(19) United States
(12) Patent Application Publication
(10) Pub. No.: US 2008/0300147 A1
(43) Pub. Date: Dec. 4, 2008

(54) Detection and Treatment of Fibrotic Disorders

(76) Inventors: Nasser Chegini, Gainesville, FL (US); Xiaoping Luo, Gainesville, FL (US); Li Ding, Gainesville, FL (US); R. Stan Williams, Gainesville, FL (US)

Correspondence Address: SALIWANCHIK LLOYD & SALIWANCHIK;A PROFESSIONAL ASSOCIATION, PO BOX 142950, GAINESVILLE, FL, 32614-2950, US

(21) Appl. No.: 10/590,675

(22) PCT Filed: Mar. 28, 2005
(86) PCT No.: PCT/US05/10257

§ 371 Date: Oct. 18, 2007

Related U.S. Application Data
(60) Provisional application No. 60/556,546, filed on Mar. 26, 2004.
(60) Provisional application No. 60/620,444, filed on Oct. 19, 2004.
(60) Provisional application No. 60/636,240, filed on Dec. 15, 2004.

(51) Int. Cl. C40B 40/06; C12Q 1/68

(52) U.S. Cl. 506/16; 435/6

(57) ABSTRACT

The present invention provides a method for detecting a fibrotic disorder in a subject by: (a) providing a biological sample obtained from the subject (such as endometrium, peritoneal fluid, and/or smooth muscle cells); (b) analyzing the expression of at least one gene that is differentially expressed in the fibrotic disorder of interest; and (c) correlating the expression of the gene(s) with the presence or absence of the fibrotic disorder in the subject. The present invention also provides a method and compositions for modulating the expression of genes that are differentially expressed in fibrotic tissues, compared to normal tissues. Restoration of gene expression to levels associated with normal tissue is expected to ameliorate at least some of the symptoms of the fibrotic disorder. This method includes the step of contacting the tissue with an agent that modulates expression of one or more differentially expressed genes in the tissue. The present invention also includes arrays, such as microfluidic cards, for detecting differential gene expression in samples of fibrotic tissue.

### CROSS-REFERENCE TO RELATED APPLICATIONS

[0001] The present application claims the benefit of U.S. Application Ser. Nos. 60/556,546, filed Mar. 26, 2004, 60/620,444, filed Oct. 19, 2004, and 60/636,240, filed Dec. 15, 2004, each of which is hereby incorporated by reference herein in its entirety, including any figures, tables, nucleic acid sequences, amino acid sequences, and drawings.

### GOVERNMENT SUPPORT

[0002] The subject invention was made with government support under a research project supported by the National Institutes of Health Grant No. HD37432.

[0003] The Sequence Listing for this application is four compact discs labeled “Copy 1”, “Copy 2”, “Copy 3”, and “CRF”. Each copy contains only one file named “03-28-05.ST25.txt” which was created on Mar. 28, 2005. The file is 9,994 KB. The entire contents of each of the computer discs are incorporated herein by reference in their entireties.

### BACKGROUND OF INVENTION

[0004] Leiomyomas are benign uterine smooth muscle tumors, accounting for more than 30% of hysterectomies performed in the United States annually. Leiomyomas consist mainly of smooth muscle cells of myometrial origin and a network of connective tissue (Anderson, Semin. Reprod. Endocrinol., 1996, 14:269-282; Chegini, Cytokines and Reproduction, 1999, 133-162).

[0005] Abnormal vaginal bleeding, pelvic pain and pelvic masses are among the major symptoms associated with leiomyomas. Leiomyomas are considered to originate from cellular transformation of myometrial smooth muscle cells and/or connective tissue fibroblasts during the reproductive years. The identity of factors that initiate such cellular transformation is not known; however, ovarian steroids are essential for leiomyoma growth, and GnRH anolog (GnRHa) therapy, creating a hypoestrogenic condition, is often used for their medical management (Chegini, N “Implication of growth factor and cytokine networks in leiomyomas” In Cytokines in human reproduction. J. Hill ed. New York, Wiley & Sons Publisher, 2000, 133-162; Maruo, T et al. Hum Reprod Update, 2004, 10:207-20; Takeuchi, H et al. J Obstet Gynaecol Res, 2000, 26:325-331; Steinauer, J et al. Obstet Gynecol, 2004, 103:1331-6; Palomba, S et al. Hum Reprod, 2002, 17:3213-3219; DeManno, D et al. Steroids, 2003, 68:1019-32; Carr, B R et al. J Clin Endocrinol Metab, 1993, 76:1217-1223).

[0006] Hypoestrogenic conditions created by GnRHa therapy affect both leiomyoma and myometrium; however, clinical observations indicate a difference in their response to changes in the hormonal environment (Carr, B R et al. J Clin Endocrinol Metab, 1993, 76:1217-1223). In addition to GnRHa therapy, clinical and preclinical assessments of selective estrogen and progesterone receptor modulators, either alone or in combination with GnRHa therapy, have shown efficacy in leiomyoma regression (Steinauer, J et al. Obstet Gynecol, 2004, 103:1331-6; Palomba, S et al. Hum Reprod, 2002, 17:3213-3219; DeManno, D et al. Steroids, 2003, 68:1019-32).

[0007] GnRHa-induced leiomyoma regression is accompanied by alterations in uterine arteriole size, blood flow, and cellular content as well as changes in the expression of several growth factors, cytokines, extracellular matrix, proteases, and protease inhibitors (reviewed in Chegini, Cytokines in Human Reproduction, 2000, 133-162; Nowak, Bailliere Best Pract Res. Clin Obstet. Gynaecol., 1999, 13:223-238). Differential expression and autocrine/paracrine action of many of these molecules are considered to play a central role in leiomyoma growth and GnRHa-induced regression (Chegini, Cytokines in Human Reproduction, 2000, 133-162; Nowak, Bailliere Best Pract Res. Clin Obstet. Gynaecol., 1999, 13:223-238).

[0008] At the cellular level, a combination of mitotic activity, cellular hypertrophy, and accumulation of extracellular matrix (ECM) are considered to participate in leiomyoma growth (Anderson, Semin. Reprod. Endocrinol., 1996, 14:269-282; Chegini, Cytokines and Reproduction, 1999, 133-162; Stewart et al., J. Clin. Endocrinal Metab., 1994, 79:900-906; Wolanska et al., Mol Cell Biochem., 1998, 189:145-152). Compared to myometrium, leiomyomas are reported to overexpress estrogen and progesterone receptors, and GnRHa therapy lowers their content in both tissues (Stewart et al., Semin, Reprod. Endocrinol., 1995, 10:344-357; Englund et al., J. Clin. Endocrinol Metab., 1998, 83:4092-4092). Clinical and basic science research shows that GnRHa acting through suppression of the pituitary-gonadal axis cause leiomyoma to regress by affecting uterine arteriole size, blood flow at the tumor level. But its effect at cellular and molecular levels in leiomyoma has not been investigated.

[0009] With respect to the leiomyoma molecular environment, several genome-wide allel-typing studies have evaluated the association between genomic instability and the pathogenesis of leiomyoma (for review; Ligon, A H and Morton, CC Hum Reprod Update, 2001, 7:8-14). These studies have led to the identification of several candidate genes, however in the majority of cases evidence of genomic instability is either lacking or inconsistent (Ligon, A H and Morton, C C Hum Reprod Update, 2001, 7:8-14), implying the existence of unrecognized pathways that can lead to the development of leiomyoma. Further studies have provided support for various autocrine/paracrine regulators in the pathogenesis of leiomyoma including local estrogen production, growth factors, cytokines, chemokines and their receptors, whose expression are regulated by ovarian steroids (Chegini, N “Implication of growth factor and cytokine networks in leiomyomas” In Cytokines in human reproduction. J. Hill ed. New York, Wiley & Sons Publisher, 2000, 133-162; Maruo, T et al. Hum Reprod Update, 2004, 10:207-20). These studies in many instances demonstrated altered expression of these factors and/or their receptors in leiomyoma compared to normal myometrium. In recent years cDNA microarray has been utilized as a high throughput method to identify a large number of differentially expressed and regulated genes in various tissues and cells. Using this approach, several recent studies have further assisted in fingerprinting the gene expression profile of leiomyoma and myometrium during the menstrual cycle (Tsibris, J C M et al. Fertil Steril, 2002, 78:114-121; Chegini, N et al. J Soc Gynecol Investig, 2003, 10:161-71; Wang, H et al. Fertil Steril, 2003, 80:266-76; Weston, G et al. Mol Hum Reprod, 2003, 9:541-9; Ahn, W S et al. Int J Exp Pathol, 2003, 84:267-79; Quade, B J et al. Genes Chromosomes Cancer, 2004, 40:97-108). However, only the expression of a few of these newly identified genes has been validated, and their regulation and correlation with pathogenesis of leiomyoma remains to be investigated.

[0010] With respect to GnRHa therapeutic action, it is traditionally believed to act primarily at the level of the pituitary-gonadal axis, and by suppressing ovarian steroid production causes leiomyoma regression. However, the identification of GnRH and GnRH receptor expression in several peripheral tissues, including the uterus, has implicated an autocrine/paracrine role for GnRH and additional sites of action for GnRHa therapy (Chegini, N et al. J Clin Endocrinol Metab, 1996, 81:3215-3221; Ding, L et al. J Clin Endocrinol Metab, 2004, 89:5549-5557; Chegini, N et al. Mol Cell Endocrinol, 2003, 209:9-16; Xu, J et al. J Clin Endocrinol Metab, 2003, 88:1350-61; Chegini, N and Kornberg, L J Soc Gynecol Investig, 2003, 10:21-6; Chegini, N et al. Mol Hum Reprod, 2002, 8:1071-8). Demonstration of the expression of GnRH, as well as GnRH I and II receptors mRNA in leiomyoma and myometrium and their isolated smooth muscle cells has provided support for this concept (Chegini, N et al. J Clin Endocrinol Metab, 1996, 81:3215-3221; Ding, L et al. J Clin Endocrinol Metab, 2004, 89:5549-5557). Several in vitro studies have also demonstrated GnRHa direct action on various cell types derived from peripheral tissues resulting in alteration of cell growth, apoptosis, the expression of cell cycle proteins, growth factors, pro- and anti-inflammatory cytokines, proteases, and protease inhibitors (Chegini, N “Implication of growth factor and cytokine networks in leiomyomas” In Cytokines in human reproduction. J. Hill ed. New York, Wiley & Sons Publisher, 2000, 133-162; Ding, L et al. J Clin Endocrinol Metab, 2004, 89:5549-5557; Chegini, N et al. Mol Cell Endocrinol, 2003, 209:9-16; Xu, J et al. J Clin Endocrinol Metab, 2003, 88:1350-61; Chegini, N and Kornberg, L J Soc Gynecol Investig, 2003, 10:21-6; Chegini, N et al. Mol Hum Reprod, 2002, 8:1071-8; Klausen, C et al. Prog Brain Res, 2002, 141:111-128; Mizutani, T et al. J Clin Endocrinol Metab, 1998, 83:1253-1255; Wu, X et al. Acta Obstet Gynecol Scand, 2001, 80:497-504). Local expression and differential regulation of these genes influences cell proliferation, differentiation, migration, inflammatory response, angiogenesis, expression of adhesion molecules, ECM turnover and apoptosis, etc., processes that are central to leiomyoma growth and regression (Chegini, N “Implication of growth factor and cytokine networks in leiomyomas” In Cytokines in human reproduction. J. Hill ed. New York, Wiley & Sons Publisher, 2000, 133-162; Maruo, T et al. Hum Reprod Update, 2004, 10:207-20; Chegini, N et al. J Clin Endocrinol Metab, 1996, 81:3215-3221; Ding, L et al. J Clin Endocrinol Metab, 2004, 89:5549-5557; Chegini, N et al. Mol Cell Endocrinol, 2003, 209:9-16; Xu, J et al. J Clin Endocrinol Metab, 2003, 88:1350-61; Chegini, N and Kornberg, L J Soc Gynecol Investig, 2003, 10:21-6; Chegini, N et al. Mol Hum Reprod, 2002, 8:1071-8; Klausen, C et al. Prog Brain Res, 2002, 141:111-128; Mizutani, T et al. J Clin Endocrinol Metab, 1998, 83:1253-1255; Wu, X et al. Acta Obstet Gynecol Scand, 2001, 80:497-504; Dou, Q et al. Mol Hum Reprod, 1997, 3:1005-1014; Chegini, N et al. J Clin Endocrinol Metab, 1999, 84:4138-4143; Senturk, L M et al. Am J Obstet Gynecol, 2001, 184:559-566; Sozen, I et al Fertil Steril, 1998, 69:1095-1102; Gustavsson, I et al. Mol Hum Reprod, 2000, 6:55-59; Orii, A et al. J Clin Endocrinol Metab, 2002, 87:3754-9; Fukuhara, K et al. J Clin Endocrinol Metab, 2002, 87:1729-36; Zhai, Y L et al. Int J Cancer, 1999, 84:244-50; Ma, C and Chegini, N Mol Hum Repord, 1999, 5:950-954). Microarray studies, including a small-scaled array, have also identified the expression profile of additional genes targeted by GnRHa in murine gonadotrope tumor cell line LβT2, human breast tumor cell line MCF-7 and leiomyoma and myometrium (Chegini, N et al. J Soc Gynecol Investig, 2003, 10:161-71; Ma, C and Chegini, N Mol Hum Repord, 1999, 5:950-954; Kakar, S S et al. Gene, 2003, 308:67-77).

[0011] Transforming growth factors beta (TGF-β) is a multifunctional cytokine and key regulator of cell growth and differentiation, inflammation, apoptosis and tissue remodeling (Blobe, G C et al. N Engl J Med, 2000, 342:1350-1358; Flanders, K C Int J Exp Pathol, 2004, 85:47-64; Schnaper, H W et al. Am J Physiol Renal Physiol, 2003, 284:F243-252; Clancy, R M and Buyon, J P J Leukoc Biol, 2003, 74:959-960; Olman, M A and Matthay, M A Am J Physiol Lung Cell Mol Physiol, 2003, 285:L522-6). While under normal physiological conditions the expression and autocrine/paracrine actions of TGF-β are highly regulated, alteration in TGF-β and TGF-β receptor expression and their signaling mechanisms often result in various pathological disorders, including fibrosis (Blobe, G C et al. N Engl J Med, 2000, 342:1350-1358; Flanders, K C Int J Exp Pathol, 2004, 85:47-64; Schnaper, H W et al. Am J Physiol Renal Physiol, 2003, 284:F243-252; Clancy, R M and Buyon, J P J Leukoc Biol, 2003, 74:959-960; Olman, M A and Matthay, M A Am J Physiol Lung Cell Mol Physiol, 2003, 285:L522-6). Altered expression of TGF-β isoforms (TGF-β1, β2 and β3) and TGF-β receptors (type I, II and III) in leiomyoma and their isolated smooth muscle cells (LSMC) compared to normal myometrium has been observed (Dou, Q et al. J Clin Endocrinol Metab, 1996, 81:3222-3230; Chegini, N et al. J Clin Endocrinol Metab, 1999, 84:4138-43; Chegini, N et al. Mol Hum Reprod, 2002, 8:1071-1078; Chegini, N et al. Mol Cell Endocrinol, 2003, 209:9-16). Recently, it has also been demonstrated that leiomyoma and LSMC express elevated levels of Smads, components of the TGF-β receptor signaling pathway, compared to myometrium and MSMC (Chegini, N et al. Mol Cell Endocrinol, 2003, 209:9-16; Xu, J et al. J Clin Endocrinol Metab, 2003, 88:1350-1361). TGF-β regulates its own expression and the expression of Smad in LSMC and MSMC, and through downstream signaling from this and MAPK pathways regulates the expression of c-fos, c-jun, fibronectin, type I collagen and plasminogen activator inhibitor 1 in these cells (Chegini, N et al. J Clin Endocrinol Metab, 1999, 84:4138-43; Chegini, N et al. Mol Hum Reprod, 2002, 8:1071-1078; Ding, L et al. J Clin Endocrinol Metab, 2004, 89:5549-5557). Additionally, data have demonstrated the ability of TGF-β to regulate LSMC and MSMC cell growth (Tang, X M et al. Mol Hum Reprod, 1997, 3:233-40; Arici, A and Sozen, I Am J Obstet Gynecol, 2003, 188:76-83; Lee, B S and Nowak, R A J Clin Endocrinol Metab, 2001, 86:913-920; Arici, A and Sozen, I Fertil Steril, 2000, 73:1006-1011).

[0012] Because leiomyoma growth is dependent on ovarian steroids, GnRHa therapy and most recently selective estrogen and progesterone receptors modulators are used for their medical management (Steinauer, J et al. Obstet Gynecol, 2004, 103:1331-6; Palomba, S et al. Hum Reprod, 2002, 17:3213-3219; DeManno, D et al. Steroids, 2003, 68:1019-32). It has been demonstrated that GnRHa therapy results in a marked down-regulation of TGF-β isoforms and TGF-β receptors expression and alters the expression and activation of Smads in leiomyoma as well as LSMC (Dou, Q et al. J Clin Endocrinol Metab, 1996, 81:3222-3230; Chegini, N et al Mol Hum Reprod, 2002, 8:1071-1078; Chegini, N et al. Mol Cell Endocrinol, 2003, 209:9-16). It has also been shown that TGF-β expression in LSMC and MSMC is inversely regulated by ovarian steroid compared to their antagonists, ICI-182780, ZK98299, and RU486 (Chegini, N et al. Mol Hum Reprod, 2002, 8:1071-1078). In addition, it has been shown that other cytokines such as GM-CSF, IL-13 and IL-15, which promotes myofibroblast transition, granulation tissue formation and inflammatory response, respectively, may mediate their action either directly or through induction of TGF-β expression in LSMC and MSMC (Chegini, N et al. J Clin Endocrinol Metab, 1999, 84:4138-43; Chegini, N et al. Mol Cell Endocrinol, 2003, 209:9-16; Ding, L et al. J Soc Gyncol Invest, 2004, 00, 00). From these observations, it was proposed that the TGF-β system serves as a major autocrine/paracrine regulator of fibrosis in leiomyoma (Dou, Q et al. J Clin Endocrinol Metab, 1996, Chegini, N et al. J Clin Endocrinol Metab, 1999; 81:3222-3230; Chegini, N et al. Mol Hum Reprod, 2002, 8:1071-1078; Chegini, N et al. Mol Cell Endocrinol, 2003, 209:9-16; Xu, J et al. J Clin Endocrinol Metab, 2003, 88:1350-1361; Ding, L et al. J Clin Endocrinol Metab, 2004, 89:5549-5557; Tang, X M et al. Mol Hum Reprod, 1997, 3:233-40). Evidence has been developed reflecting the molecular environments directed by GnRHa therapy in leiomyoma and myometrium, as well as by GnRHa direct action in LSMC and MSMC (Chegini, N et al. J Soc Gynecol Investig, 2003, 10:161-71).

### BRIEF SUMMARY OF INVENTION

[0013] The present invention provides a method for detecting a fibrotic disorder in a subject by: (a) providing a biological sample obtained from the subject (such as endometrium, peritoneal fluid, and/or smooth muscle cells); (b) analyzing the expression of at least one gene that is differentially expressed in the fibrotic disorder of interest as compared to normal tissue (such as myometrium); and (c) correlating the expression of the gene(s) with the presence or absence of the fibrotic disorder in the subject. Preferably, the fibrotic disorder is a fibrotic disorder of the female reproductive tract. Examples of reproductive tract disorders include, but are not limited to, leiomyoma, endometriosis, ovarian hyperstimulation syndrome, adhesions, endometrial cancer, and other tissue fibroses. Fibrosis involves the deposition of large amounts of extracellular matrix molecules, notably collagen. Fibrosis is involved in normal physiological responses (e.g., wound healing) as well as pathophysiological conditions such as renal failure, liver cirrhosis and heart disease. The compositions and methods of the present invention are useful for detecting or treating abnormal fibrotic changes in the tissue of a subject.

[0014] Differentially expressed genes include those that are differentially expressed in a given fibrotic disorder (such as leiomyoma), including but not limited to, docking protein 1, 62 kD (downstream of tyrosine kinase 1); centromere protein A (17 kD); catenin (cadherin-associated protein), beta 1 (88 kD); nuclear receptor subfamily 1, group I, member 2; v-rel avian reticuloendotheliosis viral oncogene homolog A; LGN Protein; CDC28 protein kinase 1; hypothetical protein; solute carrier family 17 (sodium phosphate), member 1; FOS-like antigen-1; nuclear matrix protein p84; LERK-6 (EPLG6); visinin-like 1; phosphodiesterase 10A; KH-type splicing regulatory protein (FUSE binding protein 2); Polyposis locus (DP1 gene) mRNA; microtubule-associated protein 2; CDC5 (cell division cycle 5, S pombe, homolog)-like; Centromere autoantigen C (CENPC) mRNA; RNA guanylyltransferase and 5′-phosphatase; Nijmegen breakage syndrome 1 (nibrin); ribonuclease, RNase A family, 4; keratin 10 (epidermolytic hyperkeratosis; keratosis palmaris et plantaris); basic helix-loop-helix domain containing, class B, 2; dual specificity phosphatase 1; annexin A11; putative receptor protein; Human endogenous retrovirus HERV-K(HML6); mitogen-activated protein kinase kinase kinase 12; TXK tyrosine kinase; kynureninase (L-kynurenine hydrolase); ubiquitin specific protease 4 (proto-oncogene); peroxisome biogenesis factor 13; olfactory receptor, family 2, subfamily F, member 1; membrane protein, palmitoylated 3 (MAGUK p55 subfamily member 3); origin recognition complex, subunit 1 (yeast homolog)-like; dTDP-D-glucose 4,6-dehydratase; cytochrome c oxidase subunit VIa polypeptide 2; gamma-tubulin complex protein 2; Monocyte chemotactic protein-3; myelin transcription factor 1; inhibitor of growth family, member 1-like; thyroid hormone receptor, alpha myosin-binding protein C, slow-type; fragile X mental retardation 2; sonic hedgehog (Drosophila) homolog; 6-phosphofructo-2-kinase/fructose-2,6-biphosphatase 2; SFRS protein kinase 2; excision repair cross-complementing rodent repair deficiency; cyclin-dependent kinase 5, regulatory subunit 1 (p35); poly(A)-specific ribonuclease (deadenylation nuclease); solute carrier family 12 (potassium/chloride transporters), member 4; Pseudogene for metallothionein; natriuretic peptide precursor A; intercellular adhesion molecule 2; apoptosis antagonizing transcription factor; similar to rat HREV107; major histocompatibility complex, class II, DP beta 1; MpV17 transgene, murine homolog, glomerulosclerosis; uroporphyrinogen decarboxylase; proteasome (prosome, macropain) 26S subunit, ATPase, 1; fms-related tyrosine kinase 3 ligand; actin, gamma 1; Protein Kinase Pitslre, Alpha, Alt. Splice 1-Feb; nuclear factor of kappa light polypeptide gene enhancer in B-cells inhibitor, alpha; pyruvate kinase, muscle; telomeric repeat binding factor 2; cell division cycle 2, G1 to S and G2 to M; ADP-ribosylation factor 3; NRF1 Protein; H factor (complement)-like 3; serine (or cysteine) proteinase inhibitor, clade B (ovalbumin), member 6; mRNA of muscle specific gene M9; solute carrier family 25 (mitochondrial carrier; phosphate carrier), member 3; ribosomal protein L36a; suppressor of Ty (S. cerevisiae) 4 homolog 1; amino-terminal enhancer of split; ubiquitin A-52 residue ribosomal protein fusion product 1; hydroxyacyl-Coenzyme A dehydrogenase/3-ketoacyl-Coenzyme A thiolase; chaperonin containing TCP1, subunit 2 (beta); tyrosine kinase with immunoglobulin and epidermal growth factor homology; domains; Fc fragment of IgG, receptor, transporter, alpha; NRD1 convertase; ADP-ribosylation factor 5; transcription elongation factor A (SII), 1; like mouse brain protein E46; titin; fibromodulin; Abi-interactor 2 (Abi-2); and other differentially expressed genes disclosed herein.

[0015] In one embodiment, the differentially expressed gene is at least one of CDKN1B, CDKN1C, CTGF, fibromodulin, and Abi-2.

[0016] In another embodiment, the differentially expressed gene is at least one of IL-11, IL-13, EGR1, EGR2, EGR3, CITED2, P300, E2F1, E2F2, E2F3, E2F4, E2F5, MCP3, CXCL5, CCL7, SMAD3, TYMS, GT198, SMAD7, NCOR2, TIMP-1, and ADAM17, wherein elevated expression of IL-11, IL-13, EGR1, EGR2, EGR3, CITED2, P300, E2F1, E2F2, E2F3, E2F4, E2F5, MCP3, CXCL5, CCL7, SMAD3, TYMS, and/or GT198 is indicative of a fibrotic disorder; and wherein reduced expression of SMAD7, NCOR2, TIMP-1, and/or ADAM17 is indicative of a fibrotic disorder.

[0017] In another embodiment, the differentially expressed gene is at least one listed in Table 9 herein.

[0018] The step of analyzing expression of the differentially expressed gene can be performed by quantifying the amount of differentially expressed gene product present in the sample, e.g., by contacting the sample with an antibody that specifically binds the gene product. This step can also be performed by quantifying the amount of a nucleic acid (e.g., DNA or RNA) that encodes the gene product present in the sample, e.g., by contacting the sample with a polynucleotide that hybridizes under stringent conditions to the nucleic acid that encodes the gene product. The latter can also be performed using a polymerase chain reaction (PCR), for example.

[0019] Preferably, expression of a plurality of differentially expressed genes is analyzed. In this case, step (c) of correlating the expression of the differentially expressed gene with the presence or absence of the fibrotic disorder in the subject can include determining the ratio of two or more differentially expressed gene products in the sample.

[0020] In another aspect, the invention features a method for modulating gene expression in fibrotic tissue. This method includes contacting the fibrotic tissue in vitro or in vivo with an agent that modulates expression of a differentially expressed gene in the tissue. Preferably, the fibrotic tissue is tissue from a subject with leiomyoma, endometriosis, ovarian hyperstimulation syndrome, adhesions, or other tissue fibroses of the female reproductive tract, for example. The agent can be one that specifically binds the product that is expressed by a differentially expressed gene. The agent can also be a nucleic acid that modulates (i.e., increases or decreases) expression of one or more differentially expressed genes in a cell. The agent can also be one that modulates transcription or translation of a nucleic acid encoding the product of one or more differentially expressed genes, such as antisense oligonucleotide, ribozyme, or small interfering RNA (siRNA). Nucleic acid molecules that are modulators of differentially expressed genes in fibrotic tissue can be administered, for example, in a viral vector (such as lentivirus) or non-viral vector (such as a liposome). In other variations of this method, the agent can be an ovarian steroid, such as estradiol and medroxyprogesterone actetate. However, the agent is preferably not a hormone, but is nonetheless capable of modulating the expression of one or more genes that are differentially expressed in a fibrotic disorder, such as those genes that are differentially expressed upon GnRHa therapy.

[0021] In a preferred embodiment, the agent that modulates expression of a differentially expressed gene in fibrotic tissue is one that decreases or down-regulates the action or expression of one or more genes selected from the group consisting of IL-11, IL-13, EGR1, EGR2, EGR3, CITED2, P300, E2F1, E2F2, E2F3, E2F4, E2F5, MCP3, CXCL5, CCL7, SMAD3, TYMS, and/or GT198. In a another preferred embodiment, the agent that modulates expression of a differentially expressed gene in fibrotic tissue is one that increases or up-regulates the action or expression of one or more genes selected from the group consisting of SMAD-7, NCOR2, TIMP-1, and ADAM17. More preferably, the agent decreases or down-regulates the action or expression of one or more genes selected from the group consisting of IL-11, IL-13, EGR1, EGR2, EGR3, CITED2, P300, E2F1, E2F2, E2F3, E2F4, E2F5, MCP3, CXCL5, CCL7, SMAD3, TYMS, and/or GT198, and increases or up-regulates the action or expression of one or more genes selected from the group consisting of SMAD-7, NCOR2, TIMP-1, and ADAM17.

[0022] In one embodiment, the agent that modulates expression of a differentially expressed gene in fibrotic tissue is selected from the group consisting of a selective estrogen receptor modulator (such as Roloxifene or other SERM), a selective progesterone receptor modulator (such as Asoprisnil (J867), RU486, or other SPRM), SB-505124, SB-431542, a mast cell inhibitor (such as Tranlist), Cystatin C (CystC), SD-208, LY550410, LY580276, Pitavastatin, 1,5 naphthyridine amiothiazole derivative, 1,5 naphthyridine pyrazole derivative, and ursolic acid (see, for example, Yingling, J. et al., Nat. Rev. Drug Discov., 2004, Dec.; 3(12):1011-22, which is incorporated herein by reference in its entirety). In another embodiment, the agent is one based on a pyrazolopyridine scaffold (Beight, D. W. et al., WO 2004/026871), a pyrazole scaffold (Gellibert, F. et al., J. Med. Chem., 2004, 47:4494-4506), an imidazopyridine scaffold (Lee, W. C. et al., Wo 2004/021989), triazole scaffold (Blumberg, L. C. et al., WO 2004/026307), a pyridopyrimidine scaffold (Chakravarty, S. et al., WO 2000/012497), or an isothiazole scaffold (Munchhof, M. J., WO 2004/147574), each of which is incorporated herein by reference in its entirety. In another embodiment, the agent is a GnRhH agonist or antagonist, such as those disclosed herein.

[0023] Preferably, the agent administered to the subject for treatment or prevention of fibrosis is one that inhibits (reduces) TGF-beta signaling (signal transduction). More preferably, the agent administered to the subject is one that inhibits (reduces) TGF-beta II signaling (signal transduction). Preferably, the inhibition is selective, as opposed to “upstream” of TGF-beta II.

[0024] In another aspect of the method of the invention, the subject invention includes a method for treating (alleviating symptoms associated with) fibrotic tissue or reducing the likelihood of fibrotic tissue formation, by administering GnRH analog (e.g., GnRH agonist or antagonist) locally to the target site. For example, the GnRH analog can be administered directly to a fibroid to reduce the size of the fibroid.

[0025] In another aspect, the present invention includes a method for identifying a modulator of a gene that is differentially-expressed in fibrotic tissue and/or during fibrogenesis, or a polypeptide encoded by the differentially-expressed gene, in a cell population, comprising: contacting the cell population with a test agent under conditions effective for the test agent to modulate a differentially-expressed gene disclosed herein, to modulate the biological activity of a polypeptide encoded by the differentially-expressed gene; and determining whether the test agent modulates the expression of the gene or biological activity of the polypeptide encoded by the gene. In one embodiment, the determining step is carried out by detecting mRNA or the polypeptide of the differentially expressed gene. Preferably, the cell population comprises mammalian cells (such as human cells) of the female reproductive tract (such as endometrial cells). In one embodiment, the differentially expressed gene is selected from the group consisting of IL-11, IL-13, EGR1, EGR2, EGR3, CITED2, P300, E2F1, E2F2, E2F3, E2F4, E2F5, MCP3, CXCL5, CCL7, SMAD3, TYMS, GT198, SMAD-7, NCOR2, TIMP-1, and ADAM17. Preferred modulators are those that decrease the activity of or down-regulate the expression of one or more of IL-11, IL-13, EGR1, EGR2, EGR3, CITED2, P300, E2F1, E2F2, E2F3, E2F4, E2F5, MCP3, CXCL5, CCL7, SMAD3, TYMS, and GT198, or increase the activity of or up-regulate the expression of one or more of SMAD-7, NCOR2, TIMP-1, and ADAM17. More preferably, the modulator decreases the activity of or down-regulates the expression of one or more of IL-11, IL-13, EGR1, EGR2, EGR3, CITED2, P300, E2F1, E2F2, E2F3, E2F4, E2F5, MCP3, CXCL5, CCL7, SMAD3, TYMS, and GT198; and increases the activity of or up-regulates the expression of one or more of SMAD-7, NCOR2, TIMP-1, and ADAM17. In one embodiment, the identified modulator modulates one or more genes (up to and including all the genes) listed in Table 9 herein.

[0026] The present invention also includes arrays, such as microfluidic cards, for detecting differential gene expression in samples of fibrotic tissue.

### BRIEF DESCRIPTION OF DRAWINGS

[0027] The patent or application file contains at least one drawing executed in color. Copies of this patent or patent application publication with color drawing(s) will be provided by the Office upon request and payment of the necessary fee.

[0028] FIGS. 1A-1J show the expression profile of a selected group of genes representing growth factors/cytokines/polypeptide hormones/receptors (FIGS. 1A-1B), intracellular signal transduction pathways (FIGS. 1C-1D), transcription factors (FIGS. 1E-1F), cell cycle (FIGS. 1G-1H) and cell adhesion/ECM/cytoskeletons (FIGS. 1I-1J) in response to time-dependent action of GnRHa in LSMC and MSMC. Values on the x-axis represent an arbitrary unit derived from the mean gene expression value for each factor after supervised analysis, statistical analysis in R programming environment and ANOVA, with gene expression values for the untreated controls (Ctrl) set at 1.

[0029] FIGS. 2A-2J show comparative analysis of the expression profile of 10 genes identified as differentially expressed in response to GnRH therapy in leiomyoma and matched myometrium and untreated group by microarray and Realtime PCR. Values on the x-axis represent an arbitrary unit derived from the mean expression value for each gene with values for the untreated controls (Crtl) set at 1. Total RNA isolated from these tissues was used for both microarray analysis and Realtime PCR validating the expression of IL-11, EGR3, CITED2, Nur77, TEIG, TGIF, p27, p57, Gas1 and GPRK5. On the Y-axis untreated myometrium and leiomyoma are designated as Unt-MM and Un-LM, and GnRH-treated as GnRH-Trt MM and GnRH-Trt LM.

[0030] FIGS. 3A-3T show comparative analysis of the expression profile of 10 genes identified as differentially expressed and regulated in response to GnRHa time-dependent action in LSMC and MSMC by microarray and Realtime PCR. Values on the x-axis represent an arbitrary unit derived from the mean expression value for each gene, and y-axis represent the time course of GnRHa (0.1 μM) treatment (2, 6 and 12 hours) with untreated control (Crtl) gene expression values set at 1. Total RNA isolated from these cells used for both microarray analysis and Realtime PCR for validating the expression of IL-11, EGR3, TEIG, TGIF, CITED2, Nur77, CDKN1B (p27), CDKN1C (p57), Gas1 and GPRK5.

[0031] FIGS. 4A-4E show immunohistochemical localization of IL-11, TGIF, TIEG, Nur77, EGR3, CITED2, p27, p57 and Gas1 in leiomyoma and myometrium. Note the presence of immunoreactive IL-11, TGIF, TIEG, Nur77, EGR3, CITED2, p27, p57 and Gas1 in association with leiomyoma and myometrial smooth muscle cells, and cellular components of connective tissue and vasculature. Both nuclear (EGR3, Nur77, p27, p57) and cytoplasmic (IL-11) staining is observed. Incubation of tissue sections with non-immune mouse (A), rabbit (B) and goat (figure not shown) IgGs instead of primary antibodies during immunostaining served as controls (Ctrl) reduced the staining intensity. Mag: X150 and X300.

[0032] FIGS. 5A-5N show the expression profile of a group of genes representing growth factors/cytokines/polypeptide hormones/receptors (FIGS. 5A-5B), intracellular signal transduction pathways (FIGS. 5C-5D), transcription factors (FIGS. 5E-5F), cell cycle (FIGS. 5G-5H) and cell adhesion/ECM/cytoskeletons (FIGS. 5I-5J) in response to time-dependent action of TGF-β in LSMC and MSMC. Values on the x-axis represent an arbitrary unit derived from the mean gene expression value for each factor after supervised analysis, statistical analysis in R programming environment and ANOVA, with gene expression values for the untreated controls (Ctrl) set at 1.

[0033] FIGS. 6A-6R show comparative analysis of the expression profile of 12 genes identified as differentially expressed and regulated in response to time-dependent action of TGF-β1 in LSMC and matched MSMC by microarray and Realtime PCR. Values on the x-axis represent an arbitrary unit derived from the mean expression value for each gene and y-axis represent the time course of TGF-β (2.5 ng/ml) treatment (2, 6 and 12 hours) with untreated control (Crtl) gene expression values set at 1. Total RNA isolated from these cells was used for both microarray analysis and Realtime PCR validating the expression of IL-11, EGR3, CITED2, Nur77, TEIG, TGIF, Runx1, Runx2, p27, p57, Gas1 and GPRK5.

[0034] FIGS. 7A-7E show a comparative analysis of the expression profile of Runx1 and Runx2 genes in leiomyoma (LM) and matched myometrium (MM) from untreated (un-Trt) and women who received GnRHa therapy (GnRHa-Trt) as well as in leiomyoma and myometrial smooth muscle cells (LSMC and MSMC) in response to GnRHa (0.1 μM) time dependent action (2, 6 and 12 hours) and in response to time-dependent (2, 6 and 12 hours) action of TGF-β1 (2.5 ng/ml) determined by Realtime PCR. In microarray analysis Runx2 expression was not included since its expression value did not reach the study standard. Values on the x-axis represent an arbitrary unit derived from the mean expression value for each gene and y-axis represents the time course of TGF-beta and GnRHa treatments, with untreated control (Crtl) gene expression values set at 1. Total RNA isolated from these cells was used for both microarray analysis and Realtime PCR validation.

[0035] FIGS. 8A-8E are bar graphs showing mean ±SEM of relative mRNA expression levels of CCN2, CCN3, CCN4, fibulin-1C and S100A4 in leiomyoma (LM) and matched myometrium (MM) from untreated (Un-Trt) and GnRH treated (GnRH-Trt) groups (N=12) determined by Real-time PCR. Values on the Y-axis represent an arbitrary unit derived from the mean expression value for each gene with values for the untreated MM (Un-TrtMM) set at 1. Total RNA isolated from tissues including tissues used for microarray analysis (Luo X. et al., Endocrinology 146:1074-1095). For CCN2, denotes b, c and d are statistically different from a, and d is different from c. For CCN3 and S100A4 denotes b, c and d are different from a. For CCN4, denotes b and c are different from a. For fibulin-1C, denotes c and d are different from a and b. All with p<0.05.

[0036] FIG. 9 shows Western blot analysis of CCN2, CCN3, CCN4 and fibulin-1C in 9 paired myometrium (M) and leiomyoma (L) from proliferative (N=3) and secretory (N=3) phases of the menstrual cycle, and from women who received GnRHa therapy (GnRHa-treated, N=3). Total protein was isolated from these tissues and equal amount of protein was subjected to immunoblotting using antibodies specific to CCN2, CCN3, CCN4 and fibulin-1C.

[0037] FIGS. 10A-10L show immunohistochemical localization of CCN2 (FIGS. 10A and 10B), CCN3 (FIGS. 10C and 10D), CCN4 (FIGS. 10E and 10F), fibulin-1C (FIGS. 10G and 10H) and S100A4 (FIGS. 10I and 10J) in leiomyoma and myometrium with immunoreactive proteins in association with leiomyoma and myometrial smooth muscle cells, and cellular components of connective tissue and vasculature. Incubation of tissue sections with non-immune rabbit (FIG. 10K) and goat (FIG. 10L) IgGs, instead of primary antibodies during immunostaining served as controls reduced the staining intensity. Mag: X60.

[0038] FIGS. 11A and 11B are bar graphs showing the mean ±SEM of relative mRNA expression of TGF-β1 and TGF-β3 in leiomyoma and matched myometrium. Total RNA was isolated from paired tissues (N=12) and subjected to Realtime PCR. Total protein isolated from these tissues and equal amount of protein was subjected to ELISA before and after activation. Denotes a and b are significantly different from c and d, respectively; and denotes a and c are statistically different from b and d with P<0.05. Arrows point out the significant differences between the expression of TGF-β1 and TGF-β3 mRNA expression and total and active TGF-β1 in leiomyoma and myometrium.

[0039] FIGS. 12A-12E are bar graphs whowing relative mRNA expression of CCN2, CCN3, CCN4, fibulin-1C and S100A4 in leiomyoma (LSMC) and myometrial (MSMC) smooth muscle cells following treatment with TGF-β1 (2.5 ng/ml) for 2, 6 and 12 hrs. Total RNA was isolated from treated and untreated control (Ctrl) cells and subjected to Realtime PCR. Results are the mean ±SEM of three experiments performed using independent cell cultures from different tissues. For CCN2, denotes b, b′, c, c′, d and d′; for CCN3 denotes b, b′, c, c′, and d; for CCN4, denotes b, c, c′, d and d′; for fibulin-1C, denotes b and d; and for S100A4 denote c′, d and d′ are statistically different from a and a′ respectively, with P<0.05. Arrows point out the significant differences between the expression of CCNs, fibulin-1C and S100A4 in LSMC and MSMC.

[0040] FIGS. 13A-13E are bar graphs showing the relative mRNA expression of CCN2, CCN3, CCN4, fibulin-1C and S100A4 in leiomyoma (LSMC) and myometrial (MSMC) smooth muscle cells following treatment with GnRHa (0.1 μM) for 2, 6 and 12 hrs. Total RNA was isolated from treated and untreated control (Ctrl) cells and subjected to Realtime PCR. Results are the mean ±SEM of three experiments performed using independent cell cultures from different tissues. For CCN2, denotes b, c′, d and d′; for CCN3 denotes b, b′, c, c′, d and d′; for CCN4, denotes b, b′, c, and d′; for fibulin-1C, denotes b, b′, c, c′, d and d′; and for S100A4 denote b, b′, c, c′, d and d′ are statistically different from a and a′, respectively with P<0.05. Arrows point out the significant differences between the expression of CCNs, fibulin-1C and S100A4 in LSMC and MSMC.

[0041] FIGS. 14A-14E are bar graphs showing the relative mRNA expression of CCN2, CCN3, CCN4, fibulin-1C and S100A4 in leiomyoma (LSMC) and myometrial (MSMC) smooth muscle cells pretreated with U0126 (U) MEK1/2MAPK inhibitor followed by treatment with GnRHa and TGF-β1. Serum-starved cells were pretreated with U0126 at 20 μM for 2 hrs, washed and then treated with 2.5 ng/ml of TGF-β1, or 0.1 μM of GnRH for 2 hrs. Total RNA was isolated from treated and untreated controls (Ctrl) and subjected to Realtime PCR. Results are the mean ±SEM of three experiments performed using independent cell cultures from different tissues. Denotes * are significantly different from control and **, and denotes *** are significantly different from * and control with P<0.05, respectively. Arrows point out the significant differences between the expression of CCNs, fibulin-1C and S100A4 in LSMC as compared with MSMC.

[0042] FIGS. 15A-15E are bar graphs showing relative mRNA expression of CCN2, CCN3, CCN4, fibulin-1C and S100A4 in leiomyoma (LSMC) and myometrial (MSMC) smooth muscle cells transfected with Smad SiRNA (SmadSi) and treatment with TGF-β 1. The cells were transfected with Smad3 SiRNA or scrambled SiRNA for 48 hrs washed and then treated with 2.5 ng/ml of TGF-β1 for 2 hrs. Total RNA was isolated from treated and untreated controls (Ctrl) and subjected to Realtime PCR. Results are the mean ±SEM of three experiments performed using independent cell cultures from different tissues. Denotes * are significantly different from ** and ***, as well as *** are significantly different from ** with P<0.05, respectively. Arrows point out the significant differences between the expression of CCNs, fibulin-1C and S100A4 in LSMC as compared with MSMC.

[0043] FIG. 16 is a bar graph showing the relative expression of fibromodulin mRNA in leiomyoma (LM) and matched myometrium (MM) from untreated (Un-Trt) and GnRH treated (GnRH-Trt) groups determined by real-time PCR. Values on the Y-axis represent an arbitrary unit derived from the mean expression value for each gene with values for the untreated MM (Un-TrtMM) set at 1. Total RNA isolated from tissues used for both microarray analysis (Luo, X. et al. Endocrinology, 2005, 146:1074-1096) is included in the results. Denotes * are statistically different from ** and UnTrt-MM (P) with p<0.05. Results are the mean ±SEM of mRNA expression in leiomyoma and matched myometrium form proliferative (N=8) and secretory (N=12) phases of the menstrual and GnRHa-treated group (N=7).

[0044] FIG. 17 shows Western blot analysis of fibromodulin in 14 paired myometrium (M) and leiomyoma (L) from proliferative (N=7) and secretory (N=7) phases of the menstrual cycle, and from women who received GnRHa therapy (GnRHa-treated; N=6). Total protein was isolated from these tissues and equal amount of protein was subjected to immunoblotting using antibodies specific to fibromodulin.

[0045] FIGS. 18A-18D show immunohistochemical localization of fibromodulin in leiomyoma (A) and myometrium (B) with immunoreactive proteins in association with leiomyoma and myometrial smooth muscle cells, and cellular components of connective tissue and vasculature. Incubation of tissue sections with non-immune and goat IgGs instead of primary antibodies (C and D) during immunostaining served as controls (Ctrl) reduced the staining intensity. Mag: X60.

[0046] FIGS. 19A-19D are bar graphs showing relative mRNA expression of fibromodulin in leiomyoma (LSMC) and myometrial (MSMC) smooth muscle cells following treatment with TGF-β1 (2.5 ng/ml) and GnRHa (0.1 mM) for 2, 6 and 12 hrs; or in cells pretreated with 20 μM of U0126 (U) MEK1/2MAPK inhibitor followed by 2 hrs of treatment with TGF-β1 (T) or GnRHa (G). Serum-starved cells were pretreated with U0126 at for 2 hrs, washed and then treated with 2.5 ng/ml of TGF-β1 for 2 hrs. Additionally LSMC and MSMC were transfected with Smad3 SiRNA or scrambled SiRNA for 48 hrs washed and then treated with 2.5 ng/ml of TGF-β1 (T/Si) for 2 hrs Total RNA was isolated from treated and untreated control (Ctrl) cells and subjected to Realtime PCR. Results are the mean ±SEM of three experiments performed using independent cell cultures from different tissues. Denotes *, ** and *** are statistically different from untreated control. In Smad SiRNA-treated cells * is different from ** and *** with P<0.05, respectively. Arrows point out the significant differences between the expression of fibromodulin in LSMC and MSMC.

### DETAILED DISCLOSURE

[0047] The study disclosed herein was designed to further define the molecular environments of leiomyoma and matched myometrium during the early-mid luteal phase of the menstrual cycle, which is characterized by elevated production of ovarian steroids, compared with tissues obtained from hormonally suppressed patients on GnRHa therapy. The present inventors further evaluated the direct action of GnRHa on global gene expression and their regulation in leiomyoma and myometrial cells isolated from the untreated tissue cohort. These approaches enabled the identification of expression profiles of genes targeted by GnRHa. The present inventors validated the expression of 10 of these genes in these cohorts, and concluded that local expression and activation of these genes may represent features differentiating leiomyoma and myometrial molecular environments during growth as well as GnRHa-induced regression.

[0048] Microarrays have been shown to be of great value in understanding the molecular biology of many diseases, and they have been successfully used to classify various tumors based on their clinical phenotype or genetic background. In this experiment, the present inventors have used gene expression profiling to define the biological relationship between TGF-β and GnRH in tumor growth and regression, and try to unveil the complexity of leiomyoma genesis and development. The present inventors have evaluated the underlying differences between molecular responses directed by TGF-β autocrine/paracrine actions in LSMC and MSMC, and following interference with these actions using TGF-β receptor type II antisense oligomers treatment. Since TGF-β receptors expression is targeted by GnRHa in leiomyoma and myometrium, the present inventors further evaluated the gene expression profiles in response to TGF-β type II receptor antisense treatment and GnRHa-treated LSMC and MSMC to identify the genes whose expression are the specific target of these treatments. Using this approach, several differentially expressed and regulated genes targeted by TGF-β autocrine/paracrine action were evaluated, and the expression of 12 genes in LSMC and MSMC in response to the time-dependent action of TGF-β was validated using Realtime PCR.

[0049] Methods involving conventional molecular biology techniques are described herein. Such techniques are generally known in the art and are described in detail in methodology treatises such as Molecular Cloning: A Laboratory Manual, 2nd ed., vol. 1-3, ed. Sambrook et al., Cold Spring Harbor Laboratory Press, Cold Spring Harbor, N.Y., 1989; and Current Protocols in Molecular Biology, ed. Ausubel et al., Greene Publishing and Wiley-Interscience, New York, 1992 (with periodic updates). Various techniques using polymerase chain reaction (PCR) are described, e.g., in Innis et al., PCR Protocols: A Guide to Methods and Applications, Academic Press: San Diego, 1990. Methods for chemical synthesis of nucleic acids are discussed, for example, in Beaucage and Carruthers, Tetra. Letts. 22:1859-1862, 1981, and Matteucci et al., J. Am. Chem. Soc. 103:3185, 1981. Chemical synthesis of nucleic acids can be performed, for example, on commercial automated oligonucleotide synthesizers. Immunological methods (e.g., preparation of antigen-specific antibodies, immunoprecipitation, and immunoblotting) are described, e.g., in Current Protocols in Immunology, ed. Coligan et al., John Wiley & Sons, New York, 1991; and Methods of Immunological Analysis, ed. Masseyeff et al., John Wiley & Sons, New York, 1992. Conventional methods of gene transfer and gene therapy can also be adapted for use in the present invention. See, e.g., Gene Therapy: Principles and Applications, ed. T. Blackenstein, Springer Verlag, 1999; Gene Therapy Protocols (Methods in Molecular Medicine), ed. P. D. Robbins, Humana Press, 1997; and Retro-vectors for Human Gene Therapy, ed. C. P. Hodgson, Springer Verlag, 1996.

[0050] The following publications are specifically incorporated herein by reference in their entirety, including all figures, tables, and sequences, to the extent they are not inconsistent with the explicit teachings of this specification: U.S. patent publication US 2003/0032044 (Chegini et al.), filed Jul. 17, 2002; international publication WO 03/007685 (Chegini et al.), filed Jul. 17, 2002; international publication WO 00/20642 (Chegini et al.), filed Oct. 1, 1999; U.S. patent publication US 2003/0077589 (Hess-Stumpp et al.), filed Sep. 25, 2001; and U.S. patent publication US 2001/0002393 (Palmer et al.), filed Dec. 20, 2000.

### I. Detecting Fibrotic Disorders

[0051] The invention provides a method for detecting a fibrotic disorder in the tissue of a subject. This method includes the steps of: (a) providing a biological sample obtained (i.e., derived) from the subject (such as endometrium or peritoneal fluid); (b) analyzing the expression of a differentially expressed gene in the sample; and (c) correlating the expression of the differentially expressed gene with the presence or absence of the fibrotic disorder in the subject.

[0052] Examples of reproductive tract disorders include, but are not limited to, leiomyoma, endometriosis, ovarian hyperstimulation syndrome, adhesions, and other tissue fibroses (e.g., fibroids) (Smits G. et al., N. Engl. J. Med., 2003, 349(8):760-766; Elchalal U. et al., Human Reproduction, 1997, 12(6):1129-1137; Stewart E. et al., Human Reproduction Update, 1996, 2(4):295-306; Shozu M. et al., The Journal of Clinical Endocrinology & Metabolism, 86(11):5405-5411; Estaban J. et al., Arch. Pathol. Lab. Med., 1999, 123:960-962; Lee W. et al., The Korean Journal of Pathology, 2003, 37:71-73; and Kurioka H. et al., Human Reproduction, 1998, 13(5):1357-1360).

[0053] Differentially expressed genes include those which are differentially expressed in a given fibrotic disorder, including but not limited to, docking protein 1, 62 kD (downstream of tyrosine kinase 1); centromere protein A (17 kD); catenin (cadherin-associated protein), beta 1 (88 kD); nuclear receptor subfamily 1, group I, member 2; v-rel avian reticuloendotheliosis viral oncogene homolog A; LGN Protein; CDC28 protein kinase 1; hypothetical protein; solute carrier family 17 (sodium phosphate), member 1; FOS-like antigen-1; nuclear matrix protein p84; LERK-6 (EPLG6); visinin-like 1; phosphodiesterase 10A; KH-type splicing regulatory protein (FUSE binding protein 2); Polyposis locus (DP1 gene) mRNA; microtubule-associated protein 2; CDC5 (cell division cycle 5, S pombe, homolog)-like; Centromere autoantigen C (CENPC) mRNA; RNA guanylyltransferase and 5′-phosphatase; Nijmegen breakage syndrome I (nibrin); ribonuclease, RNase A family, 4; keratin 10 (epidermolytic hyperkeratosis; keratosis palmaris et plantaris); basic helix-loop-helix domain containing, class B, 2; dual specificity phosphatase 1; annexin A11; putative receptor protein; Human endogenous retrovirus HERV-K(HML6); mitogen-activated protein kinase kinase kinase 12; TXK tyrosine kinase; kynureninase (L-kynurenine hydrolase); ubiquitin specific protease 4 (proto-oncogene); peroxisome biogenesis factor 13; olfactory receptor, family 2, subfamily F, member 1; membrane protein, palmitoylated 3 (MAGUK p55 subfamily member 3); origin recognition complex, subunit 1 (yeast homolog)-like; dTDP-D-glucose 4,6-dehydratase; cytochrome c oxidase subunit VIa polypeptide 2; gamma-tubulin complex protein 2; Monocyte chemotactic protein-3; myelin transcription factor 1; inhibitor of growth family, member 1-like; thyroid hormone receptor, alpha myosin-binding protein C, slow-type; fragile X mental retardation 2; sonic hedgehog (Drosophila) homolog; 6-phosphofructo-2-kinase/fructose-2,6-biphosphatase 2; SFRS protein kinase 2; excision repair cross-complementing rodent repair deficiency; cyclin-dependent kinase 5, regulatory subunit 1 (p35); poly(A)-specific ribonuclease (deadenylation nuclease); solute carrier family 12 (potassium/chloride transporters), member 4; Pseudogene for metallothionein; natriuretic peptide precursor A; intercellular adhesion molecule 2; apoptosis antagonizing transcription factor; similar to rat HREV107; major histocompatibility complex, class II, DP beta 1; MpV17 transgene, murine homolog, glomerulosclerosis; uroporphyrinogen decarboxylase; proteasome (prosome, macropain) 26S subunit, ATPase, 1; fins-related tyrosine kinase 3 ligand; actin, gamma 1; Protein Kinase Pitslre, Alpha, Alt. Splice 1-Feb; nuclear factor of kappa light polypeptide gene enhancer in B-cells inhibitor, alpha; pyruvate kinase, muscle; telomeric repeat binding factor 2; cell division cycle 2, G1 to S and G2 to M; ADP-ribosylation factor 3; NRF1 Protein; H factor (complement)-like 3; serine (or cysteine) proteinase inhibitor, clade B (ovalbumin), member 6; mRNA of muscle specific gene M9; solute carrier family 25 (mitochondrial carrier; phosphate carrier), member 3; ribosomal protein L36a; suppressor of Ty (S. cerevisiae) 4 homolog 1; amino-terminal enhancer of split; ubiquitin A-52 residue ribosomal protein fusion product 1; hydroxyacyl-Coenzyme A dehydrogenase/3-ketoacyl-Coenzyme A thiolase; chaperonin containing TCP1, subunit 2 (beta); tyrosine kinase with immunoglobulin and epidermal growth factor homology; domains; Fc fragment of IgG, receptor, transporter, alpha; NRD1 convertase; ADP-ribosylation factor 5; transcription elongation factor A (S11), 1; like mouse brain protein E46; titin; fibromodulin; Abl-interactor 2 (Abi-2); and other differentially expressed genes disclosed herein. In one embodiment, the differentially expressed gene includes one or more of the genes listed in Table 9. The number of differentially expressed genes analyzed in the sample can be 1, 2, 3, 4, 5, 6, 7, 8, 9, 10, 11, 12, 13, 14, 15, 16, 17, 18, 19, 20, or more.

[0054] In another embodiment, the differentially expressed gene is at least one of CDKN1B, CDKN1C, CTGF, fibromodulin, and Abl-interactor 2 (Abi-2).

[0055] Suitable subjects for use in the invention can be any human or non-human animal. For example, the subject can be a female animal, such as mammal, like a dog, cat, horse, cow, pig, sheep, goat, chicken, primate, rat, or mouse. Because the experiments presented herein relate to human subjects, a preferred subject for the methods of the invention is a human, such as a human female. Particularly preferred are female subjects suspected of having or at risk for developing a fibrotic disorder within the reproductive tract, e.g., a woman suspected of having or at risk for developing leiomyoma, endometriosis, or peritoneal adhesions based on clinical findings or other diagnostic test results.

[0056] The step of providing a biological sample obtained from the subject can be performed by conventional medical techniques. For example, an endometrial tissue sample can be taken from the subject by biopsy. As another example, a sample of peritoneal fluid can be taken from a subject by conventional techniques. Suitable methods are described in more detail in the Examples sections presented below.

[0057] The step of analyzing the expression of a differentially expressed gene in the sample can be performed in a variety of different ways. Numerous suitable techniques are known for analyzing gene expression. For example, gene expression can be determined directly by assessing protein expression of cells or fluid of a biological sample (e.g., endometrial tissue or peritoneal fluid). Proteins can be detected using immunological techniques, e.g., using antibodies that specifically bind the protein in assays such as immunofluorescence or immunohistochemical staining and analysis, enzyme-linked immunosorbent assay (ELISA), radioimmunoassay (RIA), immunoblotting (e.g., Western blotting), and like techniques. Expression of differentially expressed genes can also be determined by directly or indirectly measuring the amount of mRNA encoding protein in a cellular sample using known techniques such as Northern blotting and PCR-based methods such as competitive quantitative reverse transcriptase PCR (Q-RT-PCR). Suitable methods for analyzing expression of differentially expressed genes are described below; nonetheless, other suitable methods might also be employed.

[0058] The step of correlating the expression of the gene with the presence or absence of the fibrotic disorder in the subject involves comparing the level of gene expression in the test biological sample with levels of gene expression in control samples, e.g., those derived from subjects known to have or not to have the particular disorder. Thus, after quantifying gene expression in a biological sample from a test subject, the test result is compared to levels of gene expression determined from (a) a panel of cells or tissues derived from subjects (preferably matched to the test subject by age, species, strain or ethnicity, and/or other medically relevant criteria) known to have a particular disorder and (b) a panel of cells or tissues derived from subjects (preferably also matched as above) known not to have a particular disorder. If the test result is closer to the levels (e.g., mean or arithmetic average) from the panel of cells or tissues derived from subjects known to have a particular disorder, then the test result correlates with the test subject having the particular disorder. On the other hand, if the test result is closer to the levels (e.g., mean or arithmetic average) from the panel of cells or tissues derived from subjects known not to have a particular disorder, then the test result correlates with the test subject not having the particular disorder. Optionally, the method further comprises selecting and administering a therapy or therapies to the patient to treat for the correlated disorder(s).

### II. Modulating Gene Expression

[0059] The present invention also provides a method for modulating the expression of genes that are differentially expressed in fibrotic tissues (such as leiomyoma), compared to normal tissues. Restoration of gene expression to levels associated with normal tissue is expected to ameliorate at least some of the symptoms associated with the fibrotic disorder. This method includes the step of contacting the tissue with an agent that modulates expression of one or more differentially expressed genes in the tissue. Optionally, the method includes the step of diagnosing the subject with the fibrotic disorder prior to contacting the tissue with the agent that modulates expression of one or more differentially expressed genes in the fibrotic tissue.

[0060] Differentially expressed genes include those which are differentially expressed in a given fibrotic disorder, including but not limited to, docking protein 1, 62 kD (downstream of tyrosine kinase 1); centromere protein A (17 kD); catenin (cadherin-associated protein), beta 1 (88 kD); nuclear receptor subfamily 1, group I, member 2; v-rel avian reticuloendotheliosis viral oncogene homolog A; LGN Protein; CDC28 protein kinase 1; hypothetical protein; solute carrier family 17 (sodium phosphate), member 1; FOS-like antigen-1; nuclear matrix protein p84; LERK-6 (EPLG6); visinin-like 1; phosphodiesterase 10A; KH-type splicing regulatory protein (FUSE binding protein 2); Polyposis locus (DP1 gene) mRNA; microtubule-associated protein 2; CDC5 (cell division cycle 5, S pombe, homolog)-like; Centromere autoantigen C (CENPC) mRNA; RNA guanylyltransferase and 5′-phosphatase; Nijmegen breakage syndrome 1 (nibrin); ribonuclease, RNase A family, 4; keratin 10 (epidermolytic hyperkeratosis; keratosis palmaris et plantaris); basic helix-loop-helix domain containing, class B, 2; dual specificity phosphatase 1; annexin A11; putative receptor protein; Human endogenous retrovirus HERV-K(HML6); mitogen-activated protein kinase kinase kinase 12; TXK tyrosine kinase; kynureninase (L-kynurenine hydrolase); ubiquitin specific protease 4 (proto-oncogene); peroxisome biogenesis factor 13; olfactory receptor, family 2, subfamily F, member 1; membrane protein, palmitoylated 3 (MAGUK p55 subfamily member 3); origin recognition complex, subunit 1 (yeast homolog)-like; dTDP-D-glucose 4,6-dehydratase; cytochrome c oxidase subunit VIa polypeptide 2; gamma-tubulin complex protein 2; Monocyte chemotactic protein-3; myelin transcription factor 1; inhibitor of growth family, member 1-like; thyroid hormone receptor, alpha myosin-binding protein C, slow-type; fragile X mental retardation 2; sonic hedgehog (Drosophila) homolog; 6-phosphofructo-2-kinase/fructose-2,6-biphosphatase 2; SFRS protein kinase 2; excision repair cross-complementing rodent repair deficiency; cyclin-dependent kinase 5, regulatory subunit 1 (p35); poly(A)-specific ribonuclease (deadenylation nuclease); solute carrier family 12 (potassium/chloride transporters), member 4; Pseudogene for metallothionein; natriuretic peptide precursor A; intercellular adhesion molecule 2; apoptosis antagonizing transcription factor; similar to rat HREV107; major histocompatibility complex, class II, DP beta 1; MpV17 transgene, murine homolog, glomerulosclerosis; uroporphyrinogen decarboxylase; proteasome (prosome, macropain) 26S subunit, ATPase, 1; fms-related tyrosine kinase 3 ligand; actin, gamma 1; Protein Kinase Pitslre, Alpha, Alt. Splice 1-Feb; nuclear factor of kappa light polypeptide gene enhancer in B-cells inhibitor, alpha; pyruvate kinase, muscle; telomeric repeat binding factor 2; cell division cycle 2, G1 to S and G2 to M; ADP-ribosylation factor 3; NRF1 Protein; H factor (complement)-like 3; serine (or cysteine) proteinase inhibitor, clade B (ovalbumin), member 6; mRNA of muscle specific gene M9; solute carrier family 25 (mitochondrial carrier; phosphate carrier), member 3; ribosomal protein L36a; suppressor of Ty (S. cerevisiae) 4 homolog 1; amino-terminal enhancer of split; ubiquitin A-52 residue ribosomal protein fusion product 1; hydroxyacyl-Coenzyme A dehydrogenase/3-ketoacyl-Coenzyme A thiolase; chaperonin containing TCP1, subunit 2 (beta); tyrosine kinase with immunoglobulin and epidermal growth factor homology; domains; Fc fragment of IgG, receptor, transporter, alpha; NRD1 convertase; ADP-ribosylation factor 5; transcription elongation factor A (S11), 1; like mouse brain protein E46; titin; fibromodulin; Abl-interactor 2 (Abi-2); and other differentially expressed genes disclosed herein. In one embodiment, the differentially expressed gene includes one or more of the genes listed in Table 9.

[0061] In another embodiment, the differentially expressed gene is at least one of CDKN1B, CDKN1C, CTGF, fibromodulin, and Abl-interactor 2 (Abi-2).

[0062] In a preferred embodiment, the agent that modulates expression of a differentially expressed gene in fibrotic tissue (such as leiomyoma) is one that decreases or down-regulates the action or expression of one or more genes selected from the group consisting of IL-11, IL-13, EGR1, EGR2, EGR3, CITED2, P300, E2F1, E2F2, E2F3, E2F4, E2F5, MCP3, CXCL5, CCL7, SMAD3, TYMS, and/or GT198. In a another preferred embodiment, the agent that modulates expression of a differentially expressed gene in fibrotic tissue is one that increases or up-regulates the action or expression of one or more genes selected from the group consisting of SMAD-7, NCOR2, TIMP-1, and ADAM17. More preferably, the agent decreases or down-regulates the action or expression of one or more genes selected from the group consisting of IL-11, IL-13, EGR1, EGR2, EGR3, CITED2, P300, E2F1, E2F2, E2F3, E2F4, E2F5, MCP3, CXCL5, CCL7, SMAD3, TYMS, and/or GT198, and increases or up-regulates the action or expression of one or more genes selected from the group consisting of SMAD-7, NCOR2, TIMP-1, and ADAM17.

[0063] In one embodiment, the agent that modulates expression of a differentially expressed gene in fibrotic tissue (such as leiomyoma) is selected from the group consisting of a selective estrogen receptor modulator (such as Roloxifene or other SERM), a selective progesterone receptor modulator (such as Asoprisnil (J867), RU486, or other SPRM), SB-505124, SB-431542, a mast cell inhibitor (such as Tranlist), Cystatin C (CystC), SD-208, LY550410, LY580276, Pitavastatin, 1,5 naphthyridine amiothiazole derivative, 1,5 naphthyridine pyrazole derivative, and ursolic acid (see, for example, Yingling, J. et al., Nat. Rev. Drug Discov., 2004, Dec.; 3(12):1011-22; Chwalisz, K. et al., Semin. Reprod. Med., 2004, 22(2):113-119; Hodl, C. et al., Bioconjug. Che., 2004, 15(2):359-365; Dubey, R. K. et al., J. Clin. Endocrinol. Metab., 2004, 89(2):852-859; DeManno, D. et al., Steroids, 2003, 68(10-13):1019-1032; DaCosta, B. S. et al., Mol. Pharmacol., 65(3):744-752; Sokol, J. P. et al., Mol. Cancer. Res., 2004, 2(3):183-195; Wanatabe, T. et al., Journal of Cell Biology, 2003, 163(6):1303-1311, and Hjelmeland, M. D. et al., Mol. Cancer. Ther., 2004, 3(6):737-745), which are incorporated herein by reference in their entirety). In another embodiment, the agent is one based on a pyrazolopyridine scaffold (Beight, D. W. et al., WO 2004/026871), a pyrazole scaffold (Gellibert, F. et al., J. Med. Chem., 2004, 47:4494-4506), an imidazopyridine scaffold (Lee, W. C. et al., WO 2004/021989), triazole scaffold (Blumberg, L. C. et al., WO 2004/026307), a pyridopyrimidine scaffold (Chakravarty, S. et al., WO 2000/012497), or an isothiazole scaffold (Munchhof, M. J., WO 2004/147574), each of which is incorporated herein by reference in its entirety.

[0064] Preferably, the agent administered to the subject for treatment or prevention of fibrosis is one that inhibits (reduces) TGF-beta signaling (signal transduction). More preferably, the agent administered to the subject that inhibits (reduces) TGF-beta II signaling (signal transduction).

[0065] In another aspect of the method of the invention, the subject invention includes a method for treating (alleviating symptoms associated with) fibrotic tissue or reducing the likelihood of fibrotic tissue formation, by administering GnRH analog locally to the target site. For example, the GnRH analog can be administered directly to a fibroid to reduce the size of the fibroid.

[0066] The tissue for use in this method can be any derived from a human or non-human animal. In some embodiments, the tissue is derived from a female reproductive system, e.g., endometrium, or tissue derived from the uterus, cervix, vagina, fallopian tube, or ovary. Because the experiments presented herein relate to human subjects, a preferred tissue sample for the methods of the invention is one derived from a human. Particularly preferred is tissue derived from a subject suspected of having or at risk for developing a fibrotic disorder (such as a woman suspected of having or at risk for developing leiomyoma, endometriosis, ovarian hyperstimulation syndrome, peritoneal adhesions, or other tissue fibroses) based on clinical findings or other diagnostic test results.

[0067] The method of the present invention utilizes one or more agents that modulate expression one or more differentially expressed genes in the tissue. Numerous agents for modulating expression of such genes in a tissue are known. Any of those suitable for the particular system being used may be employed. Typical agents for modulating expression of such genes are proteins, nucleic acids, and small organic or inorganic molecules such as hormones (e.g., natural or synthetic steroids). Preferably, the agent is not a hormone.

[0068] An example of a protein that can modulate gene expression is an antibody that specifically binds to the gene product. Such an antibody can be used to interfere with the interaction of the gene product and other molecules that bind the gene product. Products of the differentially expressed genes (or immunogenic fragments or analogs thereof) can be used to raise antibodies useful in the invention. Such gene products (e.g., proteins) can be produced by purification from cells/tissues, recombinant techniques or chemical synthesis as described above. Antibodies for use in the invention include polyclonal antibodies, monoclonal antibodies, single chain antibodies, Fab fragments, F(ab′)₂ fragments, and molecules produced using a Fab expression library. See, for example, Kohler et al., Nature, 1975, 256:495; Kohler et al., Eur. J. Immunol., 1976, 6:511; Kohler et al., Eur. J. Immunol., 1976, 6:292; Hammerling et al., “Monoclonal Antibodies and T Cell Hybridomas,” Elsevier, N.Y., 1981; Ausubel et al., supra; U.S. Pat. Nos. 4,376,110, 4,704,692, and 4,946,778; Kosbor et al., Immunology Today, 1983, 4:72; Cole et al., Proc. Natl. Acad. Sci. USA, 1983, 80:2026; Cole et al., “Monoclonal Antibodies and Cancer Therapy,” Alan R. Liss, Inc., pp. 77-96, 1983; and Huse et al., Science, 1989, 246:1275.

[0069] Other proteins that can modulate gene expression include variants of the gene products that can compete with the native gene products for binding ligands such as naturally occurring receptors of these gene products. Such variants can be generated through various techniques known in the art. For example, protein variants can be made by mutagenesis, such as by introducing discrete point mutation(s), or by truncation. Mutation can give rise to a protein variant having substantially the same, or merely a subset of the functional activity of a native protein. Alternatively, antagonistic forms of the protein can be generated which are able to inhibit the function of the naturally occurring form of the protein, such as by competitively binding to another molecule that interacts with the protein. In addition, agonistic (or superagonistic) forms of the protein may be generated that constitutively express one or more functional activities of the protein. Other variants of the gene products that can be generated include those that are resistant to proteolytic cleavage, as for example, due to mutations which alter protease target sequences. Whether a change in the amino acid sequence of a peptide results in a protein variant having one or more functional activities of a native protein can be readily determined by testing the variant for a native protein functional activity (e.g., binding a receptor or inducing a cellular response).

[0070] Another agent that can modulate gene expression is a non-peptide mimetic or chemically modified form of the gene product that disrupts binding of the encoded protein to other proteins or molecules with which the native protein interacts. See, e.g., Freidinger et al. in Peptides: Chemistry and Biology, G. R. Marshall ed., ESCOM Publisher: Leiden, Netherlands, 1988), azepine (e.g., see Huffman et al. in Peptides: Chemistry and Biology, G. R. Marshall ed., ESCOM Publisher: Leiden, Netherlands, 1988), substituted gamma lactam rings (Garvey et al. in Peptides: Chemistry and Biology, G. R. Marshall ed., ESCOM Publisher: Leiden, Netherlands, 1988), keto-methylene pseudopeptides (Ewenson et al. J. Med. Chem., 1986, 29:295; and Ewenson et al. in Peptides: Structure and Function (Proceedings of the 9th American Peptide Symposium) Pierce Chemical Co. Rockland, Ill., 1985), beta-turn dipeptide cores (Nagai et al. Tetrahedron Lett, 1985, 26:647; and Sato et al. J. Chem. Soc. Perkin. Trans., 1986, 1:1231), and beta-aminoalcohols (Gordon et al. Biochem. Biophys. Res. Commun., 1985, 126:419; and Dann et al. Biochem. Biophys. Res. Commun., 1986, 134:71). Proteins may also be chemically modified to create derivatives by forming covalent or aggregate conjugates with other chemical moieties, such as glycosyl groups, lipids, phosphate, acetyl groups and the like. Covalent derivatives of proteins encoded by differentially expressed genes can be prepared by linking the chemical moieties to functional groups on amino acid side chains of the protein or at the N-terminus or at the C-terminus of the polypeptide.

[0071] The agent that directly reduces expression of the differentially expressed gene can also be a nucleic acid molecule that reduces expression of the gene. For example, the nucleic acid molecule can be an antisense nucleic acid that hybridizes to mRNA encoding the protein. Antisense nucleic acid molecules for use within the invention are those that specifically hybridize (e.g. bind) under cellular conditions to cellular mRNA and/or genomic DNA encoding a protein in a manner that inhibits expression of the protein, e.g., by inhibiting transcription and/or translation. The binding may be by conventional base pair complementarity, or, for example, in the case of binding to DNA duplexes, through specific interactions in the major groove of the double helix.

[0072] In one embodiment, the nucleic acid molecule that directly reduces the expression of the differentially expressed gene is selected from the group consisting of antisense, short interfering RNA (siRNA), and a ribozyme. In a specific embodiment, the nucleic acid molecule is targed to the TGF-beta type II receptor, directly reducing its expression.

[0073] Vectors may be used to deliver the nucleic acid molecule to the target site (e.g., the fibrotic tissue) in vitro or in vivo. The vector may be, for example, a viral vector (such as lentivirus) or a non-viral vector (such as a liposome or other cholesterol molecule); see, for example, Soutschek, J. et al., Nature, 2004, 432(7014):173-178, which describes therapeutic silencing of an endogenous gene by administration siRNAs, and which is incorporated herein by reference in its entirety.

[0074] Antisense constructs can be delivered as an expression plasmid which, when transcribed in the cell, produces RNA which is complementary to at least a unique portion of the cellular mRNA which encodes the protein. Alternatively, the antisense construct can take the form of an oligonucleotide probe generated ex vivo which, when introduced into a protein expressing cell, causes inhibition of protein expression by hybridizing with an mRNA and/or genomic sequences coding for the protein. Such oligonucleotide probes are preferably modified oligonucleotides that are resistant to endogenous nucleases, e.g. exonucleases and/or endonucleases, and are therefore stable in vivo. Exemplary nucleic acid molecules for use as antisense oligonucleotides are phosphoramidate, phosphothioate and methylphosphonate analogs of DNA (see, e.g., U.S. Pat. Nos. 5,176,996; 5,264,564; and 5,256,775). Additionally, general approaches to constructing oligomers useful in antisense therapy have been reviewed, for example, by Van der Krol et al., Biotechniques, 1988, 6:958-976; and Stein et al., Cancer Res., 1988, 48:2659-2668. With respect to antisense DNA, oligodeoxyribonucleotides derived from the translation initiation site, e.g., between the −10 and +10 regions of a protein encoding nucleotide sequence, are preferred.

[0075] Antisense approaches involve the design of oligonucleotides (either DNA or RNA) that are complementary to mRNA encoding the protein to be inhibited. The antisense oligonucleotides will bind to mRNA transcripts and prevent translation. Absolute complementarity, although preferred, is not required. The ability to hybridize will depend on both the degree of complementarity and the length of the antisense nucleic acid. Generally, the longer the hybridizing nucleic acid, the more base mismatches with an RNA it may contain and still form a stable duplex (or triplex, as the case may be). One skilled in the art can ascertain a tolerable degree of mismatch by use of standard procedures to determine the melting point of the hybridized complex.

[0076] In one embodiment, the antisense oligonucleotides used in the subject invention are targeted to the TGF-beta type II receptor, such as those disclosed herein.

[0077] Oligonucleotides that are complementary to the 5′ end of the message, e.g., the 5′ untranslated sequence up to and including the AUG initiation codon, should work most efficiently at inhibiting translation. However, sequences complementary to the 3′ untranslated sequences of mRNAs have been shown to be effective at inhibiting translation of mRNAs as well (Wagner, R., Nature, 1994, 372:333). Therefore, oligonucleotides complementary to either the 5′ or 3′ untranslated, non-coding regions of a differentially expressed gene could be used in an antisense approach to inhibit translation of endogenous mRNA. Oligonucleotides complementary to the 5′ untranslated region of the mRNA should include the complement of the AUG start codon. Antisense oligonucleotides complementary to mRNA coding regions are less efficient inhibitors of translation but could be used in accordance with the invention. Whether designed to hybridize to the 5′, 3′ or coding region of the mRNA, antisense nucleic acids should be at least eighteen nucleotides in length, and are preferably less than about 100 and more preferably less than about 30, 25, 20, or 18 nucleotides in length.

[0078] Antisense oligonucleotides of the invention may comprise at least one modified base moiety which is selected from the group including but not limited to 5-fluorouracil, 5-bromouracil, 5-chlorouracil, 5-iodouracil, hypoxanthine, xanthine, 4-acetylcytosine, 5-(carboxyhydroxyethyl) uracil, 5-carboxymethylaminomethyl-2-thiouridine, 5-carboxymethylaminomethyluracil, dihydrouricil, beta-D-galactosylqueosine, inosine, N6-isopentenyladenine, 1-methylguanine, 1-methylinosine, 2,2-idimethylguanine, 2-methyladenine, 2-methylguanine, 3-methylcytosine, 5-methylcytosine, N6-adenine, 7-methylguanine, 5-methylaminomethyluracil, 5-methoxyaminomethyl-2-thiouracil, beta-D-mannosylqueosine, 5′-methoxycarboxymethyluracil, 5-methoxyuracil, 2-methylthio-N6-isopenten-yladenine, uracil-5-oxyacetic acid (v), wybutoxosine, pseudouracil, queosine, 2-thiocytosine, 5-methyl-2-thiouracil, 2-thiouracil, 4-thiouracil, 5-methyluracil, uracil-5-oxyacetic acid methylester, uracil-5-oxyacetic acid (v), 5-methyl-2-thiouracil, 3-(3-amino-3-N-2-carboxypropyl) uracil, (acp3)w, and 2,6-diaminopurine. Antisense oligonucleotides of the invention may also comprise at least one modified sugar moiety selected from the group including but not limited to arabinose, 2-fluoroarabinose, xylulose, and hexose; and may additionally include at least one modified phosphate backbone selected from the group consisting of a phosphorothioate, a phosphorodithioate, a phosphoramidothioate, a phosphoramidate, a phosphordiamidate, a methylphosphonate, an alkyl phosphotriester, and a formacetal or analog thereof.

[0079] In yet a further embodiment, the antisense oligonucleotide is an alpha-anomeric oligonucleotide. An alpha-anomeric oligonucleotide forms specific double-stranded hybrids with complementary RNA in which, contrary to the usual beta-units, the strands run parallel to each other (Gautier et al., Nucl. Acids Res., 1987, 15:6625-6641). Such oligonucleotide can be a 2′-0-methylribonucleotide (Inoue et al., Nucl. Acids Res., 1987, 15:6131-6148), or a chimeric RNA-DNA analogue (Inoue et al., FEBS Lett., 1987, 215:327-330).

[0080] Oligonucleotides of the invention may be synthesized by standard methods known in the art, e.g. by use of an automated DNA synthesizer (such as are commercially available from Biosearch, Applied Biosystems, etc.). As examples, phosphorothioate oligonucleotides may be synthesized by the method of Stein et al. Nucl. Acids Res., 1988, 16:3209), methylphosphonate oligonucleotides can be prepared by use of controlled pore glass polymer supports (Sarin et al., Proc. Natl. Acad. Sci. U.S.A., 1988, 85:7448-7451).

[0081] The antisense molecules should be delivered into cells that express the differentially expressed (e.g., overexpressed) genes in vivo. A number of methods have been developed for delivering antisense DNA or RNA into cells. For instance, antisense molecules can be introduced directly into the tissue site by such standard techniques as electroporation, liposome-mediated transfection, CaCl-mediated transfection, or the use of a gene gun. Alternatively, modified antisense molecules, designed to target the desired cells (e.g., antisense linked to peptides or antibodies that specifically bind receptors or antigens expressed on the target cell surface) can be used.

[0082] However, because it is often difficult to achieve intracellular concentrations of the antisense sufficient to suppress translation of endogenous mRNAs, a preferred approach utilizes a recombinant DNA construct in which the antisense oligonucleotide is placed under the control of a strong promoter (e.g., the CMV promoter). The use of such a construct to transform cells will result in the transcription of sufficient amounts of single stranded RNAs that will form complementary base pairs with the endogenous gene transcripts and thereby prevent translation of the mRNA.

[0083] Ribozyme molecules designed to catalytically cleave target mRNA transcripts can also be used to prevent translation of mRNA and expression of protein (see, e.g., PCT Publication No. WO 90/11364, published Oct. 4, 1990; Sarver et al., Science, 1990, 247:1222-1225 and U.S. Pat. No. 5,093,246). While ribozymes that cleave mRNA at site-specific recognition sequences can be used to destroy target mRNAs, the use of hammerhead ribozymes is preferred. Hammerhead ribozymes cleave mRNAs at locations dictated by flanking regions that form complementary base pairs with the target mRNA. The sole requirement is that the target mRNA have the following sequence of two bases: 5′-UG-3′. The construction and production of hammerhead ribozymes is well known in the art and is described more fully in Haseloff and Gerlach, Nature, 1988, 334:585-591. Preferably the ribozyme is engineered so that the cleavage recognition site is located near the 5′ end of the mRNA; i.e., to increase efficiency and minimize the intracellular accumulation of non-functional mRNA transcripts. Ribozymes within the invention can be delivered to a cell using a vector.

[0084] The expression of endogenous genes that are overexpressed in fibrotic disorders can also be reduced by inactivating or “knocking out” the gene or its promoter using targeted homologous recombination. See, e.g., Kempin et al., Nature, 1997, 389:802; Smithies et al., Nature, 1985, 317:230-234; Thomas and Capecchi, Cell, 1987, 51:503-512; and Thompson et al., Cell, 1989, 5:313-321. For example, a mutant, non-functional gene variant (or a completely unrelated DNA sequence) flanked by DNA homologous to the endogenous gene (either the coding regions or regulatory regions of the gene) can be used, with or without a selectable marker and/or a negative selectable marker, to transfect cells that express the gene in vivo.

[0085] Alternatively, endogenous gene expression may be reduced by targeting deoxyribonucleotide sequences complementary to the regulatory region of the target gene(s) (i.e., the gene promoter and/or enhancers) to form triple helical structures that prevent transcription of the gene in target cells. (See generally, Helene, C., Anticancer Drug Des., 1991, 6(6):569-84; Helene, C., et al., Ann. N.Y. Acad. Sci., 1992, 660:27-36; and Maher, L. J., Bioassays, 1992, 14(12):807-15).

[0086] Antisense nucleic acid, ribozyme, and triple helix molecules of the invention may be prepared by any method known in the art for the synthesis of DNA and RNA molecules. These include techniques for chemically synthesizing oligodeoxyribonucleotides and oligoribonucleotides well known in the art such as for example solid phase phosphoramide chemical synthesis. Alternatively, RNA molecules may be generated by in vitro and in vivo transcription of DNA sequences encoding the antisense RNA molecule. Such DNA sequences may be incorporated into a wide variety of vectors which incorporate suitable RNA polymerase promoters. Alternatively, antisense cDNA constructs that synthesize antisense RNA constitutively or inducibly, depending on the promoter used, can be introduced stably into cell lines.

[0087] Another agent that can be used to modulate gene expression in fibrotic tissue is a hormone. Numerous naturally occurring and synthetic hormones are known to cause physiological changes in such tissue and are available commercially. See, e.g., PDR: Physician's Desk Reference, 2002. Those particular hormones which modulate expression of differentially expressed genes in a given sample tissue can be determined empirically by contacting a series of tissue samples with a panel of different hormones and analyzing the tissue samples for changes in phenotype over time. In experiments relating to the invention, it was shown that GnRHa therapy modulated the expression of 297 genes in leiomyoma and myometrium compared to untreated group (P<0.02). In addition, GnRHa, TGF-b and TGF-b receptor type II antisense treatments resulted in differential regulation of 134, 144, and 154 specific genes, respectively (P<0.005 and 0.001). The products of these genes were functionally categorized as key regulators of cell cycle, transcription factors, signal transduction, ECM turnover and apoptosis. Based on (i) expression values, (ii) functional classification and (iii) regulation by GnRH and TGF-b mediated actions, we selected 10 of these genes and validated their expression in leiomyoma and myometrium, and in LSMC and MSMC using RealTime PCR, western blotting and immunohistochemistry. In conclusion, the results provide additional evidence for the difference in gene expression profile between leiomyoma and myometrium, and reveal the profile of previously unrecognized novel genes whose expression are the target of GnRH and TGF-β actions in leiomyoma and myometrium.

[0088] The agent that can be used to modulate gene expression in fibrotic tissue may be administered to non-human animals or humans in pharmaceutically acceptable carriers (e.g., physiological saline) that are selected on the basis of mode and route of administration and standard pharmaceutical practice. For example, the pharmaceutical compositions of the invention might include suitable buffering agents such as acetic acid or its salt (1-2% w/v); citric acid or its salt (1-3% w/v); boric acid or its salt (0.5-2.5% w/v); succinic acid; or phosphoric acid or its salt (0.8-2% w/v); and suitable preservatives such as benzalkonium chloride (0.003-0.03% w/v); chlorobutanol (0.3-0.9% w/v); parabens (0.01-0.25% w/v) or thimerosal (0.004-0.02% w/v). Examples of compositions suitable for parenteral administration include sterile aqueous preparations such as water, Ringer's solution, and isotonic sodium chloride solution. In addition, sterile, fixed oils might be used as a solvent or suspending medium. For this purpose, any bland fixed oil may be employed including synthetic mono- or di-glycerides. In addition, fatty acids such as oleic acid find use in the preparation of injectables. Carrier formulations suitable for local, subcutaneous, intramuscular, intraperitoneal or intravenous administrations may be found in Remington's Pharmaceutical Sciences, Mack Publishing Company, Easton, Pa. The pharmaceutical compositions useful in the invention may be delivered in mixtures of more than one pharmaceutical composition.

[0089] The compositions of the invention (containing an agent that can be used to modulate gene expression in fibrotic tissue) may be administered to animals or humans by any conventional technique. Such administration might be parenteral (e.g., intravenous, subcutaneous, intramuscular, or intraperitoneal introduction). Preferably, the compositions may also be administered directly to the target site (e.g., a portion of the reproductive tract or peritoneal cavity) by, for example, surgical delivery to an internal or external target site, or by catheter to a site accessible by a blood vessel. Other methods of delivery, e.g., liposomal delivery or diffusion from a device impregnated with the composition, are known in the art. The composition may be administered in a single bolus, multiple injections, or by continuous infusion (e.g., intravenously or by peritoneal dialysis).

[0090] The methods of this invention, generally speaking, may be practiced using any mode of administration that is medically acceptable, meaning any mode that produces effective levels of response without causing clinically unacceptable adverse effects. Preferred modes of administration include parenteral, injection, infusion, deposition, implantation, anal or vaginal supposition, oral ingestion, inhalation, and topical administration. Injections can be intravenous, intradermal, subcutaneous, intramuscular, or interperitoneal. For example, the pharmaceutical composition can be injected directly into target site for the prevention of fibrotic disorders, such as leiomyoma, endometriosis, ovarian hyperstimulation syndrome, or adhesion formation. In some embodiments, the injections can be given at multiple locations. Implantation includes inserting implantable drug delivery systems, e.g., microspheres, hydrogels, polymeric reservoirs, cholesterol matrixes, polymeric systems, e.g., matrix erosion and/or diffusion systems and non-polymeric systems, e.g., compressed, fused, or partially fused pellets. Inhalation includes administering the pharmaceutical composition with an aerosol in an inhaler, either alone or attached to a carrier that can be absorbed. For systemic administration, it may be preferred that the pharmaceutical composition is encapsulated in liposomes. The term “parenteral” includes subcutaneous injections, intravenous, intramuscular, intraperitoneal, intrasternal injection or infusion techniques. In certain preferred embodiments of the invention, the administration can be designed so as to result in sequential exposure of the pharmaceutical composition over some period of time, e.g., hours, days, weeks, months or years. This can be accomplished by repeated administrations of the pharmaceutical composition, by one of the methods described above, or alternatively, by a sustained-release delivery system in which the pharmaceutical composition is delivered to the subject for a prolonged period without repeated administrations. By sustained-release delivery system, it is meant that total release of the pharmaceutical composition does not occur immediately upon administration, but rather is delayed for some period of time. Release can occur in bursts or it can occur gradually and continuously. Administration of such a system can be, e.g., by long-lasting oral dosage forms, bolus injections, transdermal patches, and subcutaneous implants.

[0091] A therapeutically effective amount is an amount that is capable of producing a medically desirable result in a treated animal or human. As is well known in the medical arts, dosage for any one animal or human depends on many factors, including the subject's size, body surface area, age, the particular composition to be administered, sex, time and route of administration, general health, and other drugs being administered concurrently. Toxicity and therapeutic efficacy of the compositions of the invention can be determined by standard pharmaceutical procedures, using cells in culture and/or experimental animals to determine the LD50 (the dose lethal to 50% of the population) and the ED50 (the dose therapeutically effective in 50% of the population). The dose ratio between toxic and therapeutic effects is the therapeutic index and it can be expressed as the ratio LD50/ED50. Agents that exhibit large therapeutic indices are preferred. While agents that exhibit toxic side effects may be used, care should be taken to design a delivery system that targets such compounds to the site of the tissues to be treated in order to minimize potential damage to uninvolved tissue and thereby reduce side effects. The data obtained from cell culture assays and animal studies can be used in formulating a range of dosage for use in humans. The dosage of such compounds lies preferably within the range of circulating concentrations that include an ED50 with little or no toxicity. The dosage may vary within this range depending on the dosage form employed and the route of administration utilized.

III. Methods for Identifying Agents that Modulate Fibrosis

[0092] The present invention also relates to methods of identifying agents, and the agents themselves, which modulate differentially-expressed genes or polypeptides expressed in endothelial or other fibrosis-forming (e.g., leiomyoma-forming) cells, such as cells of the female reproductive tract. In one embodiment, the fibrosis is uterine fibrosis. These agents can be used to modulate the biological activity of the polypeptide encoded for the gene, or the gene, itself. Agents that regulate the gene or its product are useful in variety of different environments, including as medicinal agents to treat or prevent disorders associated with fibrosis and as research reagents to modify the function of tissues and cells.

[0093] The methods for identifying agents, in accordance with the present invention, generally comprise steps in which an agent is placed in contact with the gene, its transcription product, its translation product, or other target, and then a determination is performed to assess whether the agent “modulates” the target. The specific method utilized will depend upon a number of factors, including, e.g., the target (i.e., is it the gene or polypeptide encoded by it), the environment (e.g., in vitro or in vivo), the composition of the agent, etc.

[0094] Differentially expressed genes include those which are differentially expressed in a given fibrotic disorder, including but not limited to, docking protein 1, 62 kD (downstream of tyrosine kinase 1); centromere protein A (17 kD); catenin (cadherin-associated protein), beta 1 (88 kD); nuclear receptor subfamily 1, group I, member 2; v-rel avian reticuloendotheliosis viral oncogene homolog A; LGN Protein; CDC28 protein kinase 1; hypothetical protein; solute carrier family 17 (sodium phosphate), member 1; FOS-like antigen-1; nuclear matrix protein p84; LERK-6 (EPLG6); visinin-like 1; phosphodiesterase 10A; KH-type splicing regulatory protein (FUSE binding protein 2); Polyposis locus (DP1 gene) mRNA; microtubule-associated protein 2; CDC5 (cell division cycle 5, S pombe, homolog)-like; Centromere autoantigen C (CENPC) mRNA; RNA guanylyltransferase and 5′-phosphatase; Nijmegen breakage syndrome 1 (nibrin); ribonuclease, RNase A family, 4; keratin 10 (epidermolytic hyperkeratosis; keratosis palmaris et plantaris); basic helix-loop-helix domain containing, class B, 2; dual specificity phosphatase 1; annexin All; putative receptor protein; Human endogenous retrovirus HERV-K(HML6); mitogen-activated protein kinase kinase kinase 12; TXK tyrosine kinase; kynureninase (L-kynurenine hydrolase); ubiquitin specific protease 4 (proto-oncogene); peroxisome biogenesis factor 13; olfactory receptor, family 2, subfamily F, member 1; membrane protein, palmitoylated 3 (MAGUK p55 subfamily member 3); origin recognition complex, subunit 1 (yeast homolog)-like; dTDP-D-glucose 4,6-dehydratase; cytochrome c oxidase subunit VIa polypeptide 2; gamma-tubulin complex protein 2; Monocyte chemotactic protein-3; myelin transcription factor 1; inhibitor of growth family, member 1-like; thyroid hormone receptor, alpha myosin-binding protein C, slow-type; fragile X mental retardation 2; sonic hedgehog (Drosophila) homolog; 6-phosphofructo-2-kinase/fructose-2,6-biphosphatase 2; SFRS protein kinase 2; excision repair cross-complementing rodent repair deficiency; cyclin-dependent kinase 5, regulatory subunit 1 (p35); poly(A)-specific ribonuclease (deadenylation nuclease); solute carrier family 12 (potassium/chloride transporters), member 4; Pseudogene for metallothionein; natriuretic peptide precursor A; intercellular adhesion molecule 2; apoptosis antagonizing transcription factor; similar to rat HREV107; major histocompatibility complex, class II, DP beta 1; MpV17 transgene, murine homolog, glomerulosclerosis; uroporphyrinogen decarboxylase; proteasome (prosome, macropain) 26S subunit, ATPase, 1; fms-related tyrosine kinase 3 ligand; actin, gamma 1; Protein Kinase Pitslre, Alpha, Alt. Splice 1-Feb; nuclear factor of kappa light polypeptide gene enhancer in B-cells inhibitor, alpha; pyruvate kinase, muscle; telomeric repeat binding factor 2; cell division cycle 2, G1 to S and G2 to M; ADP-ribosylation factor 3; NRF1 Protein; H factor (complement)-like 3; serine (or cysteine) proteinase inhibitor, clade B (ovalbumin), member 6; mRNA of muscle specific gene M9; solute carrier family 25 (mitochondrial carrier; phosphate carrier), member 3; ribosomal protein L36a; suppressor of Ty (S. cerevisiae) 4 homolog 1; amino-terminal enhancer of split; ubiquitin A-52 residue ribosomal protein fusion product 1; hydroxyacyl-Coenzyme A dehydrogenase/3-ketoacyl-Coenzyme A thiolase; chaperonin containing TCP1, subunit 2 (beta); tyrosine kinase with immunoglobulin and epidermal growth factor homology; domains; Fc fragment of IgG, receptor, transporter, alpha; NRD1 convertase; ADP-ribosylation factor 5; transcription elongation factor A (SII), 1; like mouse brain protein E46; titin; fibromodulin; Abl-interactor 2 (Abi-2); and other differentially expressed genes disclosed herein. In one embodiment, the differentially expressed gene includes one or more of the genes listed in Table 9. The number of differentially expressed genes analyzed in the sample can be 1, 2, 3, 4, 5, 6, 7, 8, 9, 10, 11, 12, 13, 14, 15, 16, 17, 18, 19, 20, or more.

[0095] In another embodiment, the differentially expressed gene is at least one of CDKN1B, CDKN1C, CTGF, fibromodulin, and Abl-interactor 2 (Abi-2).

[0096] For modulating the expression of a gene, a method can comprise, in any effective order, one or more of the following steps, e.g., contacting a gene (e.g., in a cell population) with a test agent under conditions effective for the test agent to modulate the expression of the gene, and determining whether the test agent modulates the gene. An agent can modulate expression of a gene at any level, including transcription (e.g., by modulating the promoter), translation, and/or perdurance of the nucleic acid (e.g., degradation, stability, etc.) in the cell.

[0097] For modulating the biological activity of polypeptides, a method can comprise, in any effective order, one or more of the following steps, e.g., contacting a polypeptide (e.g., in a cell, lysate, or isolated) with a test agent under conditions effective for the test agent to modulate the biological activity of the polypeptide, and determining whether the test agent modulates the biological activity.

[0098] Contacting the gene or polypeptide with the test agent can be accomplished by any suitable method and/or means that places the agent in a position to functionally control expression or biological activity of the gene or its product in the sample. Functional control indicates that the agent can exert its physiological effect through whatever mechanism it works. The choice of the method and/or means can depend upon the nature of the agent and the condition and type of environment in which the gene or its product is presented, e.g., lysate, isolated, or in a cell population (such as, in vivo, in vitro, organ explants, etc.). For instance, if the cell population is an in vitro cell culture, the agent can be contacted with the cells by adding it directly into the culture medium. If the agent cannot dissolve readily in an aqueous medium, it can be incorporated into liposomes, or another lipophilic carrier, and then administered to the cell culture. Contact can also be facilitated by incorporation of agent with carriers and delivery molecules and complexes, by injection, by infusion, etc.

[0099] Agents can be directed to, or targeted to, any part of the polypeptide that is effective for modulating it. For example, agents, such as antibodies and small molecules, can be targeted to cell-surface, exposed, extracellular, ligand binding, functional, etc., domains of the polypeptide. Agents can also be directed to intracellular regions and domains, e.g., regions where the polypeptide couples or interacts with intracellular or intramembrane binding partners.

[0100] After the agent has been administered in such a way that it can gain access to the gene or gene product (including DNA, mRNA, and polypeptides), it can be determined whether the test agent modulates its expression or biological activity. Modulation can be of any type, quality, or quantity, e.g., increase, facilitate, enhance, up-regulate, stimulate, activate, amplify, augment, induce, decrease, down-regulate, diminish, lessen, reduce, etc. The modulatory quantity can also encompass any value, e.g., 1%, 5%, 10%, 50%, 75%, 1-fold, 2-fold, 5-fold, 10-fold, 100-fold, etc. To modulate gene expression means, e.g., that the test agent has an effect on its expression, e.g., to effect the amount of transcription, to effect RNA splicing, to effect translation of the RNA into polypeptide, to effect RNA or polypeptide stability, to effect polyadenylation or other processing of the RNA, to effect post-transcriptional or post-translational processing, etc. To modulate biological activity means, e.g., that a functional activity of the polypeptide is changed in comparison to its normal activity in the absence of the agent. This effect includes, increase, decrease, block, inhibit, enhance, etc.

[0101] A test agent can be of any molecular composition, e.g., chemical compounds, biomolecules, such as polypeptides, lipids, nucleic acids (e.g., antisense, siRNA, or ribozyme targeted to a polynucleotide), carbohydrates, antibodies, ribozymes, double-stranded RNA, aptamers, etc. For example, if a polypeptide to be modulated is a cell-surface molecule, a test agent can be an antibody that specifically recognizes it and, e.g., causes the polypeptide to be internalized, leading to its down regulation on the surface of the cell. Such an effect does not have to be permanent, but can require the presence of the antibody to continue the down-regulatory effect. Antibodies can also be used to modulate the biological activity of a polypeptide in a lysate or other cell-free form.

[0102] The present invention also relates to methods of identifying modulators of a gene, differentially-expressed in fibrotic tissue or during fibrogenesis, in a cell population capable of forming fibrotic tissue, comprising, one or more of the following steps in any effective order, e.g., contacting the cell population with a test agent under conditions effective for the test agent to modulate a differentially-expressed gene disclosed herein, or a polypeptide thereof. These methods are useful, e.g., for drug discovery in identifying and confirming the pro-fibrotic or anti-fibrotic activity of agents, for identifying molecules in the normal pathway of fibrogenesis, etc.

[0103] Any cell population capable of forming (contributing to) fibrotic tissue can be utilized. Cells can include, e.g., endothelial, epithelial, muscle, embryonic and adult stem cells, ectodermal, mesenchymal, endodermal, neoplastic, etc. The phrase “capable of forming fibrotic tissue” does not indicate a particular cell-type, but simply that the cells in the population are able under appropriate conditions to form or contribute to fibrotic tissue structure. In some circumstances, the population may be heterogeneous, comprising more than one cell-type, only some which actually form fibrotic tissue, but others which are necessary to initiate, maintain, etc., the process of fibrogenesis.

[0104] The cell population can be contacted with the test agent in any manner and under any conditions suitable for it to exert an effect on the cells, and to modulate the differentially-expressed gene or polypeptide. The means by which the test agent is delivered to the cells may depend upon the type of test agent, e.g., its chemical nature, and the nature of the cell population. Generally, a test agent must have access to the cell population, so it must be delivered in a form (or pro-form) that the population can experience physiologically, i.e., to put in contact with the cells. For instance, if the intent is for the agent to enter the cell, if necessary, it can be associated with any means that facilitate or enhance cell penetrance, e.g., associated with antibodies or other reagents specific for cell-surface antigens, liposomes, lipids, chelating agents, targeting moieties, etc. Cells can also be treated, manipulated, etc., to enhance delivery, e.g., by electroporation, pressure variation, etc.

[0105] A purpose of administering or delivering the test agents to cells capable of forming blood vessels is to determine whether they modulate a gene that is differentially expressed in fibrotic tissue, such as those disclosed herein. By the phrase “modulate,” it is meant that the gene or polypeptide affects the polypeptide or gene in some way. Modulation includes effects on transcription, RNA splicing, RNA editing, transcript stability and turnover, translation, polypeptide activity, and, in general, any process involved in the expression and production of the gene and gene product. The modulatory activity can be in any direction, and in any amount, including, up, down, enhance, increase, stimulate, activate, induce, turn on, turn off, decrease, block, inhibit, suppress, prevent, etc.

[0106] Any type of test agent can be used, comprising any material, such as chemical compounds, biomolecules, such as polypeptides (including polypeptide fragments and mimics), lipids, nucleic acids (such as short interfering RNA (siRNA), antisense, or ribozymes), carbohydrates, antibodies, small molecules, fusion proteins, etc. Test agents can include, e.g., protamine, heparins, steroids, angiostatins, triazines, endostatins, cytokines, chemokines, FGFs, etc. The agent can be one based on a pyrazolopyridine scaffold (Beight, D. W. et al., WO 2004/026871), a pyrazole scaffold (Gellibert, F. et al., J. Med. Chem., 2004, 47:4494-4506), an imidazopyridine scaffold (Lee, W. C. et al., Wo 2004/021989), triazole scaffold (Blumberg, L. C. et al., WO 2004/026307), a pyridopyrimidine scaffold (Chakravarty, S. et al., WO 2000/012497), or an isothiazole scaffold (Munchhof, M. J., WO 2004/147574), for example.

[0107] Whether the test agent modulates a differentially expressed gene or polypeptide encoded by a differentially expressed gene can be determined by any suitable method. These methods include, detecting gene transcription, detecting mRNA, detecting polypeptide and activity thereof. The detection methods include those mentioned herein, e.g., PCR, RT-PCR, Northern blot, ELISA, Western, RIA, etc. In addition to detecting nucleic acid and polypeptide, further downstream targets can be used to assess the effects of modulators, including, the presence or absence of TGF-beta receptor signal transduction (e.g., TGF-beta II receptor signal transduction) as modulated by a test agent.

[0108] The method for identifying modulators of differentially expressed genes or polypeptides encoded by differentially expressed genes can include the additional step of evaluating the effects of the test agent on an animal model of fibrosis. The use of an animal model can be used before, during, or after a test agent has been identified as a modulator of a differentially expressed gene or polypeptide encoded by a differentially expressed gene in accordance with the present invention. Animal models that are genetically susceptible to the development of tumors may be used. For example, the Eker rat carries a mutation in the tuberous sclerosis 2 (Tsc-2) tumor suppressor gene and is predisposed to the development of tumors of the digestive tract (renal cell carcinomas) and reproductive tract (uterine leiomyomas) (Everitt J. I. et al., American Journal of Pathology, 1995, 146:1556-1567; Hunter D. S. et al., Cancer Research, 59:3090-3099; Walker C. L. et al., Genes Chromosomes Cancers, 2003, 38(4):349-356; Everitt J. T. et al., Toxicol. Lett., 1995, 82-83:621-625; Yoon H. et al., Am. J. Physiol. Renal. Physiol., 2002, 283:F262-F270; Everitt J. I. et al., American Journal of Pathology, 1995, 146:1556-1567; each of which is incorporated herein by reference in its entirety). Because of their inherited susceptibility to tumor development, Eker rats are an excellent model system for studying the effects of chemical carcinogens on predisposed individuals and for identifying the mechanisms by which chemical carcinogens interact with tumor susceptibility genes. In addition to being useful for studying the effects of carcinogens on tumor susceptibility genes, animal models in which spontaneous tumors occur at a high frequency are also useful in preclinical studies conducted to identify agents that may be used to prevent or treat fibrosis. Thus, test agents may be administered to rats carrying the Eker mutation or other animal model to determine if the test agent is capable of preventing or reducing the growth of fibrotic tissue, such as fibrotic tissue of the uterus.

[0109] In another aspect, the invention concerns an array, such as a gene array, including a substrate (such as a solid support) having a plurality of addresses (such as wells), wherein each address disposed thereon has a capture probe that can specifically bind at least one polynucleotide that is differentially expressed in fibrotic disorders, or a complement thereof. In one embodiment, the at least one polynucleotide is selected from the group consisting of docking protein 1, 62 kD (downstream of tyrosine kinase 1); centromere protein A (17 kD); catenin (cadherin-associated protein), beta 1 (88 kD); nuclear receptor subfamily 1, group I, member 2; v-rel avian reticuloendotheliosis viral oncogene homolog A; LGN Protein; CDC28 protein kinase 1; hypothetical protein; solute carrier family 17 (sodium phosphate), member 1; FOS-like antigen-1; nuclear matrix protein p84; LERK-6 (EPLG6); visinin-like 1; phosphodiesterase 10A; KH-type splicing regulatory protein (FUSE binding protein 2); Polyposis locus (DP1 gene) mRNA; microtubule-associated protein 2; CDC5 (cell division cycle 5, S pombe, homolog)-like; Centromere autoantigen C (CENPC) mRNA; RNA guanylyltransferase and 5′-phosphatase; Nijmegen breakage syndrome 1 (nibrin); ribonuclease, RNase A family, 4; keratin 10 (epidermolytic hyperkeratosis; keratosis palmaris et plantaris); basic helix-loop-helix domain containing, class B, 2; dual specificity phosphatase 1; annexin A11; putative receptor protein; Human endogenous retrovirus HERV-K(HML6); mitogen-activated protein kinase kinase kinase 12; TXK tyrosine kinase; kynureninase (L-kynurenine hydrolase); ubiquitin specific protease 4 (proto-oncogene); peroxisome biogenesis factor 13; olfactory receptor, family 2, subfamily F, member 1; membrane protein, palmitoylated 3 (MAGUK p55 subfamily member 3); origin recognition complex, subunit I (yeast homolog)-like; dTDP-D-glucose 4,6-dehydratase; cytochrome c oxidase subunit VIa polypeptide 2; gamma-tubulin complex protein 2; Monocyte chemotactic protein-3; myelin transcription factor 1; inhibitor of growth family, member 1-like; thyroid hormone receptor, alpha myosin-binding protein C, slow-type; fragile X mental retardation 2; sonic hedgehog (Drosophila) homolog; 6-phosphofructo-2-kinase/fructose-2,6-biphosphatase 2; SFRS protein kinase 2; excision repair cross-complementing rodent repair deficiency; cyclin-dependent kinase 5, regulatory subunit 1 (p35); poly(A)-specific ribonuclease (deadenylation nuclease); solute carrier family 12 (potassium/chloride transporters), member 4; Pseudogene for metallothionein; natriuretic peptide precursor A; intercellular adhesion molecule 2; apoptosis antagonizing transcription factor; similar to rat HREV107; major histocompatibility complex, class II, DP beta 1; MpV17 transgene, murine homolog, glomerulosclerosis; uroporphyrinogen decarboxylase; proteasome (prosome, macropain) 26S subunit, ATPase, 1; fins-related tyrosine kinase 3 ligand; actin, gamma 1; Protein Kinase Pitslre, Alpha, Alt. Splice 1-Feb; nuclear factor of kappa light polypeptide gene enhancer in B-cells inhibitor, alpha; pyruvate kinase, muscle; telomeric repeat binding factor 2; cell division cycle 2, G1 to S and G2 to M; ADP-ribosylation factor 3; NRF1 Protein; H factor (complement)-like 3; serine (or cysteine) proteinase inhibitor, clade B (ovalbumin), member 6; mRNA of muscle specific gene M9; solute carrier family 25 (mitochondrial carrier; phosphate carrier), member 3; ribosomal protein L36a; suppressor of Ty (S. cerevisiae) 4 homolog 1; amino-terminal enhancer of split; ubiquitin A-52 residue ribosomal protein fusion product 1; hydroxyacyl-Coenzyme A dehydrogenase/3-ketoacyl-Coenzyme A thiolase; chaperonin containing TCP™, subunit 2 (beta); tyrosine kinase with immunoglobulin and epidermal growth factor homology; domains; Fc fragment of IgG, receptor, transporter, alpha; NRD1 convertase; ADP-ribosylation factor 5; transcription elongation factor A (SII), 1; like mouse brain protein E46; titin; fibromodulin; and Abi-interactor 2 (Abi-2).

[0110] In another embodiment of the array, the at least one polynucleotide includes at least one gene selected from the group consisting of CDKN1B, CDKN1C, CTGF, fibromodulin, and Abi-2.

[0111] In another embodiment of the array, the at least one polynucleotide includes at least one gene selected from the group consisting of IL-11, IL-13, EGR1, EGR2, EGR3, CITED2, P300, E2F1, E2F2, E2F3, E2F4, E2F5, MCP3, CXCL5, CCL7, SMAD3, TYMS, GT198, SMAD7, NCOR2, TIMP-1, and ADAM17.

[0112] In another embodiment of the array, the at least one polynucleotide includes at least one of those genes listed in Table 9.

[0113] In another embodiment of the array, the at least one polynucleotide includes at least one gene selected from the group consisting of stanniocalcin 2, interleukin 11, disintegrin and metalloproteinase domain 17, early growth response 3, fibromodulin, collagen type XVIII alpha 1, and interleukin 13.

[0114] In another embodiment of the array, the at least one polynucleotide includes a plurality of genes comprising stanniocalcin 2, interleukin 11, disintegrin and metalloproteinase domain 17, early growth response 3, fibromodulin, collagen type XVIII alpha 1, and interleukin 13.

[0115] In another embodiment of the array, the array further comprises a capture probe that can specifically bind at least one polynucleotide encoding a house-keeping gene as a control.

[0116] In another embodiment of the array, each of the addresses comprises a well, and each of the capture probes comprises a primer for amplifying RNA in a biological sample that is deposited in the well

[0117] In one embodiment, the capture probes are polynucleotides that hybridize to the differentially expressed polynucleotides under stringent conditions or mild conditions. In another embodiment of the array, each of the capture probes binds the polynucleotides (e.g., hybridizes with the polynucleotide along the full length of the polynucleotide or along substantially the full length of the polynucleotide) under stringent conditions. As used herein “stringent” conditions for hybridization refers to conditions which achieve the same, or about the same, degree of specificity of hybridization as the conditions employed by the current applicants. Specifically, hybridization of immobilized DNA on Southern blots with 32P-labeled gene-specific probes was performed by standard methods (Maniatis, T., E. F. Fritsch, J. Sambrook [1982] Molecular Cloning: A Laboratory Manual, Cold Spring Harbor Laboratory, Cold Spring Harbor, N.Y.). In general, hybridization and subsequent washes are carried out under stringent conditions that allow for hybridization of target sequences with homology to the capture probes. For double-stranded DNA gene probes, hybridization was carried out overnight at 20-25° C. below the melting temperature (Tm) of the DNA hybrid in 6×SSPE, 5×Denhardt's solution, 0.1% SDS, 0.1 mg/ml denatured DNA. The melting temperature is described by the following formula (Beltz, G. A., K. A. Jacobs, T. H. Eickbush, P. T. Cherbas, and F. C. Kafatos, Methods of Enzymology, 1983, R. Wu, L. Grossman and K. Moldave [eds.] Academic Press, New York 100:266-285).

[0118] Tm=81.5° C.+16.6 Log [Na+]+0.41(% G+C)−0.61(% formamide)−600/length of duplex in base pairs.

[0119] Washes are typically carried out as follows:

[0120] (1) Twice at room temperature for 15 minutes in 1×SSPE, 0.1% SDS (low stringency wash).

[0121] (2) Once at Tm-20° C. for 15 minutes in 0.2×SSPE, 0.1% SDS (moderate stringency wash).

[0122] For oligonucleotide probes, hybridization was carried out overnight at 10-20° C. below the melting temperature (Tm) of the hybrid in 6×SSPE, 5×Denhardt's solution, 0.1% SDS, 0.1 mg/ml denatured DNA. Tm for oligonucleotide probes can be determined by the “nearest-neighbor” method. See Breslauer et al., “Predicting DNA duplex stability from the base sequence,” Proc. Natl. Acad. Sci. USA, 83 (11): 3746-3750 (June 1986); Rychlik and Rhoads, “A computer program for choosing optimal oligonucleotides for filter hybridization, sequencing and in vitro amplification of DNA,” Nucleic Acids Res., 17 (21): 8543-8551 (Nov. 11, 1989); Santa Lucia et al., “Improved nearest-neighbor parameters for predicting DNA duplex stability,” Biochemistry 35 (11): 3555-3562 (Mar. 19, 1996); Doktycz et al., “Optical melting of 128 octamer DNA duplexes. Effects of base pair location and nearest neighbors on thermal stability,” J. Biol. Chem., 270 (15): 8439-8445 (Apr. 14, 1995). Alternatively, the Tm can be determined by the following formula:

[0123] Tm (° C.)=2(number T/A base pairs)+4(number G/C base pairs) (Suggs, S. V., T. Miyake, E. H. Kawashime, M. J. Johnson, K. Itakura, and R. B. Wallace [1981] ICN-UCLA Symp. Dev. Biol. Using Purified Genes, D. D. Brown [ed.], Academic Press, New York, 23:683-693).

[0124] Washes are typically carried out as follows:

[0125] (1) Twice at room temperature for 15 minutes 1×SSPE, 0.1% SDS (low stringency wash).

[0126] (2) Once at the hybridization temperature for 15 minutes in 1×SSPE, 0.1% SDS (moderate stringency wash).

[0127] In another embodiment of the array, each polynucleotide bound by the capture probe of each address is unique among the plurality of addresses.

[0128] In another embodiment of the array, the substrate has no more than 500 addresses.

[0129] In another embodiment of the array, the substrate has 200 to 500 addresses.

[0130] The substrate of the array of the invention can be any solid support suitable for disposing the capture probes, such as those materials known in the art used for fabrication of gene arrays and/or microfluidics. “Arraying” refers to the act of organizing or arranging members of a library, or other collection, into a logical or physical array. Thus, an “array” refers to a physical or logical arrangement of, e.g., library members (candidate agent libraries). A physical array can be any “spatial format” or physically gridded format” in which physical manifestations of corresponding library members are arranged in an ordered manner, lending itself to combinatorial screening. For example, samples corresponding to individual or pooled members of a candidate agent library or patient library can be arranged in a series of numbered rows and columns, e.g., on a multiwell plate. Similarly, capture probes can be plated or immobilized (in a lyophilized or other state) or otherwise deposited in microtitered, e.g., 96-well, 384-well, or -1536 well, plates (or trays).

[0131] A “solid support” (also referred to herein as a “solid substrate”) has a fixed organizational support matrix that preferably functions as an organization matrix, such as a microtiter tray. Solid support materials include, but are not limited to, glass, polacryloylmorpholide, silica, controlled pore glass (CPG), polystyrene, polystyrene/latex, polyethylene, polyamide, carboxyl modified teflon, nylon and nitrocellulose and metals and alloys such as gold, platinum and palladium. The solid support can be biological, non-biological, organic, inorganic, or a combination of any of these, existing as particles, strands, precipitates, gels, sheets, tubing, spheres, containers, capillaries, pads, slices, films, plates, slides, etc., depending upon the particular application. Other suitable solid substrate materials will be readily apparent to those of skill in the art. The surface of the solid substrate may contain reactive groups, such as carboxyl, amino, hydroxyl, thiol, or the like for the attachement of nucleic acids, proteins, etc. Surfaces on the solid substrate will sometimes, though not always, be composed of the same material as the substrate. Thus, the surface can be composed of any of a wide variety of materials, for example, polymers, plastics, resins, polysaccharides, silica or silica-based materials, carbon, metals, inorganic glasses, membranes, or any of the above-listed substrate materials.

[0132] In addition to standard gene arrays, such as the commercially available gene arrays described herein, micro fluidic cards (e.g., 7900 HT Micro Fluidic Card, APPLIED BIOSYSTEMS) may be used to profile gene expression using the comparative C_{T} method of relative quantification. Such cards are also contemplated in the arrays of the present invention. Microfluidic card experiments use a two-step RT-PCR process. In the reverse-transcription (RT) step, cDNA is reverse transcribed from total RNA samples using random primers from the high capacity cDNA archive kit. Additional details about the RT-PCR process are contained in the high capacity cDNA archive kit protocol (PN 4322169). In the PCR step, PCR products are synthesized from cDNA samples using the TAQMAN universal PCR master mix. The PCR step employs the 5′ nuclease assay, which is described in Appendix C of the user's guide for the 7900HT system. Relative gene expression values can be obtained from 7900HT system data using the comparative C_{T} method for relative quantification. In the comparative C_{T} method, quantity is expressed relative to a calibrator sample that is used as the basis for comparative results (see Applied Biosystems 7900HT Micro Fluidic Card Getting Started Guide, APPLIED BIOSYSTEMS, which is incorporated herein by reference in its entirety). Real-time quantitative gene expression results are available as soon as the thermal cycling process is complete.

[0133] All wells on the card are connected by a series of channels, and assays are loaded at the factory before shipping. The biological sample is combined with TAQMAN Universal PCR Master Mix and loaded into the card ports. The card may contain any number of wells, such as 96, 192, 384, 500, 1000, etc. Real-time performance can be obtained by using a micro fluidic card in a high throughput 384-well format, 2 microliter reaction volume, and eight loading ports. Briefly, sample (e.g., isolated RNA) is loaded into the micro fluidic card, the card is centrifuged to transfer mixes into the individual wells, and the card is sealed using a sealing device which individually seals each well to avoid diffusion and cross-talk. The sealed card is then ready for real-time PCR. The fill reservoirs are trimmed and the card is loaded on the 7900HT system for real-time PCR. The 384 well format provides configuration flexibility. For example, using one sample per micro fluidic card, 384 genes with single data points, or 96 genes with 4 replicates may be assayed. Using eight samples per micro fluidic card, 48 genes with single data points, 24 genes with 2 replicates, or 12 genes with 4 replicates may be assayed. Isolated RNA from tumor tissues, normal tissues, or cells can be injected into the card. The card can be divided into normal tissue and tumor tissue, for example. Using a 384 well format, 48 genes of four individuals (human or non-human animal subjects) with normal tissue and tumor tissue can be assayed.

[0134] The effects of test agents, such as TGF-beta receptor inhibitors (e.g., SB505124/SB431542), TGF-beta signaling inhibitors (halofuginone), and potential environment carcinogens or gene express can be determined using the method of the invention.

[0135] For differential expression analysis, it is preferable to include at least one house-keeping gene (as a control gene) whose expression should not change, such as GAPD (GenBank accession number NM_{—}002046), or other house-keeping genes described herein.

[0136] Table 9 lists genes that may be used on a micro fluidic card in accordance with the subject invention. For example, one or more genes from each category listed in Table 9 can be assayed for differential expression (e.g., cell adhesion molecule, extracellular matrix, kinase, oxidoreductase, protease, signaling molecule, transcription factor).

[0137] Optionally, once a test agent is identified as a modulator, the method of the invention may further include the step of manufacturing the identified modulator. The manufacturing step may involve synthesis of the modulator (e.g., if a small molecule) or genetic engineering, for example. Optionally, the manufacturing step may further comprise combining the manufactured modulator with another active substance and/or a pharmaceutically acceptable carrier or excipient, as a formulated composition.

[0138] As used herein, the terms “bind,” “binds,” or “interacts with” mean that one molecule recognizes and adheres to a particular second molecule in a sample, but does not substantially recognize or adhere to other structurally unrelated molecules in the sample. Generally, a first molecule that “specifically binds” a second molecule has a binding affinity greater than about 10⁵ to 10⁶ moles/liter for that second molecule.

[0139] By reference to an “antibody that specifically binds” another molecule is meant an antibody that binds the other molecule, and displays no substantial binding to other naturally occurring proteins other than those sharing the same antigenic determinants as other molecule. The term “antibody” includes polyclonal and monoclonal antibodies as well as antibody fragments or portions of immunolglobulin molecules that can specifically bind the same antigen as the intact antibody molecule.

[0140] As used herein, a “nucleic acid,” “nucleic acid molecule,” “oligonucleotide,” or “polynucleotide” means a chain of two or more nucleotides such as RNA (ribonucleic acid) and DNA (deoxyribonucleic acid).

[0141] The term “subject,” as used herein, means a human or non-human animal, including but not limited to mammals, such as a dog, cat, horse, cow, pig, sheep, goat, chicken, primate, rat, and mouse. In a preferred embodiment, the subject is female, such as a human female.

[0142] The term “differentially expressed gene”, as used herein, means a gene that is either over-expressed or underexpressed in fibrotic tissue (such as leiomyoma), compared to normal, non-fibrotic tissue. Accordingly, the method of treatment of the present invention is directed to upregulating the expression of one or more genes that are underexpressed in fibrotic tissue, or increasing the activity of the polypeptide encoded by the gene; and downregulating the expression of one or more genes that are overexpressed in fibrotic tissue, or decreasing the activity of the polypeptide encoded by the gene.

[0143] When referring to a differentially expressed gene, the phrase “modulates the expression of” means upregulates or downregulates the amount or functional activity of the gene, or otherwise modifies the activity of the gene product, e.g., the availability of the gene product to interact with a receptor.

[0144] The terms, “treat”, “treatment”, and “treating”, as used herein, are intended to include the prevention of a fibrotic disorder and partial or full alleviation of an existing fibrotic disorder within a human or non-human animal subject (e.g., a reduction in the severity of one or more symptoms associated with the fibrotic disorder). For example, treating a fibroid, such as a uterine fibroid, can include a reduction in the size of the fibroid and/or a reduction in the rate of the fibroid's growth.

### Materials and Methods

[0145] The following materials and methods describe those utilized in Examples 1-8.

[0146] Tissues. Portions of leiomyoma and matched myometrium were collected from premenopausal women (N=6) who were scheduled to undergo hysterectomy for indications related to symptomatic leiomyomas. Three of the patients received GnRHa therapy for three months prior to surgery. The untreated patients did not receive any medications (including hormonal therapy) during the previous 3 months prior to surgery, and based on endometrial histology and the patient's last menstrual period they were from early-mid secretory phase of the menstrual cycle. To maintain a standard, all leiomyomas selected for this study were between 2 to 3 cm in diameter. Following collection, the tissues were divided into several pieces and either immediately snap frozen and stored in liquid nitrogen for further processing, fixed and paraffin embedded for histological evaluation and immunohistochemistry, or used for isolation of leiomyoma and myometrial smooth muscle cells and culturing (Ding, L et al. J Clin Endocrinol Metab, 2004, 89:5549-5557; Xu, J et al. J Clin Endocrinol Metab, 2003, 88:1350-61). The tissues were collected at the University of Florida affiliated Shands Hospital with prior approval obtained from the Institutional Review Board.

[0147] Isolation and Culture of Leiomyoma and Myometrial Smooth Muscle Cells. To determine the direct action of GnRHa on global gene expression in leiomyoma and myometrial smooth muscle cells (LSMC and MSMC), the cells were isolated and cultured as previously described (Ding, L et al. J Clin Endocrinol Metab, 2004, 89:5549-5557; Chegini, N et al. Mol Hum Reprod, 2002, 8:1071-8). Only untreated tissues were used for isolation of LSMC and MSMC. Prior to use in these experiments, the primary cell cultures were seeded in 8-well culture slides (Nalge Nunc, Naperville, Ill.) and after 24 hours of culturing they were characterized using immunofluoroscence microscopy and antibodies to α smooth muscle actin, desmin and vimentin (Ding, L et al. J Clin Endocrinol Metab, 2004, 89:5549-5557; Xu, J et al. J Clin Endocrinol Metab, 2003, 88:1350-61). LSMC and MSMC were cultured in 6-well plates at an approximate density of 10⁶ cells/well in DMEM-supplemented media containing 10% FBS. After reaching visual confluence, the cells were washed in serum-free media and incubated for 24 hrs under serum-free, phenol red-free condition (Chegini, N et al. Mol Hum Reprod, 2002, 8:1071-8). The cells were then treated with 0.1 μM of GnRHa (leuprolide acetate, Sigma Chemical, St Louis, Mo.) for a period of 2, 6 and 12 hours (Ding, L et al. J Clin Endocrinol Metab, 2004, 89:5549-5557).

[0148] cDNA Microarray and Gene Expression Profiling. Total cellular RNA was isolated from the tissues and cells using Trizol (INVITROGEN, Carlsbad, Calif.). The isolated RNA was treated with DNase I (Roche, Molecular Biochemicals, Indianapolis, Ind.) at 1 unit/10 μg of RNA for 20 min at 25° C., heat-inactivated at 75° C. and subjected to further purification using RNeasy Kit (QIAGEN, Valencia, Calif.). The RNA was then subject to amplification by reverse transcription using SuperScript Choice system (Invitrogen), with final concentrations in 20 μl first-strand reaction of 100 μmol of high performance liquid chromatography-purified T7-(dT)24 primer (Genset Corp, La Jolla, Calif.), 8 μg of RNA, 1× first-strand buffer, 10 mM dithiothreitol, 500M of each dNTP, and 400 units of Superscript II reverse transcriptase (T7 Megascript kit; Ambion, Austin, Tex.). The second-strand cDNA synthesis was performed in a 150 μl reaction consisting of, at the final concentrations, 1× second-strand reaction buffer, 200 μM each dNTP, 10 units of DNA ligase, 40 units of DNA polymerase I, and 2 units of RNase H (INVITROGEN), and double-stranded cDNA was purified by phenol:chloroform extraction using phase lock gels (Eppendorf-5 Prime, Inc. Westbury, N.Y.) and an ethanol precipitation (Chegini, N et al. J Soc Gynecol Investig, 2003, 10:161-71).

[0149] Five micrograms of purified cDNA was reverse transcribed using Enzo BioArray high yield RNA transcript labeling kit (AFFYMETRIX, Santa Clara, Calif.) and the product was purified in RNeasy spin columns (QIAGEN) according to manufacture's instructions. Following an overnight ethanol precipitation, cRNA was re-suspended in 15 μl of diethyl pyrocarbonate-treated water (AMBION) and quantified using a Beckman DU530 Life Science UV-visible spectrophotometer. Following quantification of cRNA to reflect any carryover of unlabeled total RNA according to an equation given by Affymetrix (adjusted cRNA yield=cRNA (μg) measured after in vitro transcription (starting total RNA) (fraction of cDNA reaction used in in vitro transcription), 20 g of cRNA was fragmented (0.5 μg/μl) according to Affymetrix instructions using the 5× fragmentation buffer containing 200 mM Tris acetate, pH 8.1, 500 mM potassium acetate and 150 mM magnesium acetate (SIGMA Chemical, St. Louis, Mo.). 20 μg of the adjusted fragmented cRNA was added to a 300 μl of hybridization mixture containing at final concentrations 0.1 mg/ml herring sperm DNA (Promega/Fisher, Madison, Wis.), 0.5 mg/ml acetylated bovine serum albumin (INVITROGEN), and 2×MES hybridization buffer (Sigma). 200 μl of the mixture was hybridized to the human U95A Affymetrix GeneChip arrays, purchased at the same time from the same lot number and used within two weeks of purchase in order to maintain standard. In addition, an aliquot of random samples were first hybridized to an Affymetrix Test 2 Array to determine sample quality according to manufacturer's criteria. After meeting recommended criteria for use of the expression arrays, the hybridization was performed for 16 hrs at 45° C., followed by washing, staining, signal amplification with biotinylated anti-strepavidin antibody, and the final staining step according to manufactures protocol.

[0150] Microarray Data Analysis. The Chips were scanned to obtain the raw hybridization values using Affymetrix Genepix 5000A scanner. Difference in the levels of fluorescence spot intensities representing the rate of hybridization between the 25 basepair oligonucleotides and their mismatches were analyzed by multiple decision matrices to determine the presence or absence of gene expression, and to derive an average difference score representing the relative level of gene expression. The fluorescence spot intensities, qualities and local background were assessed automatically by Genepix software with a manual supervision to detect any inaccuracies in automated spot detection. Background and noise corrections were made to account for nonspecific hybridization and minor variations in hybridization conditions. The net hybridization values for each array were normalized using a global normalization method as previously described (Chegini, N et al. J Soc Gynecol Investig, 2003, 10:161-71). To identify the changes in pattern of gene expression, the average and standard deviation (SD) of the globally normalized values were calculated followed by subtraction of the mean value from each observation and division by the SD. The mean transformed expression value of each gene in the transformed data set was set at 0 and the SD at 1 (Chegini, N et al. J Soc Gynecol Investig, 2003, 10:161-71).

[0151] The transformed gene expression values were subjected to Affymetrix Analysis Suite V 5.0. Briefly, probe sets that were flagged as absent on all arrays using default settings were removed from the datasets. After application of this filtering, the dataset was reduced from 12,625 probe sets to 8580 probe sets. The gene expression value of the remaining probe sets was then subjected to unsupervised and supervised learning, discrimination analysis, and cross validation (Eisen, M B et al. Proc Natl Acad Sci USA, 1998, 95:14863-14868; Varela, J C et al. Invest Opthalmol V is Sci, 2002, 43:1772-1782; Tusher, V G et al. Proc Natl Acad Sci USA, 2001, 98:5116-5121; Pavlidis, P Methods, 2003, 31:282-289; Peterson, L E Comput Methods Programs Biomed, 2003, 70:107-19; Butte, A Nat Rev Drug Discov, 2002, 1:951-960). After variation filtering, the coefficient of variation was calculated for each probe set across all chips and the probe sets were ranked by the coefficient of variation of the observed single intensities. The expression values of the selected genes were then subjected to R programming analysis that assesses multiple test correction to identify statistically significant gene expression values (Pavlidis, P Methods, 2003, 31:282-289; Peterson, L E Comput Methods Programs Biomed, 2003, 70:107-19; Butte, A Nat Rev Drug Discov, 2002, 1:951-960). The gene expression values having a statistical significance of p≦0.02 (ANOVA, Tukey test) between leiomyoma and myometrium from GnRH-treated and untreated cohorts, and p≦0.005 between GnRHa-treated and untreated cells (control) were selected. The validity of gene sets identified at these p values in predicting treatment class was established using “leave-one-out” cross validation where the data from one array was left out of the training set and probe sets with differential hybridization signal intensities were identified from the remaining arrays (Varela, J C et al. Invest Opthalmol V is Sci, 2002, 43:1772-1782; Butte, A Nat Rev Drug Discov, 2002, 1:951-960). Hierarchical clustering and K-means analysis was performed and viewed with the algorithms in the software packages Cluster and TreeView (Eisen, M B et al. Proc Natl Acad Sci USA, 1998, 95:14863-14868).

[0152] Gene Classification and Ontology Assessment. The selected differentially expressed and regulated genes in the above cohorts were subjected to functional annotation and visualization using Database for Annotation, Visualization, and Integrated Discovery (DAVID) software (Dennis G Jr. et al., DAVID: Database for Annotation, Visualization, and Integrated Discovery, Genome Biology, 2003; 4(5):P3; Hosack D. A. et al., Glynn Dennis Jr, Brad T Sherman, HClifford Lane, Richard A Lempicki. Identifying Biological Themes within Lists of Genes with EASE, Genome Biology, 2003, 4(6):P4). The integrated GoCharts assigns genes to specific ontology functional categories based on selected classifications, KeggCharts assigns genes to KEGG metabolic processes and context of biochemical pathway maps, and DomainCharts assigning genes according to PFAM conserved protein domains.

[0153] Quantitative RealTime PCR. Realtime PCR was utilized for verification of 10 differentially expressed and regulated genes identified in leiomyoma and myometrium as well as LSMC and MSMC from untreated and GnRHa-treated cohorts. The selection of these genes was based not only on their expression values (up or downregulation), but classification and biological functions important to leiomyoma growth and regression, regulation by ovarian steroids, GnRHa and TGF-β. They are IL-11, CITED2, Nur77, EGR3, TGIF, TIEG, p27, p57, GAS-1 and GPRK5 representing cytokines, transcription factors, cell cycle regulators and signal transduction. Realtime PCR was carried out as previously described using Taqman and ABI-Prism 7700 Sequence System and Sequence Detection System 1.6 software (Ding, L et al. J Clin Endocrinol Metab, 2004, 89:5549-5557). Results were analyzed using the comparative method and following normalization of expression values to the 18S rRNA expression according to the manufacturer's guidelines (Applied Biosystems) as previously described (Ding, L et al. J Clin Endocrinol Metab, 2004, 89:5549-5557).

[0154] Western Blot Analysis and Immunohistochemical Localization. For immunoblotting, total protein was isolated from small portions of GnRHa-treated and untreated leiomyoma and myometrium as well as the GnRHa-treated and untreated cells as previously described (Ding, L et al. J Clin Endocrinol Metab, 2004, 89:5549-5557; Chegini, N et al. Mol Cell Endocrinol, 2003, 209:9-16). Following determination of the tissue homogenates and cell lysates protein content an equal amount of sample proteins were subjected to SDS-PAGE and transferred to polyvinyldiene difluoride (PVDF) membrane. The blots were incubated with anti-TIEG antibody, kindly provided by Dr. Thomas Spelsberg, Department of Biochemistry, Mayo Clinic, Rochester, Minn. (Johnsen, S A et al. Oncogene, 2002, 21:5783-90), TGIF, EGR3, p27, p57, Nur77 and Gas1 antibodies purchased from Santa Cruz Biochemical (Santa Cruz, Calif.), IL-11 antibodies purchased from R & D system (Minneapolis, Minn.) for 1 hr at room temperature. The membranes were washed, exposed to corresponding HRP-conjugated IgG for 1 hr and immunostained proteins were visualized using enhanced chemiluminesence reagents (Amersham-Pharmacia Biotech, Piscataway, N.J.) as previously described (Ding, L et al. J Clin Endocrinol Metab, 2004, 89:5549-5557; Chegini, N et al. Mol Cell Endocrinol, 2003, 209:9-16; Xu, J et al. J Clin Endocrinol Metab, 2003, 88:1350-61).

[0155] For immunohistochemical localization, tissue sections were prepared from formalin-fixed and paraffin embedded leiomyoma and myometrium. Tissue sections were microwave prior to immunostaining using antibodies to IL-11, TGIF, TIEG, EGR3, Nur77, p27, p57 and Gas1. The antibodies were used at concentrations of 5 μg of IgG/ml for 2-3 hours at room temperature. Following further processing including incubation with biotinylated secondary antibodies and avidin-conjugated HRP (ABC ELITE kit, VECTOR Laboratories, Burlingame, Calif.), the chromogenic reaction was detected with 3,3′-diaminobenzidine tetrahydrochloride solution. In some instances the slides were counter stained with hematoxylin. Omission of primary antibodies or incubation of tissue sections with non-immune mouse IgG instead of primary antibodies at the same concentration during immunostaining served as controls (Ding, L et al. J Clin Endocrinol Metab, 2004, 89:5549-5557; Chegini, N et al. Mol Cell Endocrinol, 2003, 209:9-16; Xu, J et al. J Clin Endocrinol Metab, 2003, 88:1350-61).

[0156] Determination of TGF-β1 on global gene expression in LSMC and MSMC. All the materials utilized for this study including isolation of leiomyoma and myometrial cells are identical to those described in detail above. To determine the effect of TGF-β1 on global gene expression in LSMC and MSMC, the cells were cultured in 6-well plates at approximate density of 10⁶ cells/well in DMEM-supplemented media containing 10% FBS. After reaching visual confluence the cells were washed in serum-free media and incubated for 24 hrs under serum-free, phenol red-free condition (Xu, J et al. J Clin Endocrinol Metab, 2003, 88:1350-1361; Ding, L. et al. J Clin Endocrinol Metab, 2004, 89:5549-5557). The cells were then treated with 2.5 ng/ml of TGF-β1 (R & D System, Minneapolis, Mich.) for 2, 6 and 12 hours. To further profile the autocrine/paracrine action of TGF-β1 on gene expression in LSMC and MSMC, the cells were cultured as above and treated with 1 μM of TGF-β type II receptor antisense or sense oligonucleotides for 24 hours as previously described (Xu, J et al. J Clin Endocrinol Metab, 2003, 88:1350-1361; Ding, L. et al. J Clin Endocrinol Metab, 2004, 89:5549-5557). The cells were washed and then treated with TGF-β1 (2.5 ng/ml) for 2 hours. Parallel experiments using untreated cells were used as controls including an additional control for TGF-β type II receptor antisense and sense experiments.

[0157] Total cellular RNA was isolated from LSMC- and MSMC-treated and untreated controls and subjected to microarray analysis. To maintain standard and allow for comparative analysis, the GeneChips used in this study were utilized, simultaneously processed and their gene expression values were subjected to global normalization and transformation. Following these unsupervised assessments the coefficient of variation was calculated for each probe set across all the chips used in this study, and the selected gene expression values of this study were independently subjected to supervised learning including R programming analysis and ANOVA with false discovery rate selected at p<0.001 (Moustakas, A. Immunol Lett, 2002, 82:85-91; Verrecchia, F. et al. J Biol Chem, 2001, 276:17058-17062). The genes identified in these cohorts were analyzed for functional annotation and visualized using Database for Annotation, Visualization, and Integrated Discovery (DAVID) software with integrated GoCharts. Following the analysis, we selected 12 of the differentially expressed and regulated genes, including 10 identified and validated in leiomyoma and myometrium from untreated and GnRHa-treated cohorts, as well as LSMC and MSMC treated in vitro with GnRHa, for validation in response to TGF-β-time dependent action using Realtime PCR. They include IL-11, EGR3, CITED2, TIEG, TGIF, Nur77, p27, p57, GAS-1 and GPRK5. In addition, the expression of Runx1 and Runx2, transcription factors that interact with TGF-β receptor signaling pathways (Zavadil, J. et al. Proc Natl Acad Sci USA, 2001, 98:6686-6691), was validated in LSMC and MSMC as well as in leiomyoma and myometrium from GnRHa-treated and untreated cohorts. Detail description of the materials and methods for Realtime PCR as well as data analysis is provided in Chegini, N. et al. J Soc Gynecol Investig, 2003, 10:161-71.

### EXAMPLE 1

### Gene Expression Profiles in Leiomyoma and Normal Myometrium

[0158] Global gene expression profiling has been instrumental in identifying the molecular environment of tissues with respect to fingerprints of their physiological and pathological behavior, and in vitro cellular responses to various regulatory molecules. The present inventors used this approach and characterized the gene expression profile of leiomyoma and matched myometrium, and their transcriptional changes in response to hormonal transition induced by GnRHa therapy. The initial assessment of the gene expression values in leiomyoma, myometrium and their isolated smooth muscle cells from untreated as well as GnRHa- and TGF-β-treated cohorts revealed a uniform expression of transcripts for the housekeeping genes glyceraldehyde-3-phosphate dehydrogenase, α-actin and a large number of ribosomal proteins, indicating that the expression profile is consistent with established standards for gene expression analysis. Following global normalization and transformation of the gene expression values, supervised learning, discrimination analysis, cross validation and variation filtering, the gene expression values were subjected to R programming analysis and ANOVA with false discovery rate selected at p≦0.02.

[0159] Using the above analysis, the present inventors identified a total of 153 genes, including 19 EST, or 1.23% of the genes, and 122 genes including 21 EST or 0.98% of the genes on the array, as differentially expressed in leiomyoma compared to matched myometrium from untreated and GnRHa-treated tissues, respectively. Hierarchical clustering and Tree-View analysis separated the genes in each cohort into distinctive clusters with sufficient variability allowing division into their respective subgroups. Of the 153 (excluding 19 EST) differentially expressed genes in untreated cohorts, 82 were upregulated and 52 downregulated in leiomyoma compared to myometrium (Table 1). Of the 122 genes (excluding 21 EST) in leiomyoma and myometrium from patients who received GnRHa therapy, 34 transcripts were upregulated and 67 downregulated, in leiomyoma compared to myometrium, respectively (Table 2). Analysis of the variance-normalized mean (K-means) separated the differentially expressed and regulated genes in these cohorts into 4 distinctive clusters, with genes in clusters A and D displaying a tissue-specific response, while genes in cluster B and C showing regulatory response to GnRHa therapy. To further characterize the molecular environment of leiomyoma from myometrium and their response to GnRHa therapy, we compared the gene expression profiles in GnRHa-treated with corresponding untreated tissues. The analysis indicated that the expression of 170 (excluding 26 EST) and 167 (excluding 31 EST) genes are targeted by GnRHa therapy in leiomyoma and myometrium, compared to their respective untreated cohorts (Tables 3 and 4). Of these genes, 96 and 89 transcripts were downregulated in leiomyoma and myometrium, respectively, due to GnRHa therapy, compared to their respective untreated tissues, with 3 transcripts were commonly found among the tissues in these cohorts, with different regulatory pattern of expression (compare Tables 3 and 4).

[0160] Table 1 is a categorical list of differentially expressed genes identified in leiomyoma compared to matched myometrium. The genes were identified following unsupervised and supervised analysis of their expression values and subjected to R programming environment and ANOVA with a false-discovery rate of rate of p≦0.02 as described in materials and methods. Of the 153 genes identified as differentially expressed, 82 genes were up (+) and 52 genes were downregulated (−) in leiomyoma compared to myometrium excluding 19 EST.

[0161] Table 2 is a categorical list of differentially expressed genes identified in leiomyoma compared to myometrium in response to GnRHa therapy. The genes were identified following unsupervised and supervised analysis of their expression values and statistical analysis in R programming environment and ANOVA with a false-discovery rate selected at p≦0.02. Of the 122 genes identified, the expression of 34 genes was up (+) and 67 gene downregulated (−) in GnRH-treated leiomyoma (LYM) compared to myometrium (MYM) excluding 21 EST).

[0162] Table 3 is a categorical list of differentially expressed genes identified in leiomyoma from GnRHa-treated compared to untreated leiomyoma. The genes were identified following unsupervised and supervised analysis of their expression values and statistical analysis in R programming environment and ANOVA with a false-discovery rate selected at p≦0.02. Of the 170 genes identified, the expression of 74 genes was up (+) and 96 genes downregulated (−) in GnRH-treated compared to untreated leiomyoma (LMY) excluding 26 EST.

[0163] Table 4 is a categorical list of differentially expressed genes identified in myometrium from GnRHa-treated compared to untreated myometrium. The genes were identified following unsupervised and supervised analysis of their expression values and statistical analysis in R programming environment and ANOVA with a false-discovery rate selected at p≦0.02. Of the 167 genes identified, the expression of 47 genes was up (+) and 89 genes downregulated (−) in GnRH-treated compared to untreated myometrium (MYM) excluding 31 EST.

[0164] A few microarray studies have reported the gene expression profile of leiomyoma and myometrium (Tsibris, J C M et al. Fertil Steril, 2002, 78:114-121; Chegini, N et al. J Soc Gynecol Investig, 2003, 10:161-71; Wang, H et al. Fertil Steril, 2003, 80:266-76; Weston, G et al. Mol Hum Reprod, 2003, 9:541-9; Ahn, W S et al. Int J Exp Pathol, 2003, 84:267-79; Quade, B J et al. Genes Chromosomes Cancer, 2004, 40:97-108). The present inventors performed a comparative analysis using the differentially expressed genes identified in the untreated leiomyoma and matched myometrium of this study, with the list of genes reported in four of the other studies, searching for a set of commonly expressed genes. The comparison identified 2 genes in this study in common with at least one of the other studies. However, lowering the false discover rate to p≦0.05 enabled the identification of a larger number of genes (422 including 49 EST), of which 11 transcripts were found in common with other studies (Table 5).

[0165] Table 5 is a list of the common genes found in this study of leiomyoma and matched myometrium from early-med secretory phase of the menstrual cycle following unsupervised and supervised analysis of their expression values and statistical analysis in R programming environment and ANOVA with a false-discovery rate selected at p≦0.05 to allow comparison with the results of four other microarray studies utilizing leiomyoma and myometrium from proliferative and secretory phases of the menstrual cycle.

[0166] Gene ontology assessment and division of differentially expressed genes into similar functional categories indicated that the products of a large percentage of these genes (40% to 67%), in leiomyoma and myometrium from both GnRHa treated and untreated cohorts, are involved in metabolic processes, catalytic activities, binding, signal transduction, transcriptional and translational activities, cell cycle regulation, cell and tissue structure, etc. (Tables 1-4). In addition, 15% to 23% of the genes were either functionally unclassified, or their roles in biological process are still unknown.

### EXAMPLE 2

### Time-Dependent Action of GnRHa on Gene Expression Profile of Leiomyoma and Myometrial Smooth Muscle Cells (LSMC and MSMC)

[0167] Leiomyoma and myometrium and their smooth muscle cells (LSMC and MSMC) express GnRH and GnRH receptors, and GnRH through the activation of specific signal transduction pathways results in transcriptional regulation of several genes downstream from these signals in LSMC and MSMC (Ding, L et al. J Clin Endocrinol Metab, 2004, 89:5549-5557; Chegini, N et al. Mol Cell Endocrinol, 2003, 209:9-16; Xu, J et al. J Clin Endocrinol Metab, 2003, 88:1350-61. To obtain a comprehensive picture of transcriptional changes induced by GnRHa direct action in leiomyoma and myometrium, we isolated LSMC and MSMC from the untreated cohorts. The serum starved LSMC and MSMC were treated with GnRHa (0.1 μM) for 2, 6 and 12 hours and their isolated RNA was subjected to microarray analysis. Based on the same data analysis criteria described above with a false discovery rate of p≦0.005, we identified 281 genes including 36 EST or 2.2% of the genes on the array displaying differential expression and regulation in LSMC and MSMC in response to GnRHa treatment in a time-dependent manner compared to untreated controls. Hierarchical clustering analysis also separated these genes into different clusters in response to time-dependent action of GnRHa in LSMC and MSMC, with expression patterns sufficiently different to cluster into their respective subgroups. Analysis of the variance-normalized mean (K-means) separated the differentially expressed and regulated genes in these cohorts into 4 distinctive clusters, with genes in clusters A and D displaying a cell-specific response, while genes in cluster B and C showing regulatory behaviors to GnRHa time-dependent action. Among the differentially expressed and regulated genes, the transcripts of 48 genes were identified as commonly expressed in LSMC and the original tissues (leiomyoma) from the untreated cohort used (Table 6).

[0168] Table 6 is a categorical list of differentially expressed genes in leiomyoma from GnRHa treated and LSMC treated with GnRHa for 2, 6 and 12 hours. The genes were identified following unsupervised and supervised analysis of their expression values and statistical analysis in R programming environment and ANOVA with a false-discovery rate selected at p≦0.005. Of the 130 genes identified, the expression of 34 genes was up-(+) and 96 genes downregulated (−) excluding 26 EST.

[0169] Gene ontology and functional annotation of the differentially expressed and regulated genes into similar functional categories indicated that in LSMC and MSMC, similar to their original tissues, the majority of the gene products are involved in cellular processes, catalytic activities, binding, signal transduction, transcriptional and translational activities, metabolism, cell cycle regulation and cellular structure. The time-dependent action of GnRHa on the expression of a selective group of genes representing growth factors/cytokines/chemokines/receptors, intracellular signal transduction pathways, transcription factors, cell cycle, cell adhesion/receptor/ECM/cytoskeleton in LSMC and MSMC are shown in FIGS. 1A-1J.

### EXAMPLE 3

### Verification of Gene Transcripts in Leiomyoma, Myometrium and LSMC and MSMC

[0170] Among the differentially expressed and regulated genes identified in these tissues and cells, we selected 10 genes for verification using Realtime PCR, western blotting and immunohistochemistry. The selection of these genes was based not only on their expression values (up or downregulated), but also on gene classification, biological functions important to leiomyoma growth and regression, and regulation by ovarian steroids, GnRH and TGF-β. The genes selected for validation were IL-11, CITED2, Nur77, EGR3, TGIF, TIEG, CDKN1B (p27), CDKN1C (p57), GAS-1 and GPRK5, representing cytokines, transcription factors, cell cycle regulators, and signal transduction. The pattern of expression of these genes in leiomyoma and myometrium from untreated and GnRHa-treated cohorts (FIGS. 2A-2J), as well as in LSMC and MSMC treated with GnRHa for 2, 6 and 12 hours (FIGS. 3A-3T) as determined by Realtime PCR, closely overlapped with their expression profiles identified by the microarray analysis.

[0171] Western blotting also indicated that leiomyoma and myometrium, as well as LSMC and MSMC locally produce IL-11, TGIF, TIEG, Nur77, EGR3, CITED2, p27, p57 and Gas1 proteins. Immunohistochemically, IL-11, TGIF, TIEG, Nur77, EGR3, CITED2, p27, p57 and Gas1 were localized in various cell types in leiomyoma and myometrium, including LSMC and MSMC (FIGS. 4A-4E). The present inventors did not have access to antibody to GPRK5 and have not yet attempted to quantitate the level of IL-11, TGIF, TIEG, Nur77, EGR3, CITED2, p27, p57 and Gas1 production in leiomyoma and myometrium as well as in LSMC and MSMC in response to GnRHa treatment. However, these results provided further support for the microarray and Realtime PCR data, indicating that various cells types contribute to overall expression of these genes in leiomyoma and myometrium. In addition to these genes, the expression of 15 more genes was validated with Realtime PCR including CTGF, Abl-interactor 2 (Abi2), fibromodulin, Runx1 and Runx2 (Levens, E et al. “Differential Expression of fibromodulin and Abl-interactor 2 in leiomyoma and myometrium and regulation by gonadotropin releasing hormone analogue (GnRHa) therapy” Fertil Steril, 2004, (In press)).

[0172] Uterine leiomyoma affect 30 to 35% of women during their reproductive years and up to 70 to 80% before menopause (Baird, D D et al. Am. J Obstet Gynecol, 2003, 188: 100-107). The etiology of leiomyoma remains unknown, however they are thought to derive from the transformation of MSMC and/or connective tissue fibroblasts, and display high sensitivity to ovarian steroids for their growth. For this reason, GnRHa therapy is often used for medical management of symptomatic leiomyomas. In addition to GnRHa therapy, clinical and preclinical assessments of selective estrogen and progesterone receptor modulators, either alone, or in combination with GnRHa therapy, have shown efficacy in leiomyoma regression (Steinauer, J et al. Obstet Gynecol, 2004, 103:1331-6; Palomba, S et al. Hum Reprod, 2002, 17:3213-3219; DeManno, D et al. Steroids, 2003, 68:1019-32). Despite their prevalence and the efficacy of these therapies for their medical management, the molecular environment differentiating leiomyoma from adjacent myometrium, and their response to the above therapies is unknown. In the present study, the present inventors characterized gene expression fingerprints of leiomyoma and matched myometrium from the early-mid secretory phase of the menstrual cycle, a period associated with their rapid growth, their response to hormonal transition induced by GnRHa therapy, and to direct action of GnRHa in isolated LSMC and MSMC prepared from the untreated tissues.

[0173] Combining global normalization and unsupervised assessment of the gene expression values derived from all the cohorts enabled us to sort potential candidate genes prior to their putative identification in each cohort. Transcripts of many of the genes on the array were found in leiomyoma and myometrium as well as in LSMC and MSMC. However, leiomyoma/LSMC were not distinguished as a single class from myometrium/MSMC based on single gene markers uniformly expressed only in leiomyoma and/or myometrium. This is not unique to leiomyoma/myometrium since many large-scale gene expression profiling studies have shown the existence of a significant degree of shared gene expression between various tumors and their normal tissue counterparts. However, supervised assessment and multiple test correction in R programming environment (Tusher, V G et al. Proc Natl Acad Sci USA, 2001, 98:5116-5121; Pavlidis, P Methods, 2003, 31:282-289; Peterson, L E Comput Method is Programs Biomed, 2003, 70:107-19; Butte, A Nat Rev Drug Discov, 2002, 1:951-960) with reduced false discovery rate, allowed the identification of a specific set of differentially expressed and regulated genes in descending order of significance in each cohort. The analysis separated these genes into several clusters with a sufficient difference allowing their subdivision into their respective subgroup in leiomyoma, myometrium, their isolated cells, as well as due to GnRHa therapy at the tissue and cellular levels. We identified 153 genes (excluding 19 EST) in these cultures as differentially expressed in leiomyoma compared to myometrium, of which 82 genes were upregulated and 52 downregulated in leiomyoma. GnRHa therapy affected the expression of 122 genes (excluding 21 EST), with 34 upregulated and 67 downregulated genes in leiomyoma compared to myometrium. However, their gene profiles in untreated and GnRHa treated leiomyoma/myometrium differed substantially, pointing out a unique molecular environment that is targeted by GnRHa therapy. Analysis of the variance-normalized mean gene expression values divided these genes into 4 clusters with two clusters showing treatment-specific, while other clusters displayed a tissue-specific response to GnRHa therapy. A similar behavior was also observed with gene clusters identified in LSMC and MSMC in response to GnRHa action in vitro. The significance of these findings are related to clinical observations indicating that GnRHa therapy affects both leiomyoma and myometrium, with non-myoma tissue regressing more in response to therapy (Carr, B R et al. J Clin Endocrinol Metab, 1993, 76:1217-1223). The gene expression profiling disclosed herein supports the clinical observations, and further points out that GnRHa therapy targets different genes in leiomyoma and myometrium although they may group in a similar functional category. The recent microarray study using a small-scale array containing probe sets of 1200 known genes (Chegini, N et al. J Soc Gynecol Investig, 2003, 10:161-71) provides support for the current study; however, the present inventors are not aware of any other study using a large-scale gene expression profiling in leiomyoma and myometrium from women who received GnRHa therapy for further comparison.

[0174] Since this study was completed, a few other microarray studies have reported the gene expression profiles of leiomyoma and myometrium from the proliferative and secretory phases of the menstrual cycle (Tsibris, J C M et al. Fertil Steril, 2002, 78:114-121; Wang, H et al. Fertil Steril, 2003, 80:266-76; Weston, G et al. Mol Hum Reprod, 2003, 9:541-9; Quade, B J et al. Genes Chromosomes Cancer, 2004, 40:97-108). To broaden the scope of this study, the present inventors compared the genes list identified in untreated leiomyoma and matched myometrium of the present study, with the data sets reported in four of these other studies (Tsibris, J C M et al. Fertil Steril, 2002, 78:114-121; Wang, H et al. Fertil Steril, 2003, 80:266-76; Weston, G et al. Mol Hum Reprod, 2003, 9:541-9; Quade, B J et al. Genes Chromosomes Cancer, 2004, 40:97-108). This comparison resulted in identification of only a few genes in common among these studies. Although intrinsic individual tissue variation may contribute toward differences among these studies, standard of experimental process, utilization of different microarry platforms, utilization of tissues from different phases of the menstrual cycle, differences of leiomyoma size, and most importantly the method of data acquisition and analysis (Tsibris, J C M et al. Fertil Steril, 2002, 78:114-121; Wang, H et al. Fertil Steril, 2003, 80:266-76; Weston, G et al. Mol Hum Reprod, 2003, 9:541-9; Quade, B J et al. Genes Chromosomes Cancer, 2004, 40:97-108) are among other key contributing factors accounting for different study results (Pavlidis, P Methods, 2003, 31:282-289; Peterson, L E Comput Methods Programs Biomed, 2003, 70:107-19; Butte, A Nat Rev Drug Discov, 2002 1:951-960). To maintain a standard, the present inventors used leiomyoma of uniform sizes (2-3 cm in diameters) and matched myometrium, and the untreated cohorts were collected from the early-mid secretory phase of the menstrual cycle, a period associated with leiomyoma maximum growth. However, lowering the false discovery rate of the present study allowed the identification of more transcripts and the appearance of additional common genes with other studies (see Table 5; Refs. Tsibris, J C M et al. Fertil Steril, 2002, 78:114-121; Wang, H et al. Fertil Steril, 2003, 80:266-76; Weston, G et al. Mol Hum Reprod, 2003, 9:541-9; Quade, B J et al. Genes Chromosomes Cancer, 2004, 40:97-108). Considering the presence of a large number of probe sets on these arrays (i.e. 6800-12,500), selection of genes based only on fold change (Tsibris, J C M et al. Fertil Steril, 2002), or higher statistical levels (Wang, H et al. Fertil Steril, 2003, 80:266-76; Weston, G et al. Mol Hum Reprod, 2003, 9:541-9; Ahn, W S et al. Int J Exp Pathol, 2003, 84:267-79; Quade, B J et al. Genes Chromosomes Cancer, 2004, 40:97-108) is no better than what one would expect by chance alone (Pavlidis, P Methods, 2003, 31:282-289; Peterson, L E Comput Methods Programs Biomed, 2003, 70:107-19; Butte, A Nat Rev Drug Discov, 2002 1:951-960). Since the present inventors employed a similar data analysis, a larger number of genes was found in common with our previous microarray study which used only a small-scale array containing about 1200 known genes (Chegini, N et al. et al. J Soc Gynecol Investig, 2003, 10:161-71). The present inventors recognize that exclusion of moderately regulated genes during microarray data analysis does not reflect lack of functional importance, since a number of genes previously identified in leiomyoma and myometrium by conventional methods are not included among the differentially expressed genes in our study and other reports (Chegini, N Implication of growth factor and cytokine networks in leiomyomas. In; Cytokines in human reproduction. J. Hill ed. New York, Wiley & Sons Publisher, 2000, 133-162; Maruo, T et al. Hum Reprod Update, 2004, 10:207-20; Tsibris, J C M et al. Fertil Steril, 2002, 78:114-121; Chegini, N et al. J Soc Gynecol Investig, 2003, 10:161-71; Wang, H et al. Fertil Steril, 2003, 80:266-76; Weston, G et al. Mol Hum Reprod, 2003, 9:541-9; Ahn, W S et al. Int J Exp Pathol, 2003, 84:267-79; Quade, B J et al. Genes Chromosomes Cancer, 2004, 40:97-108). However, the expression of newly identified genes requires verification, and their regulation would allow linking their potential biological functions in leiomyoma growth and regression.

[0175] GnRHa therapy and most recently SERM and SPRM have been utilized for medical management of leiomyoma (Takeuchi, H et al. J Obstet Gynaecol Res, 2000, 26:325-331; Steinauer, J et al. Obstet Gynecol, 2004, 103:1331-6; Palomba, S et al. Hum Reprod, 2002, 17:3213-3219; DeManno, D et al. Steroids, 2003, 68:1019-32; Carr, B R et al. J Clin Endocrinol Metab, 1993, 76:1217-1223). Unlike SERM and SPRM that act directly on estrogen/progesterone sensitive tissues such as the uterus (Palomba, S et al. Hum Reprod, 2002, 17:3213-3219; DeManno, D et al. Steroids, 2003, 68:1019-32), GnRHa is traditionally believed to act primarily at the level of the pituitary-gonadal axis to implement its therapeutic benefits (Klausen, C et al. Prog Brain Res, 2002, 141:111-128). However, identification of GnRH and GnRH receptors in several peripheral tissues, including leiomyoma, has led the present inventors to propose an autocrine/paracrine role for GnRH, and an additional site of action for GnRHa therapy (Chegini, N et al. J Clin Endocrinol Metab, 1996, 81:3215-3221; Ding, L et al. J Clin Endocrinol Metab, 2004, 89:5549-5557; Chegini, N et al. Mol Cell Endocrinol, 2003, 209:9-16; Xu, J et al. J Clin Endocrinol Metab, 2003, 88:1350-61). In vitro studies have provided evidence for direct action of GnRHa on several cell types derived from these tissues resulting in alterations of a wide range of cellular activities, including cell growth, apoptosis and gene expression (Ding, L et al. J Clin Endocrinol Metab, 2004, 89:5549-5557; Chegini, N et al. Mol Cell Endocrinol, 2003, 209:9-16; Xu, J et al. J Clin Endocrinol Metab, 2003, 88:1350-61; Chegini, N and Kornberg, L J Soc Gynecol Investig, 2003, 10:21-6; Chegini, N et al. Mol Hum Reprod, 2002, 8:1071-8; Klausen, C et al. Prog Brain Res, 2002, 141:111-128; Mizutani, T et al. J Clin Endocrinol Metab, 1998, 83:1253-1255). Using isolated LSMC and MSMC prepared from the untreated tissues allowed the present inventors to identify novel regulatory functions for GnRHa in leiomyoma and myometrium, and discover a wide range of genes whose expression has not previously been recognized to be the target of GnRHa direct action. Similar to their distinct clustering at tissue levels, the differentially expressed and regulated genes identified in LSMC and MSMC were also divided into clusters according to time-dependent response to GnRHa action. The genes in these clusters were either rapidly induced by GnRHa treatment, or required prolong exposure, while others displayed biphasic patterns of temporal regulation in both treatment- and cell-specific fashions. Despite differences in their profiles, substantial similarity existed in functional grouping of the genes affected by GnRHa therapy in leiomyoma/myometrium, and GnRHa direct action on LSMC/MSMC (in vitro), with the expression of 48 genes commonly identified in tissues and cells. The present inventors propose that the hypoestrogenic condition created by GnRHa therapy and contributions of other cell types to overall gene expression at the tissue level may account for the difference in profiles of gene expression between tissues and cell cultures. Gene ontology and division into similar functional categories indicated that the products of the majority of the genes in these clusters are involved in transcriptional and signal transduction activities, cell cycle regulation, extracellular matrix turnover, cell-cell communication, transport and enzyme regulatory activities.

[0176] Among the genes in these functional categories are several growth factors, cytokines and chemokines, and polypeptide hormones, identified as differentially expressed in leiomyoma, myometrium and their isolated smooth muscle cells, and were the target of GnRHa action in vivo and in vitro. Using several conventional methods, previous reports have documented the expression of PDGF, EGF, IGFs, VEGF, FGF, TGF-βs, CTGF, TNF-α, IFN-γ, MCP-1 and IL-8 as well as some of their receptors in leiomyoma and myometrium (Chegini, N “Implication of growth factor and cytokine networks in leiomyomas” In Cytokines in human reproduction. J. Hill ed. New York, Wiley & Sons Publisher, 2000; Maruo, T et al. Hum Reprod Update, 2004, 10:207-20; Ding, L et al. J Clin Endocrinol Metab, 2004, 89:5549-5557; Chegini, N et al. Mol Cell Endocrinol, 2003, 209:9-16; Chegini, N et al. Mol Hum Reprod, 2002, 8:1071-8; Wu, X et al. Acta Obstet Gynecol Scand, 2001, 80:497-504; Senturk, L M et al. Am J Obstet Gynecol, 2001, 184:559-566; Sozen, I et al. Fertil Steril, 1998, 69:1095-1102). However, the expression of some of these and other genes in this category did not meet the selection criteria of this study, a common discrepancy often observed in microarray analysis, particularly in identifying moderately expressed and regulated genes (Varela, J C et al. Invest Opthalmol V is Sci, 2002, 43:1772-1782; Tusher, V G et al. Proc Natl Acad Sci USA, 2001, 98:5116-5121; Pavlidis, P Methods, 2003, 31:282-289; Peterson, L E Comput Methods Programs Biomed, 2003, 70:107-19; Butte, A Nat Rev Drug Discov, 2002, 1:951-960). For example, the expression of TGF-β isoforms, TGF-β receptors and components of their signaling pathway that are well documented in leiomyoma and myometrium, as well as in their isolated smooth muscles cells (Chegini, N et al. Mol Cell Endocrinol, 2003, 209:9-16; Xu, J et al. J Clin Endocrinol Metab, 2003, 88:1350-61; Chegini, N and Kornberg, L J Soc Gynecol Investig, 2003, 10:21-6; Chegini, N et al. Mol Hum Reprod, 2002, 8:1071-8; Dou, Q et al. J Clin Endocrinol Metab, 1996, 81:3222-3230; Arici, A and Sozen, I Fertil Steril, 2000, 73:1006-1011; Lee, B S and Nowak, R A J Clin Endocrinol Metab, 2001, 86:913-920), are not consistently identified in microarray studies (Tsibris, J C M et al. Fertil Steril, 2002, 78:114-121; Chegini, N et al. J Soc Gynecol Investig, 2003, 10:161-71; Wang, H et al. Fertil Steril, 2003, 80:266-76; Weston, G et al. Mol Hum Reprod, 2003, 9:541-9; Ahn, W S et al. Int J Exp Pathol, 2003, 84:267-79; Quade, B J et al. Genes Chromosomes Cancer, 2004, 40:97-108), although in the current and previous (Chegini, N et al. J Soc Gynecol Investig, 2003, 10:161-71) studies we identified most of the members of TGF-β system. Among the cytokines whose expression was identified and validated in the present study is IL-11. IL-11 is recognized to play key regulatory functions in inflammation, angiogenesis and tissue remodeling (Leng, S X and Elias, J A Int J Biochem Cell Biol, 1997, 29:1059-62; Tang, W et al. J Clin Invest, 1996, 98:2845-53; Zhu, Z et al. Am J Respir Crit. Care Med, 2001, 164:S67-70; Zimmerman, M A et al. Am J Physiol Heart Circ Physiol, 2002, 283:H175-80; Bamba, S et al. Am J Physiol Gastrointest Liver Physiol, 2003, 285:G529-38), events that are central to leiomyoma pathophysiology. IL-11 is a member of the IL-6 family and produced by various cell types, including the uterus, and its overexpression is reported to cause sub-epithelial airway fibrosis particularly through interaction with IL-13 and TGF-β (Leng, S X and Elias, J A Int J Biochem Cell Biol, 1997, 29:1059-62; Tang, W et al. J Clin Invest, 1996, 98:2845-53; Zhu, Z et al. Am J Respir Crit. Care Med, 2001, 164:S67-70; Zimmerman, M A et al. Am J Physiol Heart Circ Physiol, 2002, 283:H175-80; Bamba, S et al. Am J Physiol Gastrointest Liver Physiol, 2003, 285:G529-38; Karpovich, N et al. Mol Hum Reprod, 2003, 9:75-80). Evidence has been provided that IL-11, similar to TGF-β and IL-13, is overexpressed in leiomyoma compared to myometrium and GnRHa therapy suppressed their expression in these tissues (Chegini, N et al. Mol Cell Endocrinol, 2003, 209:9-16; Chegini, N et al. Mol Hum Reprod, 2002, 8:1071-8; Dou, Q et al. J Clin Endocrinol Metab, 1996, 81:3222-3230; Ding, L et al. J Soc Gyncol Invest, 2004, 00, 00). At the cellular level, unlike the expression of TGF-β and IL-13, GnRHa increased IL-11 expression in LSMC and MSMC within 2 to 6 hours of treatment, which sharply declined to control levels after 12 hours. Although the nature of differential regulation of IL-11 at the tissue and cellular levels requires detailed investigation, prolonged treatment with GnRHa, the contribution of other cell types and the influence of other autocrine/paracrine regulators, may account for the difference in IL-11 expression between in vivo and in vitro conditions.

[0177] Other differentially expressed and regulated genes identified in the present study functionally belong to signal transduction pathways that are recruited and activated by various growth factors/cytokines/chemokines, polypeptide hormones, extracellular matrix and adhesion molecules. However the expression of few of these components and other signal transduction pathways has been documented in leiomyoma and myometrium (Chegini, N “Implication of growth factor and cytokine networks in leiomyomas” In; Cytokines in human reproduction. J. Hill ed. New York, Wiley & Sons Publisher, 2000, 133-162; Ding, L et al. J Clin Endocrinol Metab, 2004, 89:5549-5557; Chegini, N and Kornberg, L J Soc Gynecol Investig, 2003, 10:21-6; Orii, A et al. J Clin Endocrinol Metab, 2002, 87:3754-9), and little is known about their recruitment and activation in LSMC and MSMC. The expression of Smads, MAPK and FAK has been identified in leiomyomas and myometrium and evidence has been provided for their regulation and activation by GnRHa in LSMC and MSMC (Ding, L et al. J Clin Endocrinol Metab, 2004, 89:5549-5557; Xu, J et al. J Clin Endocrinol Metab, 2003, 88:1350-61; Chegini, N and Kornberg, L J Soc Gynecol Investig, 2003, 10:21-6). Here, the present inventors validated the expression of GPRK5 identified as one of the differentially expressed and regulated genes in leiomyoma and myometrium and demonstrated that GnRHa therapy, and in vitro treatment of LSMC and MSMC with GnRHa inhibits GPRK5 expression. G-protein-coupled receptor kinases (GPRKs), consisting of six members GPRK1 to GPRK6, act as key regulators of signaling via GPRKs, and are widely expressed in various tissues and cells (Mak, J C et al. Eur J Pharmacol, 2002, 436:165-72; Simon, V et al. Endocrinology, 2001, 142:1899-905; Simon, V et al. Endocrinology, 2003, 144:3058-66; Krasel, C et al. J Biol Chem, 2001, 276:1911-1915). Previous studies have demonstrated that pregnant and non-pregnant human myometrium as well as cultured myometrial cells express GPRK2, GPRK4γ and GPRK5, however GPRK3 and GPRK4α, β, and δ were not detected in myometrium (Simon, V et al. Endocrinology, 2001, 142:1899-905; Simon, V et al. Endocrinology, 2003, 144:3058-66). GPRK5 has been shown to serve as a substrate for PKC, although PKC-mediated phosphorylation inhibits GPRK5 (Klausen, C et al. Prog Brain Res, 2002, 141:111-128; Krasel, C et al. J Biol Chem, 2001, 276: 1911-1915). In addition, the extreme N terminus of GPRK5 contains a binding site for Ca2+/calmodulin, where upon binding it inhibits GPRK activity, a mechanism suggested to regulate GPRKs activity (Krasel, C et al. J Biol Chem, 2001, 276: 1911-1915). Since GnRH receptors are a member of the G-protein coupled receptor (GPCR) family and recruit and activate the components of several signaling pathways, including PKC and Ca2+/calmodulin, their regulatory interaction with GPRKs may serve in regulating various events downstream from these signals in LSMC and MSMC.

[0178] Nuclear translocation of many activated intracellular signaling molecules results in phosphorylation and activation of transcription factors, major elements in these signaling networks that regulate specific gene expression. In previous studies (Chegini, N et al. J Soc Gynecol Investig, 2003, 10:161-71) and the present study, several transcription factors were identified as differentially expressed and regulated in leiomyoma and myometrium and targeted by GnRHa direct action in LSMC and MSMC (see Tables 1-4). Many of these transcription factors are involved in ovarian steroids, polypeptide hormones, inflammatory cytokines, growth factors and ECM receptor mediated-actions, by regulating the promoter of their target genes in various normal and cancer cells. However, little is known regarding the expression and regulation of these and other transcription factors in leiomyoma and myometrium. For this reason, the present inventors placed a greater emphasis on verification of the expression of transcription factors such as Nur77, CITED2, EGR3, TIEG and TGIF in leiomyoma, myometrium and their temporal regulation by GnRHa in LSMC and MSMC.

[0179] Nur77 (also known as NR4A1, TR3, NGFI-B, NAK-1) is a member of the orphan nuclear receptor superfamily originally identified as an immediate-early gene in serum-treated fibroblasts (Maira, M et al. Mol and Cell Biol, 2003, 23; 763-776; Drouin, J et al. J Steroid Biochem Mol Biol, 1998, 65:59-63; Fernandez, P et al. Endocrinology, 2000, 141:2392-2400; Gelman, L et al. J Biol Chem, 1999, 274:7681-7688; Sadie, H et al. Endocrinology, 2003, 144:1958-71; Wilson, T E et al. Mol Cell Biol, 1993, 13:861-868; Song, K H et al. Endocrinology, 2001, 142:5116-23; Zhang, P and Mellon, S H Mol Endocrinol, 1997, 11:891-904). It is also identified as NGF-inducible gene, which is constitutively expressed in various tissues and is strongly induced by several stimuli, resulting in regulation of gene expression related to inflammation, angiogenesis, apoptosis and steriodogenesis, including steroid-21 and 17α-hydroxylases and 20α hydroxysteroid dehydrogenase in the hypothalamic-pituitary-adrenal axis (Maira, M et al. Mol and Cell Biol, 2003, 23; 763-776; Drouin, J et al. J. Steroid Biochem Mol Biol, 1998, 65:59-63; Fernandez, P et al. Endocrinology, 2000, 141:2392-2400; Gelman, L et al. J Biol Chem, 1999, 274:7681-7688; Sadie, H et al. Endocrinology, 2003, 144:1958-71; Wilson, T E et al. Mol Cell Biol, 1993, 13:861-868; Song, K H et al. Endocrinology, 2001, 142:5116-23; Zhang, P and Mellon, S H Mol Endocrinol, 1997, 11:891-904). In the anterior pituitary, Nur77 is reported to mediate the stimulatory effect of CRH and the negative-feedback regulation of POMC transcription by glucocorticoids, as well as GnRH-induced GnRH receptor expression (Drouin, J et al. J. Steroid Biochem Mol Biol, 1998, 65:59-63; Sadie, H et al. Endocrinology, 2003, 144:1958-71). LH-induced Nur77 is also reported to regulate cytochorome p450 expression in granulosa and leydig cells (Sadie, H et al. Endocrinology, 2003, 144:1958-71; Wilson, T E et al. Mol Cell Biol, 1993, 13:861-868; Song, K H et al Endocrinology, 2001, 142:5116-23). More importantly, overexpression of Nur77 is implicated as an important regulator of apoptosis in different cells. In response to apoptotic stimuli, Nur77 translocation from the nucleus to mitochondria results in cytochrome C release and apoptosis of LNCaP human prostate cancer cells (Rajpal, A et al. EMBO J, 2003, 22:6526-36; Castro-Obregon, S et al. J Biol Chem, 2004, 279:17543-53; Li, H et al. Science, 2000, 289:1159-1164). The present inventors found a relatively similar expression of Nur77 in myometrium and leiomyoma; however, GnRHa therapy resulted in a significant elevation of Nur77 in both tissues. GnRHa treatment also resulted in a rapid induction of Nur77 in MSMC and LSMC, which subsequently declined to control levels, and in LSMC fell to below the levels detected in untreated cells. Interestingly, GnRH is reported to regulate Nur77 expression in αT3-1 and LβT2 gonadotrope cell lines through PKA pathway and GnRH receptor promoter via a mechanism involving SF-1 with Nur77 acting as a negative regulator of this response (Sadie, H et al. Endocrinology, 2003, 144:1958-71). In a recent study, activation of MAPK pathway involving Raf-1, MEK2 and ERK2 was reported to regulate Nur77 activation resulting in nonapoptotic program cell death (Castro-Obregon, S et al. J Biol Chem, 2004). The present inventors have shown that GnRH signaling through MAPK and transcriptional activation of c-fos and c-jun regulate the expression of several specific genes in LSMC and MSMC. This suggests that GnRH-mediated action through this pathway may regulate nur77 expression thus influencing the outcome of cellular growth arrest and/or apoptosis in leiomyoma.

[0180] Recently, a new family of transcriptional co-regulators, the CITED (CBP/p300-interacting transactivator with ED-rich tail) family, was discovered that interact with the first cysteine-histidine-rich region of CBP/p300 (Tien, E S et al. J Biol Chem, 2004, 279:24053-63; Kranc, K R et al Mol Cell Biol, 2003, 23:7658-66). The CITED family contains four members and appears to act as key transcriptional modulators in embryogenesis, inflammation, and stress responses (Tien, E S et al. J Biol Chem, 2004, 279:24053-63) by affecting the transcriptional activity of many transcription factors ranging from AP2, estrogen receptor, and hypoxia-inducible factor 1 (HIF1) and LIM (Yin, Z et al. Proc Natl Acad Sci USA, 2002, 99:10488-10493). The present inventors identified CITED2 among the differentially expressed and regulated genes in leiomyoma, myometrium and their isolated cells, and in response to GnRHa treatment in vivo and in vitro. Unlike GnRHa therapy which increased CITED2 expression in leiomyoma and myometrium, GnRHa had a biphasic effect on CITED2 expression in MSMC, while inhibiting expression in LSMC. Although in vitro culture conditions may directly influence the expression of regulatory molecules that either interact with or regulate CITED2 expression, the exact molecular mechanism resulting in differential expression of CITED2 in vivo and in vitro by GnRHa requires further investigation. Interestingly, the expression of several growth factors, cytokines and HIF1 are the target of ER, PR regulatory action, and CITED2 acting as a repressor of their expression may serve as an important regulator of processes that regulate inflammatory response, angiogenesis and tissue remodeling in leiomyoma. Additionally, CBP/p300 which serve as promiscuous co-activators for an increasing number of transcription factors resulting in proliferation, differentiation and apoptosis in response to diverse biological factors, including ER- and PR-dependent transcriptional activity, is specifically recruited by Nur77 acting as dimers following PKA activation (Maira, M et al. Mol and Cell Biol, 2003, 23; 763-776; Kranc, K et al. Trends Cell Biol, 1997, 7:230-236; Puri, P L et al. EMBO J, 1997, 16:369-383).

[0181] In a previous microarray study, it was reported that EGR1, a prototype of a family of zinc-finger transcription factors that includes EGR2, EGR3, EGR4, and NGFI-B (Hjoberg, J et al. Am J Physiol Lung Cell Mol Physiol, 2004, 286:L817-825; Thiel, G and Cibelli, G J Cell Physiol, 2002, 193:287-92), is differentially expressed in leiomyoma and myometrium (Chegini, N et al. J Soc Gynecol Investig, 2003, 10:161-71). Here, the present inventors provide evidence for the expression of EGR3 and differential regulation in response to GnRHa therapy in leiomyoma and myometrium, as well as in LSMC and MSMC in vitro. A recent report demonstrated that EGR1 expression is elevated in leiomyoma compared to corresponding myometrium in women who received GnRHa therapy (Shozu, M et al. Cancer Research, 2004, 64:4677-4684) supporting previous microarray data (Chegini, N et al. J Soc Gynecol Investig, 2003, 10:161-71). EGRs expression is rapidly and transiently induced by a large number of growth factors, cytokines, polypeptide hormones and injurious stimuli and kinetics of their expression is essentially identical to c-fos proto-oncogene (Hjoberg, J et al. Am J Physiol Lung Cell Mol Physiol, 2004, 286:L817-825; Thiel, G and Cibelli, G J Cell Physiol, 2002, 193:287-92; Inoue, A et al. J Mol Endocrinol, 2004, 32:649-61). In addition, induction of EGR1 occurs primarily at the level of transcription and is mediated, in part, through MAPKs, including ERK, JNK, and p38 pathways (Hjoberg, J et al. Am J Physiol Lung Cell Mol Physiol, 2004, 286:L817-825; Thiel, G and Cibelli, G J Cell Physiol, 2002, 193:287-92). It has been demonstrated that GnRHa through the activation of MAPK regulates the expression c-fos and c-jun as well as fibronectin, collagen and PAI-I expression (Ding, L et al. J Clin Endocrinol Metab, 2004, 89:5549-5557). In human fibrosarcoma and glioblastoma cells, EGR directly influences the expression of fibronectin, TGF-β1, and PAI-1 and may regulate the expression of PDGF, tissue factor, and membrane type 1 matrix metalloproteinase (Thiel, G and Cibelli, G J Cell Physiol, 2002, 193:287-92; Liu, C et al. J Biol Chem, 1999, 274:4400-11). Estrogen is also reported to induce EGR3 in various cancer cell lines while is inhibited by progesterone in Schwann cells (Inoue, A et al. J Mol Endocrinol, 2004, 32:649-61; Mercier, G et al. Mol Brain Res, 2001, 97:137-148). Constitutive transgenic expression of EGR3 has recently been shown to increase thymocytes apoptosis, possibly through potent activation of FasL expression (Xi, H and Kersh, G J J Immunol, 2004, 173:340-8). Given the role of ovarian steroids and a large number of growth factors, cytokines and polypeptide hormones in leiomyoma growth, and suppression by GnRHa, their differential influence on EGR1 and EGR3 expression may represent a mechanism resulting in balance between the rate of cell proliferation and apoptosis as well as tissue turnover, affecting leiomyoma growth and regression.

[0182] The present study also provides the first evidence of the expression and regulation of TIEG and TGIF, novel three zinc-finger Kruppel-like transcriptional repressors, and key regulators of TGF-β receptor signaling (Johnsen, S A et al. Oncogene, 2002, 21:5783-90; Cook, T and Urrutia, R Am J Physiol Gastrointest Liver Physiol, 2000, 278:G513-21; Ribeiro, A et al. Hepatology, 1999, 30:1490-7; Chen, F et al. Biochem J, 2003, 371:257-63; Melhuish, T A et al. J Biol Chem, 2001, 276:32109-14), by GnRHa in leiomyoma, myometrium, LSMC and MSMC. TIEG regulates TGF-β receptor signaling through a negative feedback mechanism by repressing the inhibitory Smad7 (Johnsen, S A et al. Oncogene, 2002, 21:5783-90). In addition, TGIF through direct binding to DNA or interaction with TGF-β-activated Smads represses TGF-β-responsive gene expression (Chen, F et al. Biochem J, 2003, 371:257-63; Melhuish, T A et al. J Biol Chem, 2001, 276:32109-14). Since GnRHa suppresses TGF-β and TGF-β receptors while enhancing Smad7 expression in leiomyoma and myometrium as well as LSMC and MSMC, differential regulation of TIEG and TGIF may serve as an additional downstream mechanism altering TGF-β autocrine/paracrine actions in leiomyoma. To further understand the regulation of these transcription factors in leiomyoma, the present inventors also provide evidence for their regulation in LSMC and MSMC by TGF-β, further implicating the importance of TGF-β in pathogenesis of leiomyoma (as described in Examples 4-7).

[0183] The expression, activation and direct interaction of these and other transcription factors with DNA results in regulation of the expression of various genes whose products influence cell growth, inflammation, angiogenesis, apoptosis and tissue turnover. In previous studies (Chegini, N et al. J Soc Gynecol Investig, 2003, 10:161-71; Ding, L et al. J Clin Endocrinol Metab, 2004, 89:5549-5557) and the present study, several differentially expressed and regulated genes were identified in leiomyoma, myometrium and LSMC and MSMC whose promoters are the target of these transcription factors. Among these genes are members of cell cycle regulatory proteins that play a central role in leiomyoma growth and regression (Chegini, N “Implication of growth factor and cytokine networks in leiomyomas” In; Cytokines in human reproduction. J. Hill ed. New York, Wiley & Sons Publisher, 2000, 133-162; Maruo, T et al. Hum Reprod Update, 2004, 10:207-20; Zhai, Y L et al. Int J Cancer, 1999, 84:244-50), including p27, p57 and Gas1. The present inventors identified p27, p57 and Gas1 as differentially expressed and regulated in leiomyoma and myometrium as well as LSMC and MSMC and in response to GnRHa treatment. Although p27, p57 and Gas1 function as major regulators of cell cycle progression, several studies have also shown Cip/Kip proteins function as transcriptional cofactors by regulating the activity of NFκ-B, STAT3, Myc, Rb, C/EBP, CBP/p300, E2F and AP1 (Coqueret, O Trends Cell Biol, 2003, 13:65-70). A recent report also suggests that p21, p27 and p57 are involved in regulation of apoptosis (Blagosklonny, M V Semin Cancer Biol, 2003, 13:97-105) and their differential regulation in leiomyoma and myometrium is consistent with GnRHa induction of apoptosis related gene in LSMC and MSMC (Chegini, N “Implication of growth factor and cytokine networks in leiomyomas” In; Cytokines in human reproduction. J. Hill ed. New York, Wiley & Sons Publisher, 2000, 133-162; Maruo, T et al. Hum Reprod Update, 2004, 10:207-20; Mizutani, T et al. J Clin Endocrinol Metab, 1998, 83:1253-1255; Zhai, Y L et al. Int J Cancer, 1999, 84:244-50). However, the results disclosed herein are the first to document the expression of Gas1 in leiomyoma and myometrium, and regulation in LSMC and MSMC in response to timed-dependent action of GnRHa. GnRHa has been demonstrated to alter cell cycle progression and programmed cell death in several cell types including leiomyoma smooth muscle cells (Chegini, N “Implication of growth factor and cytokine networks in leiomyomas” In; Cytokines in human reproduction. J. Hill ed. New York, Wiley & Sons Publisher, 2000, 133-162; Mizutani, T et al. J Clin Endocrinol Metab, 1998, 83:1253-1255; Zhai, Y L et al. Int J Cancer, 1999, 84:244-50), and these results provide additional support for the involvement of specific cell cycle and apoptotic related genes in leiomyoma growth and regression. How the expression of these genes is regulated and through what mechanism their products influence LSMC and MSMC cell cycle progression and programmed cell death awaits further investigation.

[0184] Leiomyoma growth and GnRHa therapy resulting in leiomyoma regression also involves extracellular matrix turnover. In previous studies (Chegini, N et al. J Soc Gynecol Investig, 2003, 10:161-71), in the present study, and in recent studies by other groups (Tsibris, J C M et al. Fertil Steril, 2002, 78:114-121; Wang, H et al. Fertil Steril, 2003, 80:266-76; Weston, G et al. Mol Hum Reprod, 2003, 9:541-9; Ahn, W S et al. Int J Exp Pathol, 2003, 84:267-79; Quade, B J et al. Genes Chromosomes Cancer, 2004, 40:97-108), several genes in this category were identified displaying differential expression in leiomyoma and myometrium and were targeted by GnRH therapy (Tables 1-4) (Chegini, N “Implication of growth factor and cytokine networks in leiomyomas” In Cytokines in human reproduction. J. Hill ed. New York, Wiley & Sons Publisher, 2000, 133-162; Ding, L et al. J Clin Endocrinol Metab, 2004, 89:5549-5557; Dou, Q et al. Mol Hum Reprod, 1997, 3:1005-1014; Levens, E et al. Fertil Steril, 2004, (In press); Stewart, E A et al. J Clin Endocrinol Metab, 1994, 79:900-6). These include the expression of several collagens, small leucine rich repeat family of proteoglycans, decorin, biglycan, osteomodulin, fibromodulin, versican, and osteoadherin/osteoglycin, fibronectin, desmin and vimentin, several member of proteases such as matrix metalloproteinases (MMPs) and their inhibitors, TIMPs, a disintegrin-like and metalloproteinase proteins (ADAM), etc. It has also been reported that GnRHa regulates the expression of fibronectin, collagen type I, PAI-I, MMPs and TIMPs (Chegini, N “Implication of growth factor and cytokine networks in leiomyomas” In Cytokines in human reproduction. J. Hill ed. New York, Wiley & Sons Publisher, 2000, 133-162; Ding, L et al. J Clin Endocrinol Metab, 2004, 89:5549-5557; Dou, Q et al. Mol Hum Reprod, 1997, 3:1005-1014), as well as decorin, versican, desmin and vimentin (unpublished data) in leiomyoma and myometrium, involving the activation of MAPK in LSMC and MSMC (Ding, L et al. J Clin Endocrinol Metab, 2004, 89:5549-5557). Since ECM turnover is a key regulator of the outcome of tissue fibrosis, and many cytokines, chemokines, growth factors and polypeptide hormones through specific intracellular signal transduction and activation of transcription factors influence the expression of ECM and proteases, further investigation is underway to elucidate their regulatory interactions affecting processes that may influence leiomyoma growth and regression.

[0185] In summary, in the present study, the inventors provide a comprehensive assessment of the gene expression profile of leiomyoma and matched myometrium during early-mid luteal phase of the menstrual cycle, a period characterized by elevated production of ovarian steroids and maximal leiomyoma growth, compared with tissues obtained from hormonally suppressed patients on GnRHa therapy and in response to the direct action of GnRHa on LSMC and MSMC. The present inventors identified several common and tissue-specific gene clusters in these cohorts suggesting their co-regulation by the same factors and or mechanism(s) in the same cluster. The present inventors validated the expression of several genes whose products are important in signal transduction, transcription, cell cycle regulation, apoptosis and ECM turnover, events critical to development, growth and regression of leiomyoma. Based on these and previous observations, the present inventors propose that the product of these specific genes, by regulating the local inflammatory and apoptotic processes leading to elaboration of profibrotic cytokines production such as TGF-β is central to the establishment and progression of fibrosis in leiomyoma. Provided in Examples 4-7 is further evidence for the role of TGF-β autocrine/paracrine action in this process.

### EXAMPLE 4

### Gene Expression Profiles of Leiomyoma and Matched Myometrium Cells in Response to TGF-β1

[0186] It has been reported that leiomyoma and myometrium express all the components of the TGF-β system, and it has been shown that TGF-β through Smads and MAPK pathways regulates the expression of a specific number of genes in LSMC and MSMC (Chegini, N. et al. J Clin Endocrinol Metab, 1999, 84:4138-43; Chegini, N. et al. Mol Hum Reprod, 2002, 8:1071-1078; Chegini, N. et al. Mol Cell Endocrinol, 2003, 209:9-16; Xu, J. et al. J Clin Endocrinol Metab, 2003, 88:1350-1361; Ding, L. et al. J Clin Endocrinol Metab, 2004, 89:5549-5557; Tang, X. M. et al. Mol Hum Reprod, 1997, 3:233-40). Here, the present inventors performed microarray analysis to further characterize the molecular environment of LSMC and MSMC directed by TGF-β autocrine/paracrine actions. LSMC and MSMC were treated with TGF-β1 (2.5 ng/ml) for 2, 6 and 12 hours, total RNA was isolated and subjected to microarray analysis. Following global normalization and transformation of the gene expression values, supervised learning, discrimination analysis, cross validation and variation filtering, the gene expression values for this study were independently subjected to statistical R programming analysis and ANOVA with false discovery rate selected at p≦0.001. The analysis identified 310 genes or 2.46% of the genes on the array as differentially expressed and regulated in response to time-dependent action of TGF-β in LSMC and MSMC.

[0187] Hierarchical clustering analysis separated these differentially expressed genes into distinctive clusters, with sufficient difference in their patterns allowing each cohort to cluster into their respective subgroup. The differentially expressed and regulated genes were separated into five clusters in response to time-dependent action of TGF-β in LSMC and MSMC, with genes in clusters A and B displaying a late response, genes in cluster D displaying early response, and genes in clusters C and E showing biphasic regulatory behaviors. Further analysis of the variance-normalized mean gene expression values divided the genes into 6 clusters, each displaying a different level of response to time-dependent action of TGF-β, with overlapping behavior between LSMC and MSMC with the exception of genes in clusters E and F.

[0188] Comparative analysis between gene expression profiles of LSMC and MSMC in response to TGF-β action, with their corresponding leiomyoma and myometrium (tissues) from the untreated group revealed a substantial variability among their profiles (data not shown). However, gene ontology assessment and division into functional categories indicated that the majority of these genes (60 to 70%) are involved in transcriptional regulation and metabolism, cell cycle regulation, extracellular matrix and adhesion molecules, signal transduction and transcription factors. The time-dependent action of TGF-β on expression the profile of a selective group of these genes in the above clusters representing transcription factors, growth factors, cytokines, signal transduction pathways, ECM/adhesion molecules etc. in LSMC and MSMC are presented in FIG. 5A-5N.

### EXAMPLE 5

### Gene Expression Profiles of LSMC and MSMC In Response to TGF-β Following Pretreatment with TGF-β type II Receptor Antisense

[0189] To further evaluate the autocrine/paracrine action of TGF-β in leiomyoma and myometrial microenvironments, LSMC and MSMC were pretreated with TGF-β type II receptor (TGF-β type IIR) antisense oligomers to block/reduce TGF-β receptor signaling. Following pretreatments the cells were treated with or without TGF-β for 2 hours and their total RNA was subjected to microarray analysis. Based on the same data analysis described above with false discovery rate of p≦0.001, the present inventors identified 54 differentially expressed and regulated genes in response to TGF-β1 (2.5 ng/ml for 2 hours) in LSMC and MSMC pretreated with TGF-β type IIR antisense. Hierarchical cluster analysis distinctively separated these genes into 3 clusters with each cohort separated into their respective subgroups. The genes in clusters A and C displayed different response to TGF-β type IIR antisense treatment, while genes in cluster B showed overlapping behavior in LSMC and MSMC. However, there was an overlapping pattern between the gene expression profiles in TGF-β type IIR sense- and antisense-treated cells that could be due to the inability of antisense treatment to block all the combined action of autocrine/paracrine and exogenously added TGF-β. Interestingly, antisense treatment altered the expression of many genes known to be the target of TGF-β action, including those validated in this study. Gene ontology assessment and division into similar functional categories indicated that the majority of these genes are involved in transcriptional regulation and metabolism, cell cycle regulation, extracellular matrix and adhesion molecules, and transcription factors.

### EXAMPLE 6

### Comparative Analysis of Gene Expression Profiles in Response to TGF-β Type II Receptor Antisense and GnRHa Treatments in LSMC and MSMC

[0190] Since GnRHa alters the expression of TGF-β and TGF-β receptors expression in leiomyoma and myometrium as well as in LSMC and MSMC, the present inventors compared the gene expression profile of TGF-β type IIR antisense-treated with GnRHa-treated LSMC and MSMC, searching for common genes whose expression are affected by these treatments. Based on the same data analysis described above with false discovery rate selected at p≦0.001, the present inventors identified 222 genes differentially expressed and regulated in LSMC and MSMC in response to TGF-β type IIR antisense- and GnRHa-treated cells (Tables 7 and 8). Hierarchical clustering analysis separated these genes into 4 clusters displaying different pattern of regulation allowing their separation into respective subgroup. The genes in cluster A, B and D displayed different response to TGF-β type IIR antisense and GnRHa treatments, with genes in cluster C showing overlapping behavior in LSMC and MSMC.

[0191] Table 7 is a categorical list of genes identified as differentially expressed in LSMC pretreated with TGF-β type II receptor (TGF-β type IIR) antisense for 24 hours followed by TGF-β treatment for 2 hrs compared to LSMC treated with GnRHa (0.01 μM) for 2, 6, 12 hours. The genes were identified following supervised analysis of their expression values and statistical analysis in R programming and ANOVA with a false-discovery rate of rate of p≦0.001.

[0192] Table 8 is a categorical list of genes identified as differentially expressed in LSMC pretreated with TGF-β type II receptor (TGF-β type IIR) antisense for 24 hrs followed by TGF-b treatment for 2 hrs compared to LSMC treated with GnRHa (0.01 μM) for 2, 6, 12 hours. The genes were identified following supervised analysis of their expression values and statistical analysis in R programming and ANOVA with a false-discovery rate of rate of p≦0.001

### EXAMPLE 7

### Verification of Gene Transcripts in TGF-β-Treated LSMC and MSMC

[0193] Using Realtime PCR, the present inventors validated the expression of 12 genes in response to time dependent action of TGF-β in LSMC and MSMC (FIGS. 6A-6R). They include IL-11, CITED2, Nur77, EGR3, TIEG, TGIF, p27, p57, GAS-1 and GPRK5, whose expression was also validated in leiomyoma and matched myometrium from untreated and GnRHa-treated cohorts as well as LSMC and MSMC treated in vitro with GnRHa. In addition, the present inventors verified the expression of Runx1 and Runx2. As illustrated TGF-β in a time dependent manner differentially regulate the expression of these genes in LSMC and MSMC with a pattern of expression displaying significant overlap between Realtime PCR and microarray analysis (FIGS. 6A-6R). However, the expression value of GPRK5 and Runx2 genes in microarray analysis of LSMC and MSMC did not meet the standard of analysis and was not included among the list of differentially expressed and regulated genes in response to TGF-β, although Runx2 mRNA is detectable by Realtime PCR (FIGS. 6A-6R). The results indicated that Runx1 and Runx2 expression not only is the target of TGF-β regulatory action, they are also regulated by GnRHa therapy in leiomyoma and myometrium as well as by GnRHa in LSMC and MSMC in vitro, with their time-dependent inhibition in MSMC (FIGS. 6A-6R).

[0194] The present inventors verified the expression of IL-11, TIGF, TIEG, p27 and p57 by Western blotting and their cellular distribution using immunohistochemistry in leiomyoma and myometrium. These findings provide further support for the microarray and Realtime PCR data indicating that the products of these genes are expressed in leiomyoma and myometrium. The present inventors are currently investigating time-dependent and dose-dependent regulation of these genes in response to TGF-β.

[0195] By extending previous work on the role of TGF-β in leiomyoma, in this study, the present inventors have provided the first example of gene expression fingerprints of LSMC and MSMC in response to autocrine/paracrine action of TGF-β. The present inventors further characterized the molecular environment of these cells following pretreatment with TGF-β type IIR antisense as a tool to interfere with the autocrine/paracrine action of TGF-β isoform s, and comparatively assessed their expression profiles with GnRHa-treated cells, which also inhibits TGF-β receptor expression in these cells (Dou, Q. et al. J Clin Endocrinol Metab, 1996, 81:3222-3230; Chegini, N. et al. Mol Hum Reprod, 2002, 8:1071-1078). Since the aim of this study was to capture the early and late autocrine/paracrine action of TGF-β in these cells, the present inventors selected a treatment strategy based on previous observations reflecting TGF-β time-dependent regulation of c-fos, c-jun, fibronectin, collagen type I, and PAI-1 expression (Ding, L. et al. J Clin Endocrinol Metab, 2004, 89:5549-5557). TGF-β regulates the expression of these genes in LSMC and MSMC through TGF-β receptor activation of Smad and MAPK pathways (Schnaper, H. W. et al. Am J Physiol Renal Physiol, 2003, 284:F243-252; Xu, J. et al. J Clin Endocrinol Metab, 2003, 88:1350-1361; Ding, L. et al. J Clin Endocrinol Metab, 2004, 89:5549-5557), whose promoters are known to contain TGF-β regulatory elements (Miyazono, K. et al. Oncogene, 2004, 23:4232-7; Moustakas, A. et al. Immunol Lett, 2002, 82:85-91). This study design is also consistent with other microarry studies profiling gene expression in response to TGF-β action in human dermal fibroblasts, HaCaT kritonocyte cell line and NMuMG, mouse mammary gland epithelial cell line, in which the cells were treated for 1, 2, 6 and 24 hours, displaying a Smad-mediated regulation of selected number of genes (Verrecchia, F. et al. J Biol Chem, 2001, 276:17058-17062; Zavadil, J. et al. Proc Natl Acad Sci USA, 2001, 98:6686-6691; Xie, L. et al. Breast Cancer Res, 2003, 5:R187-R198 25-27).

[0196] Cluster and tree-view analysis revealed a considerable similarity in overall gene expression patterns between LSMC and MSMC in response to TGF-β action; however, there was sufficient difference allowing their separation into respective subgroups. The genes in these clusters displayed different regulatory response to TGF-β action in a cell- and time-specific manner, with genes in clusters A and B displaying a late response, genes in cluster D displaying early responsiveness, and clusters C and E showing a biphasic regulatory behavior. These results suggest that the same factors and/or mechanisms co-regulate the expression of these genes in each cluster, possibly due to the presence of common regulatory elements in their promoters. Whether the expression profile of these genes in LSMC and MSMC respond differently to varying concentration of TGF-β, or other TGF-β isoforms is not established. However, the concentration of TGF-β used in this and other studies examining the effect of TGF-β on the expression of other genes (Xu, J. et al. J Clin Endocrinol Metab, 2003, 88:1350-1361; Ding, L. et al. J Clin Endocrinol Metab, 2004, 89:5549-5557; Tang, X. M. et al. Mol Hum Reprod, 1997, 3:233-40; Arici, A. and Sozen, I. Am J Obstet Gynecol, 2003, 188:76-83; Verrecchia, F. et al. J Biol Chem, 2001, 276:17058-17062; Zavadil, J. et al. Proc Natl Acad Sci USA, 2001, 98:6686-6691; Xie, L. et al. Breast Cancer Res, 2003, 5:R187-R198), is comparable with level of TGF-β produced by these cells, although LSMC produces more TGF-β1 compared to MSMC (Chegini, N. et al. J Clin Endocrinol Metab, 1999, 84:4138-43; Chegini, N. et al. Mol Hum Reprod, 2002, 8:1071-1078). Moreover, based on the profile of TGF-β isoforms's expression in leiomyoma, it has previously been proposed that TGF-β1 and TGF-β3 play an more critical role in leiomyoma (Chegini, N. et al. J Clin Endocrinol Metab, 1999, 84:4138-43), and in vitro studies have indicated a higher growth response to TGF-β1 (personal observations) and TGF-β3 in LSMC compared to MSMC (Lee, B. S. and Nowak, R. A. J Clin Endocrinol Metab, 2001, 86:913-920; Arici, A. and Sozen, I. Fertil Steril, 2000, 73:1006-1011). However, TGF-β isoforms mediate their actions through TGF-β type IIR, and alterations in the TGF-β receptor system may serve as a more accurate indicator of their overall autocrine/paracrine actions in these and other cell types. It has been shown that leiomyoma over-expresses TGF-β type IIR compared to myometrium (Dou, Q. et al. J Clin Endocrinol Metab, 1996, 81:3222-3230; Chegini, N., Luo X, Ding L, Ripley D 2003 The expression of Smads and transforming growth factor beta receptors in leiomyoma and myometrium and the effect of gonadotropin releasing hormone analogue therapy. Mol Cell Endocrinol 209:9-16), and pretreatment of LSMC with TGF-β type IIR antisense oligomers and/or neutralizing antibodies prevented TGF-β receptor-mediated actions (Chegini, N. et al. Mol Hum Reprod, 2002, 8:1071-1078; Xu, J. et al. J Clin Endocrinol Metab, 2003, 88:1350-1361).

[0197] These observations as well as identification of specific genes whose expression exhibited sensitivity to pretreatment with TGF-β type IIR antisense, among them genes containing TGF-β regulatory response elements in their promoters, further support TGF-β receptors mediated signaling in regulating the overall expression of these genes in LSMC and MSMC, and possibly in leiomyoma and myometrium. Lack of response of other TGF-β-targeted genes to TGF-β type IIR antisense pretreatment could be due to inability of antisense to block all the autocrine/paracrine, as well as exogenously added TGF-\tilde{β}. However, the expression of these genes may also be regulated as a consequence of TGF-β receptors overexpression and/or their altered intracellular signaling. Interestingly, activin receptor-like kinases (ALK) ALK1 and ALK5, which serve as TGF-β type I receptors and are activated by TGF-β type II receptors, have been shown to regulate the expression of different genes in endothelial cell in response to TGF-β action (Ota, T. et al. J Cell Physiol, 2002, 193:299-318). However, ALK1 functions as a TGF-β type I receptor in endothelial cells, while ALK-5 is expressed in various cells, and through distinct Smad proteins, i.e., Smad1/Smad5 and Smad2/Smad3, respectively, regulate gene expression in response to TGF-β actions (Ota, T. et al. J Cell Physiol, 2002, 193:299-318). The present inventors have identified the expression of all the components of the TGF-β receptor system, including ALK5 and Smad2/3 in leiomyoma and myometrium as well as LSMC and MSMC. However, TGF-β-mediated action through ALK1 could result in the regulation of a different set of genes not involving ALK5. In addition to TGF-β and TGF-β receptors, alteration in Smad expression is also considered to influence the outcome of several disorders targeted by TGF-β including tissue fibrosis (Flanders, K. C. Int J Exp Pathol, 2004, 85:47-64).

[0198] Gene ontology dividing the differentially expressed and regulated genes into similar functional categories revealed that the majority of the genes targeted in response to TGF-β treatment of LSMC and MSMC are associated with cellular metabolism, cell growth regulation (cell cycle and apoptosis), cell and tissue structure (ECM, adhesion molecules and microfilements), signal transduction and transcription factors. Despite the differences in their profiles, the present inventors found a substantial degree of similarity in functional annotation among the genes identified at tissue (leiomyoma and myometrium) and cellular (LSMC and MSMC) levels in response to TGF-β1. These differences between gene expression profiles of tissues and LSMC/MSMC in response to TGF-β could be due to the contribution of other cell types to the gene pool, and the influence of other autocrine/paracrine regulators on the overall genes expression at the tissue level. Previous studies from this laboratory and others have reported the expression of a few other genes targeted by TGF-β action in LSMC and MSMC. However, to the present inventors' knowledge, this is the first example of a large-scale gene expression profiling of these cells in response to TGF-β. Using quantitative realtime PCR analysis, the presenti inventors validated the expression of several of these genes in response to time-dependent action of TGF-β in LSMC and MSMC, including the expression of 10 genes validated in leiomyoma/myometrium as well as in LSMC/MSMC in response to GnRHa treatment.

[0199] The present inventors demonstrated that LSMC express an elevated level of IL-11 compared to MSMC, and its expression is a major target of TGF-β regulatory action. Although the biological significance of IL-11 expression in leiomyoma and myometrial environments, and consequence of its overexpression in leiomyoma await investigation, IL-11, alone, or through interaction with TGF-β is considered to play a critical role in progression of fibrotic disorders (Leng, S. X. and Elias, J. A. Int J Biochem Cell Biol, 1997, 29:1059-1062; Kuhn, C. et al. Chest, 2000, 117:260 S-262S; Zhu, Z. et al. Am J Respir Crit. Care Med, 2001, 164:S67-70; Chakir, J. et al. J Allergy Clin Immunol, 2003, 111:1293-1298). Other members of the interleukin family, IL-4 and IL-13, and their interactions with TGF-β are also reported to be equally important in this disorder (Wynn, T. A. Nat Rev Immunol, 2004, 4:583-594; Wynn, T. A. Annu Rev Immunol, 2003, 21:425-456). IL-13 expression has recently been identified in leiomyoma, and it has been discovered that exposure of LSMC to IL-13 upregulates the expression of TGF-β and TGF-β type II receptors in LSMC, suggesting a direct, and/or indirect regulatory function for IL-13 in mediating events leading to progression of tissue fibrosis in leiomyoma (Ding, L., Luo, X. Chegini, N. “The expression of IL-13 and IL-15 in leiomyoma and myometrium and their influence on TGF-b and proteases expression in leiomyoma and myometrial smooth muscle cells and SKLM, leiomyosarcoma cell line” J Soc Gyncol Invest, 2004, 00, 00). Other cytokines in this category including IL-4, IL-6, IL-8, IL-15, IL-17, TNF-α and GM-CSF are also expressed in leiomyoma and myometrium (Ding, L., Luo, X. Chegini, N. “The expression of IL-13 and IL-15 in leiomyoma and myometrium and their influence on TGF-b and proteases expression in leiomyoma and myometrial smooth muscle cells and SKLM, leiomyosarcoma cell line” J Soc Gyncol Invest, 2004, 00, 00; Chegini, N. “Implication of growth factor and cytokine networks in leiomyomas” In: Cytokines in human reproduction, J Hill ed. Wiley & Sons New York, 2000, 133-162; Chegini, N. et al. J Soc Gynecol Investig, 2003, 10:161-71). These cytokines are classified as type1/type2 related subsets and predominance toward type II direction is considered to result in inflammatory/immune responses leading to progression of tissue fibrosis (Zhu, Z. et al. Am J Respir Crit. Care Med, 2001, 164:S67-70; Chakir, J. et al. J Allergy Clin Immunol, 2003, 111:1293-1298; Wynn, T. A. Nat Rev Immunol, 2004, 4:583-594; Wynn, T. A. Annu Rev Immunol, 2003, 21:425-456; Lee, C. G. et al. J Exp Med, 2004, 200:377-389). A recent report has further elaborated the participation of IL-11 and TGF-β, and transcription factor EGR1 in tissue fibrosis, through a mechanism involving regulation of the balance between the rate of cellular apoptosis and inflammatory response (Lee, C. G. et al. J Exp Med, 2004, 200:377-389). EGR1 has previously been identified among the differentially expressed genes in leiomyoma and myometrium (Chegini, N. et al. J Soc Gynecol Investig, 2003, 10:161-71) and expression of EGR2 and EGR3 in these tissues and regulation of EGR3 in response to TGF-βaction in LSMC and MSMC is demonstrated herein.

[0200] Elevated expression and preferential phosphorylation of EGR1 leads to regulation of target genes whose products are involved in apoptosis as well as angiogenesis and cell survival, including IL-2, TNF-alpha, Flt-1, Fas, Fas ligand, cyclin D1, p15, p21, p53, PDGF-A, angiotensin II-dependent activation of PDGF and TGF-β, VEGF, tissue factor, 5-lipoxygenase, thymidine kinase, superoxide dismutase, intercellular adhesion molecule 1 (ICAM-1), fibronectin, urokinase-type plasminogen activator and matrix metalloproteinase type I (Thiel, G. and Cibelli, G. J Cell Physiol, 2002, 193:287-292; Khachigian, L. M. Cell Cycle, 2004, 3:10-1; Nagamura-Inoue, T. et al. Int Rev Immunol, 2001, 20:83-105; Liu, C. et al. Cancer Gene Ther, 1998, 5:3-28; Liu, C. et al. J Biol Chem, 1999, 274:4400-11; Baoheng, Du. et al. J Biol Chem, 2000, 275:39039-39047). The expression of many of these genes has been documented in myometrium and leiomyoma (Blobe, G. C. et al. N Engl J Med, 2000, 342:1350-1358), and known to be the target of TGF-β regulatory action. EGR1 also acts as a transcriptional repressor of TGF-β type II receptor through direct interaction with SP1 and Ets-like ERT sites in proximal promoter of the gene (Baoheng, Du. et al. J Biol Chem, 2000, 275:39039-39047). Transfection of EGR1 expression vector into a myometrial cell line (KW) expressing low levels of EGR1 is reported to result in a rapid growth inhibition of these cells (Shozu, M. et al. Cancer Res, 2004, 64:4677-4684). To the present inventors' knowledge, this is the first report of the regulatory action of TGF-β on EGR3 expression, not only in LSMC and MSMC, but any other cell types. Based on previous and present observations, the present inventors propose that a local inflammatory response mediated through individual and combined actions of TGF-β, IL-13 and IL-11, as well as regulatory function of TGF-β on EGR expression, results on local expression of set of genes whose products promote apoptotic and non-apoptotic cell death, further enhancing an inflammatory reaction that orchestrate various events leading to progression of fibrosis in leiomyoma.

[0201] Additional genes identified as differentially expressed and regulated by TGF-β autocrine/paracrine action in LSMC and MSMC in this functional category include TGIF, TIEG, CITED2, Nur77, Runx1 and Runx2. These transcription factors possess key regulatory functions in the expression of a wide range of genes in response to various stimuli specifically TGF-β. The expression of TGIF, TIEG, CITED2 and Nur77 is highly regulated in LSMC and MSMC, and with the exception of CITED2, TGF-β transiently increased their expression in a time-dependent manner. TGIF is a transcriptional co-repressor that directly associates with Smads and inhibits Smad-mediated transcriptional activation by competing with p300 for Smad association (Chen, F. et al. Biochem J, 2003, 371:257-263; Wotton, D. et al. Cell Growth Differ, 2001, 12:457-63). CITED2, induced by multiple cytokines, growth factors and hypoxia, also interacts with p300 and function as a coactivator for transcription factor AP-2 (Tien, E. S. et al. J Biol Chem, 2004, 279:24053-63). CITED2-mediated action is reported to result in down-regulation of MMP-1 and MMP-13 through interactions with CBP/p300 and other transcription factors such as c-fos, Ets-1, NFκB, and Smads that control MMPs promoter activities (Yokota, H. et al. J Biol Chem, 2003, 278:47275-47280; Shi, Y. and Massague, J. Cell, 2003, 113:685-700). TGF-β targets the expression of these transcription factors and MMPs in many cell types, including LSMC and MSMC (Ding, L. et al. J Clin Endocrinol Metab, 2004, 89:5549-5557; Shi, Y. and Massague, J. Cell, 2003, 113:685-700; Ma, C. and Chegini, N. Mol Hum Reprod, 1999, 5:950-954), thus their differential regulation and interactions with CITED2 and TGIF may serve in regulating the outcome of TGF-β autocrine/paracrine actions in leiomyoma involving cell growth, inflammation, apoptosis and tissue turnover. Unlike TGIF, TIEG is rapidly induced by TGF-β and enhances TGF-β actions through Smad2/3 activation (Johnsen, S. A. et al. Oncogene, 2002, 21:5783-90; Cook, T. and Urrutia, R. Am J Physiol Gastrointest Liver Physiol, 2000, 278:G513-521; Ribeiro, A. et al. Hepatology, 1999, 30:1490-1497). However, TIEG has no effect on gene transcription in the absence of Smad4, or due to overexpression of Smad7, although it is capable of increasing Smad2/3 activity in the absence of Smad7 (Shi, Y. and Massague, J. Cell, 2003, 113:685-700; Johnsen, S. A. et al. Oncogene, 2002, 21:5783-90). It was shown that TGF-β induced a rapid, but transient expression of TIEG in LSMC and MSMC, and the expression of Smad2/3, Smad4 and Smad7 and their differential regulation by TGF-β has been demonstrated in these cells (Xu, J. et al. J Clin Endocrinol Metab, 2003, 88:1350-1361; Ding, L. et al. J Clin Endocrinol Metab, 2004, 89:5549-5557). Based on these observations, the present inventors further propose that TGF-β through a mechanism involving TGIF, TIEG and Smads self regulates its own autocrine/paracrine action in leiomyoma/myometrium. Estrogen has also been shown to increase TIEG expression in breast tumor cell (Johnsen, S. A. et al. Oncogene, 2002, 21:5783-90; Sorbello, V. et al. Int J Biol Markers, 2003, 18:123-9). Since estrogen, a major growth-promoting factor for leiomyoma, induces TGF-β expression in LSMC and MSMC (Chegini, N. et al. J Clin Endocrinol Metab, 1999, 84:4138-43; Chegini, N. et al. Mol Hum Reprod, 2002, 8:1071-1078), E2-induced TGF-β or estrogen directly may regulate TIEG expression in leiomyoma. TIEG is also reported to trigger apoptotic cell programs by a mechanism involving the formation of reactive oxygen species (Ribeiro, A. et al. Hepatology, 1999, 30:1490-1497), often created as a result of local inflammatory response. Whether TGF-β-induced TIEG through the above mechanism results in apoptotic response in leiomyoma is not known; however, formation of reactive oxygen species may enhance local inflammatory response serving as an additional mediator of tissue fibrosis in leiomyoma.

[0202] With respect to Nur77, it regulates the expression of a group of genes whose products are involved in cell cycle regulation, differentiation, apoptosis, and malignant transformation (Rajpal, A. et al. EMBO J, 2003, 22:6526-36; Castro-Obregon, S. et al. J Biol Chem, 2004, 279:17543-17553). Evidence has been provided that Nur77 is the target of regulatory action of TGF-β in LSMC and MSMC, with pattern of expression resembling that observed in leiomyoma and myometrium, respectively (Chegini, N. et al. J Soc Gynecol Investig, 2003, 10:161-71). Although the nature and functional significance of Nur77 expression in leiomyoma, and regulation by TGF-β is unknown, malignant transformation in leiomyoma is rare, suggesting Nur77 may function as regulator of cell cycle in leiomyoma and myometrium. In addition to Nur77, the present inventors discovered that the expression of various genes functionally associated with cell cycle regulation and apoptosis are influenced by TGF-β autocrine/paracrine action, and balance of their expression may become a critical factor in leiomyoma growth and regression. Additional transcription factors whose expression was the target of TGF-β action in LSMC and MSMC are Runx1 and Runx2. This family of transcriptional factors consisting of Runx1 to Runx3, are integral components of signaling cascades mediated by TGF-β and bone morphogenetic proteins regulating various biological processes, including cell growth and differentiation, hematopoiesis and angiogenesis (Miyazono, K. et al. Oncogene, 2004, 23:4232-7; Shi, Y. and Massague, J. Cell, 2003, 113:685-700; Levanon, D. and Groner, Y. Oncogene, 2004, 23:4211-4219; McCarthy, T. L. et al. J Biol Chem, 2003, 278:43121-43119; Ito, Y. and Miyazono, K. Curr Opin Genet Dev, 2003, 13:43-47). The present inventors provided the first evidence for regulatory action of GnRHa therapy and GnRHa direct action on Runx1 and Runx2 expression in leiomyoma, myometrium as well as LSMC and MSMC, with GnRHa significantly inhibiting their expression, specifically in MSMC. Although Runx2 is expressed at low levels in leiomyoma and myometrium, Runx1 and Runx2 expression in LSMC and MSMC displayed a rapid response to TGF-β action in vitro, with Runx1 showing a significantly higher response. TGF-β activation of Smad and MAPK cascades regulates the expression of Runx2; however, interaction with Smad3 causes repression of Runx2 and downstream transcription activation of specific genes (Miyazono, K. et al. Oncogene, 2004, 23:4232-7; Shi, Y. and Massague, J. Cell, 2003, 113:685-700; Ito, Y. and Miyazono, K. Curr Opin Genet Dev, 2003, 13:43-47). It has recently been reported that TGF-β and GnRH activate the MAPK pathway (Ding, L. et al. J Clin Endocrinol Metab, 2004, 89:5549-5557), and GnRHa alter TGF-β-activated Smad in LSMC and MSMC (Xu, J. et al. J Clin Endocrinol Metab, 2003, 88:1350-1361), signaling cascade that may regulate Runx1 and Runx2 expression in these cells. Differential regulation of Runx1 and Runx2 by TGF-β and GnRHa imply their potential biological implication, specifically in regulating TGF-β action in leiomyoma microenvironment. This is particularly interesting since estrogen is also reported to enhance Runx2 activity, through a mechanism involving TGF-β type I receptor gene promoter, which contains several Runx binding sequences (McCarthy, T. L. et al. J Biol Chem, 2003, 278:43121-43119). Together, the identification of these and several other key transcription factors in LSMC and LSMC, and their regulation by TGF-β serving as integral components of inflammatory, cell cycle and apoptotic processes, further support the present inventors' hypothesis that a regulatory balance between these events is a key factor in progression of fibrosis mediated by TGF-β in leiomyoma.

[0203] Such balance between cell proliferation and apoptosis is critical to tissue homeostasis and central to leiomyoma growth and regression. Since both positive and negative signals determine the outcome of these events, the present inventors searched and identified several genes in this category in previous studies and in the current study as differentially expressed and regulated in leiomyoma and myometrium, as well as in LSMC and MSMC in response to TGF-β. The primary focus here was placed on p27Kip1, p57Kip2 and Gas1 expression, because of their regulation by GnRHa. It was found that TGF-β suppressed the expression of these genes in LSMC, and in a biphasic fashion accompanied by suppression of GAS1 expression in MSMC. TGF-β is known to regulate the expression of several cell cycle regulatory proteins including p27, which bind cyclin-dependent kinase (CDK), and by inhibiting catalytic activity of CDK-cyclin complex, regulate cell cycle progression and apoptosis (Reed, S. I. Nat Rev Mol Cell Biol, 2003, 4:855-64). However, TGF-β regulation of p57 expression is limited (Miyazono, K. et al. Oncogene, 2004, 23:4232-7; Moustakas, A. et al. Immunol Lett, 2002, 82:85-91; Kim, S. J. and Letterio, J. Leukemia, 2003, 17:1731-7) and available data suggests that TGF-β enhances p57 degradation through ubiquitin-proteasome pathway and Smad-mediated signaling (Nishimori, S. et al. J Biol Chem, 2001, 276:10700-10705). TGF-β-induced p57 degradation, CDK2 activation and cell proliferation is blocked by proteasome inhibitors and/or by overexpression of Smad7 (Nishimori, S. et al. J Biol Chem, 2001, 276:10700-10705; Yokoo, T. et al. J Biol Chem, 2003, 278:52919-52923; Brown, K. A. et al. Breast Cancer Res, 2004, 6:R130-R139; Kawaguchi, K. et al. Hum Pathol., 2004, 2004; 35:61-8). TGF-β-induced cell growth is also influenced by c-myc and the expression and activities of G1, G2, CDK and cyclins, and their inhibitors p15INκ4b and p21 (Miyazono, K. et al. Oncogene, 2004, 23:4232-7; Moustakas, A. et al. Immunol Lett, 2002, 82:85-91; Shi, Y. and Massague, J. Cell, 2003, 113:685-700), and they were identified among differentially expressed and regulated genes in LSMC and MSMC by TGF-β (Chegini, N. et al. J Soc Gynecol Investig, 2003, 10:161-71). With respect to Gas1, to the present inventors' knowledge, this observation is the first to demonstrate Gas1 expression in human uterine tissue and its regulation by TGF-β. GAS1 acts as a negative regulator of the cell cycle and has been positively correlated with the inhibition of endothelial cell apoptosis and the integrity of resting endothelium (Spagnuolo, R. et al. Blood, 2004, 103:3005-12). Similar to p15, p21 and p27, myc suppresses the expression of GAS1 by limiting myc-max heterodimers binding to their promoters, (Gartel, A. L. and Shchors, K. Exp Cell Res, 2003, 283:17-21; Lee, T. C. et al. Proc Natl Acad Sci USA, 1997, 94:12886-91). GAS1 is also reported to suppress growth and tumorigenicity of human tumor cells, and overexpression of MDM2, or p53 mutation inhibits Gas1-mediated action (Evdokiou, A. and Cowled, P. A. Exp Cell Res, 1998, 240:359-67). The present inventors have identified max and MDM2 expression in LSMC and MSMC and their regulation by TGF-β, suggesting their potential interactions in leiomyoma cellular environment. It was previously reported that TGF-β isoforms stimulate DNA synthesis, but not cell division in LSMC and MSMC, suggesting that p27, p57 and Gas1, as well as the products of other cell cycle regulators, may influence the effect of TGF-β action on leiomyoma cell growth late in the S to M phases of the cell cycle transition. Collectively, the identification of several genes in this category, whose products regulate cell cycle progression as target of TGF-β autocrine/paracrine action in LSMC and MSMC, further indicate the importance of TGF-β in regulating the balance between cell proliferation, cell cycle arrest and apoptosis whose outcome directs leiomyoma growth and/or regression.

[0204] Expression and activation of various components of signal transduction pathways are essential for mediating the cellular actions of growth factors, cytokines, chemokines, polypeptide hormones, and adhesion molecules. The present inventors identified several genes functionally belonging to this category as differentially expressed and regulated in LSMC and MSMC in response to TGF-β action, among them are member of family of Ras/Rho, Smads and MAPK, guanine nucleotide binding protein alpha, GTP-binding protein overexpressed in skeletal muscle, PTK2 protein tyrosine kinase 2, S100 calcium-binding protein A5, adenylate cyclase 9, CDC-like kinase 2, Cdc42 effector protein 4, retinoic acid induced 3, receptor tyrosine kinase-like orphan receptor 1, LIM protein and LIM domin kinase 2, phosphodiesterase 4D (cAMP-specific), protein phosphatase alpha, serine/threonine kinase 17a (apoptosis-inducing), focal adhesion kinase 2, STATs, etc. Although, Smad and MAPK pathways are known to be recruited and activated by TGF-β receptors, including in LSMC and MSMC, the components of other pathways are not the target of TGF-β. However, many growth factors, cytokines, chemokines, polypeptide hormones and adhesion molecules, expressed by LSMC and MSMC, either alone or through crosstalk with TGF-β receptor signaling may activate various components of the other pathways (Blobe, G. C. et al. N Engl J Med, 2000, 342:1350-1358; Chegini, N. “Implication of growth factor and cytokine networks in leiomyomas” In: Cytokines in human reproduction, J Hill ed. Wiley & Sons New York, 2000, 133-162; Chegini, N. et al. J Soc Gynecol Investig, 2003, 10:161-71), although only the expression and activation of a few of these molecules has been demonstrated in leiomyoma and myometrium, and in LSMC and MSMC. Since GPRK5 expression was detected in leiomyoma and myometrium and was the target of GnRHa action in LSMC and MSMC, the present inventors further investigated and found GPRK5 expression is regulated by TGF-β. The biological implication of GPRK5 and regulation by TGF-β in LSMC and MSMC is unclear; however, GPKs serve as negative regulators of GPCR mediated biological responses through the generation of second messengers, such as cAMP and calcium/calmodulin, and down-regulation of their activity (desensitization) (Luo, J. and Benovic, J. L. J Biol Chem, 2003, 278:50908-14; Miyagawa, Y. et al. Biochem Biophys Res Commun, 2003, 300:669-73; Cornelius, K. et al. J. Biol. Chem., 2001, 276:1911-1915). Activation of calcium/calmodulin is reported to alter Smad function, with inhibition of calmodulin resulting in an increase in activin-dependent induction of target genes, whereas its overexpression decreased activin- and TGF-βaction (Miyazono, K. et al. Oncogene, 2004, 23:4232-7; Moustakas, A. et al. Immunol Lett, 2002, 82:85-91; Shi, Y. and Massague, J. Cell, 2003, 113:685-700). The result suggests that GPRK may act as downstream regulator of TGF-β receptor singling possibly through modulation of PKC, MAPK and/or calmodulin and hence influencing TGF-β autocrine/paracrine action in leiomyoma.

[0205] Tissue remodeling is also a critical step in progression of fibrotic disorders and modulation of ECM, adhesion molecules and protease expression, and phenotypic changes toward a myofibroblastic phenotype are essential components of this process (Blobe, G. C. et al. N Engl J Med, 2000, 342:1350-1358; Gabbiani, G. J Pathol, 2003, 200:500-3; Phan, S. H. Chest, 2002, 122:286 S-289S; Shephard, P. et al. Thromb Haemost, 2004, 92:262-74; Gauldie, J. et al. Curr Top Pathol, 1999, 93:35-45). In this study and the previous study, the presenti inventors identified the expression of several genes in this category in leiomyoma and myometrium, as well as LSMC and MSMC including fibronectin, collagens, decorin, versican, desmin, vimentin, fibromodulin, several member of intergrin family, desmoplakin, extracellular matrix protein 1, enhancer of filamentation 1, porin, SPARC-like 1, syndecan 4, endothelial cell-specific molecule 1, as well as MMPs, TIMPs and ADAMs (Chegini, N. et al. J Soc Gynecol Investig, 2003, 10:161-71). The expression of fibronectin, vimentin, collagen type 1, fibromodulin, MMP1, MMP2 and MMP9, TIMPs in leiomyoma and myometrium has been demonstrated and showed that TGF-β, through the activation of MAPK, regulates the expression of some of these genes (Ding, L. et al. J Clin Endocrinol Metab, 2004, 89:5549-5557; Yokota, H. et al. J Biol Chem, 2003, 278:47275-47280; Dou, Q. et al. Mol Hum Reprod, 1997, 3:1005-14). Of particular interest are the elevated expression of decorin, vimentin and fibromodulin in leiomyoma since they are considered to regulate the outcome of tissue fibrosis and their ability to bind TGF-β, thus controlling TGF-β autocrine/paracrine action (Blobe, G. C. et al. N Engl J Med, 2000, 342:1350-1358; Chegini, N. “Implication of growth factor and cytokine networks in leiomyomas” In: Cytokines in human reproduction, J Hill ed. Wiley & Sons New York, 2000, 133-162; Levens E, Luo X, Ding L, Williams R S, Chegini N “Differential Expression of fibromodulin and Abl-interactor 2 in leiomyoma and myometrium and regulation by gonadotropin releasing hormone analogue (GnRHa) therapy” Fertil Steril, 2004, (In press); Chakravarti, S. Glycoconj J, 2002, 19:287-93). Since leiomyoma is believed to derive from transformation of myometrial connective tissue fibroblast and/or smooth muscle cells, the expression of vimentin in leiomyoma/LSMC imply that these cells have adopted a myofibroblastic characteristic. While granulation tissue myofibroblasts are derived from local fibroblasts, other cell types including smooth muscle cells have the potential to acquire a myofibroblastic phenotype (Lee, C. G. et al. J Exp Med, 2004, 200:377-389; Gabbiani, G. J Pathol, 2003, 200:500-3; Phan, S. H. Chest, 2002, 122:286 S-289S; Shephard, P. et al. Thromb Haemost, 2004, 92:262-74). These cells express various cytokines including GM-CSF, IL-11 and TGF-β of which GM-CSF is considered to participate in fibroblasts transformation into myofibroblasts and enhancing their TGF-β expression (Gabbiani, G. J Pathol, 2003, 200:500-3; Phan, S. H. Chest, 2002, 122:286 S-289S; Shephard, P. et al. Thromb Haemost, 2004, 92:262-74). It has been shown that GM-CSF is a key regulator of TGF-β in LSMC, and their interaction and as well as the involvement of other cytokines such as IL-11 and IL-13 regulate various events leading to leiomyoma formation and progression of fibrosis (Ding, L. et al. J Clin Endocrinol Metab, 2004, 89:5549-5557; Ding L, Luo X Chegini N “The expression of IL-13 and IL-15 in leiomyoma and myometrium and their influence on TGF-b and proteases expression in leiomyoma and myometrial smooth muscle cells and SKLM, leiomyosarcoma cell line” J Soc Gyncol Invest, 2004, 00, 00). IL-11 either alone or through the induction of TGF-β is reported to alter myofibroblasts ECM turnover resulting in the progression of tissue fibrosis (Lee, C. G. et al. J Exp Med, 2004, 200:377-389; Bamba, S. et al. Am J Physiol Gastrointest Liver Physiol, 2003, 285:G529-38). Despite the importance of tissue turnover in the pathophysiology of leiomyoma, little data are currently available of the extent of ECM expression and the difference that may exist compared to myometrium, that contribute to the fibrotic characteristic of leiomyoma.

[0206] In conclusion, as a continuation of work with TGF-β, the present inventors have provided the first large-scale example of gene expression profile of LSMC and MSMC identifying specific cluster of genes whose expression is targeted by autocrine/paracrine action of TGF-β. The present inventors validated the expression of a selective number of these genes functionally recognized to regulate inflammatory response, angiogenesis, cell cycle, apoptotic and non-apoptotic cell death, and ECM matrix turnover, events that are central to leiomyoma pathobiology. Based on the present work and previous work with TGF-β, the present inventors propose that the individual and combined action of TGF-β with other profibrotic cytokines such as IL-11, orchestrate local inflammatory responses mediated through and influenced by the expression of genes whose products regulate cell cycle progression, angiogenesis, apoptosis and tissue turnover, providing an environment leading to the progression of fibrosis.

### EXAMPLE 8

### Differential Expression of Fibromodulin and Abl-Interactor 2 in Leiomyoma and Myometrium and Regulation by Gonadotropin Releasing Hormone Analogue (GnRHa) Therapy

[0207] To validate the expression of fibromodulin and Abl-interactor 2 (Abi-2) that were identified as being differentially expressed in leiomyomata and myometrium and were regulated by GnRHa therapy. Fibromodulin is considered to have an anti-fibrotic role in wound repair and may be a biologically relevant modulator of TGF-beta activity during scar formation. Abl-interactor 2 encodes a non-receptor tyrosine kinase, c-Abl, that has been implicated in a variety of cellular processes including cell growth, reorganization of cytoskeleton, cell death and stress responses. Accordingly, a prospective study determining the tissue gene expression profile of myometrium and elimyoma using Real-time polymerase chain reaction (PCR) was carried out. Portions of leiomyoma and matched unaffected myometrium were collected from premenopausal women (N=27) who were scheduled to undergo hysterectomy for indications related to symptomatic leiomyoma. Seven of the patients received GnRHa therapy for three months prior to surgery. The untreated patients did not receive any medications (including hormonal therapy) during the 3 months prior to surgery.

[0208] Based on endometrial histology and the patient's last menstrual period, the tissue samples were identified as being from the proliferative (N=8) or the secretory (N=12) phase of the menstrual cycle. Total RNA was isolated and subjected to Real-time PCR. The results were analyzed using unpaired Student-test and Tuckey test (ANOVA) with a probability level of P<0.05 considered significant. These results for the first time document expression of fibromodulin and Abi-2 in leiomyoma and myometrium and provide evidence that the expression of these genes is influenced by ovarian steroids and possibly by a direct action of GnRHa on myometrial and leiomyoma cells.

### Materials and Methods

[0209] The following materials and methods describe those utilized in Examples 9-13. All the materials for Realtime PCR, immunoblotting and immunohistochemistry were purchased from APPLIED BIOSYSTEM (Foster City, Calif.), BIORAD (Hercules, Calif.), and VECTOR Laboratories (Burlingame, Calif.), respectively. Leuprolide acetate (GnRHa) was purchased from SIGMA Chemical (St Louis, Mo.), human recombinant TGF-β1, polyclonal antibody to CCN4 (WISP-1) were purchased from R&D System (Minneapolis, Minn.). Polyclonal antibodies to CTGF (CCN2), NOV (CCN-3), fubulin-1C and SA100A4 were purchased from SANTA CRUZ Biotechnology (Santa Cruz, Calif.). U0126, MEK1/2 synthetic inhibitor was purchased from CALBIOCHEM (San Diego, Calif.).

[0210] Portions of leiomyoma and matched myometrium were collected from premenopausal women (N=27) who were scheduled to undergo hysterectomy for symptomatic uterine leiomyomas at the University of Florida affiliated Shands Hospital. Of these patients seven received GnRHa therapy for a period of three months prior to surgery. The untreated patients did not receive any medications during the 3 months prior to surgery and, based on endometrial histology and patient last menstrual cycle, they were from proliferative (N=8) and secretory (N=12) phases of the menstrual cycle. To maintain a standard, leiomyomas used in this study were 2 to 3 cm in diameter. Prior approval was obtained from the University of Florida Institutional Review Board for the experimental protocol of this study.

[0211] Isolation and Culture of Leiomyoma and Myometrial Smooth Muscle Cells. Leiomyoma and myometrial smooth muscle cells (LSMC and MSMC) were isolated and cultured as previously described (Chegini, N. et al. Mol Hum Reprod, 2002, 8:1071-1078). Prior to use in these experiments, the primary cell cultures were characterized using immunofluorescence microscopy and antibodies to [symbol] smooth muscle actin, desmin and vimentin (Chegini, N. et al. Mol Hum Reprod, 2002, 8:1071-1078). LSMC and MSMC were cultured in 6-well plates at an approximate density of 10⁶ cells/well in DMEM-supplemented media containing 10% FBS. After reaching visual confluence, the cells were washed in serum-free media and incubated for 24 hrs under serum-free, phenol red-free condition (Chegini, N. et al. Mol Hum Reprod, 2002, 8:1071-1078; Ding, L. et al. J Clin Endocrinol Metab, 2004, 89:5549-5557). These cells were used for the following experiments.

[0212] The Expression of CCNs. Fibulin-1C and S100A4 and Regulation by TGF-beta and GnRHa. To determine whether TGF-beta and GnRHa influence the expression of CCNs, fibulin-1C and S100A4, LSMC and MSMC cultured as above were treated with TGF-β1 (2.5 ng/ml) or GnRHa (0.1 μM) for 2, 6 and 12 hrs (Ding, L. et al. J Clin Endocrinol Metab, 2004, 89:5549-5557). Since TGF-beta and GnRHa action in LSMC and MSMC is mediated in part through activation of MAPK pathway (Ding, L. et al. J Clin Endocrinol Metab, 2004, 89:5549-5557), the present inventors further determined whether inhibition of MAPK activation alters TGF-beta and GnRHa effects on CCNs, fibulin-1C and S100A4 expression. LSMC and MSMC were cultured as above and following pretreatment with U0126 (20 μg/ml), a synthetic inhibitor of ERK1/2, for 2 hrs (Ding, L. et al. J Clin Endocrinol Metab, 2004, 89:5549-5557), the cells were treated with TGF-beta1 (2.5 ng/ml) or GnRHa (0.1 M) for 2 hrs.

[0213] Activation of Smad also serves a major signaling pathway for TGF-β mediated action in LSMC and MSMC (Shi, Y. and Massague, J. Cell, 2003, 113:685-700; Xu, J. et al. J Clin Endocrinol Metab, 2003, 88:1350-1361). To determine whether TGF-β action in regulating the expression of CCNs, fibulin-1C and S100A4 is mediated through Smad pathway, LSMC and MSMC were cultured as above and transfected with Smad3 SiRNA designed using Dharmacon Inc (Lafayette, Colo.) tool with the target sequence of 5′-UCCGCAUGAGCUUCGUCAAAdTdT-3′ as previously described (Kim, B. C. et al. J Biol. Chem., 2004, 279:28458-28465). LSMC and MSMC at 80% confluence were transfected with SiRNA using transfectamine 2000 reagent according to the manufacturer's instructions (Inveritogen, Carlsbad, Calif.), with 200 μmol of SiRNA and 10 μl of transfection reagent for 48 hrs. The cells were then treated with TGF-β1(2.5 ng/ml) for 2 hrs. Untreated or cells treated with scrambled Smad3 SiRNA were used a negative control. Total RNA was isolated from the treated and untreated controls cells and subjected to Realtime PCR.

[0214] Realtime PCR. Total RNA was isolated using Trizol Reagent (invitrogen) and the level of TGF-β1, TGF-β3, CCNs, fibulin-1C and S100A4 mRNA expression was determined by Realtime PCR as previously described using Taqman and ABI-Prism 7700 (Applied Biosystems) and Sequence Detection System 1.91 software (Ding, L. et al. J Clin Endocrinol Metab, 2004, 89:5549-5557). Results were analyzed using comparative method following normalization of expression values to the 18S rRNA expression as previously described (Ding, L. et al. J Clin Endocrinol Metab, 2004, 89:5549-5557).

[0215] Western Blot Analysis and Immunohistochemical Localization. For Western blotting, total protein was isolated from small portions of GnRHa-treated and untreated leiomyoma and myometrium as previously described (Xu, J. et al. J Clin Endocrinol Metab, 2003, 88:1350-1361; Ding, L. et al. J Clin Endocrinol Metab, 2004, 89:5549-5557). The homogenates' protein contents were determined, and an equal amount was subjected to SDS-PAGE and transferred to polyvinyldiene difluoride membrane. The blots were incubated with anti-CCN2, CCN3, CCN4, fibulin-1C, and S100A4 antibodies for 1 hr at room temperature. The membranes were exposed to corresponding HRP-conjugated IgG and immunostained proteins were visualized using enhanced chemiluminesence reagents (AMERSHAM-PHARMACIA Biotech, Piscataway, N.J.) as previously described (Xu, J. et al. J Clin Endocrinol Metab, 2003, 88:1350-1361; Ding, L. et al. J Clin Endocrinol Metab, 2004, 89:5549-5557).

[0216] For immunohistochemical localization, tissue sections were prepared from formalin-fixed and paraffin-embedded leiomyoma and myometrium and subjected to standard processing. The sections were then immunostained using antibodies to CCN2, CCN3, CCN4, fibulin-1C, and S100A4 at 5 μg of IgG/ml for 2-3 hrs at room temperature. Following further processing including incubation with biotinylated secondary antibodies and avidin-conjugated HRP (ABC ELITE kit, VECTOR Laboratories, Burlingame, Calif.), the chromogenic reaction was detected with 3,3′-diaminobenzidine tetrahydrochloride solution. Omission of primary antibodies, or incubation of tissue sections with non-immune mouse-rabbit and -goat IgGs instead of primary antibodies at the same concentration during immunostaining served as controls (Xu, J. et al. J Clin Endocrinol Metab, 2003, 88:1350-1361).

[0217] All the experiments were performed at least three times in duplicate using independent cell cultures. Where appropriate the results are expressed as mean ±SEM and statistically analyzed using unpaired Student t-test and ANOVA. A probability level of P<0.05 was considered significant.

### EXAMPLE 9

### Expression of CCNs, Fibulin-1C and S100A4 in Leiomyoma and Myometrium and the effect of GnRHa Therapy

[0218] Using Realtime PCR the present inventors validated the expression of CCN2 (CTGF), CCN3 (NOV), CCN4 (WISP-1), fibulin-1C and S100A4 mRNA in leiomyoma and myometrium, demonstrating a significantly lower expression of CCN2, CCN3 and S100A4, with higher expression of fibulin 1C in leiomyoma as compared to myometrium (FIGS. 8A-8E; p<0.05). The level of CCN4 mRNA displayed a trend toward lower expression as compared to myometrium, but these levels did not reach statistical significance. GnRHa therapy resulted in significant reduction in CCN3, CCN4, and S100A4 expression in myometrium. Conversely, GnRHa therapy did significantly affect the expression of the above genes in leiomyoma with the exception of CCN2 (p<0.05; FIGS. 8A-8E).

[0219] As illustrated in FIG. 9, leiomyoma and matched myometrium from proliferative and secretory phase of the menstrual cycle express variable levels of CCN2, CCN3, CCN4 and fibulin-1C proteins; however, quantitating their levels was not attempted in this study. The SA100A4 antibody was not useful for Western analysis and several attempts failed to detect any immunoreactive proteins in either tissue or cell extracts. Immunohistochemically, CCN2, CCN3, CCN4, fibulin-1C and S100A4 were localized in leiomyoma and myometrial smooth muscle cells, connective tissue fibroblasts and vasculature (FIGS. 10A-10L). The present inventors observed mostly cytoplasmic localization with a considerable heterogeneity in immunostaining intensity among various cell types. Incubation with normal rabbit (FIG. 10K) or goat (FIG. 10L) sera resulted in a considerable reduction in immunostaining intensity associated with these cells.

### EXAMPLE 10

### Correlation of CCNs with TGF-β Expression

[0220] The present inventors have previously reported that leiomyoma and LSMC express elevated levels of TGF-β isoforms (TGF-β1, β2 and β3) as compared to myometrium and MSMC (Chegini, N. et al. J Clin Endocrinol Metab, 1999, 84:4138-4143; Chegini, N. et al. Mol Hum Reprod, 2002, 8:1071-1078; Chegini, N. et al. Mol Cell Endocrinol, 2003, 209:9-16; Xu, J. et al. J Clin Endocrinol Metab, 2003, 88:1350-1361; Ding, L. et al. J Clin Endocrinol Metab, 2004, 89:5549-5557; Tang, X. M. et al. Mol Hum Reprod, 1997, 3:233-240; Arici, A. and Sozen, I. Am J Obstet Gynecol, 2003, 188:76-83; Lee, B. S. and Nowak, R. A. J Clin Endocrinol Metab, 2001, 86:913-920; Arici, A. and Sozen, I. Fertil Steril, 2000, 73:1006-1011). Here, the present inventors confirmed these results showing that leiomyoma expressed a higher level of TGF-β1 compared to TGF-β3, with elevated levels as compared to myometrium (p<0.05; FIGS. 11A and 11B). In addition, leiomyoma express significantly higher levels of total and active TGF-β1 as compared to myometrium (p<0.05, FIGS. 11A and 11B). Since TGF-β action on tissue fibrosis is considered to be indirect and mediated through the induction of CCN2, the present inventors compared the expression of CCN2 with that of TGF-β1 and TGF-β3 in leiomyoma and myometrium. As shown in FIGS. 11A-11B and 8A-8E, not only the expression CCN2, but also the expression of CCN3 and CCN4 were inversely correlating with the expression of TGF-β1 and TGF-β3 in leiomyoma and myometrium.

### EXAMPLE 11

### The Expression of CCNs, Fibulin1C and S100A4 in LSMC and MSMC and regulation by TGF-β

[0221] To evaluate whether TGF-β regulates the expression of CCN2 in leiomyoma and myometrium, the present inventors isolated LSMC and MSMC from these tissues and showed that these cells express CCNs, fibulin1-C and S100A4 and regulated by TGF-β1 (FIGS. 12A-12E). As shown in FIGS. 12A-12E, TGF-β in a cell- and time-dependent manner significantly increased the expression of CCN2 by 10 to 25 fold, and CCN4 by two fold, while inhibiting the expression of CCN3 (P<0.05). However, TGF-β1 had a limited effect on the expression of fibulin-1C and S100A4, moderately inhibiting their expression in LSMC and MSMC, while increasing fibulin-1C expression in MSMC (p<0.05; FIGS. 12A-12E).

### EXAMPLE 12

### The Effect of GnRHa on the Expression of CCNs, Fibulin1C and S100A4 in LSMC and MSMC

[0222] Conventional and microarray studies, including the inventors' own, have identified the expression profile of several genes targeted by GnRHa in leiomyoma and myometrial smooth muscle cells (Luo, X. et al. Endocrinology, 2005, 146:1074-1095; Luo, X. et al. Endocrinology, 2005, 146:1096-1118). The present inventors further assessed the direct action of GnRHa on CCNs, fibulin-1C and S100A4 expression following treatment of serum-starved LSMC and MSMC with GnRHa. As illustrated in FIGS. 13A-13E, GnRHa (0.1 μM) treatment for 2, 6 and 12 hrs in a time- and cell-dependent manner inhibited the expression of CCN2, CCN3, CCN4, fibluin-1C and S100A4 in LSMC and MSMC, with an increased expression of S100A4 in LSMC after 2 and 6 hrs of treatment as compared to MSMC (p<0.05).

### EXAMPLE 13

### Inhibition of MAPK and Smad3 Pathways on TGF-β and GnRHa-Mediated Action

[0223] TGF-β and GnRH recruit and activate Smad and MAPK signaling pathways, respectively targeting the expression of many genes including fibronectin, collagen, MMPs, TIMPs, plasminogen activator inhibitor (PAI-1), c-fos and c jun in LSMC and MSMC (Xu, J. et al. J Clin Endocrinol Metab, 2003, 88:1350-1361; Ding, L. et al. J Clin Endocrinol Metab, 2004, 89:5549-5557; Arici, A. and Sozen, I. Fertil Steril, 2000, 73:1006-1011; Dou, Q. et al. Mol Hum Reprod, 1997, 3:1005-1014; Ma, C. and Chegini, N. Mol Hum Reprod, 1999, 5:950-954; Luo, X. et al. Endocrinology, 2005, 146:1074-1095; Luo, X. et al. Endocrinology, 2005, 146:1096-1118). To determine whether TGF-β and GnRHa regulate the expression of CCNs, fibulin-1C and S100A4 in LSMC and MSMC through these pathways, the cells were pretreated with MEK1/2 inhibitor (U0126). As shown in FIGS. 14A-14E pretreatment with U0126 altered the basal expression of CCN2, CCN3, CCN4, fibulin-1C and S100A4 in LSMC and MSMC, with a limited effect on TGF-β-mediated action on CCN2, but inhibited CCN3 expression in MSMC, and CCN4, fibulin-1C and S100A4 expression in both LSMC and MSMC (p<0.05). Pretreatment with U0126 also altered GnRHa-mediated action on CCN2, CCN3, CCN4, fibulin-1C and S100A4 expression in LSMC and MSMC in cell specific manner (FIGS. 14A-14E).

[0224] Transfection of LSMC and MSMC with Smad3 SiRNA, but not scrambled SiRNA significantly reduced the expression of Smad3 mRNA in LSMC and MSMC. Transfection with Smad3 SiRNA had a limited effect on the expression of CCN2, CCN4, fibulin-1C or S100A4 expression, although it increased the expression of CCN3 in both MSMC and LSMC (FIGS. 15A-15E). Treatment of Smad3 SiRNA-transfected cells with TGF-β1 for 2 hrs resulted in a significant enhancement of TGF-β1-mediated action on CCNs, fibulin-1C and S100A4 in both LSMC and MSMC (FIGS. 15A-15E).

[0225] In the present study, the present inventors demonstrated that leiomyoma and myometrium expresses several components of CCN family, as well as fibulin-1C and S100A4. The present inventors showed that leiomyoma expresses significantly lower levels of CCN2, CCN3 and S100A4, while expressing more fibulin-1C as compared to myometrium, with several cell types including LSMC and MSMC as their major source of local expression. The present inventors also provided the first evidence that GnRHa therapy alters the expression of CCN2 without affecting CCN3, CCN4 or fibulin-1C expression. The present inventors extended these observations and further demonstrated the expression of these genes in LSMC and MSMC and their regulation by TGF-β1 and GnRH through Smad and MAPK signaling pathway, respectively.

[0226] With respect to leiomyoma and myometrial expression of CCNs, fibulin-1C and S100A4 a limited correlation between levels of their expression and the phases of the menstrual cycle was found. Other studies have also reported a lack of menstrual cycle-dependent and lower expression of CCN1 (Cyr61), CCN2 and CCN5 in leiomyoma as compared to myometrium, except with higher expression of CCN5 in tissues from proliferative phase of the menstrual cycle and lowest expression detected during menstrual period (Sampath, D. et al. J Clin Endocrinol Metab, 2001, 86:1707-1715; Weston, G. et al. Mol Hum Reprod, 2003, 9:541-549; Mason, H. R. et al. Mol Hum Reprod, 2004, 10:181-187). Estrogen has been reported to regulate the expression of CCN5 in rat uterus (Mason, H. R. et al. Mol Hum Reprod, 2004, 10:181-187) and in human breast cancer cell lines (Sampath, D. et al. Endocrine, 2002, 18:147-159), as well as the expression of CCN1 in myometrial, but not in leiomyoma's explant cultures, whereas progesterone receptor agonist, RS020, alone or in combination with E2 had no effect (Sampath, D. et al. J Clin Endocrinol Metab, 2001, 86:1707-1715; Sampath, D. et al. Endocrine, 2002, 18:147-159; Sampath, D. et al. Endocrinology, 2001, 142:2540-2548). Considering that leiomyoma overexpresses estrogen and progesterone receptors as compared to myometrium, the expression profile of CCNs in these tissues suggests either a lack of, or an equal regulatory function for ovarian steroids. Since GnRHa therapy creates a hypoestrogenic condition, alteration in the expression of these genes in GnRHa-treated group imply a regulatory function for ovarian steroids. However, GnRHa therapy only affected the expression of CCN2, suggesting factors other than ovarian steroids may influence the expression of other members of CCN family in leiomyoma and myometrium. In this context, bFGF has been shown to increase the expression of CCN1 in myometrial, but not leiomyoma explants (Sampath, D. et al. J Clin Endocrinol Metab, 2001, 86:1707-1715). Unlike bFGF action on CCN1 expression, the present inventors found that TGF-β1 is equally effective in regulating the expression of CCN2, CCN3 and CCN4 in LSMC and MSMC, by increasing the expression of CCN2 and CCN4, while inhibiting CCN3.

[0227] TGF-β is a key profibrotic cytokine whose action on tissue fibrosis is considered to be indirect and mediated through the induction of CCN2 (Schnaper, H. W. et al. Am J Physiol Renal Physiol, 2003, 284:F243-F252; Ihn, H. Curr Opin Rheumatol, 2002, 14:681-685; Leask, A. and Abraham, D. J. Biochem Cell Biol, 2003, 81:355-363). Leiomyomas have several characteristic features typical of fibrotic disorder, including overexpression of TGF-β, TGF-β receptors and Smads as compared to normal myometrium (Dou, Q. et al. J Clin Endocrinol Metab, 1996, 81:3222-3230; Chegini, N. et al. J Clin Endocrinol Metab, 1999, 84:4138-4143; Chegini, N. et al. Mol Hum Reprod, 2002, 8:1071-1078; Chegini, N. et al. Mol Cell Endocrinol, 2003, 209:9-16; Xu, J. et al. J Clin Endocrinol Metab, 2003, 88:1350-1361; Ding, L. et al. J Clin Endocrinol Metab, 2004, 89:5549-5557; Tang, X. M. et al. Mol Hum Reprod, 1997, 3:233-240; Arici, A. and Sozen, I. Am J Obstet Gynecol, 2003, 188:76-83; Lee, B. S. and Nowak, R. A. J Clin Endocrinol Metab, 2001, 86:913-920; Arici, A. and Sozen, I. Fertil Steril, 2000, 73:1006-1011). Based on their expression profiles the present inventors have previously proposed that TGF-β1 and TGF-β3 play a more critical role in leiomyoma as compared to TGF-β2 (Dou, Q. et al. J Clin Endocrinol Metab, 1996, 81:3222-3230; Chegini, N. et al. J Clin Endocrinol Metab, 1999, 84:4138-4143; Chegini, N. et al. Mol Hum Reprod, 2002, 8:1071-1078; Chegini, N. et al. Mol Cell Endocrinol, 2003, 209:9-16; Xu, J. et al. J Clin Endocrinol Metab, 2003, 88:1350-1361; Ding, L. et al. J Clin Endocrinol Metab, 2004, 89:5549-5557). The present inventors provided further evidence in support of the inventors' previous observations and showed that leiomyoma express significantly higher levels of TGF-β1 and TGF-β3 as compared to matched myometrium, and with significantly higher TGF-β1 expression compared to TGF-β3. However, the expression profile of TGF-β1 and TGF-β3 in leiomyoma was inversely correlated, not only with CCN2 (CTGF), but also with CCN3 and CCN4 expression. Since most evidence supporting the involvement of CCN2 as a downstream signal in mediating TGF-β-induced tissue fibrosis comes from in vitro studies (Ihn, H. Curr Opin Rheumatol, 2002, 14:681-685; Leask, A. and Abraham, D. J. Biochem Cell Biol, 2003, 81:355-363), the present inventors isolated LSMC and MSMC from these tissues and showed, as expected, that TGF-β1 significantly increased the expression of CCN2 in these cells. The present inventors also found that TGF-β1 positively regulates the expression of CCN4, while suppressing CCN3 expression in these cells. To the present inventors' knowledge, this is the first study to demonstrate a differential regulatory function for TGF-β1 on CCN2, CCN3 and CCN4 expression in LSMC and MSMC, although TGF-β is known for regulating the expression of CCN2 in several cell types, with a few documented examples of regulation of CCN3 (Schnaper, H. W. et al. Am J Physiol Renal Physiol, 2003, 284:F243-F252; Ihn, H. Curr Opin Rheumatol, 2002, 14:681-685; Leask, A. and Abraham, D. J. Biochem Cell Biol, 2003, 81:355-363; Perbal, B. Lancet, 2004, 363:62-64; Brigstock, D. R. J Endocrinol, 2003, 178:169-175; Perbal, B. Mol Pathol, 2001, 54:57-79). To the present inventors' knowledge, this study is also the first to provide evidence for divergence between the expression of TGF-β isoforms and CCNs expression and regulation at tissue and cellular levels originating from these tissues. In hypertrophic scars gene expression profiling also indicated a lower expression of CCN2 accompanied by elevated expression of TGF-β1 as compared to normal skin (Tsou, R. et al. J Burn Care Rehabil, 2000, 21:541-550). The results of these studies indicate that a direct correlation between TGF-β and CCN2 expression may not serve as a common feature of all fibrotic disorders as previously proposed (Ihn, H. Curr Opin Rheumatol, 2002, 14:681-685; Leask, A. and Abraham, D. J. Biochem Cell Biol, 2003, 81:355-363).

[0228] TGF-β regulates its own expression in LSMC and MSMC and acting through downstream signaling from Smad and MAPK pathways regulates the expression of many other genes in different functional categories including cell cycle, transcription factors, cell and tissue structure, signal transduction and apoptosis (Dou, Q. et al. J Clin Endocrinol Metab, 1996, 81:3222-3230; Chegini, N. et al. J Clin Endocrinol Metab, 1999, 84:4138-4143; Xu, J. et al. J Clin Endocrinol Metab, 2003, 88:1350-1361; Ding, L. et al. J Clin Endocrinol Metab, 2004, 89:5549-5557; Arici, A. and Sozen, I. Fertil Steril, 2000, 73:1006-1011; Dou, Q. et al. Mol Hum Reprod, 1997, 3:1005-1014; Ma, C. and Chegini, N. Mol Hum Reprod, 1999, 5:950-954; Luo, X. et al. Endocrinology, 2005, 146:1074-1095; Luo, X. et al. Endocrinology, 2005, 146:1096-1118). Here, the present inventors demonstrated that pretreatment of LSMC and MSMC with U0126, a synthetic inhibitor of MEK1/2 inhibits the basal expression of CCNs expression and reverses TGF-β1 action. However, treatment of Smad3 SiRNA-transfected LSMC and MSMC with TGF-β1 resulted in a significant increase in CCNs expression. Although the results provide further evidence that components of both MAPK and Smad pathways are involved in mediating TGF-β action on the expression of CCNs (Ihn, H. Curr Opin Rheumatol, 2002, 14:681-685; Leask, A. and Abraham, D. J. Biochem Cell Biol, 2003, 81:355-363; Perbal, B. Lancet, 2004, 363:62-64; Brigstock, D. R. J Endocrinol, 2003, 178:169-175; Perbal, B. Mol Pathol, 2001, 54:57-79), including in LSMC and MSMC, a sharp increase in the expression of these genes in Smad3 SiRNA-transfected cells following TGF-β treatment was unexpected. The present inventors propose that crosstalk with components of other signaling pathways activated by TGF-β receptors may have opposing effect on TGF-β-induced CCNs, fibulin-1C and S100A4 expression in LSMC and MSMC. A recent study has reported that inhibition of ERK and c-jun NH(2)-terminal kinase (JNK), but not of p38 MAPK and PI3K, blocked TGF-β1-induced CCN2 expression and Smad2/3 phosphorylation in airway smooth muscle cells (Xie, S. et al. Am J Physiol Lung Cell Mol Physiol, 2005, 288:L68-L76). However, the inhibitory action of TGF-β on CCN4 expression in NCI H295R, adrenocortical cell line has been reported to be mediated through c-Jun in a Smad-independent manner (Lafont, J. et al. J Biol Chem, 2002, 277:41220-41229). The present inventors have recently reported that TGF-β through MEK1/2 regulates the expression of c-Jun in LSMC and MSMC (Ding, L. et al. J Clin Endocrinol Metab, 2004, 89:5549-5557), further supporting the involvement of multiple signaling pathways in TGF-β regulation of CCNs expression in LSMC and MSMC. Further consideration for TGF-β enhancement of CCNs expression in Smad3 SiRNA-transfected LSMC and MSMC may relate to elevated expression of Smad3 in leiomyoma (Xu, J. et al. J Clin Endocrinol Metab, 2003, 88:1350-1361), which similar to the expression of TGF-β1/β3, it is inversely correlate with CCNs expression. Such a condition may explain why the inhibition of Smad3 expression resulted in an increase in CCNs expression in LSMC and MSMC. Interestingly, plasminogen activator inhibitor (PAI-1) mRNA expression, a well known gene targeted by TGF-β was significantly inhibited following treatment of Smad3 SiRNA-transfected LSMC and MSMC with TGF-β (unpublished observation). In addition to TGF-β, other cytokines such as IL-4 and IL-13 that are expressed in leiomyoma (Ding, L. et al J Soc Gyncol Invest, 2004, 11:319A) also reported to attenuate TGF-β1-induced CCN2 expression by inhibiting TGF-β-stimulated ERK1/2 and Smad2/3 activation, while TNF-α and IL-1β reduced TGF-β-induced CCN2 without affecting TGF-α-induced Smad2/3 (Xie, S. et al. Am J Physiol Lung Cell Mol Physiol, 2005, 288:L68-L76). A functional Smad binding site and TGF-β responsive enhancer (TGFβRE) in CCN2 promoter has been found to be necessary for basal promoter activity in normal fibroblasts, whereas Smad element is not required for high CCN2 promoter activity in scleroderma fibroblasts (Leask, A. and Abraham, D. J. Biochem Cell Biol, 2003, 81:355-363).

[0229] These results with Smad3 SiRNA transfected LSMC and MSMC contrast with reports indicating the involvement of Smad pathway activation in TGF-β-induced CCN2 expression in other cell types (Ihn, H. Curr Opin Rheumatol, 2002, 14:681-685; Leask, A. and Abraham, D. J. Biochem Cell Biol, 2003, 81:355-363; Perbal, B. Lancet, 2004, 363:62-64; Brigstock, D. R. J Endocrinol, 2003, 178:169-175; Perbal, B. Mol Pathol, 2001, 54:57-79; Chen, Y. et al. Kidney International, 2002, 62:1149-1159). Although transfection with Smad3 SiRNA resulted in a significant inhibition of Smad3 mRNA expression in LSMC and MSMC, Smad3 inhibition coincided with significant increase, not only in CCN2 expression, but also CCN3, CCN4, fibulin-1C and S100A4 expression following TGF-β treatment. The mechanism underlying TGF-β induction of these genes is not clear from this study; however, TGF-β-induced CCN2 expression in dermal fibroblasts has been reported to involve a functional Smad binding site in the CTGF promoter since deletion or mutation at this site abolished the ability of TGF-β to induce CTGF promoter activity (Leask, A. and Abraham, D. J. Biochem Cell Biol, 2003, 81:355-363; Chen, Y. et al. Kidney International, 2002, 62:1149-1159; Holmes, A. et al. J Biol Chem, 2001, 276:10594-10601). Mutation of Smad element also reduced constitutive CTGF promoter activity, suggesting that the promoter is necessary for both basal and TGF-β-induced CTGF transcription (Leask, A. and Abraham, D. J. Biochem Cell Biol, 2003, 81:355-363; Chen, Y. et al. Kidney International, 2002, 62:1149-1159). However, in normal and scleroderma dermal fibroblasts mutation of Smad element is reported to affect TGF-α-induced, but not basal CTGF promoter activity (Chen, Y. et al. Kidney International, 2002, 62:1149-1159; Holmes, A. et al. J Biol Chem, 2001, 276:10594-10601). Smads alone is considered not activate transcription rather acting through recruitment of transcription factors to the promoter of their target genes and synergistic interactions with other signaling cascades they activate gene expression. Among the signaling pathway that interacts with Smads is MAPK (Shi, Y. and Massague, J. Cell, 2003, 113:685-700). The present inventors found that MEK1/2 inhibitor, U0126, in a cell specific manner reduced basal and TGF-β-induced CCN4, fibluin-1C and S100A4, but not TGF-β-induced CCN2 expression in LSMC and MSMC. Previous reports in other cells types indicated that preincubation with U0126, as well as tyrosine kinase, serine/threonine and protein kinase C inhibitors reduced the basal and TGF-β-induced CTGF promoter activity (Leask, A. and Abraham, D. J. Biochem Cell Biol, 2003, 81:355-363; Chen, Y. et al. Kidney International, 2002, 62:1149-1159; Holmes, A. et al. J Biol Chem, 2001, 276:10594-10601). Interestingly, MEK1 inhibitor (PD98059) did not affect TGF-β-induced CTGF, suggesting that the TGF-β induction of CTGF in mesangial cells requires MEK2, but not MEK1 (Chen, Y. et al. Kidney International, 2002, 62:1149-1159).

[0230] The present inventors also identified the expression of fibulin-1C and S100A4 in leiomyoma and myometrium, and in LSMC and MSMC and found that GnRHa therapy at tissue level and in vitro in a time- and cell-dependent manner altered their expression in LSMC and MSMC. TGF-β1 had a limited effect on the expression of fibulin-1C and S100A4 in these cells; it inhibited fibulin-1C and S100A4 in LSMC, while increasing fibulin-1C expression in MSMC. To the present inventors' knowledge, this is the first study to provide evidence for the expression of fibulin-1C and S100A4 at tissue level and their regulation in cell derived from these tissues in vitro. While this study was completed, a report showed that leiomyoma and myometrium expresses several members of S100 family including S100A4 using standard RT-PCR, and further demonstrated that S100A11 act as a suppressor of LSMC proliferation (Kanamori, T. et al. Mol Hum Reprod, 2004, 10:735-742). Although the biological significance of S100A4 in leiomyoma and myometrium is not clear from the present inventors' study, S100A4 expression has been associated with elevated levels of wild-type p53, and their physical interactions stimulate cells entry into the S phase of the cell cycle (Kanamori, T. et al. Mol Hum Reprod, 2004, 10:735-742; Grigorian, M. et al. J Biol Chem, 2001, 276:22699-22708). Furthermore, transfection of S100A4-negative cells with S100A4 constructs resulted in clonal death that was prevented by co-transfection with the anti-apoptotic gene bcl-2, which control calcium entry in different subcellular compartments (Chen, H. et al. Biochem Biophys Res Commun, 2001, 286:1212-1217; Brooke, J. S. et al. BMC Cell Biol, 2002, 3:2). Similar to CCN3 pro-angiogenic activities (Perbal, B. Lancet, 2004, 363:62-64; Brigstock, D. R. J Endocrinol, 2003, 178:169-175; Perbal, B. Mol Pathol, 2001, 54:57-79), S100A4 also promotes angiogenesis by acting directly as an angiogenic factor (Barraclough, R. Biochim Biophys Acta, 1998, 1448:190-199; Chen, H. et al. Biochem Biophys Res Commun, 2001, 286:1212-1217). Thus, the inhibitory action of GnRHa on CCN3 and S100A4 expression in leiomyoma may represent a mechanism by which GnRHa therapy regresses leiomyoma growth.

[0231] The interaction between fibulin-1C and CCN3 has been considered as an important step in CCN signaling involving ECM, cytoskeleton proteins and calcium (Perbal, B. et al. Proc Natl Acad Sci USA, 1999, 96:869-874; Argraves, W. S. et al. EMBO Rep, 2003, 4:1127-1131; Timpl, R. et al. Nat Rev Mol Cell Biol, 2003, 4:479-489; Tran, H. et al. J Biol Chem, 1995, 270:19458-19464). Similar to CCN3, fibulin-1C also contains a calcium-binding type II EGF-like domain enabling fibulin-1C to interact with extracellular domain of heparin-binding EGF (HB-EGF) (Perbal, B. et al. Proc Natl Acad Sci USA, 1999, 96:869-874; Argraves, W. S. et al. EMBO Rep, 2003, 4:1127-1131; Timpl, R. et al. Nat Rev Mol Cell Biol, 2003, 4:479-489; Tran, H. et al. J Biol Chem, 1995, 270:19458-19464; Tran, H. et al. J Biol Chem, 1997, 272:22600-22606). This EGF-like domain is also present in fibronectin and their interaction is considered to result in modification of calcium levels in surrounding cellular environment (Chegini, N. “Implication of growth factor and cytokine networks in leiomyomas” In: Cytokines in human reproduction, J Hill ed. Wiley & Sons, New York, pp. 133-162, 2000). Yeast two-hybrid screens have indicated that latent TGF-β binding protein (LTBP-3) also interacts with proHB-EGF through the EGF-like domains, and interaction among HB-EGF, LTBP-3 and fibulin-1C to serve as a novel function for HB-EGF action between cell and ECM (Grigorian, M. et al. J Biol Chem, 2001, 276:22699-22708). Since EGF, HB-EGF, TGF-BP and their receptors as well as fibronectin are expressed in leiomyoma and myometrium (Sherbet, G. V. and Lakshmi, M. S. Anticancer Res, 1998, 18:2415-2421), it is likely that their interactions may also influence communication between cellular and ECM compartment in leiomyoma. CCN3 has also been reported to interact with Notchl, a member of a family of highly conserved transmembrane receptors, involved in differentiation, proliferation and apoptosis, fundamental biological processes during embryonic development (Perbal, B. Lancet, 2004, 363:62-64; Brigstock, D. R. J Endocrinol, 2003, 178:169-175; Perbal, B. Mol Pathol, 2001, 54:57-79; Lin, C. G. et al. J Biol Chem, 2003, 278:24200-24208; Yu, C. et al. J Pathol, 2003, 201:609-615; Sakamoto, K. et al. J Biol Chem, 2002, 277:29399-29405; Soon, L. L. et al. J Biol Chem, 2003, 278:11465-11470; Margalit, O. et al. Br J Cancer, 2003, 89:314-319; Xie, D. et al. Cancer Res, 2001, 61:8917-8923; Saxena, N. et al. Mol Cell Biochem, 2001, 228:99-104). CCN3 is expressed in many different types of tumors and shows positive or negative effects on tumorigenesis and metastasis, however S100A4 is not tumorigenic rather it is elevated during metastasis suggesting a role in tumor progression (Brooke, J. S. et al. BMC Cell Biol, 2002, 3:2; Davies, M. et al. DNA Cell Biol, 1995, 14:825-832). Immunohistochemically, CCN2, CCN3 and CCN4 as well as fibulin 1C and S100A4 were detected in association with ECM and cytoplasmic compartments of various cell types in leiomyoma and myometrium with significant overlap in their distribution. CCN3 is detected in ECM, culture conditioned media, cytoplasm and nucleus, while S100A4 is essentially a cytoplasmic protein, although it is also secreted (Perbal, B. Lancet, 2004, 363:62-64; Brigstock, D. R. J Endocrinol, 2003, 178:169-175; Perbal, B. Mol Pathol, 2001, 54:57-79; Duarte, W. R. et al. Biochem Biophys Res Commun, 1999, 255:416-420). The results suggest that CCNs, fibulin-1C and S100A4 could interact intra- and extra-cellularly, influencing various cellar events during physiological and pathological conditions. For instance CCN3 through interaction with S100A4 might alter cytoskeletal organization, facilitate cell motility and cell proliferation, since CCN3 decreases adhesive capacity while increasing motility of Ewing's transfected cells (Margalit, O. et al. Br J Cancer, 2003, 89:314-319), and S100A4 affecting cytoskeleton assembly (Heizmann, C. W. and Cox, J. A. Biometals, 1998, 11:383-397; Barraclough, R. Biochim Biophys Acta, 1998, 1448:190-199). Inhibition of S100A4 has also been reported to decrease matrix metalloproteinases expression a mechanism that may account for S100A4 reduction in cellular migration (Merzak, A. et al. Neuropathol Appl Neurobiol, 1994, 20:614-619; Bjornland, K. et al. Cancer Res, 1999, 59:4702-4708).

[0232] In conclusion, the present inventors have provided further evidence that leiomyoma expresses elevated levels of TGF-β1 and TGF-β3 compared to myometrium whose expression inversely correlates with CCN2 as well as CCN3 and CCN4 expression in leiomyoma. The expression of CCNs as well as fibulin-1C and S100A4 is targeted by GnRHa therapy, and under in vitro condition TGF-β acting through MAPK/ERK and Smad pathways differential regulates their expression in LSMC and MSMC. Taken together, to the present inventors' knowledge, this study is the first to provide evidence for divergence of TGF-β and CCNs expression and regulation at cell and tissue levels from the same origin implying that CCN2 may not represent a common feature of fibrotic disorder associated with TGF-β overexpression.

### Materials and Methods

[0233] The following materials and methods describe those utilized in Examples 14-16. The materials for Realtime PCR, Western blotting and immunohistochemistry were purchased from Applied Biosystem (Foster City, Calif.), BioRad (Hercules, Calif.), and Vector Laboratories (Burlingame, Calif.), respectively as previously described (Ding, L. et al. J Clin Endocrinol Metab., 2004, 89:5549-5557; Xu, J. et al. J Clin Endocrinol Metab., 2003, 88:1350-1361). Polyclonal antibody generated in goat against recombinant FMOD was purchased from Santa Cruz Biotechnology (Santa Cruz, Calif.).

[0234] Portions of leiomyoma and matched myometrium were collected from premenopausal women (N=27) who were scheduled to undergo hysterectomy for symptomatic uterine leiomyomas at the University of Florida affiliated Shands Hospital. Of these patients, seven received GnRHa therapy for a period of three months prior to surgery. The untreated patients did not receive any medications during the previous 3 months prior to surgery and based on endometrial histology and the patient's last menstrual period they were identified as being from proliferative (N=8) or secretory (N=12) phases of the menstrual cycle. To maintain a standard, leiomyomas used in this study were 2 to 3 cm in diameter. Prior approval was obtained from the University of Florida Institutional Review Board for the experimental protocol of this study. Following collection, total RNA and protein was isolated from these tissues and subjected to Realtime PCR, Western blotting or processed for immunohistochemistry and cell culturing as previously described (Ding, L. et al. J Clin Endocrinol Metab., 2004, 89:5549-5557; Xu, J. et al. J Clin Endocrinol Metab., 2003, 88:1350-1361).

[0235] Realtime PCR. Briefly, total RNA was isolated from leiomyoma and matched myometrium using Trizol Reagent (INVITROGEN, Carlsbad, Calif.) and complimentary DNA was generated from 2 μg of total RNA using Taqman reverse transcription reagent. The newly synthesized cDNA was used for PCR performed in 96-well optical reaction plates with cDNA equivalent to 100 ng RNA in a volume of 50 μl reaction containing 1× Taqman Universal Master Mix, optimized concentrations of FAM-labeled probe and specific forward and reverse primer for FMOD selected from Assay on Demand (APPLIED BIOSYSTEMS). Controls included RNA subjected to RT-PCR without reverse transcriptase and PCR with water replacing cDNA. The results were analyzed using a comparative method and the values were normalized to the 18S rRNA expression and converted into fold change based on a doubling of PCR product in each PCR cycle, according to the manufacturer's guidelines as previously described (Ding, L. et al. J Clin Endocrinol Metab., 2004, 89:5549-5557; Luo, X. et al. Endocrinology, 2005, 146:1074-1096).

[0236] Western Blot Analysis and Immunohistochemistry. For Western blotting small pieces of tissues were lysed in a lysis buffer, centrifuged and the supernatants were collected and their total protein content was determined using a conventional method (Pierce, Rockford, Ill.) as previously described (Xu, J. et al. J Clin Endocrinol Metab., 2003, 88:1350-1361; Ding, L. et al. J Clin Endocrinol Metab., 2004, 89:5549-5557). Equal amounts of sample proteins were subjected to PAGE, transferred to polyvinylidiene difluoride (PVDF) membranes, and following further processing, the blots were incubated with FMOD antibody for 1 hr at room temperature. The blots were washed with washing buffer and exposed to corresponding HRP-conjugated IgG, and immunostained proteins were visualized using enhanced chemiluminescence reagents (Amersham-Pharmacia Biotech, Piscataway, N.J.).

[0237] For immunohistochemistry, tissue sections were prepared from formalin-fixed and paraffin embedded leiomyoma and myometrium and following standard processing immunostained using antibodies to FMOD at 5 μg of IgG/ml for 2-3 hrs at room temperature. Following further standard processing, chromogenic reaction was detected with 3,3′-diaminobenzidine tetrahydrochloride solution (Xu, J. et al. J Clin Endocrinol Metab., 2003, 88:1350-1361). Omission of primary antibody, or incubation of tissue sections with non-immune goat IgG instead of primary antibody at the same concentration served as controls.

[0238] The Expression and Regulation of Fibromodulin in LSMC and MSMC by TGF-beta and GnRHa. Leiomyoma and myometrial smooth muscle cells (LSMC and MSMC) were isolated, characterized and cultured as previously described (Chegini, N. et al. Mol Hum Reprod., 2002, 8:1071-1078). LSMC and MSMC were cultured in 6-well plates at an approximate density of 10⁶ cells/well in DMEM-supplemented media containing 10% FBS. After reaching visual confluence, the cells were washed in serum-free media and incubated for 24 hrs under serum-free, phenol red-free conditions (Chegini, N. et al. Mol Hum Reprod., 2002, 8:1071-1078).

[0239] To determine whether TGF-β and GnRHa influence the expression of FMOD, LSMC and MSMC cultured as above were treated with TGF-β1 (2.5 ng/ml) or GnRHa (0.1 μM) for 2, 6 and 12 hrs (Xu, J. et al. J Clin Endocrinol Metab., 2003, 88:1350-1361; Ding, L. et al. J Clin Endocrinol Metab., 2004, 89:5549-5557). Since TGF-β mediates its action in part through activation of the MAPK pathway (Ding, L. et al. J Clin Endocrinol Metab., 2004, 89:5549-5557), the present inventors determined whether inhibition of the MAPK pathway alter TGF-β mediated action in regulating the expression of FMOD. LSMC and MSMC were cultured as above and following pretreatment with U0126 (20 μM), a synthetic inhibitor of ERK1/2, for 2 hrs, the cells were treated with TGF-β1 or GnRHa for 2 hrs (Ding, L. et al. J Clin Endocrinol Metab., 2004, 89:5549-5557). Activation of Smad also serves as a major signaling pathway for TGF-β mediated action including in LSMC and MSMC (Xu, J. et al. J Clin Endocrinol Metab., 2003, 88:1350-1361). To determine whether TGF-β mediated action through the Smad pathway regulates the expression of FMOD, LSMC and MSMC were cultured as above and transfected with Smad3 SiRNA as previously described (Luo, X. et al. Endocrinology, 2005, 146:1097-1118). LSMC and MSMC at 80% confluence were transfected with 200 pmol of SiRNA using transfectamine 2000 reagent (10 μl) according to the manufacturer's instructions (INVITROGEN, Carlsbad, Calif.) for 48 hrs. The cells were then treated with TGF-β1 (2.5 ng/ml) for 2 hrs. Untreated or cells treated with scrambled Smad3 SiRNA were used as a negative control. Total RNA was isolated from the treated and untreated controls cells and subjected to Realtime PCR.

[0240] Where appropriate, the results are expressed as mean ±SEM and statistically analyzed using unpaired Student t-test and variance (ANOVA) using Tukey test. A probability level of P<0.05 was considered significant.

### EXAMPLE 14

### Expression of FMOD in Leiomyoma and Myometrium

[0241] Using Realtime PCR, the present inventors demonstrated that leiomyoma and matched myometrium used for microarray analysis express FMOD mRNA with a considerable overlap between microarray analysis and Realtime PCR data. The present inventors evaluated the relative expression of FMOD and the influence of the menstrual cycle using total RNA isolated from leiomyoma and matched myometrium from proliferative (N=8) and secretory (N=12) phases of the menstrual cycle with Realtime PCR. The results indicated that FMOD is expressed at a significantly higher level in leiomyoma as compared to matched myometrium from the proliferative phase of the menstrual cycle (p<0.05; FIG. 16). There was a trend toward a lower expression of FMOD in leiomyoma compared to myometrium from the secretory phase, however these values did not reach statistical significance (FIG. 16). The relative level of FMOD expression was significantly elevated in myometrium from the secretory phase compared to proliferative phase (p<0.05) with a trend toward lower expression in leiomyoma (FIG. 16). The expression of FMOD was significantly reduced in both leiomyoma and myometrium in women who received GnRHa therapy (N=7), reaching the levels observed in myometrium from the proliferative phase (P=0.05; FIG. 16).

[0242] To further assess the expression of FMOD, total protein was isolated from these tissues and subjected to Western blot analysis. As shown in FIG. 17, leiomyoma (L) and matched myometrium (M) from proliferative and secretory phases of the menstrual cycle contain immunoreactive FMOD and with higher intensity in L compared with M in tissue from the proliferative phase, with an increase in intensity in tissues from the secretory phase. There was a reduction in FMOD immunoreactive intensity in L and M from the GnRHa treated group compared to tissues from the secretory phase (FIG. 17). Immunoreactive FMOD was also localized in leiomyoma and myometrial tissue sections with staining associated with myometrial and leiomyoma smooth muscle cells, as well as connective tissue fibroblasts and vasculature (FIGS. 18A-18D). Incubation of tissue sections with non-immune goat IgGs instead of primary antibody at the same concentration served as control and showed a substantial reduction in staining intensity associated with these cells.

### EXAMPLE 15

### Expression of FMOD in LSMC and MSMC and Regulation by TGF-β

[0243] The present inventors have recently characterized the expression profile of LSMC and MSMC in response to TGF-β and GnRHa using gene microarray which indicated that the expression of several components of ECM including FMOD are the target of their regulatory action (Luo, X. et al. Endocrinology, 2005, 146:1097-1118). To further evaluate the influence of TGF-β on FMOD expression in leiomyoma and myometrium, the present inventors isolated LSMC and MSMC and following treatment with TGF-β1 (2.5 ng/ml) determined the expression of FMOD in these cells. As shown in FIGS. 19A-19D, treatment with TGF-β1 in a cell- and time-dependent manner significantly increased the expression of FMOD in MSMC with a gradual reduction in expression reaching control levels after 12 hrs (P<0.05). TGF-β had either no effect, or inhibited FMOD expression in LSMC after 12 hrs of treatment (FIGS. 19A-19D; P<0.05). Treatment of LSMC and MSMC with GnRHa (0.1 μM) for 2 and 6 hrs had no significant effect on FMOD expression; however, it inhibited FMOD after 12 hrs of treatment (FIGS. 19A-19D; P<0.05).

### EXAMPLE 16

### Inhibition of MAPK and Smad3 Pathways on TGF-β- and GnRHa-Mediated Actions

[0244] TGF-β recruits and activates several intracellular signaling pathways, specifically Smad and MAPK pathways. TGF-β through the activation of these pathways regulates the expression of many genes including fibronectin and collagen in LSMC and MSMC (Xu, J. et al. J Clin Endocrinol Metab., 2003, 88:1350-1361; Ding, L. et al. J Clin Endocrinol Metab., 2004, 89:5549-5557; Luo, X. et al. Endocrinology, 2005, 146:1097-1118). To determine whether TGF-β regulates the expression of FMOD through these pathways, LSMC and MSMC were pretreated with U0126 followed by treatment with TGF-β1 (2.5 ng/ml) for 2 hrs. As shown in FIGS. 19A-19D, pretreatment with U0126 increased the basal expression of FMOD in LSMC and MSMC and TGF-β-mediated action in LSMC, while inhibiting TGF-β-mediated action in MSMC (p<0.05). Pretreatment with U0126 also increased the expression of FMOD in MSMC and LSMC treated with GnRHa as compared to untreated control and U0126-treated cells, respectively (FIGS. 19A-19D; P<0.05).

[0245] Transfection of LSMC and MSMC with Smad3 SiRNA, but not scrambled SiRNA significantly inhibited the expression of Smad3 in both cell types, and resulted in a trend toward increased basal expression of FMOD in MSMC and LSMC (FIGS. 19A-19D). However Smad3 SiRNA transfection significantly reduced TGF-β-induced FMOD in MSMC reaching control levels, without affecting LSMC (FIGS. 19A-19D; P<0.05).

[0246] Using microarray gene expression profiling, the present inventors have identified fibromodulin (FMOD) among the differentially expressed genes in leiomyoma and myometrium and in LSMC and MSMC treated with TGF-β1 (Luo, X. et al. Endocrinology, 2005, 146:1074-1096; Luo, X. et al. Endocrinology, 2005, 146:1097-1118). In the present study, the present inventors validated the expression of FMOD using Realtime PCR showing a considerable overlap with microarray observations. The present inventors extended this work and demonstrated the menstrual cycle-dependent expression of FMOD in leiomyoma and myometrium. These results indicated that the expression of FMOD is significantly higher in leiomyoma compared to myometrium from the proliferative, but not the secretory phase of the menstrual cycle, suggesting a regulatory function for ovarian steroids on FMOD expression. The influence of the menstrual cycle on the expression of FMOD appears to be tissue specific, because of an increase in myometrial expression of FMOD from the secretory phase compared to the proliferative phase, with lower levels in leiomyoma. Since GnRHa therapy creates a hypoestrogenic condition, these results, as well as a significant reduction in the expression of FMOD in both leiomyoma and myometrium in women who received GnRHa therapy, further support the involvement of ovarian steroids in regulating FMOD expression in these tissues. The present inventors also demonstrated the expression of FMOD in LSMC and MSMC, and showed differential regulation by TGF-β1 and GnRHa through Smad and MAPK signaling pathways, respectively.

[0247] The biological significance of FMOD expression in leiomyoma and myometrium await detailed investigation, however, FMOD was found in association with several cell types in leiomyoma and myometrium and was differentially regulated by TGF-β in MSMC and to a certain extend in LSMC. Fibromodulin is a collagen-binding protein widely expressed in many connective tissues and appears to play an important role in ECM remodeling, specifically in tissues that undergo extensive tissue turnover such as cervix during ripening, fetal wound healing, atherosclerosis and bleomycin-induced lung fibrosis (Westergren-Thorsson, G. et al. Biochim Biophys Acta., 1998, 1406:203-213; Strom, A. et al. Histol Histopathol., 2004, 19:337-347; Soo, C. et al. Am J Pathol., 2000, 157:423-433; Venkatesan, N. et al. Am J Respir Crit. Care Med, 2000, 161:2066-2073). Fibromodulin is a member of the proteoglycan family including biglycan, decorin, lumican and chondroadherin small molecules with important roles in binding to other matrix molecules either to aid fibrillogenesis or act as bridging molecules between various tissue elements (Blochberger, T. C. et al. J Biol Chem, 1992, 267: 347-352; Noonan, D. M. and Hassell, J. R. Kidney Int, 1993, 43:53-60; Yanagishita, M. Acta Pathol Jpn, 1993, 43:283-293). It has been reported that for each collagen molecule there is at least one FMOD binding site, however these sites are limited in number and are highly specific (Hedbom, E. and Heinegard, D. J Biol Chem, 1993, 268:27307-27312). Evidence suggests that FMOD regulates the formation of the collagen fibrils network through its interaction with collagen types I, II and XII (Font, B. et al. Matrix Biol, 1996, 15:341-348), whose expressions have been documented in leiomyoma and myometrium (Stewart, E. A. et al. J Clin Endocrinol Metab., 1994, 79:900-906; Stewart, E. A. et al. J Soc Gynecol Investig., 1998, 5:44-47; Ding, L. et al. J Clin Endocrinol Metab., 2004, 89:5549-5557; Leppert, P. C. et al. Fertil Steril., 2004, 82(Suppl 3):1182-1187). Fibromodulin, like decorin, binds to type I and type II collagens and through interaction with TGF-β regulates the local biological activity and retention of TGF-β within the ECM (Fukushima, D. et al. J Biol Chem, 1993, 268:22710-22715; Hildebrand, A. et al. Biochem J, 1994, 302:527-534). Since leiomyoma and myometrium express biglycan and decorin (Luo, X. et al. Endocrinology, 2005, 146:1074-1096; Luo, X. et al. Endocrinology, 2005, 146:1097-1118; personal observations), alteration in the expression of FMOD could influence the organization of collagen and local availability of TGF-β, thus influencing the outcome of fibrosis in leiomyoma.

[0248] Leiomyomas have several characteristic features typical of fibrotic disorders, including overexpression of TGF-β, TGF-β receptors and Smads as compared to normal myometrium (Dou, Q. et al. Mol Hum Reprod., 1997, 3:1005-1014; Chegini, N. et al. Mol Hum Reprod., 2002, 8:1071-1078; Chegini, N. et al. J Soc Gynecol Investig., 2003, 10:161-171; Chegini, N. et al. Mol Cell Endocrinol., 2003, 209:9-16; Chegini, N. and Kornberg, L. J Soc Gynecol Investig., 2003, 10:21-26; Xu, J. et al. J Clin Endocrinol Metab., 2003, 88:1350-1361). Since leiomyoma also express a higher level of FMOD compared to myometrium the present inventors expected a positive regulatory function for TGF-β on the expression of FMOD in LSMC as compared to MSMC. However, under culture conditions of the present inventors' study, TGF-β resulted in a significant increase (5-10 fold) in FMOD expression in MSMC which declined to control levels, compared to a slight reduction in the expression in LSMC in a time-dependent manner. How TGF-β causes differential regulation of FMOD expression in MSMC and LSMC is unclear from this study and requires detailed investigation; however, it is clear that TGF-β mediated signaling though MAPK/ERK and Smad in MSMC are involved in differential regulation of TGF-β action in these cells. In other tissues such as the cervix during ripening, the expression of collagen type I and III, versican, biglycan, decorin and FMOD as well as TGF-β1 are reported to induce no significant change in small proteoglycans expression despite an almost 50% decrease in their concentration (Westergren-Thorsson, G. et al. Biochim Biophys Acta., 1998, 1406:203-213). However, in a rat model that transits from scarless fetal-type repair to adult-type repair, the expression of FMOD is reported to decrease as compared to TGF-β and TGF-β receptors, and when compared to adult wound healing (Soo, C. et al. Am J Pathol., 2000, 157:423-433). These results in a rat model of wound healing and scar tissue formation is comparable to the present inventors' observations in leiomyoma, suggesting that FMOD may act as a biologically relevant modulator of TGF-β activity during tissue fibrosis. TGF-β1 is reported to modulate the synthesis and accumulation of decorin, biglycan, and FMOD in cartilage explants cultured under conditions in which aggrecan synthesis remains relatively constant, with FMOD content most rapidly augmented in response to TGF-β1 (Burton-Wurster, N. et al. Osteoarthritis Cartilage, 2003, 11:167-176). In addition to TGF-β regulation of FMOD in dermal skin fibroblasts, CTGF has also been reported to increase the expression of FMOD, as well as the expression of type I and III collagens and basic fibroblast growth factor, without influencing the expression of HSP47, decorin, biglycan, and versican (Wang, J. F. et al. Wound Repair Regen., 2003, 11:220-229). In the gene expression profiling studies described herein, the present inventors found a significantly lower expression of CTGF in leiomyoma as compared to matched myometrium, however it was increased in TGF-β-treated LSMC and MSMC (Luo, X. et al. Endocrinology, 2005, 146:1097-1118). These results suggest that these cytokines could influence FMOD expression at the tissue level differently when compared to their action in vitro. Furthermore, the present inventors have reported that TGF-β self-regulates its own expression and the expression of CTGF and TGF-β through the activation of MAPK pathway regulates the expression of type I collagen and fibronectin in LSMC and MSMC (Ding et. al., 2004). In mouse uterus, analysis of decorin, biglycan, lumican and FMOD expression from day 1 to day 7 of pregnancy indicated that decorin was present together with lesser amounts of lumican in the stroma before the onset of decidualization, whereas biglycan and FMOD were almost absent (San Martin, S. et al. Reproduction, 2003, 125:585-595). Fibromodulin was weakly expressed in the non-decidualized stroma, but only after implantation (San Martin, S. et al. Reproduction, 2003, 125:585-595).

[0249] Fibromodulin expression has been found only in mitotic, but not in mitomycin C-induced postmitotic skin fibroblasts, or in endothelial cells and keratinocytes, and is considered to serve as a specific marker for mitotic activity which could indicate cell ageing (Petri, J. B. et al. Mol Cell Biol Res Commun., 1999, 1:59-65). Interestingly, matrix metallporteinases (MMPs) such as MMP-2, -8 and -9, and specifically MMP-13 are reported to effectively cleave FMOD in fresh articular cartilage, and the cleaved product was found to be identical to that observed in cleaved FMOD from cartilage explant cultures treated with IL-1 (Heathfield, T. F. et al. J Biol. Chem., 2004, 279:6286-6295). Since leiomyoma and myometrium express several MMPs including 2, 8, 9 and 13, and proinflammatory cytokines such as IL-1, they may target FMOD degradation in a manner similar to that demonstrated in other tissues (Dou, Q. et al. Mol Hum Reprod., 1997, 3:1005-1014, Lee, B. S. et al. J Clin Endocrinol Metab., 1998, 83:219-223, Tang, X. M. et al. Mol Hum Reprod., 1997, 3:233-240; Palmer, S. S. et al. J Soc Gynecol Investig., 1998, 5:203-209). Fibromodulin deficiency is reported to lead to a significant reduction in tendon stiffness in FMOD (−/−) mice, with irregular collagen fibrils and increased frequency of small diameter fibrils, suggesting that FMOD is required early in collagen fibrillogenesis (Chakravarti, S. Glycoconj J, 2002, 19:287-293). Thus, altered expression of FMOD would be expected to impact the organization of collagen in various fibrotic disorders such as leiomyoma.

[0250] In summary, these results document the first example of expression of FMOD in leiomyoma and myometrium and provide evidence for direct regulatory action of GnRHa and TGF-β on its expression in LSMC and MSMC. Since FMOD acts as key regulator of connective tissue remodeling its differential expression in leiomyoma and myometrium may influence leiomyoma fibrotic characteristics.

[0251] All patents, patent applications, provisional applications, and publications referred to or cited herein, whether supra or infra, are incorporated by reference in their entirety, including all figures, tables, and sequences, to the extent they are not inconsistent with the explicit teachings of this specification.

[0252] It should be understood that the examples and embodiments described herein are for illustrative purposes only and that various modifications or changes in light thereof will be suggested to persons skilled in the art and are to be included within the spirit and purview of this application.

TABLE 1

| | | Change in |
|---|---|---|
| | | Expression |
| | | LYM vs |
| | | MYM |
| Gene Accession # | Gene Symbol | (P ≦ 0.02) |
| Transcription factors | | |
| AB020634 | NFAT5 | + |
| M97388 | DR1 | + |
| U26914 | RREB1 | + |
| AF040253 | SUPT5H | − |
| AB002386 | EZH1 | − |
| L38933 | HUMGT198A | − |
| AB022785 | ASH2L | − |
| AB014558 | CRY2 | − |
| Cell cycle regulators | | |
| X60188 | MAPK3 | − |
| U66469 | CGRRF1 | − |
| Cell adhesion receptors/proteins | | |
| AF106861 | ATRN | + |
| Z29083 | TPBG | + |
| AB002382 | CTNND1 | − |
| Extracellular transport/carrier | | |
| proteins | | |
| U09210 | SLC18A3 | + |
| Oncogenes and tumor suppressors | | |
| X57110 | CBL | + |
| M16038 | LYN | + |
| X60287 | MAX | + |
| U96078 | HYAL1 | − |
| Stress response proteins | | |
| W28616 | HSPCB | + |
| X83573 | ARSE | − |
| D87953 | NDRG1 | − |
| Membrane channels and | | |
| transporters | | |
| AF027153 | SLC5A3 | + |
| M55531 | SLC2A5 | + |
| X57303 | SLC7A1 | + |
| X91906 | CLCN5 | − |
| Extracellular matrix proteins | | |
| U05291 | FMOD | − |
| AB011792 | ECM2 | − |
| Trafficking/targeting proteins | | |
| D89618 | KPNA3 | + |
| AC004472 | VCP | + |
| AA890010 | SEC22L1 | + |
| L43964 | PSEN2 | + |
| X97074 | AP2S1 | + |
| AA192359 | TNPO3 | + |
| U32315 | STX3A | − |
| Metabolism | | |
| D50840 | UGCG | + |
| M21186 | CYBA | + |
| AC005329 | NDUFS7 | + |
| U44111 | HNMT | + |
| M84443 | GALK2 | + |
| X14608 | PCCA | + |
| AF014402 | PPAP2A | + |
| AF035555 | HADH2 | + |
| U84371 | AK2 | + |
| AA526497 | UQCRH | + |
| AI557064 | NDUFV2 | + |
| D55654 | MDH1 | + |
| AL049954 | AHCYL1 | − |
| AA420624 | MAOA | − |
| M93107 | BDH | − |
| Post-translational modification | | |
| U84404 | UBE3A | − |
| Translation | | |
| L36055 | EIF4EBP1 | + |
| Apoptosis associated proteins | | |
| Z70519 | TNFRSF6 | + |
| AJ006288 | BCL10 | + |
| U04806 | FLT3LG | − |
| RNA processing, turnover, and | | |
| transport | | |
| U40763 | PPIG | + |
| AB007510 | PRPF8 | − |
| X85237 | SF3A1 | − |
| U76421 | ADARB1 | − |
| Cell receptors (by ligand) | | |
| J03171 | IFNAR1 | + |
| M33210 | NDRG1 | − |
| AJ225028 | GABBR1 | − |
| D15050 | TCF8 | − |
| AF030339 | PLXNC1 | − |
| Intracellular | | |
| transducers/modulators | | |
| AB007881 | SMG1 | + |
| AB004904 | SOCS3 | + |
| D89094 | PDE5A | + |
| Z50053 | GUCY1A2 | + |
| X95632 | ABI2 | + |
| Y13493 | DYRK2 | + |
| D88532 | PIK3R3 | + |
| Y18206 | PPP1R3D | + |
| M96995 | GRB2 | + |
| AF015254 | AURKB | + |
| U02680 | PTK9 | + |
| AF052135 | STAMBP | + |
| U46461 | DVL1 | + |
| AB003698 | CDC7 | + |
| AI961669 | ARFGEF2 | + |
| X70218 | PPP4C | + |
| X99325 | STK25 | + |
| L36151 | PIK4CA | − |
| AL049970 | PRKRIR | − |
| AI671547 | RAB9A | − |
| AF103905 | RAPGEF3 | − |
| X95735 | ZYX | − |
| M33552 | LSP1 | − |
| X62048 | WEE1 | − |
| S76965 | PKIA | − |
| U25771 | ARF4L | − |
| AF035299 | DOK1 | + |
| Protein turnover | | |
| X87212 | CTSC | + |
| AL080090 | ANAPC10 | + |
| AJ132583 | NPEPPS | − |
| AF099149 | ARIH2 | − |
| Cell receptors (by activities) | | |
| AF084645 | NR1I2 | + |
| AB020639 | ESRRG | + |
| Cytoskeleton/motility | | |
| proteins | | |
| AB008515 | NOL7 | + |
| AI056696 | CETN3 | − |
| Functionally unclassified | | |
| AF035444 | PHLDA2 | + |
| U79299 | OLFM1 | + |
| U22963 | MR1 | + |
| U15552 | HSU15552 | + |
| AB015332 | AKAP8L | + |
| AF068195 | UBADC1 | + |
| AB011542 | EGFL5 | + |
| Z78368 | C1orf8 | − |
| AF053356 | LRCH4 | − |
| AF009426 | C18orf1 | − |
| not classified | | |
| AB011096 | SARM1 | + |
| AJ236885 | ZNF148 | + |
| N42007 | NUP50 | + |
| Z48570 | DDX24 | + |
| M19650 | CNP | + |
| AB002348 | KIAA0350 | + |
| AB014564 | KIAA0664 | − |
| M29551 | PPP3CB | − |
| AB020699 | KIAA0892 | − |
| AB002370 | KIAA0372 | − |
| AB023181 | DLGAP4 | − |
| AB011106 | ATRNL1 | − |
| D88152 | SLC33A1 | − |
| AF082657 | ERAL1 | + |
| AB023163 | HIP14 | − |
| AF040964 | C4orf15 | + |
| U33838 | RELA | + |
| M22919 | MYL6 | − |
| U93869 | POLR3F | + |
| X59417 | PSMA6 | + |
| AJ224326 | RPE | + |
| U60644 | PLD3 | + |
| AB018257 | ZNF294 | − |

TABLE 2

| | | Change in |
|---|---|---|
| | | Expression |
| | | LYM vs |
| | | MYM |
| Gene Accesssion# | Gene Symbol | (P ≦ 0.02) |
| Cell surface/Matrix Protein | | |
| D26579 | ADAM8 | + |
| Transcription Factor | | |
| U15655 | ERF | + |
| L39059 | TAF1C | + |
| M96577 | E2F1 | + |
| AF025654 | RNGTT | − |
| U15642 | E2F5 | − |
| AB015132 | KLF7 | − |
| U63810 | CIAO1 | − |
| U52960 | SURB7 | − |
| U65093 | CITED2 | − |
| AJ001183 | SOX10 | − |
| Cell cycle | | |
| U03106 | CDK1A | + |
| L23959 | TFDP1 | − |
| M80629 | CDC2L5 | − |
| X77794 | CCNG1 | − |
| Cell adhesion | | |
| receptors/proteins | | |
| AF007194 | Mucin 3 | + |
| X15606 | ICAM2 | − |
| D14705 | CTNNA1 | − |
| S66213 | ITGA6 | − |
| Oncogenes and tumor | | |
| suppressors | | |
| U96078 | HYAL1 | − |
| Stress response proteins | | |
| AI972631 | ARS2 | − |
| Membrane channels and | | |
| transporters | | |
| X89066 | TRPC1 | − |
| AB021981 | SLC35A3 | − |
| D50312 | KCNJ8 | − |
| Extracellular matrix | | |
| proteins | | |
| U37283 | MFAP5 | − |
| Trafficking/targeting | | |
| proteins | | |
| AF002163 | AP3D1 | + |
| X96783 | SYT5 | − |
| Metabolism | | |
| AJ004832 | NTE | + |
| AF062529 | NUDT3 | + |
| D38537 | PPOX | + |
| AI345944 | NDUFB1 | − |
| AI766078 | COQ7 | − |
| D14710 | ATP5A1 | − |
| Post-translational | | |
| modification | | |
| U31525 | GYG | − |
| Apoptosis associated | | |
| proteins | | |
| Y09392 | TNFRSF25 | + |
| AF015451 | CFLAR | − |
| M16441 | LTA | − |
| RNA processing, turnover, | | |
| and transport | | |
| L35013 | SF3B4 | + |
| AJ007509 | HNRPUL1 | + |
| AF016369 | PRPF4 | − |
| M96954 | TIA1 | − |
| Chromatin proteins | | |
| AF045184 | SKIIP | − |
| Cell Surface receptors | | |
| X06614 | RARA | + |
| AF109134 | OGFR | + |
| D16827 | SSTR5 | − |
| X61615 | LIFR | − |
| M64347 | FGFR3 | − |
| M15169 | ADRB2 | − |
| U23850 | ITPR1 | − |
| Growth Factor/Cyt/Chemo/Polypept- | | |
| Horm | | |
| U79716 | RELN | + |
| M63582 | TRH | + |
| M13982 | IL4 | + |
| X52599 | NGFB | + |
| Intracellular iransducers/modulators | | |
| U39064 | MAPKK6 | + |
| X82260 | RANGAP1 | + |
| Z15108 | PRKCZ | + |
| R54564 | MINK | + |
| U09284 | LIMS1 | + |
| U12779 | MAPKAPK2 | + |
| U18420 | RAB5C | + |
| AL050268 | RAB1A | − |
| AB005047 | SH3BP5 | − |
| X52213 | LTK | − |
| | GNEF1 | − |
| D85758 | ERH | − |
| AF014398 | IMPA2 | − |
| AJ011736 | GRAP2 | − |
| U59913 | SMAD5 | − |
| X17576 | NCK1 | − |
| U48730 | STAT5B | − |
| U17743 | MAP2K4 | − |
| U43885 | GAB1 | − |
| Protein turnover | | |
| D49742 | HABP2 | + |
| U80034 | MIPEP | − |
| Cytoskeleton/motility proteins | | |
| W27148 | MAP1B | − |
| DNA synthesis, recombination, repair | | |
| X91992 | ALKBH | − |
| Y15572 | RAD51L3 | − |
| AF007871 | DYT1 | − |
| AF058696 | NBS1 | − |
| Functionally unclassified | | |
| AI924594 | TSPAN-2 | − |
| Z68747 | mitochondrial | − |
| | ribosomal | |
| | protein S31 | |
| AB018285 | zinc finger protein | − |
| Not classified | | |
| D42085 | NUP93 | − |
| D87437 | C1orf16 | + |
| X77548 | NCOA4 | − |
| D79990 | RASSF2 | − |
| U05861 | AKR1C1 | − |
| L49054 | MLF1 | − |
| AB007884 | ARHGEF9 | − |
| AF044896 | C1orf38 | − |
| AJ223352 | HIST1H2BK | − |
| AA043348 | HSPA4 | − |
| Z85986 | C6orf69 | − |
| W26677 | FLJ35827 | + |
| AB011133 | MAST3 | + |
| AB018274 | LARP | + |
| U92896 | EFNA2 | + |
| AF064801 | RNF139 | + |
| U47924 | GRCA | − |
| AB007896 | KIAA0436 | − |
| AJ002428 | VDAC1 | − |

TABLE 3

| | | Change in |
|---|---|---|
| | | Expression |
| Gene Accesssion # | Gene Symbol | (p ≦ 0.02) |
| Cell surface antigens | | |
| X84746 | ABO | + |
| AF004876 | YIF1 | + |
| Transcription/activators/repressors | | |
| X98253 | ZNF183 | − |
| D38251 | POLR2E | − |
| U22431 | HIF1A | − |
| AB002332 | CLOCK | + |
| U33838 | RELA | − |
| U15306 | NFX1 | − |
| AF040253 | SUPT5H | + |
| L19067 | RELA | + |
| M74099 | CUTL1 | + |
| U48436 | FMR2 | + |
| AA478904 | KLF7 | + |
| M69043 | NFKBIA | − |
| Cell cycle-regulating kinases | | |
| U17743 | MAP2K4 | − |
| D88357 | CDC2 | − |
| L04658 | CDK5 | − |
| X66357 | CDK3 | + |
| M74091 | CCNC | − |
| L23959 | TFDP1 | − |
| Cell adhesion receptors/proteins | | |
| X69819 | ICAM3 | − |
| Z29083 | TPBG | − |
| AF007194 | Mucin 3, Intestinal | + |
| Oncogenes and tumor suppressors | | |
| J03069 | MYCL2 | + |
| X72631 | NR1D1 | + |
| U09577 | HYAL2 | − |
| AI743606 | RAB8A | − |
| U04313 | SERPINB5 | + |
| AF013168 | TSC1 | + |
| Trafficking/targeting proteins | | |
| X99459 | AP3S2 | − |
| AW044624 | RER1 | − |
| U60644 | PLD3 | − |
| AA890010 | SEC22L1 | − |
| AC004472 | VCP | − |
| AF034546 | SNX3 | − |
| Z12830 | SSR1 | − |
| AF044671 | GABARAP | − |
| Metabolism | | |
| AC005329 | NDUFS7 | − |
| M22976 | CYB5 | + |
| AF047181 | NDUFB5 | − |
| D16294 | ACAA2 | − |
| AI345944 | NDUFB1 | − |
| D14710 | ATP5A1 | − |
| X06994 | CYC1 | − |
| AI540957 | QP-C | − |
| AI557064 | NDUFV2 | − |
| U19822 | ACACA | + |
| AF047469 | ASNA1 | − |
| Protein modification enzymes | | |
| D29643 | DDOST | − |
| AD000092 | CALR | − |
| AF035280 | EIF2B2 | − |
| L36055 | EIF4EBP1 | − |
| L34600 | MTIF2 | − |
| D28483 | RBMS2 | − |
| RNA processing/turnover/ | | |
| transport | | |
| U51334 | TAF15 | + |
| D59253 | NP25 | − |
| Z48501 | PABPC1 | − |
| L36529 | THOC1 | + |
| AF083190 | DNAJC8 | + |
| D28423 | SFRS3 | − |
| Growth factors/cytokines/ | | |
| chemokines | | |
| J00219 | IFNG | + |
| U32324 | IL11RA | + |
| Z70519 | TNFRSF6 | − |
| X04571 | EGF | + |
| X72308 | CCL7 | + |
| X78686 | CXCL5 | + |
| J04513 | FGF2 | − |
| S74221 | IK | − |
| U43368 | VEGFB | + |
| AL021155 | NPPA | + |
| Intracellular | | |
| transducers/modulators | | |
| X75958 | NTRK2 | + |
| S76475 | NTRK3 | + |
| U43885 | GAB1 | − |
| X84709 | FADD | − |
| M96995 | GRB2 | − |
| U46461 | DVL1 | − |
| AF051323 | SCAP2 | − |
| X66363 | PCTK1 | − |
| AB018330 | CAMKK2 | + |
| L13616 | PTK2 | − |
| U02680 | PTK9 | − |
| X72964 | CETN2 | − |
| Y17711 | CBARA1 | − |
| U51004 | HINT1 | − |
| U94747 | HAN11 | − |
| U78733 | SMAD2 | − |
| GTP/GDP/G-protein/GTPase | | |
| modulators | | |
| D13988 | GDI2 | − |
| U18420 | RAB5C | + |
| U34806 | GPR15 | + |
| U18550 | GPR3 | − |
| Amino- and | | |
| carboxypeptidases | | |
| L13977 | PRCP | − |
| Metalloproteinases | | |
| U80034 | MIPEP | − |
| Proteosomal proteins | | |
| D26600 | PSMB4 | − |
| AB009398 | PSMD13 | − |
| X59417 | PSMA6 | − |
| D26598 | PSMB3 | − |
| D38048 | PSMB7 | − |
| Cytoskeleton/motility proteins | | |
| AB007862 | PCNT2 | + |
| U48734 | ACTN4 | + |
| U01828 | MAP2 | + |
| U39226 | MYO7A | + |
| AI540958 | DNCL1 | + |
| AF020267 | MYO9B | + |
| U43959 | ADD2 | + |
| AL096717 | EML2 | + |
| AI961040 | TUBGCP2 | + |
| Extracellular matrix and | | |
| carrier proteins | | |
| M12625 | LCAT | + |
| AF093118 | FBLN5 | + |
| M20776 | COL6A1 | − |
| U80034 | MIPEP | − |
| AB006190 | AQP7 | + |
| AB021981 | SLC35A3 | − |
| U90313 | GSTO1 | − |
| X67301 | IGHM | − |
| M92303 | CACNB1 | + |
| X91906 | CLCN5 | + |
| AB023173 | ATP11B | + |
| M20471 | CLTA | − |
| U27467 | BCL2A1 | + |
| U30872 | CENPF | − |
| AI857458 | UCN | − |
| D87432 | SLC7A6 | + |
| N80906 | CST6 | + |
| D38535 | ITIH4 | + |
| M31767 | MGMT | + |
| AB007884 | ARHGEF9 | − |
| AC004472 | KIAA1539 | − |
| Functionally unclassified | | |
| W28869 | TEGT | − |
| Z68747 | MRPS31 | − |
| L07758 | PWP1 | − |
| AJ007014 | NCBP2 | − |
| U72508 | B7 | − |
| AA524058 | C6orf74 | − |
| D86062 | C21orf33 | − |
| D87343 | DSCR3 | + |
| AF042384 | BC-2 | − |
| AF068195 | UBADC1 | − |
| AL021937 | RFPL3S | + |
| U80744 | TNRC5 | − |
| AF035444 | PHLDA2 | − |
| not classified | | |
| AL031177 | APG4A | + |
| AB007884 | ARHGEF9 | − |
| AC004472 | KIAA1539 | + |
| AF040964 | C4orf15 | − |
| D87742 | FLJ39207 | + |
| AB006628 | FCHO1 | + |
| AB014592 | KIAA0692 | + |
| AB023214 | ZBTB1 | + |
| AB028964 | FOXJ3 | + |
| U54999 | GPSM2 | + |
| L49054 | MLF1 | − |
| AA926959 | CKS1B | + |
| NM_00635 | Ras-Like | − |
| | Protein Tc4 | |
| AB002292 | ARHGEF10 | + |
| M24899 | THRA | + |
| U92896 | EFNA2 | + |
| AJ222967 | CTNS | + |
| AL031983 | OR2H3 | + |
| U05681 | BCL3 | + |
| AF014398 | IMPA2 | − |
| X67325 | IFI27 | − |
| U90907 | PIK3R3 | − |
| AF030107 | RGS13 | + |
| AL049634 | PTPNS1L2 | + |
| AF091071 | RER1 | + |
| AC005525 | IGSF4C | + |
| U49278 | UBE2V1 | − |
| U39318 | UBE2D3 | + |
| AF075599 | UBE2M | − |
| AJ002428 | VDAC1 | − |
| U84388 | CRADD | − |
| X63657 | FVT1 | + |

TABLE 4

| | | Change in |
|---|---|---|
| | | Expression |
| Gene Accesssion # | Gene Symbol | (p ≦ 0.02) |
| Cell surface/Matrix protein | | |
| AF106861 | ATRN | − |
| AJ001683 | KLRC4 | − |
| D26579 | ADAM8 | − |
| M33308 | VCL | + |
| U12255 | FCGRT | + |
| Transcription Factors | | |
| AJ001183 | SOX10 | − |
| AB004066 | BHLHB2 | − |
| AF012108 | NCOA3 | − |
| AF025654 | RNGTT | − |
| AF035262 | SMARCE1 | − |
| D42123 | CRIP2 | − |
| D80003 | NCOA6 | − |
| L19067 | RELA | + |
| L19871 | ATF3 | + |
| L38933 | HUMGT198A | + |
| L39059 | TAF1C | + |
| L49380 | SF1 | + |
| M81601 | TCEA1 | + |
| U37251 | ZNF177 | + |
| U63810 | CIAO1 | + |
| U68727 | PKNOX1 | + |
| X99720 | PRCC | + |
| Metabolism | | |
| AF104421 | UROD | − |
| AL049954 | AHCYL1 | − |
| D16294 | ACAA2 | − |
| D16481 | HADHB | − |
| D28137 | BST2 | − |
| D38537 | PPOX | − |
| D55639 | KYNU | − |
| U25849 | ACP1 | + |
| U91316 | BACH | + |
| X58965 | NME2 | + |
| X76228 | ATP6V1E1 | + |
| RNA processing transport | | |
| AA205857 | SNRPD3 | − |
| AB007510 | PRPF8 | − |
| AB017019 | HNRPDL | − |
| AL008726 | ZSWIM3 | − |
| U40763 | PPIG | + |
| Growth factor/chemokine | | |
| and receptors | | |
| X78686 | CXCL5 | − |
| X81882 | CUL5 | − |
| D13168 | EDNRB | − |
| D14582 | EPIM | − |
| D26070 | ITPR1 | − |
| J03278 | PDGFRB | − |
| J03634 | INHBA | − |
| M91211 | AGER | + |
| S67368 | GABRB2 | + |
| U23850 | ITPR1 | + |
| U78110 | NRTN | + |
| X06614 | RARA | + |
| X60592 | TNFRSF5 | + |
| X64116 | PVR | + |
| Non-receptor protein kinases | | |
| AI341656 | LIM | − |
| L13738 | ACK1 | + |
| L27071 | TXK | + |
| X54637 | TYK2 | + |
| Non-receptor phosphatases | | |
| AI739548 | | − |
| J03805 | PPP2CB | − |
| L36151 | PIK4CA | + |
| M29893 | RALA | + |
| M64929 | PPP2R2A | + |
| X68277 | DUSP1 | + |
| Nuclear receptors | | |
| AB020639 | ESRRG | − |
| AF084645 | NR1I2 | − |
| AF109134 | OGFR | − |
| X75918 | NR4A2 | + |
| Translation/post-trans | | |
| modification | | |
| D84273 | NARS | − |
| M34539 | FKBP1A | + |
| Death receptor | | |
| proteins/adaptors | | |
| AF006041 | DAXX | − |
| U04806 | FLT3LG | + |
| U50062 | RIPK1 | + |
| X98176 | CASP8 | + |
| Chaperones/heat shock | | |
| proteins | | |
| W28616 | HSPCB | − |
| L26336 | HSPA2 | + |
| X04106 | CAPNS1 | + |
| Cell signaling/EC | | |
| communication | | |
| AI658639 | ENSA | − |
| L19605 | ANXA11 | + |
| M32886 | SRI | + |
| U37283 | MFAP5 | + |
| U79716 | RELN | + |
| Adaptor/receptor-associated | | |
| proteins | | |
| AF015767 | BRE | − |
| U09284 | LIMS1 | + |
| GTP/GDP and G-protein | | |
| GTPase activity modulators | | |
| AB002349 | RALGPS1 | − |
| AI961929 | ARHGAP1 | − |
| M85169 | PSCD1 | + |
| U57629 | RPGR | + |
| Trafficking/targeting proteins | | |
| AF002163 | AP3D1 | − |
| D63476 | ARHGEF7 | − |
| U00957 | AKAP10 | + |
| X07315 | NUTF2 | + |
| DNA replications | | |
| J05249 | RPA2 | + |
| L20046 | ERCC5 | + |
| L26336 | HSPA2 | + |
| L26339 | RCD-8 | + |
| L78833 | VAT1 | + |
| M62302 | GDF1 | + |
| M84820 | RXRB | + |
| Other functional protein | | |
| M20681 | SLC2A3 | − |
| AA631972 | NK4 | − |
| AB026891 | SLC7A11 | − |
| AF047472 | BUB3 | − |
| AI972631 | ARS2 | − |
| AL008726 | | − |
| AL050254 | FBXO7 | − |
| D44466 | PSMD1 | − |
| D87953 | NDRG1 | − |
| L43964 | PSEN2 | + |
| M76558 | CACNA1D | + |
| M83664 | HLA-DPB1 | + |
| M95178 | ACTN1 | + |
| U40705 | TERF1 | + |
| U59913 | SMAD5 | + |
| U72263 | EXT2 | + |
| X01703 | TUBA3 | + |
| X14487 | KRT10 | + |
| X51602 | FLT1 | + |
| X58199 | ADD2 | + |
| X76538 | MPV17 | + |
| X78338 | ABCC1 | + |
| Z24727 | TPM1 | + |
| Functionally unclassified | | |
| AA923149 | WSB2 | − |
| AB002322 | SRRM2 | − |
| AB007879 | CP110 | − |
| AB007890 | LKAP | − |
| AB007915 | KIAA0446 | − |
| AB007931 | RBAF600 | − |
| AB011133 | MAST3 | − |
| AB011151 | BDG29 | − |
| AB014515 | N4BP1 | − |
| AB014564 | KIAA0664 | − |
| AB014599 | BICD2 | − |
| AB018344 | DDX46 | − |
| AB023186 | PEPP3 | − |
| AB028995 | PPM1E | − |
| AB028998 | TENC1 | − |
| AB029012 | EST1B | − |
| AF051941 | NME6 | − |
| AF058696 | NBS1 | |
| AL031228 | VPS52 | − |
| AL031282 | FLJ13052 | − |
| AL046940 | FLJ46603 | − |
| D29677 | HELZ | − |
| D50645 | SDF2 | − |
| D50920 | THRAP4 | − |
| D79990 | RASSF2 | − |
| D87119 | TRIB2 | − |
| Not classified | | |
| S59184 | RYK | + |
| U01062 | ITPR3 | + |
| U12597 | TRAF2 | + |
| U41737 | | + |
| U85611 | CIB1 | + |
| U89358 | L3MBTL | + |
| U93869 | POLR3F | + |
| W25974 | MTX1 | + |
| W27949 | HEBP2 | + |
| X16281 | ZNF44 | + |
| X52851 | PPIA | + |
| X65784 | SPG7 | + |
| X92814 | HRASLS3 | + |
| XM29054 | | + |
| Y09305 | DYRK4 | + |
| | GEF | + |
| NM_003242 | Protein Kinase | + |
| | Pitslre, Alpha, | |
| | Proto-Oncogene | |
| | N-Cym, | |
| | Single-Stranded | |
| | DNA-Binding | |
| | Protein Mssp- | |

TABLE 5

| Gene Symbol | Gene Name | Ref#9 | Ref#11 | Ref#12 | Ref#14 |
|---|---|---|---|---|---|
| BCL10 | B-cell CLL/lymphoma 10 | − | + | − | − |
| CDH2 | Cadherin 2A | + | − | − | − |
| F13A1 | Coagulation factor XIII | − | − | + | − |
| CRH | Corticotropin Releasing Hormone | − | + | − | − |
| ECM2 | Extracellular Matrix Protein 2 | + | − | − | − |
| HOXD4 | Homeo box D4 | − | − | − | + |
| ENO1 | c-myc binding protein | − | − | − | + |
| PIPPIN | Ortholog of rat Pippin | − | − | − | + |
| PPIB | Peptidylprolyl isomerase B | − | − | − | + |
| RY1 | Putative ucleic acid binding protein | − | − | − | + |
| TYMS | Thymidylate synthetase | + | + | − | + |

Ref#9: Tsibris, J. et al. Fertil Steril, 2002, 78: 114-121
Ref#11: Wang, H. et al. Fertil Steril, 2003, 80: 266-276
Ref#12: Weston, G. et al. Mol Hum Reprod, 2003, 9: 541-549
Ref#14: Quade, B. J. et al. Cancer, 2004, 40: 97-108

TABLE 6

| Gene | |
|---|---|
| Accesssion # | Gene Symbol |
| | Transcription |
| | activators/repressors |
| AJ000041 | HOXC11 |
| NM_001130 | AES |
| NM_006164 | NFE2L2 |
| | Cell cycle-regulating kinases |
| M84489 | MAPK1 |
| | Oncogene/tumor suppressors |
| NM_002315 | LMO1 |
| M24898 | NR1D1 |
| NM_002350 | LYN |
| | Membrane channels and |
| | transporters |
| NM_006358 | SLC25A17 |
| | Trafficking |
| NM_005829 | AP3S2 |
| | Metabolism |
| NM_001355 | DDT |
| NM_000819 | GART |
| NM_004317 | ASNA1 |
| | Translation/post-translational |
| NM_006156 | NEDD8 |
| NM_003758 | EIF3S1 |
| | Death receptor-associated |
| | proteins |
| AF015956 | DAXX |
| | RNA processing/turnovert |
| NM_002568 | PABPC1 |
| | Neuropeptides/growth factors |
| NM_003353 | UCN |
| NM_002006 | FGF2 |
| | Extracellular communication |
| NM_001405 | EFNA2 |
| NM_004279 | EEEF1E1 |
| | Intracellular |
| | transducers/effectors |
| NM_005079 | TPD52 |
| NM_006012 | CLPP |
| | Intracellular kinases (non- |
| | receptor) |
| AF-068864 | PAK3 |
| L13616 | PTK2 |
| NM_003177 | SYK |
| NM_002822 | PTK9 |
| NM_012290 | TLK1 |
| | GPs/GTPase activity |
| | modulators |
| M28212 | RAB6A |
| AF030107 | RGS13 |
| | Kinase activators/inhibitors |
| X82240 | TCL1A |
| NM_003629 | PIK3R3 |
| | Cytoskeleton/motility |
| | proteins |
| X58199 | ADD2 |
| | Functionally unclassified |
| NM_004487 | GOLGB1 |
| NM_004337 | C8orf1 |
| NM_006992 | B7 |
| | Not classified |
| NM_021964 | ZNF148 |
| NM_021999 | ITM2B |
| NM_014629 | ARHGEF10 |
| NM_030913 | SEMA6C |
| NM_012263 | TTLL1 |
| NM_020150 | SARA1 |
| | PPIA |
| | RPE |
| | MAFK |
| | LRIG2 |
| | DKFZP586F242 |
| | KIAA0290 |
| | Homeotic Protein Hox5.4 |

TABLE 7

| | | GnRHa |
|---|---|---|
| | | 2h vs |
| | | TGF- |
| | | βRII |
| | | antisense |
| Gene Accession# | Gene Symbol | p ≦ 0.001 |
| BC003576 | ACTN1 | − |
| Adenylyl Cyclase-AP2 | | + |
| M12271 | ADH1A | + |
| AB014605 | AIP1 | + |
| BC000171 | AMD1 | − |
| AK092006 | ANXA2 | + |
| BC001429 | ANXA5 | − |
| AK098588 | APEX1 | + |
| AF038954 | ATP6V1G1 | − |
| AB020680 | BAG5 | − |
| AF019413 | BF | + |
| AB004066 | BHLHB2 | − |
| BC009050 | BTG1 | + |
| AB030905 | CBX3 | + |
| BC008816 | CCBP2 | + |
| BC032518 | CCNG2 | + |
| AU130185 | CDH6 | + |
| AJ011497 | CLDN7 | − |
| AJ006267 | CLPX | + |
| BC005159 | COL6A1 | − |
| AK098615 | CRY1 | − |
| AL833597 | CSF2RA | − |
| AF013611 | CTSW | − |
| AK025446 | DKFZP564M182 | − |
| AJ005821 | DMXL1 | − |
| AF088046 | DNAJA2 | − |
| BC039596 | DNM2 | − |
| AF139463 | EGR2 | − |
| N66802 | EGR3 | − |
| AF001434 | EHD1 | − |
| AF208852 | EIF4A2 | + |
| BC000738 | EMD | − |
| AF103905 | EPAC | + |
| AF052181 | EPIM | + |
| BC003384 | FKBP2 | + |
| AF085357 | FLOT1 | + |
| AY358917 | FSTL3 | − |
| L13698 | GAS1 | + |
| AF169253 | GATA2 | − |
| AF144713 | GDI2 | + |
| AC000051 | GGT1 | + |
| NM_000855 | GUCY1A2 | + |
| X83412 | HAB1 | + |
| AF103884 | HB-1 | + |
| AF264785 | HES1 | − |
| BC022283 | HFL3 | + |
| | IGF I | + |
| D86989 | IGL2 | + |
| AF038953 | ITM2A | − |
| NM_005354 | JUND | − |
| AB014765 | JWA | + |
| AB002308 | KIAA0310 | − |
| AB014548 | KIAA0648 | + |
| AK129875 | LAPTM4A | + |
| AB017498 | LRP5 | + |
| AF027964 | MADH2 | + |
| AK026690 | MADH3 | + |
| AB025247 | MAFF | − |
| AB025186 | MAPRE3 | − |
| AB017335 | MAZ | − |
| AF061261 | MBNL2 | + |
| BC012396 | MGC40157 | + |
| AF125532 | MKNK2 | + |
| BC001122 | MSH2 | + |
| AF508978 | MTA1 | − |
| AF057354 | MTMR1 | + |
| NM_005593 | MYF5 | − |
| AB011179 | NCDN | − |
| AF047181 | NDUFB5 | + |
| AB014887 | ORM1 | + |
| BC009610 | PC4 | + |
| AK023529 | PCBP2 | − |
| AB029821 | PEMT | − |
| AF254253 | PHKG1 | + |
| AF220656 | PHLDA1 | − |
| AF025439 | PKM2 | − |
| A18757 | PLAUR | − |
| AB006746 | PLSCR1 | − |
| A24059 | PNLIP | + |
| AB005754 | POLS | − |
| AF042385 | PPIE | + |
| BC047502 | PPP1R3D | + |
| AK091875 | PPP2CB | − |
| AI800682 | PTPN21 | − |
| BC028038 | PTPRD | + |
| BC001390 | QP-C | + |
| BC003608 | RBPMS | − |
| AF019413 | RDBP | + |
| AF086557 | RPL10A | + |
| AB007147 | RPS2 | + |
| BC011645 | RRAD | − |
| D10570 | RUNX1 | − |
| AB028976 | SAMD4 | − |
| AF070614 | SCHIP1 | − |
| BC005927 | SERPINE1 | − |
| AJ000051 | SF1 | − |
| AK097315 | SF3B4 | − |
| BC004534 | SFPQ | − |
| AL110214 | SFRS6 | − |
| AB020410 | SHH | + |
| AB001328 | SLC15A1 | + |
| AF519179 | SMOX | − |
| AK096917 | SREBF2 | − |
| AF261072 | TCBAP0758 | + |
| BC003151 | TCFL1 | + |
| BC000125 | TGFB1 | − |
| AF050110 | TIEG | − |
| AF087143 | TOP2B | + |
| AC002481 | TUSC4 | + |
| AC002400 | UBPH | + |
| AF060538 | VAMP1 | + |
| AF134726 | VARS2 | − |
| BC000165 | VDAC2 | − |
| AF007132 | ABHD5 | − |
| AL831821 | ACADSB | + |
| AJ306929 | AFURS1 | − |
| AB031083 | AKR1C1 | + |
| AC002366 | AMELX | + |
| AB084454 | ANGPT1 | + |
| AF168956 | APLP2 | − |
| AF047432 | ARF6 | + |
| AK000379 | ASNS | − |
| AF022224 | BAG1 | + |
| BC019307 | BCL2L1 | + |
| AC006378 | BET1 | + |
| AB004066 | BHLHB2 | − |
| AF002697 | BNIP3 | − |
| AL021917 | BTN3A3 | + |
| AB059429 | BUCS1 | + |
| AJ420534 | C6orf145 | − |
| AF111344 | CASP10 | + |
| AK022697 | CBARA1 | − |
| BC009356 | CDC42EP1 | − |
| AF002713 | CENPB | − |
| AK128741 | CHD4 | + |
| AF136185 | COL17A1 | + |
| AB014764 | COPS7A | − |
| AF452623 | CRELD1 | − |
| AK098615 | CRY1 | − |
| AL833597 | CSF2RA | − |
| AB014595 | CUL4B | + |
| AB015051 | DAXX | − |
| AJ313463 | DF | + |
| BC015800 | DXYS155E | + |
| BC014410 | EFEMP1 | − |
| AF139463 | EGR2 | − |
| BC028412 | ELL2 | + |
| AK092872 | ERCC2 | + |
| AK000818 | FLJ20811 | + |
| AK074486 | FLJ90005 | − |
| AK130009 | FRZB | + |
| AJ251501 | GAD2 | + |
| AC004976 | GARS | − |
| AK094782 | GLUD1 | − |
| AF070597 | GNB1 | − |
| AK023082 | GORASP2 | + |
| AF077204 | GTPBP1 | + |
| BC035837 | HAS1 | + |
| AK097824 | HSPA2 | + |
| BC009696 | IFITM2 | + |
| AC005369 | IK | + |
| L25851 | ITGAE | + |
| AF003521 | JAG2 | − |
| BC002646 | JUN | − |
| AF081484 | K-ALPHA-1 | − |
| AF056022 | KATNA1 | + |
| AK025504 | KIAA0251 | − |
| AB002301 | KIAA0303 | − |
| AB014528 | KIAA0628 | + |
| AB014548 | KIAA0648 | + |
| AB040969 | KIAA1536 | − |
| AB040972 | KIAA1539 | − |
| AF061809 | KRT16 | + |
| BC009971 | KRTHA3B | + |
| AB014581 | L3MBTL | + |
| AF000177 | LSM1 | + |
| AB025186 | MAPRE3 | − |
| AB018266 | MATR3 | − |
| AC005943 | MBD3 | − |
| AY032603 | MCM3 | − |
| AF508978 | MTA1 | − |
| AK130664 | MTHFD2 | − |
| AB023192 | NISCH | + |
| AC004663 | NOTCH3 | − |
| AB005060 | NRG2 | + |
| AK025458 | NUCB1 | − |
| | NCOR 2 | − |
| AF109134 | OGFR | + |
| AJ238420 | PDGFA | − |
| AB005754 | POLS | − |
| AB051763 | POR | − |
| AA846273 | PRCC | + |
| AF044206 | PTGS2 | − |
| AY449732 | PTHR1 | + |
| BC002438 | RAB4A | + |
| AF080561 | RBM14 | − |
| BC003608 | RBPMS | − |
| AL031228 | RING1 | + |
| AB078417 | RIS1 | + |
| AK096243 | RPN2 | + |
| D10570 | RUNX1 | − |
| BC002829 | S100A2 | + |
| AB011096 | SARM1 | + |
| BC020740 | SGCD | − |
| AC004000 | SLC25A5 | − |
| AY142112 | SLC4A3 | + |
| AF053134 | SNCB | + |
| AB061546 | SRP14 | + |
| AK125542 | SRPX | + |
| AB015718 | STK10 | + |
| BC012085 | STK38 | + |
| AF064804 | SUPT3H | + |
| BC000125 | TGFB1 | − |
| AI290070 | THBS1 | + |
| AY117678 | TPT1 | + |
| AF062174 | TRIAD3 | − |
| BC014243 | TYK2 | − |
| AB003730 | UBC | + |
| AB014610 | USP52 | + |
| BC030810 | ZNF230 | − |
| AJ245587 | ZNF248 | + |
| BI547129 | ZW10 | − |
| AC006020 | AASS | + |
| AF245699 | AGTR1 | + |
| AC002366 | AMELX | + |
| D12775 | AMPD3 | + |
| AB084454 | ANGPT1 | + |
| AF019225 | APOL1 | + |
| BC014450 | B7 | + |
| AB004066 | BHLHB2 | − |
| AB062484 | CALD1 | + |
| AB023172 | CARD8 | + |
| BC002609 | CBX1 | − |
| AF213700 | CDKN1B | + |
| AF018081 | COL18A1 | + |
| BC000326 | COPB2 | + |
| AF062536 | CUL1 | − |
| NM_005491 | CXorf6 | − |
| AC004634 | DTR | − |
| AA053720 | EDIL3 | + |
| AF174496 | EEF1A1 | + |
| AF139463 | EGR2 | − |
| N66802 | EGR3 | − |
| AF000670 | ELF4 | − |
| AF083633 | EXTL1 | − |
| BC001786 | FKBP4 | − |
| AY358917 | FSTL3 | − |
| AB014560 | G3BP2 | − |
| AK022142 | GAB1 | + |
| AF169253 | GATA2 | − |
| AL031659 | GHRH | + |
| BC026329 | GJA1 | + |
| AF052693 | GJB5 | + |
| AF493902 | GNA13 | + |
| K03460 | H2-ALPHA | − |
| AF264785 | HES1 | − |
| AB017018 | HNRPDL | + |
| AF056979 | IFNGR1 | − |
| AC005369 | IK | + |
| AJ271736 | IL9R | + |
| AF007140 | ILF3 | + |
| AY351902 | IQGAP2 | + |
| AB007893 | KIAA0433 | + |
| AB014528 | KIAA0628 | + |
| AB028956 | KIAA1033 | − |
| AB014581 | L3MBTL | + |
| BC016618 | LCP2 | + |
| AF211969 | LENG4 | − |
| AF004230 | LILRB1 | + |
| BC017263 | LMAN2 | + |
| AF055581 | LNK | − |
| AK095843 | LOC169834 | + |
| AB025247 | MAFF | − |
| AC005943 | MBD3 | − |
| BC012396 | MGC40157 | + |
| AF508978 | MTA1 | − |
| AK130664 | MTHFD2 | − |
| NM_005593 | MYF5 | − |
| AB020673 | MYH11 | + |
| BC005318 | MYL1 | + |
| AB014887 | ORM1 | + |
| AK125499 | P5 | + |
| AJ238420 | PDGFA | − |
| AK055119 | PDK2 | − |
| AB051763 | POR | − |
| AF042385 | PPIE | + |
| AF345987 | PRKCG | + |
| M95929 | PRRX1 | − |
| AF119836 | RAB6A | + |
| AF019413 | RDBP | + |
| AF055026 | RPIP8 | + |
| BC020740 | SGCD | + |
| AF519179 | SMOX | − |
| AF391283 | SSA1 | − |
| BC012088 | TAF10 | − |
| BC000125 | TGFB1 | − |
| AF050110 | TIEG | − |
| AY065346 | TNFAIP1 | − |
| AF019413 | TNXB | − |
| AK025459 | TRA1 | + |
| AJ440721 | TXNDC5 | + |
| AB062290 | TYMS | + |
| BC000379 | UBB | + |
| AB003730 | UBC | + |
| AF002224, | UBE3A | − |
| AF001787 | UCP3 | + |
| AF135372 | VAMP2 | − |
| AB029013 | WHSC1 | − |
| AB023214 | ZBTB1 | − |
| AF060865 | ZNF205 | + |
| AF055077 | ZNF42 | + |

TABLE 8

| | | GnRHa |
|---|---|---|
| | | 2h vs |
| | | TGF- |
| | | βRII |
| | | antisense |
| Gene Accesion# | Gene Symbol | p ≦ 0.001 |
| AK000002 | ABCC10 | + |
| AF129756 | AIF1 | + |
| AA114994 | ARGBP2 | + |
| BC014450 | B7 | − |
| AB005298 | BAI2 | − |
| AF090947 | BBS4 | + |
| AB038670 | BDNF | + |
| AC006378 | BET1 | + |
| AB018271 | BPAG1 | + |
| AC000391 | BRD3 | + |
| AF016270 | BRD8 | + |
| AJ420534 | C6orf145 | − |
| AB029331 | C6orf18 | + |
| AF072164 | C9orf33 | + |
| AC002543 | CAPZA2 | − |
| BC015799 | CASP7 | + |
| BC036787 | CTF1 | − |
| AF280107 | CYP3A5 | + |
| BC000485 | DDC | − |
| AB018284 | EIF5B | + |
| AF253417 | EPHX1 | − |
| AI879202 | ETHE1 | − |
| BC001325 | FUBP3 | − |
| AB058690 | GPS2 | + |
| AY136740 | GPSM2 | + |
| NM_000855 | GUCY1A2 | + |
| X83412 | HAB1 | + |
| | HERV-K(HML6) | − |
| AF299094 | HSF1 | − |
| AY136751 | HTR2B | + |
| BC015335 | ICT1 | + |
| AF011889 | IDS | + |
| BC002793 | IFNAR2 | − |
| AF117108 | IMP-3 | + |
| AF003837 | JAG1 | + |
| AF072467 | JRK | + |
| AF361886 | KEAP1 | − |
| AB014564 | KIAA0664 | − |
| BC034041 | LMO2 | + |
| AK074703 | LOC89944 | + |
| AF000177 | LSM1 | + |
| AK025599 | MAN1A1 | + |
| AK124738 | MAP4K5 | + |
| AK025602 | MGC2747 | + |
| AB037859 | MKL1 | − |
| AF102544 | MOCS3 | − |
| BC006491 | MPZ | + |
| AB037663 | MYLK | + |
| AF113003 | NCOR2 | − |
| AF044958 | NDUFB8 | + |
| BC002421 | NEF3 | + |
| AB010710 | OLR1 | − |
| AY189737 | OVGP1 | + |
| AB014608 | PARC | + |
| AL133335 | PFDN4 | + |
| AJ419231 | PHC2 | − |
| AF006501 | POLR2F | + |
| AK095191 | POU6F1 | − |
| AF045569 | PRKCH | + |
| NM_006256 | PRKCL2 | + |
| AF007157 | PRNPIP | − |
| | N-Cym | + |
| AK074531 | PRR3 | − |
| AF332577 | PSMA6 | + |
| AF000231 | RAB11A | − |
| AF125393 | RAB27A | + |
| BC002585 | RAB7L1 | + |
| D38076 | RANBP1 | − |
| AB112074 | RBBP6 | + |
| BC007102 | RQCD1 | − |
| AF072825 | RREB1 | + |
| AC004381 | SAH | + |
| AF015224 | SCGB2A2 | + |
| AF029081 | SFN | + |
| AK127319 | SLC16A3 | − |
| BC041164 | SMPD1 | − |
| AB046845 | SMURF1 | − |
| AB030036 | ST14 | + |
| AF070532 | SUPT6H | − |
| AJ549245 | TAF1 | + |
| BC029891 | TFEC | + |
| BC000866 | TIMP1 | + |
| AF139460 | ZNF288 | + |
| BC015961 | ADM | + |
| AF129756 | AIF1 | + |
| AY341427 | AP2B1 | + |
| BC004537 | ATP6V0C | − |
| BC008861 | ATP6V0D1 | − |
| AB009598 | B3GAT3 | + |
| AB029331 | C6orf18 | + |
| AF078803 | CAMK2B | + |
| BC015799 | CASP7 | + |
| AB025105 | CDH1 | + |
| AB001090 | CDH13 | + |
| AB037187 | CHST7 | + |
| AK122769 | CKMT2 | + |
| AB032372 | CKTSF1B1 | + |
| AF000959 | CLDN5 | + |
| AF053318 | CNOT8 | + |
| BC022069 | CRABP1 | + |
| BC003015 | DGCR14 | + |
| BC038231 | DUSP8 | + |
| BC020746 | DXS1283E | + |
| J03066 | EN2 | + |
| BC002706 | ERBB3 | − |
| BC002706 | ERBB3 | − |
| AI879202 | ETHE1 | − |
| AF241235 | FXYD2 | + |
| AF124491 | GIT2 | + |
| | Glial Growth Factor 2 | + |
| AL133324 | GSS | + |
| AB032481 | HOXD13 | + |
| AF299094 | HSF1 | − |
| AF441399 | HSGP25L2G | + |
| AF275719 | HSPCB | + |
| AB030304 | HUMGT198A | + |
| BC014972 | IL2RG | + |
| AB012853 | ING1L | + |
| AF361886 | KEAP1 | − |
| BC005407 | KIAA0169 | + |
| BC014932 | KIAA0280 | − |
| AB007887 | KIAA0427 | − |
| AB028953 | KIAA1030 | + |
| BC014781 | LCAT | + |
| AB016485 | LDB1 | − |
| AF072814 | M96 | + |
| AF010193 | MADH7 | − |
| AL137667 | MAPK8 | + |
| AY032603 | MCM3 | − |
| AL137295 | MLLT10 | + |
| AB051340 | MRPL23 | + |
| AB046613 | MYL6 | + |
| NM_004998 | MYO1E | + |
| AF113003 | NCOR2 | − |
| AF013160 | NDUFS2 | + |
| AF020351 | NDUFS4 | + |
| BC013789 | NHLH1 | + |
| | Nuclear Factor 1A | + |
| BC011539 | ORC1L | + |
| AB014887 | ORM1 | + |
| BC006268 | PEX7 | + |
| AK093558 | PFDN1 | + |
| AL133335 | PFDN4 | + |
| BC009899 | PIK3R4 | + |
| BC037246 | PNMT | + |
| AF055028 | POLR2B | + |
| BC031043 | PRH1 | + |
| AB026491 | PRKCABP | + |
| AK074531 | PRR3 | − |
| AF332577 | PSMA6 | + |
| AK023775 | PTPRF | − |
| AF263016 | PTPRR | − |
| BC001390 | QP-C | + |
| BC015460 | QPCT | + |
| AF000231 | RAB11A | − |
| AK055170 | RAE1 | + |
| AF127761 | RBM8A | + |
| AF155595 | RCOR | − |
| BX537448 | SEC14L1 | − |
| AF153609 | SGK | − |
| AF078544 | SLC25A14 | + |
| BC009409 | TACSTD2 | + |
| AF142482 | TEAD3 | − |
| BC000866 | TIMP1 | + |
| AF017146 | TOP3B | + |
| BC016804 | TRAM2 | − |
| BC014243 | TYK2 | − |
| AB028980 | USP24 | + |
| AB017103 | YWHAE | − |
| BC000292 | ACTG1 | + |
| AF023476 | ADAM12 | + |
| AF001042 | ADARB1 | − |
| AB018327 | ADNP | + |
| AF245699 | AGTR1 | + |
| AF129756 | AIF1 | + |
| D45915 | ALK | + |
| AK057883 | AP2M1 | + |
| AK023088 | ARL6IP | − |
| AF001307 | ARNT | + |
| AB018271 | BPAG1 | + |
| AK096489 | BZW1 | + |
| AB029331 | C6orf18 | + |
| AF037335 | CA12 | + |
| AF070589 | CACNA1C | − |
| BC005334 | CETN2 | + |
| AY497547 | CMKLR1 | + |
| NM_001886 | CRYBA4 | + |
| AF361370 | DIA1 | + |
| AF498961 | DRD1 | + |
| AK057845 | EFNA1 | + |
| AI879202 | ETHE1 | − |
| AC002389 | GAPDS | + |
| AF015257 | GPR30 | + |
| AF103803 | H41 | − |
| X83412 | HAB1 | + |
| BC005240 | HAX1 | + |
| AK058013 | HPGD | + |
| BC000290 | IGHMBP2 | + |
| BC015752 | IRF4 | + |
| AK074047 | ITGAX | + |
| AF135158 | JIK | + |
| AF233882 | JUP | − |
| AB020638 | KIAA0831 | + |
| AF115510 | LRRFIP1 | − |
| AF010193 | MADH7 | − |
| AL137667 | MAPK8 | + |
| AK025602 | MGC2747 | + |
| AF125532 | MKNK2 | + |
| BC006491 | MPZ | + |
| AB051340 | MRPL23 | + |
| AF113003 | NCOR2 | − |
| AF013160 | NDUFS2 | + |
| | E6-Ap, | − |
| | Papillomavirus | + |
| BC011539 | ORC1L | + |
| BC000398 | PAFAH1B2 | + |
| AL117618 | PDHB | + |
| AB002107 | PER1 | − |
| BC062602 | PNN | − |
| AK095191 | POU6F1 | − |
| BC013154 | PPP2R5E | − |
| AK055139 | PTK2 | − |
| AF218026 | PTOV1 | − |
| AF008591 | RAC3 | − |
| AL701206 | RARG | + |
| AF127761 | RBM8A | − |
| AF155595 | RCOR | + |
| AB007148 | RPS3A | − |
| BC007102 | RQCD1 | − |
| BC005927 | SERPINE1 | + |
| AB007897 | SETBP1 | + |
| BC009362 | SETDB1 | + |
| AF029081 | SFN | + |
| AF368279 | SGTA | − |
| AK000416 | SLC16A5 | + |
| AF078544 | SLC25A14 | + |
| AK127096 | SLC30A3 | + |
| AY142112 | SLC4A3 | + |
| BC009409 | TACSTD2 | + |
| AB006630 | TCF20 | − |
| AF142482 | TEAD3 | + |
| BC000866 | TIMP1 | + |
| BC029516 | TNP1 | + |
| AF038009 | TPST1 | − |
| AY245544 | TRB2 | + |
| AF104927 | TTLL1 | + |
| BX537824 | TXNIP | + |
| AB002155 | UPK1B | + |
| AF122922 | WIF1 | |

TABLE 9

| Category | Group | Gene Symbol | Gene Name |
|---|---|---|---|
| | All Group | FBLN5 | fibulin 5 |
| | All Group | ECM2 | extracellular matrix |
| | | | protein 2, female organ |
| | | | and adipocyte specific |
| Cell adhesion | Other cell adhesion | SDC4 | syndecan 4 |
| molecule | molecule | | |
| Cell adhesion | Kinase modulator | ICAM2 | intercellular adhesion |
| molecule | | | molecule 2 |
| Extracellular matrix | Extracellular matrix | THBS1 | thrombospondin 1 |
| | glycoprotein | | |
| Extracellular matrix | Extracellular matrix | COL7A1 | collagen, type VII, |
| | structural protein | | alpha 1 |
| Extracellular matrix | Other extracellular | FMOD | fibromodulin |
| | matrix | | |
| Extracellular matrix | Extracellular matrix | COL18A1 | collagen, type XVIII, |
| | structural protein | | alpha 1 |
| Kinase | Protein kinase | WEE1 | WEE1 homolog (S. pombe) |
| Molecular function | Miscellaneous function | TNFRSF5 | tumor necrosis factor |
| unclassified | | | receptor superfamily 5 |
| Transcription factor | Miscellaneous function | NCOA6 | nuclear receptor |
| | | | coactivator 6 |
| Molecular function | Miscellaneous function | GAS1 | growth arrest-specific 1 |
| unclassified | | | |
| Molecular function | Molecular function | ESM1 | endothelial cell- |
| unknown | unknown | | specific molecule 1 |
| Oxidoreductase | Oxygenase | HMOX1 | heme oxygenase |
| | | | (decycling) 1 |
| Protease | Cysteine-type protease | CASP8 | caspase 8, apoptosis- |
| | | | related cysteine |
| | | | protease |
| Protease | Cam family adhesion | ADAM17 | a disintegrin and |
| | molecule | | metalloproteinase |
| | | | domain 17 (tumor |
| | | | necrosis factor, alpha, |
| | | | converting enzyme) |
| Receptor | G-protein coupled | GPR30 | G protein-coupled |
| | receptor | | receptor 30 |
| Receptor | Cytokine receptor | TNFRSF6 | tumor necrosis factor |
| | | | receptor superfamily 6 |
| Select regulatory | Kinase modulator | CCND2 | cyclin D2 |
| molecule | | | |
| Select regulatory | Protease inhibitor | CST7 | cystatin F |
| molecule | | | (leukocystatin) |
| Select regulatory | Protease inhibitor | CST6 | cystatin E/M |
| molecule | | | |
| Select regulatory | Kinase modulator | CCNE1 | cyclin E1 |
| molecule | | | |
| Signaling molecule | Protein/peptide hormone | EDN1 | endothelin 1 |
| Signaling molecule | Protein/peptide hormone | STC2 | stanniocalcin 2 |
| Signaling molecule | Cytokine | IL11 | interleukin 11 |
| Signaling molecule | Chemokine | CCL3 | chemokine (C-C motif) |
| | | | ligand 3 |
| Signaling molecule | Cytokine | IL15 | interleukin 15 |
| Signaling molecule | Other signaling molecule | CTNNB1 | catenin (cadherin- |
| | | | associated protein), b1 |
| Signaling molecule | Other signaling molecule | HUMGT198A | GT198, complete ORF |
| Signaling molecule | Cytokine | CXCL10 | chemokine (C-X-C |
| | | | motif) ligand 10 |
| Signaling molecule | Growth factor | CXCL12 | chemokine (C-X-C |
| | | | motif) ligand 12 |
| | | | (stromal cell-derived |
| | | | factor 1) |
| Signaling molecule | Cytokine | IL17 | interleukin 17 |
| | | | (cytotoxic T- |
| | | | lymphocyte-associated |
| | | | serine esterase 8) |
| Signaling molecule | Chemokine | CXCL5 | chemokine (C-X-C |
| | | | motif) ligand 5 |
| Signaling molecule | Cytokine | IL13 | interleukin 13 |
| Synthase and | Synthase | TYMS | thymidylate synthetase |
| synthetase | | | |
| Transcription factor | Zinc finger transcription | TIEG | TGFB inducible early |
| | factor | | growth response |
| Transcription factor | Homeobox transcription | TGIF | TGFB-induced factor |
| | factor | | (TALE family |
| | | | homeobox) |
| Transcription factor | Other transcription factor | RUNX3 | runt-related |
| | | | transcription factor 3 |
| Transcription factor | Zinc finger transcription | LHX1 | LIM homeobox 1 |
| | factor | | |
| Transcription factor | Other transcription factor | E2F1 | E2F transcription factor 1 |
| Transcription factor | Zinc finger transcription | EGR3 | early growth response 3 |
| | factor | | |
| Transcription factor | Transcription cofactor | CITED2 | Cbp/p300-interacting |
| | | | transactivator, with |
| | | | Glu/Asp-rich carboxy- |
| | | | terminal domain, 2 |
| Transcription factor | Transcription cofactor | EP300 | E1A binding protein |
| | | | p300 |
| Transcription factor | Nuclear hormone | NR4A1 | nuclear receptor |
| | receptor | | subfamily 4, group A, |
| | | | member 1 |
| Transcription factor | Other transcription factor | RUNX1 | runt-related |
| | | | transcription factor 1 |
| | | | (acute myeloid |
| | | | leukemia 1; aml1 |
| | | | oncogene) |
| Transferase | Methyltransferase | MGMT | O-6-methylguanine- |
| | | | DNA methyltransferase |

1: A method for identifying a modulator of at least one gene that is differentially-expressed in fibrotic tissue or during fibrogenesis, or a polypeptide encoded by the differentially-expressed gene, in a cell population, comprising: (a) contacting the cell population with a test agent under conditions effective for the test agent to modulate a differentially-expressed gene, to modulate the biological activity of the polypeptide encoded by the differentially-expressed gene; and (b) determining whether the test agent modulates the expression of the gene or biological activity of the polypeptide encoded by the gene.

2: The method of claim 1, wherein said determining step comprises detecting mRNA or the polypeptide encoded by the differentially-expressed gene.

3. (canceled)

4: The method of claim 1, wherein the cell population comprises endometrial cells of the female reproductive tract.

5: The method of claim 1, wherein the cell population comprises human cells.

6: The method of claim 1, wherein the at least one differentially expressed gene includes at least one gene selected from the group consisting of docking protein 1, 62 kD (downstream of tyrosine kinase 1); centromere protein A (17 kD); catenin (cadherin-associated protein), beta 1 (88 kD); nuclear receptor subfamily 1, group I, member 2; v-rel avian reticuloendotheliosis viral oncogene homolog A; LGN Protein; CDC28 protein kinase 1; hypothetical protein; solute carrier family 17 (sodium phosphate), member 1; FOS-like antigen-1; nuclear matrix protein p84; LERK-6 (EPLG6); visinin-like 1; phosphodiesterase 10A; KH-type splicing regulatory protein (FUSE binding protein 2); Polyposis locus (DP1 gene) mRNA; microtubule-associated protein 2; CDC5 (cell division cycle 5, S pombe, homolog)-like; Centromere autoantigen C (CENPC) mRNA; RNA guanylyltransferase and 5′-phosphatase; Nijmegen breakage syndrome 1 (nibrin); ribonuclease, RNase A family, 4; keratin 10 (epidermolytic hyperkeratosis; keratosis palmaris et plantaris); basic helix-loop-helix domain containing, class B, 2; dual specificity phosphatase 1; annexin A11; putative receptor protein; Human endogenous retrovirus HERV-K(HML6); mitogen-activated protein kinase kinase kinase 12; TXK tyrosine kinase; kynureninase (L-kynurenine hydrolase); ubiquitin specific protease 4 (proto-oncogene); peroxisome biogenesis factor 13; olfactory receptor, family 2, subfamily F, member 1; membrane protein, palmitoylated 3 (MAGUK p55 subfamily member 3); origin recognition complex, subunit 1 (yeast homolog)-like; dTDP-D-glucose 4,6-dehydratase; cytochrome c oxidase subunit VIa polypeptide 2; gamma-tubulin complex protein 2; Monocyte chemotactic protein-3; myelin transcription factor 1; inhibitor of growth family, member 1-like; thyroid hormone receptor, alpha myosin-binding protein C, slow-type; fragile X mental retardation 2; sonic hedgehog (Drosophila) homolog; 6-phosphofructo-2-kinase/fructose-2,6-biphosphatase 2; SFRS protein kinase 2; excision repair cross-complementing rodent repair deficiency; cyclin-dependent kinase 5, regulatory subunit 1 (p35); poly(A)-specific ribonuclease (deadenylation nuclease); solute carrier family 12 (potassium/chloride transporters), member 4; Pseudogene for metallothionein; natriuretic peptide precursor A; intercellular adhesion molecule 2; apoptosis antagonizing transcription factor; similar to rat HREV 107; major histocompatibility complex, class II, DP beta 1; MpV17 transgene, murine homolog, glomerulosclerosis; uroporphyrinogen decarboxylase; proteasome (prosome, macropain) 26S subunit, ATPase, 1; fms-related tyrosine kinase 3 ligand; actin, gamma 1; Protein Kinase Pitslre, Alpha, Alt. Splice 1-Feb; nuclear factor of kappa light polypeptide gene enhancer in B-cells inhibitor, alpha; pyruvate kinase, muscle; telomeric repeat binding factor 2; cell division cycle 2, G1 to S and G2 to M; ADP-ribosylation factor 3; NRF1 Protein; H factor (complement)-like 3; serine (or cysteine) proteinase inhibitor, clade B (ovalbumin), member 6; mRNA of muscle specific gene M9; solute carrier family 25 (mitochondrial carrier; phosphate carrier), member 3; ribosomal protein L36a; suppressor of Ty (S. cerevisiae) 4 homolog 1; amino-terminal enhancer of split; ubiquitin A-52 residue ribosomal protein fusion product 1; hydroxyacyl-Coenzyme A dehydrogenase/3-ketoacyl-Coenzyme A thiolase; chaperonin containing TCP1, subunit 2 (beta); tyrosine kinase with immunoglobulin and epidermal growth factor homology; domains; Fc fragment of IgG, receptor, transporter, alpha; NRD1 convertase; ADP-ribosylation factor 5; transcription elongation factor A (SII), 1; like mouse brain protein E46; titin; fibromodulin; and Abi-interactor 2 (Abi-2).

7: The method of claim 1, wherein the at least one differentially expressed gene includes at least one gene selected from the group consisting of CDKN1B, CDKN1C, CTGF, fibromodulin, and Abi-2.

8: The method of claim 1, wherein the at least one differentially expressed gene includes at least one of IL-11, IL-13, EGR1, EGR2, EGR3, CITED2, P300, E2F1, E2F2, E2F3, E2F4, E2F5, MCP3, CXCL5, CCL7, SMAD3, TYMS, GT198, SMAD7, NCOR2, TIMP-1, and ADAM17.

9: The method of claim 1, wherein the at least one differentially-expressed gene includes at least one of those genes listed in Table 9.

10: The method of claim 1, wherein the at least one differentially-expressed gene includes at least one gene selected from the group consisting of stanniocalcin 2, interleukin 11, disintegrin and metalloproteinase domain 17, early growth response 3, fibromodulin, collagen type XVIII alpha 1, and interleukin 13.

11: The method of claim 1, wherein the at least one differentially expressed gene includes a plurality of genes comprising stanniocalcin 2, interleukin 11, disintegrin and metalloproteinase domain 17, early growth response 3, fibromodulin, collagen type XVIII alpha 1, and interleukin 13.

12: A method for detecting a fibrotic disorder in a subject by: (a) providing a biological sample obtained from the subject; (b) analyzing the expression of at least one gene that is differentially expressed in the fibrotic disorder of interest as compared to normal tissue; and (c) correlating the expression of the at least one differentially expressed gene with the presence or absence of the fibrotic disorder in the subject.

13: The method of claim 12, wherein the fibrotic disorder is a fibrotic disorder of the female reproductive tract.

14: The method of claim 12, wherein the fibrotic disorder is a uterine fibrosis.

15: The method of claim 12, wherein the fibrotic disorder is a fibrotic disorder of the female reproductive tract selected from the group consisting of leiomyoma, endometriosis, ovarian hyperstimulation syndrome, adhesion, and endometrial cancer.

16: The method of claim 12, wherein the sample comprises smooth muscle cells, endometrium, or peritoneal fluid.

17. (canceled)

18: The method of claim 12, wherein the normal tissue comprises myometrium.

19: The method of claim 12, wherein the at least one differentially expressed gene includes at least one gene selected from the group consisting of docking protein 1, 62 kD (downstream of tyrosine kinase 1); centromere protein A (17 kD); catenin (cadherin-associated protein), beta 1 (88 kD); nuclear receptor subfamily 1, group I, member 2; v-rel avian reticuloendotheliosis viral oncogene homolog A; LGN Protein; CDC28 protein kinase 1; hypothetical protein; solute carrier family 17 (sodium phosphate), member 1; FOS-like antigen-1; nuclear matrix protein p84; LERK-6 (EPLG6); visinin-like 1; phosphodiesterase 10A; KH-type splicing regulatory protein (FUSE binding protein 2); Polyposis locus (DP1 gene) mRNA; microtubule-associated protein 2; CDC5 (cell division cycle 5, S pombe, homolog)-like; Centromere autoantigen C (CENPC) mRNA; RNA guanylyltransferase and 5′-phosphatase; Nijmegen breakage syndrome 1 (nibrin); ribonuclease, RNase A family, 4; keratin 10 (epidermolytic hyperkeratosis; keratosis palmaris et plantaris); basic helix-loop-helix domain containing, class B, 2; dual specificity phosphatase 1; annexin A11; putative receptor protein; Human endogenous retrovirus HERV-K(HML6); mitogen-activated protein kinase kinase kinase 12; TXK tyrosine kinase; kynureninase (L-kynurenine hydrolase); ubiquitin specific protease 4 (proto-oncogene); peroxisome biogenesis factor 13; olfactory receptor, family 2, subfamily F, member 1; membrane protein, palmitoylated 3 (MAGUK p55 subfamily member 3); origin recognition complex, subunit 1 (yeast homolog)-like; dTDP-D-glucose 4,6-dehydratase; cytochrome c oxidase subunit VIa polypeptide 2; gamma-tubulin complex protein 2; Monocyte chemotactic protein-3; myelin transcription factor 1; inhibitor of growth family, member 1-like; thyroid hormone receptor, alpha myosin-binding protein C, slow-type; fragile X mental retardation 2; sonic hedgehog (Drosophila) homolog; 6-phosphofructo-2-kinase/fructose-2,6-biphosphatase 2; SFRS protein kinase 2; excision repair cross-complementing rodent repair deficiency; cyclin-dependent kinase 5, regulatory subunit 1 (p35); poly(A)-specific ribonuclease (deadenylation nuclease); solute carrier family 12 (potassium/chloride transporters), member 4; Pseudogene for metallothionein; natriuretic peptide precursor A; intercellular adhesion molecule 2; apoptosis antagonizing transcription factor; similar to rat HREV 107; major histocompatibility complex, class II, DP beta 1; MpV17 transgene, murine homolog, glomerulosclerosis; uroporphyrinogen decarboxylase; proteasome (prosome, macropain) 26S subunit, ATPase, 1; fms-related tyrosine kinase 3 ligand; actin, gamma 1; Protein Kinase Pitslre, Alpha, Alt. Splice 1-Feb; nuclear factor of kappa light polypeptide gene enhancer in B-cells inhibitor, alpha; pyruvate kinase, muscle; telomeric repeat binding factor 2; cell division cycle 2, G1 to S and G2 to M; ADP-ribosylation factor 3; NRF1 Protein; H factor (complement)-like 3; serine (or cysteine) proteinase inhibitor, clade B (ovalbumin), member 6; mRNA of muscle specific gene M9; solute carrier family 25 (mitochondrial carrier; phosphate carrier), member 3; ribosomal protein L36a; suppressor of Ty (S. cerevisiae) 4 homolog 1; amino-terminal enhancer of split; ubiquitin A-52 residue ribosomal protein fusion product 1; hydroxyacyl-Coenzyme A dehydrogenase/3-ketoacyl-Coenzyme A thiolase; chaperonin containing TCP1, subunit 2 (beta); tyrosine kinase with immunoglobulin and epidermal growth factor homology; domains; Fc fragment of IgG, receptor, transporter, alpha; NRD1 convertase; ADP-ribosylation factor 5; transcription elongation factor A (SII), 1; like mouse brain protein E46; titin; fibromodulin; and Abi-interactor 2 (Abi-2).

20: The method of claim 12, wherein the at least one differentially expressed gene includes at least one gene selected from the group consisting of CDKN1B, CDKN1C, CTGF, fibromodulin, and Abi-2.

21: The method of claim 12, wherein the at least one differentially expressed gene includes at least one of IL-11, IL-13, EGR1, EGR2, EGR3, CITED2, P300, E2F1, E2F2, E2F3, E2F4, E2F5, MCP3, CXCL5, CCL7, SMAD3, TYMS, GT198, SMAD7, NCOR2, TIMP-1, and ADAM17, wherein elevated expression of IL-11, IL-13, EGR1, EGR2, EGR3, CITED2, P300, E2F1, E2F2, E2F3, E2F4, E2F5, MCP3, CXCL5, CCL7, SMAD3, TYMS, and/or GT198 is indicative of a fibrotic disorder; and wherein reduced expression of SMAD7, NCOR2, TIMP-1, and/or ADAM17 is indicative of a fibrotic disorder.

22: The method of claim 12, wherein the at least one differentially expressed gene includes at least one of those genes listed in Table 9.

23: The method of claim 12, wherein the at least one differentially expressed gene includes at least one gene selected from the group consisting of stanniocalcin 2, interleukin 11, disintegrin and metalloproteinase domain 17, early growth response 3, fibromodulin, collagen type XVIII alpha 1, and interleukin 13.

24: The method of claim 12, wherein the at least one differentially expressed gene includes a plurality of genes comprising stanniocalcin 2, interleukin 11, disintegrin and metalloproteinase domain 17, early growth response 3, fibromodulin, collagen type XVIII alpha 1, and interleukin 13.

25: The method of claim 12, wherein the subject is human.

26: The method of claim 12, further comprising diagnosing the subject based on said correlating.

27: A method for modulating gene expression in fibrotic tissue, comprising contacting the fibrotic tissue in vitro or in vivo with an agent that modulates expression of at least one differentially expressed gene in the tissue.

28: The method of claim 27, wherein the agent is a TGF-beta signaling inhibitor.

29: The method of claim 27, wherein the agent is a TGF-beta II receptor inhibitor.

30. (canceled)

31: The method of claim 27, wherein the at least one differentially expressed gene includes at least one gene selected from the group consisting of docking protein 1, 62 kD (downstream of tyrosine kinase 1); centromere protein A (17 kD); catenin (cadherin-associated protein), beta 1 (88 kD); nuclear receptor subfamily 1, group I, member 2; v-rel avian reticuloendotheliosis viral oncogene homolog A; LGN Protein; CDC28 protein kinase 1; hypothetical protein; solute carrier family 17 (sodium phosphate), member 1; FOS-like antigen-1; nuclear matrix protein p84; LERK-6 (EPLG6); visinin-like 1; phosphodiesterase 10A; KH-type splicing regulatory protein (FUSE binding protein 2); Polyposis locus (DP1 gene) mRNA; microtubule-associated protein 2; CDC5 (cell division cycle 5, S pombe, homolog)-like; Centromere autoantigen C (CENPC) mRNA; RNA guanylyltransferase and 5′-phosphatase; Nijmegen breakage syndrome 1 (nibrin); ribonuclease, RNase A family, 4; keratin 10 (epidermolytic hyperkeratosis; keratosis palmaris et plantaris); basic helix-loop-helix domain containing, class B, 2; dual specificity phosphatase 1; annexin A11; putative receptor protein; Human endogenous retrovirus HERV-K(HML6); mitogen-activated protein kinase kinase kinase 12; TXK tyrosine kinase; kynureninase (L-kynurenine hydrolase); ubiquitin specific protease 4 (proto-oncogene); peroxisome biogenesis factor 13; olfactory receptor, family 2, subfamily F, member 1; membrane protein, palmitoylated 3 (MAGUK p55 subfamily member 3); origin recognition complex, subunit 1 (yeast homolog)-like; dTDP-D-glucose 4,6-dehydratase; cytochrome c oxidase subunit VIa polypeptide 2; gamma-tubulin complex protein 2; Monocyte chemotactic protein-3; myelin transcription factor 1; inhibitor of growth family, member 1-like; thyroid hormone receptor, alpha myosin-binding protein C, slow-type; fragile X mental retardation 2; sonic hedgehog (Drosophila) homolog; 6-phosphofructo-2-kinase/fructose-2,6-biphosphatase 2; SFRS protein kinase 2; excision repair cross-complementing rodent repair deficiency; cyclin-dependent kinase 5, regulatory subunit 1 (p35); poly(A)-specific ribonuclease (deadenylation nuclease); solute carrier family 12 (potassium/chloride transporters), member 4; Pseudogene for metallothionein; natriuretic peptide precursor A; intercellular adhesion molecule 2; apoptosis antagonizing transcription factor; similar to rat HREV107; major histocompatibility complex, class II, DP beta 1; MpV17 transgene, murine homolog, glomerulosclerosis; uroporphyrinogen decarboxylase; proteasome (prosome, macropain) 26S subunit, ATPase, 1; fms-related tyrosine kinase 3 ligand; actin, gamma 1; Protein Kinase Pitslre, Alpha, Alt. Splice 1-Feb; nuclear factor of kappa light polypeptide gene enhancer in B-cells inhibitor, alpha; pyruvate kinase, muscle; telomeric repeat binding factor 2; cell division cycle 2, G1 to S and G2 to M; ADP-ribosylation factor 3; NRF1 Protein; H factor (complement)-like 3; serine (or cysteine) proteinase inhibitor, clade B (ovalbumin), member 6; mRNA of muscle specific gene M9; solute carrier family 25 (mitochondrial carrier; phosphate carrier), member 3; ribosomal protein L36a; suppressor of Ty (S. cerevisiae) 4 homolog 1; amino-terminal enhancer of split; ubiquitin A-52 residue ribosomal protein fusion product 1; hydroxyacyl-Coenzyme A dehydrogenase/3-ketoacyl-Coenzyme A thiolase; chaperonin containing TCP1, subunit 2 (beta); tyrosine kinase with immunoglobulin and epidermal growth factor homology; domains; Fc fragment of IgG, receptor, transporter, alpha; NRD1 convertase; ADP-ribosylation factor 5; transcription elongation factor A (SII), 1; like mouse brain protein E46; titin; fibromodulin; and Abi-interactor 2 (Abi-2).

32: The method of claim 27, wherein the at least one differentially expressed gene includes at least one gene selected from the group consisting of CDKN1B, CDKN1C, CTGF, fibromodulin, and Abi-2.

33: The method of claim 27, wherein the at least one differentially expressed gene includes at least one of IL-11, IL-13, EGR1, EGR2, EGR3, CITED2, P300, E2F1, E2F2, E2F3, E2F4, E2F5, MCP3, CXCL5, CCL7, SMAD3, TYMS, GT198, SMAD7, NCOR2, TIMP-1, and ADAM17.

34: The method of claim 27, wherein the at least one differentially expressed gene includes at least one of those genes listed in Table 9.

35: The method of claim 27, wherein the at least one differentially expressed gene includes at least one gene selected from the group consisting of stanniocalcin 2, interleukin 11, disintegrin and metalloproteinase domain 17, early growth response 3, fibromodulin, collagen type XVIII alpha 1, and interleukin 13.

36: The method of claim 27, wherein the at least one differentially expressed gene includes a plurality of genes comprising stanniocalcin 2, interleukin 11, disintegrin and metalloproteinase domain 17, early growth response 3, fibromodulin, collagen type XVIII alpha 1, and interleukin 13.

37: The method of claim 27, wherein the agent is a selective estrogen receptor modulator (SERM), selective progesterone receptor modulator (SPRM), or mast cell inhibitor.

38-39. (canceled)

40: The method of claim 27, wherein the agent has a pyrazolopyridine scaffold, a pyrazole scaffold, an imadazpyridine scaffold, a triazole scaffold, a pyridopyrimidine scaffold, or an isothiazole scaffold.

41: The method of claim 27, wherein the agent is a GnRh agonist or antagonist.

42: The method of claim 27, wherein the agent is at least one selected from the group consisting of roloxifene; asoprisnil (J867); RU486; SB-505124; SB-431542; tranlist; cystatin C (CystC); SD-208; LY550410; LY580276; pitavastatin; 1,-5 naphthyridine amiothiazole derivative; 1,5 naphthyridine pyrazole derivative; and ursolic acid.

43: An array comprising a substrate having a plurality of addresses, wherein each address disposed thereon has a capture probe that can specifically bind at least one polynucleotide that is differentially expressed in fibrotic disorders, or a complement thereof.

44: The array of claim 43, wherein the at least one polynucleotide is selected from the group consisting of docking protein 1, 62 kD (downstream of tyrosine kinase 1); centromere protein A (17 kD); catenin (cadherin-associated protein), beta 1 (88 kD); nuclear receptor subfamily 1, group I, member 2; v-rel avian reticuloendotheliosis viral oncogene homolog A; LGN Protein; CDC28 protein kinase 1; hypothetical protein; solute carrier family 17 (sodium phosphate), member 1; FOS-like antigen-1; nuclear matrix protein p84; LERK-6 (EPLG6); visinin-like 1; phosphodiesterase 10A; KH-type splicing regulatory protein (FUSE binding protein 2); Polyposis locus (DP1 gene) mRNA; microtubule-associated protein 2; CDC5 (cell division cycle 5, S pombe, homolog)-like; Centromere autoantigen C (CENPC) mRNA; RNA guanylyltransferase and 5′-phosphatase; Nijmegen breakage syndrome 1 (nibrin); ribonuclease, RNase A family, 4; keratin 10 (epidermolytic hyperkeratosis; keratosis palmaris et plantaris); basic helix-loop-helix domain containing, class B, 2; dual specificity phosphatase 1; annexin A11; putative receptor protein; Human endogenous retrovirus HERV-K(HML6); mitogen-activated protein kinase kinase kinase 12; TXK tyrosine kinase; kynureninase (L-kynurenine hydrolase); ubiquitin specific protease 4 (proto-oncogene); peroxisome biogenesis factor 13; olfactory receptor, family 2, subfamily F, member 1; membrane protein, palmitoylated 3 (MAGUK p55 subfamily member 3); origin recognition complex, subunit 1 (yeast homolog)-like; dTDP-D-glucose 4,6-dehydratase; cytochrome c oxidase subunit VIa polypeptide 2; gamma-tubulin complex protein 2; Monocyte chemotactic protein-3; myelin transcription factor 1; inhibitor of growth family, member 1-like; thyroid hormone receptor, alpha myosin-binding protein C, slow-type; fragile X mental retardation 2; sonic hedgehog (Drosophila) homolog; 6-phosphofructo-2-kinase/fructose-2,6-biphosphatase 2; SFRS protein kinase 2; excision repair cross-complementing rodent repair deficiency; cyclin-dependent kinase 5, regulatory subunit 1 (p35); poly(A)-specific ribonuclease (deadenylation nuclease); solute carrier family 12 (potassium/chloride transporters), member 4; Pseudogene for metallothionein; natriuretic peptide precursor A; intercellular adhesion molecule 2; apoptosis antagonizing transcription factor; similar to rat HREV107; major histocompatibility complex, class II, DP beta 1; MpV17 transgene, murine homolog, glomerulosclerosis; uroporphyrinogen decarboxylase; proteasome (prosome, macropain) 26S subunit, ATPase, 1; fins-related tyrosine kinase 3 ligand; actin, gamma 1; Protein Kinase Pitslre, Alpha, Alt. Splice 1-Feb; nuclear factor of kappa light polypeptide gene enhancer in B-cells inhibitor, alpha; pyruvate kinase, muscle; telomeric repeat binding factor 2; cell division cycle 2, G1 to S and G2 to M; ADP-ribosylation factor 3; NRF1 Protein; H factor (complement)-like 3; serine (or cysteine) proteinase inhibitor, clade B (ovalbumin), member 6; mRNA of muscle specific gene M9; solute carrier family 25 (mitochondrial carrier; phosphate carrier), member 3; ribosomal protein L36a; suppressor of Ty (S. cerevisiae) 4 homolog 1; amino-terminal enhancer of split; ubiquitin A-52 residue ribosomal protein fusion product 1; hydroxyacyl-Coenzyme A dehydrogenase/3-ketoacyl-Coenzyme A thiolase; chaperonin containing TCP1, subunit 2 (beta); tyrosine kinase with immunoglobulin and epidermal growth factor homology; domains; Fc fragment of IgG, receptor, transporter, alpha; NRD1 convertase; ADP-ribosylation factor 5; transcription elongation factor A (SII), 1; like mouse brain protein E46; titin; fibromodulin; and Abi-interactor 2 (Abi-2).

45: The array of claim 43, wherein the at least one polynucleotide includes at least one gene selected from the group consisting of CDKN1B, CDKN1C, CTGF, fibromodulin, and Abi-2.

46: The array of claim 43, wherein the at least one polynucleotide includes at least one gene selected from the group consisting of IL-11, IL-13, EGR1, EGR2, EGR3, CITED2, P300, E2F1, E2F2, E2F3, E2F4, E2F5, MCP3, CXCL5, CCL7, SMAD3, TYMS, GT198, SMAD7, NCOR2, TIMP-1, and ADAM17.

47: The array of claim 43, wherein the at least one polynucleotide includes at least one of those genes listed in Table 9.

48: The array of claim 43, wherein the at least one polynucleotide includes at least one gene selected from the group consisting of stanniocalcin 2, interleukin 11, disintegrin and metalloproteinase domain 17, early growth response 3, fibromodulin, collagen type XVIII alpha 1, and interleukin 13.

49: The array of claim 43, wherein the at least one polynucleotide includes a plurality of genes comprising stanniocalcin 2, interleukin 11, disintegrin and metalloproteinase domain 17, early growth response 3, fibromodulin, collagen type XVIII alpha 1, and interleukin 13.

50-55. (canceled)

The application's sequence listing, which the Patent Office published only in electronic form, follows.

SEQUENCE LISTING (1006 sequences)

SEQ ID NO: 1 - DNA, 6019 bp, Homo sapiens
gcggcggtggcggcgaccgtcagttttcgctgaggagaaacacgaaacggaccctttggctctcccccttccccttccccgtcctgaacccctctcctggtcaccgagaatcagtccccgtggagttccccctccacctcgccatcgtttcctcggtcctcggcccagtggaagtcactaccctcgaggaggaggcagcggcagccgccctcgcgtcgccgcccccggttcggtgcccgcggtcccggagaggaggtgccgccgccaccgccgctccccccctcccgctgccctcgggccgggctgggtcgagctgcgatgccctcggacttcatctcattgctcagcgcggacctagacctggaatcgcccaagtccctctactcgcgagaatctgtctatgatcttctcccaaaggagttacagttacctccatctagagaaacatctgtagcatcaatgagtcagacaagcggtggtgaggcaggctcgcctcctccagctgttgttgctgctgatgcttcttcagctccctcctcttcctccatgggcggtgcttgcagctcctttaccacctcttccagccctaccatttattctacctcagtcaccgacagcaaggctatgcaagtggagagctgctcctcagccgtgggggtaagtaacagaggggtaagtgaaaagcagttaaccagtaacacagttcagcagcatccatcaacaccgaagaggcacacagtcttgtacatctcaccaccacctgaggacttgctggataacagtcggatgtcctgccaggatgaggggtgtggattggaatctgagcagagctgcagtatgtggatggaggattccccctccaacttcagtaacatgagcaccagttcctacaatgataacactgaggtacctcgtaaatcacgaaaacgaaatccaaagcagaggccgggggtcaaacgacgagattgtgaagaatctaatatggatatatttgatgccgacagtgccaaagcacctcactatgtgctttctcagcttaccacggacaacaaaggcaactcaaaagcgggaaatggaacattggaaaaccaaaaaggaactggagtaaagaagagccctatgttgtgtggacaatatcctgttaaaagtgagggaaaggagctgaagatagttgtacaacctgagacacagcaccgagctcggtacctgactgagggcagccgtggctcagtgaaagatagaacacagcaaggctttcctacagtaaagctggaaggccataatgaacctgtagtgttgcaagtgtttgtgggcaacgactctggacgagtgaaaccacatggattttatcaggcctgcagagtaactggacgaaatacaactccttgcaaagaagtggacattgaaggcactactgttatagaagtcggccttgatcctagcaacaacatgacactggcggtggactgcgtagggatattgaaattgaggaatgctgatgtcgaagccagaataggaattgctggttccaagaagaaaagcactcgtgccagattggtttttcgagttaatatcatgaggaaagatggctccactttgacactgcaaacaccctcttctccaattttgtgtactcagccagcaggagtgccagaaatcttaaagaaaagcttgcatagctgttcagtgaaaggagaagaagaagtgtttttaatcggcaagaactttctgaaaggaactaaagttattttccaagaaaatgtttctgatgaaaactcttggaagtcagaagctgaaattgatatggaactatttcatcagaatcatcttattgtgaaggttcctccctatcatgaccaacatataactttgcctgtgtcagtgggaatatatgtagtgacaaatgctggaagatctcatgatgttcaaccattcacttacactccagacccagcagcagctggtgctttgaatgtaaatgtgaagaaggaaatatctagtccagcaagaccttgctcttttgaagaggccatgaaagcaatgaaaactactggatgtaatttagataaggtaaatattatccctaatgccctgatgactccactcataccaagcagtatgattaagagtgaagatgttactccaatggaagtaacagcagaaaaaagatcttccactatttttaagactacaaagtctgttggatcaactcagcaaacattagaaaacatctcaaacatagcaggaaatggctctttttcatcaccatcatcttcccacctaccttctgaaaatgaaaaacagcagcagattcagcccaaggcatacaacccagagaccctgacaactattcaaacccaggacatctcacagcctggtacttttccagcagtttctgcttctagtcagctgcccaacagcgatgcactattgcagcaggctacacagtttcagacaagagaaactcagtctagagagatattacagtcagatggtacagtggttaatttgtcacaactgactgaggcatcacaacaacagcagcagtcaccactacaagaacaagcacagactttacagcagcagatttcatcaaatatttttccatcaccaaatagtgtgagtcagcttcagaatactattcagcagctgcaagcagggagtttcacaggcagtactgctagtggcagcagtggaagtgttgacttggtccaacaagttttagaggcacagcagcagttatcttcagttttattttctgctccagatggtaatgagaatgttcaagagcagcttagtgcagatatttttcaacaagtcagtcaaattcagagtggtgtaagccctggaatgttttcctcaacagagccaacagtccataccagaccagataatttattacctggaagagctgaaagtgttcatccacagtctgaaaacacgttatctaatcaacagcagcagcagcagcagcaacagcaagtgatggaatcttcagccgcaatggtgatggagatgcaacagagtatctgccaggcagctgcccagattcagtcagagttattcccttcaactgcttcagcaaatggaaaccttcagcaatcgccagtttaccagcagacttctcacatgatgagtgcattgtctaccaatgaggatatgcaaatgcagtgtgaattgttttcttctcctcctgcagtttctggaaatgaaacttctacaactaccacacagcaggttgcaacccctggcactaccatgtttcagacatcaagttcaggagatggagaagaaactggaacacaagcaaaacagattcagaacagtgtctttcagaccatggtccaaatgcaacatagtggggacaatcaacctcaagttaaccttttttcatccacaaaaagtatgatgagtgttcagaatagtggtacccaacaacaaggtaatggtttattccagcaagggaatgagatgatgtcacttcaatctggaaattttttgcagcagtcttctcattcacaggcccaactttttcatcctcaaaatcctattgccgatgctcagaacctttcccaggaaactcaaggttctctctttcatagtccaaatcctattgtccacagtcagacttctacaacctcctctgaacaaatgcagcctccaatgtttcactctcaaagtaccattgctgtgttacagggctcttcagttcctcaagaccagcagtcaaccaacatatttctttcccagagtcccatgaataatcttcagactaacacagtagcccaagaagcattttttgcagcaccgaactcaatttctccacttcagtcaacatcaaacagtgaacaacaagctgctttccaacagcaagctccaatatcacacatccagactcctatgctttcccaagaacaggcacaacccccgcagcagggtttatttcagcctcaggtggccctgggctcccttccacctaatccaatgcctcaaagccaacaaggaaccatgttccagtcacagcactcaatagttgccatgcagagtaactctccatcccaggaacagcagcagcagcagcaacagcagcagcaacagcagcagcaacaacaacagagcattttattcagtaatcagaataccatggctacaatggcgtctccaaagcaaccaccaccaaacatgatattcaacccaaatcaaaatccaatggctaatcaggagcaacagaaccagtcaatttttcaccaacaaagtaacatggccccaatgaatcaagagcaacagcccatgcaatttcagagtcagtccacagtttcctcacttcagaacccaggtcctacccagtcggaatcatcacagacccccttgttccatagctctcctcagattcagttggtacaagggtcacctagttctcaagagcagcaagtaactctcttcttatctccagcatccatgtctgccttgcagaccagtataaatcaacaagatatgcaacagtctcctctttattcccctcagaacaacatgcctggaattcaaggagccacatcttcgcctcaaccacaggctactttatttcacaacacagcaggaggcacaatgaaccaactgcagaattctcctggctcatctcagcagacatcaggaatgttcttatttggcattcaaaataactgtagtcagcttttaacctctggaccagctacattgcctgatcagttgatggccataagtcagccaggccaaccacaaaacgagggccagccacctgtgacaacacttctttctcagcaaatgccagagaattctccactggcatcctctataaacaccaaccagaacatcgaaaagattgatttgcttgtttcattgcaaaaccaagggaacaacttgactggctccttttaactggatataaattccacgaagaaaatcctgattccaagatgtcctgagatcttgtggttccatgagaattattactttaaaaacaaaacaaaatataaaaaactgtgtttgagtaaactgatagattttactctgactgcaaaagagcacacctatgctgcttgttgcagtaactaaccaccaatgttaacatcttcatattttatattcctaataacagtgatgactgagaatctatttgagtttccagctggcagaattaattgttattattttcctaggcgcaatttccttaaacgtacagtttaaattcaaggctggaccactcagttattattgctattagaaaataatatatcatgtttacttttgttcttcattattttctttcctgcattgttttagtcaagtaatggcttttgaaaaagtaaagttcaataataactaaggctgtgatttttttcaatataaaaggcacagctgttggccaaagtgaaggaatcttttttcagttttattggagaaactgaagggtaacattctaacaagtaaactgtatgtgcagataaaagtactcttgatttaacacaaaggcagatgatacacttataaaactgggaacagctggaatgcttcttgattttattttttcagagagttgttagttctctgggtttctactaaggggtttagccataactgtgcatagaaaaataattatctgtaaaaaatgaaggggataatatatgataaattatgttctgatatcctcctacagtagtttaaattgacagaaaaatttgaatgttttcttcttaacccagtcttaggctggtattccctttttatatatatctatattacttttcacctctttttcactttactttagagaactattaatatactactggcttcatgaccctgtagcatctttggccactttaatctagggtgacctagcaatcctgcagcacagggcagagagtactgtcttaggaattattaggagttgattcctgagaaacaacacatttttccccatgaacggtgctgttctgaagtcttcaaatttttccctctaataggaaacagtataaatttt

SEQ ID NO: 2 - DNA, 1375 bp, Homo sapiens
tcgaattccggaagccgctcccgacaccctttgcctggctctgtccatattagttcccaggcggccgtcgcgttccagcagcggcacgcagcgcaggcggagcggcagcggggcctcggctctatagagccgagccgctggtacccgcccggtaccgcgcgagccagtgcccctggatcttgcctctgctccgacgccgttccccaccagttagcgacagcgcccgcccctctgaggagacacgaaggtggttccccagccgctcaaatttccggaccaccgcgctttcccctcctcagcctgggctgtgctctctctagaatcctcgggcccccactttcttcccaaactcatcctaaatctctcacacacgcgagtgttcccagccctcaagccagctgctcctcctccgttcattttctgcccctcttcgcaaagcacccccgggatcatcctccgagggcgactttttgagaaatctcggtggagtagtggaccagagcaggggagtttttaaaagccggggcgcgagaaacaggaaggtactatggcttcctcgtctggcaacgatgatgatctcactatccccagagctgctatcaataaaatgatcaaagagactcttcctaatgtccgggtggccaacgatgctcgagagctggtggtgaactgctgcactgaattcattcaccttatatcttctgaagccaatgagatttgtaacaaatcggaaaagaagaccatctcaccagagcatgtcatacaagcactagaaagtttgggatttggctcttacatcagtgaagtaaaagaagtcttgcaagagtgtaaaacagtagcattaaaaagaagaaaggccagttctcgtttggaaaaccttggcattcctgaagaagagttattgagacagcaacaagaattatttgcaaaagctagacagcaacaagcagaattggcccaacaggaatggcttcaaatgcagcaagctgcccaacaagcccagcttgctgctgcctcagccagtgcatctaatcaggcgggatcttctcaggatgaagaagatgatgatgatatctgaaattcaccagctgagtttctatttcttctataaatgtttttccctgcacaacaaaaacagtgaaagaaatgcttatctgtaattttgtatgcatcttggtggacttgtcattggtattctagagatgtctgctataagtttcatctgttgtgtgctatacatgtaaaaactgtctctttgaactattgaaaatttaaggttcagtataatatcaattttgaatttttcctggtgtttatgaaattttagatagcagcaagtcttcgtttgatcataaacagtgtacagataactcaa

SEQ ID NO: 3 - DNA, 3576 bp, Homo sapiens
  misc_feature (1261)..(1261): n is a, c, g, or t
  misc_feature (1307)..(1307): n is a, c, g, or t
  misc_feature (2728)..(2728): n is a, c, g, or t
  misc_feature (3454)..(3454): n is a, c, g, or t
  misc_feature (3569)..(3569): n is a, c, g, or t
gaattccgggtggctgcgctgcccttggtgactgcaagcccctcactgccttcctggaacccaagaacrrctttcttcacaggggccccacccagcctccacctccccatgtctcgatcaagttggagcccgccagtagctttgcggtggacttcaatgagcccctggacttctcgcagaagggcctggcctggtccaagtgaagcaggaaaacatctcctttctgagcccttcttccctggtcccctatgactgctccatggagcccatcgacctgtccatccccaagaacttcaggaaaggggacaaggatttggccactcccagcgaasscaagaagcctgaggaggaggcggggagcagcgagcagccctctccctgcccagcacccggcccttctcttcctgtaactttggggcccagcggaatcctggaaagccccatggcccctgctccggcggccaccccggaacccccagcacagcccctgcagggccctgttcagctggcggtcccaatctactcctcagccctggtcagcagccctccactcgtgggcagctcagccctcctgagtggcacagccttgctgcgtccactgcggcccaagcccccgctgcttttgccaaagccccccgtgacagaagagctgcccccgctggcctccattgcccagatcatctcatctgtatcctcggcccccaccctgctgaaaaccaaggtggcggacccagggcccgcaagcactggcagtaacaccacggcttcagacagcttaggaggttctgtccccaaagccgccaccaccgccacccccgctgccaccaccagcccaaaagagtctagtgagcctcccgctccagccagcagcccagaggctgcctctcccaccgagcagggcccagcgcggacgtcgaagaagaggggccggaaaagggggatgaggagccgaccccgcgccaacagcggcggggtggacctggactccagcggggagtttgccagcatcgagaagatgctggccaccacagacaccaacaagttcagtccgtttctgcagacagcggaggacaacactcaggatgaggtggccggagcccctgccgaccaccatgggcccagtgatgaagagcagggcagtcccccagaagacaagctgctgagggccaagcggaactcgtacaccaactgcctgcagaagatcacctgtccccactgtccccgggttttcccttgggccagctccctacagaggcacatnctcacacacactgacagtcagtcggatgcggagactgcagccgccncgggcgaagtgctagacctcacctcacgggacagagagcagccgtcggagggcgccactgagctccgccaggtcgcaggggatgcgcctgtggagcaggccacggcggaaacggcctcgccggtgcaccgggaagagcacgggcgtggggagagccatgagccggaggaggagcatggcactgaggagagcactggggacgccgacggcggaagaggacgcgtcgagcaaccagagcctggacctggacttcgccaccaagctcatggacttcaagctggcggagggcgacggcgaggcaggcccgggggcgcggcctcgcaggagcagaagctcgcctgcgacacctgtgggaagagcttcaagttcctgggcaccctgagccgccaccggaaggcgcacggccgccaggagcccaaggacgagaagggagatggcgccacgactgcagaggagggscccagccctgcccctgaacaggaggagaagccscccgagaccccggcagaggtggtggagtcggccccgggtgccggggaggccccggcggaaaagctcgcggaggagacggagggcccctccgacggggagagcgcggccgagaaaaggtcctcagagaagagcgacgatgacaagaaaccaaagacagactcccccaaaagcgtggccagcaaggcagacaagaggaagaaggtctgcagcgtgtgcaacaagcggttctggtcgctgcaggacctgacccggcacatgcgctcccacacaggggaaaggccatacaaatgtcagacctgcgagcgaaccttcaccttgaagcacagcctggttcgccaccagcggatccaccagaaagccaggcatgccaaacaccacgggaaggacagcgacaaggaagagcggggtgaggaggacagcgagaatgagtccacccacagcggcaacaacgccgtctcagagaacgaggctgagctggctcccaatgccagcaaccacatggctgtcacccggagccggaaggagggcttggccagtgccaccaaggactgcagccacagggaggagaaggtcacggcagggtggccgtctgagcctggccagggtgaccttaacccagagagcccggcggccctggggcaggacctgctggagccgcgcagcaagaggcctgcccacccaatcctggccacagctgatggcgcctcccagcacgtggggatggagtgacagcctcagtccccctcagcacagacaaaagccagcagagcaaagcgtctatacttcatggggtttcctcagtgccctttggctgttgaggagtgagagagagagagagagagagagagagagagagagagagacaagcaggagcgtggctgctcgctcagtgccatagccttaccgcagcctgcgcgggaggcccacagnccgtgccgattccagtgccttaactacttaccggatccctccatattatcatgggtgttgtatttttccaaaatgacttcttaaacaaaacaaatattataatgaattgtctggagaggacctcttcatttgagcattagcgttattttgtattggtgtgtgtgagcttgttcttgtgaatctgtgatagcaccgtttgttctgtgagctggaaacagaaggaaaaaacatacccttgggtacccatagccaataactggaagaaaatgatgtgaatttcatgtaaatgaccagaggaaagatggataagatgataatttcttaaatagacattttccttttttctttgtgcttcatggtggagctgtcatctggtccttggtattacaggatgtggttgatgaaggtttccaatatggtttcaggccaaaaccagggaagattctagcttcagcctcatgtcattccagtctgtcagcattagacatggtcactgttcaagtttcaagacatccattcttaactatagagaagagttactcccctggcgtcttaacctatggaaaacatgcacggataggatatatttgattgcctcctcttccctttcagtatatgtattattaatattattattattattattattattagttcatcagtttgctgttctctgcagtgagcagaatcaaatgggcaatatttgtcctgggagacctgtgccgnacccaggtccccgtgttaacgtgtgcctgcggttgtggttggcaccctcgggtggtagctcttctactgtaatgagacaagcctttcttctgtcactgcagaatttagaaggggnggaattc

SEQ ID NO: 4 - DNA, 3762 bp, Homo sapiens
agagaacagattcggaaactggggaggtctagcatgtggcgtaggagggggtcctcactccgcttcgcgattgccaaaacgagcctgccggaagcgccctaaggggttttcttctcccagggaaccagcggggaaactgaggctcggggtggagcgcaggattgtgggacgcgccaagactgctgtctttcccagcagcagcggaagatgtcggacagcgaggacagcaacttttccgaggaggaggacagcgagcgcagcagtgacggcgaggaggccgaggtagacgaagagcggcggagtgcagcgggcagtgagaaagaagaagagcctgaggacgaagaggaggaggaagaggaggaggaatatgatgaggaagaggaggaagaagatgatgaccgaccccccaagaaaccccgccatggaggcttcattctggacgaggctgatgttgacgatgagtatgaggacgaggaccagtgggaggatggagcagaggacattctagagaaagaagagattgaagcctccaatatcgataatgttgtcctggatgaagatcgttctggggctcgccgcctgcaaaacctctggagggaccagcgagaagaagaactgggcgagtattacatgaagaaatacgccaagtcatctgtgggagagacggtgtatggaggatctgatgagctctcagacgacatcacccagcagcagctgctcccaggagtcaaggatcccaatctgtggactgtcaaatgtaagattggggaggaacgggccacggccatttccttgatgcgcaagttcattgcctaccagttcacagacacgcccctgcagatcaagtcagtagtggcaccagagcatgtgaagggctacatctacgtggaggcctacaagcagacccacgtgaagcaggccattgagggggtgggcaacctgcggcttggctactggaaccagcagatggtgcccatcaaggagatgacagacgtgctcaaagtggtgaaggaggtggccaacctgaaaccaaagtcctgggtccgcctcaagcggggcatctacaaggatgacattgctcaggtggactacgtggagcccagccagaacaccatctccctgaagatgatcccacgcatcgactacgatcgcatcaaggcccgcatgagcttgaaagactggtttgccaaaaggaagaagtttaagcggcctccacagaggctgtttgatgctgagaagatcaggtccctggggggtgatgttgcctctgatggtgacttcctcatctttgaggggaaccgttacagccggaagggctttctgttcaagagcttcgccatgtctgctgtgatcacggagggtgtgaagccaacactctctgagctggaaaagtttgaggaccagccagagggcattgacctggaggtggtgactgagagcacagggaaggagcgggagcacaacttccaacctggggacaacgtggaggtctgtgagggtgagctcatcaacctgcagggcaagatcctcagcgtggatggcaacaagatcaccatcatgcccaagcatgaggacctcaaggacatgttggagttcccagcccaggaacttagaaaatacttcaagatgggggaccacgtgaaggtgattgctggccgattcgagggcgacacaggcctcattgtgcgggtggaggagaatttcgttatcctgttctctgacctcaccatgcatgagctgaaggtgctcccccgggacctgcagctctgctcagagacagcatcaggtgtggatgttgggggccagcatgaatggggcgagctggtgcagctggatccccagactgtgggtgtcatcgtgcgactagaacgggagaccttccaggtgctgaacatgtacgggaaggtggtgactgtcagacatcaggctgtgacccggaagaaggacaaccgctttgctgtggccttggactcagagcagaacaacatccatgtgaaagacatcgttaaggtcattgatggcccccactcaggccgagaaggggagattcgccatctcttccgaagcttcgccttcctacattgcaagaaactggtggagaacgggggcatgtttgtctgcaagacccgccacctggtgctggctgggggctcaaagccccgtgatgtgaccaacttcaccgtgggtggctttgcgcctatgagtccccggatcagcagccccatgcaccccagtgctggaggtcagcgtggcggctttggtagcccaggtggcggcagtggtggcatgagcaggggccggggccggagggacaacgaactcatcggccagaccgtgcgcatctcccaggggccctacaaaggctacatcggtgtggtgaaagatgccacagagtccacggcccgtgtggagctgcactccacctgccagaccatctctgtggaccgtcagcggctcaccacggtgggctcacggcgcccgggcggcatgacctcgacctatgggaggacgcccatgtatggctcccagacgcccatgtatggctctggctcccgaacacccatgtacggctcacagacacccctccaggatggtagccgcaccccacactacggctcacagacgcccctgcatgatggcagccgcactcctgcccagagtggggcctgggaccccaacaaccccaacacgccgtcacgggctgaggaagaatatgagtatgctttcgatgatgagcccaccccgtccccgcaggcctatgggggaacccccaatccccaaacacctggctacccagacccctcgtccccacaggtcaacccacaatacaacccgcagacgccagggacgccggccatgtacaacacagaccagttctctccctatgctgccccctccccacaaggttcctaccagcccagccccagcccccagagctaccaccaggtggcgccaagcccagcaggctaccagaatacccactccccagccagctaccaccctacaccgtcgcccatggcctatcaggctagccccagcccgagccccgttggctacagtcctatgacacctggagctccctcccctggtggctacaacccacacacgccaggctcaggcatcgagcagaactccagcgactgggtaaccactgacattcaggtgaaggtgcgggacacctacctggatacacaggtggtgggacagacaggtgtcatccgcagtgtcacggggggcatgtgctctgtgtacctgaaggacagtgagaaggttgtcagcatttccagtgagcacctggagcctatcacccccaccaagaacaacaaggtgaaagtgatcctgggcgaggatcgggaagccacgggcgtcctactgagcattgatggtgaggatggcattgtccgtatggaccttgatgagcagctcaagatcctcaacctccgcttcctggggaagctcctggaagcctgaagcaggcagggccggtggacttcgtcggatgaagagtgatcctccttccttccctggcccttggctgtgacacaagatcctcctgcagggctaggcggattgttctggatttccttttgtttttccttttagttttccatcttttccctccctggtgctcattggaatctgagtagagtctgggggagggtccccaccttcctgtacctcctccccacagcttgcttttgttgtaccgtctttcaataaaaagaagctgtttggtctaaaaaaaaaaaaaaaaaaaaaaaa

SEQ ID NO: 5 - DNA, 4606 bp, Homo sapiens
ggacacctgttctgctgttgtgtcctgccattctcctgaagaacagaggcacactgtaaaacccaacacttccccttgcattctataagattacagcaagatggaaataccaaatccccctacctccaaatgtatcacttactggaaaagaaaagtgaaatctgaatacatgcgacttcgacaacttaaacggcttcaggcaaatatgggtgcaaaggctttgtatgtggcaaattttgcaaaggttcaagaaaaaacccagatcctcaatgaagaatggaagaagcttcgtgtccaacctgttcagtcaatgaagcctgtgagtggacacccttttctcaaaaagtgtaccatagagagcattttcccgggatttgcaagccaacatatgttaatgaggtcactgaacacagttgcattggttcccatcatgtattcctggtcccctctccaacagaactttatggtagaagatgagacggttttgtgcaatattccctacatgggagatgaagtgaaagaagaagatgagacttttattgaggagctgatcaataactatgatgggaaagtccatggtgaagaagagatgatccctggatccgttctgattagtgatgctgtttttctggagttggtcgatgccctgaatcagtactcagatgaggaggaggaagggcacaatgacacctcagatggaaagcaggatgacagcaaagaagatctgccagtaacaagaaagagaaagcgacatgctattgaaggcaacaaaaagagttccaagaaacagttcccaaatgacatgatcttcagtgcaattgcctcaatgttccctgagaatggtgtcccagatgacatgaaggagaggtatcgagaactaacagagatgtcagaccccaatgcacttccccctcagtgcacacccaacatcgatggccccaatgccaagtctgtgcagcgggagcaatctctgcactccttccacacacttttttgccggcgctgctttaaatacgactgcttccttcacccttttcatgccacccctaatgtatataaacgcaagaataaagaaatcaagattgaaccagaaccatgtggcacagactgcttccttttgctggaaggagcaaaggagtatgccatgctccacaacccccgctccaagtgctctggtcgtcgccggagaaggcaccacatagtcagtgcttcctgctccaatgcctcagcctctgctgtggctgagactaaagaaggagacagtgacagggacacaggcaatgactgggcctccagttcttcagaggctaactctcgctgtcagactcccacaaaacagaaggctagtccagccccacctcaactctgcgtagtggaagcaccctcggagcctgtggaatggactggggctgaagaatctctttttcgagtcttccatggcacctacttcaacaacttctgttcaatagccaggcttctggggaccaagacgtgcaagcaggtctttcagtttgcagtcaaagaatcacttatcctgaagctgccaacagatgagctcatgaacccctcacagaagaagaaaagaaagcacagattgtgggctgcacactgcaggaagattcagctgaagaaagataactcttccacacaagtgtacaactaccaaccctgcgaccacccagaccgcccctgtgacagcacctgcccctgcatcatgactcagaatttctgtgagaagttctgccagtgcaacccagactgtcagaatcgtttccctggctgtcgctgtaagacccagtgcaataccaagcaatgtccttgctatctggcagtgcgagaatgtgaccctgacctgtgtctcacctgtggggcctcagagcactgggactgcaaggtggtttcctgtaaaaactgcagcatccagcgtggacttaagaagcacctgctgctggccccctctgatgtggccggatggggcaccttcataaaggagtctgtgcagaagaacgaattcatttctgaatactgtggtgagctcatctctcaggatgaggctgatcgacgcggaaaggtctatgacaaatacatgtccagcttcctcttcaacctcaataatgattttgtagtggatgctactcggaaaggaaacaaaattcgatttgcaaatcattcagtgaatcccaactgttatgccaaagtggtcatggtgaatggagaccatcggattgggatctttgccaagagggcaattcaagctggcgaagagctcttctttgattacaggtacagccaagctgatgctctcaagtacgtggggatcgagagggagaccgacgtcctttagccctcccaggccccacggcagcacttatggtagcggcactgtcttggctttcgtgctcacaccactgctgctcgagtctcctgcactgtgtctcccacactgagaaaccccccaacccactccctctgtagtgaggcctctgccatgtccagagggcacaaaactgtctcaatgagaggggagacagaggcagctagggcttggtctcccaggacagagagttacagaaatgggagactgtttctctggcctcagaagaagcgagcacaggctggggtggatgacttatgcgtgatttcgtgtcggctccccaggctgtggcctcaggaatcaacttaggcagttcccaacaagcgctagcctgtaattgtagctttccacatcaagagtccttatgttattgggatgcaggcaaacctctgtggtcctaagacctggagaggacaggctaagtgaagtgtggtccctggagcctacaagtggtctgggttagaggcgagcctggcaggcagcacagactgaactcagaggtagacaggtcaccttactacctcctccctcgtggcagggctcaaactgaaagagtgtgggttctaagtacaggcattcaaggctgggggaaggaaagctacgccatccttccttagccagagagggagaaccagccagatgatagtagttaaactgctaagcttgggcccaggaggctttgagaaagccttctctgtgtactctggagatagatggagaagtgttttcagattcctgggaacagacaccagtgctccagctcctccaaagttctggcttagcagctgcaggcaagcattatgctgctattgaagaagcattaggggtatgcctggcaggtgtgagcatcctggctcgctggatttgtgggtgttttcaggccttccattccccatagaggcaaggcccaatggccagtgttgcttatcgcttcagggtaggtgggcacaggcttggactagagaggagaaagattggtgtaatctgctttcctgtctgtagtgcctgctgtttggaaagggtgagttagaatatgttccaaggttggtgaggggctaaattgcacgcgtttaggctggcaccccgtgtgcagggcacactggcagagggtatctgaagtgggagaagaagcaggtagaccacctgtcccaggctgtggtgccaccctctctggcattcatgcagagcaaagcactttaaccatttcttttaaaaggtctatagattggggtagagtttggcctaaggtctctagggtccctgcctaaatcccactcctgagggagggggaagaagagagggtgggagattctcctccagtcctgtctcatctcctgggagaggcagacgagtgagtttcacacagaagaatttcatgtgaatggggccagcaagagctgccctgtgtccatggtgggtgtgccgggctggctgggaacaaggagcagtatgttgagtagaaagggtgtgggcgggtatagattggcctgggagtgttacagtagggagcaggcttctcccttctttctgggactcagagccccgcttcttcccactccacttgttgtcccatgaaggaagaagtggggttcctcctgacccagctgcctcttacggtttggtatgggacatgcacacacactcacatgctctcactcaccacactggagggcacacacgtaccccgcacccagcaactcctgacagaaagctcctcccacccaaatgggccaggccccagcatgatcctgaaatctgcatccgccgtggtttgtattcattgtgcatatcagggataccctcaagctggactgtgggttccaaattactcatagaggagaaaaccagagaaagatgaagaggaggagttaggtctatttgaaatgccaggggctcgctgtgaggaataggtaaaaaaaaacttttcaccagcctttgagagactagactgaccccacccttccttcagtgagcagaatcactgtggtcagtctcctgtcccagcttcagttcatgaatactcctgttcctccagtttcccatcctttgtccctgctgtcccccacttttaaagatgggtctcaacccctccccaccacgtcatgatggatggggcaaggtggtggggactaggggagcctggtatacatgcggcttcattgccaataaatttcatgcactttaaagtcctgtggcttgtgacctcttaataaagtgttagaatccattttg

SEQ ID NO: 6 - DNA, 1438 bp, Homo sapiens
atcaaggtgatcccaaaacgaaccaacagaccaggcatcagcacaacagaccggggttttccacgagcccgctaccgcgcccggaccaccaactacaacgtccggctttctgagttgggtggcgggaaaggcgatgagtaaaggccgggcagaagctgcgggagccgccgggatcctcctgaggtacctgcaggagcagaaccggccctacagctcccaggatgtgttcgggaacctacagcgggaacacggactgggcaaggcggtggtggtgaagacgctggagcagctggcgcaacaaggcaagatcaaagagaagatgtacggcaagcagaagatctattttgcggatcaggaccagtttgacatggtgagtgatgctgaccttcaagtcctagatggcaaaatcgtggccctcactgctaaggtgcagagcttgcagcagacgtgccgctacatggaggctgagctcaaggaattatctagtgccctgaccacaccagagatgcagaaagaaatccaggagttaaagaaggaatgcgctggctacagagagagattgaagaacattaaagcagctaccaatcatgtgactccagaagagaaagagcaggtgtacagagagaggcagaagtactgtaaggagtggagggaagaggaagaggatggctacagagctgtcttgatgcaatacttgaaggataccccaagagcaagaagcagttctttgaggaagttgggatagagacggatgaagattacaacgtcacactcccagacccctgaggggcccacggtcaggactggtggggactgcaggatgtcagaagagtgagatgtcttgcactggctaccttgtttttggttggcttttgttgttgttcctcttacttttcactttagcagagcagtcaggagacaagcataaaccagagcactgggtagagaggatgagggctggtggctgggggtagaccccacgcatttcattgtctaaattgcagtagcttgaggttaacatttagacttggaacaatgctaaaggaaagcatttggcaatatttattataatttaattttatataaaaatatttaatttcctctggatagtcaaacctgccagatatcaaacctgaggaaggcagaagtgaatttggagaactagggtagagagaggttgctataaaacgagcatttggagggcccacggcttcactcaggacctgctgggcttgtgtaccccaggagcccttttaagtatcttttgtacgcttttcaccccacccccaagtcctgggagaaatgcaggcaacactgagacatgggagaggccaagatatgcttgacagaaagggtgattttgaggctcagttaatatttcaaaattgtaaccgtagcaaaactgcattggtatttagaaaaataaaaaatttccaat

SEQ ID NO: 7 - DNA, 34200 bp, Homo sapiens
cgcgggctttttctgtttgaagactacagcgtcacacagcaacgcgcgcgagagaagagagtattctcgcgagaagtccaggggtggccgtgatggcggcggcaggagcaggacctggccaggaagcgggtgccgggcctggcccaggagcggtcgcaaatgcaacaggggcagaagagggggagatgaagccggtggcagcgggagcagccgctcctcctggagaggggatctctgctgctccgacagttgagcccagttccggggaggctgaaggcgggtaagaggtcctgccgcccgaggaagacgcgggagggaggcccgcccctcgcgaatcccgcggctcctggagccctgccgcccgccccctgcgaacccaggccccgccgccaatggctcgccctgcctctgcgccgcttggcccgtcccctctcaagcatatctcggataacgccccttccgcacctttcacgggcggtgggagctgaggctcctgtcgttatctctgatccttgcaccctggcaggaagctggtagctcacactttaacgggaggccttcacatattccagaaaagaaaccactttgcagtgccagactggaagaagtaacggtcactctgaaaacagggtgggagagctgcctctctttgaacctctcccaggaccaactctaacccaggtagatttgactgtaaaggccggttaggcttccctgtgctccgtgggtccgcgactgtctgacatgtccaccttctcagtatcctgacagtaccttgggcatccagtctgagatcaggcttagctgaaaaagctgcaggagtatgaagttcggctgtaatttgatcatcatttttgggaataggcattttgaggtttgtcttgagaattcttacttgagcgctttcattatcttatagggaggcaaacttggtcgatgtaagcggtggcttggagacagaatcatctaatggaaaagatacactagtaagtatttttagttgtttgcaagacaaaatagggtttgttttagttatttcttcttcttcttttttttttttttttgttgcgacggagccttgctctgtcgcccaggctggaatgcagtggcgcgatctcggctcactgcaacctcctccccccgggttccagcgattctcctgcctcagcctcccgagtatctgggattacaggcatctgccaacacacctggcttcttttttttgtctttttagtagagacggggtttcaccatgttggccaggctggtctcgaactcctaacctcagttgattctcccgcctcagcctcccagagtgttgggattacaggcgtgagccaccgcgcccggccttgtttttacatttttaagcgaatcaaaaatacattcaggccaggcacggtggctcatgcctgtaatcccagcactttgggaggctgagacctcaggatcacttgagaccagcctgggcaacatagggagacccccgtctcttaaaaaaataaaataaagtaaaatacattcaagtcaactgatttgagtctcgaactgctctgacacaggaaggtgctggggatacatcagaggtgatggatactcaggcgggctccgtggatgaagagaatggccgacagttgggtgaggtagagctgcaatgtgggatttgtacaaaatggttcacggctgacacatttggcatagatacctcgtgagtacttttcatagtttttgtgagaattgctcggtaaaataaatctgaacatgctcaacagttactttgtgggcaaaataaatgcaaagtatttcctatgtctcctaacccctattcagcaagtaggatgttgaatcaggagttgttttaattcccttagcatgttatctgcttactgagggcacagctctggtagatacaatggtgggtattgcccctccttttgagttgacaacctggtttggagacaaaaaaaaatgcaattacaaagtgttatataaacaaatttagaacaatataaaccttgtgttggtgttttggatttttcagaaaggatatatgtggataaagcctgttgtccaaaatttgagatgacccatgctctttatgcctgaaccatcctttttttcctttctcattgctgctgactcactcctttaggtatattgtctactctcctcagcaaacctatttccaatcatgtacctcttctagtgaattaaaatcatattgtgattgagaatgaaagacttttttccttatactgactgtctgttggaataattgtactgctcgctctctgtaatgttctttatggtttgtattatgctaatacatttataaaagactatctaaacataaggctgcattatcgtgaaattaatccaccttgggtgagattgtgaagaaatacatatatgtgtgtgtgtgtgtgtgtgtgtgtgtgtgtgtgtgtatatgtatatatatatacatatatatatgttttcttgtttttttcttgcgactgggtctcgctctgctgcccaggctggagtgcaatggcaggatcacagctttctgcagcctcgaacttctgagctcaagggatcctcctgcctcacccttccaaagtgttgggattactggcatgagccaccacacccagctttcctttataatctgttgtatactttctagttaaaaggttaaagtgggttttagaaatgctgatgtcttaattaacatgtgacttgtgatttaggaaagagtgtttttaaaaagaaagaaaaatactgaaggatcaggaagaaataattgatcttggtagcaacatctgctgggaaaacacactagctaagcaagcctggtctcttagagaggcctaagatagggccacttttgccagaaaaatttgtttggatagacagtttaggaaaggaagtttactagagagataactgggaggaattcaaggaagaatcaaatcacagttcaaagttttggtagctttggagacaacagtttgtaactgaatttcaaaagttatatctaaagtccagttagatcctatcagtggtatcaagttaaaaaaaaaaaaaggtggggggccaggcgcagtgactcacgcctgtaatcccagcactttgggaggccaaggcaggctgatcacgaggtcaggagttcaaaaccagcctgaccaacatggtgaaaccccgtcaccagaaaaaaaaatacaaaaattagttgggcacagtggtgcgtgcctgtagtcccagctactcgggaggcaggaaaatcacttgaacccgggaagcagaggttgcaccccagcctgggcgacagtgagactccgtctcaaaaaaaaaggccaggcatggtggctcacacctgtaatcccagcactttaggaggccgagacaggagaatgacgtgagcccaggacttcgagactagcctaggcaacatagtgagaccctgtctctacgagaaatagaaaaaaattagctgggcgtggtggttcacatctgtagtaccagctactcaggagctttaggtgggaggattgcttaagccctgcaggttgaggctgcagtgagccatgattgctactgcactccagcctgggtaacagagtgataccctgtctcaaaaaagaaaagaaaaataaagcccagttaggtgggatggattatcttttacaactgagatagagaatgtgagctagcagggtataaaaaaggctgctttttacacctgtttgtatttaaattaaaataactatttacctacctatctttagtatgaggttttgtctttgtaaataagcttatcacaatagtctgttaaacagaagaggttctacagagaagtgaaggtaaggaaactcagctgtaacatttgtaagaatgtttcgtaattccatgagggtagcaatagttggtaaatgcagtcttctctgaggatatcctaagctagtttcagagtccaagataaacctttgttctgatttcttctcttctagcttaagccatttatactaaaggtcttctgtccttctgttactttgccctttgcaagactaaactcctgtgcttttcctgtcatcttgtgcaatcactaccatgtttctcttctcaaatgcgttggttcctctgttgcatccgtctctgccatattgtctttcccctcctggcctcttcctctcttgccttcaaataggcaagtcttctcttgatgtcaggtgatccatgcgccttggcctctcaaagttctggaattagaggtctgagccactgtgcctggcctagttatttacatttttaattcattttttcttacattctgcctgccctttccaaccacattattgacaccatagagatacaccttagactactttgtcctcttctacagctagcctggcatattctttttaggtactcaaaaaataaacttaacgagataccagtgagaaccttctagatgctgaattgtccagtataacggataaggtcttattaactttcgtgacagaaaaatccaggtatttataaaaatatgagccctgttttggttttgacaacctttttacattttaagactatgttaacatattaacattttaatttacctgtcactgaggggaatggattcatgttaacttctcataaagaggcgtacagcctgtgcagcatggcgaaaccctgactccataaaaaaatacgaaaattagctgggcatggtggctaatgcctatagtcccagctacttggggggctgaagtgggagaatcaacctgagccagggaacgtcaagtctgcagtgagctatgattgcaccactgcactccagcctgagtggtagagtgagagcctgtctttaaaaaaagaaaaagaagtgtgtgtgttcacaagttcactaattcgtataatttggctcttcggcagatcctgtctacctttcatgaccaactacagttttcattgcaacgtctgccatcacagtgggaatacctatttcctccggaagcaagcaagtaagaacaaactctggagtatttgaagatgattatccactggaaaagaaaagggatctgggcgtagcagaatcaggagacctttgcctagtagctggtataaattcagttggggtttagctctgaataattgcaattgcccatttcaggtcacatgatgactccattttgctgctataattgttattttctggaccacttatcgagtattcccttggtagtagagatgtagtactacagataactgtttcttcctttttgtttttgatagacttgaaggaaatgtgccttagtgctttggccaacctgacatggcagtcccgaacacaggatgaacatccgaagacaatgttctccaaagataaggtacaggtggaactaatgtgattgcagttatattgaagagttaggtggaacttctaaatatactccctaacaagtactttcttcccagtttttattgaatatatgacagtggattcagtgattaccttgttctctttttttttcaagatggaatgcagtgatgcgatctcagctcagtgcaccctctgcctcctgggtcccagagattctcctgcctccgcttcccgagtagctgggattacaggcatgcgccaccacgcccagctaattttttgtatttttagtagagacaggatttcaccgtgttggccaggctcatctccaactgacctcatgatccactggcttcggcctcccaaagtgctgggattacaggcgtgagccaccgcacctggactgttgtgttttttttgagagagggtctctgtcacccaggctggagtgcagtggtgtgatcatggctcactgcagccttgacctcctgggctaaagcaatttgccttcctcggcctctcaaagtgctgggattacaggtgtgagccactgcacgtggcctctttttagtttattttttccaaaattattttgaaaagtttcaaggtggaatgtagtgacaccatcacggctcaccgaagacttgacctcctgggctcaggtgatcctcccacctcagcctctcaagtagctgggactacaggtgcacaccaccacacccagctagtttttatggtttttttagagacagggtttcgccacgttgcccaggcaggtagaactcccgtactcaagtgatccgtccgcctcagcctcccaaggtgttgggattacaggtgtgagccactgcacccggcccatttcttcttagatttaacagttaacattttgctacatttgttttatgtccccatatatctgtttttcccttaagctatatgaggctacattgtgggtacactttacccaatattctgttatacaaccacagtgccataatcataataaaaaaatttaacattggtgcagtactactaatttacagttcatatttgtagtttctcaggattatttttgtgttaataatatcctcctctatagcttctttctccatccaggatctggtcaggatcacccattacatttagttgtaatgactgttttgtctctaatctattaataaaacaattcctttattcagttgggttttgctctattacccagcctggagtgcagtggcacaggcccggctcactgcagcctcaacctcctgtgttcaagctattctcccacctcagcctcccgagtagctgggattccaggcgcatgctaccacatccagctaacttaaaaaaattttttgtggagatgtggtctcactagctggtttcgacctcctgggttcaagtgatcctcctgctttggccttccaaacgtctgggaatacaggcataaaccaacacacccagcccctttatttatttatttatttatttatttatttaatgaattaaaattttttaagtgcttaggcagttgtttggcatgatattcctcaatttgcatttgactttcttcatgattatgttcaggttaaacttttttttttccgctttaatagggacaggtctcactatgttgcccaagctgatcttacactcctaggctcaagcaatctaccagccttggcctcccaaggtgctgagattacagttgtgagccactgtgcctggccatgtgttaaacatctttggcaagaatattacataagtattgtgtgttttttagactgtcacatcaggaggtatataagatattgctttgttttattattagtgatcctaaatttgactagttggttaaggagggagcatttttatctttgtgctaagtaatccttaagccatacatggagattatgtgagtactttattttcctactcctttcaaccagtgatttttagcccccattgattatccaaccctgaatcagttgttagagtagtagttgtaaatcagaatacattctttggttgcaagtcttctgtaaataactttccctcattctttttcttcccttttaaatatcactgtggattattttttaaaaatcagtgtgttatagtccattgttggaatttttttttttttttaattgagatggagtctggctctgtcacccaggctaaaatgtagtggtgcgatgtctcggctcactgcaacttctgcctcctgggttcaagcaattatcctgcctcagcctcctgagtagctgggactactggcgcatgccaccatgcctggctgatttttgtattttttggtagagacagggtttcaccatgttggccaggctggtctcaaacttctgacctcaagtgatccacccacctcagcctcccaaagtgctgggattacaagcgtgagccaccacgcccagctcttgttggattttttcatttctgaccctcaggttgtcccagattcaaccattgtagccctatcagactgactcctgaaactctttgatactcccccatccgtttttgaactcttccttactttctggaacaacaaaatattccaggctttctttgtactttccctggttcctttcagtaaagatttagttgtcatggagctaactctggtggtggtgcttttgaagattatctaaataggaggccagaagatgaaggtcaaaagtcgtttcagtcatgcaagcaggagttggtgagagccacagtcacagcagtggggatggaagggagtcctgactgaagtgacatttctgaaattttaaaatttatttggtgagcatttaggtgtaaaaattgtgagagaagagtcaaggacaactcttaatgtgtctagcttattctgggtgatgactggttctaagttatcaggagcaagaatagaaatccataaagcagatttatgaggtaatataccaagttccattttagtcacaagaagtttgaggtccctttaggatgtccagatagagatgtctcagctggtagaaataggagttcaagagagaataatttgggagtcatcttccaattgacagccaagggactgtgacagagcttttctctccaattggagtgtaagccctacatggctaaggtttgtttatacttgtggaaatccccataatctgtgtattgtgtgtatgcaatgaaatattcagagattaaaagacaaacatgtaaaccttgtataacaccgtggggggaaaaactaacatggatttttctcttgattctaacaagatcttcgaaaaatgctgttttctttctttgtcagcatatctttgattgcagcagtaatagtcttaatttattttgaaaattaggatattataccatttattgataaatactgggagtgcatgacaaccagacagagacctgggaaaatgacttggccaaataacattgttaaaacaatggtaagtagattaaaattgattagacttgacatttaaaaaaccattgttttttgtaagaattcaataatatcgtctcattgtgaaatgataaaattagaacaacttaatgttaaatctttgagtgtgagatacagctaattgtgaattttagtagttttcacacacagaatcagtgagatgcatattgtcttatatgaacattgcccgcatacacctggttttatgtattgaaacttgtccacagtacttttccaagaataattttgtattgaaattagagaccatttcttttcttctattaaaaaaaaagttataggcaatattgtccttaaaattaaagagagcacctggggagaagtcaacagcaagctgttaacagtgcttatctttgtgaaatagaaggataggtgaggattatgaaaaacttgggcactctttgtgtttctctgttgtttgaattttttgatggtcactgattatttcttagaaggaaaaacgatactatcttttttggacactgcacctaggaattgacttttagagttagtggttgattattaattccatacttttaagtataaaatgttcattaatagtaaaacactacttctttttagagtaaagaaagagatgtattcttggtaaaggaacacccagatccaggcagtaaagatccagaagaagattaccccaaatttggacttttggatcaggtacattaatatgttttacattttctttttgattttaagccactcggggataggtaatcaggttctgtttacatttgtatatttgccacataacacactgccattatatgcacatagcatggtggactccaaaaaaatagtgactgatatgagagtactcaccttcaaccaagagaccagtgttgtatagtgtttttgttgtgggtcttccccaaaatgttatgaatttcttcaaatcacttttttttttaactttagtttcctcgcttgtaacatgtaaaaatgctatttcaaattacttctaatcttcctgccatcttaaattttgctcttaaaaactttctttgttgtgaaaagaatttgttttgaagaatttgtgttgcatatctaacataacaggcaaacgaaaattgctgttttttgttcaacagcagggttcacatttggcaagtcagaatgtcaaatcttaaagctgtgtctttacatgtttgatttgccagctttgaaaatgcaagattcagcccggtgcagtggctcatgcctgtaatcctagcacttttggaggctgaggcaggaggattgcttgagtccaggcattcaagaccagcctggacaatacaacaagacctgtctctcaaaaaagaaaatgcaagatttcacatagaaatttagatttctgtcttgtaaaatgaaaacatctgactgcatggggcctgaattcccacaggagctgagtgaatggggcttaggcactctggtttgccctgtgccctctcctgcctctacccaagttgattgattaattgccatttatcgccattctgaaactattctgatccttacacttggcctacctcacacatacttgcaaggttgcttgctggtccttaaaacacccaagtttgggactctgcaagcttcattgtttagaattgtccatttcagactgtgcatggtggctcacgcctgtaatcccagcactttgggaggctgaggcgggcagatcatttgagatcgggagttggagaccagcctggccaacacagcgaaactctatctctagtgaaaatagaaaaattaggccaggcatggtggctcatgcctgtaatcccagcactttgggaggccaaggtgggtggatcacctgaggtcaggagttttgagaccagcctagccaacatggtgaaaccccatctctactaaaaaatacaaaactttagctgggtatggcagcaggcacctctaatcccagctactcaggaggctgaggcaagagaatcacttgaacctggtaggcagaggttgcagtaagccgatatcgcgccactgcactccagcctgggtgacaagagtgaaactctctcaaaaaaaaaataataataattagccaggcgtgttggtgtgtgcctataatcccagctactcgggagggtaaaccaagagaatcgcttgaacctggaaggcagaagttgcagtaagccgagatcgcgccactgtactacagactgggcaatagagtaaggccccatctcagaaaaaaaagaattgtcaattttagttcccattctgttagaatttctcttgttttatgagcatccagattgactgacttacgtagactccttttttaattggatgtatttttgcaggaccttagtaacattggtcctgcttatgacaaccaaaaacagagcagtgctgtgtctactagtgggaatttaaatggtaagtgtttacatatctcattgctgaaatatttggaagctattgaatccagttgtgcctagaactggccattctttgggttgacccttaacctggatacttactaaaatgcttttatagttcaaactcaatttttaggaactagccaaggatttggcagatggtaatagaggagaactttttgtcactttacaacagtttggtcttgagtgagacaggtttagcataagacaaggaaccatttcaaggtcagatttgctgtgtttatatctgtatccttataactaacattaaatttagaaagattcatctcctctccactctttttctgcaattcagctgttacttttaacagatttcctgtgcccatcttctaatttttcttgccctgaaacttcagctcattcacatgatagcatttctatattaaccacccattgcagcttgttcttctgttaacccatctaatagcgggaaaacccctcgttactaatggttatttaataagagttggggtggctgagagatatttagctgttcatctgatatatgggatcattaacctgtcttttggagtggtcgcgtcttaaatatctgatcatttctactgttactaatattttaaggtgggttggaaatagctagtgtgttatctttttacaacatattttcccgttttaattgttaaaatttgacaaatacatggtgccacttctgttcttacaggtggagccacttttggaggtgaattcctccactgtcttctttcagcctctcagacttaagtattttgtggtttggaaaatgctttttgctgagctatggtagaagctaaaaactacataatttgaagcattatgaaaatggcggcaatagcacttaatatgaaacagtagttgagtttaatgttagtatttaagagcttgtatgttgtcatattctgcctaacatggccagccaccccacttctgtactgtttgctctgttctggttggatctgaaacttcttaaaataatcaaaatgcaaatgacaattaaaaatgtaattgtggccacgcgaggtggctcatgcatgtaatcccagcactttgggaggccgagacaggcagatcacctgaggccaggagtttgagaccagcctggccaccatggcaaagccccatctctactaaaaatacaaaaaattagccaagtgtggtggcaggcgcctgtaatcccagctactcaggaggctgaggcaggagaatcgtttgaacccaggaggcagaggttgcagtgagccgagatcgtgccactgcactccagcttgggcaacagagcaagactctgtctcaaaaaaacaaaaatttaattgttttttgattatggttacttaaactagagatgatgacattgcagcagtttaacattaaacttttatgaaaaataggaataacatctgaggtgttcaccaaaggaaattctgcataaaaagtctggtcctgtatatgcagaatatgagccaccttcaatgtcttgatcctttttattgcagcagaactgctagtaattcccaagcttgccccaaattaagatttagtactctgcagttgtttacgtaaaggtgttttcctgcagttcagggacatttcctggaagagggaaaaataaaactaattgagaggaatttgaactggacaaaaatttcaaagtacctatttcagaaatacacaaggtaatcttccttgtggctttagtatgtagctaaattttttgtataaaatatgtaaattgtctattcctatttattgcttttagttccacaagccaggttaatctaacctgaattttagtgcattggcacaatcttaataaatgttgtatttgacgaatgggtatggaactaaaaattgcctagcaaatcgaaagccttctttcttatttgtgtcatgtgcaaccacgatggagatctagcagtactggagagaaacacctttttagtacttctgtttccgttttccatgttggatgtattttgtcttgttggatattcaggttcaatgctttagcagatactgtgcttttatgatgtttatggactgtattgtgtagttcaagcaagtgaacatcgacttacagtgaggacattctctctttatgggtgtttgtattaatttggatgaaaaaaaatgtgcccatacagttgttttcattctttttagctgtgggtgtttgggatctgaatgagtgagaatgcatttgtgtcacaccctgagaaagtataccaatagttgcagtttattaggaacaaaggttgaaaactgtaacccaaccatcatagtgctggattcatttgagtttattgccagaacccagtgttcccaggctatgagatgctcagtagattctttgaaaactagggtgaaatccaatatgcctttggaaggaaatcctcctgtggtgttacacaaatgcacattgggtgtgttggtccctatggaatttcagtatccacatggtgtttcccttgtggctcattgaaagcaatctgccttctcttcaaagggggaattgcagcaggaagcagcggaaaaggacgaggagccaagcgcaaacagcaggatggagggaccacagggaccaccaagaaggcccggaggtggggagagtgcccaccctgcccccctcactatttaagtattatttggtgctgggaaagtccagcagagggaagagagttcaagggtcggaggttaaaaagcctgtccattttttctaaaccttgagcactttgagggacaaaataaccccaggttggaggccaggcgcagtggctcatgcgtgtaatcccagcactttgggaggtcaaggagggtggatcacttgaggccaggagtttgagaccagcctggccaacatggcgaaaccccatctccactaaaaatacaaaattaggcaggtgtagtggtgagcgcctgtaatcccagctacttgggaggctgaggcaggagaatcgcttgaacctgggaggcgggtggcagtgagccaagatcatgccactgcactccatcctgggcaacagaatgagactccgtctcaaaaacaaaacaaaaaacaaaaataataaccccaggccgggcacggtgggtcatgcctgtaatcccagcactttgggaggctgagacaggtgaatcacctgaggtcaggagtttgagaccatcctggacaatgtggtgaaaccccatctctactgaaacaacaaacaaaaaaattagctgggcctgagggcacgtgcctataatcccagctactcgggaggctgaggtgggagaattgcttgaacccaggaggcagaggttgtagtgagctgagatcgcgctatcgcactccagcctgggccacgagaacgaaactgtctcaaaaaaacaaaacaaacccaagtttaagtgtcatgttttacatttaagtgtacatacatttgttagtacaaaatttatagtagtaacaaggatagtgtcttctggtgataagcctggggaacctagggagtgaagttctgttaaggcgacttgagaaaggataggtggggagggagtgaaaccagtgttgaatgttagctcctttagctccttaactttctgcttctcccttctcatgccttttcccttccctttgtctaaagctgaggtgatgaaatccaggttgcttatttatttatatatttttgtgagatggagttttgctctatcacccaggctggagtgcagtgatggaatctcggctcactgcacaagttatttacttagattagcaagatagcaagtgcttatgtctctgagcttctgttcattactttataataatcagtatactaaagactatcaccctaatcacccccattcctctcctcccttcccccccccccccccccgcataatgtaccagctcagtttcatagacatcaattcatgtttaaagaccactgggaagatatccacaatctacaagtaatttcaccaaaactaccttgctcaataaagctaatccttttcacttccttgttttgcctgaagagggcagagttacttatttgagtaatgagaagtatttgctgtgaagttgcatgtattctagctgaaataaaccagaggcctttcttacacagttgaatgcatttgagctaaagggggttttagttttttgatgttattttttcctttctgcagtgaccctttgttttctgctcagcgccttccccctcatggctacccattggaacacccgtttaacaaagatggctatcggtatattctagctgagcctgatccgcacgcccctgaccccgagaagctggaacttgactgctgggcaggaaaacctattcctggagacctctacagagcctgcttgtatgaacgggttttgttagccctacatgatcgaggtatgtaaagtattggagatcatatggatgcagggttactttgaactgccatcattagccttgtcagtctagaattaggtgtacatctcagtctgttgccactgcctcacccccatctctgtctagattcatccagaatgtgcaagaaattctgttccttcctataagctccagccgttttatttatttatatatatatatatatatatatatatatatatatggttttttaaaactttctattttgaactaattttaaacttgcagtaaagttgccaaaaataagttttctttctcatcaagcttttcctaatgataatatcttagaaaaccatagtacagttatcaaaactgggaaattaacattggtaaatattatcaacacaactagagaaagacctttcaattttaccagtttttccactcacacttaattatttctctttagtctattatagtctttaacagttccaaagccattgcttatctttcatgaccatgatatttttaagtgttttaatcagttattttgttgaatattcctcagtgaagatttgtctgatgttttctcatgattagactgaagttaggcagtttggggaagaataacacggaaacaatgtcttatagcatcatctcatgggattcatgatgtcagtaggtcttattggttacgttgaccatgatcatttggttaaggtgattctgctagctttctccactgtaaaaaactaccgtctttcccttatacttaacaaatgtcttaggcaaaaatacatcgagtctatctatgcaaatatcttgtttgtttttaaacttatgttcactaattttagcacccatcagtggatattgtctgcaacaattatgactgtgttgtatgatgattttcgatttcctctttcccttttctgttaattgattatttatatcagtatggactcatatatatttactttatttcagggagtataatccaatactttgattattttgttgtttaaattattccagctttggcaagtaggagcttcttcaagaagttggttcttgtgttctttcgataagccgtgtctttttttaaaaaaaaaatttctttactttgaggcatcaaaaggtgttcctggccaatcttatattttctgtgccccaggcctacttctttcaccgagccctggttcctttgattggagcatgttgtttaggaataacatctaggtgctcacttccatatatcacatataccaaaattagaatgataaagagaagatgcatggcccctgtgcaagaataacacacaaatttgtgaagcgttccttattttttttttaagtaataaagtaaataaacaaatagcaattaatatctaggtgttaggtgtgctgttactaggcgtcattgcttctagacttcctcagtggtcagaggtaggaagtgcatgtgtgtatgtacaaacctgcatgtacacagataacaatttatattgatacctgggttgacagccttcctcctttccttatttgtaaggtctttctccaacagtgggaaatgtgaataattagatagataattatctacaatatatttactttatttcaatatatttattttgttatagagatcagagtctcactcaggctggtatgcagtgatgcagtcctggctcactgcagcctcaacctcctgggctcaaacgatcctcctgcctcagcctactgagtagctgggatcacaggcacacgccaccacacctagctgggttttttaattttaattttttagaggtggggtcttactatgttgcctaggctggtctcaaactcctgggctcaagccgtcatcctgcctcagcctcccagggtcttgggagtgagccaccattcttgaccttgctcatatttaatatgcacataaagtcgtttcagaatttctttttttttttttttttttttgagttggagtcttgccctgtcacccaggctggagtgcagtggcgcaatctcggctcactgcaacctctgcctcccgggttcaagtgattcttctgcctcagcctcctgagtagctggaattacaggcacgtgccaccacgcccggctaattttttgtatctttagtagagacggggtttcaccgtgttagccaggctggtcttgaactctggaccttgtgatctgcccgcctcagcctcccaaagtgctgggattacaggcatgagccactgaacccagccagtttcagaatttctaatccctgggagaaacatttactaagtagattatagcatttatatatagctctttttgtctttagacttgccgtactcagtccaaggtactggtaacttagattagttcttttcttccccacttcctttagtgggtcatgtccagttaagtcaggtttatttgctagtgtttgatgccattttggattctcccacatgttgattgtttgtgtgtatgtatgtttggagtgaggatgtgtgaaacattactatggttctgggagtcagagctgtacagaacggtttacaaaatgtcactccctcatcacccctacagtgcccttctcactctcttttttccaccgtcttcccactcacactctagtttctagtttatccttgctgtatttcttcacaaatgagcagatacagtacatgtatatattcttttgtctcccttttttgtttgtctgtttctgtgtttttttggtttgatttgttttttgaggctagaaggcagtggcgtgatctcggctcactgcagccttcacctccctggctcaagcaattctcatgctgaagcctcccgaatagctgggactacaggtgtgtgccaccacccgtggctaatttttgtatttctagtagagatggggtttcgtcatgttggccgggctggtctcaaactcctgagctcaggtgatctgcccatctcagcctcccaaagtgctgggataacacgtgtgagccactgcgcccagccttatctccttttttatacatgaatagcagcgtgctatatatatagtctttgctccatgcaattattttattttatttttttttttagaaaggttcttgttctgtcacccaggctggagtgcaatggtgcaatctcagctcactgcagcttcgacttcctggctcaagcaatcttcccatcttagcctcccaggtagctgggactacaggcacacatcactgcacccagctaaattttaattatttttttagggacaaagtctccttcactgtgttgcccaggatggtcttgaactcctgacctcaggtgatcctacttccttggcctcccaaagtgctgggattataggcatgggccattgcatctggcctcattgtttatttgtttgttttcaagatggggtctcactctgccacccaggctggagtgcagtggtgtaatcatggctcactgcagcctcaacctttcctgttaaaatcagcctgcaaagcctcgaaattctctcccaccttttgccattttttctttctgtggaagtcatggggttctcccctgattatttagattgctcccttatctcacataatggcctggtaataaagtaagattcaaaccatatgcagaggtagagagatgaattacagtgaatacctgtcttagtccctttgtgttgctactaaggaggacttgaggctgggtaatttgtaaagaaaagaggtttatttggctaaaagaagcatggcaccagcgcttgcttctggtgaggatcccaggcatgtccagtcatggtagaaggcaaagcggagcaggcgttagatggcaagagaggaagcaagacagggagggaggtgccaggctctttttaacaaccagctcctcagaaactaatagagtgaaaactcactcacatccccacattccgcattaatctgctcttgaggtatctgccctcctgacccaaacacctcccatcagaccacacctccaacattgtgatcaaatttcaacctgcacttagggtcaaatacccaaactatagcgataccttgtacacttttcacccagattttaacagttcaagattttgccatgtttgctttatctgtttatttctttttctttttctgaattaaaaaaatatatatatcaccctatgtacactaaaaactatgcatctctttaaaaatgcggctattggggccaggcacagtggctcacgcctgtaatcccagcactttgggaggctgaggcgggtggatcacctgaggtcgagagttcaagaccagcctgaccatcatgaagaaaccccttctctgctaaaaatacaaaattgcgggcctggtggtaatcccagctactcgggaggctaagacaggagaatctcttcaacctgggaggcggaggttgcagtgagccgagatcgcgccattgcactccagcctgggcgacaagagtgaaactccatctcaaaaaaaaaaaaaatgcagatattttcttttataaccaaaataattccttgctatcatccaaattcagttcataatcagatttccttgattgtcttaaataccggttcatctcctgagatatttattaattacaaaaggaaaattgtcatttagcagtggagaaacctggcaggcatcatcttaatcaagtgaccagggtgaacatcactattttgatagcatatatgatgcactgaggggcacaacattacctcattggagttcctgagtaagaataacaataaccttgaccttaaaatgaggaaacgccaggccgggcatggtggctcacacctgtaatcccagcactttgggaggccaaagtgggtagataaccggaggtcaggagtttgataccagcctggtcaacatggtgaaaccccatccctacagaaatagaaaaattagccaggcatgatggcaggcacctgtaatcccagccacttgggaggctgaggtgggagaatcgcttgaacccgggagccagaggttgcagtgagccgaggttgcaccatcacactccagcctggatgacagagcaagactctatctccaaaaaaaaaaaacaaaagaaaacaccagacaaatgtaactgagggacattctacaaactgaaatgaccaatattcttcaaagtgtcaagcttatgaaaggttgaggaactgtttgagattggaagaggctaaggagacatgacaactaagtgaaatgtggaatctaggattagaacctgggccagaaaaggggatattacttggataattggcttaattttaagaaggtccatggattatttaatagtattattgttaattttctggttttgatgattatgttaatgattatacatgatgtgaacatttgggaaaactgagtgaagcacacactaggactctactattttttgaaagtttgaaattgttggccgggcgcggtggctcacgcctgtaatcccagcactttgggaggccgaggcaggcggatcacgaggtcaggagatcaagaccatcctggctaacacggtgaaaccctgtctctactgaaaatataaaaaattagccgggcgtggtggcgggcacctgtaatcccagctacttgggaggctgaggcaggagaatggcgtgaacccgggaggcggagcttgcagtgagcagagatcgcgccactgcactccagcctgggcaaaagagcgagactctgtctcaaaaaaaaaaaaaaaaagaaagaaagtttgaaattgttttaaaacagttaaggccaggtgctgtggctcattcctgtaatcccagaactttgggaggccaaggagagcagattgcttgagttcaggatttgagaccagcctgggcaacttgttcaaaccctgtctcttcaaacaattagctggatgtggtagcacttgtagtaccaactacttgggggctgaggcaggaggattgtttgagcccaggaaatcaaggctgtagtgagtcaagatgacaccactgcattccagcctgagcaacagcatgagaccttatctcaaggaaaaaaaaaaaaaaactagtcaagaggctagccacagtggctcatacctgtaatcctggcacttgggccaacacaagaagatcgcctgaggccacgagttcaaggctatggtgagctgtggttgtgcgactgagtaagagagcaagaccctggctcttaaaaaaaaaaaaaaaaagttaaattttttaaatgaagatttattcaaattaagttccaaactcatcaccattggtttgttatatttgagggaatatgcaatataattaatatcaatcagatgtcttaaagttaatcacatgtaggctgggctcagtgactcagcctgtaattccagcactttgggaggtcagtgcaggtggatcacctgaggtcaggaattcgagaccagcctgaccaatatggtgaaacccgtctgtactaaaaatacgaaaattagctgggcgtggtggtgggcgcctgtaatcccagctactcaggctgaggcaggaggattgcttgaacttgggaggcggaggttgcagtgagccaagatcgtgccactgtactccagcctgggctacagaacaagactctgtctcaaaaaaaaaaaaaaaaaaagataagccaggtgcggtggctcatgcctgtaattccaacactttgggagaccaaggcgggcagatcacgaggtcaggagttcgagaccagcctgaccaacatggtgaaaccctgtctctactaaaaatacaaaaatgagctgggcgtggtggcacgcgcctgtaatcccagctactcgggaggctgaggcaggaaaattgcttgaacccgggaggtggaggttgcagtgagccgagattgcaccactgccctccagcctgggcgacagagcgggactccatctcaaaaaaaaaaaagataatcacatgtaataaaaactaagtaacctaacaactttctcttttttgttgctttctcattccttgccagtatcttatgctgagatttttaaactcctcaactaatatttcaaacacctgacctgatatttgtgatttttaaattgttttattggactaatgtttttgtggcaattgtccccaagaacctcaaataagttgcaggccttcttttaatctctgtcaccgcagctccccagttaaagatctcagatgaccggctgactgtggttggagagaagggctactctatggtgagggcctctcatggagtacggaagggtgcctggtattttgaaatcactgtggatgagatgccaccagataccgctgccagactgggttggtcccagcccctaggtaagctggggccttaatatggacatcacagcagatagagaggatagaccatctggccaagggctaaggcttcaaggctgttgggtttaccagattgtgggcatagaattcagttcctgagggttgagctggtttgctattcccgggatatttttgtaattctttgcttgtgagaaagtttttaagcaattttacaaaattgaccaaaaaacataaaaagaaataggatctttttccttcagcaaactagatttgacttgcaatcttctgacttcctgtgtatgtttttattgggacaggaaaccttcaagctcctttaggttatgataaatttagctattcttggcggagcaaaaagggaaccaagttccaccagtccattggcaaacactactcttctggctatggacagggagacgtcctgggattttatattaatcttcctgaagacacagagacagccaagtcattgccagacacatacaaagataaggtgagtttgtcctctcccggcagattcctggctttgaaggcctgtggcagccagtgcttatcactggcttgtgtgatctcttaggaactgacccacagctcacgttttttcctaacctgttgctatgacattttcagaataacagtaacaatcggtgcacaaatagtcatccattcattcttctacccatctatcatttgtctttttttagtgcactacagagaaaatgacagacatcaggacactttcccactaagtacttcaggatacataagctagaattcagcctgtttaattcattcttttgatacaaaatgtatataaaatgaagtacacaaattttaagtgtacattcactgagttttgagtttgacctaaactgttgaaatgtaggatccactaggcatgatggttcacgcctataatcccaacaatttgggaagccaagctgggaggactgcttgagcccacgagttcaagaccagcctgggtaacatcacgagaccccatctgtacaaaagactaaaaaagtgccgatagtcccagctacttgaaaagctgagatgggagaatcattcagcccaggagttcaaggttactgtgagctgtgatcacaccactgcactccccccaaaaaagagatgtggacacttaccatcacctcaggaagtttcctcatgccttttcacagttagtcctcacccccacatagaggcaaccactgttttaactttctttcccaccatactttaatttgtacctcttcttgaacttaaatgggctcatgcagtctgtagtcttttatatctggcttttgagactcatccattttgctgcatatatctgtgcacccttttcagtgcagggtagtactccattgcatgaatgtgccccagtgtgtttatgcattttcctactgacagacacttgggccgtctcaggtttggggctactatgagcaagatgctatgaatattcttgtacagtctttttggatcattggatagttacatatttagctttataagaaattttccaaactcttttcctaccatatatgagggttttagttgctgacatttatgattgtctgtcaacttaattttagccatttttgatgggtgtgtagtagtatctcattgtgagttaaattagcatttctttgatgacatactgggcatttttcatgtgcttttcggccactcatatgttttttgtgaagtttctcttcaaatattttgcctgttaatattgctattctgagacttctctgttcttttttttttttttttttaagtttaaatttttttggtagaaacaggtttggtattttttgtttttttttttttttccatgttgcccaggctggtcttgaactactgggctcaagcagttcacctgcttcagcctcccaaagtgctaggattacaggcatgagtcactgcacttaatagtgtcttctgaggaaccaaagttttagtttttatgaagtctgatttatcaaatttttcttttatacttatttctttccatgaatttaaaaaaaaatctttggctactccctgtcatgaagatattctcccatgttttcctttgaaaacatcatggtgttagcttttacacataggtgtctgatttaccttggattaatttttttttttctttagatggagtctcgctctgttgcccaggctggagtgcaatggtgcaatcttggctcactgcaacctccgtctcatgggttcaagctgttctccagccttagcctcccgattagctgggattacaggcacccgccaccacacccagctaatttttgtatttttagtggagacagggtttcaccatgttggtcaggctggtcttgaactcccgcctcggcctcccaaagtgctgggattacaggcatgagccactgtgcccgaccagatttttatgtatagtatggaaattcattttttttccatatgattacacaattatcccagcaccatatgttaactctttcctttctccactggatttctttgatgcctttattgaaaatcagatgtttgtgttaaggaaaggtttacttcagagctctgtatttcagtgatctgtttcttgtcctttatgcatgtatcacagtgtcttggttatcatagctttagagtaagtctttaaatttgatagtggaaatactctgagtttattctgataataagcagcctacagtctcatttttattgattatatcacactagtgacttattgtaccatcctgcctcccggaactctttaaatgtataccacactgatgcctggttttacagaacacagaggtctgcacttaaaaggattctgtaggtgttttttcaatgattcatttacattacaaaaaaaattttttttcctttaattaaaaaaaaaaacaaattttttgaccagacactgtggctccacgcttgggaggccaaagcaggcaaatcacttgaggccaggagctcgaggccagcctgggcaacatggcgaaaccctgtctctacaaaaaaaatacaaaaattagttggatgtgatggcacactcctgtaatctgagttactcaagaggttgaggcatgagaatcgcttgagcctggagggcagaggttgcagtgagccaagatcatgccagtgaactccagactgggcgacagagagcaagactgtctcaaaaataaataaataaataaataatttttagtgacatgtccacacgacagaatactatggatctattcaaaagccgcatatatactgattataaaatggtctctaatgtagttgccaagttaaaaactcaagatgcaagaccaaacttataatatgttaccatttgtatggctttttgggctttttttttttttgtatgtttatctggtgttttattttgaaacagagtctcattctgtcgcccaggctggagtgcagtggtacgcagtctcggcatactgcagcctctgcctcccaggttcaagcaattctcctgcttcagcctcctgagcagccaggattacaggcgtgcaccaccacgcccagctaatttttatatttttagtagagacggggttgcgccatgttggccaggctgatctcaaattcctggcctcgtgatctgcctgcctcagcctcccaaaatgctgggattacaagcgtgagccactgcgctcggccacatgtgtgtgttttaattttgaagacaatatatgcctagattctctggaaggataccaggacactggaacagtgattacttttggcaggggaaactgggtataagggacatagaaagagagactctcgttttatatgcttgtatatcttgggaattcttcttttctaaccatgtttaatacatatatatgttaagaaattgaaattttttaaattaatgtcatatatttctctggaagtgaatagttaaatagactcttaagaaccagtaagaaagaggtgacccagagaccacctgtgggaacagatgggaaactaggacggggaagaaggtgaccttcaaaatattttcatagaataagggattgtaggcttggtgcggtggctcgtgcctgtaatcccagcactttgggaggctgaggcgggtggatcacctgaggtcaggagttcgagaccagcctggccaacatggcgaaaccccgtctttactaaaaatacaaaaagtaaccgggtgtggtggcacatgcctgtaatcccagctgcctgggaggctgagacaggagaatcgcttgaacctggcaggccaagattgcagtgagccaagatcacaccactgcattccagcctgggtgacagagtgagactgtctcaaaaaaaaaaaaagaataggctgggcgcagtggctcatgcctgtgatcccagcactttgggaggccaaggcgggtggatcacctgaggtcaggagtttgagaccagcctggccaacatagtgaaaccctgtctctactaaaaatacaaaaaattagccgggtgtggtgtaatcccagctactcgagagcctgaggcaggagaatcgcttgaacccgggaggcggaggttgcagtgagaagagatcacaccattgcactccagcctgggcaacaagagtgaaactccgtctcaaaaaaaaaaaaagaataagagattgtagactcaataaacgtcatttttttcagtgagattattggaaaagatgtgtgaatttagccacttttatgggtatttttattgtggtaagcatgtatgtattatgtattttctcacgtttcttactaaaggcctactgaaaatgttttaataaacatgtgccatctggtattttttaagaagtgtgtaatagttcaaaatctagcaaaactcaactgcaaagatttttaatatctgttgtagagctcaaggggttaacactatttgtgtgcggatgcgtttttttcatgatgatggagctgatgctttattgtgcctttttttctttcttggttttcaaggctttgataaaattcaagagttatttgtattttgaggaaaaagactttgtggataaagcagagaagagcctgaagcagactccccatagtgaggtgagtcatggccataagaacattagaatcataaggccttgagcgttaggacccattccttcattataaaagtgaggaacacgaggcccaaaggggaatgaaggggcatctggtagccccactggccagcggcaagctcaccctctgcttattgtgttttgctctttatgtagtaccatgcttctgctgttagagacatgatcctgttctttcaggataactctgtagagaaaagtgtataaaaatagtggcctgcaccaccccatctgggaggtgtacccaacagctcattgagaacgggccatgatgacgatggcggttttgtggaatagaaaagggggaaaggtggggaaaagatagagaaatcagattgttgctgtgtctgtgtggaaagaggtagacatgggagacttcattttgttctgtactaagaaaaattcttctgccttgggatgctgttgatctatgaccttacccccaaccctgtgctctctgaaacatgtgctgtgtccactcagggttaaatggattaagggtggtgcaagatgtgctttgttaaacagatgcttgaaggcagcatgctcgttaagagtcatcaccactccctaatctcaagtacccagggacacaaacactgcggaaggccgcagggtcctctgcctaggaaaaccagagacctttgttcacttgtttgtatgctgaccttccctccactgttgtcctgtgaccctgccaaatccccctctgtgagaaacacccaagaatgatcaatgaaaaaaaaaaaaaaatagtggcctgttgggaaatctacaagagactgaggaagcaagtccagtgtctttattctttatcagaggaggtatcaagtccaaagggagggaacctggagtgggagagtagaccttgtggtgtggcccaggggcactaggagctgtaacgtctcactcagtgtccttcagaactttctctgcctccacttccggggttgctggaaacatgtctgcccaaggtcatagcacagtcagagaaaggctggcacatctgggccagccacaagcaccaaaaataaaaagggaagtgggatgtagaggaagaaagttaagctggaaacatttttttcataaaaatgctaatgctgtgaggccacccaggacactaatagaaggagatggaggtgaaataaagaaacgagtttcagctgtttttaggaaagaaatactaaagagaaataattattagatctaaagatgcaataaccagaaagccccctcttgtgggaagagaaggcagccttttctgaagaattgaagtggtcaagagaggatattcagtgtaattctgggagagaaaggaggaacatgaggattcagagatgtgacataagagtcttagagaacttcaaagtgaaaaagcagaagtgagaactgactcggggaaaggaattgataaataagcacgcttaaacaggtgtggtcccaaggagtccatggaaggccagcttactttaaaaaaaaaaaaaaattttgtagagatgaggtctcactatgttgcccaagctagtcttcaactcctggcctcaagtaatcctctctcctcggcctcccagcttacttttataaatacagtgcaatgaataataaaatatagaaatgtttggtatatgtagcacaggaattcagaaaacaaagccccggactttgagaccagtctgggcaatacagtgagatctgtctctataaaaaaattttaaaaattagctggatatggtggtgtatgcctgtagtcccagctgcttgggaggctgatgtgggaggatcacttgagccaaggaggttgaggctgcagtgagccaagatcacaccactgcactccagcctgagtcacagagtgagaccctgtctcaaaaaagaaaaaaaagcctgaatagtgcatattaacatgctttgaaaaatcgaaagtattataaaaattgaagatgttgttattacacaagttatgcactgttcttgggtgagtgactagcagtctggcagcagcacttctaacatattttcctagagagttctttttttgtttgttcttttttacagttctgaagtaaaaccatggtttttgtttcagataatattttataaaaatggtgtcaatcaaggtgtggcttacaaagatatttttgagggggtttacttcccagccatctcactgtacaagagctgcacggtacgtacatgtttccatcccatgagcaaaacttgagggaagcagatgaatgggttgtgatgacaaagttactgagtgctggaacgaaatccaagcagcctcagagtggcatgcgcatgtgttgttaccattactgtttagtccagaaacagtttgggcatcttagggagtatttgctggatagaaaaaggtcctgcagtttgtgtgcgccatacttttcccttgagcacgtggtgtggtgttaccgttcagtaggaaggatataaatacacatacacaaatcctcctgggatgtcatgataacccaccattattagtcattgttgcttacaatgatttttttttttttttttttttttttttgagacagtgtctcactctgttgcataggctcaccatagccttgacctcctgggcacaagtgatcctcccacctcagcctcctgagtaggtggggtgtgctaattttttggtttttgtttttgtagaggcaggatctcactacattgccctggctggtctcaaagtcatgggctcaagcagttctcccagctcagcctcccaaagtgctgggattacagagaggcatgaggtaccacatctggcaagttttttttttttttttaaatatgatccaaacatgaagaagggtactatcattagggcctgttggttttaaaaatatataggtagataggtagatagatacagatatatagaaaagttggggctgggtgcactggctcacgcctgtaatcccagcactttgggaggccaaggtgggtggatcacttgaggtcaggggttcgagaccagcctggccaacatggcgaaaccccgtctctactgaagatacaaaaattagctgggcttggtggcacatgcctgtaattccagctactcaggaggctgaggcaggagaatcacttgaacccaggaggcggaggttgcaatgagctgaggtcgtgccactactccagcctgggtgacaaaacgagactctgtgtcaaaaaaaaaaaaaggaaagaaaagaaaagaaaacttaggccagtcgcggtggctcatgcctgtaatcccagcactttgggagggtgactcaggcagaccatttgaggtcaggagttcaagaccagcctggccaatgtggtgagacctcgttgctactaaaaatataaaaattagccagatgtgatggccacgcgcctataatcccagctgtgggggaggctgacgcaggagaatcacttgaacccgggagatggaggctgcagtgagccaagattacaccactgccctccagcctgggcaatagagtgagactccgtctcaaaaaaaaaaaaagggcgggggtggcgctgggcacagtggctcacgcctgtaatcccagcactttggtgggaggccgaggtgggcagatcacgaggtcaagagatcgagaccatcctggccaacgtggtgaaaccccatctctactaaaaatacaaaaattagccgggcatcggccgggtgtggcggctcacacctgtaatcccagcactttgggaggccgaggcgggccgatcatgaggtcaggagatcgagaccatcctggctaacacggtgaaacctcatctctctaaaaatacaaaaaaaaaaaaaaaaagaaaaaaaaaagctgggcctggtggcgggagcctgtattctcagctactcaggaggccgaggcaggagaatggcgtgaacccaggaagtggagcttgcagtgagccgagattgtgccactgcactccaacctgggcaacagagcgagactctgtctcaaaaagaaataaaaaattagccaggcttggtggcacgcgcctgtcgtcccagctactcaggaggctgaggcaggagaattgcttgaacctgggaggtggaggttgcagtgagccaagatcatgccactgcactccagcctggtgacagagcaagactccgtctcaaaaaagaaagaaaaagttaatgcatgaagatttccatgtacttttagtctgtcagtaggcaccattgaagcaggtaaaaaaaaaaaaggaaatctttaaacagtgtaaaccaaaactatctgagacagatctcaatcaatttagaagtttattttgccaaagttaaggacctgcctgtaagaaaaaaacagaatcacagaaacagtctgtggtctgtgcctttctccaaggatgaatttgagggcttaaaagttttaaaaagaaaaagggctggacggagtggctcacggcagtaatcccaacactttgggaggccaatataagagaatcagttgagcccaggacctcgagaccagcctgggcaacatagcaaaaccccctttctacaaaaaaatacaaaaaattagccaggcgtggtggtacatgcctgcagtcccagctacttgggaagctgaggtgggaggatcccctgagcccaggaggtcaagggtgcagtgagccgtgatcgcattgttgcgctgcagcctggacaacagagtcagagcctgtctcaaaaaaaataaaaagtaaaataaaggggaaatgcgggctggaggggaaagtaggagggtatggtcatccacatgttgcaagagaaaaggagcagataggggaaagtcaattatgtattcatctcatgcccggtaaatcggcacttcacataaggtaaggtgaacataaagtagctgcctgtggggatatttaacgttttatctgtaggtgtctgcttagcaacaaaaggaaaggcagtttcttgcatgactcagctttcagcttaattttttccttttgacagagcaaattgggatcctgaatttttatttttctttgacaacagaaatcaacacagatctcttttagttacctaattcttgatggacatcaggatgttgaccacttttagtaatatttaatatatatcttatttgttccatttatcccccgagtattgtagccacatttaaagtgaaaatttcctgtgtcaaattaacttttccaatattttttgtccattttttccatgtctgcttgaattgaattcgctccaggtttccattaactttggaccatgcttcaagtatcctccgaaggatctcacttaccgccctgtgagtaacattacaaatggctgcatgtgtcctcagcatctccgtggctgctgtagtcaccgtgttctgtttctcattcctcctgcagatgagtgacatgggctggggcgccgtggtagagcacaccctggctgacgtcttgtatcacgtggagacagaagtggatgggaggcgcagtcccccatgggaaccctgaccaggtccctcttttctgtcaaggactttctgggaataatactgggggttttgtttttgtttttgaactgtctcaaatgttctcccaaagatgctaaaaacacagcctctccttttagcaagttaaaaggctgggtaggactgcgggagactgcctgcctttcaccattttctccccacttccagtgactgctcttattttgtgtaccataagccaacaaccgctgactccaggattgcataagccccctgtgaaatcggtgctgtactgcataccctgccagctgtgacttgttatcctactatattttctaaggagtgaataatattgtccgagtaactaacttatttaaaagacatttccttctgtgggcattgactgtatcccacctgttttccaaggaaatggtaacctgtttctgagaacacctgaaatcaatggctatacattccaaaccaatctaaacgctatttccttttggtgtgggtttggttttgttcattttgaaatacacttttgaacactgagatccgtaaaactactagatctctggaagtgtaattgtgaaagaaact

SEQ ID NO: 8 - DNA, 4103 bp, Homo sapiens
tgtggcgacggcggcagctgtggccccggcgccagcgcccggcacggacagcgcctcttcggtgcactggttccgcaaagggctgcgactccacgacaacccggcgttgctggcggccgtgcgcggggcgcgctgcgtgcgctgcgtttacattctcgacccgtggttcgcggcctcctcctcagtcgggatcaaccgatggaggttcctacttcagtctctggaagatttggacacaagtttaaggaaactgaactcccgcctgtttgtagtccggggacagccagccgacgtgttcccaaggctgttcaaggaatggggagtgacccgcttgacctttgaatatgactctgaaccctttgggaaagaacgggatgcagccatcatgaagatggccaaggaggctggtgtggaagtagtgacggagaattctcataccctctatgacctggacaggatcattgagctgaatgggcagaagccaccccttacatacaagcgctttcaggccatcatcagccgcatggagctgcccaagaagccagtgggcttggtgaccagccagcagatggagagctgcagggccgagatccaggagaaccacgacgagacctacggcgtgccctccctggaggagctggggttccccactgaaggacttggtccagctgtctggcagggaggagagacagaagctctggcccgcctggataagcacttggaacggaaggcctgggttgccaactatgagagaccccgaatgaacgccaactccctcctggccagccccacaggcctcagcccctacctgcgctttggttgtctctcctgccgcctcttctactaccgcctgtgggacctgtataaaaaggtgaagcggaacagcacacctcccctctccctatttgggcaactcctatggcgagagttcttctacacggcagctaccaacaaccccaggtttgaccgcatggaggggaaccccatctgcatccagatcccctgggaccgcaatcctgaggccctggccaagtgggctgagggcaagacaggcttcccttggattgatgccatcatgacccaactgaggcaggagggctggatccaccacctggcccggcatgccgtggcctgcttcctgacccgcggggacctctgggtcagctgggagagcggggtccgggtatttgatgagctgctcctggatgcagatttcagcgtgaacgcaggcagctggatgtggctgtcctgcagtgctttcttccagcagttcttccactgctactgccctgtgggctttggccgtcgcacggaccccagtggggactacatcaggcgatacctgcccaaattgaaagcgttcccctctcgatacatctatgagccctggaatgccccagagtcaattcagaaggcagccaagtgcatcattggtgtggactacccacggcccatcgtcaaccatgccgagaccagccggcttaacattgaacgaatgaagcagatttaccagcagctttcgcgctaccggggactctgtctactggcatctgtcccttcctgtgtggaagacctcagtcaccctgtggcagagcccagctcgagccaggctggcagcatgagcagtgcaggcccaagaccactacccagtggcccagcatcccccaaacgcaagctggaagcagccgaggaaccacctggtgaagaactcagcaaacgggcccgggtggcagagttgccaaccccagagctgccgagcaaggatgcctgagactgcagagcccttgctccgtgagcaaagcctgggtgcccaagcagccaccgcagcagcagagtacaacctgcagagaagctgatcaccgggcagagatagagcgagcatgtgtgtgtgtgtgcgcgtgtgcagaggagggagtggtgtgcctgtttgtgtgtgcatgcatctgttgacactcatgattctgaatgttgcctgggctgggggagtacctgtagcacgccagtgctgtttcccggcctccagacacaaggctcgaggttatggcagtgactttcagctgagacctgttcctgcaagccagctgccttgtctgaacagaacgtagtggtaggaccctagctgggattctggcatctgcctccctagacctccttccctccctcctcacgtcaggctgtggagcaggagcacagcagttctggctgttgtccaaagcatgggattctggaggcagccagagccctgctgagttcctgctttctgacctggaggctgagcaggccggagtggatggatgctgtccagacgtagccacctggcctctgtttcttattttaaaattctctgctactgggctcagtcccaggcccttccttgggcttctgggactgagcatgaggccatagacagatctaaaaagtttccaccaccctacagaagtacacacagatacctgactggtgtggggtatgcctggtactgtaataggagcctaagacagcacacctaccttttcaggatttagaacctaaaattagaaagagaatcccagctgtcattgttccttccccagaagctaagagccagcctcagagcctacccaggagctgtgaaggggcaagggtcaaactgactcactctaccaggaggagaccaggttgcagtggcgtaaggccccctggtttctctggccacactccaaggcaccacagtgctgccagtgaggacagctgacacccagccagggaaaccattctagtctttattctgttggcttccagggcctgtcctggacttgtcagcatccagactgccatgtcagctatcccagtagctgagctccaaggactcaggcagagggactcagggatggggactgccaggggcagttggcaaaagtccaagtagagattacacccagcacaccattccttccaggagcagtaggtgggaggtttgacccagagaagccaatccttgcattccaggagtggcctgtgcctcccacctcttccttcccactgccaaaggcctgtgttgagaaagatgtcatgcaaaaggacgacggtggccaactaaagcaagtcttccttccaccctgtggcctgcacttgagccacaaagtgtgtgtgtgtgtgtgcgtgtgtggtacgtgtgtgtgtgtgtggctatgaggctgattcctgtttggatttttgtcctcacgtgtatcattaagctggcctttgggccttttcctttctacctcccctgtgacctttcctagcctcagatctgttaattcttttggccccagccctgtccctcactgtcctctgtccttggaccagaaccctggggtcagacccatctcctgtagctgtccatcacactgacaggcttcttcctgagatatcctcaggttttctcagccagagagctgcctttagagtccaactgttgtacgtatgtcaccttcactagaaatgtcccatcatcgtgggaggggagcagggcacaggggatggtgtgcattcagagcattgggttgggggcttccctgttccctcagccccagtcgagaggaaagagaatcgggccactgccagaaagagagtcaagcaaacctggaagggcaaatctgagagtgggaaggccaaaggccgaggcccagatttagtattcactagcagcgccttcgggtagcaggatgattccttttcctgcctgtctgctgctggctctcttccctaaggtacaggttggcaggaccacctccgcctacttctccaccatccctagcatgccagcccgttcccagatcaacctgccagtggagtcaggcagtgcactcctggagccaagagggaagggcagggtagagagggtatgtccagtagcctggagctccatggtggcttcatgcctcccttctcccagctcaggtggccctgagggctccctcggaacagtgcctcaaatcctgacccaagggccagcatggggaagagatggttgcaggcaaaatgcactttatagagattttctattgctgggaaggtgtgtttctcccacaatttgtttgtgaatattcacttgttttataaatgtctgacctgtcttg

SEQ ID NO: 9 - DNA, 1866 bp, Homo sapiens
cgttcctcggcgccgccggggccccagagggcagcggcagcaacagcagcagcagcagcagcgggagtggagatggcggcggcggcggctcaggggggcgggggcggggagccccgtagaaccgagggggtcggcccgggggtcccgggggaggtggagatggtgaaggggcagccgttcgacgtgggcccgcgctacacgcagttgcagtacatcggcgagggcgcgtacggcatggtcagctcggcctatgaccacgtgcgcaagactcgcgtggccatcaagaagatcagccccttcgaacatcagacctactgccagcgcacgctccgggagatccagatcctgctgcgcttccgccatgagaatgtcatcggcatccgagacattctgcgggcgtccaccctggaagccatgagagatgtctacattgtgcaggacctgatggagactgacctgtacaagttgctgaaaagccagcagctgagcaatgaccatatctgctacttcctctaccagatcctgcggggcctcaagtacatccactccgccaacgtgctccaccgagatctaaagccctccaacctgctcagcaacaccacctgcgaccttaagatttgtgatttcggcctggcccggattgccgatcctgagcatgaccacaccggcttcctgacggagtatgtggctacgcgctggtaccgggccccagagatcatgctgaactccaagggctataccaagtccatcgacatctggtctgtgggctgcattctggctgagatgctctctaaccggcccatcttccctggcaagcactacctggatcagctcaaccacattctgggcatcctgggctccccatcccaggaggacctgaattgtatcatcaacatgaaggcccgaaactacctacagtctctgccctccaagaccaaggtggcttgggccaagcttttccccaagtcagactccaaagcccttgacctgctggaccggatgttaacctttaaccccaataaacggatcacagtggaggaagcgctggctcacccctacctggagcagtactatgacccgacggatgagccagtggccgaggagcccttcaccttcgccatggagctggatgacctacctaaggagcggctgaaggagctcatcttccaggagacagcacgcttccagcccggagtgctggaggccccctagcccagacagacatctctgcaccctggggcctggacctgcctcctgcctgcccctctcccgccagactgttagaaaatggacactgtgcccagcccggaccttggcagcccaggccggggtggagcatgggcctggccacctctctcctttgctgaggcctccagcttcaggcaggccaaggccttctcctccccacccgccctccccacggggcctcgggagctcaggtggccccagttcaatctcccgctgctgctgctgctgcgcccttaccttccccagcgtcccagtctctggcagttctggaatggaagggttctggctgccccaacctgctgaagggcagaggtggagggtggggggcgctgagtagggactcagggccatgcctgcccccctcatctcattcaaaccccaccctagtttccctgaaggaacattccttagtctcaagggctagcatccctgaggagccaggccgggccgaatcccctccctgtcaaagctgtcacttcgcgtgccctcgctgcttctgtgtgtggtgagcagaagtggagctggggggcgtggagagcccggcgcccctgccacctccctgacccgtctaatatataaatatagagatgtgtctatggctgaaaaaaaaaaaaaaaa

SEQ ID NO: 10 - DNA, 1258 bp, Homo sapiens
ccgggctctacccagagcaagaccctgatggctgcggtgtttctggtaacgctttatgaatactcgccgcttttctacatcgcggtggtctttacctgcttcatcgtgaccaccggcctggtattgggatggtttggttgggatgttccagtaattctgagaaattcagaagagacccagttcagcacaagagttttcaaaaagcaaatgagacaagtcaagaatccttttggcttagagatcactaatccatcttcagcttcaattacaactggcataaccttgacaacagattgccttgaagatagcctccttacatgctactgggggtgcagtgttcaaaaattatatgaagctctgcagaagcatgtttattgcttcagaataagcactccccaagcattagaagatgctctgtatagtgaatatctctatcaggaacagtattttattaaaaaggatagcaaagaagaaatatattgccagttaccaagagatactaaaattgaagactttggtacagtacccagatctcgctatccattggtagcgctattgaccttagctgatgaggatgaccgggaaatttatgatattatttccatggtgtcagtgattcatattcctgataggacttataaactatcctgcagaatattgtatcaatatttactcttggctcaaggtcaatttcatgatcttaagcaacttttcatgtctgcaaataataatttcactccctccaacaattcctcttcagaagaaaaaaacacagacagaagtttgttggaaaaggtgggactctctgaaagtgaagttgagccatcggaagagaacagcaaggactgtgttgtttgccagaatgggactgtgaactgggtactcttaccatgcagacacacatgcctgtgtgatggctgtgtgaagtattttcagcagtgcccaatgtgcaggcagtttgttcaggaatcttttgcactttgcagtcaaaaagagcaagataaagacaaaccgaagactctttgaagacatcgtaacactgaaaagtacactttctactaaagatgcagaaattgatgatcttggaattcatcataacatggaatctacagtactgaccatcaatgaaaattatattttaacttcatatttgtatggtacttggatgataaaaattaattattcctttctgcttagtgaatgaatactggaatccatctgtgttgatacaataaaaattcattcaactcttgaaaag

SEQ ID NO: 11 - DNA, 3819 bp, Homo sapiens
atggtggccgcagcggcggcaactgaggcaaggctgaggaggaggacggcggcgacggcagcgctcgcgggcaggagcggcgggccgcactgggactgggacgtgaccagggctgggaggccggggctgggggccgggctgcgcctcccgcggctgctgtctccaccgctgcggccacggctgctgctgctgctgttgttgctcccgccgccgctgttgctgctgctgctgccctgtgaggccgaggccgcggcggcggcggcggcggtgtcgggctcagccgcagccgaggccaaggaatgtgaccggccctgtgtcaacggcggtcgctgcaaccctggcaccggccagtgcgtctgccccgccggctgggtgggcgagcaatgccagcactgcgggggccgcttcagactaactggatcttctgggtttgtgacagatggacctggaaattataaatacaaaacgaagtgcacgtggctcattgaaggacagccaaatagaataatgagacttcgtttcaatcattttgctacagagtgtagttgggaccatttatatgtttatgatggggactcaatttatgcaccgctagttgctgcatttagtggcctcattgttcctgagagagatggcaatgagactgtccctgaggttgttgccacatcaggttatgccttgctgcatttttttagtgatgctgcttataatttgactggatttaatattacttacagttttgatatgtgtccaaataactgctcaggccgaggagagtgtaagatcagtaatagcagcgaaactgttgaatgtgaatgttctgaaaactggaaaggtgaagcatgtgacattcctcactgtacagacaactgtggttttcctcatcgaggcatctgcaattcaagtgatgtcagaggatgctcctgcttctcagactggcagggtcctggatgttcagttcctgtaccagctaaccagtcattttggactcgagaggaatattctaacttaaagctccccagagcatctcataaagctgtggtcaatggaaacattatgtgggttgttggaggatatatgttcaaccactcagattataacatggttctagcgtatgaccttgcttctagggagtggcttccactaaaccgttctgtgaacaatgtggttgttagatatggtcattctttggcattatacaaggataaaatttacatgtatggaggaaaaattgatccaactgggaatgtgaccaatgagttgagagtttttcacattcataatgagtcatgggtgttgttgacccctaaggcaaaggagcagtatgcagtggttgggcactctgcacacattgttacactgaagaatggccgagtggtcatgctggtcatctttggtcactgccctctctatggatatataagcaatgtgcaggaatatgatttggataagaacacatggagtatattacacacccagggtgcccttgtgcaagggggttacggccatagcagtgtttacgaccataggaccagggccctatacgttcatggtggctacaaggctttcagtgccaataagtaccggcttgcagatgatctctaccgatatgatgtggatacccagatgtggaccattcttaaggacagccgatttttccgttacttgcacacagctgtgatagtgagtggaaccatgctggtgtttgggggaaacacacacaatgacacatctatgagccatggcgccaaatgcttctcttcagatttcatggcctatgacattgcctgtgaccgctggtcagtgcttcccagacctgatctccaccatgatgtcaacagatttggccattcagcagtcttacacaacagcaccatgtatgtgttcggtggtttcaatagtctcctcctcagcgacatcctggtattcacctcggaacagtgtgatgcgcatcggagtgaagccgcttgtttagcagcaggacctggtattcggtgtgtgtggaacacagggtcgtctcagtgtatctcgtgggcgctggcaactgatgaacaagaagaaaagttaaaatcagaatgtttttccaaaagaactcttgaccatgacagatgtgaccagcacacagattgttacagctgtacagccaacaccaatgactgccactggtgcaatgaccattgtgtccccaggaaccacagctgctcagaaggccagatctccatttttaggtatgagaattgccccaaggataaccccatgtactactgtaacaagaagaccagctgcaggagctgtgccctggaccagaactgccagtgggagccccggaatcaggagtgcattgccctgcccgaaaatatctgtggcattggctggcatttggttggaaactcatgtttgaaaattactactgccaaggagaattatgacaatgctaaattgttctgtaggaaccacaatgcccttttggcttctcttacaacccagaagaaggtagaatttgtccttaagcagctgcgaataatgcagtcatctcagagcatgtccaagctcaccttaaccccatgggtcggccttcggaagatcaatgtgtcctactggtgctgggaagatatgtccccatttacaaatagtttactacagtggatgccgtctgagcccagtgatgctggattctgtggaattttatcagaacccagtactcggggactgaaggctgcaacctgcatcaacccactcaatggtagtgtctgtgaaaggcctgcaaaccacagtgctaagcagtgccggacaccatgtgccttgaggacagcatgtggagattgcaccagcggcagctctgagtgcatgtggtgcagcaacatgaagcagtgtgtggactccaatgcctatgtggcctccttcccttttggccagtgtatggaatggtatacgatgagcacctgcccccctgaaaattgttcaggctactgtacctgtagtcattgcttggagcaaccaggctgtggctggtgtactgatcccagcaatactggcaaagggaaatgcatagagggttcctataaaggaccagtgaagatgccttcgcaagcccctacaggaaatttctatccacagcccctgctcaattccagcatgtgtctagaggacagcagatacaactggtctttcattcactgtccagcttgccaatgcaacggccacagtaaatgcatcaatcagagcatctgtgagaagtgtgagaacctgaccacaggcaagcactgcgagacctgcatatctggcttctacggtgatcccaccaatggagggaaatgtcagccatgcaagtgcaatgggcacgcgtctctgtgcaacaccaacacgggcaagtgcttctgcaccaccaagggcgtcaagggggacgagtgccagctatgtgaggtagaaaatcgataccaaggaaaccctctcagaggaacatgttattatactcttcttattgactatcagttcacctttagtctatcccaggaagatgatcgctattacacagctatcaattttgtggctactcctgacgaacaaaacagggatttggacatgttcatcaatgcctccaagaatttcaacctcaacatcacctgggctgccagtttctcagctggaacccaggctggagaagagatgcctgttgtttcaaaaaccaacattaaggagtacaaagatagtttctctaatgagaagtttgattttcgcaaccacccaaatatcactttctttgtttatgtcagtaatttcacctggcccatcaaaattcaggtgcaaactgaacaatga

SEQ ID NO: 12 - DNA, 2053 bp, Homo sapiens
ccggctcgcgccctccgggcccagcctcccgagccttcggagcgggcgccgtcccagcccagctccggggaaacgcgagccgcgatgcctggggggtgctcccggggccccgccgccggggacgggcgtctgcggctggcgcgactagcgctggtactcctgggctgggtctcctcgtcttctcccacctcctcggcatcctccttctcctcctcggcgccgttcctggcttccgccgtgtccgcccagcccccgctgccggaccagtgccccgcgctgtgcgagtgctccgaggcagcgcgcacagtcaagtgcgttaaccgcaatctgaccgaggtgcccacggacctgcccgcctacgtgcgcaacctcttccttaccggcaaccagctggccgtgctccctgccggcgccttcgcccgccggccgccgctggcggagctggccgcgctcaacctcagcggcagccgcctggacgaggtgcgcgcgggcgccttcgagcatctgcccagcctgcgccagctcgacctcagccacaacccactggccgacctcagtcccttcgctttctcgggcagcaatgccagcgtctcggcccccagtccccttgtggaactgatcctgaaccacatcgtgccccctgaagatgagcggcagaaccggagcttcgagggcatggtggtggcggccctgctggcgggccgtgcactgcaggggctccgccgcttggagctggccagcaaccacttcctttacctgccgcgggatgtgctggcccaactgcccagcctcaggcacctggacttaagtaataattcgctggtgagcctgacctacgtgtccttccgcaacctgacacatctagaaagcctccacctggaggacaatgccctcaaggtccttcacaatggcaccctggctgagttgcaaggtctaccccacattagggttttcctggacaacaatccctgggtctgcgactgccacatggcagacatggtgacctggctcaaggaaacagaggtagtgcagggcaaagaccggctcacctgtgcatatccggaaaaaatgaggaatcgggtcctcttggaactcaacagtgctgacctggactgtgacccgattcttcccccatccctgcaaacctcttatgtcttcctgggtattgttttagccctgataggcgctattttcctcctggttttgtatttgaaccgcaaggggataaaaaagtggatgcataacatcagagatgcctgcagggatcacatggaagggtatcattacagatatgaaatcaatgcggaccccagattaacaaacctcagttctaactcggatgtctgagaaatattagaggacagaccaaggacaactctgcatgagatgtagacttaagctttatccctactaggcttgctccactttcatcctccactatagatacaacggactttgactaaaagcagtgaaggggatttgcttccttgttatgtaaagtttctcggtgtgttctgttaatgtaagacgatgaacagttgtgtatagtgttttaccctcttctttttcttggaactcctcaacacgtatggagggatttttcaggtttcagcatgaacatgggcttcttgctgtctgtctctctctcagtacagttcaaggtgtagcaagtgtacccacacagatagcattcaacaaaagctgcctcaactttttcgagaaaaatactttattcataaatatcagttttattctcatgtacctaagttgtggagaaaataattgcatcctataaactgcctgcagacgttagcaggctcttcaaaataactccatggtgcacaggagcacctgcatccaagagcatgcttacattttactgttctgcatattacaaaaaataacttgcaacttcataacttctttgacaaagtaaattacttttttgattgcagtttatatgaaaatgtactgatttttttttaataaactgcatcgagatccaaccgactgaattgttaaaaaaaaaaaaaaataaagattcttaaaagaa

SEQ ID NO: 13 - DNA, 5423 bp, Homo sapiens
agatggcggtcttggcacctctaattgctctcgtgtattcggtgccgcgactttcacgatggctcgcccaaccttactaccttctgtcggccctgctctctgctgccttcctactcgtgaggaaactgccgccgctctgccacggtctgcccacccaacgcgaagacggtaacccgtgtgactttgactggagagaagtggagatcctgatgtttctcagtgccattgtgatgatgaagaaccgcagatccactctctccttcctgcttcctccttgctgtggtggctgggatgcttcttccatgattttttgaatctagactgggctgttctctgtgttaaaccaatcagttgcgaccttctcttaacagtgtgaagtgagggggtctctctccctccttctccttcctctgtgattcaccttcctttttaccctgccctgcggcggctccgccccttaccttcatggacgactcagaggtggagtcgaccgccagcatcttggcctctgtgaaggaacaagaggcccagtttgagaagctgacccgggcgctggaggaggaacggcgccacgtctcggcgcagctggaacgcgtccgggtctcaccacaagatgccaacccactcatggccaacggcacactcacccgccggcatcagaacggccggtttgtgggcgatgctgaccttgaaagacagaaattttcagatttgaaactcaacggaccccaggatcacagtcaccttctatatagcaccatccccaggatgcaggagccggggcagattgtggagacctacacggaggaggatcctgagggagccatgtctgtagtctctgtggagacctcagatgatgggaccactcggcgcacagagaccacggtcaagaaagtagtgaagactgtgacaacacggacagtacagccagtcgctatgggaccagacgggttgcctgtggatgcttcatcagtttctaacaactatatccagactttgggtcgtgatttccgcaagaatggcaatgggggacctggtccctatgtggggcaagctggcactgctacccttcctaggaacttccactaccctcctgatggttatagtcgccactatgaagatggttatccaggtggcagtgataactatggcagtctgtcccgggtgacccgcattgaggagcggtataggcccagcatggaaggctaccgggcacctagtagacaggatgtgtatgggccccaaccccaggttcgggtaggtgggagcagcgtggatctgcatcgctttcatccagagccttatgggctagaggatgaccagcgtagtatgggctatgatgacctggattatggtatgatgtctgattatggcactgcccgtcggactgggacaccctctgaccctcgtcggcgcctcatgagctatgaagacatgattggtgaggaggtgccatcggatcaatactactgggctcctttggcccagcatgagcgaggaagtttagcaagcttggatagcctgcgcaaaggagggcctccacctcctaattggagacagccagagctgccagaggtgatcgccatgcttggattccgcttggatgctgtcaagtccaatgcagctgcatacctgcaacacttatgctaccgcaatgacaaggtgaagactgacgtgcggaagctcaagggcatcccagtactggtgggattgttagaccatcccaaaaaggaagtgcaccttggagcctgtggagctctcaagaatatctcttttggacgtgaccaggataacaagattgccataaaaaactgtgatggtgtgcctgcccttgtgcgattgcttcgaaaggctcgtgatatggaccttactgaagttattaccggaaccctgtggaatctttcatcccatgactcaatcaaaatggagattgtggaccatgcactgcatgccttgacagatgaagtgatcattcctcattctggttgggagcgggaacctaatgaagactgtaagccacgccatattgagtgggaatcggtgctcaccaacacagctggctgccttaggaatgtaagctcagagaggagtgaagctcgccggaaacttcgggaatgtgatggtttagttgatgccctcattttcattgttcaggctgagattgggcagaaggattcagacagcaagcttgtagagaactgtgtttgccttcttcggaacttatcatatcaagttcaccgggagatcccacaggcagagcgttaccaagaggcagctcccaatgttgccaacaatactgggccacatgctgccagttgctttggggccaagaagggcaaagatgagtggttctccagagggaaaaaacctatagaggatccagcaaacgatacagtggatttccctaaaagaacgagtccagctcgaggctatgagctcttatttcagccagaggtggttcggatatacatctcacttcttaaggagagcaagactcctgccatcctagaagcctcagctggagctatccagaacttgtgtgctgggcgctggacgtatggtcgatacatccgctctgctctgcgtcaagagaaggctctttctgccatagctgacctcctgactaatgaacatgaacgggtggtgaaagctgcatctggagcactgagaaacctggctgtggatgctcgcaacaaagaattaattggtaaacatgctattcctaacttggtaaagaatctgccaggaggacagcagaactcctcttggaatttctctgaggacactgtcatctctattttgaacactatcaacgaggttatcgctgagaacttggaggctgccaaaaagcttcgagagacacagggtattgagaagctggtgttgatcaacaaatcagggaaccgctcagaaaaagaagttcgagcagcagcacttgtattacagacaatctggggatataaggaactgcggaagccactggaaaaagaaggatggaagaaatcagactttcaggtgaatctaaacaatgcttcccgaagccagagcagtcattcatatgatgatagtactctccctctcattgaccggaaccaaaaatcagataagaaacctgatcgggaagaaattcagatgagcaatatgggatcaaacacaaaatcactagataacaactattccacaccaaatgagagaggagaccacaatagaacactggatcgatcgggggatctaggcgacatggagccattgaagggaacaacacccttgatgcagaagatttagcaccactatctccgttccatctgggcttatatgtacttttattttttggtggtgaaattgactgatgattttcctttttcttcgctggactattgtgccaactgccaggctgcctcctgcccttacagccctaagtggctgccttctttccatcaactcccaacttcttcctgtgaagtttaattgtctcaacgcctccccctcccccattccctccatttttctcccaagaaacctgactcaattatttgcatattttgagaaactgctgcagattagttctttttgccagttttccctggaactcctggccttttgtggaggggagggatggagagaataggaatcttcactagaagccgtgggaagaattggaagttacatgctgtatatgcaatgtccagcagtctgataaactgacgattcttaatcaagatttttttcctgatggggaagggacttttattttcttttagagaggggaaagtgtgagctcttcccttattcctaatggctatttttgaagcaaagaaggccagcaacattggcacatgccacctggcaaaggacccttgagtaagtgaaggtctcctaaaactgggattaagaaaccttgctctcctcatctccaaggcagggaccatcaagaacctacagactccatctcttctgcaagcctcatgccaaccctgggctattgctgctgccccttaaacacaggctgtccttaacccacctctcctgccctgtgatatgtctgctgagttggcctggccatttccaagaggctgtagaaaggggagaatgtcaaggaagacttttggtagagaaggagcagaaagatgtgtttttgggaagaagaagacctctaggaggagctagtaggaatgtacatgaagcaattagtctgaaactggcttccccactcccccgtttctccttttcctatccttataggcctgtcccttgcctctgccctggattggttggcaaactaaaggacttgatgtacataactcctgtcccttttcccttacaaggtggggattgcccctggctttgcctcttctttgtgcctttggcctggggtgcatctcctcccgcccttccatgtgcctttctttgcctctgcagtctcatttctcataattttgcaaattatattttgttgctttcttacctactattggccctaaatagcagaaagaagagaagtgaccgagagaacctcagattcttcattgaggattggtatagccatgatttcagtcatagcaagcttttgctcaacagcatatgggtgggattttgcaaaaatcctattctgatgaatctcaaagtaaggctggtaagagaagtgagtggtgtgactcttactccttaggtgcccagaatttaccatcatctctgaaggagttacagggaagtggtctccccaattctcccctccctccagtattgccccctctcactttagcatatattaattagcaggttgggctagagaaatcagctgctatgcgggttgattattattattatttctaatccttttccttatttgccttctactccccttaatctaatctaaaagctctgttccatgcaactggagttccttatccctctcttccccttcccttatatattgaggctatggggtaggagaaaagtgcacaacccaccaccccctttactcgtgcattaaaatttcttatttacccttttcccccttcccatttcttcccactttcatctaccttttctggcaaaaaggagccttttgctctctgtgaccctaagagcacactgcacagggaaaattgccccatccagacctggctccactcttgatctctcttgtcctcttctgctcttttcctggtgctcttttttctcggtggggtgtgggtaatagaacagccgtgggcttttggggacctttaacttttttttctctcttttgtttataaaaaacactaaacattcaattccagagaaccaaaaatcccaccttcccaccgaacactactaaggggcttgtgttctgctccataccttttctcttttctttctgtcttgttaatgcttttaaaaacaaatgagttttttatataaataaagtttttaaagtgtgt

SEQ ID NO: 14 - DNA, 2421 bp, Homo sapiens
ggaggaggcaagagccgacgcgaggggaggggagcgcagcggcggggctaacgggcgggcaagcgggcgggcggcaacagcatgtccctcggccagcgcgggcggcctcttagcgcggcgggggctgctctgggcgcgccccgggcgaagtgcgcccagtctccggccccggcccctcggcgcgcccgacttcccggccgcccctgagcccagcagccgcgggtcccgggatcggctaagagtagctgcaacgcctcgccggacggagtcctttcctttcccgggacgctgggccatgagctccgcggcccacctgaggcacaggggagtctgctcggccaggacagcctccccgaagtcccgctgccctcgcctctgcactgcgggacgccagcgctcggccctggcggaggcgtcttcggaagagcatcggggtgggggcatggaatccgcggaacctgcgggccaggcccgggcggcggccaccaagctgtcggaggctgtgggcgcggcgctgcaggagccccggcggcagaggcgcctggtgcttgttatcgtgtgcgtggcgctgttactggacaacatgctgtacatggtcatcgtgcccatagtgcccgactacatcgcccacatgcgcgggggcggcgagggccccacccggactcccgaggtgtgggagcccaccctgccgctgcccactccggccaatgccagcgcctacacggccaacacctcggcgtccccgacagctgcgtggccagcgggctcagcccttcggccccgctaccctacggagagcgaagacgtgaagatcggggtgctgtttgcttccaaggctatcctgcagctgctagtgaaccccttgagcgggcccttcatcgaccgcatgagctacgacgtgccgctgctgatcggcctgggcgtcatgttcgcctctacagtcctgttcgccttcgccgaggactacgccacgctgttcgcggcgcgcagcctgcagggcctgggctcagccttcgccgacacgtctggcatagccatgatcgccgataagtacccggaggagccggagcgcagtcgtgcactgggcgtggcgctggccttcattagcttcggaagcctagtggccccgcccttcgggggcatcctctatgagttcgccggcaagcgcgtgcccttcttggtgctagctgccgtgtcgctctttgacgcgctgttgctgctggcagtggccaaacccttctcggcggctgcacgggctcgggccaacctgccagtgggcactcccatccaccgcctcatgctagacccctacattgccgtggtggccggcgcgctcaccacctgtaacattcccctcgccttcctcgaacccaccattgccacgtggatgaagcatacgatggcggcttccgagtgggagatgggcatggcctggctgccggccttcgtgcctcatgtgctgggcgtctacctcaccgtgcgcctggcggcgcgctacccacacctgcagtggctgtacggcgcgcttgggctggctgtgatcggcgccagctcgtgcatcgtgcccgcctgccgctccttcgcgccgctagtggtctcactatgcggcctctgttttggcatagccctagtcgacacagcactgctgcccacgctcgccttcctggtggacgtgcgccatgtctcagtctatggcagcgtctacgccatcgccgacatctcctattcggtggcctacgcgctcgggcccatagtggcaggccacattgtgcactcgctgggctttgagcagctcagccttggcatgggactggccaacctgctctatgctcccgtcttgctgctgctccgcaacgtgggcctcctgacgcgctcccgttccgagcgcgatgtgctgcttgatgagccaccgcaaggtctgtacgatgcggtgcgcctgcgtgagcgtcctgtgtctggccaggacggcgagcctcgcagcccgcctggcccttttgatgagtgcgaggacgactacaactactactacacccgcagctagcatccccactcctcctccagcccacccaaccgccttgggtcaagggggctgctctgcaagcccactggccagctctggctcagggcccacctcctccagcgagtaccccagccactcctcaaccttgacttctgcccaaatcccctccctgtgacccgttccatatccctttctctcttgtccaatggggcttggagcaccgaggccagcgaagccatcgcgctccttgcggaggtgaagaggaccctgagtccccacctgcggctcccctgtgtagagcctgcatctgtctgtccttccttccattgctcccagtgccaaacttgggccgctgcaccgcggcgcctccgcccaaatcaataaactgtgtctgtcccagg

SEQ ID NO: 15 - DNA, 3090 bp, Homo sapiens
gaattccgggcccggatagccggcggcggcggcggcggcggcggcggcggcggccgggagaggcccctccttcacgccctgcttctctccctcgctcgcagtcgagccgagccggcggacccgcctgggctccgaccctgcccaggccatggccggcaacgtgaagaagagctctggggccgggggcggcacgggctccgggggctcgggttcgggtggcctgattgggctcatgaaggacgccttccagccgcaccaccaccaccaccaccacctcagcccccacccgccggggacggtggacaagaagatggtggagaagtgctggaagctcatggacaaggtggtgcggttgtgtcagaacccaaagctggcgctaaagaatagcccaccttatatcttagacctgctaccagatacctaccagcatctccgtactatcttgtcaagatatgaggggaagatggagacacttggagaaaatgagtattttagggtgtttatggagaatttgatgaagaaaactaagcaaaccataagcctcttcaaggagggaaaagaaagaatgtatgaggagaattctcagcctaggcgaaacctaaccaaactgtccctcatcttcagccacatgctggcagaactaaaaggaatctttccaagtggactctttcagggagacacatttcggattactaaagcagatgctgcggaattttggagaaaagcttttggggaaaagacaatagtcccttggaagagctttcgacaggctctacatgaagtgcatcccatcagttctgggctggaggccatggctctgaaatccactattgatctgacctgcaatgattatatttcggtttttgaatttgacatctttacccgactctttcagccctggtcctctttgctcaggaattggaacagccttgctgtaactcatcctggctacatggcttttttgacgtatgacgaagtgaaagctcggctccagaaattcattcacaaacctggcagttatatcttccggctgagctgtactcgtctgggtcagtgggctattgggtatgttactgctgatgggaacattctccagacaatccctcacaataaacctctcttccaagcactgattgatggcttcagggaaggcttctatttgtttcctgatggacgaaatcagaatcctgatctgactggcttatgtgaaccaactccccaagaccatatcaaagtgacccaggaacaatatgaattatactgtgagatgggctccacattccaactatgtaaaatatgtgctgaaaatgataaggatgtaaagattgagccctgtggacacctcatgtgcacatcctgtcttacatcctggcaggaatcagaaggtcagggctgtcctttctgccgatgtgaaattaaaggtactgaacccatcgtggtagatccgtttgatcctagagggagtggcagcctgttgaggcaaggagcagagggagctccctccccaaattatgatgatgatgatgatgaacgagctgatgatactctcttcatgatgaaggaattggctggtgccaaggtggaacggccgccttctccattctccatggccccacaagcttcccttcccccggtgccaccacgacttgaccttctgccgcagcgagtatgtgttccctcaagtgcttctgctcttggaactgcttctaaggctgcttctggctcccttcataaagacaaaccattgccagtacctcccacacttcgagatcttccaccaccaccgcctccagaccggccatattctgttggagcagaatcccgacctcaaagacgccccttgccttgtacaccaggcgactgtccctccagagacaaactgccccctgtcccctctagccgccttggagactcatggctgccccggccaatccccaaagtaccagtatctgccccaagttccagtgatccctggacaggaagagaattaaccaaccggcactcacttccattttcattgccctcacaaatggagcccagaccagatgtgcctaggctcggaagcacgttcagtctggatacctccatgagtatgaatagcagcccattagtaggtccagagtgtgaccaccccaaaatcaaaccttcctcatctgccaatgccatttattctctggctgccagacctcttcctgtgccaaaactgccacctggggagcaatgtgagggtgaagaggacacagagtacatgactccctcttccaggcctctacggcctttggatacatcccagagttcacgagcatgtgattgcgaccagcagattgatagctgtacgtatgaagcaatgtataatattcagtcccaggcgccatctatcaccgagagcagcacctttggtgaagggaatttggccgcagcccatgccaacactggtcccgaggagtcagaaaatgaggatgatgggtatgatgtcccaaagccacctgtgccggccgtgctggcccgccgaactctctcagatatctctaatgccagctcctcctttggctggttgtctctggatggtgatcctacaacaaatgtcactgaaggttcccaagttcccgagaggcctccaaaaccattcccgcggagaatcaactctgaacggaaagctggcagctgtcagcaaggtagtggtcctgccgcctctgctgccaccgcctcacctcagctctccagtgagatcgagaacctcatgagtcaggggtactcctaccaggacatccagaaagctttggtcattgcccagaacaacatcgagatggccaaaaacatcctccgggaatttgtttccatttcttctcctgcccatgtagctacctagcacaccatctccctgctgcaggtttagaggaccagtgagttgggagttattactcaagtggcacctagaagggcaggagttcctttggtgacttcacagtgaagtcttgccctctctgtgggatatcacatcagtggttccaagatttcaaagtggtgaaatgaaaatggagcagctagtatgttttattattttatgggtcttgagtgcatttgaaggtg

SEQ ID NO: 16 - DNA, 2298 bp, Homo sapiens
tcggccgagcccagagacagccagttcctctcccgccgcgccgggccgcgtgccgctcgctccccggccgtggcgcctccgggccagacgcgctgcagcctccagcccgcggcaagcgggcggggcggccgcgccacccccggccccgcgccagcagcccctcgccgcgcgtccagcgttcccggccagcagcctccccatacgcagtcctgctggaccgccccgtcgcgccccccactctgaactcaagtcaccgtggagctccgccgccccgaaactttcacgcgagcgggaaatatgggatgtataaaatcaaaagggaaagacagcttgagtgacgatggagtagatttgaagactcaaccagtacgtaatactgaaagaactatttatgtgagagatccaacgtccaataaacagcaaaggccagttccagaatctcagcttttacctggacagaggtttcaaactaaagatccagaggaacaaggagacattgtggtagccttgtacccctatgatggcatccacccggacgacttgtctttcaagaaaggagagaagatgaaagtcctggaggagcatggagaatggtggaaagcaaagtcccttttaacaaaaaaagaaggcttcatccccagcaactatgtggccaaactcaacaccttagaaacagaagagtggtttttcaaggatataaccaggaaggacgcagaaaggcagcttttggcaccaggaaatagcgctggagctttccttattagagaaagtgaaacattaaaaggaagcttctctctgtctgtcagagactttgaccctgtgcatggtgatgttattaagcactacaaaattagaagtctggataatgggggctattacatctctccacgaatcacttttccctgtatcagcgacatgattaaacattaccaaaagcaggcagatggcttgtgcagaagattggagaaggcttgtattagtcccaagccacagaagccatgggataaagatgcctgggagatcccccgggagtccatcaagttggtgaaaaggcttggcgctgggcagtttggggaagtctggatgggttactataacaacagtaccaaggtggctgtgaaaaccctgaagccaggaactatgtctgtgcaagccttcctggaagaagccaacctcatgaagaccctgcagcatgacaagctcgtgaggctctacgctgtggtcaccagggaggagcccatttacatcatcaccgagtacatggccaagggcagtttgctggatttcctgaagagcgatgaaggtggcaaagtgctgcttccaaagctcattgacttttctgctcagattgcagagggaatggcatacatcgagcggaagaactacattcaccgggacctgcgagcagctaatgttctggtctccgagtcactaatgtgcaaaattgcagattttggccttgctagagtaattgaagataatgagtacacagcaagggaaggtgctaagttccctattaagtggacggctccagaagcaatcaactttggatgtttcactattaagtctgatgtgtggtcctttggaatcctcctatacgaaattgtcacctatgggaaaattccctacccagggagaactaatgccgacgtgatgaccgccctgtcccagggctacaggatgccccgtgtggagaactgcccagatgagctctatgacattatgaaaatgtgctggaaagaaaaggcagaagagagaccaacgtttgactacttacagagcgtcctggatgatttctacacagccacggaagggcaataccagcagcagccttagagcacagggagacccgtccatttggcaggggtggctgcctcatttagagaggaaaagtaaccatcactggttgcacttatgatttcatgtgcggggatcatctgccgtgcctggatcctgaaatagaggctaaattactcaggaagaacaccctctaaatgggaaagtattctgtactcttagatggattctccactcagttgcaacttggacttgtcctcagcagctggtaatcttgctctgcttgacaacatctgagtgcagccgtttgagaagaaaacatctattctctccaaaaatgcacccaactagctctatgtttacaaatggacataggactcaaagtttcagagaccattgcaatgaatccccaataattgcagaactaaactcatttataaagctaaaataaccggatatatacatagcatgacatttctttgtgctttggcttacttgttt

SEQ ID NO: 17 - DNA, 623 bp, Homo sapiens
ccgctccctgggccgtaggaaatgagcgataacgatgacatcgaggtggagagcgacgaagagcaaccgaggtttcaatctgcggctgacaaacgggctcatcataatgcactggaacgaaaacgtagggaccacatcaaagacagctttcacagtttgcgggactcagtcccatcactccaaggagagaaggcatcccgggcccaaatcctagacaaagccacagaatatatccagtatatgcgaaggaaaaaccacacacaccagcaagatattgacgacctcaagcggcagaatgctcttctggagcagcaaggggaaagcgagagctgatcaagttctttgttcctggggaattcacttctcttccttcctcatggaagatgcaagtaaaaggaaatgcaagtaaccacctggtccgtgcactggagaaggcgaggtcaagtgcccaactgcagaccaactacccctcctcagacaacagcctctacaccaacgccaagggcagcaccatttctgccttcgatgggggctcggactccagctcggagtctgagcctgaagagccccaaagcaggaagaagctccggatggaggccagctaagccactcggggcaggcca

SEQ ID NO: 18 - DNA, 2507 bp, Homo sapiens
caggagtctctggtgcagctggggtggaatctggccaggccctgcttaggcccccatcctggggtcaggaaatttggaggataaggcccttcagccccaaggtcagcagggacgagcgggcagactggcgggtgtacaggagggctgggttgacctgtccttggtcactgaggccattggatcttcctccagtggctgccaggatttctggtggaagagacaggaaggcctcccccccttggtcgggtcagcctgggggctgagggcctggctgtcagccactcttcccagaacatatgtcatggcctcagtggctcatggggaagcaggggtgggcgagcttaggctagagcaagtcctgtgggagatggcagaggcctggtctgagaggcaactcggatgtgccctccagtggccatgctcccctccatgcgtctcccctgccctcctggagccctgcaggtcaatgtttaacagaaaccagagcagcggtggattaatgcgcaagggctcagccccccagccctgagcagtgggggaatcggagactttgcaacctgttctcagctctgcctcccctggccaggttgtcctcgaccagtcccgtgccatggcagcccacctgcttcccatctgcgccctcttcctgaccttactcgatatggcccaaggctttaggggccccttgctacccaaccggcccttcaccaccgtctggaatgcaaacacccagtggtgcctggagaggcacggtgtggacgtggatgtcagtgtcttcgatgtggtagccaacccagggcagaccttccgcggccctgacatgacaattttctatagctcccagctgggcacctacccctactacacgcccactggggagcctgtgtttggtggtctgccccagaatgccagcctgattgcccacctggcccgcacattccaggacatcctggctgccatacctgctcctgacttctcagggctggcagtcatcgactgggaggcatggcgcccacgctgggccttcaactgggacaccaaggacatttaccggcagcgctcacgggcactggtacaggcacagcaccctgattggccagctcctcaggtggaggcagtagcccaggaccagttccagggagctgcacgggcctggatggcaggcaccctccagctggggcgggcactgcgtcctcgcggcctctggggcttctatggcttccctgactgctacaactatgactttctaagccccaactacaccggccagtgcccatcaggcatccgtgcccaaaatgaccagctagggtggctgtggggccagagccgtgccctctatcccagcatctacatgcccgcagtgctggagggcacagggaagtcacagatgtatgtgcaacaccgtgtggccgaggcattccgtgtggctgtggctgctggtgaccccaatctgccggtgctgccctatgtccagatcttctatgacacgacaaaccactttctgcccctggatgagctggagcacagcctgggggagagtgcggcccagggggcagctggagtggtgctctgggtgagctgggaaaatacaagaaccaaggaatcatgtcaggccatcaaggagtatatggacactacactggggcccttcatcctgaacgtgaccagtggggcccttctctgcagtcaagccctgtgctccggccatggccgctgtgtccgccgcaccagccaccccaaagccctcctcctccttaaccctgccagtttctccatccagctcacgcctggtggtgggcccctgagcctgcggggtgccctctcacttgaagatcaggcacagatggctgtggagttcaaatgtcgatgctaccctggctggcaggcaccgtggtgtgagcggaagagcatgtggtgattggccacacactgagttgcacatattgagaacctaatgcactctgggtctggccagggcttcctcaaatacatgcacagtcatacaagtcatggtcacagtaaagagtacactcagccactgtcacaggcatattccctgcacacacatgcatacttacagactggaatagtggcataaggagttagaaccacagcagacaccattcattccatgtccatatgcatctacttggcaaggtcatagacaattcctccagagacactgagccagtctttgaactgcagcaatcacaaaggctgacattcactgagtgcctactctttgccaatccccgtgctaagcgttttatgtggacttattcattcctcacaatgaggctatgaggaaactgagtcactcacattgagagtaagcacgttgcccaaggttgcacagcaagaaaagggagaagttgagattcaaacccaggctgtctagctccgggggtacagcccttgcactcctactgagtttgtggtaaccagccctgcacgacccctgaatctgctgagaggcaccagtccagcaaataaagcagtcatgattt

SEQ ID NO: 19 - DNA, 840 bp, Homo sapiens
  misc_feature (40)..(40): n is a, c, g, or t
  misc_feature (382)..(382): n is a, c, g, or t
  misc_feature (390)..(390): n is a, c, g, or t
  misc_feature (468)..(468): n is a, c, g, or t
  misc_feature (492)..(492): n is a, c, g, or t
  misc_feature (504)..(504): n is a, c, g, or t
  misc_feature (515)..(515): n is a, c, g, or t
  misc_feature (525)..(525): n is a, c, g, or t
  misc_feature (529)..(529): n is a, c, g, or t
  misc_feature (550)..(550): n is a, c, g, or t
  misc_feature (556)..(556): n is a, c, g, or t
  misc_feature (594)..(594): n is a, c, g, or t
  misc_feature (599)..(604): n is a, c, g, or t
  misc_feature (608)..(614): n is a, c, g, or t
  misc_feature (618)..(624): n is a, c, g, or t
  misc_feature (627)..(627): n is a, c, g, or t
  misc_feature (630)..(658): n is a, c, g, or t
  misc_feature (661)..(688): n is a, c, g, or t
  misc_feature (690)..(837): n is a, c, g, or t
atatcatactctctcggggtgaagtcatcagggtttctgntccaaataggcttggtcttgtttagttcttcctgatcaatgtatttctctttgatcttcttagttttcttcttcttatccttaccgctgtcatcctcctcatctgaacccacatcttcgatcttgggcttttcttcatcatctttatcttcctcttctttctcacctttctcttcctctgcctcatcatcactaatttccttctctcgttccttctccaaataaagggtgatgggatagcctatgaactgagaatgcttcttcactacttcttggacccgcctctcttctaggtactctgtctgatcttctttaagatggaggatcacttgggtacccctgncaatgggntcaccatggtcagcacgcacagtgaaggaacctccagcagaagatcccaagcatactgttcatcatcgggggtgcttnggtgatcacaaccactttctctgncaccaagtaggnagaataaaagncaacaacaanctgnccaatcatggagatgtcttgnaacagnctgaagagtagattcaagttgggcttaaccaggtgaantgaannnnnngggnnnnnnnaagnnnnnnngcnaannnnnnnnnnnnnnnnnnnnnnnnnnnnnaannnnnnnnnnnnnnnnnnnnnnnnnnnnannnnnnnnnnnnnnnnnnnnnnnnnnnnnnnnnnnnnnnnnnnnnnnnnnnnnnnnnnnnnnnnnnnnnnnnnnnnnnnnnnnnnnnnnnnnnnnnnnnnnnnnnnnnnnnnnnnnnnnnnnnnnnnnnnnnnnnnnnnnnnnnnnnnaaa

SEQ ID NO: 20 - DNA, 1858 bp, Homo sapiens
ccttcctcttcttgatcggggattcaggaaggagcccaggagcagaggaagtagagagagagacaacatgttacatctgcaccattcttgtttgtgtttcaggagctggctgccagcgatgctcgctgtactgctaagtttggcaccatcagcttccagcgacatttccgcctcccgaccgaacatccttcttctgatggcggacgaccttggcattggggacattggctgctatggcaacaacaccatgaggactccgaatattgaccgccttgcagaggacggcgtgaagctgacccaacacatctctgccgcatctttgtgcaccccaagcagagccgccttcctcacgggcagataccctgtgcgatcagggatggtttccagcattggttaccgtgttcttcagtggaccggagcatctggaggtcttccaacaaatgagacaacttttgcaaaaatactgaaagagaaaggctatgccactggactcattggaaaatggcatctgggtctcaactgtgagtcagccagtgatcattgccaccaccctctccatcatggctttgagcatttctacggaatgcctttctccttgatgggtgattgcgcccgctgggaactctcagagaagcgtgtcaacctggaacaaaaactcaacttcctcttccaagtcctggccttggttgccctcacactggtagcagggaagctcacacacctgatacccgtctcgtggatgccggtcatctggtcagccctttcggccgtcctcctcctcgcaagctcctattttgtgggtgctctgattgtccatgccgattgctttctgatgagaaaccacaccatcacggagcagcccatgtgcttccaaagaacgacaccccttattctgcaggaggttgcgtcctttctcaaaaggaataagcatgggcctttcctcctctttgtttcctttctacacgttcacatccctcttatcactatggagaacttcctcgggaagagtctccacgggctgtatggggacaacgtagaggagatggactggatggtaggacggatccttgacactttggacgtggagggtttgagcaacagcaccctcatttattttacgtcggatcacggcggttccctagagaatcaacttggaaacacccagtatggtggctggaatggaatttataaaggtgggaagggcatgggaggatgggaaggtgggatccgcgtgcccgggatcttccgctggcccggggtgctcccggccggccgagtgattggcgagcccacgagtctgatggacgtgttccccaccgtggtccggctggcgggcggcgaggtgccccaggacagagtgattgacggccaagaccttctgcccttgctcctggggacagcccaacactcagaccacgagttcctgatgcattattgtgagaggtttctgcacgcagccaggtggcatcaacgggacagaggaacaatgtggaaagtccactttgtgacgcctgtgttccagccagagggagccggtgcctgctatggaagaaaggtctgcccgtgctttggggaaaaagtagtccaccacgatccacctttgctctttgacctctcaagagacccttctgagacccacatcctcacaccagcctcagagcccgtgttctatcaggtgatggaacgagtccagcaggcggtgtgggaacaccagcggacactcagcccagttcctctgcagctggacaggctgggcaacatctggagaccgtggctgcagccctgctgtggcccgttccccctctgctggtgccttagggaagatgacccacaataaatgtctgcagtgaaaagctgg

SEQ ID NO: 21 - DNA, 3056 bp, Homo sapiens
cccagctggtgctgaagctcgtcagttcaccatccgccctcggcttccgcggggcgctgggccgccagcctcggcaccgtcctttcctttctccctcgcgttaggcaggtgacagcagggacatgtctcgggagatgcaggatgtagacctcgctgaggtgaagcctttggtggagaaaggggagaccatcaccggcctcctgcaagagtttgatgtccaggagcaggacatcgagactttacatggctctgttcacgtcacgctgtgtgggactcccaagggaaaccggcctgtcatcctcacctaccatgacatcggcatgaaccacaaaacctgctacaaccccctcttcaactacgaggacatgcaggagatcacccagcactttgccgtctgccacgtggacgcccctggccagcaggacggcgcagcctccttccccgcagggtacatgtacccctccatggatcagctggctgaaatgcttcctggagtccttcaacagtttgggctgaaaagcattattggcatgggaacaggagcaggcgcctacatcctaactcgatttgctctaaacaaccctgagatggtggagggccttgtccttatcaacgtgaacccttgtgcggaaggctggatggactgggccgcctccaagatctcaggatggacccaagctctgccggacatggtggtgtcccacctttttgggaaggaagaaatgcagagtaacgtggaagtggtccacacctaccgccagcacattgtgaatgacatgaaccccggcaacctgcacctgttcatcaatgcctacaacagccggcgcgacctggagattgagcgaccaatgccgggaacccacacagtcaccctgcagtgccctgctctgttggtggttggggacagctcgcctgcagtggatgccgtggtggagtgcaactcaaaattggacccaacaaagaccactctcctcaagatggcggactgtggcggcctcccgcagatctcccagccggccaagctcgctgaggccttcaagtacttcgtgcagggcatgggatacatgccctcggctagcatgacccgcctgatgcggtcccgcacagcctctggttccagcgtcacttctctggatggcacccgcagccgctcccacaccagcgagggcacccgaagccgctcccacaccagcgagggcacccgcagccgctcgcacaccagcgagggggcccacctggacatcacccccaactcgggtgctgctgggaacagcgccgggcccaagtccatggaggtctcctgctaggcggcctgcccagctgccgcccccggactctgatctctgtagtggccccctcctccccggccccttttcgccccctgcctgccatactgcgcctaactcggtattaatccaaagcttattttgtaagagtgagctctggtggagacaaatgaggtctattacgtgggtgccctctccaaaggcggggtggcggtggaccaaaggaaggaagcaagcatctccgcatcgcatcctcttccattaaccagtggccggttgccactctcctcccctccctcagagacaccaaactgccaaaaacaagacgcgtagcagcacacacttcacaaagccaagcctaggccgccctgagcatcctggttcaaacgggtgcctggtcagaaggccagccgcccacttcccgtttcctctttaactgaggagaagctgatccagtttccggaaacaaaatccttttctcatttggggaggggggtaatagtgacatgcaggcacctcttttaaacaggcaaaacaggaagggggaaaaggtgggattcatgtcgaggctagaggcatttggaacaacaaatctacgtagttaacttgaagaaaccgatttttaaagttggtgcatctagaaagctttgaatgcagaagcaaacaagcttgatttttctagcatcctcttaatgtgcagcaaaagcaggcaacaaaatctcctggctttacagacaaaaatatttcagcaaacgttgggcatcatggtttttgaaggctttagttctgctttctgcctctcctccacagccccaacctcccacccctgatacatgagccagtgattattcttgttcagggagaagatcatttagatttgttttgcattccttagaatggagggcaacattccacagctgccctggctgtgatgagtgtccttgcaggggccggagtaggagcactggggtgggggcggaattggggttactcgatgtaagggattccttgttgttgtgttgagatccagtgcagttgtgatttctgtggatcccagcttggttccaggaattttgtgtgattggcttaaatccagttttcaatcttcgacagctgggctggaacgtgaactcagtagctgaacctgtctgacccggtcacgttcttggatcctcagaactctttgctcttgtcggggtgggggtgggaactcacgtggggagcggtggctgagaaaatgtaaggattctggaatacatattccatgggactttccttccctctcctgcttcctcttttcctgctccctaacctttcgccgaatggggcagcaccactgacgtttctgggcggccagtgcggctgccaggttcctgtactactgccttgtacttttcattttggctcaccgtggattttctcataggaagtttggtcagagtgaattgaatattgtaagtcagccactgggacccgaggatttctgggaccccgcagttgggaggaggaagtagtccagccttccaggtggcgtgagaggcaatgactcgttacctgccgcccatcaccttggaggccttccctggccttgagtagaaaagtcggggatcggggcaagagaggctgagtacggatgggaaactattgtgcacaagtctttccagaggagtttcttaatgagatatttgtatttatttccagaccaataaatttgtaactttgcagcggaaaaaaaaaaaaaaaaaaaaaaaaaaaaaaaaaaaaaaaaaa

SEQ ID NO: 22 - DNA, 23213 bp, Homo sapiens
gcggccgcccgcgggcggagagggggcggcgcggcggcaaggcgcgcgggcggggcggggcgcgccgagggggcgtggcgcggcgtctgcgcagctgccagcgcctttaagcccgggctcgcgctctcggaccgtgctttcgccgcctgggagccgtccggcgcagcagtttctaggtccccactgtccccgccgtcccgccccttcgcgtcccgggaaccggttggcttccgagccgcactcgccgatcctccaggcatgccccgctacgagctggctttaatcctgaaagccatgcagcgggtaagtgaccttccctcagagccggttttcccgcgcgggcgccccctgtgcttgtcatgacccctatattgaggttggcaaatagatgtatgtttatgtgttgaataaaataattaataaaataattaaggtacgtatatatagttttatgactggatatggctttgggtatgaaggcttctgctttatagaaaaatgctgatttttttgttttctattataaatgagtagaaaaaccttgtaagatctgaaatgaagatactggatgtgttaccatagaataaacaaagactggcattgggagactagaaggagctttagaggcagatgggactgggttttggattgtagcacctacttcctaaggactttaaccttctggatcctcagttccttctttgtaagccggaagtaattcatttgggagggtatttgaagataaagtggttatgtgaccttggaggtagttaagtgtagttctgtcattaaagtagctttgtggtcttaggcaagtcgctgtgaacttcattgcctagtttttcattattcccagtttattaatgaagaaactctaaaagataaaacttattatatctaagtttatttcatcagaatcccaaactagatcaaagctgaaatacagttgcttgttaagtaaatgtttgaattagtggtgttggtgcttactactctgctcccatctattattgccatgaggggtgtgggcctggttttgccagctttttttttctctcttcctcctaccagccagaaatccagattttataggaaatctggttttttttttttgatgttgccaactaattgaatacttaggtaccatggatcaaatgtaatgtatctgtgggttaggttggctctcattttgtaatctagatattcagataattagctgtaggttgtctgtaaatctcttagcatttatgttgacaaagcccaccttgttaattggtcactggtttgcagtaggactgatttcagcaatggcaggcatattcaattcttgaaagtatctatagtttcggattgttgggttgtatatgtgcatttaggctaaaatatacatgtaggcttcagagctgcaccgtgtaaactgtgagggagtgacattcacagtccactttttctttcaatgtctgagtgatatcttgttttaggcatgtattagtactatttggtttgtacccattgtattaacctcttaggtgtttgaaatactactggcatgcaaagattgctttgcctagaaaatatttttttttgctcagagtgtatctgtggaattaaaaatagtttacccatgatccctggaaaatagtattaccatgaaaaaaattcaggtgctctcttggtaaagattatagaggagggaggtgatgacatttttatttttgaccaggctttgtgtttccataaaatagaagccaagttattaccttgactaaccttccttttttgtcttttttttcactcccactccagatagataacatcaaattgcaaataaaacgaactcagatcccaggttgttcttacgtacgttttggcccaaggtgtaattgacttgttttgcttccccttgcaatcatttttactatgattacagtcccaggtaaggtaatttctgtccactttgggcatacctcagtagaggttggtgtagatgaaagcttaaaaatgaaattgcaagtgaaagcacagacttagcaaaacttctttattggagccctcaatcctcataaactggcatttttctgcttctgccccagaatcgagaattcctggttttgtctttgttttgacttgagtttttaaaagtttctctgtaacacctaccctggagtggttaagtgctttaattttgtcaggtgaagaaaccaagtgcagttatggtagccgggttgctgtggatataatccagtttgagaaaattctcattgtggtgatcagaagtgcagtgttgtggttgcatttcagctgctgggaagatgctcttgcaaatccatgtgtcgtctttgcttccgttagaaaggtgcagaatcagtgtaagttccagatatctgctcccttttcattttgtgctcagatgccccgtgtatgaattccgaatataaaacatctgttcagtctggttttgattcagatttaaggtgaatttctgttgctcagttgaaaagctaaatttgagtgtaggctctgtcaggcatgttgtaggaaaggtgtatggtactgaagtgtgtggttttgttttttaactgcttgacactgttaagtaagcaaatgacccagtcatgggttgttttgattgccattcttctgttggtgtactgcttgccttctgttttgttaatagtcatatgagaaaacagttgtatgaagtatagtatcttgaagctttaagacaccaagtttccattaggcagcctaagtctcgcagactttggtagcactgttggtctcatgggaatgccattctcatgtgtggactaagtaagggccaggagattttgcaaattttgtgtgtgtaagaagatcgaagaaaacatttttcctaatgtcactgtcttgagtattttatctgattaggatggactcattggaaactattgataatttcaagatttcttgtcatctggcatacaaagaaaacagtcgtgaccctatttccctggatttttctatccctctacttgtcctgtgtttgcaatgcaagaggaaaatccagctgcctttataatctagaataccatgtttctgtttttatttcttaggtttaattcagggcgtaatttctaccagtccctccaaatactgttaaagttactctttttgtggtcttacttcttacttcttgagtgttatattctccaaaccttggagaaaattagaaggttttaaagttttccaactgaaaagtatctttcagaggaaataccctaatttctgaatcttctatttataacttggcctggagaattataatctggtctaccaggaaggtgcttgtgcttaggttttctgccttagtcacatggaaagatgagcagaagcgattccttctagaaacagtttttttctagaaacataaaattggaaccaagtagactgagaacagaaaaaaaacacaaagttgacctggtaggatgttttacctctataaacctcatagttgctagcctttgagggaggctagatgagttgataataatgcctaaccttagcaatggattgaagtaggggtgcaggggttatgtaggtgtgtatatgtatttaggatatatatacacacctacatattatacacacacacatatgtacaattctcttgaatcctcagccatctaaggttaggtagagctatttccgtgttgggaatggaaaaactgaagaattaaaacacagacttggtcatacgtaatggtaaatacagtagtttaatgaaattttgtattgtacctatcactcagcttcaactgttaatttccagtctgctcacctctgttttctttatcttaaaatttttttcattaatttcccttggctaacatgactaaaaaaatttcagacttaaagagcagttcatttaacacttgtatgatttttgcctagatcactaattgttagaatatgccttattttatctttttttaatctgcgttatttcgagagttgcagacatcttgacatacctttcttaggaataagggccttcctcctaaccacaacatagtcatcacattcaaaacggacattgatacgatactaccaccaaatattcaattcatatagaaatttacgctgttcttccagtaatagtttttagtgttttaattcagtattcaatcaaggatcatatatttacttgtttagtctccttgaacagttccaaagcctttgtcattaataacagtggcactttgaggagttttggagtccaggcctactgttttgcagaaaccctcactttggagttgactgtagttgcgttttcatgattagagttagattagccattgttgacaggaatgagtatttcatagggatgtcaatgcatcacaccgggaggcataccactttgttaagcagtcatttggttaggtggcattcaccagaatgggccattgtaaatgtaccctatttcccttttgtattaagtgatctatggaataacaaacttgagactgaatattttgttttccaacaatctgcattggttttagcatctgttggtgactgaatcagttattgcaggagtactttaaagcaaacttagatatatcatttcacctgtaagtaattagtgtataagaaataaggacttttttttttttttttttgagactgagtcttgctctttcgcccaagctggagtgccagtggcgtgatctcggctcactgcaagctctgcctaccgggtttcacgccattctcctgcctcagccccagctgggactgggactacaggcgcccgccaccgcacccagctaattttttgtagttttagtagagacggggtttcaccgtgttagctagggtggtcttgatgtcctgacctcgtgattcacccgcctcggcctcccaaagtgctgggattacaggtgtgagccactgcgcccggccagaaataaggacttttaaacaaccgtagtgcctttacacctaactacaattccttaacacctcatgttcatgttcaaattccctgaattgtcaaaagtgtctgtctacagttttggttgactctgaatctaaacaaggtccacaaattatgtttgcttaatgaccttaagtctcttactctgtaatagcttcttaccccactctttacctttccggatttggctggtcacttatgctgtttatatatattcttctattccaggtaatttctgtagacccataggttctagaaatttgattagattcaggttttgttttgttttgttttgtaagagcacttaagtggtcttgggagggatagatcacatcaagagggacacatgtctgcattttagagaaaaattaatcttggtgtgggtacagatgttagcagctgcatgcgtccattttgaatcccccagcagcctttctcctgaaaattgtagcatccctgtactcatagcctgggtgcattacttcagggcttaccggtggtgattttcctcattacattagtccttttgcatcagttagctggattttatctgacttgtgtttattcctagtttgtgtttgtgtgtgtgtgtgtgtgtgtgtgtgtgtgtatctccctgaaaggtgttgtaaaaggatgcgttctccatctttatttcaaaaaggatgttcatgaactcccttagtgatcctctcaaatgtcctcagttttctcatttgtaaattggggatcattatcatgtctgcctcttggggtttttgttaggattaaatgagctcaaacatgtagtgtaaaaatagtggttggcacatggtgtttggtaaatgctagttactaaggtaacttctttagttttgtgggaactctgaactcaagttgtaatggagaggtggaagaggattcttcatgagttgacatcagggtgcttgggtttctgttgggtgagctgaagggaattgttgcttgccggcactgacctgctctttcagctgtgtgggaacagttgccagacagacacgcacagggaaggtctgcacatatcactgcacactaagaggtggatgtcgacagttgcagcagtaaaacttgaaacacgttccgcagtggagttagcacagtgaagggaagtgggccagactggtggtaggtggtaggttgagggagatggtggctccagatacaggtttttactatgtcatgggccactgagatttttatctgaatgaacatatttgtctagtccagtttgccttgtcattacacataccctcaactggagctatttgagattgcagatcactggtggaggagggaggaggctctttttccctttagcctctttaatctgcatctcttgttgcttaaaaaaccactgttgatggtaatataggatattggaagtttagcagtcttgatggcgaagaacttagttgttaatatttgatttttttatttaacaaacatttgagcacctgtaatatgtaagatggtgttctggacactaggacacatcagggaacaacacagaaaattctaccctcatggagtttacatacatggtagtgaggagacagaagaaacgtttaagttttatagcgtgttaggtgttgagtactatggataaatacaaagttggaagggaggcattgagatggtcagggaagttacttttgtgcaaagacgtaaaaggagaggagacaggtcttgtggaaacctggggttacaaagtgttgcctgcataggaaatagccagtcccagaggctagtttggtccattgtgatgaaagggttgactgcttgctgtgctagtgccctgtagtgggccaagggcagaagcatggagacaagaggctgggacagtgatctggatgagatggaatggtgatttgaactaaggtgctagtagttgtctttgattctggatatattttaagtatcgccaacaggctttgctgatggattgattgcatgtgggttgagggagaaagtgagcagtcaaggatgactaaaatttttggactgagcaatagtgaggatgaagttgctgttctgagatggggaggattgagagtagaacacattttttgggcaagagcaaattattcataccccggaacaacaggcaactacaacacttcatccattaagagcagttgtccataaattttactgtgagaacccttgcatttgtagattgtacagctaattcctttaacttaatgttttaaagttgtgggagttgataaagattggcttagatagaatctatagctgtgatgactgggtcaagtatagaatacacttaagacttactatttttccccttctggtggaatgactaattaacactgataaaaagaatgaaggcagaaagcgttgaacttggatggtgagaacatagatacgtctggtcttacagctgacccatcagggctttgctgtatgtgaagcctatgcctgggacttctttttacttttaatctctgcattttatccatacacatccattcacatgatcacacaaagatttcaactggtttttatcttacgtgctgtttgcagtcttactttgttaacagttgttacatatccatcttgtgtattttcaagcacaactttttaaacacgcatgatcttttatcaatatcgttaatgtttcttcctgtcagtaatgtccttttcactgaaggtagtattgcatagtgattaagggcaaaagctgtttagacatatagatgtgaggcaacatcctggctgtaacacagacagctgtggcctggggtgagttatactacctcatggcttcagttttctcatctgtaaaatggtcataataattgtacttatctcatgattgttataaggattaaagtaatgcacataaaactagacacagtacctagatggtgttaggacttaggttagtgtaagatttttttttttttttaaatttccattatttataactcacttatctttgataaacagtcttttacaagcagatagtgttgagcctcttgaattcttattgagttacacaaatgtttggttaagattacatagtaataggcattgctgctctgttatttcatatttccttttctttttgagacagtctcgctctgttgcccaggctggagtgcagaggtgtgatctcggctcactgcaacctccacctctctgggttcaagcgatcctcttgccacagcctcctgagtagctgggattacaggcgtgtgctaccacacctggctgatttttgtgtttttttagagatgaggtttggccaggcaggtctcgaactcctggcctcaagtgatccacccgccttggcctcccaaagtgctgggattacaggtgtgagtcaccacgcccagcctgttatttcatgttttcatttatctttaacaaaatgggttgttgggagtttgctcctatatgtgatctagtatcattcacataaaagttaaaaccagtagtagtttcatagttgttcttccctccctgactgccatatctacaaggtcttatttctctgagatttctataaaaaaattcatgatgagccaaacttattggtagaatcaggttaaaatgaatatatcttgggcggagtgtatatggatgaagtaaatctggtggtttatgaacttttctaggtgaataagattttatttgaggaaatggtttactttggaaattatccattcttaacccctccccactcctgtcccgggagaaactgataaaagtagagctgttctggtggtagagggttggaaggagggccgcagtccctccctactctgcctcaacttcacccatcagaatacagcttcagcaccatttgagtccaatcagggttttgtataattaataacttttaaaaagttgagggtgcaagtttaatagaaatgttttgtcaaaaagatttaagggcaaattctttatattttagggatggttaaaacattacggtacaggttgaatatcccgtatcttaaatgcttgggaccagaagtgttttggattgtgggatattgcatattacttggtggctgagcatcccatatctgaacatcccaaacccaaaatgctccagtgagcatttcctttgagcatcatgtcagttctcaaaaagttttggatttgggaggagcatttcagattttgtatttttgcattagggatacttaatctgtagtgttgtctttagctccacttacaatttaaaactggctggagttcaggccagttatattaggaaaacctgttttgctctttgtgttactgatgaaccgctacagtatccttgctccacatttttaaagtaagcaggggttgaggacagtcctatgtgagtacacatacactctgcatcaagcgttagtagtctattccaccacaggaatttgctttcctagaacttgagtcaaggtgacaaaagtgaaagcatgtatgtaaagtcttaagaattttatatacattttttctttttgtattttacttgaagtgatttaagtaggagctaatagttgatgagacagttgggagtctaaaatgtttgagagagctgcatctttaatgcattattttatctaatctttctatatataaataacttgggaaaatcctaatatgccttgcacatagttgacagtttaatttgaaaggaactaatatcacttctagtatattcaggttgtagggagtaaactgacatttactgagccacctccccattgcactgggcaatactagctttctctgttacttattccttataaatcataaggagcaagttggtttcattttaaaagccagacagttgagacttgttgaggctcatagagatgaagttgttgcctgagatcctacagttaggaagtgacggagcatggaacccagcccttaaaaactgtgctgttttcttctgtaccgtgccacctacatagatgtggtacctacacccacctcccttcttacagaatcatgaaatctgtctgttggggtggggagaaaacaagcttgggtatgcccatgttttttgtttttggtaggttacacaaaagtgattgtaattcaggtaattagttttcagaggtgtctgtgtgttctataacccttcaattattagctggctaagtgaatatttttcatttggatcagaggatgagcagggctcatcaagcttaccattgacagagtgctggactaggcgtctcagattgtaccttgagtgtgtggtttgtaaattgactccaaagctaaaagaggtggttgtttggtcacgtttaagattattgcgtactactctttgcaggccccgccctgtgtcattgaacttatgacttgaagccctgagtataggagataatttttcttgttccttgtttggttttagtggcaggtggttttttattttattatttttttgatagagtgcccatatatcctgctgtttacatatagttccagaataagtttctggtttggaagataaattatatggtcacccagacagtactagagagatctggtcatgataactaattacattttggttaacatggttatatcacctgaaggagtgcttatttaaatttggtcttacctttttttctctttctatttggtcaaatgcagcaaatatttatatttacacttctctatttggattaattcttcagttgcaatttaatttatccagatgcgtggaatagaaccaaaactgcattctaattctgtgcaaaacaataaaatactactttctgagaaggatgccttctcttttgggaagaaggggaatctgctctgtttcaaagcacctttgtgttcaaggtttggctaaatctgctcatcaccactaggggactgtttctttttgcattctacaagtattactcccattacagaagctttttaagaaaaaaatggactaccaaggaacccacctacatgcttttcataactatacctattttattgtcttataatttgacttgagaggtttgcgtgaatgatgaactgtgacaaaaagcatatataaatataaaaatacaagttaaaaagcctcatgttagctgaagattttccatgtgtattcttataaaaataagggaaccctggacagtgctcattgtattttgttgaagaaatgttaacttctttaaaagggaggaaaacatatatatatatatataacatactgtatattcagaaccatttttaagggatgtagtttatctcttgaaagactgaaattcaaggctgtgactatgactagagtgtaaaatatagctgcattgcattatagtattttatatatttgtacaaaccaaattgacctgtttttggttttgtttttccttttccagtctttaccaggtgctggtctctgcatgtgttttgttggaagttggaaaatgtagacacgacccacagagtggtatggtatccagtgagaagggaactgtccgcagtggctttgaaggatatgaggaagcctaggcggagagttgagaattcagccttgagctagtgttagggtactatttggtacctctcctgtgggcagagcgactttactagagaagttaggagttagggctagcatgagaacttcatgcagtttgagcattcatcaggcagcagaatatagcttctatatttaccttgcataaatcagatttgacaatgaagaacaatgttactgatagtaacagtgcttcccagtgattgaggaagtgcttgttttctttttcagcactttgttctatgaacaaataaggtgcagcagctagtatgacacataacccaccgtatttcccccccaacggccagatgaaaccagaaatacccactgtgtttttctctcccttctttggaaagcacgtggttggtactgccattgggaagagtgatacctgattagccaggtagccttctgaaaattgaaacaagtggcctgaggatgacttggatggctgttgggtagcagagagccctggaggcagggtttcataactgcgaacagcagttttcattgtaattgacacagcagatttcattgtaattgacaagcttcccttatgcagaaacatttaacgatacctttttaaataatgtttactagtcatctgattagattttattaaaaatttagatgattcgtcctacataatgtcaaagcatttgtttaaaaacttggaagcttttgggggtggggaaggtggtcatagaaatatgatcatcttcaggatttggcaggtatgaagtgatacaaacctcaacttttaagatttttttttttttttttgcttttctctggcaatcaatcttatttatgccagccgttgacacttagaaaggatttaaatcacttttcatagcataattattgtattgcttaatgctttaaaaaggcacgcagatgggattgagacatttctatccaggcagttttttctgcattagacctaagaacctaattttgtagggcagtagtctctaggcattatgtttagctccttttgtcagtgagaagtgtgttgtaaagtttctaatactgtggtctgttttgaacggttttgagaagaggtagctttagtataatttataggacttaaaaggaaaatgcctagaatcatcagaaaaagcatggaaaaacattcttctctgaggttgccttattggaaaaggagaaatcatttagaagttaatgtgtggaaggcattaggttgaataaaattgttgttcgtattgatctgtcagctgcaattacaattaactgaaaatttagtatttgtctctttttcaggagagaagccgtcaaattttaatacatttaattttaggtatatttaaatgtctgttttgcagagtgattatcttaatccagaactgaaaaattcctgatggtcctactgaagatttatctaatggtccacaaatgtctgttttgttgaggtttggcggacataataataaatcattttttagtcttctgaaaacttttctcctcctccctcttttctctgcttcttatacccttcaacaaaaagcattaaaaggaaaacataaaatcacgcctttagtcagtgccgttatcctctcagaggttgttttggaaatactgcctgatgaaaaggaagagaaggaaattgcttcttttaaagtttgctttttatcttcttgcagcatcttctaactggcagaaataatacaatttttgagttgttttgtaagttggatatttttagttttgtgtggaatgtcgtgtttcccattagggcagggggcgtctcacaagatctaggttactgtatgacaactatatccatttactggagtttaagaagctttataacaatacatttccagagactaggcagtacttggttttctgtatttaaattttctgagggtagatgataacatctagtaaacaccacctgcctgttccatccaggaccctaactggccataaagttacccccaaactctcctaggattcatagtattttaagatttcatttttgtgcccttattacgaatataattagtgttttctcccctttagggtgctttaagatcttagtgcctgtcctaatctgagcataccacagtaagacaagaaagggcaatgctgtggtaggcagttagctgctgaagttaggccacttagttatgaggtagatgaatttctgtcctcagctcaaaatgataatattctcactgacaaaagtatcagctgtgatcatatagattgctctttcctgtggaactgaagtgtattaaaaaaattttttttcttccaataaagaatgtctcgttgcgccgggtttgctagactgaaagtttcctcatcacgtggcgagacctcctctacttcaatctttgtcttttgtctctgctgccttgcagggttggtacagtaggcttcactagacttagctgcaactcagaatttctcctccagcacctgagtaaatgctgatggtcttgtggagagtggattaagagtacgagctaagttctcaatcccaattaagaagcggaaaatttaaactgtcttcttcaaagtttatcacaaccaccaccatcaagacagcaaaccaaaggacaaagactttgaccctgctgtgttgctctgtgtagtccagttcacgtatggtttacagacttggctggggttactaaaaataaataaaaagttggacacttctgtcattggagcgctattattcacaagttaccagaatgagagctgtactggacacagcagacattgccatagtggccctgtattttatcctggtcatgtgcattggtttttttgccatgtggaaatctaatagaagcaccgtgagtggatacttcctggcggggcgctctatgacctgggtaacaattggtgcctctctgtttgtgagcaatattgggagtgagcacttcattgggctggcaggatctggagctgcaagtggatttgcagtgggcgcatgggaattcaatgccttactgcttttacaacttctgggatgggttttcatcccaatttacatccggtcaggggtatataccatgcctgaatacttgtccaagcgatttggtggccataggattcaggtctattttgcagccttgtctctgattctctatattttcaccaagctctcggtggatctgtattcgggtgccctttttatccaggagtctttgggttggaatctttatgtgtctgtcatcctgctcattggcatgactgctttgctgactgtcaccggaggccttgttgcagtgatctacacagacactctgcaggctctgctcatgatcattggggcacttacacttatgattattagcataatggagattggcgggtttgaggaagttaagagaaggtacatgttggcctcacccgatgtcacttccatcttattgacatacaacctttccaacacaaattcttgtaatgtctcccctaagaaagaagccctgaaaatgctgcggaatccaacagatgaagatgttccttggcctggattcattcttgggcagaccccagcttcagtatggtactggtgtgctgaccaagtcatcgtgcagagggtccttgcagccaaaaacattgctcatgccaaaggctctactcttatggctggcttcttaaagctcctgccaatgtttatcatagttgtcccaggaatgatttccaggatactgtttactgatgatatagcttgcatcaacccagagcactgcatgctggtgtgtggaagcagagctggttgctccaatattgcttacccacgcctggtgatgaagctggttcctgtgggccttcggggtttaatgatggcagtgatgattgcagctctgatgagtgacttagactctatctttaacagtgccagtaccatattcaccctcgatgtgtacaaacttatccgcaagagcgcaagctcccgggagttaatgattgtggggaggatatttgtggcatttatggtggtgatcagcatagcatgggtgccaatcatcgtggagatgcaaggaggccagatgtacctttacattcaggaggtagcagattacctgacacccccagtggcagccttgttcctgctggcaattttctggaagcgctgcaatgaacaaggggctttctatggtggaatggctggctttgttcttggagcagtccgtttgatactggcctttgcctaccgtgccccagaatgtgaccaacctgataataggccgggcttcatcaaagacatccattatatgtatgtggccacaggattgttttgggtcacgggactcattactgtaattgtgagccttctcacaccacctcccacaaaggaacagattcgaaccaccaccttttggtctaagaagaacctggtggtgaaggagaactgctccccaaaagaggaaccataccaaatgcaagaaaagagcattctgagatgcagtgagaataatgagaccatcaaccacatcattcccaacgggaaatctgaagacagcattaagggccttcagcctgaagatgttaatctgttggtaacctgcagagaggagggcaacccagtggcatccttaggtcattcagaggcagaaacaccagttgacgcttactccaatgggcaagcagctctcatgggtgagaaagagagaaagaaagaaacggatgatggaggtcggtactggaagttcatagactggttttgtggctttaaaagtaagagcctcagcaagaggagtctcagagacctgatggaagaggaggctgtttgtttacagatgctagaagagactcggcaagttaaagtaatactaaatattggactttttgctgtgtgttcacttggaattttcatgtttgtttatttctccttatgaacttaaggatatggtgagacactaacttaagacaatactgactggtctttggggaaaaaagttatgtaactgtgcatctctcaggcattgtttacgctgtaggttttagccaaattttacttagcagaaaatcatctaattacaagactttattttcccagagatggattaaagtaaatcttcaacttaagtgaagccaaacctaacagactgaattgtgcaaatgtggttttaaattttgcataccaaagtaagaagagaccaattattctcacagagcacttagagcagaatatatgttaagttaccatgaattaaggtatactgtctgcactgccaagtcttggcagaccttaccctgaagtagaagatttgctcatttctaaagttttttttctgtctctgtaatccctcctaccattaagaaaaacttatttcttagacattgtacaatcagttatgtactgaaaatcgaatgtgcttgtgtgatacttgtttcaggacaagttcatttgccaggttcattttgttagcatgagcctacggattctgatttcccaaagaaagaatgttttcctgtaggtatttttgtaccaccagtatatggaatgttagggaaaaactttgttccagttcctttttttttttctttctactttcaagtttaagtgaaccatactgaaatgaccaacaagtctgcctgtaaagttacatgtcatgattgtgttgttaaatgattatgggggagaaaatgaagtaaatgttgctgatgatccccatatttattgatcatattaaggttgtttatatagtttggaaatgaccagccccctaagcagtgtttgattaacttatgctaatcagatgattactcatatattctgctaattttctagctttattcttgttatttggaaaaattattagccaaatgccttcctaggtggatccagttggaagatatgtccagaaacctgaagaaaaattgacgctgcctttgtgtgctggattgctctacttgattagatcatgatatatcaaggttgaatttttagagggaaaatttaattctgatatcttattgcatccttgataagtttttccctgatttttttttcctccaaagactttccatctggacacagcctccacatttttgttgtagtgacttagagcataaggatgtttcagtgccaattccggccgtcggtaacagaaaactcagtgcatactttgctgttgttaggttgtcaatatagtctttctgtaggatggatagcatgtttgagaggtgccaaacaagaacttttggggttagtagtgtgtcttgtggagggtattacaggactgtgtaattataggactctaacttgacatggcttggcacccacttgcagctagtgggtacagggtacaaaagatgttagagaaaagctctacagattacgtacttctgtgtcttcgtatgctcaacactgtcctttgtcctccatgaaagatgaaggaagcaaattatgtatgtactttctttgaccttctttaatctctgatactttttagattgcatgattttactaggcttgtatttagggaaattactttcataaatacttttgtagattttgaatcaaaactcagtctttttaatttttttgtagtctataaactagtttcattatgatggacttgattagtccaaagttaattttagaaattgtcaggtagcatagtgtcttcccatgatcaggaggctttctgaaggactgagtctgtaaatgaaaaaataatttatgtatgaatagcatgtatttctgaagagcttagagtgcctcgtagaatttttctcaattttattcttgaggtttataatttgggggccaaatagatagagctcatcattttcttgtttggaagttgaggctgcgacatgtccaaggttatgaagtctcttttgggaagaacagaaaccaggtctccaaatctggactcatggtttgttcagatgtgtctggacaaatggttgtcaatgttttgtcctgttttttcaaaggaactgttcttcctttgggacaaccttttggtgtttgggaaagtaataagatcttggatttttcaaattaacattaagttgtaagaactaaaattttctttgaaccacactactgtgtaattcactgataattgacatattggctgggcagcctatctcttccatatccagcgtaaatgaataggaggtgtctgtgattttttttttctccctttatttaacattgagtcctagtagtttggagaattagggtccctctaccttctttctgctcttgtcttagtaagatacataaggtacatcatcttgtgtctgtgtgtatatagcagtaggtcaagtttagagtactaaagtctgtaaataaggaatgactattagcatattcattagaattgtttattcttgccagtataaacatcattttatttagactaaagtccctgaagcttgtctttcttattgctttccagtaaatagataatgtgctcgagtaagtttgtgaattgctgattgcaacttaattcagggaccagtcttcaatctatatttcattagaatgattgtccctggaatgatcatacatggactgtcttaagctagcaaaatgttcatactttacactgactaaatgggtcctaaatgatgacattggtctttagacattaacatgtgtatatttttatattagctcaagctaaggttcagaattgaagcttgatattgactagaatagctaaaagtcaaaatgaggtgaggacactggtcttggaaggtagagaaaaataaatgtcttaccaggtgttaatggtatccccagttcttagacttttgtcttctcaggcaattttcatctcaagatctgatgagaagggcatattacattggtatgcaggatgattattgcatattttgtgggacctctaatttccctggtcatctttcagaatattctgttctgccacccccagagagtaaacacttgagccgatttcttcttccccagctattctttcctgggggtaattatgctttgtctttagattagagaagcatcaagcaatagcaatggtgctgtgtccttcggcctaaattcaatagatctcatctcctagggcttccttttcacttggctcaaaggatccattgtattttggcacaaagagcctggccagggtcatgtagccatagctcttagggatgatacctcaagaaattagctgggacccatcactctgtgaaacttcacattttaagaactgagttgagggggttgttatgcacttctgtaacttgaggctaagcaaggggttaactcttgtgagagccaatagagtgtgtctgtattcgcagtccatggctcattttctttatagtaggcatatggatcttcccctctgactttgaatatcatttggtgtggcctgtgggttattttcattctttaccaccaaataaagcggcttattagctactcagttacttgctactcaaaggttaggtcttccctgttcctgcttggcagtgttaaagcttacagggttaacttatgatgattctcctggctcattttcatcagaggcatgatgactggaaagggatcacatgggtcgttggtggtgacacctcactgtttcctaggtttggatagagagatgtatacaagacctttcctgttaaattacgtgactacagagacttgccaggacaaaatttcctaagaaatcagaaaaatgattaagtgagataagtacctgggtgacacagatattagcccgttggtaaaagacaacaaatattagcttaaaatctgcatatgtagaatcattttcattagatttagagcttgaagcaccttggctctcagctactttaaactcctccccatataaatcagggcaccaataaataagtttcagctttttaaaccctggtttgatgttaagcattataaagtacgaagtttgttaccacagtagagataatttagtagaaaaatgctttgaggcttcagtatttgtaagattttgcattagccagatgctaggttgttgaaggcatttcagtgttgataatagcctgagcagacttctttacaaatgggatctgtttctatatgtgtatatgcccacttaccattcagagagactggtctttctctttgtctcccttcacattgctgtgtcagtcctacacctagtcttttcagcacttagcaaattcaaatttggattttttggtcagcttagttcactttaaggcatattggcatggtgtgtgaaagtgatgtttggccccagtattgaggacttttagatccaaataatgactcattaaatataattatgttttaagtatactgaatttctgttagcttaaaatgttaatcctcaggaatgatttcctcacactttgtgttggctaataataaaagcactgttttatcctcaaaactcctttttcaaaaattagggagagagcagtagtgatcatttatgtgagcccctttgaaatgatggtgtcagagtgcagagaaacaatggagttttgatgccaaaaaggtttttttgcagtaaaagtaaaaatttggaattagttggcatataaaggaacccttttgtactggaacgtatgaggctggattgtgaaaaggtaatctttcgattgctagacttggttaacttagggctgcaaatctttttcttctatcaaggtcacttaatatggaatgtttttgtcagactgtcctttgttggaatactttagctgttcagctactttgactcctaggagagaatttagttaaggttcaaagtaattaactggctttgccagtggtgagtcccacaccattattcacttagtagtcatataaatgtttttatttactctcttcaatgctgagaataaggctttaaattactgattcacctttaaaggaatgttgtgagaattgatgtaatttctgtttctgtttccatctaaacttctttataaaaagagggattagtttttttgttttggggtaagcacctaatttatccagtaaccaacaaccctaaccattggcatatatagtctttcactcagaaataaacaaaaactgtttggtatatctgtatcattgctaatcttgtgcactttactttttgggcagtaccatacatagtctgaggctattgacttaaaccaataactgtactttatgtaatgactcttaaatttggttacctgggttcacagcttgcttgaagagaaaggatgctagaataaagtaagcagctgaagagcgagcaaatcaagacaaaacacagtggtctcagatttttcgtagtgtgggaacagtggttttgctctataccactgaaaagcactataacataattgttgtccatgatactgaagcttttcccctcacttctaggttgtttacattcagagctctatcaataagaggaatacatattacagtgaattcgacaaccgcacaagttggcagtaggtatccccaacctaatttatcttggtaaattcaccctgtttcctagtgctgctggataaaagagtgtttactttttattgctcttagacagagtagtctagataagttttcaatttatcaacatagcctagacttctgtaagtggaatgttcattagtaactcatctttttgttgttataattggaaacagaaacgaggcttattgctattgcagaaatcccaaactggcaaaggccagtatatatggtattccataatataaccagcttttgaaatttatgtgtttggattagtgccttctggttaccagtattgactctgctagtttgcacctttccgttcttaacagaaaatttgtatttgttattcctcttaaattttgtcgtaactagtgaaggaagtaaaaaaaaaaaaaaaaacatgcattacattgacatactttatgtgcagcctttatttaggttcagtgaaaccaggtagttctgtatttgtgttgtagcctaaatgttgtttcttttatatccattaaaaacttaaagttacttatgttctgtgatcttaattttgttgtgtttccattgtaggttgataggtatatcgagaacaggtacgtgacaacagtttatattccatgatagaaagctaaagtccatagaaagcacaaaatcgtgttcacacattagtgtacccacacatagaaagcacaagactaatagtattctctgtatcccacaagtgccagtcataaaggccaccaggtatttgtctcagagttgctatgagcactacagtattgataagcccaagacaatgcggtatctaaactggtcctaatggtaagggacccaaaggaataatctcaataagtttgtaccacattgatggagggagagaatacaaatgtcaagaatgccaaaattatatttgggggttactagctaaaatggggtttgagggctttttactgcaacttgaaactggagaaatagggacagatgtctaggtttttggtgggtggaacaggtgacatatttctgttttaagctgtagtgtgattggggttttttgtaaaaaatcttaaatcttttaggaaatattacctcttaacagtgcccccccaaacatgcagaaagtcatactttaacagggcaaatactacttgtctttgattttttttgtgtacgtttgtatgtgagagatgaagttacctttatttttttcctatacttgactgtgcttcattttaataaaggataatttgatctga

SEQ ID NO: 23 - DNA, 2218 bp, Homo sapiens
cttctctctccattcagtgcacgcgttactttggctaaaaggaggtgagcggcactctgcccttccagagcaagcatggagcaacaggatcagagcatgaaggaagggaggctgacgcttgtgcttgccctggcaaccctgatagctgcctttgggtcatccttccagtatgggtacaacgtggctgctgtcaactccccagcactgctcatgcaacaattttacaatgagacttactatggtaggaccggtgaattcatggaagacttccccttgacgttgctgtggtctgtaaccgtgtccatgtttccatttggagggtttatcggatccctcctggtcggccccttggtgaataaatttggcagaaaaggggccttgctgttcaacaacatattttctatcgtgcctgcgatcttaatgggatgcagcagagtcgccacatcatttgagcttatcattatttccagacttttggtgggaatatgtgcaggtgtatcttccaacgtggtccccatgtacttaggggagctggcccctaaaaacctgcggggggctctcggggtggtgccccagctcttcatcactgttggcatccttgtggcccagatctttggtcttcggaatctccttgcaaacgtagatggctggccgatcctgctggggctgaccggggtccccgcggcgctgcagctccttctgctgcccttcttccccgagagccccaggtacctgctgattcagaagaaagacgaagcggccgccaagaaagccctacagacgctgcgcggctgggactctgtggacagggaggtggccgagatccggcaggaggatgaggcagagaaggccgcgggcttcatctccgtgctgaagctgttccggatgcgctcgctgcgctggcagctgctgtccatcatcgtcctcatgggcggccagcagctgtcgggcgtcaacgctatctactactacgcggaccagatctacctgagcgccggcgtgccggaggagcacgtgcagtacgtgacggccggcaccggggccgtgaacgtggtcatgaccttctgcgccgtgttcgtggtggagctcctgggtcggaggctgctgctgctgctgggcttctccatctgcctcatagcctgctgcgtgctcactgcagctctggcactgcaggacacagtgtcctggatgccatacatcagcatcgtctgtgtcatctcctacgtcataggacatgccctcgggcccagtcccatacccgcgctgctcatcactgagatcttcctgcagtcctctcggccatctgccttcatggtggggggcagtgtgcactggctctccaacttcaccgtgggcttgatcttcccgttcatccaggagggcctcggcccgtacagcttcattgtcttcgccgtgatctgcctcctcaccaccatctacatcttcttgattgtcccggagaccaaggccaagacgttcatagagatcaaccagattttcaccaagatgaataaggtgtctgaagtgtacccggaaaaggaggaactgaaagagcttccacctgtcacttcggaacagtgactctggagaggaagccagtggagctggtctgccaggggcttcccactttggcttatttttctgacttctagctgtctgtgaatatccagaaataaaacaactctgatgtggaatgcagtcctcatctccagcctccccaccccagtgggaactgtgcaaagggctgccttgctgttcttgaagctgggctgtctctctccatgttggcctgtcaccagacccgagtcaattaaacagctggtcctccactttgctggttcagccttcgtgtggctcctggtaacgtggctccaccttgatgggtcaacctttgtgtggctcctggtaacataacaacaacagttactatagtggtgagatggaaggaatcaaattttgccagagaaactaactcggtggccccaacaggtcttccggggccatgggcatttgtttagagccaaattcatcctcttaccagatccttttccagaaatacctgtctaggaaggtgtgatgtcagaaacaatgacatccagaaagctgaggaacaggttcctgtggagacactgagtcagaattcttcatccaaattattttgttagtggaaaatggaattgcttctgtgtagtcaataaaatgaacctgatcacttttc

SEQ ID NO: 24 - DNA, 2161 bp, Homo sapiens
gggcgatcctgccggagccccgccgccgccggcttggattctgaaaccttccttgtatccctcctgagacatctttgctgcaagatcgaggctgtcctctggtgagaaggtggtgaggcttcccgtcatattccagctctgaacagcaacatggggtgcaaagtcctgctcaacattgggcagcagatgctgcggcggaaggtggtggactgtagcccggaggagacgcggctgtctcgctgcctgaacacttttgatctggtggccctcggggtgggcagcacactgggtgctggtgtctacgtcctggctggagctgtggcccgtgagaatgcaggccctgccattgtcatctccttcctgatcgctgcgctggcctcagtgctggctggcctgtgctatggcgagtttggtgctcgggtccccaagacgggctcagcttacctctacagctatgtcaccgttggagagctctgggccttcatcaccggctggaacttaatcctctcctacatcatcggtacttcaagcgtagcgagggcctggagcgccaccttcgacgagctgataggcagacccatcggggagttctcacggacacacatgactctgaacgcccccggcgtgctggctgaaaaccccgacatattcgcagtgatcataattctcatcttgacaggacttttaactcttggtgtgaaagagtcggccatggtcaacaaaatattcacttgtattaacgtcctggtcctgggcttcataatggtgtcaggatttgtgaaaggatcggttaaaaactggcagctcacggaggaggattttgggaacacatcaggccgtctctgtttgaacaatgacacaaaagaagggaagcccggtgttggtggattcatgcccttcgggttctctggtgtcctgtcgggggcagcgacttgcttctatgccttcgtgggctttgactgcatcgccaccacaggtgaagaggtgaagaacccacagaaggccatccccgtggggatcgtggcgtccctcttgatctgcttcatcgcctactttggggtgtcggctgccctcacgctcatgatgccctacttctgcctggacaataacagccccctgcccgacgcctttaagcacgtgggctgggaaggtgccaagtacgcagtggccgtgggctccctctgtgctctttccgccagtcttctaggttccatgtttcccatgcctcgggttatctatgccatggctgaggatggactgctatttaaattcttagccaacgtcaatgataggaccaaaacaccaataatcgccacattagcctcgggtgccgttgctgctgtgatggccttcctctttgacctgaaggacttggtggacctcatgtccattggcactctcctggcttactcgttggtggctgcctgtgtgttggtcttacggtaccagccagagcagcctaacctggtataccagatggccagtacttccgacgagttagatccagcagaccaaaatgaattggcaagcaccaatgattcccagctggggtttttaccagaggcagagatgttctctttgaaaaccatactctcacccaaaaacatggagccttccaaaatctctgggctaattgtgaacatttcaaccagccttatagctgttctcatcatcaccttctgcattgtgaccgtgcttggaagggaggctctcaccaaaggggcgctgtgggcagtctttctgctcgcagggtctgccctcctctgtgccgtggtcacgggcgtcatctggaggcagcccgagagcaagaccaagctctcatttaaggttcccttcctgccagtgctccccatcctgagcatcttcgtgaacgtctatctcatgatgcagctggaccagggcacctgggtccggtttgctgtgtggatgctgataggcttcatcatctactttggctatggcctgtggcacagcgaggaggcgtccctggatgccgaccaagcaaggactcctgacggcaacttggaccagtgcaagtgacgcacagccccgccccccggaggtggcagcagccccgagggacgcccccagaggaccgggaggcaccccaccctccccaccagtgcaacagaaaccacctgcgtccacaccctcactgcag

SEQ ID NO: 25 - DNA, 3173 bp, Homo sapiens
tgatgtgatatggctgcaagtgcctttgacccttttgtctcccttccataaactgaaatacctaagctgctccaacctcctttttgtcttttgtttcataaatcctttcccattgcacatcaactcctgtctctctttgtactgtcactctcatctgttgctttccattcacactgcctttagccactcatcattttgtgcctacaccacagaaacctctgaatgtaatggatgttcctaccagaggacaagtcgtacaatggtggaggaataggttcttcaaataggatcatggacttcttggaggagccaatccctggtgtagggacctatgatgatttcaatacaattgattgggtgagagagaagtctcgagaccgggataggcaccgagagattaccaataaaagcaaagagtcaacatgggccttaattcacagtgtgagtgatgctttttccggctggttgttgatgctccttattgggcttttatcaggttcgttagctggtttgatagacatctctgctcattggatgacagacttaaaagaaggtatatgcacagggggattctggtttaaccatgaacattgttgctggaactctgagcatgtcacctttgaagagagagacaaatgtccagagtggaatagttggtcccagcttatcatcagcacagatgagggagcctttgcctacatagtcaattatttcatgtacgtcctctgggctctcctatttgccttccttgccgtatctcttgtcaaggtgtttgcgccttatgcctgtggctctggaatccctgagataaaaactatcttgagtggtttcattattaggggctatttgggtaagtggactctggttatcaaaaccatcaccttggtgctggcagtgtcgtctggcttgagcctgggcaaagagggccctctagtgcacgtggcttgctgctgtgggaacatcctgtgccactgcttcaacaaatacaggaagaatgaagccaagcgcagagaggtcttgtcggctgcagcagcagctggtgtatctgtagcctttggagcacctataggtggagtattattcagccttgaagaggtcagctactattttcccctcaaaacattgtggcgttcattctttgctgccttggtggcagcattcactctacgctccatcaatccatttgggaacagccgcctggtactattttatgtggagtttcacaccccatggcatctctttgagctcgtgccattcattctgctgggcatatttggtggtctgtggggagcactgtttatccgcacaaacattgcctggtgtcggaagcgaaagaccacccagttgggcaagtatcctgttatagaggtactcgtcgtgacagccatcactgccatcctggctttccccaatgaatacactcggatgagcacaagtgagctcatttctgagctgtttaatgactgtggccttctggactcctccaagctctgtgattatgagaaccgtttcaacacaagcaaagggggtgaactgcctgacagaccggctggcgtgggagtctacagtgcaatgtggcagctggctttaacactcatactgaaaattgtcattactatattcacctttggcatgaagatcccttctggcctctttatccctagcatggctgttggtgctatagcaggtcgacttctaggagtaggaatggaacagctggcttattaccaccaggaatggaccgtcttcaatagctggtgtagtcagggagctgattgcatcacccccggcctttatgcaatggttggggctgcagcctgcttaggtggggtgactcggatgactgtttctcttgttgtcataatgtttgaactgactggtggcttagaatacatcgtgcctctgatggctgcagccatgacaagcaagtgggtggcagatgctcttgggcgggagggcatctatgatgcccacatccgtctcaatggatacccctttcttgaagccaaagaagagtttgctcataagaccctggcaatggatgtgatgaaaccccggagaaatgatcctttgttgactgtccttactcaggacagtatgactgtggaagatgtagagaccataatcagtgaaaccacttacagtggcttcccagtggtggtatcccgggagtcccaaagacttgtgggctttgtcctccgaagagatctcattatttcaattgaaaatgctcgaaagaaacaggatggggttgttagcacttccatcatttatttcacggagcattctcctccattgccaccatacactccacccactctaaagcttcggaacatcctcgatctcagccccttcactgtgactgaccttacacccatggagatcgtagtggatattttccgaaagctgggactgcggcagtgcctggttacacacaacgggcgattgcttggaatcattaccaaaaaggatgtgttaaagcatatagcacagatggcgaaccaagatcctgattccattctcttcaactagaatcatagagttctggatgtaaagcgggaaggacattacagaccatggatatgttgtttaacggtacccaaaacacattttccatatttggatggtgaagtcacattagtgtgttgtctctttcctacaagttaaccagttgcactacataatctctggaaattaattttctctttaggagaaattatagttaggcttccatgatgttacattaggaagatatcatgaaagaataaataagattgctatggtttaattatatttgctttttaaaagatttttttaacttaaaaagtagttagccaatatgcaatcactgaaaactatgcaagagaaattccaaccgtcctgacctataacctgtaggaaaccgacgaaaaagtcactcttttgggatctaactgttgttactggaagacgaaggtaaactaaggggctttgcttttcaaaccagagaaaggaaagccagaaggaaaagagtaatggtattttctagactgtgaagattcagttcaaatgttatccttgttcctgttacaatatttagcattattagtttgttatgtgtgtatgtttatgttaattttaatttctgattataagacaatgctgctttggttaatctcttctaaaggaattta

SEQ ID NO: 26 - DNA, 1892 bp, Homo sapiens
ctacctccaaggcaataggatcaatgagttctccatcagcagcttctgcaccgtggtggacgtcgtgaacttctccaagctgcaggtgctgcgcctggacgggaacgagatcaagcgcagcgccatgcctgccgacgcgcccctctgcctgcgccttgccagcctcatcgagatctgagcagccctggcaccgggtactgggcggagagcccccgtggcatttggcttgatggtttggtttggcttttgctggaaggtccaggatggaccatgtgacagaagtccacgggcaccctctgtagtcttctttcctgtaggtggggttagggggggcgatcagggacaggcagccttctgctgaggacataggcagaagctcactcttttccagggacagaagtggtggtagatggaaggatccctggatgttccaaccccataaatctcacggctcttaagttcttcccaatgatctgaggtcatggaacttcaaaagtggcatgggcaatagtatataaccatacttttctaacaatccctggctgtctgtgagcagcacttgacagctctccctctgtgctgggctggtcgtgcagttactctgggctcccatttgttgcttctcaaaatatacctcttgcccagctgcctcttctgaaatccacttcacccactccactttcctccacagatgcctcttctgtgccttaagcagagtcaggagaccccaaggcatgtgagcatctgcccagcaacctgtggagacaacccacactgtgtctgagggtgaaaggacaccaggagtcacttctatacctccctaacctcacccctggaaagccaccagattggaggtcaccagcatgatgataatattcatgacctgatgtgggaggagacagccaacctcaggcttagatcaatgtatagggctatattttggcagctgggtagctctttgaaggtggataagacttcagaagaggaaaggccagactttgcttaccatcagcatctgcaatgggccaaacacacctcaaattggctgagttgagaaagcagccccagtagttccattcttgcccagcactttctgcattccaaacagcatcctacctgggtttttatccacaaaggtagcggccacatggtttttaaagtatgagaaacacagtttgtcctctccttttatccaagcaggaagattctatatcctgatggtagagacagactccaggcagccctggacttgctagcccaaagaaggaggatgtggttaatctgtttcacctggtttgtcctaaggccatagttaaaaagtaccagctctggctggggtccgtgaagcccaggccaggcagccaaatcttgcctgtgctgggcatacaaccctctgctttcacatctctgagctatatcctcattagtgaaggtggcttttgctttatagtttggctggggagcacttaattcttcccatttcaaaaggtaatgttgcctggggcttaacccacctgccctttgggcaaggttgggacaaagccatctgggcagtcaggggcaaggactgttggaggagagttagcccaagtataggctctgcccagatgccatcacatccctgatactgtgtatgctttgaagcaccttccctgagaagggaagaggggatctttggactacgttcttggctccagacctggaatccacaaaagccaaaccagctcatttcaacaaaggagctccgatgtgaggggcaaggctgccccctgccccagggctcttcagaaagcatctgcatgtgaacaccatcatgcctttataaaggatccttattacaggaaaagcatgagtggtggctaacctgaccaataaagttattttatgattgc

SEQ ID NO: 27 - DNA, 3171 bp, Homo sapiens
ggcacgagatgacaccaagcaaagcctacttagtttagatctccagaaattggctggtggaaaaaaatcaaacatgaagattgcagttttgttttgtttttttctgcttatcatttttcaaactgactttggaaaaaatgaagaaattcctaggaagcaaaggaggaagatctaccacagaaggttgaggaaaagttcaacctcacacaagcacagatcaaacagacagcttggaattcagcaaacaacagtttttacaccagtagcaagacttcctattgttaactttgattatagcatggaggaaaagtttgaatccttttcaagttttcctggagtagaatcaagttataatgtgttaccaggaaagaagggacactgtttggtaaagggcataaccatgtacaacaaagctgtgtggtcgcctgagccctgcactacctgcctctgctcagatggaagagttctttgtgatgaaaccatgtgccatccccagaggtgcccccaaacagttatacctgaaggggaatgctgcccggtctgctccgctactgtctcctattctctactcagtggtatagcattaaatgatagaaatgaattttctggtgattcttcagaacaaagagaacctaccaatttacttcataagcaactgccacctcctcaggtgggaatggaccgaatagtaagaaaagaagcacttcaatctgaggaggatgaagaagtgaaagaagaagatacagagcaaaagagagagacccctgaatctagaaatcaggggcaactttacagtgagggggacagcagaggaggagacagaaagcagaggcctggagaggagaggaggctggcacaccagcaacaacgccaaggaagggaggaggaggaggatgaggaggaggagggtgaggagggtgaggaggatgaggaggacgaggaggacccggtaagaggagatatgttccgaatgccctctcgatccccgcttcctgctcctcccagaggcacactgcgcctgccaagcgggtgctctctgtcctacaggaccatcagctgcatcaacgccatgcttacccagataccaccgctgacagcaccacagataacaagtctggagctcactggcaattccatcgcctccatcccagatgaagcatttaatggattaccaaatttggaaaggcttgatctgagtaaaaataatatcacttcttcaggcataggtccaaaagcattcaagcttctgaagaagttaatgcgtttgaatatggatggaaataatttgatacagattccttcacaattgccatctacattagaagaacttaaagtcaatgagaacaatcttcaggctatcgatgaagaaagtttatcagacttaaatcagttggtcaccttagaattggaaggaaacaatctcagtgaagccaatgtcaatcctttagctttcaaacctttgaagagcctagcctacttgcgtctgggaaaaaataaatttagaattataccgcagggtcttcctggttctattgaggaattatacctagaaaataaccaaattgaagaaataactgaaatttgtttcaatcataccagaaagatcaatgtcattgtactacgttataacaaaattgaagaaaataggattgctcctttagcctggataaatcaagaaaatctagaatccattgatctctcctacaacaagctctatcacgtcccgtcctatctacccaagtccttgctgcacctagtactccttgggaaccagattgaacggatccctggctatgtgtttggccacatggaaccaggcctggaatacttgtacctgtcatttaacaaacttgctgatgatggcatggaccgtgtctccttctatggggcatatcattctctgagagaattatttctggatcacaatgacttaaaatctataccacctgggatacaagaaatgaaagcactacattttctgaggctgaacaacaacaagatacggaacattcttccagaagaaatttgcaatgctgaagaggatgatgactcaaatctggaacatcttcatcttgaaaacaattatattaaaattagagaaataccatcttacacattttcatgcataagatcatactcaagtatcgttcttaaaccacaaaacatcaagtaattccaagttttcctttgctgtttataaactttactcatgtatttgtagtagctgcatttgtcattaataagagagacataatcctcctgttatactcagtatcattatatgctagtcaacctgattcactaacacacagatgaacaaccaaaatatacctaaaaggtatagtctctaggagttttattaatagtaaaggtaaaatctctcagtttcctacctctagaaagaggccatctcactagaataggatattatgcatactgagctagaccagaagagtctggaacaaaataaacacagcctttataatcaacttgaatactggtgttagctgagaactctgtaagtccctttaaaaattatgtatcttttggttcaagattaagaagcataatgacaacaaaaaaagcaggcagaatttatgaataagtgttgtttattattaaaacaataatttgttaatttcttataaggtcctgtgctataattactggtataaatataactgaatattggggtagctttcatttcttccattaattacatgtgtaaaattaaaacactactgtaatgttaatttcctggttttgaaaatcatattatggttatgtacattgttaacattaaggaaagctggcagaagggtgtgcataaattctatactctttttgaaacttttctataattctaaaattattttttaaagttaaacagtatattaagattaccttcactattcctcactcaagattaagacattttttgaaaagcagtagagtttgcttaaaatacaaattaattattcttgactataaccttgtaaaggtaaatctaatgtataaatttttgaaaaattttgcaccactggtcatagcatctatctcctttgccttaatttactgaaatacatcattttattcggttcaattgaaataaagctatgtctttactatgtattggccctaccaaaatcatatattaaaattttctaacat

SEQ ID NO: 28 - DNA, 2245 bp, Homo sapiens
aattcgtggttccagaatcgatagggctccaagattcgccgccgccgccgccgcagccgcaggagtagccgccgccggagccgcgcgcagcatggccgagaaccccagcttggagaaccaccgcatcaagagcttcaagaacaagggccgcgatgtggaaacaatgcgaagacatagaaatgaagtgacagtggaactgcggaagaacaaaagagatgaacacttattgaaaaagagaaatgttccccaagaagaaagtctagaagattcagatgttgatgctgattttaaagcacaaaatgtaaccctagaagctatattgcagaatgccacaagtgataacccagtggtccaattgagtgctgtccaggcagcaagaaaactgttatccagtgaccagaatccaccgattgatgacttaataaaatctgggattttaccaattctagtcaaatgtctagaaagggatgataatccttcattacagtttgaagctgcttgggcattaactaacatagcatcaggaacttctgcacagactcaagctgttgtgcagtctaatgcagtacctctttttctgagacttcttcgttcaccacatcagaatgtttgtgaacaagcagtatgggctttgggaaacattataggtgatggtcctcaatgtagagattatgtcatatcactgggagttgtcaaacctcttctgtccttcatcagtccctccatccccatcaccttccttcggaacgtcacatgggtcattgtcaatctctgcaggaataaggatcccccaccgcctatggagacagttcaggagattttgccagctttatgtgtcctcatataccatacagatataaacattcttgtagacactgtttgggctctgtcatacttgacagatggaggtaatgaacagatacagatggttattgattcaggagttgtgccctttcttgtgccccttctgagccatcaggaagtcaaagttcaaacagcagccctcagagcagttggcaacatagtgactggcaccgacgagcagacccaggttgttctcaattgtgatgtcctgtcacacttcccaaatctcttatcacacccaaaagagaagataaataaggaagcagtgtggttcctttccaacataacagcaggcaaccagcaacaagttcaagctgtaatagatgctggattaattcctatgataattcatcagcttgctaagggggactttggaacacaaaaagaagctgcttgggcaatcagcaacttaacaataagtggcagaaaagatcaggttgagtaccttgtacagcagaatgtaataccaccgttctgtaatttactgtcagtgaaagattctcaagtggttcaggtggttctagatggtctaaaaaacattctgataatggccggtgatgaagcaagcacaatagctgaaataatagaggaatgtggaggtttggagaaaattgaagttttacagcaacatgaaaatgaagacatatataaattagcatttgaaatcatagatcagtatttctctggtgatgatattgatgaagatccctgcctcattcctgaagcaacacaaggaggtacctacaattttgatccaacagccaaccttcaaacaaaagaatttaatttttaaattcagttgagtgcagcatctttcccacattcaatatgaagcaccaccagatggctaccaaatgataagaacaacagcaacaaaaggctccaaaacacacatgcctctttgttttgatgcttctaaagaaagccatgtctcagtcactttgcagttgccaaaagtcactatcacatggactgtaaatgcatatgcatgatttcctaaactgttttagaactctccttaacaatctcaactaccctatttttccctgttccctggtgccacaggctgacaactgcagtctccagtttagaataaatattccatagtggtgacatgtcagctgcccactgatactcctttggaaaatggtgcgctgtggatcaagacactttggtatgatgcatatacaagttggaagactaaagaggtgcaatgtgatctgagcctccatcattgtcctccacaaacatattttcatattctttatgtggaagaatagattttaaagtacaagccaaatgattttcattggtggaactgacacaaaaaaaagtaacttaaaaacaagaaacttggttattgaataaacagataagtttt

SEQ ID NO: 29 - DNA, 86765 bp, Homo sapiens
gatcaattctgaagccatttctaattctacttcaccagtatttttaaaaccagcttatttattaaagatttacttaagttgaggctgggtgtggtggctcacgcctgtaatcccagcactttgggaggccgaggcaggcggatcatgaggtcaggagatcgagaccatcatggctaacacagtgaaaccccatctctactaaaaatacaaaaaattagcctggtgtggtggcaggcatctgtagtcccagctactcgggaggctgaggcagaagaatggcataagtaaacccgggaggcggagcttgcagtgagccgagatggtgccactgcactccagcctaggggacagagtgagactccgtctcaaaaaaaaaaaaaaaatgatttacttaagtcacttgaagttgaaaaagcacttggtttaaagtctcaattttctaataaagtatttgattaagtgcttttttctttaagccaattaattaaagctcttttatatatttttagtaatgaaacatcatatacatgacacataaatatgtagatgtattagacacgcaggtagaagtagatcttatagattcataaaacctctttttccctattttagacttccaaattcctttcttttcttttttttttttttttggcagcaaagaaagaatttaataatcacagggctagccaagtggtaatgaaatgggaggactgggagggggcctgaacaatccctgaggaggagtagaatagcagacggaacactgagaagtgatttccttgaggatagattttcatgatggaaaggaaatgagaggttctaagaggtggcctagcggcttgtaacctacatggaagaggctatgaaatgatgacagaatagaatgggcctgtgaggctggaaggagatattttccttggtctaagaaccatttgccttgtgtgggaagagattgataggtggaagtttcagtgggggagtaggtgggagtgaccgatgagaaggagaaaaactggccatgagggacagaagttggaatgctagctgcttttttagctaccttatcagcataagtgttgccctgagcgatgggatctgacgccttttgatggcccttgcagtgaatgaatccagcttcctttggaagtaaagtggccttgagaagagtttttattaaagaggcattaatgatggaggacccttgcgtagtgaggaaacctctttcagcccatataacagtatggtggtgcaggatatggaaggcatatttagagtcagtataaatattgacacgtagtccctttgcaagggtgagggtttgagttaaggcaatgagtttgacttgctgagaggtagtggagaggggcagaaagtatatgcatcaggtatgaggaagaaaatagattttggaagttatgagaactgtagagagtgagttgagcatagtttgtgattttgagggcctctaaaagtattaaggcagtggcagctgccgcacacagacatgagggctaggctaaaacagtaaggtcaagttgtttggataaaaaggccacagggcacggtcccagtccttgtgtaagaattttgactgcacagccctgcacttcagctatgtgtaatgaaaaaggctgggatgagttagggagagctagtgtgggagcagcttttagggctgttttttaagaaatggaaaggggagtggggaaagaatttaggatttatggggtcagctaggtttatctagaacagaatgggttgtggagggaggtactgaggataggagagtctatgggtttggcaccacggggtagataggcaagacaatttggttgataaggcgcagatcctgaactaacctgtaagacttgtccagtttttggacaggtaaaatggggaaattgtaaggagtgtttataggctttaaaaggccatgctgtaacaggcgagtgataacaggctttaatgctttgaaagcctgctgtgggatgggatactggtgttgagcagggtaagggtgatcaggttttaatgggatggtaaggggtacgtcatccatcgccaaggagggagtagaggtgtcctatacttgtggattaaggtggggagatacaaagagaggatgtgaaggaggctttgaactggggggaaaggcagcaatgaggtgtggctgtagcccaggaatagtcaggggagtagataatttagttaaaatgtctcgacctaataagggagctgggcaggtggggataactaaaaaggagtgcattaaagaatgttgtccaagttggcaccagagttggggagttttaagaggtttagcagcctggccatcaatacccacaacggttatggaggcaagggaaacaggcccttgaaaagaaggtaatgtgaagtgggtagccttcgtattgattaagaaggggacggacttaccctccactgtaagagttacccaaagcgtctgtgatggtccaggaggcttccgaggtgatcaggcaacgtcagtcttcagccactgagccgagaagatctgggaaggagtcagtcagagccttgggccagttagacagtccagtttccagtggggtcccacacagatgggacacggcttaggaggagtcccagttctgtgggcatcccttggcctagtggccagatttccagcacttgaagcaagatcctgggggaggaagtcctgaaggaatgcctgactgctgtggcttaggcgttttgaagtttttgtgtgctggagatatggctggggtttctcacacagcagaggcaagtaattgcaactctttattattgtacaccttgaaggcgcggttaattaggtcctgttgtggggtttgaggactggaagctcatttttggagctttttctaatgtcgggagcggactgggtaataaaatgcatattgagaataaggcggccttccggcccctctgggtctagggcggtaaagcgtctaagggttgctgctaagcgggccatgacctgggctgggttttcgtctttacctcgggtagtttttaattttgtcataattaaaagctttgtgtgctgcctttttaagcccttcaactaggcaggaaatcatgtaatctcgcctagctatacctggggaatctgcctgatagttcctttgggggtcctctcggggaactgctctgatgccttcctggaggcctggctcatgaagccagcggttgtcagcgtgagactgggctagagaaaaaactctttcccgttcatctggggagagggtggaagtcaggatgacatttaagtcactgcaggttaacttgcaggacagagttagatatcggaattcctgtatatatttagtggggtctgatgagaaagagcccaaacactggctgatttgggaaaagtctgatacagaaaaaggcacatgtacccagactatgccttcagctccagccacttctctaagaggaaattgttgggcaggtgggggagagctagtcgcagaacgaaactgtaaagcagaccgggtgtgaggagaggaagtgataaaaggattatagggtgggggagcagtggctgaggaagagttgggacctggctcggcctagcgagaagcagcctggggaggaggggagaggtcagatgggtctgtagaaaagaaggattcaaaggactcagagcttggggtggagactgaaggaacagacaggagagaaagaagaaagatttgggatgagtcacattgggagcagagactagggagggaccaatgtataaaagattgcctggacgtcaggcaccacagaccatttgcccatttttcaacaaaaattatctagatcttgtaggatagacatatcaaaagtgccattctctggccacttggaactactgttgagtttgtattgtggccaagtggtattgcagaagaaaataaggcattaagttttaggtcaggtgtgagttgaagaggttttaagttcttgagaacacaggctaagggagaagaagggggaatggagggcggaaggttgcccatagtgaaggaggtaagtttaaagagaaaggtagagacacggagaaggagggtggggagcagccctaggctgcaatgtgggtgagcagccaaagcaggcatccccgcaactaacttgccaccaagggaatgtcagtgaatgaccaaggcaggcatccccgcggtgatcagacgccaatggagtgtgggtgaataatcaggcaggcgtccccacaatgattaaacaccaagggaaggctgtcttcctgagtccatgactggcgccagagttttgggtccatggataaaatgtgtctactttgtctctactagagaggaaaaagaactggaattagaaagacagggagattgaagggtagtgagaaaggctagataagagagtgaaaagaccgcttacccaatttgaaattggtgagatgttccttgggctggttggtctgaggacccagggtcataggtggatctcttcatggagtgagggtgaggacaggggactggtctcctgaaggagtccctctgacccgggtcttcggcaccagatgtctgtcacatccgcgtgaagagaacaccaaacaggctttgtgtgagcaacaaggctgtttatttcacctgggtgcaggcgggctgaatccaaaaagagagtcagcaaagggtggtgggattatcattagttcttataggttttgggataggcagtggagttaggagcaatgttttgcaggcagggggtggatctcacaaactacattctcaagggtagggagaattacaaagaaccttcttaagggcgggggagattacaaagaaccttcttaagggtgggggagattacaaagtacattgatcagttagggtgggacagaaacaaatcacaatggtggagtgccatcagttaaggctattttcacttcttttgtggatcttcaagtgcttcaggctatctggatgtatacgtgcaggtcacaggggatatgatggcttagcttgggctcagaggcctgacaattattatgaggctagaccatgtgatgtttttacagtgcacttttttttttaacaaagacatttctctaagtgtctaaaccaaactcttccttgatttaaacacccaagagtaacctctgttgtaataactgttttagtcaaaaaaaatcaggtaacacaatacaaaagcaagcagtttaagatctgagatgaactcgcctgtttacactcttggggttccataaggaaaaacagagatttcttcccgaaagggagtctggcaccttctctgttttctttaaggaatctcaggctgttagaaactattttagattcctcatgaagcagagggtggcaagagaaaggagagacagcagaagtaaatgaagaaaacagaattcagttgactaagaagaaaaaaaaaacctttttctcaaaaaaaaaaaagaaagaacaaaagaaaaaaacaaaacaaggtcctaggagagaaaagaaaaccacaaaggccttttaaatacacacacacacacacacacacacacacacacacacacaccttgaatattagcttttaattaagctgacttttaaacattgagctcctttaaaaaaaaatttggctggacgtggtggctcatgcctgtcatcccagcacttagggaggcctaggcaggcagatcatttgaggtcaggagtttgagaccagcctggccaacatggctgggcatggtggctcatgcctgtcatcccagcactttgggaggccgaggccagcggatcacttgaggagtttgagaccagcatggccaacatggtgaaaccccgtctctactaaacatacaaaaattagttgggatggtggcacatgcctgtaatttcagctactcgggaggctgaggcaagagaatcacttgaacccaggaggcagaggttgcagtgagccaagatcatgccactgcactccagcctgggtgacagaaactctgtctcaaaagacaaaacaaaacaaaaaatttaccaagacagttgtaggtaaagaaaggcatatttattagagaaagtattaaaatatgtttcaaaaaagcaatgggcagaattatcagaggtgtgtgaatcagagcaactccatcttgaataggggctgggtaaaatgaagctgagacctactgggctgcattcccagatgatgaaggcattagtcacaggatgagataggaggtcagcacaagatacaggtcataaagaccttgctgataaaacagtttgcgtaaagaagccaaagccggccaaaacccaccaaaaccaagatggacacgagagtgacctctggtcgtcctcactgctatactaccaccagggccatggcagtttaaaaatgccatggcaacatcaagaagttaccctatatggtctaaaaaggggaggcatgaataatccaccccttttttagcatataatcaagaaataaacataaaaatgggcaatcagcagccctcagggctgctctgcctgtggagtagccattctttcttcctttactttgctaataaacttgctttcactttatggactccccctgaattctttcttgcgtgagatccaataaccgtctcttggggtttggattgggacccctttccagtaacagaatcagcaagagaggaagtgactgcaagaaaacaaaggcttgctggagattttataagctggttcttgggctgcagagtgctacatgtagtactgataatgacaaggttgcagaggagctaacttgcaacatttctgtcagccaaggtgtttgatgataaatggaaccatctgataagcaggaagagtgtgagttgtacattatctgcacagataatgtttgtgtcctgggccacaaagaaaggcagacctattatagcttatctgctttatctctttgctttcccctgatctcgccagcttgtccccttttccctaattaggactccacaaagtgagacagaaacaacaaaaacagaaacaaaaaaacaaaacaaaaaacagttaagcaaaacaaacaaatgatcacacaatttatacaattactgagcactctaattataaggagaaattaagactagctggttgttaatcttaactttagccaagacaaaaacccaattcagctacttaccaaggaatggggctcaaactgaagactgctctctaccatcctagaagcgggaaaaagctcaaactcaccctccctcttggaagagggctgaaactccagaagggggttacctgcccaccatcagcatggaagcaggaaaacttgccttccttgttggaagcaagtaaaactccagaaaagttgtacagcaaaataaacattagatctcaaacaaatttgggtagagaccagggattctctggagggaagggagctcccaggcatcagcaaattgttctattggtttgagtcataaggatagctcaagctagtaccaagcaccaaaaggagatttgtcaaagatcaggggcacttccactcagaatcccttcgtggttaccaaactgtgaacccaaaatatctgagtcaggtctcaatcaatttttctagtttattttgccaaagttaaggacacacccataacacagcctcagaaagacttgatgacatgtacccaaggcagttggggtacagcttgattttatacattttagggagacacgagacatcaatcaatatgtgtaagatgtacattggttcagtctggaaagccaggacaacttgaagttgggggagcaggggcttccaggtcataggtagataagaaacaaaagatttcattattttgaatccttgatcagcctttcactgaatacacaatttagtctggctcagtgaatctgcatttttacataaacaatagggctgaggaagcaatcagatatgcatttgtctcagagggatgacttcctgtcccacacctgtgaaaagaagctatcagtttacattgcccgggtgaaattcaacagaactgttttagagtaaagatcttgaggcccacaaaaaattgctgtgggaaaattgtgagggaggtatgtagctttttttttttttttttaatctttgtagctatcttctttacaaacaaaatgagaggcaggttttcctgacacagttcctagcttgactttccccttggattagtgattttgaggtctgacatttatttacctttcacagatctaaaggtggaatttataatttaaagggatgcagatataaaaatttgaaaaatttgtagtctggccatgtaatagaaaaggaaaaagcattttcaggagaggaatccaagggtgctgtggagcaaccatttgcaagagagatgacttgcaagagagcatgactaaaagttaatcatgctgatagttaaggcaatggggaaaagtccccaaaggcacttcagaagataggtagtctctcccatcacaagctaagaggtccaggaggacagaatggtttttggaggacaggctcagggctctgtgccctgtgctgcctagagatgctgctcccacatcccagccactctggctccagccacagctcaaagaacctcaggtgccactcaggatgctgctctggagtgcacaagccataagtcttatcagctatcacatgttgttaagtctgcaggcacccagaatgcaagagtggtggagaactcttggtggcttccacctagatttcagaggatgcatcagaaagcctaggtgtccaggcagaagcctgctgaaggggcagagctaccacagagagcctctgctaaggtaatgacaatcaggaatgtgagattgcagcccccatagagacctgtattagagcaatgcccagtggagctgtggaagcagggccattgtcctccagaccccagaattatagagccactggcagtgtgcaacctcagcctggaaaagctgtaggcattcaacctaacccatgagtacagccacatggactgagcaaagccatgggagtgaggctgcctgaggcctttgaggtccatccctcacaccagtgtgcctaggatgcagatcatgaagtcaaaggagattgttttggaactttaagatttaatgtctgctctgctgggttctggatttgcataaggtccattacacacacacacctatatatataggtgcagtagcacgatcatagttcattctgtctcccaggctggagtccagtggcaccattatagcttactacatcatcaaattcctgagctcaagcaatcctcccacctcattctcctaagtagctgagactacaggcgcacaccaccacacccagctaatttttaaaatgtttgtagagacctgtctcattatgttgcccaggcatgtctccaactccttgcctcaagcgatcctcccacctcagcctcccaaagtgttgtgattacagttgttcagccactatgcctgggcctgttacccctttcttgggccaatttctcccttttggaatgggaacatgtttacccagtgcctgtacaaccattatatcttgtatgtaaataacttgatttttattttaaaggctcatagctttaaggaacttgacttaagtctcaggtgagactttggacttataagttgatgctagaacaagttaagacttttggagactattgggatggaatgattatattttgtatggaaggacatgagatttggaaggccaggggcagcatgcttctttgtcccaaacatccaaatctgtcgctgtttgtgatcctcaattgatttttagtcagcagtcctttactggaacatcctttacccaaacctcatgttgaaatttgatccccagtgttggaggtggggcttaatggtaactgtttggatcctggaggcagatccttcaccaatggcttggtgccatccttgaagtaacacaacttactctattagttcagtgagagctggttattaaaaagagcttggcacctcacttcccccgttgcttcctctctcaccatgtgatctctgcacatgccagctccacttcatcttccaccacagtggaagcagcctgaagctttcaccagaagcagatgctgcagaaccatgagccaaataaacctcttttccttataaatacccagcctcaggtattccttatagcaacactaaataaactaaggcagacattcattataaataaattaatatgatccttccttccttcctctctctctctttttttctttgacagggtcttgctatgtcacctcccacctcagccccctgagtagctgaactacaggcacacactaccacacctggataatcttttaattttttttgtagatacagggtctcactatgttgcccaggctggtaacaaactcctggcctcaagcaatcctctgcctgagcctctcagagtgctgggactataggtgtgagccactgctcccagccaataatataattttttttttttttttttttgagacggagtcttgctctgtcgctcaggctggagtgtaatggcacagtcttggctcactgcaacttccacttcccaggttcaagcaattctcctgactcagcctcccgagtagctgggattacaggcacccacaaccgcacccagctaatttttgtatttttagtagagatgggatttcaccatcctggccagactggtcttgaactcatgacctcatgatccatccaccttggcctcccaaaatgctgggattacaggtgtgagccaccacacctggcccagccagtaatatactttctacattgaattaataaacatctgtgctctttccctaaaattcatttttttttacctgacagatggtgcagacaaacctgtatttttaaagtgcattaaaatattttctattttttcttctttgaaaatctctcccatgatttgaggaagaaaaaaaaaaaaacctcaaagttttcctgtatgtgatcttcaattgattttgagtcagtagtcctttactgaaaagagcaaagaatctcactctaacagatacatgtatgctctgtccagtaacattttatcccctgggtacagagcttacttagactctaacattttagcagtgctctccagattagctcaactacaaaggaaacatttgacccacagacacctgagaagggaaggtgactgaggaatgggtgttgagggactctgctctcctgcaaatattctgaactatcttcaggatccaagatcctatcttaggatccacttaagacctgcacgcatgaagtcattgtaccatggagcacatccttacagggctgccccaaaaatatgcccaacatagaaactaaaactttgctggttatcagcatcactgaggaatagtatttagacttgacaaagtagaggagctgaatctaagaactgtacttaaagccaagcacccaaaagggctatatcacctgttgatgaggtgaagagaaaaatctgcatactggtaacgtgaaccaacaagaaaaccagtctgtccctggtaatagtaagaatagggaggagagaaacatttgagaaatagacaaaaatggcaaaatggggtggaaaggactaataacattaatcattttccctaatcatttataatcatagccctagtctcatgcagttccagcatttgaatgtacaccatactcagagtctgataaaccccaattcaagaaataagtagaaatacagtcctaggttgatagtgttcccagctgggcacagtggcccacgcctgtaatccctatacttcgggaggccgaggtgggcagatcacttgaggtcaggaattcgagaccagcttgggcaacagagtgaaacgctgtctctactaaaaatacaaaaattagctggatgtggtggcaggcacctgtaatcccagcaactcaggaggctgaggcaggagaattgcttgaactcaggaggcagaggctgcagtgagccgagatagcaccaccgcactctagcctgggagacagagggagactctgtctcaaaaaataaaaattaaaaataaataaataaataaataaataaaagatagtgttccctagcacgcagaagaaaccaagacaaatcatctcaacccagacctctcaggattcccaaagttgaagtttaaccaaatatgaattcctaataaaatatcaaacatacaaggaaacagacaaccatgagcagagtcaagagagactacaaactgaaatgtaagacatacacagactgcagatattaaaattaaaaaaatagtatatgaagtaaatacgtttaaagtgttttaactgaaaggcagagataagcagtatgtaaagcagaaagaagggacatttaggtcaacctggaccttcagggtaagttccctgaggatatgatgcttgagttgggctagaaggacaattaagaattagtcaagataggccgggtgcggtgactcacacctgtaatcccagcactttgggaggctgaggtgggcggatcacaaagtcaggagatcgagaccagcctggctaacatggtgaaaccccgtctctattaaaaatacaaaaaaaaattagccgggcgtggtgatgggcgcctgtcgtcccagctacttgggagactgagtcaggagaatggcgtgaacccgggaggcggagcttgcagtgatcgcaccactgcattccaggtcaggcaacagagtgagactccatctcaaaaaaaataaaaataaaaataattagtcaagatataatgccatcaggatatgaaggaaaaaaaagaattaggtggaaaaaagtggtagggcattccataccaagaaatcaaaatcataagcaaagacatggacacactgaacagcatgggggactcagggaaaacttcaagtgtcctctgttactagagtaataaatgcagagcaggaaagagcaagagaagctgaagaagtagcatatcaggagatagagggctttgtataccatacgtaggaagtatggcctcactgaaggactttaaggaggggaataacatgatcagttttgttttatgtagactgctttgttagtagtgagggaaaaggatttaagatgggcaaagctggaggaacagagatcagctaggatcagctacagatcaactgctgcacaggttacaggagaaatgatgagcgtctgaactaccagggtgtctgtaagggtgggaggagaggcagatttgagaaactgcagctaaaattagcaaaagctggtgattacttttgggaaggatgaaggggaagcagcatagaatggctcctgtgtttcttgcttgggtgactaggtgatattaattgatttggggaatacaacaggaagaccacattgggacagatgataatgccctaaataatgaagatgttaggtctgagtacttatggcgaatcaagcttggagatgcttatcaagcaactggatttatgagattgaagctcatatgagaagtcaatgctgaaataattaactacaaaagtggctaattcacctaaggagagacagaagcacagtgatccaagtgtggaattcagggttaggaaataatctgaaattcatgacaagttttataggtttttaaaaaatgctcataagcaaaatataattatgtatagatattaagcaagtcttacagtatcaaaaattggaaaccatctaaaagtaaaaaaaaatagaatggttaattattacagtatatccactttggaaaaatatcatagtcattaaaaatgatgtttaggccaggcgccagtggctcacacctgtaatcccagcacttagggaggccgaggtgtgctgattgcttgagcccaggagtttgagaccagcctggctaacatggaaaaccccgtctctactaaaaatataaaaattaggctgggtgcggtgactcaagcctgtaatcccagcactttgggaggccaaagcagttggatcacctgaggtcaggagttcgagaccagcctgcacaatatggcaaaaccccgtctctactaaaaatacaaaaattagccgggcattgtggcggacacctgtaatcccagctacttgggaggcagagacaggaaagttgtttgaacccaggaggcagaggttgcagtgagctgagatcatgccactgcactccagcctgggtgacaagagcaagactccatctaaaaaacaaacaaagaaaaaaattatccaggcttggtggtgcatgcctgtaataccagctactcaggaggctgaggcaggagaattgcttgaacctgggaggcgaaggttgcagtgagccagaattgagccattgcactccgccctgggcaacagagcaagactctgcctcaaaaaaaaaaaaaaaaaaaatggttaggaagtttacagagtgtagaaaaggtttataataaaatgttaactgctttcctacctttaaaaaacactacgggctggcctcccaacactttgggaggctgaggcaggtggatcacgaggtcaagagtttgagaccagcctggccaagatggtgaaacctcatctctactaaaaatacaaaaattagccaggtgttgccaggcacggtggctcatgcctgtaatcccagcactttgggaggccgaggcgggcagatcatgaggtcgggagttcaagaccagcctgaccaacatgatgaaaccccgtctctactaaaaatacaaaaattagccgggtgtggtgatgcacgcctgtaatcccagctactcaggaggctgaggcaggagaatcgcttgaaccagggaggcggaggttgcagtaagctgagatcgtgctactgcacagcagcaaaaaaaaaaaaaaaaaaaaaaaattagccatgcaaggtggtgggcacctgtaatcccagctacttgggaggctgaagcaggagaatcgcttgaaccctggcgacggaggttgcagtgagccaagatcgcgccactgcactccagccttggcgacagagcaagactctgtctcaaaaataaaataaaataaaataaaataaacactacatatgatttaaacaatataaaaatatgagtaacaaagtccgagcacagtggctcacgtctgtaatcccaacactgtgggaggctgaggcgggcagatcataaggtcaggagttcgagaccagcctggccaatatggtgaaaccccatctctactaaaaatacaaaaaaactagccaggcgtgatggcgcgcccagctattagggaggccgcagcaggagaatcacttgaacgcgggaggcagaggttgcagtgagccgagattgcaccattgcactccatcctgggcaatagagagactccgtctttaaaaaaaaaaaaaaaagagtaacaaggtctggaaataaatacatcaaattgctatagaaacagcaaatatagaaacttgaggttgatgaaattcttccttctacctttccacattttccaaattcactatataatattataataacggagaaaactttaaaacaaacaacatttcctatcacctctatcaggacatagctagagttcctatcaaacacaggacctgacatacaggagcccctcacaaaacgcagtcatgtgccaatacctagatgtgaaggcagctgctgtagaggctcctgccttctagaagcctgcagtctctcctgtctgccagaagcctcaccatggctcggcctccgagatgccatcctgggccggcagggcaggttcagcttctgcccctcgggactcgatctcacctctggccgctgacactctgacccatgcgacttttcggggctcctacttcccattcccaccagcccaccaggggcactgcggcctcacaactccctcatcccctgggaaacaattcccccaggaccgtgggcattatccctccagcggacgtcggccccacaagcccctcacggaagggcggctccgtgagatctcactgtactgaccagtcctgccactgccaggacgctgggcctctcagacactcgatgagaccggtccaactccaggtggcaactggagctgggttgctgccgggcccttaacactacatccctacggagagggcggaacaggagagaggaatagcagaagggaaaggcagaggggagggtggcgaggaagaacccgcgagttccgatggaggctgtggctgcgcgtcgatgctccaccaggacgctggagaggcggcgcgggtcccacaagcccgaaagcccgggaggtggggcgggtcctgcagcggaaatgcctcttgggcgctccgcccgaatctcggttgtgagcttaaatgctcagctctcatatcaaggaagctaaggcgccttcagcctcctgaggagatacccggggaggccgctgctaggaagcctgagagcgcccactgacggccctgccccaagataggctccgtccctgagcagactgggctgggcctctccaaaaccacgctcacagtttgttcattcactgctgagtcctaaccagatactaagcgccagttgctgacgttagagcagtaaactgggtaccaggttcctgccgtctgaaaggacatatttaagccacaagttacaacgtagtgtggaaagcgctgtgtgggggttggggaagcagtgataagggcactcatcccggcttgggagtcaagggaggtctccagtggggcaccagccacagtagcaggacagaagcagatcggatgtaatggtttttaatgataaaaagttaccatctgatgtcttctggttcctctgagacctgctggctgctgggggtggaggggaaaagaagttgaggaggccgtgatcttggacttcccagcctccagaattatgagaaataaatgcttgttgtttaagccagaaaaaaaaaaaaaagaaagaagaaaaaagattaaatgagataataaatgttagagtataaatgtgttccacatcactgaggagcaaaaaaaaaaacaacacattatttaatttttctaaattaaattaactcgggctcaaaaccccatttactagggtggaaagacaaccaacatcaaccatttattggggcccatttccctctttagcatgttgtacattgacaaaaaaaaaaaaaacttagaaaagagcctctgggccaggtgtagtggctcaggcctgtaatccctgaactttgggaggctgaggcgggaggatcacttgagcccaggagttggagaccagcctgggcaacatagaaagaccccatttctaaaaaatacaaaaataaaataaagaaagagagaaaaaaaaaagagactctggtcttcagtctgtcatggttgctcctgggatgaccattgtctaaatccatatggtccattcaaaggcaggcagattcatagcatctctgccaagtatgcacaccagatctctgcagctcccaagacagagtgctagatgcttagttccaaagccattaaatcagcactccctatcagaagtcatggccaggcatggtgtcctcacgcctataatcccagcactctgggaggctgaggtgggcggatcacctgaggtcagaagttcgagaccagcctggacaacatggtgaaatgccatctctaataaaaatacaaaaattagccaggcatgttggcaggcacctgtaatcccagatacttgggaggctgaagcaggagaatcgcttgaacctggtgggtgaagtttgcaatgagctgagattgccccactgttctacaactttatccaggttctgtgtggaggggaatttaatttagctgggtggttttttttttttggtttggaaacacaaagccactaacaatcccatgagacaggacaggtgtggtggctcatgcttgtaatctcaacactgggaggccaaggcaggtggatcgattaagcccaggagttcgagaccagcctgggcaacattgcaaaacactgtctctacaaaaaaatacaaaaattagccaggtgtggtgtgtgtgtgcctgcagtcccagctacttgggaggctgagatgggagaatcacttgagcctggggggtcaagcatgcagtgggctgagatcatgccactgcattccaccctgggtgacaaagtgagaccctgtcccaaaaaaacaaacaagcaatcacatgagacaagaaatccagtattcctggaagaaaattaagccaagttatctttttatcctactagtcatcccatctggcaaggagtaggagacagaaactggtaaattatcttgccataatgtaaataaacaagcacagaataagtgttgagtattaccttctctgtcttccatcaggactcaatttaccttcttcaactagtggttgcaaattcaaataccacgcagataatataaattagtaaaaataaacaagtggaagaaaacaaaatcataggcacaatgatcaacagcaacgagcccttagtcttggcaataaacttttttttttttttctttaagagacatgatttcactctgttgccctgactggagtgcagtggcatgatcatagctcactgcagccttgaactcctggtctcaagcaatcctcttgccttggccttccaaagtgctgggattacaggtgtgagtagtcaccatacccagtcttggcatttactctaagaacagggtgagaactgcagtgaactggagagcacaagttcattccaaagggagcaattgctacttagctccaaatagcctttactttgtgggaatataagtccagtgttgccagattttaagttggaaatattatgtacgatctactgatttacaatattggctactcattaaagttttttttaaaaaaaaacaccgttggctgccgggcgcggtggctcacacctgtaatcacagcactttgggaggctgaggcaggcagatcacgaggtcaggagattgagaccatcctggctaacacagtgaaaccccgtctctactaaaaatacaaaaaatcagccaggtgcggtggcaggcacctgtagtcccagctactcaggaggctgaggcaggaaaatggcatgaacccaggaggcggagcttgcagtgagccaagatcgcgccactgcactccagcctgggcaatagagcgagactccatctcaaaaaaaacaaaacaaaacaaaaaaaaccaccgttggtcacagttaaaaagcactgtctgggccaaatgttacacataagtaggtcatctttatgcccttcaatggtttcagctgctacatatatgctgctagaggtcaaatctacatcccccccatagactgctctcccaagcttcagatccatgtatctgtcccttgcctagctttaccttgaggtgacaccagaacctcaaattcaaatatctaaaatggaacccatcaccgccccccaaccaccataacttggttcccaggtctttgtttcttatctcagtgaaactgcaccaacaaacatccagtttcccaagtcagaaatcttggagtcaccctcaatttcctctctcccccaacctatcctattggtaaacaagtctaatcaattttatctctggagttctacttgaatccatatttcccatgcccaccatcactgacatggttcaggcctcactttagtttttatttaactaaagcaagactcacctaacctcttgccttttgtgtctttaccctcactagaatgttatttccgagacacaaacttcatcttgtcacttccctgtttaaaacttttcaatggtttcacattgaaaagtgacagagttccaacttcttagcctggtgttcagggactttgtgatcttgtctttctaggttcatctcctaccacttccccaacctccatccaaaactacagccacactgaaataccttcaatttccataatggggcatagtttctctgccctagcacatttacacaggctgttcctactgcctggattgtccttctctcactccctacactacatcctcactttcttggttcctcaaataaagcattaatcatctcctctgggaagcacccctcaccatcaacctccttcttcagactggtgggaatctgttctctggccccataaaactctgtgcgcatctctattttcattacctgttacttcactgatcccccaatgaaatgggacctagtttagtgcaaagactctatcttacttctgcagtttaaagactgagcacaatacctggtccataacaggcattcaacaaatgttacatgaatcaatcaatcaatctagttcaactcatggtaccaatggagaaacctctcttcggtttctcaagatcatgtggtggatcagtgatggagctagagaacccaagtctcctcactttcagctcagcacactttccaccagaacaaatcagcttttaatgaggacagggattgaagcgtggccctgaaaggaagggccgacatggaacaaagtggtggttttagggggaaatggaggaaatgagaatggcaaagcacatttatttgtcatccttaacatgaatgcttcacagttcacagctgacacgagcataaaaaagaggggatagaccccaaccattaaagacagaatgaagcttataattagaaaccttaaatagaaatttaatacagcatacattatattattctaagcatatatatttattcatttaatccttgttagaaatgcttgttccccagtgccgtgaagaaatagcacttgaacataaatttaatttcctcagcaaggctatttttactttctgcagaaacggtacactcaccagcagttttgccatgaagagtacaccgaacaaaggaggcagggtcatttatagcctgacgcatccaccctactgctgtgtccggtttccattggctggaacaggacctcgctttctgtatttgtcctgattggctaacaacttagaactttttaaaaagaggcaaaggcagagaacaaaggaaggaggaagttaacttgtggaatgctgagaaaggtaaaaacaccttcaaataaggaagaggaacaggctatgacctaatgcttgcttggaccaatataagcatgccagggcaaatatttaggctaaattgtggaagctaagaacataaagtaaattgatttattacggctagcagatatttaagaatgttaacagaggtctttgaataaattttgcttctaagagatgttactatttattcctaataagatggagaggaaagtctttgaagaggaacctctactttactttttacatcctcaaaacaaccctgtgtagtaagtaataatattattgtgctgggtagagtggcccatgcctgtaatcccagctactcagaggctgagatggaaggctctcttgagctcaggaggtcaagaccagccggggcaatacaatgagaccttgcctctaagaataatatgccaggcaagatggttcacgcctataatcccaccactttgggaggccaaggcgggaggatccctagagctcaggagtcgagaccagcctgggcaatatagagagatcctgtctctacaaaaataaaaaatataaaaattagctgggcacggtggcacatgcctgtggtcccagctactcaggaggctgaggcaggaggagcacttcagcccaggaggttgaggctgcagtgagtcgtgatcacaccactgcactccagcctgggtgacacagtgagattctgtctcaaaataataacaataaatatctataaaataaagataatgatatctttattttatagataagaaaaatgaggcactgaaaaaattaagtagtttgagttttcacaggtaggaaaatgacagagctatgatttgaataaggcagttcggtgctagaatccatgtacttaaccacaatgcctgaagcataattctgaactgggcaatcaaaaggggatcacccacatttcactgtgtgaagcatgaattgcctgatagaggaaattttttttggttctaaattcagggagaaggctgttaagcccaggcctctgtgggggatgggagttctttgttctgtgatgcaatgatgacctcagggtaaactgccagaaggctaagggaaatggaatggctgctggaggacctgcttggggctaagggggatatggggcttctctggggccaactgacccatgccctagcctgcagacactgcggcagcagctgcttccagagtccaggaaatctggtgacactattcttattcgtggtttggcagattcagagatggtggcagcttgggaggttgcgacagcttcatccctggtgctctgggaatatggtgcaaggcaaggtgggtgacctgtgactgtacagctggatgaatgactgctgacaccacatgtgaggtcattggtatgaatgtgggcccaggtgagtgactataagccctagatgtgaggctgggtgagtaaccactgacactagatttgaagccaggtgagtgaccatggattctagatgtagaatgagggaatactgatctccaaatgaggactgggtaatgaccattaacactagatgaggagctgtgtaggtgactggccacacacgtgggattaggtgagtaactgtccactctggatatggagcagactgagtgcctcatagcaaaccttgtgtatctgaaaaggcttcatgcctgagaatatctttatctacttcccaggaactaccacttctgcaccgtgtggccttccttgatcacctgtgtaagcagaaatcagaagtggaggaagaaggggaagaagaggaagagggggaagacgaggcatctctggatccactgaagccatgttctcctaccaaagaagctcccactggagagcaagccactccagccccaccccagccatcctgtggttctgagggcctcctcaaggctatagggataccagagcaaacagtcatgcagcccgtgagcccttccagatccttccccatcttccagattctgaccagctttcctgtgaggcacaagatagcatcagggaaccgccagcagcagagaaaaagccagctcttctggggtctcccctctctgcacagcgagtccttggaggccatcttcctgagctcaggtggcccctctcctctgaagttgtctgtttgttcttctgtcttcttcaacaagcttgccttcctacctaggtccaacctgttgcttccccagtatcactcctcagcccagttttctacccatggggcccatactatggaagatctagaagggatggcccccgatcctcagctgcttccacctccatcttctccttctgtctcatcactactcctccatctgaggcccttccctgtggaccacaagggagttttatctggcgctgaggcacccacacagtcccctggaactagccccctggaagttctccctggatatgagactcatttggaaaccacaggacacaaaaagatgccccaagcttttgagcctccgatgccacccccctgccaatccccagcttctctgtcagaacccagaaaagttagccctgaaggaggacttgctatatctaaggacttctggggaaccgtgggatacagagagaaacctcaggcctctgagtcttcaatgccagtcccttgccctcccctagactccctgccagaactccagagagagagttccctggaagatccatccagatataagccccagtgggaatgcagagaaaactcaggaaacctctgggcttttgagtctccagtcttggacctcaacccagagctctctggaaccagccctgaatgtgtcccaccagcatctgagacaccatggaagggcatgcaaagtagagaaaatatttgggtccctgcagacccagtttcacctcccagccttccctcagtccctctcctggagtctctagtaatgggcccccagggagtcctgtctgaatccaaagctttgtgggagaccatggggcagaaagagaacctctgggcatctgattccccagaccctgttcatagcacacctccaaccacccttatggaaccacacagaatcaatcctggggaatgcctcgctacatcagaagctacatggaaggatactgagcattccaggaattcctcggcttctaggtctccatctctggccctcagcccacccccagctcttgcaccggagctgctcagagttagatccatgggggtcctgtctgattctgaagctagatgtggggacatacaaaagacaaaaaactcctgggcctctaagcacccagcttgtaacttaccccaagacctgcatggagccagccctctgggagtcttgtctgattctcagtctattgtaggggaaatggagcaaaaagaaaactgtgttcctgtgttcccaggtaggggctccagcccatcctcaaactctgtttcaaagtcccacgtaagtgagcctatcgcagaccaaagcaactataagcctgacggggaggcagtggagcaaagaaagaaccactgggccactgagctcccagcccccagctcactctctactcctctaccagagccacacattgaccttgaacttgtgtggagaaatgtgcaacaaagagaagttccccaaggccccagccctctggcagtggatcccctacacccagtaccccagcctcccaccctagctgaagctgtgaagattgaacgcactcatcctggtctacccaagggagtaacgtgcccaggggttaaggcagaggccccactctcccagagatggactgtcccagagttgctcacccatcctgggatccatgcctggcagtggagtagagagctgaaactcaggctgaagaaactgcggcagagccctgcctccagagcccctggcccaagtcaatcattttgcagctcccctattctgagctccacaattccagacttctggggactcccttcctgcccaccacagcagatttatccccccaatccatgcccccactcttcaagttgtcatcctcaagaagttcagcgcacagtacctcagcctgtccagtcctcccactgtcatcacttccaatcctcttcccagcttcagccacaggagtctggcagggcggaacaagggtctcagagaggggagaaaatgaaggggaagatggtgagccaggtcccatcccaagggccatgtgtacacatggaggctggtgtggactatctatctccaggcccaggagaaccctcaaactctaaggttctggtctcaggcaagagaaaggacaaggcttcagcctcatcctcagccaaaaagagagagcaccctaggaaacccaaagcaggagaccatagaagagggactgcaaggttggggttatccacagtcacagggaagaaccaccctgcccaggccagaagcctagtagaggcccctgtaagcacatttccccaaaggtctcaacacaggggccagagctctcaacacactgctcttccccagctgcttctccccaaagcttcgggtccccaggatcagccagaggcagggcgaagagcaagtgacatcctgacccctcgccactgtaagcactgtccttgggcccacatggagaagtatctctccttccctaccctcaaggcttcccttaccaggggtttgcaaaaggtgttagccaaatgcctggataaccatcgacccctacccaccaaatctagtcagtagagaaaaggctggtaatactagcacttggtatgccaagacctgaagccaaaccagggggaaggtggggatgtggagacaagaaatggaaattctaataaactagctgaattagataaatcccattcatgtcttctttggaatctagggtactgaaaatgtcaattcccaattctgctacagccatagcccctcagtttcaagtcccagtagagcactcaggattctgcaggcttaactcttttgtggatcttcacagatgatcacatctggagtccacacatccctactctatagggtgaggctacagggccaggtcagcatagcccaaagctgcccttgagagggaacgacttcacagcatgtgaacaaaaaactacatccattcacacgagcacaggtcatctgagtctaggcaactgtgcttggtcctgggtattgttctcttcttcatccacttgacctgtaagttctccacgtatctttctgaccatttcttctcagccctctgctcttttctctccctgggtcagctcatccatctccaaggccatgaaaacaagtgtcttttaatacgtctagtaaccgtctggatttctataatcaccgggtcatatcctctacccattttctaatgcactatttgttggacattgtattagtcaatgtattacagttttctactgctgctgtaacaaattaccacaaaacaaatttattttgtcagaagtctgacacggagcctgggtgcagtggctcacatctgtaatcccaacactttgggaggctgagatgggctgatagcatgagcccagaagtttgagaccagcctgggcaacatgacaaaaccctgtctctacaaaaaaaaaaaaaaaaaaaaaaaccacaaaaattagctgggcatggtggtgcatgcctatagtcccagctactgggcaaggtgaggtgggaggatcacctgaaccagagaggtcaaggctacagtgagccactgcaccactacatgccagcctgggcaaaagagaccctgtctcctccccgcaaaaaaagtctgacacatgtctcacagggctaaaatcaaggggttggcaggcctacatccttttctctaggctctgggtaggattcactccttgcctttcccagtttctagaggctgcccacattccttggttactgacccccttcttctatctttaaagctagcaaaggcaagtcaagttcttctcacattgtatcactctgacctcttctgcctccctcttccacttttttttttttttttttttttgagatggagtctcgctctgtctcccaggctggagtgcagtggcacgaactcggctcactgcaagctccgcctcccaggttttatgccgttctcctgcctcagcctcccgagtagctgggactacaggtgtgcaccacctacgccgggctaatttttttgtatttttagtagagacagggtttcaccatgttagccaggatggtctcgaactcctaacctcgtgatccgcccgccttggcctcccaaagtgctgggattacaggcgtgagccattttttttttttttttttttgagacagagtttcactcttatcacccacgctggagtgcaatggcacaatctcggctcactgcaacctctgcctcctgtgttcaagtgattctcctgcctcagcctcctgagtagcttggattacaggcatgcgccaccacgcctggctaattttgtatttttaatagagatggagtttctccatgttggtcaggctggtctcaaactcctgacctcaagtgatccacccgcctcggcctcccaaaaagtgctgggattacagacatgaaccactgcgcccgaccctacctcttccacttttaaggacccttatgattacactggacaaagctgaataatccaggacacccttccaatttaaagtcagttgatagccaggcgcagcagtggctcatgccttaacagtcccagcatttcaggaggccagggcagctggatcgtttgcggccaggagttcaagaccagtctggccaatatggcaaaaccccatctctactaaaaatacaaaaattagcctggcatggtatgtgtgcctgtaatcccagctactccggaggttgaggcaggagaatcgcttgaacccaggaggcggaggttgccaagatcatgtcactgcactccagccttgacgacagagcaagaccctgtctctaaataaataaatgaagtcagttgattagcaaccttaattccacctggaaccttaatgcccctttttccatgtgaaataatatatacataggttccaaggattacgacgtgggcatcttgagggccatgatcctgcctacagagatagtgacccaaactattatgtatgttccaaatattttcttccaatttgtatcttattggctaattttatggtgacttctattgtatcaaagaaaaatttttttatgtagttaaatctaccaacactttacttcatgacttctaaaacattttctcctggcactttgataattttgcatatttatgttttagattaccgatttttatggtatgaggtgataatctaaccttccccaaaatcatgtccaatttaccaataccattttttaaaaatagaatgtcttgagcccattccattaaatatggtgtattgtaaaaacatgagtcatttctaagcatctctaggcttcaggtccccatattcaacagcataccagacattatctcatatttgacttgtccaaaaacgtattttccctttaactttttcctccaacacgcccattcctatcaaaatgcatgacatccacctaaatacttaagctttgactcttccttcctccctgatctaagccatcaccaaatcttgtcagccaggctcagtggctcatgcgtgtaatcccagcactttggcaggccgaggtaggaggatcatttgaggtcaggagatcgataccagcctgggtggtaccccatctctactaaaaacacaaaaattagccgggtgtggtggtgtgcacctgtaatcccagctacttgggaggctgaggcagaagaattgtttgaaccaggaggcggaggttgcagtgagctgagatcatgccactgcactccagcctgggcaatagagcaagactccatctcaaaaaaacaaaacaaaacaaaacaaaacttgtcaattatacctatgaaatgtatttcaaatccatcttcccctctccatttccaccatcactattgtcttagtcattatttctcactaaattggttgctctattccttctaatccatcctgcacatggctacaattctctggagatcaactgccccgatctcttcaacaagtgtcataaaagtttgagtaaaaggctaggggtggtggtacatacttataagcccagctacttgggaggctgaggcaggagaatcccttgagcccaggatgtagtgtgccatgacgattgggaaccgaatgatgctaagtttggcatcaataatggtgaccttccagaagtgggggaccaccagtgcctaagaaggggtgaactggcccaggtgggaaacacagtagataaaattcctgcacagatcagtagcgatatagcacccgtaaatagccactacactcttagcctgagcaacagaacgaaaccctgtctcttatttttcaaagtttgaataaaggaatctaacagatgccaacttgtggacctaggttagatattggtttggtccaaatagctgtgaatgatatttgggtcgcttgggggaaactccgaatatggtatgggtatctagtttggttcttgacctctagaattttgcttttagggacagggtcatgctctgtcacccaggctagggtgcagtggtgtaatcacagctcactgcagcctctaactcctgggcttaagtgatcctcctgcctcagcctcctgagtagctaggactacagctgtgtaccaccatgcccagcaaacttttttttttattttttgtagaaatgaggactcactcttgttgcccagactggtctcaaactcccggcctcaaccaatcctcctgtctcgacctctcaaagtgctgggattataggcatgagccaccatcaccacgctcaaccaagaacatttacataaagggaaaggtaaagatactgaccaaggccgggcacggtggctcacatctgtaatcccagcactttgggaggccgaggcggtggtggatcacgaggtcagcagatcgagaccatcctggctaacatggtgaaaccctgtctctaccaaaaatacaaaaaaattagccgggcttggtggtgggtgcctgtagtcccagctactagggaggctgaggcaggagaatggcgtgaacccaagaggtggagcttgcagtgagccgagatctcaccactggactctagcctgggcaacacagcaagactccatctcaaaaaaaaaaaaaaaaagatactgaccaaaacgaaaaagttataatgcagtatgatctcaatttgggtttaaaaataccacatgtatagacacgtacacatacacaaaaaagatccagaaacatatgcactaaagttattaaaacagtgatgacctctggttattggaaatatttttttaattttgcttatatttttaccaatttctttcttagacagggtctcattctgtcacccaggctgaagtgcagtggtaagatcactgttcactgtggcctctacctcctgagctcaagtgatcttcctacctcagcctcccaagtagctaggactaccagcacacacaaccatacccagctaatttttgtattttttgtagagatgaggtcttaccaagttgcccagtctggtctcaaactcccaagctaaagcgatctgcttgccttggcctcccaaaatgctgggattaccagtgtgagccaccacgccctggcctatttttctaaatttctacaatgcacattactgcttctataaaaataaaaggttatttaatgtaaagtgtctacgcataaccacgtacatgtgattgacaatattgtactgtacacttggaaaccgttggatgaattatttggatttttttttttttgccacaagaaataaattgaattatttaacgctgaagcctatgtcactttcttgcctgaatcctccagatgacccacacctgtaagaaagttcagtcctggcatttgagggtcttcacaacatggttcctgatctctccaaatttaccccaggactcttgttgctagtctaactttaagctttatgagcaagtgctgtactttctgacctgtgcctcaaactgttctcctccacttctccacatcaagtttcccaccttcctttaaggcccagaaaccgtattttacatggcattgccttccttgcagccccattaacactgtgtgccttgttgatagcttctgtttcctgatagtaaggctttaacatgaggttctctgaggtcaagctcaaattctcaatccagtgctctttccactctatcatattccctctactctgtatatttggttgagaatcagccagtcagaaggtacatgctgcttccttgattcctctcactagtgtcactgttctgttccaaagctttatttagctcaaacctgtcaacagggtctgagtccaaaactcaccacctgctggccaagggtggaactaaaggtacttttccctctcccactactatggtctccaaagacaatgcaattctgaatttccattttacatgggaacgtgagttcacacttatctgagtagctttataaaaaaaaaaatccaaatcctatattaagtattttaaagctcctagtgggttgtggggctgagcaagggttagcaaaccatttgacacttgccacagttcagctgaaatggaagacctgcatccttcacgggcattgtgtccactgaactttcaggggaatttgtaggatcagtaccttagatcgatctatctagatatatatagatagatcgattttttttttttttttttgagacggagtctccatctgtcgcccaggctcactgcaagctccgcctcccgggttcatgccattctcctgcctcagcctcccgagtagctgggactacaggtgcctgccaccacccagctaattttttgtatttttagtgtagacggggtttcactgtgttagccaggatggtctcgatcttctgacctcgtgatccacccgcctcagcctcccaaagtgctgggattacagacgtgagccaccgcgcctggccaaatataaacatagtttaagacattagatatgttgttccatctttgtttttgcctctatggcatactgctggtcctctatttgataccacattcttggtctgaaacccaacctctaatcgcagtgtttaccctatataaagtgatcagctacggtaagatcacattccagtttctttctaggtataatgtgaggggaaagatggactgcctatacaatttgcctcttggtttaagtatgcaggcttccacagtttagaaagcatttttcaatcattttgtcagactaagaaacttgaggccccaaaagagctatcaccttgttcacagctatacaggtataactggcaactcacatgtagaagaatgaaactggatcctcatctcttaccttatacaaaaatcaactcgaggcctggtgcagcagctcatgcctgaaatcccagcactttgggaggctgaggtgggtggatcatctgaggtcaggagtttgagaccagcctggccaacatgggtgaaaccccatctctactaaaaatacaaaaattagccagaggtgtggtggtgcatgcctgcaatcccagctacttgggaggcttgaagcaggagaatcacttgagcccgggaggcagaagttgcgctgagctgagatggagtactctgaggctgggcaacaaagggagactccgtctcaaaaaaaaaaaaaaatcaactccagatggttcaaagacttaagtctaaaacctgaaaccataaaaattctagaatatcagaaaaacccttctagacattggcttaagcaaagacttcatgacccaagaacccaaaagtaaatgcaacaaaaacaaagataaatagatgggacttaattaaaaagcttctgcacagcaaaagaaacagtcagcagagtaaaaagacaacccatggagtgggagaaaatctttgcaacctatacacccaacaaaagactaacatccaggatctacaaggaactgaaacaaatcagcaagaaaaaaacagtcccatcaaaaagtgctctaaggacatgaatagacaattctcaaaagaagatatacaaatggccaacaaacatattaaaaaatgctcaacatcaccaacgatcacggaaatgcaaatcaaacccacaatgtgataacaccttactcctgtaagaatggccataatcaaaaaatcaaaaaataaaagatgttggcgtggatgtggtgatcaggaacactttacactgctggtgggaatgtaaactagtacaaccactatggaaaacagtgtggagattccttaaagaactaaaagtagcactaccatttgatccagcagtcccactactggatatctacccagaggaaaagaaatcattatatgaaaaagatacttgtaaacgcacgtttatagcagcacaatttgcaactgcaaaactaatggaaccagcccgaatgcccatcaatgagtggataaataaattgaattgtggtatacctgaggtcaggagttcaagactagcctggccaatatggtgaagccccatctctactaaaaatacaaaaactagctgggcgtggtggcgtgtgcctgtaatcccagctacatgggaggctgaggcaggaggacggcttgaactagggaggcagaggttgcagtgagctgagattatgccactgcactccagcctgggagacaacgggagactccatctcaaaaaaaaaaaaaaaaagaaagaaattgtggtatatatacatccagggaatactactcagccataagaaggaacgaaataatggcatttgcagcaactggaataccattattctaagtgaactcactcaggaatggaaaaccaaacatcatacgttctcactcgtacatgggagctaagctatgagaatgcaaaggcgtaagaatgatacaacggactctggggactcagggaaaaggtgggggggcggtgagggataaaagactacacattgggtacggtgtacaccgctcagatgacaggtgcaccaaaatcttagaaatcaccactaaagaacttattcatgtaaccaaccaccacctgttccctaaaaacctcctgaaataacaaataccaaaagtgcaaaaatacccatttcacagcatgagttccagagctgctccagtttagtcaaccagtgtaagtatcatgcatccttgaagattatctatgtagaccaaaacggagcctggtcttgcctagcataaagtctaggatgactaataccagtgttgatcataatcctgaaggacacaatcccaaacaccataaccccaaatgttgaagtcccaaaagatcaaaatccttaaaatcacaacctggacaaaataaaatttcaaattctggggaaaggattagtatgtttttcattgtaaacaagacagttgcatcatgttatacagaagtattaccttgttattgtcttaagtatggtttagacacataagggtgccaagttgccaatgagcagaattgtggacttaattttaggtgtcaattttactggattaaggagtatttagaaacctggtaaagcattatctgggtgtgtctgtgaggttgtttccggggattagtttgtaagtctgagtggactgagtggggaagatctgccttcaatgttggtgggtaccatccaacaggcgggggcccagagagaacaaatacagaaggcaaattggtctctaagaggtaggatagatttttcttcttttttaagattgagttttgctcttgttgcccaggctggagtgcaatggctccatctcagctcacgacaacctccgcctcccgggttcaagctattctctgcctcagcctcccaagtagctgggagtacaggcaagcgccaccacgcctggctaattttgtatttgtagtagagatggggtttctccattttggtcaggctggtcttgagctcccgacctcaggtgatctgcccgcctcagcatcccaaagtgctgggattacaggcatgagccaccatgcccagcctaggacagatttttcttctggtgccttggacattaaaaatttgactccatgaccgcaatgttgactctgtgtgtaagcattatatgtgtgcataaaaatgttgaaagttcctcaataaacgaagagacatctgttttttgtacacgtgcatttgtgaaggataaaatttctcaagacctcgtctctttgggagacaatgcagtggtaacgcaacagtttttgaaccatctcatcaagacttaggttttctgtcacagtattacagatgaccagttatataaagctaggtgcccacaattaccaagcatagtgacaaagcatttatacatttcactttttgacctatttctttatgaatgtttcatctgctcatcaccgttatatccgtgcaactgtcattggtatacctgagtgtttatcttgcaaaaatgttactattccctattttatcgtgcagtggcctatgaaacgttctgttgtgttgtttctcaaataaatacgcttttaaaaatgtaagtaaattttcgaagaatgtttagtatttcttccagaattgtattttgggattttgaccttttgggattgtgattttcagaattttagactttagggattttgatctttggagattacagtattttattcaaaattacggtgttcaggactgtcttttgagattatgtcccaaagccaatcaacatatatttaatttagtaatttattttctctgcactactctctctctgggtaaggcatcactgtactgaccctagaagcactaagtgattactgttgaagaggatagtctattttctgtttggaaaaaaaaaaaaattcaatactaaaattttatattaacaaaaagttttttttttttaatcaaagtacataaaataaaggtggacacaactgtaagtgatcaccaaccaggggatgtttgggatttttagatgcattaaaagagagtatagagaatatccacctgcaagtaagattgtattcttttgcaaccctgcgattttcaaatggcaccccaacacagtctttggtcaggataagggatcctgcaggcctagccttaccgtccacatcaaatataggtggagggatgccatattctccacatttggagctctgtcaggctgctccctttccaccagtcctatccagtgatactgcagacaaagggtgaggcaacaggagacatcataccgatgttgatcaggagaggaagaaggtgcaatcttacttccaggatttcacatttggaagaatgccttgggagtggtgggtagcccaaggctgttcccaggaaaagaagcaggcacagggcccaggactcaggctccattttgacccaacgtttattgtccttttacaacatgtcattttttggtttagaaactgcttgtgattagttttccaacattaactcaaaagcatgtaaaataaatcaacctactctctatataaacatccagcaactgtggcccctacccacctacccaggttggatagggggaagggagggctcgggcagcattgagtcaagtgcagatgctttactgtggcaggtggcagtagtgccttggttcacaccccacacaggtcccctgcactgccccaaactacaacagaaatggcataggcccaaggcccaattccctgttggtaattcactctccgcctaccaaatgaaaatcgcttttattttatcgcttttgttttgtatttttgcaacagaaaccccctgtccagagtcagactgtagctgaactgttcagactggagaatggagcaggctgtgggcgcacccctggtccctctcctgggcaagcgcccccacccccagggaacaaggtccaggcaggccagctcactgcacgctggccaccaccacttagccatacaggtcatcatcattgtcttctgtgtatacactgccacctgtgccgcctccactgccctgactggggccagctccaccctggttccctgaagggaatctgtgtacaagagcaaagccaaaaaagagggttaggacagggcctgtgtaagatttccacaactacccctctagcttccttaggactcccatcccttttggtgtaggtccccaaagtaacttaagcactgtctaatgctcccaaccaacttacctgaagctgccaaagccccgactctgctgaagggtctgggcaaacatctcatacttccgaatgtcattgtcactgacagaacggcgcgcaaagcgcatggcttcttcaaagtgatctcgacggatctcaggcactggatcatcctcttctacctcctatagttggtaaacacagatcactagggctagttaaagcccagcctggatttcatcccaggcctcccattactgcagtttattggtctccttgcccttccaatccaacctgaggtaagatgctaggccatgcttcctaaaattgagtcactgctctgcttaaaaacttgtcaatgcactctggaaaagggaaaactgtagggacagaaatcacatcagtgatggggcttaaggaggggagatgttgactgaagtggctaaggaaactttttgagatagtagaaattttaagtctcaactgtggtagtagttatagaacttacacacacttgtcataaagcatggaaatggtatatagaaagagtgaattttattgtatttatatcataccttaataaaccttaatactttaaaaggaaatgccaatggctttcagtgcttaccacatttggattacatcctacctagcggtctcacttccagtgacatatatactcttaaatctacccagggtttcccaatgattgcaatcctactactagagcacattatttgggctgcttattccctttattcaaattctactctcttcacagcccagctcaaaacctatctcttccattgagaggccaatttctgtgacttatgtgactacctcctaggattagttcatcagtagttgttaagcttttatgggagagagaagggatgtcacagacccttcaaaagggaaagaaagccatttatttgctcattaagtcccatgtttggaacttaatgaattaattaagggtaacacaagacatagtggaaaacaagtgagatgacagagatcttacctttatggaacttacaaacacatgaatttgccttttcattttgggaggtctgtggaccctatcccttccccaaccatcagggataagtatatgagtctcatctcagctcaaaaccttgctctgtggttcacgcctgtaatcccagcactttgggaggccgaggtgggcacatcacaaggtcaggagatcgagaccatcctggctaacgtggtgaaaccacgtttctactaaaaaaaaaatacaaaaaactagccggacatggtggcatgtgcctgtagtcccagctactcgggaggctgaggcaggagaatcgcttgaacctgggaggcagaagttgcagtgagccaagatcgtgccactgcactccagtctgggcaacagagtgagacttcgtctcaaaaaaaaaacaaaaaacaaaaaacaaaaaaaaccttgctgtgtttgctgcactctcatactttgatttccctcatggagcttggttcagactgagaatggagcctgaccatctcttctcggccttattccaaattgaatggattcacctcagcattctttatctttgatgccctattaaaattcttctcagttagatgatctttccaacagcttctactctcaactccagggcatggtggtggctgctgcctggctctccatgattggcacatctggggaaaggatgcagactcaccatggctgatgggtttgtctgcctctctcgttctcgcctaatctcactctcgatggattcacggatggccagcttgcaagcacgctggcaaatctctgtcaggtcagctccagagaagccattagtcattttagccaggaactccaagtccacatcctaaaagcagcagcagaggtaccttagcatttagcctctcctctcgagatacgcagatctttgggctacccgagcactcccaactacagtttgccccttctttggccaccccattttattcctgattctagattatcttgatatcctcaaaaattctaccttccctttagaccaaccctaaccccagtggaatcttgtccagaaactaaagagcactccgtaccagcctgaggactcatgcaagtctcccacagcccatgatcttgcacctgccttggcaactggggacttgcgcaggttagccttgaggatggcaacacgggacttctcatcaggaagtgggatgtagatgagctgatcaagacggccaggtctgaggatggcaggatcaatgatgtcaggccggttggtagcgccaatgatgaacacatttttttttgtggacatgccatccatttctgtcaggatctggttgatgactcggtcagcagccccaccaccatctccaatgttacctccacgagccttggcaatcgaatccagctcatcaaagaatagcacacagggggcagcttggcgggcctgtaggaggaatggattgattcaagcactaacaaaactagatgtctctaggcaaacgtggtggctcacacctgtattcccagcactttgggaggccaaggtgggaggatcacttgaggccagaaatccgaaaccagcatgggcaacatactgagactttgtctctacaaaaaataaaaaattagccagatgtggtgacgcatgcctatagtcccagctactcaggaggctgaagtaggagaattgcttaagcccaggtttcaaggttacagtgagccatgactgtaccactgccctccaacctgggcaacagagccagaccctgtctcgagagagagagagaaaaaaaaaataacactaggtctctcagacctcagaaagaaaatcaagtgacttactgtgcagttgagcagccagcactaagaatatttcaaccctcttaaagaaaaacagcctctattccttgccctcaggcaaatcaatacatagttcagcctattgcagctcaccttgtcaaagatttctctgacattggcctcagactccccaaaccacatggtgagcagctcaggacccttgatggagatgaagttggcctggcattcattagcaatggctttggccaacaaagttttcccacagccaggaggtccatagaacagaactcccttggaaggtgtcatgccaaacttcaggaatttgtctgggtgctccacaggatactaggaggaaaaggaaagagggttcaaggctacctccacattttgaaagaaacctaactaaacagaagcatcccctccattatttcatggtgtacccaatggtatcagatccaggttctctagaagaagactccttagtgcctcaaacctaagaacagtaggttcctaagtcgtgctctcacaactcttgcagcaaatgtgttgacaccctgagatcacccaggtcaattacaatgtactgagacagtgactcaccctggaccaagttgccctacctggaccagctcctgtagctcacgtttgacatcctctaggcccccgatgtcttcccaggttacctgtggcacctctaccacggtttcccgcagtgctgatgggttactctggctcaaggcccactagaaaaggagggaaaactggggatgagacttaccaagggaggggtcaaagcacgtatgtgtgtacctgaggcacgggtgtggtccttacccggaagtcatccatagtaactgctagagagttcatgacctcggcatcaatggtctcatcctctaggtcaatgagatccatcttcttgcggatggcttgcagagcagcctctgagcacagggctgctaagtcagcacccacatgcccgtgagtctcattggctacctgcagagaaagatctacttactatgctgcctcaaagacccagctgctgcaggaggctcagagacaatagaatccttcccctgactgctatccctgggtcctctcatttccttgaatatatactatcaatacctttatgggctgggttttaagtacttaattctggacttgggacctagaaataaggctgctccaacaattctgatttactctaaatgcagcgtcaactatgaaaaatgccaactcccatttcctggattcaatctcagattacttcctttcccctgtccagaaatcaaaacccatctcctcacatcttaaccttatgtctctagccagttcccagcaactgcctagagacactgtaacgcctggtcagccatcatcatcacttcacctgttccaggtccacatcatctgccagcttcatgttcttggtatggatctgaagaatctctaagcgtcctgtagcatcaggaattccaatatctacctccctgtcaaagcgacctgtgggacagtacacaaacagtacacaaacataaacagggctcatctctagtccagaggtaagagacaggcctagggtgaccaaccatctcagccagcacaggattgtcctaatgccagcactaaaaaagtctcaagctctgggaaacctttcagtctcaggaaaaccagggtggttggtcactctagacaggacgtagggtaaaggaaaaagacccctggacccaatcactgtgaagggcttcaagaggattaggtgacttagatgaaggagagaagtaggacctaagcaaggacggggtcaaaagtatctggagtccttaccaaatcgccgtagagctgggtcaatgctgttgggtctgttggttgctgccataacaatcacatgtgccctctgctttaggccatccatgagggtcaacaactgtgatacaatgcgccgctccacctcgccatgagtctgccagaacaggatgtctggtcagaagtgaagtcagggcctttcaacccccctctatcccctcaggtaagctcctactttctctcttttgggagcgatggcatctagctcatcaatgaagatgatggcaggagcattcttctcagcctcctcaaaggctttacgaaggttgctctcagactcaccagccaatttgctcatgatctcaggacctgaaaggatacagaatggagacaataacaaaatgatagtctttcccaattcctcccaaaaatcagttatcttgcttgtttggcccagagacaggtcctgggtgagaaggtggtaacctctgcctacttctcacatcctctaccagccattatcccaggacagccaccaggcaaggctggagagaagcccagggactcactatactcttctcacagttgaactgtaaaggtgacagcaaatgctctaggacctctggctagagcaggagagatggcacaccagatggcacaccactaaacagcattctccaagagccagtgatcaaagttcatttgccccaaaccctctcaaatcactaaccattcaccctttgatttctcattctagcttgctcccgctctgcagtctgtccacaatctttctcaaagggggcaggacagggagcaccaatgtaaaatatcttccctttattgctcttctgtctgtaacataccccagcataagaaatatgctataaacatgaaggagggcatgggtgcaaaaaggatgtgttcataagtgctccagctcataagcccagttcaaaattgggtctagctagacataagatgaaccaaatatcttaccattgatcaagaagaagaaggctccagtctcatttgctacagctcgagcaatcagggtctttcctgttccaggaggtccgtaaagcaggattcctctaggaggctgtggaccaatgcagagtgtgattaggttcccaccttctcccaaaccctaaaatggcttgactagcgctccagagagggtgagaatcaggcttcaaccctgacaatattaagaataagccctccgcagtaaatgctaagaagacaattactttaggccacactcatttctattactagcagggaaaatactgctagaaagtgggcaacatttatgattgcaacttgcataggagactaagggcagagaaactgtagtccaaatgcgtttgaagatacatgactagggaaaggcaagaggccattacactaagggctcaattttagacagaccaagggccaaagactagctaagccatttaagagagcagggtctattttcttcattgccagaggatcactcactccagtaatcatgccctccagaatttatcacactggaatgctgttccttacaatcatcatttttcttcttcaacactaccctttctatggcctcatccacaagcagaacatgtaaactgtccacatagaaaatgaaattatttgtgtgccacccactaggaaaatgagtaacttcatcttcagtgtgttccatggaaacactttcccactaggaaaagattgagaagctacactctagaccagtagttctcaaatgttttagactcagaaccctttaacactctgaaaatttccttaacttccttacgtctactgggtgacattgctctagacaggctggcaaactatggtgagatttgtttttacagggtccattgatacaagaatggcttttatattctaagagttgtaaagaaaaacccatatatatatgtgtgtgtgttttgtgcgcacacgcacacaacagacaatttgattagcctactctggttttagaccatcagctctaatgaatttagagccttaggtaaactaaaggatacgttattgcccctctaatccaaggcaataatgaaagccatgcatgaaaacagtcccaggattagacattgggacaggattagacattggcaccactttagacttgattccagagcccaggatgctcaccttcacaccaattgccttaaagagggcaggatgtctcaggggcagttccaccatctcctttatctgagctagctgcttcctgcagccaccaatgtcatcataccctacttcattcaaggactcttcctcatcctgaatatggaggagataaagaaaggagaaggcaagaatattatatcagcaaaagctgagtttctctaaatcattccactacctagtgtgcaaaaacctaccgtataagaagattctcaacccggcatggtggctcacatctgtaatcccagcactttgggaggcagaggtgggaggaatgcttgagtccaggagttcctgggcaatacagcaagactccatctcattaaaaattaaattaaatttaaaaaagattctcctctaaagggatccggcctcaaagaacaactacaaaaatcccaaggcaaagatttctagcacagtccttgcctctcacattactcgtagtcttactgagaaggggtctctaaaatctgaagctggaaaccctgggaatgggcagaggcctgaagccaccatcagctttacttcaaaaatgatttcaatcacttatatattttgggttcagtctagttttttgaaattcctggcattaggtaaatccgagaaacaattaggcccagaaatgaatagctggcaggtttctcatccctgaaagatggttagttctccaaagaacacccagtctttttcttttttgagacagagtctcactctgtcacccaggctggagtgcagtggcacaatctcagctcactgcaacctccgactcctgggttcaaccgattctcctgcctcagcctcctgagtagctgggattacagatgtgtaccaccatgcctggctaatttttgtatttttagtagagatgggatttcaccatgttgcccaggctggtcttgaacacctgacctcaagtgatctgcccatctcagtctcccaaagtactgggattacaggtgtcagccaccgcagccggccgagcacccagtcctgacagttaccacatgatgccacactgagtaatcataaaatcggatactggaatcagggagaaaactcacctctcgtttgataggctccccttcgcagtggatcactgtgtctggagcaacaatgcaataagggctaggatctgtttccaccactttgaactccacagcacgcatcccaccacggacaagaaaaatgtctcctgcgagagcaaacagtacaagcacagttagaggtgtcaactacaagacaaagtgagaactcatcagaccctggggtcaaaatgccaagctcattagatagtgcccttcattagatattgccctacctctccccaactccaccccacctgtcttaataagcagcaggcaagatgagaaaggtaaactgtgaagagtccctctgacaagaggtcagtgaacaaaacctgacatgtcagaagcccatcaagttctgacttctgccatataggtagcccaagttttcactacaaccaccaatggtagaactgtgcactctggaccctgacccagccaaaatggaccactttctccttcagagatccataaagatagcttactctcctggaacagagaaggggagagatggagcaaaggaaggatggaggaaaaaaagagggtaagacatatgaatatgtgtgcagggtttgcatgtgtgtgtatacaaatatatgaaaatgagtctagcggccgggcacagtggctcacctgaggtcaagagttcgagacgagcctgaccaacatggtgaaaccccgtctctactaaaaacacaaaaattagccgggcgtggtggcagacgcctgtaatcccagctacttgggaggctgaggcaggagaattgcttgaacccaggaggcggaggttgcagtgagccgagattgcaccactgcgctccagcctgggggacagcgcgacactctgtctcaaaaaaaaaagaaaagaaaatgagactaggcttgatggctcatgcctgtaatcccagcactttgggaggccatggcagatggatcacttgagcccagcagtttgagaccagcctgggcatcatagtgagaccctgtctcttttttttttttttgagacagagtcttgctctgtcacccaggctgcagtactgtggcccaatcttggctcactgcaacctccacctcttgggttcaagcaattctcatgcctcagcctcccaggtagctgggattacaggtgcccacgatggggtttcgccatgttggccaggctggtctcaaactcctggcctcaagtgatccacccgcctcagcctcccaaattgctgggattataggtgtgagccacggtgcccagctgaccccatctcttaaaaaatgaataaataaatacaggggaaaagcataaaagatttaaaaaaaaaaaaaagaaaaagaaaatgagataaagatgttccaaggtttattccctacagtcaataatccttaagctcagaattagctctcacctttccggatgggtcgatacgcttccaggaagtacggcttaaggtatacctcgaagagattaccagtaatgccttccactgtgtcatcaatgggcagcacatggatacgtttgccgtacttcacatcagggcatggctggatgctgaggatgacaagcagactccatattaccaaccacacttcgggcccaagcactgggtgtccaaaagggcctggcacagatagctgatagtaagtgaaaaagaaaaggcaggatggctttaggcgaagagaggaaggagaacagggtggaagtgagggcgaaggaacagccccactcactcctaatcagtgagccaaaatcaagagccacacatttagaaaccccacaaagacatgcagggtcttcagggagatatccaaggatgatccccttctagctaatactggtgacccaatattacaagggaaggtcttaagctaacaattgtcagggtcagtgaaacagaagtgaaaaaaacaaaattatctcagccaggtggtcagaacaccttgaggaagtgactaagcactcccaagaagaaagctacatgaaacttagactccattcaaaagaatcaaaagcctgagatgatcctggccaggtgatggttggttgggtaggagtggctagagatgactccaagatggggtaacctcttgcctaaaattatgcaagaacaagcaaaatcactcacattgagagctatcccaggtctggctccaactattcctctctcccgggttaacttaggggcttaaaagacctgctagcagctcaccttccatgcccatacccccacctcattccaaccccaacacaagccatcaattagacatactagtgagagtagtgaggagattatttggcatatacatacacaccctcgagtggtatcctaagccaggatataagtatgataaattacacctctagtaggaaaaaataaagccatcaagaaagttacaggaacgccaatttgtctcaagggacctgcagaaatggattttgaagtcccagggaggcagaaccaaaacctaaagacaaccctgaagcataagtcttcccatgaccaggaggcttcctgcatcgacaggtgccaagaacttggtcctgcctgtaatacatgggtcctgcctgtaatgcaggctatctctggcctcccatccctgtgaagccaaaaaccccacacacacctgatgacatcccctaggcgtacacgaaggttattccgaacaactctattcatccgaatcttctcatcagaacaagtatcatcagaaaggacgatgcaaacagcttctcgtctcttctttcctttcagcaacactgtgtcacctcggaacaactgcaattcatccatcttgggctgaggaaagaaagttaaggcctttgggtcattgggctgacggggagtaagcagcagccctggagattgggattcccagtaaaccccactctatctgcagtcactgcaagaaaaatgagaaaagaaacctgggaaaatccctcaagtaagtgcagtaaggaaagactagtctgtggccacagcttacctgggacaaggacaccacactgttgtcctcattgatggcttcatcaacaattaaccgattgggacggttcttctgtttgagaatggctgttgataggtcatcaccttttgaactagaaggaggaaatggagtcagtagatactcctgccccaagcgcctcgccagtctctaaaactcatacttaggaaagaaacagtgaatagatgaagctgtccctagaccagaaagctcagatgaaggaaaggcagccaaggtcacgaggagcagtatctaccatacatattacaatacccattccagcagctcctggtattttgagcgtcagtgtcccagctataaggccccaagtgagtgatcctgccccagggtcagaaaataatggcctaagaagaagacataatagaaatggaggctgaatagttgttagagaaataaaaatagtcttagacttacagaagagtggttaagagcaggaactctatagtcagacccattgggtctgaattccaattatgccactgcttaattgtgatcttgggcaagttacctaacctctgaactttgatgtcctcctctataaaagaaggaatataatacttatctcagaggcttattgtcttaagggagataatgaatgtaaaatgcttaacataatacctggcacatggtattaatggtcaccatgattaacagtatagagtaaagcataagctaactttccagggaattaagtaagccagacaacctcccttgaggctcagggaggccttaagttctaccaagcaagcctggggacaacgaagcagaatcattggtgctaccctccttataggctaaacctactgatgccagggcattccatagtaccaaaggaatgccaagcataaagaccatcatatttggaaaaaacactaacagacatcaaaccgccagaaagaggctcaaggtcaaaaggaacttcacagtaatatctgcaaaagtacacaattccataaagttggctcaaaaaatcaaaaccaagaaatgctgagacatggggcaaatccaaatccctctcacccaaatcaaagtcgactgggtctacactcagtgttatttcctagaagctaggatcattcaccagacagtgacaccaacttattacctagcccgtttccagctgtcacttactagactcagcaagctccctctccctttttttttttttttttttttttttgagatggagtttcgcttttgttgtccaggctggaatgcaatgctgcgatctcagctaactgcaacctccacctcccgggttcaagtgattctcctgcctcagcctcccgagtagctgggattacaggcatgcgccaccacaactggctaattttgcatttttactagagatggggtttcaccatggtggtcaggctggtctcgaactcctgacctcaggtgatctgcccacctcggcctcccaaagtactgggattacaggcgtgagccacagcacccagcgctctctcttttttaagagcggcctcgtgttagtaaggctcaggaaaacataagcattaaccaaagtaggaaggccagacaatgaaggaagcaaagaaaataaatttttaaaacgaatttcttcattcaacaaattcatgagtctctattatgtaccaggcattgttctaagggctggggatactgaagtcaacaaaacaagacaaaatagtattcccattggaaatatcctcacaatttgcaagagacaaagaaaaatgctgtgctcagctaggaagccatggggttcttacatctttgggtcctgatacacccaagagaaaaacaaaccccattcatctaacaaaatggtaggccttctgctaaccctcacacataggctgcatttttaaccactgcctctaaactagtttctaacgacagtttcctctgctcaaatttgcttcccccattccacaagtctgccactccaggcacaatgctgctgagtaggcagactcttccaatgcttatcaacacactagaggccaagcatgctcaatgtgacagttgagagcaatgtaaacccacgagctctcccactcctgtcccatcaaaatactcttccagggactgcccatcttcttgcttgacttatagaactgggactggagaaaaataaaacgccagatgcctctagtcaccatagttttttattttttgaaacggagtctccctctgttgcccaggctggagtgcagtggcgcgatctccctcactgcaatctctgcctccctgggttcaagtgattctcctgtctcagcctccagagtggctgggactacaggtgtgcaccatcaccatgcctggctactttttgcattttaatagagatggggtttctccatgttgcccgggctggtctcaaactcctgacctcaagtgatctgcctgcctcggcctcccaaaatgctgggattacaggcctgagccactgtgcccggtcaatagtttgtattttaatctcaaagctgtatcctaggaaaacctccattctgcctaccatcccggactctggctctggagatgagtggtatgcccttttcttaaggtaaagcctctaattccccatctacctactgagatcagatgtggtaatctctaaaagactgaatttggcctgaccatgggccaacagcagttctggacactctttggggcaatcctccattgtcttctgtataagtcaatccctttccagaactgcacaggggactccacgggacttggaagggtttcagctaagagtcatcaaggtgaccaagaggttagaaacagctgatgatgccaggttccaagaattttagatttttacttttgaaaataagaggctgactgcatataaaccaaaagaatactttcagaataagtgactcttttaaataagcaactgagtaatactttatccgaattcagaaacttgagaaaaaggaacacacctcaaaaaactaatctcttcaaggaaggaaggtaatttgcatagagtttccttgggctggctgtgttttttttttttttttttttttgcctctaaaagctctctattctaaattgaatgggctgaggtagccaagttttatctaacgctttcctaaggatggaggtggggtcagaaagccccagagcccgggtaatttctcaatatagctggttggggaaaggagtgcgcgcacgtttgtgtttttgaagagttagtgcaactctaaactgcacaccacgaaacctggaaatctggaaaggcgcacaaaacacgaactgagattccaactttagcaagaacctaaaatgttaaagaaaaattcctttctccccacccacgagtcataacattaaggaaaactggctcaaactttctagtatgaacaacaggcctaaagtaagaagaccagaagcgaaaggtagggctcgccctctccctaacagtccttcacgactcaggtcacacacagaggatgcccacctccggccccgccgacccggctccaaaaaggcggctgtgagcttccctgagctcggcgggccttccccgaccccgggctccgcctcggtggcagagctcctgaggccttcacatggcgcaaagtccacgcccaccgggcccggctggggcctcgggctcgcggggcctgctctctccggggaccaaaggctttcggcgggtggtaggccggacggcagactggcgccccaaagccccggggcgccgccccggcggagtgggccggaagacctggccaggcccagacgtccgttctaagggagccaatcgggcgggccggggcctgcatgacacagcacgatccggcccaggctccgacccggacccaacgcaagccccgcctagggggcgcgcgggtgcgcagctggccccagccgggcctgccgggtccacggcccctcactcgccccctagcttcccttccctctttcctggtctccacctctctgacgcgcccacggccaggccccgccgggcctaccctgcgcggctggtcccggtgcgcgccgccgcagcaagcgaacggcgcgcgcacactcactcggctccagaagccatggcgcgcgcctctcccggccggcggctgtggcggcccgcgggtaacggctacgagcggtggcaagcgaccgactgggccggggctcggctcttccaggcggtgggcgagcagcggcgacaaacccgcaagcggcttccctctcgcttcctcccaccggcagcgaggcgtcgggcgaacaacgctggctcctgatccgcgaggtggcagtggcagtggcagcggcagcggcagcgacgactcaaacgacggtcgcagacgcttcgctgagactgagccgagaagagccgaatcatcggaagggaagctgctcccacctcagccaatcagcgcctgccctgcggactctcgcccgcctctccgcgcctctccccagcaacccgcagatcacagccaatcaggaaattcgcttgcggcctggctcccgcctcagtgatgcgacacgcctagtaacgccacgtcaattggccgcaacgctacgcttcctcgacggattggaattctcagccaatcaacgaaaggaatagggcgagatcgattagtgaaaggagaccctttaatcccttagaggcggactctcccacttggctccagttcattggctccggagtttatcctcctggaagaacgtggcacaatagactgaacccttgtattagtctagtcctattgtggtaacccatacacccatcttctcccaaaacctggagatcttctaagacgccatcaccaccctgacacttcttgctccttctcaacgctgcctccaaccacccctactctgaactttctgactagcaccccactcctaccccattgtcactgcaccctctggtaaccccaatcccacagcctttgcagtttctcagcgcttgtgcctttcttcctcccgtcattaatattaataccttataataaggcactcaaatccagagaagtcaaagggcaaccacagaacacacagccaattcagtagaacccaaattagcaagaaaactgcatatgctgggacttgaaaatccttgggccccaaataacaggggtccctgttagtagtcaacaggcagctgttggtgatatgctgactcaattcacctttcaccctgtacccacacagacacatttgactaagacgagtcgaatttctagaatttggaattaggaagggagtgaagagttactctgagagaaacctgcctgtctctaagtaacaggtacctgcccttgtcctgagaggcctatctagaccacccttcagacccaactccactcattgtcactgtcctgggctttggggctctgcattcaggcaatgtgaaggactaaagccactgcctccaaagtgaggattcctgtagccctttcctcatacccagacttcaagttcataaggtagacgatgtcaggaaagggcatcatagacaactagcactcaactagacggtcacaagccttcccacgcaagtatatgtagtaggcagacgagataaatatgaaattttactcgacaacagaaaaggagaaacaggaaaaaaggtgcctcgagcaaagtcaatgacttggtggtggcagagattgtttcctccaaaacgagaatggtagtaactagggcaaatttcacaggcctaccaccaatctcaccagtccaggaattatataggaatggtcacattcctaatgatggtgaagcagaaagccctccccacagagagacagcccactggggacccagctcaagctcttcaaaacgtggcagctacaggtcacaagactttggcagagatgtccgaaattcttcaaggaaggcgtcacgatcagagggacggatccagctcaaatagctttctaggtacagggggagagacctggagagaaagaaggatgatgcctaagggtgaaagattggcagaaagctgggcagccatacccccgctttcagtgttcaccacccacaataggtccaaggactctaggacaccaactgcccctcagccccaagccagcaggcctgagcctcaccacagagcatcttcatgtgaccccttagtttgggcctccagcctccaccagagtgcagtggcctcatccctccgatctagcctcttcagagtctgaagcaggtgaaagtaagtgtctcgattacctgtagccccagcccagagtacagagtcttagaacttgacatagtcttaggcattgttttataaaaagggaaactgaggcctagagagaggaagtatcttgcctacactcacatatggaagcgggggcagatcattcacaaccattcccatcccagtgtccatcatctgccccctactcctgtgcaacccacaacagcagagtcatggtctttgtgtctgaggatatcggggaaaccagggaactcttgggagccctgcatacacactgtgtatatttgaacacctggatatatccctaggtatatatagcacaaccccaatcacccctcctgtctgagaacaccactcttacacttacgcccaagtatttcccatgggcctctctgtccttgcacatctatgcatagccgacgtcatgcaagtacacatacctgggcacatctgcacactgaggaggaagtcctgtaaggctttggtatcctggccgctggctacccattccagtccacgactaattagggcggctgcccgaagctgctgcagtgccgcatctgacttacatccctgctcacagttgaaagctgcccctggggaccactcccaaagtcaagaagtgtcttcccagcctcacagtcaccaaaaccccaaatcctcctctatttcttcttgtgtccacagtccctttctcttaagtctcctggtgggctgggacacattaaagggaacccacttccaccactaccacttccaggaggtaagaggaaaactgaaagtttagatcaccttgttctttttcctcaggtgtggcccggaagagcagctcgaggcacctgaagtaggacacagaacaggggtgaagaggaatcaatttcagaaactctagggtaagtaggtgaacatggagctcaccaactcaggtcccaatcagaaaatcatccctccacaccccctctaggaccccgggctcacctgctaaattcactaattgccactttttgggcacccagttgaacccaggcctggccctgaagcaggtgggtggcagagacccagagtgggcagtatggcagttccttggttccttttctggcatcttcccacagccgggacatcttgggtagcagagatgatgtgcggctgagcaactcctcacatagagtcaaggcatcttgggctctgcctgcctggatcagtgctaccgctgcctccaaaaacacctcaggcatacagggccctggaggggaggggggtggggagaactggagtgggaagaagaagcagtgtcttgaaaggcatgagccaccatccccaacctcttcaccaggctctggtaccatgcagagtcctgggcccccagactggacagacagaatagaggaaaaaacaaaaaattgcagtcttgctgtatttcaaaggggacaccaacccgtctaccccattgcagagaagcttgaagacacacccacccttggctccgagctatccagcaacagggccagcaggtccaagtaatgctctgcagcgtctcctgccctgaggagtaaaagcccataagcctcaccctaggccctagcagggaacctgcaagggtcctgagaatgttctctcttagctaacagatggatgttcatgggccctgaggaggagaaagggagggaaggtcttagggctccaattttggctcagtatggatctaccccagttacagaatggactggggaagagacttcagagtgtcaaagatagagaaggttaatgtcttagagaagagtcctcagttcaggtctagaagcaaggtaagaggctgaggagtggcgacctatgtcctgccactgcctcattcatcccccaagtcacaagaacaaaagcagagtcacaccccaggggaggcatcagaagtgggaagagaagctcaggtgagcaaggggaacctcacctccccgtctgtaggcacctgcttgctagtatgtgcttggtctggctctgagtgccacaatgaaggggtgaggctaggtcaggtggtggcagtagtaattctacctcaatgagaaactgcggggctttggaactgcatgggacattcaaggcctaaaagagaaagaaaaaaattgtatctataatctttgggagccatacttccttatacttggatcttgactagtcaagtcaccccatcacaagcacctcaggaatcctccaccccacatcttcacctggcagttccctacctcaactagcagctccagactctccagctctgctgttgtgtcccccagttgctgatagagcctagaggcctccagaagtggaggaccccaggctgatccctctttcagggctgcaaccaagtacaacagtgctctctgtggatttccctaaagggataggaggacacgggcctcagctacccttacaaagcaaaaagctatacataatgcttgtggtttccccaatccaccctaggactgtctttaccatcttacggtgacaggaccccagtgctgtgtacacctggaccaacacaggccgtggacacaggcctgaggccgcttcatgaaggctgcttagtgccttgtctgggttccctgtgatcagctcctggagacctgaggacagtcagggtgtgagcttggagagggctatagagcaggggtcatgatggggaacaagggtctaagaagcccatggaactgaatgggacaagagagagggcatgagtctggaggaccacttaaaggtagaagagatgagtcaggttgctagctgaccttggcggtaggcaaatgctgtcaggaggacatccttcaatccctgggcatcctgcagggtcaatggagcatctaattcctcagctgggggactccaagttttcagaagtaacagcagatccttagaggctccactctggggaaagaaggacaaccagaagctccaagcctacaacctccccgtcttctcctatctccatctatcctggctagaccttgagctcaagggtcctcttgatccttgaggacacaggcctcagctacccttacaaagcaagaagctatgcataatgcctgtagtttcccccaattctaagagatagatagctatgaggcaagaattaaaaaaaaggaagaaaaacctggggcagtgatgatctattccagcgtgcctcctcactcagggcaaggaccatatttgagttactaataaggagactaaggctgagagctgacttgagcaagatcacaagagccctatccctatccaaaaaaaaattttttttttttttgagacagggtctccctctgtcacccaggctgcagggctggagtgcagtggcgtgatcatagctcacaactcactgttgcctccacctcttgggttcaagtgatcctcctacctcagcctcccaaagtgctgagattacaggtatgagccaccatgcctgtccaatttttaaaaaacactcctaagagaatccccacaatgagagaccaaccagggcaaggtcacccaagagtcccagagagaatccaggttttccgaccaccaacccagccgcctgtccagtacatgatgatgctactgcagctggagagaaaggaggaggaaggaaggaggagaccctcagcttcaggtcactttccctattacctggctgccattcagggtctctagtaacaaggccaggtccccaagacggtcagcactcaaccagagggcagcctgcaggccaaccaggcggtgcagggcagacagcagctccggcagaaggcaggaagcacgaaggacagagtcccacagctccctgagcccctgttccaacctgggcccctgctgctcctgtgtctccagcactgtagagtatacacacacacatagacacacacacagctgaagtagcacctcatcctccatctccccacacactctggctttcctctcctgcaggaccccaaaggtcacaataataatacctcaacctggtctgaagagcacagagaagggcacctctctccatggaggtgacagatgttgtttatcctcccatctccctgcaataacttaaacccagactgaagatggcaggggaatcagggacaatctctggccctcacctctctctaggctccgctggatatcctgggcctgatcctctgtgaaaccctgggccaagcttgccctcaggataatgaagttgcaggtgacagtcagctccaagggaagaacaggaacagctgcagggagccctggagcaacaatgttggtcttacagactgctcccccatggaagatcctccaaataaaatcccaactcagagatcaccccactccaaccaaaacagctacaataaagaacccaccctccagccaattagctaaggatttaaaaaaagaacccaacctttggacagagagtctggaaagggcaaaaaagttatccagatcagaccatcttggaaaccatttttcaaatgccactctgtgagtgtgtaaggaagagagggatttgcctgtacaaagatgattccactccagtctcctctgtgccttaaacaggactccctgccccgagtaattatatcgatcccaaaaacgcaggagcggatgtttctctggctatggaagaggggaactgaccatcctggggaggacccgcctaccttgcagactatggaggagccctctgagcccttccagtgcatcctgagccaactgctgtcgcctcagagtcagaccggagttctgagccacctgccacatgagggaggggttgtcactgaggatcaatccttttttctccccttgcagcagtggcaagggatgcattctccagtcatttctggctctttggtcaagctcagtccctccccatctgttggggtaaatccactgcaaacccgctttcagggatcttgaggctgcaaaccgagggtgccagcaaccgtgttaccttggcctgtcgaacgagccggtcattcttttccctccacaggtccaggcagctggagcccacagaggtggtctggcgggacatggtggccgaggctgggcccggagaccagaagcggacttaggaagggtgaagctggcctgcccaagctcccaaccccagcggggaggggcctgggcacttctgcaccccgccgagctcccctgcttctctcggggtcccaatccacccgcccaggctttccaggacagatgggacgctctctccccgcggcccgccgggctctcaacctcgcctctggttggccgggtctgcgaagctctgggctgcggttggtcctcttgaagagttagttcccgcgggaaactcggggaggaaacgagtcagcaaccccaaacaggcttaggcgggctagaagccggggtcgtgtctgactggggcagtcgcacggccggcggtgcggcccgctcggctctcgcggaggccacagcctcgagaaagggtgggcgggagcgagtttcggccccacagtccgtggctcggcccttcctcgctgccacacccccaggtcctcctgggttcccgcttccaccgagggccgactgcgaggtgcatgctgggagtcgtagtaccgcaccggggcggaacagctccgccccggcggatggtgtttccagaaagcggtaactggagacgagggcgctccgtaatcgtccatcctttctctgctcactgtcgagcaccaacacgctcaccaaggtcggctttctaccgcgtgtagtctgctggcagtgccgctctgtacttgcactgctcaaaagtacctgcccaatcatttcaaattaaatggagctaggagaattgaatatccatatgcaaaaaaaaaaaaaaaaaaaagacaggaaagaaaagaacgcgaccatacatacgtacataaaatcaactcaatggatcacaaactaaatataagagccaaaaatataaaacttctaaaagaaaacgtaaagcagcctaactaacatggtgaaaccttctctacaaaaatacaaaaattagcagggcgtggtgtcgtgcgcctgtaatcccagctaccccggaggctgaggcggaagaatcgcttgaacccgggtggcggaggttgcagtgagccgacatcgtgccattgcactccagcctgggtgacagagtgagactccgtctcaaaaaaaaaaaaaaaagaaaacgtaagagaacagctttatgaccttgggtttggcaacaagttgttagacacagcactaaaagcttgtacaatttaaaaaaaagttaactttattaaaattaaaaactcttgtactacaaagacatcattaagaagtcatacgctggggccgggcgccgtggctcacgcctgcgatcccagcactttgggagaccgaggcgggcggatcacgaggtcaggagatcgagaccatcatggctaacacggtgaaaccccgtctctactaaaaatacaaaaaattagccgggcgatgtggcgggcgcctgtagtcccagctactcgggaggctgaggcaggagaaaggcgtgaaccccgcgggccagagcctgcagtgagccgagatcgccccactgcactccagcctgcgcaacagcgagactccatctcaaaaaaaaaaaaaaagaaaagaaaagaaaagaagaaaaatcataggctggatgtggctcatgctgtaatcccagcactttgggaggctgaggctggaggattccctgaagccaggagttcaagaccagcctaggcaacaaagatggtgtcttttgtagagacattatctctacaaaaaatttaaaacattaaccctggcacaataacacacctgtagacccagctacttgggaggctgaggtgggaggagcccttgagcctaggagttccaggttgcagtgagccatgatcacaccactgccctccagcctgagtaacagagtgagaccctgcctcaaaaaaagaaaggtcacagtcacagagtgggagaaactacttgctaattatatacctcataagggactggtatccctaacacataaaaactcccaaaactcaagaaaaagatttttaaaaacaatcttagctgggtgtggtggttcatgcctgttatcccagcactttgggaggctgaggtgggaggatcatttgagcctcagaagtttaagacctgcctgggcaacatagcaaaaccccacctctacaaaaaaaatacaaaaattagctgggcatggtggcacacacctgtagtcccatctactcgggaaacttaggtgggaggatcacctgagctcagggatgtcgaagctgcagtgagccatgattgagccactgcactccagcgtgggcaacaaagtgagaccctgtctcaaaacaaaacaaaaaacaattttaagatggaccaaaaaaaaaaaaaaagacattttaccaaaaaagatctactaatggctaagaaacacataaaaagatgctcggcattattagctattagagaaacacagttaaaaacatggccagggccgggccatgttatgcctgtaatcccagcactttgggaggctgaggtggatggatcacttgaggtcaggagttcaagaccagcatggccaacttggtgaaacctcgtctctactaaaaatacaaaaattaggcaggcatggtggtgcatgcctgtaatcccagctacctgggaagctgaggtgggagaatggcttgaacccggaaggtggaggttgcagtgagccgagatcctgccactgaactctagcctaggtgacacagcgagacttcgtctcaaaaaataaaaaaacgcttcacacagccgggcgtggtggctcacacctttaatcccagcactttgggaggctgaggcaggtggatcacttgaggccaggagtttgagaccagccaagccaacagggcaaaaccctgtctctactgcaaatacaaaaattagctgggcatggtggcagacacctgtaatcccagctactcaggaggctgaggcatgacaatcacttgaacctgggaaacggaggttgcagtgagctgagaccatgccactgcactccagcctgggtgacagagtgagactctgtctcaaaaataaataaataaaaataaaaacactatacacatacatacataaaatgactacaataaaaacagattataccaagtgttggtgaggatgtgtatgaggaaccctcatacactgctggtgggaatataaaatagtacactcacttcagaaaagtttggcagtttcttaaaaagttaatcataggccgggcgcagtggcttattcctgtaatcccagcactttgggaggccaaggcaggtgaatcacgatgtcagtagatcgagaccatcctggctaacacagtgaaaccccgtctctactaaaaatacaaaaaattagccaggcgtggtggcgggcacctgtagtcccagctactcaagaggctgaggcaggagaatggcgtgaacccaggaagtggagcttgcagtgagccaagaccccgccactgcactccagcctgggtgacagagcaagactccatctcaaaaaaaaaaaaagaaaaaaaagtcaatcacaaatttaccataagactcagcaattccactccaaagaatactcccaagagaaatgaaaacatacgtccacactgagatttgttgcaaatactcatagtagctaaaaatgttcataatggctaaaaactgaaaacaatcaaaatgtccatcagttggtcaaagccaatgatttagcaatgaaaaggggcaaaagagtgcaccaacaaactttttttttttgagacggagtctcgctctgttgcccgggctggagtgcagtggcgcaatctcggctcactgcactccagcctgggcgacagaacaagactgtctcaaaaaaaaaaaaaaaaaaaaaaaagattgaaaacaggccaggctcatgcctgtaatcccagcactttgggggactgaggtgggcggatcaccagagggcaggagaccagcctggctaacatagtgaaaccccatctccactaaaaatacaaaaaattagccggacgtggtggcacatgcctatagtcccagctacttgggaggctgaggcaggagaaccacttgaacccaggaggcagaggctgcagtgagcagagatcacgccactgcactccggcctgggcaacagagtgaaactccatctctaaataaataaataaataaataaataaataaaagaccgaaaacagatcattggcctggggtaggattagggagtcaatgtagggaattttggggggatgatagaaatgttctaaaattaagttgtggcattttgcaataatttatttcatatgacaccaaaagcataagcaatgaaagaaaaaaacaggatgaactggactttctcaaaattaagaatttttgtgtaggccaggcgcggtggctcatgcctgtaatcccagcactttgggaggccaaggcgggcggatcataaggtcaagagattgagaccatcctgtccaacatggtgaaaccccgtctctactaaaaatacaaaaattagctgggcgtggtgatgcacgcctgtagtcccagctactcaggaggctgaggcaggagaatcacttgaacccaggaggcggaggttgcagtgagcccagatagtgccactgtactccagcctggcgacagagcaagactccgtctcaaaaaaaaaaaaaaaaaaaaaagaatgtttgtgcattaaaggatattatcaagaaaatgaaaagacaacccacagagtggagaaaatatttgtaagtcatatatcatttgtaaatcatatatcatatcatatcatatatctgttcagggacctgtatctagcatgtaaaaagaatgctagccaggcacagtggcttacacctgtaatcccagcactttgggaggctgaagcaggaggattgcctgagcccaggagttcaagaccagcctaggcaacatagtggggccctgtctctacaataaaataaaaaattagtcggccatggtggtgcacacctgtagtcccagttactcaggaagctgagacaggaggactgcttgaacccaggaagctgtggcttcagtgagccatgatcacgccactgcattatagcctgggtgacagagcaagaccctggtccaaaaataataataataacaataatccaattaaaaatagtcgaagaatctgaagggacatttctccagtaagcacaagaaaagatgctcagctcagcatcattaatcattaaggaaatgcacaccaaaaccacaatgagatattacttcacacccactaggatggttagaatcaaagacagatgacaacaagtgttgacatggatgtggagaaatcgttacccatatatacttctggtaagactgtaaaacgatacagcaactttggaaaacaaactggcagttccttaaaagattaaacagagttaccttatgacccagcagttgctcagtgtacagctaggtatacactcaagagaaattaaaacatatgtccaaacaaaaacttatacacaaatgtttatagcagcattacataataaccaaaatgtgtaaatccaaatggctatcaatggatgaatggataaacaaaatgtggtatatccatgcaatagagtattatttggccataaagaggaatgaagtaccaatacatgctacaacatagatgaactctgaaaacattaggctgagtaaaggaagataagacagaaaaaggcactactgtatgagcccatttatatgaaatgtccagaacaggcaaatctatagagacagaaaacaaattagtggtaccaggagttaagggggagaagagaaggaatgactgcttaagggtacagggtttctttttggggtaatgaaaacattctggaattgataatgatgataattgtacaacgttgtgaatgtactaacggccactaaattatacactttaaaatggtgaattttatatgaattttacttcaattttaaaaaagaaaaagaatgaagtactgctgtgtgctgctatatagatgaaaccggaaaacattatactaactggaagatgccagtcacaaaagaccacatattattatgatcccatttctgtgaaatatccaaaatgggcaaatatatagagaaacagcagattagtgctagccaggggttggggaggattggagggtgatatctaaacagtagattttcttttggggttggtgaaaatgttctaaaattgattctggtgatggttgtacaattctgtaaatacacaaaaaccattaaatcttacaccttacgtgggtaaattttatggtaaattgcatttcaataaagcttttttaaaaaagaatcagggctgggtgcaatggctcacacctgcaatcccaacacttgaggaggtcgaggcaggaggatggcttgaggccaggagttcaagaccagcctaggcaagacagcaagacccccacctctacaaaaaattaaaggaaaaaaaaaaagaatcattgagttagtgtggaatggactctgatttcaaggaaaagggagggataagataatttttctttttaaaagagagaggatctatgttgcccaggctggagtgcagtggctattcacaggtgcattcattgtgcactacagcctctaactcctgggctcaagtgatccacctcagcctctacatagctgggaccatgcctggctaatttttttatttttgtagagacggagtcttgctatcctcaagtgatcctcccacctctgcctcccaagtagctgggactatagggacatgccacagtgcctggctagaaataatttttaatagcgtaaatcaatgtactaatgtctttatctaatagaatcttatagatacaccaggagaaagaatagacagtggttggcagatcagcaaattagccttaggctccaggcaaggaggctactgcaaaaagtgcagggtacctggctgagaagtggaggaactagggcctaaaatccttccatgggtgctagggatggaggaaaggtttttgttttggtttttttcccctttctcaaaaagacaccatttgctcaccgaactatgcttgggagttgtgtccaccagacttggggagaagcgtttttctaattcatcttacaggccagctggggccaacttcacccccttgcattattaaacctctttctaccatggttaacaacctatcccttttttttttttttttttttttgagagagagtctggctctgtctcccaggctggagtgcagtagcgtgatcttggctcactgtaacctctgcctcccaggttcaagcgattctcctgcctcagcctcctgagtagccggaattacaggtgcacaccaccacacctggctaatttttgtatttttagtagagatggggttttgccatgttggccaggctggtctcaaactcctgacctcaggtgatccacccgccttggctccccaaagtgctgagattacaggcatgaggcaccacacccagctgaaccatacttttcatcatcttactatttggcatctgtaacactagggaccactggccattaataatctgaacttagccaggtgctgtggctcacacctgtaatcctagtgctttgagaggccaaggtggaaggatcgcttgaggccaggagttcacgaacagcctgggcaatgtagcaagactctgtctgtacagaaatttaaaaattagccaggcatggtcccagatactgaggaggctgagatggatcacttgagcccaggagtttgaaactacagggagctatgattgcaccactgccctccagcctggacaatagagcaaaaatatgtctttaaaatgatagtaacaataaaaataatttcaattcttcccttagctacctaccacagcagtgaacgtttatacttcacaaccactactactcagcttctctactttatgccagctaaaagtaggtgctatcccatggttttaacatctgttctgtttttcagtggtatcagctcctcttgttctaggtactgtcaaacctcaaatcccagtcctgatgcttctctccagggcctcttcccaactcttttgatggacatctctaggaggatttcatgccagcatttcaaacatgacaggagtgctggggtgaacggagggcacaaaacatacacatgagaaaagaaccagtggattcacacaattttggcttcaagtcaggaataatgaatgggacaaggtggaatgctacataagatgggcatgtagatctgataaagagtggcacaggttgggaaacaagggaggcttccacagaagggaagggcaaagggtgttctatagtgaaaaggcccagtggagcgggggcatagcactatttggggcttcagacagttaaagtcggtgctgcatgatgcctgggcttgtcttctcagtcttctctctttatcagacaaagaacaggaacttaacaaaatgtgttgcatggcaaaggaaaatagcggtgggataataggattgatttgggaagaggtggaggcagtgaattcagacaactccaaccacttcataaaggttctcaggtgcagccaggctttcctaagatgactgatctcatctgtgcctggtggcaggagagactgatcctcctcacaacccctatagaacagtggggctcccccacatctcagacacacataattatattatcattttattacacttttttttaaatagtagagacggggtcttgttatgttccacaggctggtcttgaactcctgggaccaagcaatcctcccacctctgcctcccaaagtgctgggattataggtgcaagtcaccacgcccggcctattttattccacttcggagaccgccccccttgtccctcagatgcatccaaatcaggagttagggatcatactccactgtggtcctgaattatagaataatgaagtcctagatgtcagcggcccctggctgcatgatagtaagagtatggctgagcctgtcttgcagatcatccagtacctgtacaggccaggctacactgttctccagcactctctgtagccaagtgccagtaatcacagactaggctacctctgctgggccagaaatagctgcctgaaccaggagctcacagcaccatccactctcatcaccaaagctatgcccaggagaagtcccacgctgctcacaatgaagcccacagcctcaaatatgaacctgcaaagaaaggcggagaatctcaggcaacagagtaggtctactgccttttccctgtagaggcaaaaccttggccatcctggatgtttaggatcttcatactttgttccaagtttctccctccccaccacctctacttctcaagcaaatctactcacttaggggcaaacactttccagaccatgagatgcctgcgaaggatggaggctgccaaggcacaggccagaatctagaggaggagaggaggggccacgttacttgtgaaggagaggaggaagcggagcaaaaggagagtttctataggcccctgtaaaaaatggaagcaggagaatagtgcatgtcagtggaaaaaatattgcatgtcctgggctaggagttaggagacctacttcctgccctgccccaagcactgactcactatgtgactttgggcaagtcagtatccatctgcaatgctaacactcaggctgtgcccccaggatggaggaagatatcagtgccacatctgcctctggaggaaaggaagaggatccatgaccacagtttgggaagaaaatcctggctatcacctcagtttttccagtctgtccactgatagagtaatcctcaaatgcaactagcggggtccagatctaggttgtagaggggaaatgatccaggactaggattaaggagacccaggttcaagtctcagaactgccatttgaggccactgggcttgggcaaccacttcacttatgtgaaactcagtcaaggctctctcccacggttttgaaggtctgaaagaaagtgatgcacacacagagaaaaaacaccaactccctgatctctctcctacacccacctgaataccaaggataaagaggtacttgaggcccagctgcagcagtgctgcatagaagtgctgaggcgcatcccggagccgcatctccatcagtggctcctcttcctcctcgggtctgactctggcatcagcttcattccctgggggctgctgtctcttccgcagcccttgactctcacacaggaaaggccagagcaggagcagtgggcaacctactgcctcaagagagggtatggctggaatcaacaggccaccctggctggctcaggttccaattagcctaggccaaggggtgccaaagatccaacaaacccatatctctccattcaaatccaggggtttcctttctttccacaaagccagagtaaacaatggaagcaagtgaaggaggagggggtacctgcaaagaggaggtgggaggcaaaggtgttggctcccactagcaaagcaggcagccaagtacaggagccatgaccctctgggaatcccacgaaggctgcatgccaatggatggctggaaagacaggctggtggcctgtggagtagaaggtctgtgtggccatgagggcccaagccgagactgcctgccatggcacagtaaaaggacctggaagaaaagatatgccacgttacagtcacttcttattccctaatccataggctactgctccacaatcatatactcctactacttcagtatcaattctcatacacactcacatgcctatcagcccaacctccttacagtcaacattctgttattctaattctctctgtggtacaaaagcgccatcaggcttatctgaatcctgctatggccaatctctttctttctctcaaacacatacagctcagtgccattatatattcacaatttactacttccatcactggaaaatcaagaaatgtgctcatgaggatgcagcatttccacagggagtcttagaggactccttgtctctcctctccatgaaccctgggaaccaacaggagggatcaatttgcttggctatggcaggtaagagagaggacaccaagaagaccttcctagttgtgtggggcatgggaccctctgtcaagctcaggaacatgaggagcaacacctccttgaaaacaagaggggccgaactcacatcactattgtctttaagtgaatcagagctgagatatttaccaggggtggtgacgggtatcccagcagcaagcagatgtaggagaaggaagctctgcagaaacagaagcaggaacacaaggctgatgcgctccgcatgcaacagcagaagtgggaaggccaacagggtgagggctgtgaccatagcagctgagtagacactccccaactgataagcagccacagtcaggggaccctgagatttggtcctctctaaccggccccggaactcctcctgcatgtgtcggtagatttgagggaccacataatccaagtcagcttgagaagtgggggggcctgagaagggagtgaggacagtcctggtccttggagcgcctgccccagccttcaccagcactgtcacaggcttccagagcagcagcgcgagccctgaagcagccagccctgctacagcccgaggcagcaccatggatgccccagagaccaggacccggagacgggggggagcctcatctgcccccgacgccaatgcccagtaggcagcagtacccaatgccattaggggcagtccccagcgcacaaagagcatgggtggctcggggctcttgagattaccatagcggcgaagccacaagcgcacggcagctaacagggccaccagcgccgccacacaagctccataccacaaattcttggctcgaccacccaccatggatgccagaggactcagccagggagaggagtggcaaacaggtgtctcttcagggcaacgatgaaaaagcccagctagccttgtacataaaagcaacccaattccaagcctcagggcatatgcaccattgtgccgtggggggtttgttgtggctgaagtgccaaggcggggcattgtgagtagcttaggtggaagcagctggccctcccagtgaagctggacaaccaggagcaggatgaatgagcccaaaaggaagggggtggccctggcctcagctacaacaaaactatcagagaagaacacagccaagcgaaacagcaggagtaacaggacgggcccagggatgggaaacagggttgccaggggcctcttggacccccagccagcccaggctttccacagaaaagggaggaatgagctcactgcagccacagcccctagaagcactagatctagcttcagctcaatagttcccaggagtccagcatacgctatggccccaaccaggccccaggccacaggtgtcaggagtagagggcagaatggaaagcctggggatattgcccactgagatgccagcaggcagataaagcaggaagcagccaagagagcagtaccccccgccatgcggaccagagagaaacgagcccaagactcgatgcacatggcccgagctccccgcaggaactgctgcagctcagcaatcacagtcggcagtgtcgcctcagcccccttggggctctggagaagccactggtagtcagcagaggccttggagaagaggttctgcagctgatgaagctccttagcttgaaggtcctgagtagcagctgagtaggtatgaagaaatcgggacacctggcagagaaaaggtcagaggccaaggggaacaggtcagagacataaattggggcagaggcaagaataggtattacaaaagggggtacctggaagtcaaggacccaaactctgtccagaatcggggaagggagggataacggaagagggataggtatggaaggtgggactaagactagtcaaaggacaaaagagtggttcattatgcttctttcatgcccaccctagctctgtcacctggaaacccagcccgctcacctacctgctgagcattgagatggagagctgaggcttgggctaaagcagaggagtggggctgggagtcctcaccccctgagaatagctcagccatcacttccccgatattcccaaatgggatgggcaggcccagcagcagggccagcgtgggcacaaggctaacttgaggaatcacctctggctcctaaaggaaaatgacagtggtcaacagattcatcacaaagctgaagtcaatgtttgggatggcagacataggggcctaggtaagaaatgagagtggaggatacccaggatcatggatttgggggcctaaaatagaggtattcatgaggatgctgtaatggtaacatgggctgattactgggagaacagatgaggaacatcccaggcctcacctctggtggggtgctggggaagactgctgtggggctatacagaaagagagcagctgagacctccagctcactgtcccctccatggtctccatttgtggtcatcccatggtccccagccactaccagcagtgtgtcattctccagacgctccacaagtcccctgggggccaataaatgtgtcaggagtagaaacggataaatatttttctcaaaaagaaaaaagatttttctccaggggcctattcatccccagctataactccattagtaaggcctagacctttggcaaagagacatgtcttcggccatgatcctgatgcccaaagctacacattgagttaatcaagatggatggagcctctagcttcagcagaaggcctagagaagacagaattcagccaggaaagaagctctaagataagagcttcttcgagattctcagacacaaacccactcccccagccaataccccacactcactggatcacctggtccatctggctaagtttcttggccatttcagggtggtgagggccatgcttgtggccacagtggtccacacccaggaagtgagcaatcagcacgtcccattcaccactgtccactgtgaaggggagaacactgagcacagaagactaagacccactcctcaaccccagccaggctttgacactcctctatgtccagggatacaagcccaggctgttacacccataggtggctcagaatttgtggactaaagcagttctccccagctcccagtcttagaactaagtgctctggccccatgctcactggtggggtagaggtgttccaggatgccattgtccactgtgtctaggtctctgacattgaaggatgggaagaagaaagctttggagaaagcaccagggaaaaggtctttccaggtatcatctcccatgaagactacacgccttcctgcagggacatgaaagagaagtcagagcctgagcaaacgtcagggttaggagaaaagaggaaaagaggccctttaaagacccatcagaagtcccaaccatgcaacctaaagtacagcaattccatacagcaatccttatccttcagggcctaacattttccaccaggaagctttccctgataaccgtactccacccagacctcacacttatccttcctacaaaatgctctcctagttctgtctctgggtatctctactgagttgtttttcctgggtgtatcctgcttcttcccagtcagtgaatgaacagggcctgtatttctctgctttcttctccacacttgcaagccaagatccacatcttctcttcttcccttctcccttttactgagaggtctccaagaataaaacttacactccattcagattagaagcttcataggaacaaagcccagatcccttctcctctgtctcccaaactgagctccctaccagcagggccctggcctctttcttctcctctgtcccccaaactgagctccctaccagcagggccctggcctctttcttctcctctgtccccctacaccataatcaagtgtgcatctgggcacccaaaggtctgactccctgacttcaaattttgaagaaatttgccaaggtacttctggccttcaaagtggcccacactgacctgcactggtgagctgcttaatgagattgtcttccactatggcgtggctggcgaagttactaccagcatcaataaaggtaggcagtgagccagtggtgagggccttgaggcgctgcatggtggtggtaggagggtcaacctgagatcggtagagccgggcatggtggggctgaatctccaggatcctctgcaaggagcttagtttgcccaggaagggtagggagacaggaggctctctaggcacgtgtgaatgctggggctgggcgaagtcaaatcgcagagcatctatcagcaccaacacaacccgcgaaaatcgggaagccatccagcaggccccaggtttcccttggctcccccatggcagggacccagggcctgggggctcttggcagctgctatggttggtgagctccaaacgggtgagcaggaagccactggtgaagagggcaatgccagcgtagaagaggaagcagacccaggccaggaagagcaacactgaggctttctgcatcctgataggggtggggaagtaaattcattactgtggggcaaagaaccagtggatattctggtccctgaatacaagcccagctagaatcacttcctcccggaaaccttcctggagataaaccatttcacagccaacccctcgcaatattactctcctcctatttccaggctgggcatggtggctcacgcctgtaatcccagcactttgggaggccgaggcgggcggatcacctgaggtgaggagttcgagaccagcctggccaaaatggcgaaaccccgtccctactaaaaatacaaaaatgggtggcgggcacctgtagtctcagctactggggaggctgacgcaggagaatcgcttgaatcggggaggcggaggttgcagtgagccgagattgaaccactgcactagagtctggacaacagagggagacgccgtttcatgaggtcccaccccagatctactgaatcaggatcttcgaggggtagagcataggaacgttcacatgtacaggcaggaaatgctaatgctgcctgtacatgtgaacagtcaggagggaaacttattccaattggtagtcaggctctcttacacgccgtttctgcgcctctcccctcgccaatctcaatacccagtggaaagggatcgaagccgcaggggaatccgggcccagccgacggcgccgcctggcgggcaccgaggggacgaaggggaggagtcactctccgcttccgggcggccaggttcgccaggagacctgaggcacgaccttcgccacgcaaggaggctggggcccgggtcgagagtcgactgggcctccgctgggacccaggcgtgcgaccggctctgcctcctccggtaactacccagcctcccgctgggcaccctagccgcggtactgagcaccttggttaggagctgaggggaagagggagactcccttacttcagggtgaggggaataccggggggtgaggttctcgggagaccctggctcacctgcaatggcacccggaagtgcggcggcggcggcgcctgcgacctggcagcacagagatgcgtgcgccagacagagtggcccgtcggtggctccatcgccatctgccggcacctcggtggaagtttggccaggagcgtggggctggccccagtttgatgggatatttagtaattgaaaattggggacaggggaccaagctggaggaagagttcagggaaccactgtccattcatggttacgactaagagcacggctgctggagtcaaacttgacttgaatcctagcttggccgcacatattgtcatcattaggcattacctcatctgtaaaatggagataatacttattttcccttttttgcttagctgagtccaactgagatttcattactcctcctttcaaagcctgtaactaaatcttacgactgaataattaagcaaataatccttcggagtggaggaggggaggctgggcccagtggttcacacctgtaatcccagcactttgggaggtcaaggcaggtggatcacctaaggtcaggagttcaagaccagcccggccaatatgacgaaacgccgtctctactgaaaatacaaaagttacccgggagtggtggcgggcgcctgtgatcccagatacctgggaggctgaggcaggagaatcactcgaacccaggaggcggaggttgcagtgagccgagattgcaccactgcactccagcctgggcaacagagcaagactccctctcaaaaaaaaaaaaaaaaaatgccaggcacgatgactcacacctgtaagcccagcactttgggaggctgaggctggagaatcagttgaagtcaggaattggagaccagcctggccaacatgctgaaaccccaactctactaaaaattacaaaatttagccaggcgtggcgatgtgtacctgtagtcccagctactgaggaggctgagactggagaattgcttgaagccaggaggcagaggctacagtgagctgagatcgtgctactgcactccagcctaggcgacagagcgagactctgtctcaaaaagaaacaaaacccgtccactggtttctcatctcagagtaaaagttcttgcattggctctacatggccctgcacactatctgcctcttccccttctgattcatctagctgccacttctttgcttccctaactctgttccatccacagcagttctgcctcaggacctttgcatttgccatctcctctgtcagcttcagttcccgatgccgaaatggatctccatcaccttcatattgaagctcaactgtaacatcagcaaggcttcctgcaatcccctactttactagttcagcacctcccaccaccacaccccctggaaaaatttcccctcacttccttaatttcttccatagcacaactcatcagcatctgaaattctacacgtatttatggtttataccctccgagtagaatgtgagctcattgaggtcagggaattctgttttcttcattatgatatcctcagcacctagcatatatttgaggttcacatactgaccaaacgaataaaggaatatgttaatttttaaaaaaagttgagttattctcccaccttcatccccatagccccttatctcagttcagacctcatcccttctccaggatcactgaggcagccttctcactgtcctcccagcctcctgtgtctccctactatcccttctccacattgcagcaagacagctctaactaaaacattaatgtgattactgttatttttttcttttttgtagagatagggtcttaccatgttgcccaggctggtcaactcctgggctcaagtgatcctcccacctcagcctcccaaagtgctgggatcacaggtatgagtcactgtgcctggccaatgtgatgttttatcttaaaattcttcatgggaagggaaaaaaacccttcataggccgggcacagtggctcacgcctgtaatcccagcactttgggaggctcaggcgggcagatcacgaggtctggagttcgagatcagcctgaccaacatggtgaaaccctgtctctacaaaaaacaaaaaaattagccaggtatggtggcgcatgcctgtaatcccagctactaaggaggctgaggcaggagaattgcttgaacccgggaggcggaggttgcagtgagccgagatcatgccattgcactccagcctggacaacagagggagacgctgtctcaaacaaacaaacaaaaaatccctattaccctagggataatgtccaaccccttcaacaagaatctcattccttgtgacttggcccttgccatgtagtcacatcccccttaacactatacccttcagccaacttctctcaagcagtgagcctttgtttattctagtccaggacctgacttggtgaaaacttgctaacttttccagcctgagttcagtggcaatcagcaacgctgctactcataagctgatatgctcttcccaccaagatccctcagccagaactttcctctaccacagcatttatcacttttttttttttttttaaacagagcgtctcactgttgccaggctggagtgcaatggcgtgatcacggctcactgcagcctccacctcccaggttcatgcaattctcctgcctcagcctcccaagcaactgggactacccgcacatgctaccacgcccagctagtttttgtatttttagtagacggggtttcaccatattggccaggatggtctcaatctcctgacctcatgatctgcacacctcggcctcccaaagtgctgggattacaggtgttgagccaccacgcccggccacatttatcactttctatcactgtctgcttcctgtctgttttccctacctgaccttgtattctgtgaaagcagggaccactgggtttcaggtatttttgtaatccagtgtctagtaatgagcttggcacttggtagacattcaatgtttttgaataaatgaatgaggagcaccctcagtccctgaaaaccctttaagtatgccagtgcagggtagtagtttctcatgaaagtacttctttcccacgaaaaaacccccaaacacctgcctcaaacacacagccccacacttagcaggaaggggacttcacttcccagccagcagttcagtgaacatatggtttaacacttccaccctatcccacagtttctcttgaagacaaaaatgatagtttcactttacaagaagttcactcttattcatggaggcatcatgctgacaggactggatccaaggaaaatgctagtgactttcccaacttcattccccaatcaaagaggacagtttctggtttgccactggtgagtttattacacgactaaagttcaaataaaaaaataaaaaccaaaatcttggcagggaagctagagccagaatcaggaaaatctgcttccttgtccccagactccctggccaagcccagctccactaactcatcttgactcgatcaagttcctcatcaagacttgcatctgtaccctggacatctctgctgctcccactggagagtgagtctggagtccctggcactggggctttggtgagggctccatatacacccatggcctgaggagaggaacagagagaataccatgaggacacttgacagaggtgcagcccagcctaccaatggctaaacgggaaaagatggcatgggggccagtaagttggttttcctttctccctctctcaaacctgtcttgtaagctctggagttgattttaggaatcttgcaaaccatcagagtaaagtgactctcagaataccagcacaagtatctaccaaaaaaaggtatctcaagaacttccatatttgcaggactgagtggagatgtttcattcttagattccatctctacaaagaacgaagggaggtctagggccaaggcactctgaagacctttatggtatgtaagtgttgatgacggtggtggggtctcagtttggtccctggcaccagtgctctgtgctgggtcctcagagagctctaacctgagccaccatgctggtgacatcgccagggttggagggcagtaggatagtgttggagtccttggccagtttggagaacgcgctgacatactgctcggccacagtcagtgaagctgctgcatctccattctgtgatcacagggggataaaaatcagagatcaccgatacggagaagaagggggggatggggaatgaagaaagcagttcacaataaaaaggaccatgtaatctggctcaacagagcccacagaggcggaactctcctcaagcgtagataagagaaccccttccactgtcaattcctgtccccattcccacccaggggcctctcacatgttgtgtcagagctgcagccaggattcgaatagcttcagctttagccttggccttcgccagaactgcactggcctctcctgcaagagaagggacagagcttgcttgacccatgaagtcaaagtaccccaaagatcctgccccagcaccaatcttcaaaggcccatgccttgctcctccctcagcctctaccctctcctgacctgctgcctgatttatctgttcagccttttctgcttcggaggccaggatctgggcctgtttcttcccttctgccacattgatggccgactctcgggtcccctcagactctagaactgtggcccgtttccgccgctctgcctccacctggaagcccacaacaatcccaatcaacaagccaagggagactgatacagacatgcaactctacccatcataacaggagggaagtctggatcctcctggtactggagccctgaggcccttttcccacccctccttggcccccacctgcatctgcatagactctttcacccggggtggcacatggatatccttgatctcataacggaggcagcggataccccagcagtcagcagcttggttgatggcatccacaatgctggcattcagggactcccgttcctggaaaaagaggtgtaagccccacagcctcaacctacctatcaagggcctacactgagaagggcctgggactgatcttgaccttcagaaaagattaagagtgtcaggtttgtgtcttcaaaccctaactctggctcagatctgcttacccggaagactttgtccagagagagtttgccgagctctgatctcatggttgtttgagctagctgggtgacggcatactcagggtcctccacaccgtagcttgcctgagatggacacggatagtgtaagaagcttgggcacaagattttagtgaagagggcaactgaaaaggctggataaagtaggggacaggtaccttgtaagggtccatgatgcgcaggtaaaggactccatcgatttgcagagttacattgtctgtagaaccaggagagaaaacggggaaagtcaggcctctaggtcccaaccagttctttctactaagctctggatctacagcaaccacatcctaatagcctcagagcacccatgtcaccctgaacccctcaccgagagtcacagccgactgctcaggcacgttgatgacaatttccttgagactctgcacatatcggatccggtctaacacagggatgaggatgttcaaaccctggaaagaggagtcatgggtcctcagaaggctgggaactattgggttgggacctaagctagtcctggagtatgtagggagtcaacacatggaacatgcccagaaaagcagcagctcctaccaagaaataagtcctcagaaggctgaggtgtcactggtaagaaaacccaagagaacaggaatgcaagactaggcccctgaatggaggggagagtcatgagaatcggagccagcagaatagccatctctatgcagactgagaggtagggctgagagtgggcaggggagattcccaagaatggggcctgtgagatgcataggaaaaggtggtaacatggggatgatggtcagcagcctgggccctgtcaggtctggcctacagagtcgggagctaacagtgcgggcaggcccaaaggaagtcctcccgacattgcatgtcgtgagggattggtcatctggctggcccagggtgggcagaagaggtttctcacaggctccaggatccggtggaatcggcccattcgctccaccacccaggcctcctgctgcggcacgaacagtaccacggtgtttcggggcaatccagaggaggcgcggcgcggagcgcggccagaagccagtagagagccctgaaggaaagaagagggtgagcagagatcccatctggccagacacgccgcccctcggtcctgaaggcatctccataaaccacgaccctcaggatcctcggagaatcacatggggaccatgacctctgaccccagtcctctccaaaagttggaatttcgctcttttccagcggagaacccaggtaatctctgtcctgaccctctggaaaggttgcctcgctctcaccctcagcaaaagggccccagtgccccgcgccgcgcgcgccagcatttcccaccgccgcagcgacctccggaaccaacgagacgagcggagcggtcgctcccagaagcctacccgagcctttcctcttgcagttccgctcccccggatgtacttccggcagctccctcccccgcttcaacactcacccaatcagcgttacttggtcgaacggcgcgtcaagttgttccctgggaaacgcagaccttctagagaagggcgaaggctgtggttgttctgggtttagctgttcacgccgaagatccccggcctgatggccaaaatggaggctatttttcgcgggcattatcactcagacaccacgcactgaattattcgtcctcacccgagactcagtttgcccaccagagcgtagtatcgcccccatctgtcaccatagcgactagtggattggagctgactcgttgccatggttgccatagtgatattctctggtagtcccgctgtgttgtgcccaggactcccactggggactgaccccaatcccgttgccatggaaactgggcctaatattgcctggcgattgggccgagattttcccctcccctctttcctcaaagacactgcagctccttccctgtcttcccaagcaaggtttgttatgcccggtcttaaatagagtccagcaaacagcctcaacgttcaaccttgtctggagcatgtcaccttgcccacatccctaatgctctggtagtcaagagacctccgtagtcacctccattttacatatgagggcactgaagttctgaggggctaaagtcattaatagaaccagtattagaatcctgatctacaattcagagttcagcttctacggctgaactttacccaccaacccctccgaaaggagaaaaaccaggccccaggaatcagcagggactagcctaagacctcatgggcccaggcctgttgcctctctggtagaaagggctgagtcccagctccaggaaggccctccatcccccttcacaccctctccccaacaacaacaacaacaacaaaagtagagcttagttcaagtttccaaacaagaatttattctttcttttttaatctttttttctaaaaaaaagtaccaggtacaattttttcctgtttttgatttgctttgttttttcaagtttcagcaaatgcttgttcccctcagcccagccccaggagttaggactgaggctgggtcagagtctggagtggggaatggggtagtttggaaccacatgactgagtttgaggggtgcccctcaccccagctgaggtaggtgggtcagagtctggccaggtgagaggaggcaccccagtgcttggccctgactctgccccctggacaccttcttcagtcaggaccccaaaacaaggagacacaggtaggaggagagggacaactggagtctggagccctaggtgaggggtggttaacccctgtgtgtgtgcatacatgcacactcacacacacataccacacaaagacaagcttgtgcacacacacatacgcataacttggctttcagagataggtcagagggtaggggaagtgaagggactggggaaggacaggggaagctgagtctttggctactgactcagtccctctggaatagcccctcttccctcagctgagggaaagcagttctcctcctgcccccaccgcataagcctcttcaactcctgaggttggagcaatatctgagagtgggaagcggggaggagtgatgccaattatcaggtgtgggaggttaccaaggcaatccaatttgaataaattataaattaaaaataaataaaataacaagtggcccctgcccaggacagggaggcaacgctggcataacttgcctgggaacttgagaaaatctcagggtagctccagttcctccctactacctaagctggcctgggaaacccaagggaggggacaggcacatggagtacccgaagtagggcagggtgtagtaagaatcagaagctttaaacacccaaataatccatttgggcgtgagcatggtgagggctttaattcaagcctgaagggtctcttgctgtctctccatatatgttctctaagatggagcaggatgggcaggtcattagcccgcatgggttcagagtgctggcaatcagggcaaaggtgaataacgtggattatgaggggcctcggtcacagcctgcagttcgtaggggagccctgtgtccagctccaggctccggcgggaaaaaagcaggcggatatctccatgcaggcttaagcggcctgagcgggagctccggaacctggaggaggacaatgtgatcaacgtaagaatccaggctgggttcagtggctcatgcctgtaattccagtgctttgggagacccaggtgggaggactgcttgagcccaggagttggagaccagcctaagcaacatagcgagaccccatctctaaaaataaatgaatacatacatatatatgtacatacatacataaaaatttaaaaataaactaagcaagaatccggacagtatcgaagcaaggagagatcctcttcagggaggggatacctgggcctccccagccatccctgggccctctcctcacctgaggtgcagcaagtagcagaggaggcggtgggtggggttagcatttccctcctcacccacaggcaccaaaaagaggcgatggcgcaggaaggtcatgtgggcagcaggcatgtccgagaagtcaaaggtcacaaggaacatctttaccacagtctggttggggttaaataaggtctagggacaggacagtcaaggttggtagggcctgagggctgctttcctctctccccactcccactccctcagggcaaactcaccacttggacggtgcccaccttgggcacgctgtaacccttcctccccaaggggttcagatccacgatgccctggaaggccagggagccatcagtcaaggtggggactaggaaaaccctgggccctaaacacatgtccctctccacaagctctcaccctgaacctgcccctgccctacagtagagttctcctcacctggccctgactcacttctaggtgaggaataagtaagaaatacctcttgccccctggccccgcccccaaatcctcatcctcttgatgagctgactttggggttggagtcaaggcataccaggaagggagccggggcattttgctcagaaacatcaaagaatgtgacagtgacaggcagcgtgacgtgctgggggcagtatgacccactagctccaatttctgctgtgaagccctcaatgtggccagatggtgcaaaacgtcctcgcagcaatgattcctgggattagggtagggaaaacacatgaagagagagatgccaattcttttccttatccatccaagccacattccaccatcccacctctcccaggaccccggcaatcacaaaccccaacgggagctacctcaaagttgcccagcagggtacggctgacagcaggggtaggaacaggggaggcactgggggggctcagcaggcctggccccttccggaggcttcgaagggggctcctggtagaggaagggaaacacagggggttggcttgaggtattctgggattcctgcttatgcccttggactccaccctctgccactatgtagggcttctgccctggggtcccctactcggatgctggaaagagtacagacttctgcccccattctcagggacagggtagaggaaaaagctggtcacttacagcttcaggcgacgggctcctttcagcctccgccccatgggaccgcagtctgttgggtcctacggagagaaatgattgggaaaagacacagggtgaaggccatgtatgttttggggcagaagctcatcacaaactctcaaaggaacaccctgccccccaggcctccacctttacccacacaaatatccacttaagagtacatgaaggacaggcgcagtggcttgagcgcctgtaatcacaacactttagaaggccaaggtgggtcgatgatttgagctcaggagttcgagaccagcttgggcaacatggcgaaaccccatttctaccaaaaataccaaaaattagctgggtgcaatgtcatgtgcctgtggtcccagatacttgggaggctgaggttggaggatcccttgagcctgggaggaggaggttgcagtcagctgagattgtgccactgcactccagcagtgatggagtgagatc

SEQ ID NO: 30 - DNA, 491 bp, Homo sapiens
ttttttttgactctaatcaacattccttttgttggtgacatttgtgattttcagtaatctgagtttttgatggccttttaaacaagactccagtatgtgaaggttaattgctgtgctccacagatcttgtctattggcccctgtagaaagttaacctttgttgttttccttttataatttgcttattgcacaattgctttagggtaagtgaattatattaagatgccttgaaattatagcactccttgattaagaagctaaaatgtttctctcatttactccttaaacaaaagacttaaattagtttgggtcattattacttttattttgcagcatttggtttgttattagcgtaagagcaagtataggatatggagaggcccctggcttcatgagaacaaaggcaggcccaggttataattacagctttctcctgccccttctttactttctctaccacagttttctccactgtttgttttcctcttgcc

SEQ ID NO: 31 - DNA, 7775 bp, Homo sapiens
ggacaggctgtgtgtcggccggcggggattcaggatgaagatataacacttcagataactgagagtgaagacaacgaagaagatgacatggttgatgttatctggcgtcagttgatatcaagctgcccatggctttcagaacttgatgaaagtgcaactgaaggagttattaaagtgtggaggaaagttgtagatagaatattcagcctgtacaaactctcttgcagtgcatactttactttccttaaactcaacgctggtcaaattcctttagatgaggatgaccctaggctgcatttaagtcacagagtggaacagagcactgatgacatgattgtgatggccacattgcgcctgctgcggttgctcgtgaagcacgctggtgagcttcggcagtatctggagcacggcttggagacaacacccactgcaccatggagaggaattattccgcaacttttctcacgcttaaaccaccctgaagtgtatgtgcgccaaagtatttgtaaccttctctgccgtgtggctcaagattccccacatctcatattgtatcctgcaatagtgggtaccatatcgcttagtagtgaatcccaggcttcaggaaataaattttccactgcaattccaactttacttggcaatattcaaggagaagaattgctggtttctgaatgtgagggaggaagtcctcctgcatctcaggatagcaataaggatgaacctaaaagtggattaaatgaagaccaagccatgatgcaggattgttacagcaaaattgtagataagctgtcctctgcaaaccccaccatggtattacaggttcagatgctcgtggctgaactgcgcagggtcactgtgctctgggatgagctctggctgggagttttgctgcaacaacacatgtatgtcctgagacgaattcagcagcttgaagatgaggtgaagagagtccagaacaacaacaccttacgcaaagaagagaaaattgcaatcatgagggagaagcacacagctttgatgaagcccatcgtatttgctttggagcatgtgaggagtatcacagcggctcctgcagaaacacctcatgaaaaatggtttcaggataactatggtgatgccattgaaaatgccctagaaaaactgaagactccattgaaccctgcaaagcctgggagcagctggattccatttaaagagataatgctaagtttgcaacagagagcacagaaacgtgcaagttacatcttgcgtcttgaagaaatcagtccatggttggctgccatgactaacactgaaattgctcttcctggggaagtctcagccagagacactgtcacaatccatagtgtgggcggaaccatcacaatcttaccgactaaaaccaagccaaagaaacttctctttcttggatcagatgggaagagctatccttatcttttcaaaggactggaggatttacatctggatgagagaataatgcagttcctatctattgtgaataccatgtttgctacaattaatcgccaagaaacaccccggttccatgctcgacactattctgtaacaccactaggaacaagatcaggactaatccagtgggtagatggagccacacccttatttggtctttacaaacgatggcaacaacgggaagctgccttacaagcacaaaaggcccaagattcctaccaaactcctcagaatcctggaattgtaccccgtcctagtgaactttattacagtaaaattggccctgctttgaaaacagttgggcttagcctggatgtgtcccgtcgggattggcctcttcatgtaatgaaggcagtattggaagagttaatggaggccacacccccgaatctccttgccaaagagctctggtcatcttgcacaacacctgatgaatggtggagagttacgcagtcttatgcaagatctactgcagtcatgtctatggttggatacataattggccttggagacagacatctggataatgttcttatagatatgacgactggagaagttgttcacatagattacaatgtttgctttgaaaaaggtaaaagccttagagttcctgagaaagtaccttttcgaatgacacaaaacattgaaacagcactgggtgtaactggagtagaaggtgtatttaggctttcatgtgagcaggttttacacattatgcggcgtggcagagagaccctgctgacgctgctggaggcctttgtgtacgaccctctggtggactggacagcaggaggcgaggctgggtttgctggtgctgtctatggtggaggtggccagcaggccgagagcaagcagagcaagagagagatggagcgagagatcacccgcagcctgttttcttctagagtagctgagattaaggtgaactggtttaagaatagagatgagatgctggttgtgcttcccaagttggacggtagcttagatgaatacctaagcttgcaagagcaactgacagatgtggaaaaactgcagggcaaactactggaggaaatagagtttctagaaggagctgaaggggtggatcatccttctcatactctgcaacacaggtattctgagcacacccaactacagactcagcaaagagctgttcaggaagcaatccaggtgaagctgaatgaatttgaacaatggataacacattatcaggctgcattcaataatttagaagcaacacagcttgcaagcttgcttcaagagataagcacacaaatggaccttggtcctccaagttacgtgccagcaacagcctttctgcagaatgctggtcaggcccacttgattagccagtgcgagcagctggagggggaggttggtgctctcctgcagcagaggcgctccgtgctccgtggctgtctggagcaactgcatcactatgcaaccgtggccctgcagtatccgaaggccatatttcagaaacatcgaattgaacagtggaagacctggatggaagagctcatctgtaacaccacagtagagcgttgtcaagagctctataggaaatatgaaatgcaatatgctccccagccacccccaacagtgtgtcagttcatcactgccactgaaatgaccctgcagcgatacgcagcagacatcaacagcagacttattagacaagtggaacgcttgaaacaggaagctgtcactgtgccagtttgtgaagatcagttgaaagaaattgaacgttgcattaaagttttccttcatgagaatggagaagaaggatctttgagtctagcaagtgttattatttctgccctttgtacccttacaaggcgtaacctgatgatggaaggtgcagcgtcaagtgctggagaacagctggttgatctgacttctcgggatggagcctggttcttggaggaactctgcagtatgagcggaaacgtcacctgcttggttcagttactgaagcagtgccacctggtgccacaggacttagatatcccgaaccccatggaagcgtctgagacagttcacttagccaatggagtgtatacctcacttcaggaattgaattcgaatttccggcaaatcatatttccagaagcacttcgatgtttaatgaaaggggaatacacgttagaaagtatgctgcatgaactggacggtcttattgagcagaccaccgatggcgttcccctgcagactctagtggaatctcttcaggcctacttaagaaacgcagctatgggactggaagaagaaacacatgctcattacatcgatgttgccagactactacatgctcagtacggtgaattaatccaaccgagaaatggttcagttgatgaaacacccaaaatgtcagctggccagatgcttttggtagcattcgatggcatgtttgctcaagttgaaactgctttcagcttattagttgaaaagttgaacaagatggaaattcccatagcttggcgaaagattgacatcataagggaagccaggagtactcaagttaatttttttgatgatgataatcaccggcaggtgctagaagagattttctttctaaaaagactacagactattaaggagttcttcaggctctgtggtaccttttctaaaacattgtcaggatcaagttcacttgaagatcagaatactgtgaatgggcctgtacagattgtcaatgtgaaaaccctttttagaaactcttgtttcagtgaagaccaaatggccaaacctatcaaggcattcacagctgactttgtgaggcagctcttgatagggctacccaaccaagccctcggactcacactgtgcagttttatcagtgctctgggtgtagacatcattgctcaagtagaggcaaaggactttggtgccgaaagcaaagtttctgttgatgatctctgtaagaaagcggtggaacataacatccagatagggaagttctctcagctggttatgaacagggcaactgtgttagcaagttcttacgacactgcctggaagaagcatgacttggtgcgaaggctagaaaccagtatttcttcttgtaagacaagcctgcagcgggttcagctgcatattgccatgtttcagtggcaacatgaagatctacttatcaatagaccacaagccatgtcagtcacacctcccccacggtctgctatcctaaccagcatgaaaaagaagctgcataccctgagccagattgaaacttctattgcgacagttcaggagaagctagctgcacttgaatcaagtattgaacagcgactcaagtgggcaggtggtgccaaccctgcattggcccctgtactacaagattttgaagcaacgatagctgaaagaagaaatcttgtccttaaagagagccaaagagcaagtcaggtcacatttctctgcagcaatatcattcattttgaaagtttacgaacaagaactgcagaagccttaaacctggatgcggcgttatttgaactaatcaagcgatgtcagcagatgtgttcgtttgcatcacagtttaacagttcagtgtctgagttagagcttcgtttattacagagagtggacactggtcttgaacatcctattggcagctctgaatggcttttgtcagcacacaaacagttgacccaggatatgtctactcagagggcaattcagacagagaaagagcagcagatagaaacggtctgtgaaacaattcagaatctggttgataatataaagactgtgctcactggtcataaccgacagcttggagatgtcaaacatctcttgaaagctatggctaaggatgaagaagctgctctggcagatggtgaagatgttccctatgagaacagtgttaggcagtttttgggtgaatataaatcatggcaagacaacattcaaacagttctatttacattagtccaggctatgggtcaggttcgaagtcaagaacacgttgaaatgctccaggaaatcactcccaccttgaaagaactgaaaacacaaagtcagagtatctataataatttagtgagttttgcatcacccttagtcaccgatgcaacaaatgaatgttcgagtccaacgtcatctgctacttatcagccatccttcgctgcagcagtccggagtaacactggccagaagactcagcctgatgtcatgtcacagaatgctagaaagctgatccagaaaaatcttgctacatcagctgatactccaccaagcaccgttccaggaactggcaagagtgttgcttgtagtcctaaaaaggcagtcagagaccctaaaactgggaaagcggtgcaagagagaaactcctatgcagtgagtgtgtggaagagagtgaaagccaagttagagggccgagatgttgatccgaataggaggatgtcagttgctgaacaggttgactatgtcattaaggaagcaactaatctagataacttggctcagctgtatgaaggttggacagcctgggtgtgaatggcaagacagtagatgagtctggttaagcgaggtcagacatccaccagaatcaactcagcctcaggcatccaaagccacaccacagtcggtggtgatgcaactgggggcttactctgaggaaacctaggaaatctcggtgcactaggaagtgaatcccgcaggacagctgcactcagggatacgcccaacaccatggcctgcaaccccagggtcaagggtgaaggaaagcaagctcaccgcctgaacacggagattgtctttctgccacagaacagcagcagacgtgtcgggaggttagctgcggaaagaaatcgggatgccgcggagcacagagtgatttggaactccattccacctgaccctgtgtgtacaatccaggaaaaaaacaaaccccactcagaaacagagaaaactggggtcgcgaagaaatcacagccaaggaagatttgatgcattcagattctcgtgtaacacttgttgcttggcaacagtactggttgggttgaccagtaagtagaaaaaggctaaaggctatgcgatatgaatttcagaaatggactgaaaatggagagctatgtaacagatacactacagtagaagaacttacttctgaaatgaagggaaaaaaaccaccccatcgttccctactcctccccaccacttacccgttccccctttacctaatctagtagattagccatctttcaaattcacttttatttcagtccttatatttcatatacttccgtctcgatgctgttaacaacttctgataacatggaaaattcaaggattgtttaaaggtctgatgatcacacacaaaatgtaattccggttatttaagtcatttctgtgattctatcatgtacagtttccagaattgtcactgtgcattcaaaagtaatgaatctaacagacatttgatttaatgtacactcccttttgcttatagtgtgcattttttttggaggtcattcaaattttccctcttctgtgatagctgtagtttctttcatagaaagtagctaatccagtgtaatcttttacctttttaaaaaccaagatagagtatctattagagttttacattgttgatgatagattaacaataaagtgatgttctggtggaggtagactgaaatttttttaattcatgtttttcatttgatacttttaatttacacttagtaaattaaaagttgtttaatttacttggcattttaggacatgtacatgaaacagtgaaaatgagatccaccaacatcttttattaagttcagttattagtctgtgaagtgctttactttttgcacaattttaatagcttgctattcagtaatacattatagtgaattcatgatcaaggtttccttaaatttagcattgcatttcagtactgactgtgtaagctaaattgctgatccaaaataaaaacccagactagaatagggttcttaaaatcaagtatcaatacaaaatagaacacaattaaaatcttaattgttggctgggcacagtggctcacgcctgtaatcccagcactttgggaggccgaggcgggcggatcatgaggttaggagagcgagaccatcctggctaacacggtgaaaccccgtctttactaaaatacaaaaaaaattagccgggtgtggtggcgggcgcctgtagtcccagctactcgggaggctgaggcaggagaatggcgtgaacccaggaggcggagcttgcagtgagccgagattgtgccactgcactccagcctgggcaacagagctagactctgtgtcaaaaataaatgactagat

SEQ ID NO: 32 - DNA, 850 bp, Homo sapiens
gcgccttcctctccgcagccccccgggatgcggtagcggccgctgtgcggaggccgcgaagcagctgcagccgccgccgcgcagatccacgctggctccgtgcgccatggtcacccacagcaagtttcccgccgccgggatgagccgccccctggacaccagcctgcgcctcaagaccttcagctccaagagcgagtaccagctggtggtgaacgcagtgcgcaagctgcaggagagcggcttctactggagcgcagtgaccggcggcgaggcgaacctgctgctcagtgccgagcccgccggcacctttctgatccgcgacagctcggaccagcgccacttcttcgcgctcagcgtcaagacccagtctgggaccaagaacctgcgcatccagtgtgaggggggcagcttctctctgcagagcgatccccggagcacgcagcccgtgccccgcttcgactgcgtgctcaagctggtgtaccactacatgccgccccctggagccccctccttcccctcgccacctactgaaccctcctccgaggtgcccgagcagccgtctgcccagccactccctgggagtccccccagaagagcctattacatctactccgggggcgagaagatccccctggtgttgagccggcccctctcctccaacgtggccactcttcagcatctctgtcggaagaccgtcaacggccacctggactcctatgagaaagtcacccagctgccggggcccattcgggagttcctggaccagtacgatgccccgctttaaggggtaaagggcgcaaagggcatgggtcgggagaggggacgcaggcccctctcctccgtggcacat

SEQ ID NO: 33 - DNA, 4415 bp, Homo sapiens
gccgccgccgccgccgccgcctcctgggaaccaggggactgaagagcctgcgagagcggaacactgccggaccccgggtgggggggcgcagcagctgcgcctggccccgcccaccacacctgggcgcccgtagaaccgcgcggggcggggcggggcaggaggctggcctggcgctccggccgctttgtcgaaagccggcccgactggagcaggacgaagggggagggtctcgaggccgagtcctgttcttctgagggacggaccccagctggggtggaaaagcagtaccagagagcctccgaggcgcgcggtgccaaccatggagcgggccggccccagcttcgggcagcagcgacagcagcagcagccccagcagcagaagcagcagcagagggatcaggactcggtcgaagcatggctggacgatcactgggactttaccttctcatactttgttagaaaagccaccagagaaatggtcaatgcatggtttgctgagagagttcacaccatccctgtgtgcaaggaaggtatcagaggccacaccgaatcttgctcttgtcccttgcagcagagtcctcgtgcagataacagtgtccctggaacaccaaccaggaaaatctctgcctctgaatttgaccggcctcttagacccattgttgtcaaggattctgagggaactgtgagcttcctctctgactcagaaaagaaggaacagatgcctctaacccctccaaggtttgatcatgatgaaggggaccagtgctcaagactcttggaattagtgaaggatatttctagtcatttggatgtcacagccttatgtcacaaaattttcttgcatatccatggactgatatctgctgaccgctattccctgttccttgtctgtgaagacagctccaatgacaagtttcttatcagccgcctctttgatgttgctgaaggttcaacactggaagaagtttcaaataactgtatccgcttagaatggaacaaaggcattgtgggacatgtggcagcgcttggtgagcccttgaacatcaaagatgcatatgaggatcctcggttcaatgcagaagttgaccaaattacaggctacaagacacaaagcattctttgtatgccaattaagaatcatagggaagaggttgttggtgtagcccaggccatcaacaagaaatcaggaaacggtgggacatttactgaaaaagatgaaaaggactttgctgcttatttggcattttgtggtattgttcttcataatgctcagctctatgagacttcactgctggagaacaagagaaatcaggtgctgcttgaccttgctagtttaatttttgaagaacaacaatcattagaagtaattttgaagaaaatagctgccactattatctctttcatgcaagtgcagaaatgcaccattttcatagtggatgaagattgctccgattctttttctagtgtgtttcacatggagtgtgaggaattagaaaaatcatctgatacattaacaagggaacatgatgcaaacaaaatcaattacatgtatgctcagtatgtcaaaaatactatggaaccacttaatatcccagatgtcagtaaggataaaagatttccctggacaactgaaaatacaggaaatgtaaaccagcagtgcattagaagtttgctttgtacacctataaaaaatggaaagaagaataaagttataggggtttgccaacttgttaataagatggaggagaatactggcaaggttaagcctttcaaccgaaatgacgaacagtttctggaagcttttgtcatcttttgtggcttggggatccagaacacgcagatgtatgaagcagtggagagagccatggccaagcaaatggtcacattggaggttctgtcgtatcatgcttcagcagcagaggaagaaacaagagagctacagtcgttagcggctgctgtggtgccatctgcccagacccttaaaattactgactttagcttcagtgactttgagctgtctgatctggaaacagcactgtgtacaattcggatgtttactgacctcaaccttgtgcagaacttccagatgaaacatgaggttctttgcagatggattttaagtgttaagaagaattatcggaagaatgttgcctatcataattggagacatgcctttaatacagctcagtgcatgtttgctgctctaaaagcaggcaaaattcagaacaagctgactgacctggagatacttgcattgctgattgctgcactaagccacgatttggatcaccgtggtgtgaataactcttacatacagcgaagtgaacatccacttgcccagctttactgccattcaatcatggaacaccatcattttgaccagtgcctgatgattcttaatagtccaggcaatcagattctcagtggcctctccattgaagaatataagaccacgttgaaaataatcaagcaagctattttagctacagacctagcactgtacattaagaggcgaggagaattttttgaacttataagaaaaaatcaattcaatttggaagatcctcatcaaaaggagttgtttttggcaatgctgatgacagcttgtgatctttctgcaattacaaaaccctggcctattcaacaacggatagcagaacttgtagcaactgaattttttgatcaaggagacagagagagaaaagaactcaacatagaacccactgatctaatgaacagggagaagaaaaacaaaatcccaagtatgcaagttgggttcatagatgccatctgcttgcaactgtatgaggccctgacccacgtgtcagaggactgtttccctttgctagatggctgcagaaagaacaggcagaaatggcaggcccttgcagaacagcaggagaagatgctgattaatggggaaagcggccaggccaagcggaactgagtggcctatttcatgcagagttgaagtttacagagatggtgtgttctgcaatatgcctagtttcttacacactgtctgtatagtgtctgtatttggtatatactttgccactgctgtatttttatttttgcacaacttttgagagtatagcatgaatgtttttagaggactattacatattttttgtatatttgttttatgctactgaactgaaaggatcaacaacatccactgttagcacattgataaaagcattgtttgtgatatttcgtgtactgcaaagtgtatgcagtattcttgcactgaggtttttttgcttggggattattttaaataattggtttttgtgttttctgaattaccattttttcaagaatgtttggaatctttcctttttcaaaagtaggttaggagcaaattatcatacattctgtgacatttaaagcctttataggatagtgaaaaatgctggctgagtggattttaagagaaataattgtatttgttaacagtgtctttttttaaaaagttaaggcactctgaaacaaatggaaagtcctatgaaactgtattgtaaagaaaacattatttaattgatatgctgttttgtgagagaacaggcaagacagaactttgtcacttcagtgcagtacatttttctgaaagctacccataaaatcactttcatctcacctacctgatgcaaagcaggtgaaaccttaggagatgatccagtcactgacttgattgagggataagtgtgatttagaaatggaatggccttggatgtctatcagtgaagaaaaatgttctgttagaagatctctctaagagtttttttccttctgagcttccttttcaaaataaaagtgacaattgtagcattgacttgaagtgagacatggttatagataagagagtacaaaatgactctttttcctgtcaattgaaatttaaagaaaagttttaattatataaatagcaaagggctattgccaatactagggtcaaaaatgaatttgagggaacagtgggtaagaaactttatgcctgaataacatttagcagtattgtgattgaaaaattgccatattttgatgtataggacaagtcaactgagatccagagaatcctggatgtgaatgctaaacactggcccttaactcacattcaatgtattttcttcccataacatttagtatagttaatattttcttagaatttgagcccatttaagtggattaatattctacatgtgtgcccctaaagacacatttcttgagatgagatggaatctactcctcgtgaagaggctgtgaacattgttgaaatgacaataggatttagaatagtacacacatttagttgataaagaagtggcagggtttgagaggattgactccagcatacaagcaggcccggtaatgggcctccacgatgtccctgccataggctctgtcccgaattc

SEQ ID NO: 34 - DNA, 3047 bp, Homo sapiens
tgggccgcagccctccccgccccgccgaccgcggtcacacactctcggagcctccccgtgagcgggagcgcggcgcacggcgatgcgccgaggcgggcgctgaggcggcgccgcgcgagcagcagcagaggcggcggcggcccccagcccagcccggcgccgccgccgagcccgggccccaaggtgcggcggcgccccaagttcccgccatgagcagccggctcggggggctccgcggccccggggactcccgccccgccgggcgcgaccgcagcgccccgcggccccgacgcgcttaacgttgtcgcttgccggtcccgccaccgccgcctccgccgccgctcgcgtcctcgccgccaccgcctcggccgctgcagctccgccggcagcatgtctcgaaggaagatttcgtccgagtccttcagctccctgggctccgactacctggagaccagcccggaggaggagggggagtgccccctgtctaggctctgctggaatggcagccggagcccgcccgggccgctggagcccagcccggccgcagctgccgctgccgccgccccggccccgaccccggctgcttctgccgccgccgccgctgccactgccggggccaggagggtgcagcgccggaggcgggtcaacctggactcgctgggcgagagcatcagccgcctgacggcgccctcgcctcagacgatacagcagactctcaagaggacactgcagtattatgaacatcaagttattggttacagggatgcagaaaagaatttccacaatatctctaacagatgctcctatgcagaccactccaacaaagaagaaattgaagatgtctcaggaattcttcagtgtactgctaatatactcggtttgaagtttgaggaaattcaaaaaagatttggtgaagagttctttaatatatgctttcatgagaatgagagagtccttcgagctgtaggtggcactttgcaggacttttttaacggctttgatgctttgttggaacacattagaacttcttttggaaaacaggccactctggagtcaccatctttcctatgcaaagagctccctgaaggtactctcatgctccactacttccaccctcaccatattgtggggtttgcaatgctggggatgattaaggctgcaggaaagaagatctatcggctggatgtggaagtggaacaggttgcaaatgagaagctatgctctgatgtttcaaacccaggcaattgtagctgtcttactttccttatcaaagaatgtgaaaatactaatatcatgaagaaccttccacagggaacctcccaagttcctgcggacctcagaattagcatcaacaccttctgtagagccttccctttccacttgatgtttgatcccagcatgtcagtccttcagttgggggaaggtctaaggaagcagcttcgatgtgacactcacaaagtgctcaagtttgaggactgcttcgagattgtatctccaaaggttaatgccacctttgaaagggtcctgctgcgactgtctaccccgtttgtgattagaaccaagcctgaggcttctggctctgaaaataaagacaaggtgatggaagtcaaaggacaaatgatccatgttccagaatcaaattccattttatttttgggctctccatgtgtggacaagttggatgaactcatgggccgagggctacatctctcagacatccctatccatgatgccacccgagatgtcattttggttggtgagcaggcaaaggcccaagatgggttgaagaaaaggatggataaattaaaggcaactttagaaagaactcaccaggccctggaagaagagaaaaagaagacagtggatcttctatattctattttccctggtgatgtagcccagcaattatggcaagggcagcaagtacaggccagaaagtttgatgatgtcaccatgctcttttcagacattgttggcttcacagccatatgtgcccagtgtactcccatgcaagtaatcagcatgctgaatgaactgtacaccagatttgaccaccagtgtggatttttggatatttataaggtggaaacaataggtgatgcctactgtgttgcagcagggctccacagaaaaagcctctgccatgctaaacccattgctctgatggccttgaagatgatggaactttcagaagaggtgctgacacctgatggaagaccgattcagccccagaggagtgaactccttttctcctttcctgtttccatccagctggttccagatcagcatcaaagtgaaacggatttgggtactgaaaagatgaggataggaattcactcaggctccgtgctggctggagttgttggggtgcgaatgccacgttattgcctgtttggaaataatgtcacactggcaagcaaattcgagtcgggaagtcaccctcggcgcatcaatgtcagcccaaccacttaccaattattaaaacgagaagaaagtttcacattcattccgcggtctcgtgaagagcttccagacaactttccaaaggaaattcctgggatctgctatttcctggaggtaaggactggtccaaagccaccaaagccttctctttcttcgtcgagaataaaaaaggtttcctacaacatcggcaccatgttcctccgggagacaagcctctgagacctgctacagatcaaagactcctccaaaaagcacaagcccagaacatgggtcaccaatggggggtggaaagagattgtgtctctttcattgctttgttgagaacaagcagcaaaatttctgtattatgtcaggcaataatcctactaaaaggtggaggtgaccgctgtcaataaaaagccggaggatgagggaaataagatgtgtccattcatatgagtggttttggtcatatatatacacatatattttaattacaagtgtgggtcccctttcagaactaaccaataaatagattccatgttttcttgtttatcacacatacaagtatctttccctatatatttgtaccacttttgagagcc

SEQ ID NO: 35 - DNA, 1803 bp, Homo sapiens
gataagcttgatatcgacttcgtgttcctgggtttccttggcgctgcggccgccgctccctctgcaactgtatgaggaggaggaggaggaggatgtgaagatggcggagctgcagatgctgctggaagaggaaatcccgggggggcgccgggccctcttcgacagatacacaaatctggaacgggtggccgattactgcgagaacaactacatacagtcagcagataagcagagagccctagaagaaaccaaagcctacaccacccaatccttagcaagtgttgcctatctgataaacaccttggacaacaatgtcctgcagatgctggatatccaggcatcccagctacgaaggatggaatcttcaatcaatcatatttcacaaacagttgatattcataaagagaaagttgcaagaagagaaattggtattttgactaccaataaaaacacttcaaggacacataagattattgctccagccaaccttgaacgaccagttcgttatattagaaaacctattgactatacaattctagatgatattggacatggagtaaaggtgagtacccagaacatgaagatgggtgggctgccgcgtacaacacctccaactcagaagccccctagtccccctatgtcagggaaagggacacttgggcggcactccccctatcgcacactggagccagtgcgtcctccagtggtaccaaatgattacgtacctagcccaacccgtaatatggctccctcgcagcagagccctgtgaggacagcttctgtgaatcaaagaaatcgaacttacagcagcagtgggagtagtggagggagccacccaagtagtcggagcagcagtcgagagaacagtggaagtggtagtgtgggggttcctattgctgttcctactccatctcctcccagtgtctttccaggtcatcctgtacagttctacagcatgaataggcctgcctctcgccatactcccccaacaatagggggctcgttgccctatagacgccctccttccattacttcacaaacaagccttcagaatcagatgaatggaggacctttttatagccagaatccagtatctcttgctcctcctcctccctccatcctacaggtaactcctacgttacctttaatgggatttgtggccagagtccaagaaaatatttcagatacaccacctccaccgccacctgtggaagaaccagtctttgatgagtctcccccacctcctcctcctccagaagattacgaagaggaggaagctgctgtggttgagtatagtgatccttatgctgaagaggacccaccgtgggctccacgttcttacttggaaaaggttgtggcaatttatgactatacaaaagacaaggaagatgagctgtcctttcaggaaggagccattatttatgtcatcaagaagaatgacgatggttggtatgagggagttatgaatggagtgactgggctttttcctgggaattacgttgagtctatcatgcattattctgagtaaagctcagcagggctgtgcttggctcacaggaatagtcaggtcttcccagattatctgaaggccctggggattccactccagtaaagtagaatgaaggatacaaatgataaaaattacactttttttttgggttattccccagtattaaaaacaaagcaagctgagtctgaacaaatggatctttctgccatcatttgtacaatgctgagctgtctggattgaaataaaatgaccatttttatgtatgtcaaaggtaaaaaaaaaaaaaaaaaaaa

SEQ ID NO: 36 - DNA, 3615 bp, Homo sapiens
ggactgtgtgtgtctggctgtagcagacgcgaggcggcgacgaggcgccggggacccgcgcgaggggcggccgggaggcggcggcggcggccgccagaagtagcagcaggaccggcggcggcgacggcagccctgaaatgcattttcctctccagcggccatgttaaccaggaaaccttcggccgccgctcccgccgcctacccgaccggccgaggtggggacagcgccgttcgtcagcttcaggcttccccggggctcggtgcagggcccacccggagcggagtggggactggcccgccctcccccatcgccctgccgcctctccgggccagcaacgctgccgccgcagcccacacgattggcggcagtaagcacacaatgaatgatcacctgcatgtcggcagccacgctcacggacagatccaggttcaacagttgtttgaggataacagtaacaagcggacagtgctcacgacacaaccaaatgggcttacaacagtgggcaaaacgggcttgccagtggtgccagagcggcagctggacagcattcatagacggcaggggagctccacctctctaaagtccatggaaggcatggggaaggtgaaagccacccccatgacacctgaacaagcaatgaagcaatacatgcaaaaactcacagccttcgaacaccatgagattttcagctaccctgaaatatatttcttgggtctaaatgctaagaagcgccagggcatgacaggtgggcccaacaatggtggctatgatgatgaccagggatcatatgtgcaggtgccccacgatcacgtggcttacaggtatgaggtcctcaaggtcattgggaaggggagctttgggcaggtggtcaaggcctacgatcacaaagtccaccagcacgtggccctaaagatggtgcggaatgagaagcgcttccaccggcaagcagcggaggagatccgaatcctggaacacctgcggaagcaggacaaggataacacaatgaatgtcatccatatgctggagaatttcaccttccgcaaccacatctgcatgacgtttgagctgctgagcatgaacctctatgagctcatcaagaagaataaattccagggcttcagtctgcctttggttcgcaagtttgcccactcgattctgcagtgcttggatgctttgcacaaaaacagaataattcactgtgaccttaagcccgagaacattttgttaaagcagcagggtagaagcggtattaaagtaattgattttggctccagttgttacgagcatcagcgtgtctacacgtacatccagtcgcgtttttaccgggctccagaagtgatccttggggccaggtatggcatgcccattgatatgtggagcctgggctgcattttagcagagctcctgacgggttaccccctcttgcctggggaagatgaaggggaccagctggcctgtatgattgaactgttgggcatgccctcacagaaactgctggatgcatccaaacgagccaaaaattttgtgagctccaagggttatccccgttactgcactgtcacgactctctcagatggctctgtggtcctaaacggaggccgttcccggagggggaaactgaggggcccaccggagagcagagagtgggggaacgcgctgaaggggtgtgatgatccccttttccttgacttcttaaaacagtgtttagagtgggatcctgcagtgcgcatgaccccaggccaggctttgcggcacccctggctgaggaggcggttgccaaagcctcccaccggggagaaaacgtcagtgaaaaggataactgagagcaccggtgctatcacatctatatccaagttacctccaccttctagctcagcttccaaactgaggactaatttggcgcagatgacagatgccaatgggaatattcagcagaggacagtgttgccaaaacttgttagctgagctcacgtcccctgatgctggtaacctgaaagatacgacattgctgagccttactgggttgaaaaggagtagctcagacctgtttttatttgctcaataactctactcatttgtatcttttcagcacttaattttaatgtaagaaagttgttcattttgtttttataaaatacatgaggacaatgctttaagtttttatactttcagaaactttttgtgttctaaaagtacaatgagccttactgtatttagtgtggcagaataataacatcagtggcaggccactgattacttcatgactgccacgcatttacagattggtgtcaaagacattcactatgtttttatggttcatgttatatcctccccagggtgacagccccttaaggccctccttttccctccatgctccaggtccatgcacaggtgtagcatgtcctgcttccgtttttcataaattaatctgggtgttgggggtagtgggaggagaacggtcagaatcaaagtgacattctaagaaaaactgtaccttagagattttcctctagtgctcaaacaaatacaaaataagatccccaaggtttaaactgcccagttagcattctgacattctaaaagccggcaaagcagcttttagtggataaatgggaatggaaacgtgtgtgttcctccaaattttctagtatgatcggtgagctgttttgtaaagaagcctcatattacagagttgcttttgcacctaaatttagaattgtattccatgaactgttcctcccttttctctgcttttctcctctctgttcctcttttaataccacacgtctgttgcttgcatttagtttgtcttcttccttcagctgtgtatcccagactgttaatacagaaaagagacatttcagctgtgattatgaccattgtttcatattccaattaaaaaaagaacagcagcctagctacttaaggtggggatttcatagttccaaagaagatttagcagattagagtgagttcacacttttcaggtgccactgtaaggttctctcagcctgggaaactatcaactctttctttaaaaagaaagagggttgaaaatcctctggacgaacagaagtcactttggctgttcagtaaggccaatgttaacaacacgtttagaggaggaaaagttcaacctcaagttaaatggtttgacttattcttcgtatcattagaagaaccccagagatagcattcctctattttattttactttcttttggattgcactgattgtttttgtgggaatgacactttatctggcaaagtaactgagagtttggtaaaagaatattttcttctctgaataataattattttcacagtgaaaatttcagtattttatcactaatgtatgagcaatgatctatatcaatttcaaggcacgtgaaaaaaattttttagtatgtgcaatttaatatagaaagatttctgcctgtttggacaataggttttgggtagtacagattaggataagtaagcttatatatgcacagagattattgtattacctgtaaattgatttacaagtacttaaaagcgtggtccccagtgaggccaagaaagtttccggttaagttctttaataataatcctacagtttatcttaagaa

SEQ ID NO: 37 - DNA, 3371 bp, Homo sapiens
tttctcccaacgtgttcttttttttcctcttcattctccctccttcgaggacacaaaagtggcttccgcggaaagatttggaggcggtgggagcttttctccccggagagcgactgtgtagaaaggatttttgggaagccgctttttaacacctctgctctccgtcccccaagcctctgtgtaatcctctgaggagaaaagcccatagcttgaaagttcgggggcattttgttgtgttctgtaggagagagggggaggaccctgttcgggtagtttggccggactggtactggccgttggaaaacccgaagtacatttccgtgtggaacttttgcagatatatatttttagatttttaaataccagataaaaaatatatgccttctatatatctcctggcgacctgcccctgacagcgcgatgtacaatacggtgtggagtatggaccgcgatgacgcagactggagggaggtgatgatgccctattcgacagaactgatattttatattgaaatggatcctccagctcttccaccaaagccacctaagccaatgacttcagcagttccaaatggaatgaaggacagttctgtttctcttcaggatgcagaatggtactggggggatatttcaagggaggaggtaaatgacaaattgcgggatatgccagatgggaccttcttggtccgagatgcctcaacaaaaatgcagggagattatactttgactttgcggaagggaggcaataataagttaataaagatctatcaccgggatggtaaatatggcttttctgatcctctgacatttaattccgtggtggagctcattaaccactatcaccatgaatctcttgctcagtacaatcccaaacttgatgtgaagctgatgtacccagtgtccagataccaacaggatcagttggtaaaagaagataatattgatgcagtaggtaaaaaactgcaagaataccactctcagtatcaggagaagagtaaagagtatgataggctgtatgaagaatatactagaacatcccaggaaatacagatgaagaggactgcaatagaagcttttaatgaaacaattaaaatatttgaagagcagtgtcacacacaagaacaacatagcaaagaatatattgagcgatttcgcagagaggggaatgaaaaggagattgaacgaattatgatgaattatgataaattgaaatcacgtctgggtgagattcatgatagcaaaatgcgtctagagcaggatttgaagaaacaagctttggacaaccgagaaatagataaaaaaatgaatagtatcaaacctgacctgatccagctgcgaaagatccgagatcaacaccttgtatggctcaatcacaaaggagtgagacagaaacgcctgaatgtctggctgggaattaagaatgaggatgctgatgagaactattttatcaatgaggaagatgaaaacctgccccattatgatgagaaaacctggtttgttgaggatatcaatcgagtacaagcagaggacttgctttatgggaaacctgatggtgcattcttaattcgtgagagtagcaagaaaggatgctatgcttgctctgtggtggccgatggggaagtgaagcactgtgtgatctacagcactgctcggggctatggctttgcagagccctacaacctgtacagctctctgaaggagctagtgctccattaccagcagacatccttggttcagcacaacgactccctcaacgtcaggcttgcctaccctgttcatgcacagatgccctcgctttgcagataaagaggaagtgggaagagaggtggtcttctggcatttttttctacagtttttattagactacgatgagggcattctttctacatagactgcttgttttgcacaagaagtgattttgtgaatgtgaagtggagaggccgaggagcagccggccgggatgggggcattagaggcctgaggttctctaggactcagccatgccgctgcactgacatactaagctggaagcagatgttttttttgaaagtctgtttcattggggtttttgttttgtttagccagacaccctcaacagaatattaggcttgatggttatagcgggtggggttgtatttggaagcctctgaagagaccatgtctttttaaaatctaactcttgagagtgcagcaggggcatggctctgctgggagttgtgttttgctttggcagtctctcttccccccacgaagaaggctgtttaggttttgtgatagaatgggatttgatgaaaaagacaaccaaaggaaaatggggaggcttgggatttcatttaaataatctaagccaagatgataaaaaaaaccttcaactgaaggtactttgtttcttacaacataatttaggcttcagcatctcaccagcccctccctctgaagaagtattatgttcagaagccaacaaaacagtttgttgccagaccaatgtttgatgggaaaacgtggcactcatagttgaatgtatacttctgtaccaaaacttgaacataaaagactagaatttgtgagttttagcaaacgctaaattgatcactgtaactaaccccttctgtccttcctgcctgtttctctgagatgaggaatagcattctttttgtggggatggtgagctttgaatcataaaatgaagttggtgcttgtatggtgtttccttagcctaaagaatgatctgttgtttgaaacctttgtaacttgtttgtatgagtaaagaaaaggtgcaatgcagtgcttttagatggcttgatataccaaataacaatatagacaacattattatatgtgcttccccaagtttaaaggccctgcagaaatagtaaacatggtttaatttcccttcatttccccctcctttgctggatggggttttgggagctataggttgctaaggaggggagtcagattgtggtcaggtgcctcagtaaatcacagacccaggggccctgtggtccagggtgagagtcacaccacattacacatgtgcttccatacagtggtttctgaagcttttgcagggagagaagatggcttagtgtttagactgttagtagaagccatctggaagcttttctctttgcctttttttgtgatcctgccattaaggctatgtgcagtctgccctcctgctccagtggccttgattttaggccaggaatcttctgctccatgtggcttaagccttccagctgagtgaagctaggcaaatggagtgggggcaggcatctattcctgcccccatcatgccccacacccatcagtcaacactcatttgacaaatagagtccagctgcctctgagccaatcctgggacctaa

SEQ ID NO: 38 - DNA, 1627 bp, Homo sapiens
taccgggccccccctcgaggtcgacggtatcgataagcttccactagagaaaaactccccactcttacaatttctttaaccgcaagaagcggaggacctggacaaggactcgaggagcaaggtggcgaaccaagggtagggcgcaccgggccgagaggtcccccgcaggttgcagatacggtggactctctgcggcttctgagcacggagggagctgtcgcggggtcgggaggtcgtctctcatccctgcctcatcttccgacggccggcggggccatgtccagaggcccgagctccgcggtcctgcctagcgccctgggatcccggaagctcggcccccggagcctcagctgcctgtcggacctggacggcggcgtggccctggagccgcgggcctgtaggccccctgggagcccgggccgcgcgccgccgccaacgccagcgccgtcgggctgcgacccccgcctgcggcccatcatcctgcggcgggcgcgctcactgcccagctcccccgaacgccgccagaaggccgcgggcgccccgggcgctgcgtgtcggccgggctgcagccagaagctccgcgtgcgcttcgccgacgccctgggcttggagctggcacaggtcaaggtgttcaacgcgggagacgacccgtccgtgccgctgcacgtgctgtcgcggctcgcaatcaactcggacctgtgctgcagcagccaggacctggagttcaccctgcattgcctggtgcccgatttcccgccgcccgtcgaggccgccgactttggcgagcgcctgcagcggcagctcgtgtgcctggagcgtgtcacttgctcggaccttggcatcagcggtacggtgcgcgtgtgcaacgtggccttcgagaagcaggtggctgtgcgctacactttctcgggctggcgcagtacccacgaggcggtggcgcggtggcgcgggcccgcaggccccgagggcacggaggacgttttcaccttcggctttccagtaccgcccttcctgctggagctcggctcccgcgtgcacttcgcggtgcgctaccaagtggcgggtgccgagtactgggacaacaacgaccaccgagactacagcctcacatgtcgcaaccacgcgctgcacatgcctcgcggggagtgcgaagagagctggatccacttcatctgagccgcgcggggaccggccacctggagcctccacacctaagctgcgcctcctgtcatttccctgctgggctctcacatctatctggttgttcttcaccaccctccaagtcctctgacctaattttctgctgcaaggtcccctggcagtggcccatcctgtcttctacttgaaacgtctgagtcacttgtctaaaaagtagcctcaggtggccagaaggccgagttgtgtaatgagttggggcagggtggtggggtaggtgcatgggagggtgggccctctggggaggcccaagcagcttgttttgcaaaggcccaagtcctcctgctaggaaaagcttttgcatgtgtcctgaatgtgtctctgtaaacatagctgttatttattattgtgatgttgggacctttagcccatagcggatgcctcctcaggaatattctcgatttaataagct

SEQ ID NO: 39 - DNA, 1109 bp, Homo sapiens
gccagtgaattcgggggctcagccctcctccctcccttccccctgcttcaggctgctgagcactgagcagcgctcagaatggaagccatcgccaaatatgacttcaaagctactgcagacgacgagctgagcttcaaaaggggggacatcctcaaggttttgaacgaagaatgtgatcagaactggtacaaggcagagcttaatggaaaagacggcttcattcccaagaactacatagaaatgaaaccacatccgtggttttttggcaaaatccccagagccaaggcagaagaaatgcttagcaaacagcggcacgatggggcctttcttatccgagagagtgagagcgctcctggggacttctccctctctgtcaagtttggaaacgatgtgcagcacttcaaggtgctccgagatggagccgggaagtacttcctctgggtggtgaagttcaattctttgaatgagctggtggattatcacagatctacatctgtctccagaaaccagcagatattcctgcgggacatagaacaggtgccacagcagccgacatacgtccaggccctctttgactttgatccccaggaggatggagagctgggcttccgccggggagattttatccatgtcatggataactcagaccccaactggtggaaaggagcttgccacgggcagaccggcatgtttccccgcaattatgtcacccccgtgaaccggaacgtctaagagtcaagaagcaattatttaaagaaagtgaaaaatgtaaaacacatacaaaagaattaaacccacaagctgcctctgacagcagcctgtgagggagtgcagaacacctggccgggtcaccctgtgaccctctcactttggttggaactttagggggtgggagggggcgttggatttaaaaatgccaaaacttacctataaattaagaagagtttttattacaaattttcactgctgctcctctttcccctcctttgtcttttttttcatccttttttctcttctgtccatcagtgcatgacgtttaaggccacgtatagtcctagctgacgccaataataaaaaacaagaaaccaaaaaaaaaaaacccgaattca

SEQ ID NO: 40 - DNA, 1234 bp, Homo sapiens
cggccgggagagtagcagtgccttgagccccagctctcctccccctttctctctaaggatggcccagaaggagaactcctacccctggccctacggcgacaagacggctccatctggcctgagcaccctgccccagcgagtcctccggaaagagcctgtcaccccatctgcacttgtcctcatgagccgctccaatgtccagcccacagctgcccctggccagaaggtgatggagaatagcagtgggacacccgacatcttaacgcggcacttcacaattgatgactttgagattgggcgtcctctgggcaaaggcaagtttggaaacgtgtacttggctcgggagaagaaaagccatttcatcgtggcgctcaaggtcctcttcaagtcccagatagagaaggagggcgtggagcatcagctgcgcagagagatcgaaatccaggcccacctgcaccatcccaacatcctgcgtctctacaactatttttatgaccggagaagaatctacttgattctagagtatgccccccgcgggatgctctacaaggagctgcagaagagctgcacatttgacgagcagcgaacagccacggtccgggcggtcatggaggagttggcagatgctctaatgtactgccatgggaagaaggtgattcacagagacataaagccagaaaatctgctcttagggctcaagggagagctgaagattgctgacttcggctggtctgtgcatgcgccctccctgaggaggaagacaatgtgtggcaccctggactacctgcccccagagatgattgaggggcgcatgcacaatgagaaggtggatctgtggtgcattggagtgctttgctatgagctgctggtggggaacccaccctttgagagtgcatcacacaacgagacctatcgccgcatcgtcaaggtggacctaaagttccccgcttctgtgcccacgggagcccaggacctcatctccaaactgctcaggcataacccctcggaacggctgcccctggcccaggtctcagcccacccttgggtccgggccaactctcggagggtgctgcctccctctgcccttcaatctgtcgcctgatggtccctgtcattcactcgggtgcgtgtgtttgtatgtctgtgtatgtataggggaaagaagggatccctaactgttcccttatctgttttctacctcctcctttgtttaataaaggctgaagctttttgt

SEQ ID NO: 41 - DNA, 3000 bp, Homo sapiens
ccgccggccggggcgcctggctgcactcagcgccggagccgggagctagcggccgccgccatgtcccaccagaccggcatccaagcaagtgaagatgttaaagagatctttgccagagccagaaatggaaagtacagacttctgaaaatatctattgaaaatgagcaacttgtgattggatcatatagtcagccttcagattcctgggataaggattatgattcctttgttttacccctgttggaggacaaacaaccatgctatatattattcaggttagattctcagaatgcccagggatatgaatggatattcattgcatggtctccagatcattctcatgttcgtcaaaaaatgttgtatgcagcaacaagagcaactctgaagaaggaatttggaggtggccacattaaagatgaagtatttggaacagtaaaggaagatgtatcattacatggatataaaaaatacttgctgtcacaatcttcccctgccccactgactgcagctgaggaagaactacgacagattaaaatcaatgaggtacagactgacgtgggtgtggacactaagcatcaaacactacaaggagtagcatttcccatttctcgagaagcctttcaggctttggaaaaattgaataatagacagctcaactatgtgcagttggaaatagatataaaaaatgaaattataattttggccaacacaacaaatacagaactgaaagatttgccaaagaggattcccaaggattcagctcgttaccatttctttctgtataaacattcccatgaaggagactatttagagtccatagtttttatttattcaatgcctggatacacatgcagtataagagagcggatgctgtattctagctgcaagagccgtctgctagaaattgtagaaagacaactacaaatggatgtaattagaaagatcgagatagacaatggggatgagttgactgcagacttcctttatgaagaagtacatcccaagcagcatgcacacaagcaaagttttgcaaaaccaaaaggtcctgcaggaaaaagaggaattcgaagactaattaggggcccagcggaaactgaagctactactgattaaagtcatcacattaaacattgtaatactagttttttaaaagtccagcttttagtacaggagaactgaaatcattccatgttgatataaagtagggaaaaaaattgtactttttggaaaatagcacttttcacttctgtgtgtttttaaaattaatgttatagaagactcatgatttctatttttgagttaaagctagaaaagggttcaacataatgtttaattttgtcacactgttttcatagcgttgattccacacttcaaatacttcttaaaattttatacagttgggccagttctagaaagtctgatgtctcaaagggtaaacttactactttcttgtgggacagaaagaccttaaaatattcatattacttaatgaatatgttaaggaccaggctagagtattttctaagctggaaacttagtgtgccttggaaaagccgcaagttgcttactccgagtagctgtgctagctctgtcagactgtaggatcatgtctgcaacttttagaaatagtgctttatattgcagcagtcttttatatttgacttttttttaatagcattaaaattgcagatcagctcactctgaaactttaagggtaccagatattttctatactgcaggatttctgatgacattgaaagactttaaacagccttagtaaattatctttctaatgctctgtgaggccaaacatttatgttcagattgaaatttaaattaatatcattcaaaaggaaacaaaaaatgttgagttttaaaaatcaggattgacttttttctccaaaaccatacatttatgggcaaattgtgttctttatcacttccgagcaaatactcagatttaaaattactttaaagtcctggtacttaacaggctaacgtagataaacaccttaataatctcagttaatactgtatttcaaaacacatttaactgttttctaatgctttgcattatcagttacaacctagagagattttgagcctcatatttctttgatacttgaaatagagggagctagaacacttaatgtttaatctgttaaacctgctgcaagagccataactttgaggcattttctaaatgaactgtggggatccaggatttgtaatttcttgatctaaactttatgctgcataaatcacttatcggaaatgcacatttcatagtgtgaagcactcatttctaaaccttattatctaaggtaatatatgcacctttcagaaatttgtgttcgagtaagtaaagcatattagaataattgtgggttgacagatttttaaaatagaatttagagtatttggggttttgtttgtttacaaataatcagactataatatttaaacatgcaaaataactgacaataatgttgcacttgtttactaaagatataagttgttccatgggtgtacacgtagacagacacacatacacccaaattattgcattaagaatcctggagcagaccatagctgaagctgttattttcagtcaggaagactacctgtcatgaaggtataaaataatttagaagtgaatgtttttctgtaccatctatgtgcaattatactctaaattccactacactacattaaagtaaatggacattccagaatatagatgtgattatagtcttaaactaattattattaaaccaatgattgctgaaaatcagtgatgcatttgttatagagtataactcatcgtttacagtatgttttagttggcagtatcatacctagatggtgaataacatattcccagtaaatttatatagcagtgaagaattacatgccttctggtggacattttataagtgcattttatatcacaataaaaattttttctctttaaaaaaaaaaaacaagaaaaaaaaaaaa

SEQ ID NO: 42 - DNA, 1462 bp, Homo sapiens
gctgcatcccctttttggaattgctcaaccaggtggtaaccggcgccgcttcctggccttgggaggtggttcctttcttaacccacaagaacctctcccaagagaacttggtcctgatgtctgaccatggagatgtgagcctcccgcccgaagaccgggtgagggctctctcccagctgggtagtgcggtagaggtgaatgaagacattccaccccgtcggtacttccgctctggagttgagattatccgaatggcatccatttactctgaggaaggcaacattgaacatgccttcatcctctataacaagtatatcacgctctttattgagaaactaccaaaacatcgagattacaaatctgctgtcattcctgaaaagaaagacacagtaaagaaattaaaggagattgcatttcccaaagcagaagagctgaaggcagagctgttaaaacgatataccaaagaatatacagaatataatgaagaaaagaagaaggaagcagaggaattggcccggaacatggccatccagcaagagctggaaaaggaaaaacagagggtagcacaacagaagcagcagcaattggaacaggaacagttccatgccttcgaggagatgatccggaaccaggagctagaaaaagagcgactgaaaattgtacaggagtttgggaaggtagaccctggcctaggtggcccgctagtgcctgacttggagaagccctccttagatgtgttccccaccttaacagtctcatccatacagccttcagactgtcacacaactgtaaggccagctaagccacctgtggtggacaggtccttgaaacctggagcactgagcaactcagaaagtattcccacaatcgatggattgcgccatgtggtggtgcctgggcggctgtgcccacagtttctccagttagccagtgccaacactgcccggggagtggagacatgtggaattctctgtggaaaactgatgaggaatgaatttaccattacccatgttctcatccccaagcaaagtgctgggtctgattactgcaacacagagaacgaagaagaacttttcctcatacaggatcagcagggcctcatcacactgggctggattcatactcaccccacacagaccgcgtttctctccagtgtcgacctacacactcactgctcttaccagatgatgttgccagagtcagtagccattgtttgctcccccaagttccaggaaactggattctttaaactaactgaccatggactagaggagatttcttcctgtcgccagaaaggatttcatccacacagcaaggatccacctctgttctgtagctgcagccacgtgactgttgtggacagagcagtgaccatcacagaccttcgatgagcgtttgagtccaacaccttccaagaacaacaaaaccatatcagtgtactgtagccccttaatttaagctt

SEQ ID NO: 43 - DNA, 2177 bp, Homo sapiens
cgttgcggcagcgggatcgtaaagctgttgatatcgattcgggcggtgcgggccggggggggacgcaggcgagcgtgcgggttccaaccctcgacccgtgccctgagcgtgcagacttcgcaagcgctcggacgtcgtcgcgccatggcggagaccaagattatctaccacatggacgaggaggagacgccgtacctggtcaagctgcccgtggcccccgagcgcgtcacgctggccgacttcaagaacgtgctcagcaaccggcccgtgcacgcctacaaattcttctttaagtccatggaccaggacttcggggtggtgaaggaggagatctttgatgacaatgccaagcttccctgcttcaacggccgcgtggtctcctggctggtcctggttgagggtgctcactcggatgcggggtcccagggcacggacagccacacagacctgcccccgcctcttgagcggacaggcggcatcggggactcccggtccccctccttccaacccgatgtggccagtagccgtgacgggatggacaacgagacaggcacggagtccatggtcagtcaccggcgggaccgtgcccgacgccggaaccgcgaggaggccgcccggaccaatgggcaccctaggggagaccgacggcgggatgtgggcctccctccagacagcgcgtccaccgccctcagcagcgagcttgagtccagcagctttgtggactcggacgaggatgacagcacgagcaggctcagcagctccacggagcagagcacctcatccagactcatccggaagcacaaacgccggcggaggaagcagcgccttcggcaggcggaccgggcctcctccttcagcagcatgaccgactccaccatgtcactcaacatcatcacggtcactctcaacatggaaagacatcactttctgggcatctgcatcgtggggcagagcaacgaccgtggagacggcggcatctacattggctccatcatgaagggcggggctgtggccgctgacggccgcatcgagcccggcgacatgttgctgcaggtgaatgacgtgaactttgagaacatgagcaatgacgatgccgtgcgggtgctgcgggagatcgtttcccagacggggcccatcagtctcactgtggccaagtgctgggacccaacgccccgaagctacttcaccgtcccacggcctgacccggtgcggcccatcgaccccgccgcctggctgtcccacacggcggcactgacaggagccctgccccgcccccagctggaagaggcgccgctgacggtggagagtgacatgaataccgtcgtccgggtcatgcagctgccagactcgggactggagatccgcgaccgcatgtggcttaagatcaccatcgccaatgccgtcatcggggcggacgtggtggactggctgtacacacacgtggagggcttcaaggagcggcgggaggcccggaagtacgccagcagcttgctgaagcacggcttcctgcggcacacggtcaacaagatcaccttctccgagcagtgctactacgtcttcggggatctctgcagcaatctcgccaccctgaacctcaacagtggctccagtgggacttcggatcaggacacgctggccccgctgccccacccggctgccccctggcctctgggtcagggctacccctaccagtacccgggacccccaccctgcttcccgcctgcctaccaggacccgggctttagctatggcagtggcagcaccgggagtcagcagagtgaagggagcaaaagcagtgggtccacccggaacaccctccggcccccggcctgtgagaaggagcgtcgggcggcgggatctggggacagtgacagtgaatcggatcacacggcaccgagtggggtgggaagcagctggcgagagcgtccggccgaccagctcagccgtggcagcagcccacgcagtcaggcttcctcgtacgccccagggctccccccgccccaccccacgaccaaggcctatacagtggtgggggggccacccgggggaccccctgtccgggagctggctgccgtccccccggaattgacaggcagccgccagtccttccagaaggctatggggaacccctgcgagttcttcgtggacatcatgtgactcgtggcgcatgcccagcc

SEQ ID NO: 44 - DNA, 3187 bp, Homo sapiens
gaattcggcacgagttggagacggcgacccaggcatctggggagcacagaagtcgtactcccttaaaccctgctttgctccccctgtggatgtaaccccttagctggcattttgcatctcaattggcttgtgatggaggcgtctttggggattcagatggatgagccaatggctttttctccccagcgtgaccggtttcaggctgaaggctctttaaaaaaaaacgagcagaattttaaacttgcaggtgttaaaaaagatattgagaagctttatgaagctgtaccacagcttagtaatgtgtttaagattgaggacaaaattggagaaggcactttcagctctgtttatttggccacagcacagttacaagtaggacctgaagagaaaattgctctaaaacacttgattccaacaagtcatcctataagaattgcagctgaacttcagtgcctaacagtggctggggggcaagataatgtcatgggagttaaatactgctttaggaagaatgatcatgtagttattgctatgccatatctggagcatgagtcgtttttggacattctgaattctctttcctttcaagaagtacgggaatatatgcttaatctgttcaaagctttgaaacgcattcatcagtttggtattgttcaccgtgatgttaagcccagcaattttttatataataggcgcctgaaaaagtatgccttggtagactttggtttggcccaaggaacccatgatacgaaaatagagcttcttaaatttgtccagtctgaagctcagcaggaaaggtgttcacaaaacaaatcccacataatcacaggaaacaagattccactgagtggcccagtacctaaggagctggatcagcagtccaccacaaaagcttctgttaaaagaccctacacaaatgcacaaattcagattaaacaaggaaaagacggaaaggagggatctgtaggcctttctgtccagcgctctgtttttggagaaagaaatttcaatatacacagctccatttcacatgagagccctgcagtgaaactcatgaagcagtcaaagactgtggatgtactgtctagaaagttagcaacaaaaaagaaggctatttctacgaaagttatgaatagtgctgtgatgaggaaaactgccagttcttgcccagctagcctgacctgtgactgctatgcaacagataaagtttgtagtatttgcctttcaaggcgtcagcaggttgcccctagggcaggtacaccaggattcagagcaccagaggtcttgacaaagtgccccaatcaaactacagcaattgacatgtggtctgcaggtgtcatatttctttctttgcttagtggacgatatccattttataaagcaagtgatgatttaactgctttggcccaaattatgacaattaggggatccagagaaactatccaagctgctaaaacttttgggaaatcaatattatgtagcaaagaagttccagcacaagacttgagaaaactctgtgagagactcaggggtatggattctagcactcccaagttaacaagtgatatacaagggcatgcttctcatcaaccagctatttcagagaagactgaccataaagcttcttgcctcgttcaaacacctccaggacaatactcagggaattcatttaaaaagggggatagtaatagctgtgagcattgttttgatgagtataataccaatttagaaggctggaatgaggtacctgatgaagcttatgacctgcttgataaacttctagatctaaatccagcttcaagaataacagcagaagaagctttgttgcatccattttttaaagatatgagcttgtgataatggatcttcatttaatgtttactgttatgaggtagaataaaaaagaatactttgtaatagccacaagttcttgtttagagaccagagcaggattaataatttattttaacattttagtgtttggtggcacattctaaaatatagattaagaatacttaaaatgcctgggatagttcttgggactaacaacatgatcttctttgagttaaacctacctaagtagattttaggtgggttcctattaggtcagatttttagcttccctaattacctttcactgacatatacagaaaaaggagcagttttagttttaattaattaaaattaacagatgtgatgaggattaaatgaatcaaaagacttaatttgtagattcttttagagttatgagctaggtatagtttggggaaactcaacctggtgctggtgctcttaacaattttgtaaataaagaagataatttccttttctagaggtacatattaggccttttatgaacactaaaacaatgaggaaatgttggtcatggggcaaagtatcacttaaaattgaattcatccatttttaaaaaacacttcatgaaagcattctggtgtgaattgccatttttttcttactggcttctcaattttcttccttctctgcccctacctaaaacattctcctcggaaattacatggtgctgaccacaaagtttctggatgttttattaaatattgtacgtctttacagttgggaatttaaaataatacatacactggttgataaagggaagctgcaggaccaaggtgaagattgatagtccaaatgcttttcttttttgagttgtatatttttggacaccatcttagatataattaggtagctgctgaaaggaaaagtgaatacagaattgacggtattattggagatttttcctctgcgtagagccatccagatctctgtatcctgttttgactaagtcttaggtgggttgggaagacagataatgaagtgtaggcaaagagaaaaggacccaagatagaggtttatattcagaaatggtatatatcaatgacagcatatcaaacttcctatgggaaaaagtctggtgggtggtcagctgacagatttcccatttagtagtcatagaatacagaaatagtttagggacatgtattcattttgttattttgagcattgataggtcagtatatctacctaatctgtttggtaagtataggatatataaaccattaccattgatctgtcttatgccataatcttaaaaaaaaattgaatgctcttgaatttgtatattcaataaagttatccttttatatttttt

SEQ ID NO: 45 - DNA, 565 bp, Homo sapiens
  misc_feature (419)..(419): n is a, c, g, or t
tacagatttgacagtttaatcagaaaaatggaatgatagaaatgaagcagactccccacctactgtgctaactgggtatgcaacagtttaatgaaataccataagccttagttggagactgtgatggaacagcgtagaggccatccgtttccaggccattctgagatccaagatgccaactccttgtttctatgaaacttcacgagatgtgccagtcagaaatggcatgctgaacattctgcagagctgcagcactggcctgggcagccagggctaccacactggtgacagtgctgctggtacctgtgatggctcttctggtatccatatcttatacacaacacctatccgtaggaagaacttccgcagaactgctcggagctcagggatcaggtcaaactgcataatttacacaaganggggtagtacattgaagcatgtgctttgaactttcatcatttatttgggggcttttgagtagaagtaacaccagagaacttgtccaggcctcccgattgctcttaaatatcacaaggatgaaataggcaagagcttcctgtgaaac

SEQ ID NO: 46 - DNA, 1360 bp, Homo sapiens
cggcggcggtcgaaagcggagtgaaagagggaggcagggagccggagagccggaaccggagtcgcagcggcggagacccctgtgcggtgcggagggggcggcggccccgactctgacccgcgccgggggtgggccatggcggagatcagcgacctggaccggcagatcgagcagctgcgtcgctgcgagctcatcaaggagagcgaagtcaaggccctgtgcgctaaggccagagagatcttggtagaggagagcaacgtgcagagggtggactcgccagtcacagtgtgcggcgacatccatggacaattctatgacctcaaagagctgttcagagtaggtggcgacgtccctgagaccaactacctcttcatgggggactttgtggaccgtggcttctatagcgtcgaaacgttcctcctgctgctggcacttaaggttcgctatcctgatcgcatcacactgatccggggcaaccatgagagtcgccagatcacgcaggtctatggcttctacgatgagtgcctgcgcaagtacggctcggtgactgtgtggcgctactgcactgagatctttgactacctcagcctgtcagccatcatcgatggcaagatcttctgcgtgcacgggggcctctccccctccatccagaccctggatcagattcggacaatcgaccgaaagcaagaggtgcctcatgatgggcccatgtgtgacctcctctggtctgacccagaagacaccacaggctggggcgtgagcccccgaggagccggctacctatttggcagtgacgtggtggcccagttcaacgcagccaatgacattgacatgatctgccgtgcccaccaactggtgatggaaggttacaagtggcacttcaatgagacggtgctcactgtgtggtcggcacccaactactgctaccgctgtgggaatgtggcagccatcttggagctggacgagcatctccagaaagatttcatcatctttgaggctgctccccaagagacacggggcatcccctccaagaagcccgtggccgactacttcctgtgaccccgcccggcccctgccccctccaacccttctggccctcgcaccactgtgactctgccatcttcctcagacggaggctgggggggctgtcctggctctgctgtcccccaagagggtgccttcgagggtgaggacttctctggagaggcctggagacctagctccatgttcctcctcctctctccccacttgaaccatgaagtttccaataatttttttttctttttttccttctttttctgtttgtttttagataaaaatttttgagaaaaaaaatgaaaaattctaataaaagaagaaa

SEQ ID NO: 47 - DNA, 1975 bp, Homo sapiens
caccgagcgcccctggtgtccctcgtagtggactgacgccgcagggcgagctagccggctccgcgcctctccgcggatccagacgcctcctggggctgctggcggagggtctgaggcggcgcggccatggctcacctccggggatttgcaaaccagcactctcgagtggaccctgaggagctcttcaccaagctcgaccgcattggcaagggctcgtttggggaggtctacaagggcatcgataaccacacaaaggaggtggtggccatcaagatcatcgacctggaggaggccgaggatgagatcgaggacatccagcaggagatcactgtcctcagtcagtgcgacagcccctacatcacccgctactttggctcctacctaaagagcaccaagctatggatcatcatggagtacctgggcggcggctcagcactggacttgcttaaaccaggtcccctggaggagacatacattgccacgatcctgcgggagattctgaagggcctggattatctgcactccgaacgcaagatccaccgagacatcaaagctgccaacgtgctactctcggagcagggtgacgtgaagctggcggactttggggtagcagggcagctcacagacacgcagattaagaggaacacattcgtgggcacccccttctggatggcacctgaggtcatcaagcagtcggcctacgacttcaaggctgacatctggtccctgggcatcacagccatcgagctggccaagggggagcctccaaactctgacctccaccccatgcgcgtcctgttcctgattcccaagaacagcccacccacactggagggccagcacagcaagcccttcaaggagttcgtggaggcctgcctcaacaaagacccccgattccggcccacggccaaggagctcctgaagcacaagttcatcacacgctacaccaagaagacctccttcctcacggagctcatcgaccgctataagcgctggaagtcagaggggcatggcgaggagtccagctctgaggactctgacattgatggcgaggcggaggacggggagcagggccccatctggacgttcccccctaccatccggccgagtccacacagcaagcttcacaaggggacggccctgcacagttcacagaagcctgcggacgccgtcaagaggcagccgaggtcccagtgcctgtccacgctggtccggcccgtcttcggagagctcaaagagaagcacaagcagagcggcgggagcgtgggtgcgctggaggagctggagaacgccttcagcctggccgaggagtcctgccccggcatctcagacaagctgatggtgcacctggtggagcgagtgcagaggttttcacacaacagaaaccacctgacatccacccgctgaagcgcactgctgttcagataggggacggaaggtcgtttgtttttgttctgagctccataagaactgtgctgacttggaaggtgccctgtgctatgtcgtgcctgcagggacacgtcggatcccgtgggcctcacatgccaggtcaccaggtcaccgtctccttccacccctgcagtgtgctgttgtgcacgtcaggacgctgttctctatgccactgcctcctccctctcctggcccagcagtattgctcacgggggctccagccgccggcgtggccctcatgagctacgcctgggtcttctgcagactcatgcagccctatggccgctcagaccaaggcgcagagcaactatcagggcatgctctgcctcctcctcccattgaggtggggagaggcaacagggcagcccccagaggagtgtcctggccgctgtctcccgggcccatgatggccatagatttgccttgtggtgttccatcaggtactgtgtctgctcataagtacttgtgtcatccagaatgttttgttttttaagaaaattgaattacttgtttcctgaaaaaaaaa

SEQ ID NO: 48 - DNA, 3034 bp, Homo sapiens
tggtttctaaatcttattcagtgagcacgtgttcctttttttaattagagaaaacttgacagtagcccctttttgtgtttcacagaggagctaacattccttctgtacctgtagttcatgcgggagatggcaggggcctggcacatgacggtggagcagaaatttggcctgttttctgctgagataaaggaagcagaccccctggctgcctcggaagcaagtcaacccaaaccctgtccccccgaagtgaccccccactacatctggatcgacttcctggtgcagcggtttgagatcgccaagtactgcagctctgaccaagtggagatcttctccagcctgctgcagcgctccatgtccctgaacatcggcggggccaaggggagcatgaaccggcacgtggcggccatcgggccccgcttcaagctgctgaccctggggctgtccctcctgcatgccgatgtggttccaaatgcaaccatccgcaatgtgcttcgcgagaagatctactccactgcctttgactacttcagctgtcccccaaagttccctactcaaggagagaagcggctgcgtgaagacataagcatcatgattaaattttggaccgccatgttctcagataagaagtacctgaccgccagccagcttgttcccccagataatcaggacacccggagcaacctggacataactgtcggctctcggcaacaagccacccaaggctggatcaacacataccccctgtccagcggcatgtccaccatctccaagaaatcaggcatgtctaagaaaaccaaccggggctcccagctgcacaaatactacatgaagcgcaggacgctgctgctgtccctgctggccactgagatcgagcgtctcatcacatggtacaacccgctgtcagccccggaactggaactagaccaggccggagagaacagcgtggccaactggagatctaagtacatcagcctgagtgagaagcagtggaaggacaacgtgaacctcgcctggagcatctctccctacctagccgtgcagctgcctgccaggtttaagaacacagaagccattgggaacgaagtgacccgtctcgttcggttggacccgggagccgttagtgatgtgcctgaagcaatcaagttcctggtcacctggcacaccatcgacgccgatgctccagagctcagccatgtgctgtgctgggcgcccacggacccacccacaggcctctcctacttctccagcatgtacccgccgcaccctctcacggcgcagtacggggtgaaagtcctgcggtccttccctccggacgccatcctcttctacatcccccagattgtgcaggccctcaggtacgacaagatgggctatgtgcgggagtatattctgtgggcagcgtctaaatcccagcttctggcacaccagttcatctggaacatgaagactaacatttatctagatgaagagggccaccagaaagaccctgacatcggcgacctcctggatcagttggtagaggagatcacaggctccttgtccggcccagcgaaggacttttaccagcgggagtttgatttctttaacaagatcaccaacgtgtcggctatcatcaagccctaccctaaaggcgacgagagaaagaaggcttgtctgtcggccctgtctgaagtgaaggtgcagccgggctgctacctgcccagcaaccctgaggccattgtgctggacatcgactacaagtctgggaccccgatgcagagtgctgcaaaagccccatatctggccaagttcaaggtgaagcgatgtggagttagtgaacttgaaaaagaaggtctgcggtgccgctcagactccgaggatgagtgcagcacgcaggaggccgacggccagaagatctcctggcaggcagccatcttcaaggtgggagacgactgccggcaggacatgctggccctgcagatcatcgacctcttcaagaacatcttccagctggtcggcctggacctctttgtttttccctaccgcgtggtggccactgcccctgggtgcggggtgatcgagtgcatccccgactgcacctcccgggaccagctgggccgccagacagacttcggcatgtacgactacttcacacgccagtacggggatgagtccactctggccttccagcaggcccgctacaacttcatccgaagcatggccgcctacagcctcctgctgttcctgctgcagatcaaggacagacacaacggcaacattatgctggacaagaagggtcatatcatccacatcgactttgggttcatgtttgaaagctcgccgggcggcaatctcggctgggaacccgacatcaagctgacggatgagatggtgatgatcatggggggcaagatggaggccacacccttcaagtggttcatggagatgtgtgtccgaggctacctggctgtgcggccctacatggacgcggtcgtctccctggtcactctcatgttggacacgggcctgccctgttttcgcggccagacaatcaagctcttgaagcacaggtttagccccaacatgactgagcgcgaggctgcaaatttcatcatgaaggtcatccagagctgcttcctcagcaacaggagccggacctacgacatgatccagtactatcagaatgacatcccctactgaggaggggaccttcgagggcctctgccccatgtgccctcaaagctgtcccacaatcatggagccctgcgacctccctgccctgccgccacatgcagtggaggagaggcctgtggcccaaagaacctggtagcgcctcctggggcagcacgtgggtggcgcagccttggtaacgccatggactgcagcgacaatcaatggatggtgctgtctatgcacaggtgtgagtcctctgtttgcactggacatattccctacctgtcttatttcataggtacatgaagtattgtgtataaaaaaagagataagatttaaccaacatcaacaaaataaaaacccaaaatagtaaaaaccc

SEQ ID NO: 49 - DNA, 2743 bp, Homo sapiens
tgggaagagaaggaaaacaaagaatacctaaaatctctatttgaaatcttgattctgatgggaaagcaaaacatacctctggatggacatgaggctgatgaaatcccagaaggtctctttactccagataactttcaggcactgctggagtgtcggataaattctggtgaagaggttctgagaaagcggtttgagacaacagcagttaacacgttgttttgttcaaaaacacagcagaggcagatgctggagatctgtgagagctgtattcgagaagaaactctcagggaagtgagagactcacacttcttttccattatcactgacgatgtagtggacatagcaggggaagagcacctacctgtgttggtgaggtttgttgatgaatctcataacctaagagaggaatttataggcttcctgccttatgaagccgatgcagaaattttggctgtgaaatttcacactatgataactgagaagtggggattaaatatggagtattgtcgtggccaggcttacattgtctctagtggattttcttccaaaatgaaagttgttgcttctagacttttagagaaatatccccaagctatctacacactctgctcttcctgtgccttaaatatgtggttggcaaaatcagtacctgttatgggagtatctgttgcattaggaacaattgaggaagtttgttcttttttccatcgatcaccacaactgcttttagaacttgacaacgtaatttctgttctttttcagaacagtaaagaaaggggtaaagaactgaaggaaatctgccattctcagtggacaggcaggcatgatgcttttgaaattttagtggaactcctgcaagcacttgttttatgtttagatggtataaatagtgacacaaatattagatggaataactatatagctggccgagcatttgtactcctgcagtgcagtgtcagattttgatttcattgttactattgttgttcttaaaaatgtcctatcttttacaagagcctttgggaaaaacctccaggggcaaacctctgatgtcttctttgcggccggtagcttgactgcagtactgcattcactcaacgaagtgatggaaaatattgaagtttatcatgaattttggtttgaggaagccacaaatttggcaaccaaacttgatattcaaatgaaactccctgggaaattccgcagagctcaccagggtaacttggaatctcagctaacctctgagagttactataaagaaaccctaagtgtcccaacagtggagcacattattcaggaacttaaagatatattctcagaacagcacctcaaagctcttaaatgcttatctctggtaccctcagtcatgggacaactcaaattcaatacgtcggaggaacaccatgctgacatgtatagaagtgacttacccaatcctgacacgctgtcagctgagcttcattgttggagaatcaaatggaaacacagggggaaagatatagagcttccgtccaccatctatgaagccctccacctgcctgacatcaagttttttcctaatgtgtatgcattgctgaaggtcctgtgtattcttcctgtgatgaaggttgagaatgagcggtatgaaaatggacgaaagcgtcttaaagcatatttgaggaacactttgacagaccaaaggtcaagtaacttggctttgcttaacataaattttgatataaaacacgacctggatttaatggtggtcacatatattaaactctatacaagtaagtcagagcttcctacagataaatccgaaactgtggaaaatacctaagagacttttaaaaataggctttcttatatttgatatttggaagaaaaagccgtaaggtgtatgtagaccacttaatcactaaatatctttgcctataggactccattgaatacattagccattgataatctacctgtttaaatggcccctgtttgaactctcaagctttgaagacctacctgttcttccagaagagaacgttgaaagtgccatgtttccttttgcgtgatctctgttgatggcactctggaattgtttcagttaagtcattttagacatagcatttattatcactgtggatctctacttgttgggtgttatgaattctttgaagaaatatattttgaagaggtgtgagaggaaggaatacattttataaaatgttgtagtgaagcccacaattgacctttgactaataggagttttaagtatgttaaaaatctatactggacagttacaagaaattaccggagaaaagcttgtgagctcaccaaacaaggatttcagtgtagattttgtctttcttgaacttaaagaaacaaatgacaaagtttgaatggaaaagcctgctgttgttccacatctcgttgctgtttacattcctttgtggagcctacatcttcctaagctttttagcaggtatatgttgaacacttctgtttcatggttgagacagaatcagaggccatggatactgacaactgatttgtctgttttttttctctgtctttctccatgactcttatatactgcctcatcttgatttataagcaaaacctggaaaacctacaaaataagtgttgtggtttatctagaaaaatatggaaaatattgctgttatttttggtgaagaaaatcaattttgtatagtttatttcaatctaaataaaatgtgaattttgtttaaaaaaaaaaaaaaaaaaa

SEQ ID NO: 50 - DNA, 791 bp, Homo sapiens
  misc_feature (646)..(646): n is a, c, g, or t
tttttttttttttttttttcaagtttcttatttttattataattaaggtcttggtcatttcatttattagctctgcaacttacatatttaaattaaagaaacgttattagacaactgttacaatttataaatgtaaggggccattattgagtaaatatattcctccaagagtggatgtgtcccttctcccaccaactaatgaagcagcaacattagtttaattttattagtagatgatacactgctgcaaacgctaattctcttctccatccccatgttgattttgtgtatatgtgtgagttggttagaatgcatcaacaatctaacaatcaacagcaagatgagctaggcttgggctttcggtgaagattgactgtgtctgtctgaatcaaatgatctgacctatcctcggtagcaagaactcttcgaaccgcttcctcaaaggctgctgccacatttgtggcatcttttgcacttgtttcaaaataaggatagtcgccgttgtccctgcaccaagcttgggcttcttctgtagacacctgccgttcgcttatgtcaatcttgttacccagaatcacaaaaggaaagctctcaggctctttcacatctgcataatatatgaattctttcctccagttacttaagntctggaagctttgtgaatcatcgacactaaaagtaagcaggcagcagtcagaaactctgtaaaatgtgtcctcaggcttcgggatcgctcctgaccctgcgtgtccaaatctcgctggtaacaaatgtccatccacttccaaatt

SEQ ID NO: 51 - DNA, 2646 bp, Homo sapiens
atggtgttgagaaggatgcaccggccccgaagctgctcctaccagctgctgctggagcaccagcgtccgagctgcatccaggggctgcgctggacaccactcaccaacagcgaggagtccctggatttcagcgagagcctggagcaggcctccacagagcgggtgctcagggctgggaggcagctgcatcggcatctgctggccacctgcccaaacctcacccgagaccggaagtaccaccttaggctctatcggcagtgctgctctggccgggagctggtggatgggatcttggccctgggacttggggtccattcccggagccaagttgtgggaatctgccaggtgctgctggatgaaggtgccctctgccatgtgaaacacgactgggccttccaggaccgagatgcccaattctaccggttccccgggcccgagcccgagcccgtgggaactcatgagatggaggaggagttggccgaagctgtggccctgctctcccagcgggggcctgacgccctgctcactgtggcacttcgaaagcccccaggtcagcgcacggatgaagagctggacctcatctttgaggagctgctgcacatcaaggctgtggcccacctctccaactcggtgaagcgagaattagcggctgttctgctctttgaaccacacagcaaggcagggaccgtgttgttcagccagggggacaagggcacttcgtggtacattatctggaagggatctgtcaacgtggtgacccatggcaaggggctggtgaccaccctgcatgagggagatgattttggacagctggctctggtgaatgatgcaccccgggcagccaccatcatcctgcgagaagacaactgtcatttcctgcgtgtggacaagcaggacttcaaccgtatcatcaaggatgtggaggcaaagaccatgcggctggaagaacatggcaaagtggtgctggtgctggagagagcctctcagggcgccggcccttcccgacccccaaccccaggcaggaaccggtatacagtgatgtctggcaccccagagaagatcctagagcttctgttggaggccatgggaccagattccagtgctcatgacccaacagagacattcctcagcgacttcctcctgacccacagggtcttcatgcccagcgcccaactctgcgctgcccttctgcaccacttccatgtggagcctgcgggtggcagcgagcaggagcgcagcacctacgtctgcaacaagaggcagcagatcttgcggctggtcagccagtgggtggccctgtatggctccatgctccacactgaccctgtggccaccagcttcctccagaaactctcagacctggtgggcagggacacccgactcagcaacctgctgagggagcagtggccagagaggcggcgatgccacaggttggagaatggctgtgggaatgcatctcctcagatgaaggcccggaacttgcctgtttggctccccaaccaggacgagccccttcctggcagcagctgtgccatccaagttggggataaagtcccctatgacatctgccggccagaccactcagtgttgaccctgcagctgcctgtgacagcctccgtgagagaggtgatggcagcgttggcccaggaggatggctggaccaaggggcaggtgctggtgaaggtcaattctgcaggtgatgccattggcctgcagccagatgcccgtggtgtggccacatctctggggctcaatgagcgtctctttgttgtcaacccacaggaagcgcatgagctgatcccacaccctgaccagctggggcccactgtgggctctgctgaggggctggacctggtgagtgccaaggacctggcaggccagctgacggaccacgactggagcctcttcaacagtatccaccaggtggagctgatccactatgtgctgggcccccagcatctgcgggatgtcaccaccgccaacctggagcgcttcatgcgccgcttcaatgagctgcagtactgggtggccaccgagctgtgtctctgccccgtgcccggcccccgggcccagctgctcaggaagttcattaagctggcggcccacctcaaggagcagaagaatctcaattccttctttgccgtcatgtttggcctcagcaactcggccatcagccgcctagcccacacctgggagcggctgccccacaaagtccggaagctgtactccgccctcgagaggctgctggatccctcatggaaccaccgggtataccgactggccctcgccaagctctcccctcctgtcatccccttcatgccccttcttctcaaagacatgaccttcattcatgagggaaaccacacactagtggagaatctcatcaactttgagaagatgagaatgatggccagagccgcgcggatgctgcaccactgccgaagccacaaccctgtgcctctctcaccactcagaagccgagtttcccacctccacgaggacagccaggtggcgaggatttccacatgctcggagcagtccctgagcacccggagtccagccagcacctgggcttatgtccagcagctgaaggtcattgacaaccagcgggaactctcccgcctctcccgagagctggagccatga

SEQ ID NO: 52 - DNA, 2217 bp, Homo sapiens
gcggacccggcgccgaggcggccacccgagacgcggcgcgcacgctccggcctgcgcagcccggcccggccatggcggccccccgcccgtctcccgcgatctccgtttcggtctcggctccggctttttacgccccgcagaagaagttcggccctgtggtggccccaaagcccaaagtgaatcccttccggcccggggacagcgagcctcccccggcacccggggcccagcgcgcacagatgggccgggtgggcgagattcccccgccgcccccggaagactttcccctgcctccacctccccttgctggggatggcgacgatgcagagggtgctctgggaggtgccttcccgccgccccctcccccgatcgaggaatcatttccccctgcgcctctggaggaggagatcttcccttccccgccgcctcctccggaggaggagggagggcctgaggcccccataccgcccccaccacagcccagggagaaggtgagcagtattgatttggagatcgactctctgtcctcactgctggatgacatgaccaagaatgatcctttcaaagcccgggtgtcatctggatatgtgcccccaccagtggccactccattcagttccaagtccagtaccaagcctgcagccgggggcacagcacccctgcctccttggaagtccccttccagctcccagcctctgccccaggttccggctccggctcagagccagacacagttccatgttcagccccagccccagcccaagcctcaggtccaactccatgtccagtcccagacccagcctgtgtctttggctaacacccagccccgagggcccccagcctcatctccggctccagcccctaagttttctccagtgactcctaagtttactcctgtggcttccaagttcagtcctggagccccaggtggatctgggtcacaaccaaatcaaaaattggggcaccccgaagctctttctgctggcacaggctcccctcaacctcccagcttcacctatgcccagcagagggagaagccccgagtgcaggagaagcagcaccccgtgcccccaccggctcagaaccaaaaccaggtgcgctcccctggggccccagggcccctgactctgaaggaggtggaggagctggagcagctgacccagcagctaatgcaggacatggagcatcctcagaggcagaatgtggctgtcaacgaactctgcggccgatgccatcaacccctggcccgggcgcagccagccgtccgcgctctagggcagctgttccacatcgcctgcttcacctgccaccagtgtgcgcagcagctccagggccagcagttctacagtctggagggggcgccgtactgcgagggctgttacactgacaccctggagaagtgtaacacctgcggggagcccatcactgaccgcatgctgagggccacgggcaaggcctatcacccgcactgcttcacctgtgtggtctgcgcccgccccctggagggcacctccttcatcgtggaccaggccaaccggccccactgtgtccccgactaccacaagcagtacgccccgaggtgctccgtctgctctgagcccatcatgcctgagcctggccgagatgagactgtgcgagtggtcgccctggacaagaacttccacatgaagtgttacaagtgtgaggactgcgggaagcccctgtcgattgaggcagatgacaatggctgcttccccctggacggtcacgtgctctgtcggaagtgccacactgctagagcccagacctgagtgaggacaggccctcttcagaccgcagtccatgccccattgtggaccacccacactgagaccacctgcccccacctcagttattgttttgatgtctagcccctcccatttccaacccctccctagcatcccaggtgccctgacccaggacccaacatggtctagggatgcaggatccccgccctggggtctggtcctcgcccatcctgcagggattgcccaccgtcttccagacaccccacctgaggggggcaccaggtttagtgctgctgctttcactgctgcacccgcgccctcggccggccccccgagcagcctttgtactctgcttgcggagggctgggagaccctccaggacattcccaccctcccccatgctgccaagttgtagctatagctacaaataaaaaaaaaccttgttttccag

SEQ ID NO: 53 - DNA, 1631 bp, Homo sapiens
tttaacacccatagtaggcctaaaagcagccaccaattaagaaagccacagcacgtacacccactccagggatctgccagcaccctgtggggcccagactacaggctgatggcggaggcttcgagtgacccgggtgctgaggagcgggaagagttgctggggcccactgctcagtggagcgtggaggacgaggaggaggccgtccacgagcaatgccagcatgagagagacaggcagcttcaggcccaggacgaggagggaggcggccatgtccccgagcggccgaagcaggagatgctcctcagcctgaagccctcggaggcccctgaactggatgaggacgagggctttggcgactggtcccagaggccagagcagcggcagcagcacgagggggcgcagggcgccttggacagcggagagcccccccagtgcaggagtcctgagggggagcaagaggacaggcccggcctgcatgcctacgaaaaggaggacagtgatgaagtccacctggaggagttgagtctgagcaaggaggggccaggcccagaggacactgtccaggacaacctgggggccgcaggggctgaggaggaacaggaggagcaccagaaatgtcagcagcccaggacacccagccccttggtcttggaggggaccatcgaacagagctcgcctcccctgagccctaccaccaaactcatcgacaggaccgagtccctaaaccgctccatagagaagagtaacagtgtgaagaaatcccagccagacttgcccatctccaagattgatcagtggctggaacaatacacccaggccatcgagaccgctggccggacccccaagctagcccgccaggcctccatagagctgcccagcatggctgtggccagtaccaagagtcggtgggagacgggtgaggtacaggctcagtctgcggccaagactccgtcctgcaaggatattgtggctggagacatgagcaagaaaagcctctgggagcagaagggaggctccaagacctcatcaacaattaagagcaccccatctgggaagaggtataagtttgtggccaccgggcatgggaagtatgagaaggtgcttgtggaagggggcccggctccctaggcgtcccatctcgcttcctgggtctgcaggtccagccggctggcaccctccatgtacccaggggagattccagccagacacccgccccccggccctggctaagaagttgcttcctgttgccagcatgacctaccctcgcctctttgatgccatccgctgccacctccttttgctcctggaccctttagcctctctgcccttccactctctgaccaccgcccccgccctccccacccagctccgcttcttgttacttgggggaggaaagaaactcctgatcattggccaaagggacttacccctggagaggccaagtgccttctaggaagttaggaggttgaggcacagcctgtgcagagagggtgggtcacccccccagatccaaggggaaactgcaggtcaagggctgataacggccatgcaggatgcttgatgctgcgtcccccgctgcttgccgccccccaccccgccattttgtataataaagctccctgtgtattctc

SEQ ID NO: 54 - DNA, 3254 bp, Homo sapiens
caccgtccgcagcccgagcgccccggagccgcaggcgccgccgcgcagagacgccgcggctgcgactaggcgcgcccagccgcacgtggcggacccgcccccaggcccgcagtgtcctggaccccgcaggcctccgctctcctgtcctcggccccgtccccagggccgcgatgagcttcctgagccgacagcagccgccgccaccccgccgcgccggggcggcctgcaccttgcggcagaagctgatcttctcgccctgcagcgactgtgaggaggaggaagaagaggaggaggaggagggcagcggccacagcaccggggaggactcggcctttcaagagcccgactcgccgctgccgcccgagcggagccccacggagcccgggcccgagcgccgccgctcgcccgggccggcccccggcagccccggcgagctggaggaggacctgttgctgcccggcgcctgcccgggcgcggacgaggcgggcggtggggcggagggcgactcgtgggaggaggagggcttcggctcctcgtcgccggtcaagtcgccggcggccccctacttcctgggtagctctttctcgccggtgcgctgcggcggcccaggagatgcgtcgccgcggggttgcggggcgcgccgggcgggcgaaggccgccgctcgccgcggccggaccacccgggcaccccgccacacaagaccttccgcaagctgcgactcttcgacaccccgcacacgcccaagagtttgctctccaaagctcggggaattgattccagctctgttaaactccggggtagttctctcttcatggatacagaaaaatcaggaaaaagggaatttgatgtgcgacagactcctcaagtgaatattaatccttttactccggattctttgttgcttcattcctcaggacagtgtcgtcgtagaaagagaacgtattggaatgattcctgtggtgaagacatggaagccagtgattatgagcttgaagatgaaacaagacctgctaagagaattacaattactgaaagcaatatgaagtcccggtatacaacagaatttcatgagctagagaaaatcggctctggagaatttggttctgtatttaagtgtgtgaagaggctggatggatgcatttatgccattaagcgatcaaaaaagccattggcgggctctgttgatgagcagaacgctttgagagaagtatatgctcatgcagtgcttggacagcattctcatgtagttcgatatttctctgcgtgggcagaagatgatcatatgcttatacagaatgaatattgtaatggtggaagtttagctgatgctataagtgaaaactacagaatcatgagttactttaaagaagcagagttgaaggatctccttttgcaagttggccgaggcttgaggtatattcattcaatgtctttggttcacatggatataaaacctagtaatattttcatatctcgaacctcaatcccaaatgctgcctctgaagaaggagacgaagatgattgggcatccaacaaagttatgtttaaaataggtgatcttgggcatgtaacaaggatctccagtccacaagttgaggagggcgatagtcgttttcttgcaaatgaagttttacaggagaattatacccatctaccaaaagcagatatttttgcgcttgccctcacagtggtatgtgctgctggtgctgaacctcttccgagaaatggagatcaatggcatgaaatcagacagggtagattacctcggataccacaagtgctttcccaagaatttacagagttgctaaaagttatgattcatccagatccagagagaagaccttcagcaatggcactggtaaagcattcagtattgctgtccgcttctagaaagagtgcagaacaattacgaatagaattgaatgccgaaaagttcaaaaattcacttttacaaaaagaactcaagaaagcacagatggcaaaagctgcagctgaggaaagagcactcttcactgaccggatggccactaggtccaccacccagagtaatagaacatctcgacttattggaaagaaaatgaaccgctctgtcagccttactatatactgagctactcctttcccacctccccctgaacactgtgacaagaggaagctaggttgaaatcactgatagaatccagtttgcaattactttctcgattggtgtcagtagttttactgattaggacttttattgtgaattacagttgaaagctgtattttgatgattgctatgtcaggctttcatctaatcttaccagtctgtcttctgtaggatgtgtcactgttggatgttacaccagcctttccagggttaaccactgtggtggtgtgctgcttatagtttgctgttgcattgtaataaaaggtgtctttccctgtagtgacctgtaaaaagtactcaagggctttattacagacataccctccctttgaaaagggacatgctaaaagactcattactactcagccttcaatgtacctgtgtgtccatcttatatttcttttttttttaattgtgaattagacttgtatatcccactgggagcactttgtaggcattgcatgaaccatgggatgatgattctgtggaggtattgccttgtgaatttgctgctattttagttttgtctttgctgtaaacttgtagcattaaacaatcattgttgttaataggtcttctttttgaaacaattatgtgaaatgtatagctgcttttgatggaaagcagctatttgcctttttttttttcctttgaactttgaagctagtgcattggaaaaatgcaccctttccctcctttggaatgctgtattaatgtagtataataattactggttttgtaacttgttctggtaatgtccttcccggactctttttaaatgtctccccctaagttttatacttgattgtattattagtctgtttttaaatgttttgcccggtttttctcttcaatatttgtgtatataaaccgatcttcgtgatactgtacatagctgtttgaaatgccagaatgacttctgacattccaagtttttcacaaaatatattttatctgtgattagccatttgactaataatactggctaacagatgttgaaaaaaattgtctgttttctcattaattttggtctaaaacatgtttgcacttgtctttgacttgtgttttattaacattgattggcatattaaaagtcactctgagctt

SEQ ID NO: 55 - DNA, 2147 bp, Homo sapiens
gaattccgcgctttgcagagaaagcccccctggctcttctctctcaatccataatccagcgatgctgcagctgtaaaagcattaatagaaaatcaatccacaacctcgcggggcagcgatcgtcgagcgccgtttccaggctgccttccctggggtcgggagcggccccgctccccccgtggctggcgcgaaatgtggtgatccgtcccggggcggggatgacttcatgcagccggagctccgcggcgggagcggaggctgctgctggcaggtggggcgcgggccggcgcgagctgaccgagcactcggcgggcgcggcgggactgcggcccgtggcggcgtgcgcgggacctgcgctgactaggtccggggaagtttcctgactttctgagaagccctggtttccccaaagaagtgacttttctgatagaaatctgaaggtcatctccaagaaaaaagagatctagtatagtcaatgaattaaagacaagaaggtttccaatcagtccctgctatgtggatatttggtagcaatgactgatgtggaaactacatatgcagattttattgcttcaggaagaacaggtagaagaaatgcaatacatgatatcctggtttcctctgcaagtggcaacagcaatgaattagccttgaaattagcaggtcttgatatcaacaagacagaaggtgaagaagatgcacaacgaagttctacagaacaaagtggggaagcccagggagaagcagcaaaatctgaaagctaacaccccactttgaccctcgaccacacctgaaaatgtctcaaatctccaggagtatctggaatgcatttgtttccatgagtgaaaagaggaaaaagaaaatggctgtgctgcattgcaggaacctgctcattatcatgttaaaaatgagggcagaggctgtggctgcaggcagacttttccctacctctgtcattagcaatggttgaaatcatgtggcttgtgtttgggcgtcatttttgtatggatcctttcacttgatcatatgacgaaatgcttatagagagtagctccgacctagatgatgattcttcctgtagcatctggcccctcacaatgtcagaggatttaattgtgtctaattgcgaagggttgattgaaccccagagtttaaatatctctggctcaagtgttcacccagtaaaagaaagatccagaaagcactgtttttagcattacgtatctgtgtgttactgctgtgttatttacactgttttgtattgtacaatatatatgctcagcactgccccctctctgattgcttatgaaaacaaaatgatgtacattactgtgaatttttataccactcatttttaaaagggctgtcttttcattttagttttccatactgtggtggtgtacacaggatagaacacccttttttaaaacacagtctttccccttgctcattgtatgttgatgagttgattaagtctaacagattcatcaagactccattgctttattatagagacatttgaaaatatccattaatgtgaatatcacctgaattcaatctgtcaaatttgttttattctcaagtggagaacttctcccacataatatatatatatatatatattttaatttatgagaattttggacaattggaaaggtagaaaagaaaagccaagatcatactaaggactggaaatattttgttctatggaatcaaatttctcacaatgctgtatgatactatttaaatttggaggacaacttatcttcactaagctgaatcaggtggagaaagtaatctccttgcaatcatgtggacaccaatcacaaaagtaaagccctggtgttgtgttttcatgtcttttttcagccctctcagatccaaatgttattatgcactttttaatgtttgtaaacttttactaataattagtgtgaattgcattctgatacaataatgattatcattagaagctaacaaaattctcattaatactgtgtttgatggcctctgctgtgttttaacatcgtgcttcttatatggaaagtttttgtgagctgtgtaatccctctggtcagtattatgaaatcatttgtcagtggtaataaataaggaaccagtaaaaaaaaaaaaaaaaaaaggaattc

SEQ ID NO: 56 - DNA, 1924 bp, Homo sapiens
  misc_feature (634)..(634): n is a, c, g, or t
  misc_feature (1802)..(1803): n is a, c, g, or t
  misc_feature (1862)..(1862): n is a, c, g, or t
  misc_feature (1893)..(1893): n is a, c, g, or t
  misc_feature (1913)..(1913): n is a, c, g, or t
  misc_feature (1917)..(1917): n is a, c, g, or t
cggycggtcttaagctgttcttgcataggctcttaagcagcatggaaaaatggttgatggaaaataaagagcgcggctcacgagagataacccagctgtgctccctggaaccttcaatttcaaggcctccctvcctctactaggcgccttagctcactatggggaaccacttgactgagatggcgcccactgcctcctccttcttgccccacwtccaagccctgcatgtcgtggtcattgggctggactctgctggaaagacctccctcctttaccgcctcaagttcaaggagtttgtccagagtgtccccaccaaaggcttcaacaccgagaagatccgggtgcccctcgggggatcgcgtggcatcaccttccaagtgtgggacgtcggggggcaggagaagctgcgaccactgtggcgctcttatacccgccggacagacggtctagtgtttgtggtggacgctgcggaggctgagcggctggaggragccaaggtggagttgcaccgaatcagccgggcstcggavaaccagggcgtkccagtgctggtgctggccaacaagcaggaccagcccggggcactgagcgctgctgaggtggagaagaggctggcaghccgagagctagcagncgccactctcactcatgtgcaaggctgcagcgctgtggacggtctgggcctgcagcagggccttgagcgcctctatgagatgatcctcaagaggaagaaggcagctcggggtggcaagaagagacggtgacccaagccccccctccctttcctcccacctagtaggggtctgcacacttggacagcagggtgggaccagcctgtgacctctcagtcagactggggtgcaggacctgtccacctcaatgaaggagagaggagcatggggtgtcccgttttggtgccacactggggtggggatgggagatgggatgtctttgcatatctctctcatcctctctggagaagtgggcgctgcaggactgtggagacgtaaatgtaaactgtgactctacctcgaccctgtttcttatttttcttctctggctaaaaatttttaattggatgtgtttgggggcggggggatggaagtgacttggagaatgtgtttgggatgaatmamtatctccccttcctctgtcccccaactggggagtctccccaggctgcttttctaggaataccagtcacatagtttttatttttgtgtctgtgaaagtgccaagaacccctccccacatttgtagawccrtgaccctttttataagctgtgtgtgtcctctgtattattgttattaactattttttagcatttgcctgtaagttattaaagactgataactgtactcttaccttggtctggggcattttcctctccttatcttgccccagagacaattcaagatttctatatggggaacagtagtcatgggagggagtttatcttgaagcttgaatttgcaaagcaarcacttataaaaattagattgtgtgttacgggatggcttgtgaaaattataggggggagtggaaaacccctcaagctwccgtcaaagaagttgatattttaacagagtacagagtcctcaattccttaaaactcggcaaaataagccagacaacaggaatgtgcagctactatgaaatgctccaagcaggatggatgccttcatgcatgccaaatccagagaccaaaagctatcaggtcactaaaactgaaaactgaccagtgtctaatcctttcctcctctttcagcaactacagactgagttacctagggaaaacaanncaaaatacgatgtctctttgaagtcctcagattcaggtactgtttttccaccgtcacanagtttgatgttgtagaatggttcttaccgcnttcttgggagtattcccagntctncctgact

SEQ ID NO: 57 - DNA, 1972 bp, Homo sapiens
cgcggccggcagcgccagcgctggaatcgcccccgcgcctgggagtggcctcgcgaggcgggcgcgcgccccggggccgaggaatccgcctgcccgcccaggcgtcggccacgagagagcgggagcctcgctggtccccatttcagaggtggaggaagacctgggccgtgctctacccggccagtccccacggcgtagcgcggctcgagttctttgaccataaggggtcgagctctgggggtggccgagggagctcgcgccgcctggactgcaaagtgatccgtctggctgagtgtgtgagtgtggcccccgtcaccgtggagaccccccctgagcccggcgccactgccttccgcctggacactgctcagcgctcgcacctgctggcggccgacgcgccgtccagtgcagcctgggtgcagacgctgtgccgaaacgcctttccgaaaggcagctggactctggcgcctaccgataacccacctaagctttctgccctggagatgctggagaactccttgtacagccctacctgggaaggatcccaattctgggtaacggtgcagaggactgaggccgccgagcgctgtggcctgcatggctcctacgtgctgagggtggaggctgaaaggctgactctcctgaccgtgggggcccagagtcagatactggagccactcctgtcctggccctacactctgttgcgtcgctatggccgggacaaggtcatgttctctttcgaggccggccgccgctgcccctcaggccctggaaccttcaccttccagacggcacagggaaatgacatcttccaggcagttgagactgccatccaccggcagaaggcccagggaaaggccggacaggggcacgatgttctcagagctgactcccatgaaggggaggtggcagaggggaagttgccttccccacctggcccccaagagctcctcgacagtcccccagccctgtatgctgagcccttagactccctgcgcattgctccatgcccttcccaggactccctatactcagaccccttggacagcacgtctgctcaggcaggagagggagtacaacggaagaaacctctctattgggacttgtatgagcatgcgcagcagcagttgctgaaggccaagctgacagaccccaaagaggatcccatctatgatgaacctgagggcctggccccagtccctccccagggcctttatgatctgcctcgggagcccaaggatgcatggtggtgccaagctcgggtgaaggaggagggctatgagctcccctacaaccctgccactgatgactacgctgtgccaccccctcggagcacaaagcccctccttgctcccaagccccagggcccagccttccctgaacctggtactgcaactggcagtggcatcaaaagccacaactcagccctgtacagccaggtccagaagagcggggcctcagggagctgggactgtgggctctctagagtagggactgacaagactggggtcaagtcagagggctctacctgagaaggacggcaaggctgaggtggctaagggggaccatggggaggtggcactagggatcaaagaagatggttagaaccagcagaagccagagggtgggaggggccatgctgtgtgagaccaggggaccagagggatgggagagtcaagggaaggacaatcccaggaagtcctaagaagtggggcagatggcagggctgaggatgggctctgcatcccccaaagccatcccttccctacttccccaaatgaagggacggctgtgggaccaggtctgtggaaagtggtgcatggtcagaatgggtgcagtttgaggggcctgtgtggaggcctcagggagatgttggactgtgcctggatccttactcctgcattgttctttgccagagacctatttaaaaattttaaaattctcattaaagtcaaaaaaaaaaaaaaaaaaa

SEQ ID NO: 58 - DNA, 1838 bp, Homo sapiens
aattcttcacctcttttctcagctccctgcagcatgggtgctgggccctccttgctgctcgccgccctcctgctgcttctctccggcgacggcgccgtgcgctgcgacacacctgccaactgcacctatcttgacctgctgggcacctgggtcttccaggtgggctccagcggttcccagcgcgatgtcaactgctcggttatgggaccacaagaaaaaaaagtagtggtgtaccttcagaagctggatacagcatatgatgaccttggcaattctggccatttcaccatcatttacaaccaaggctttgagattgtgttgaatgactacaagtggtttgccttttttaagtataaagaagagggcagcaaggtgaccacttactgcaacgagacaatgactgggtgggtgcatgatgtgttgggccggaactgggcttgtttcaccggaaagaaggtgggaactgcctctgagaatgtgtatgtcaacacagcacaccttaagaattctcaggaaaagtattctaataggctctacaagtatgatcacaactttgtgaaagctatcaatgccattcagaagtcttggactgcaactacatacatggaatatgagactcttaccctgggagatatgattaggagaagtggtggccacagtcgaaaaatcccaaggcccaaacctgcaccactgactgctgaaatacagcaaaagattttgcatttgccaacatcttgggactggagaaatgttcatggtatcaattttgtcagtcctgttcgaaaccaagcatcctgtggcagctgctactcatttgcttctatgggtatgctagaagcgagaatccgtatactaaccaacaattctcagaccccaatcctaagccctcaggaggttgtgtcttgtagccagtatgctcaaggctgtgaaggcggcttcccataccttattgcaggaaagtacgcccaagattttgggctggtggaagaagcttgcttcccctacacaggcactgattctccatgcaaaatgaaggaagactgctttcgttattactcctctgagtaccactatgtaggaggtttctatggaggctgcaatgaagccctgatgaagcttgagttggtccatcatgggcccatggcagttgcttttgaagtatatgatgacttcctccactacaaaaaggggatctaccaccacactggtctaagagaccctttcaacccctttgagctgactaatcatgctgttctgcttgtgggctatggcactgactcagcctctgggatggattactggattgttaaaaacagctggggcaccggctggggtgagaatggctacttccggatccgcagaggaactgatgagtgtgcaattgagagcatagcagtggcagccacaccaattcctaaattgtagggtatgccttccagtatttcataatgatctgcatcagttgtaaaggggaattggtatattcacagactgtagactttcagcagcaatctcagaagcttacaaatagatttccatgaagatatttgtcttcagaattaaaactgcccttaattttaatatacctttcaatcggccactggccatttttttctaagtattcaattaagtgggaattttctggaagatggtcagctatgaagtaatagagtttgcttaatcatttgtaattcaaacatgctatattttttaaaatcaatgtgaaaacatagacttatttttaaattgtaccaatcacaagaaaataatggcaataattatcaaaacttttaaaatagatgctcatatttttaaaataaagttttaaaaataactgc

SEQ ID NO: 59 - DNA, 941 bp, Homo sapiens
gggggccgttggcgaagccagctgctggaggtgccgagaatctgagtttcggcaagcagccaggtctggaaactgtaacaggacattcagttagtaatgatggttgcaggttgaatagtctcgccctagatctcacctaacttgcagaatattttaaaaatgactacaccaaacaagacacctcctggtgctgaccccaagcagttggaaaggactggaacagtacgggaaattgggtcacaagctgtttggtcactctcatcttgcaaaccaggatttggagtggatcagttacgagatgacaatctagaaacttattggcaatcagatggttcccagcctcatttagtgaacatccaattcagaagaaaaacaacagtgaagacattatgtatttatgcagactacaaatctgatgaaagctatactccaagcaagatctcagtcagagtaggaaataattttcacaacctacaagaaattcggcaacttgagttggtggaaccaagtggctggattcatgttcccttaactgacaatcataagaagccaactcgttcattcatgatacagattgctgttctagccaatcacctgaatggaagagacacccatatgagacaaattaaaatatacacaccagtagaagagagctccattggtaaatttcctagatgtacaactatagatttcatgatgtatcgttcaataaggtgactttaaaatgagacgaaaatcattaaacgtatctttgttttatcctgtattcaaataatatatcatgtacctttattgaacaaggcatccgttatatctaattttgtatatgtttaaaaatattttattgtaactttgacaaataaatttggggtcatattatctttattttctttaacatgtaataaagctcacatattttacaaaaaaaaaaaaaaaaaaac

SEQ ID NO: 60 - DNA, 4071 bp, Homo sapiens
cctcggccctccgcctcctcccctcctccttctcgtcttcagccgctcctctcgccgccgcctccacagcctgggcctcgccgcgatgccggagaagaggcccttcgagcggctgcctgccgatgtctcccccatcaactacagcctttgcctcaagcccgacttgctggacttcaccttcgagggcaagctggaggccgccgcccaggtgaggcaggcgactaatcagattgtgatgaattgtgctgatattgatattattacagcttcatatgcaccagaaggagatgaagaaatacatgctacaggatttaactatcagaatgaagatgaaaaagtcaccttgtctttccctagtactctgcaaacaggtacgggaaccttaaagatagattttgttggagagctgaatgacaaaatgaaaggtttctatagaagtaaatatactaccccttctggagaggtgcgctatgctgctgtaacacagtttgaggctactgatgcccgaagggcttttccttgctgggatgagcctgctatcaaagcaacttttgatatctcattggttgttcctaaagacagagtagctttatcaaacatgaatgtaattgaccggaaaccataccctgatgatgaaaatttagtggaagtgaagtttgcccgcacacctgttatgtctacatatctggtggcatttgttgtgggtgaatatgactttgtagaaacaaggtcaaaagatggtgtgtgtgtccgtgtttacactcctgttggcaaagcagagcaaggaaaatttgcgttagaggttgctgctaaaaccttgcctttttataaggactacttcaatgttccttatcctctacctaaaattgatctcattgctattgcagactttgcagctggtgccatggagaactggggccttgttacttatagggagactgcattgcttattgatccaaaaaattcctgttcttcatcccgccagtgggttgctctggttgtgggacatgaactcgcccatcaatggtttggaaatcttgttactatggaatggtggactcatctttggttaaatgaaggttttgcatcctggattgaatatctgtgtgtagaccactgcttcccagagtatgatatttggactcagtttgtttctgctgattacacccgtgcccaggagcttgacgccttagataacagccatcctattgaagtcagtgtgggccatccatctgaggttgatgagatatttgatgctatatcatatagcaaaggtgcatctgtcatccgaatgctgcatgactacattggggataaggactttaagaaaggaatgaacatgtatttaaccaagttccaacaaaagaatgctgccacagaggatctctgggaaagtttagaaaatgctagtggtaaacctatagcagctgtgatgaatacctggaccaaacaaatgggatttcccctcatttatgtggaagctgaacaggtagaagatgacagattattgaggttgtcccaaaagaagttctgtgctggtgggtcatatgttggtgaagattgtccccagtggatggtccctatcacaatctctactagtgaagaccccaaccaggccaaactaaaaattctaatggacaagccagagatgaatgtggttttgaaaaatgtcaaaccagaccaatgggtgaagttaaacttaggaacagttgggttttatcggacccagtacagctctgccatgctggaaagtttattaccaggcattcgtgacctttctctgccccctgtggatcgacttggattacagaatgacctcttctccttggctcgagctggaatcattagcactgtagaggttctaaaagtcatggaggcttttgtgaatgagcccaattatactgtatggagcgacctgagctgtaacctggggattctctcaactctcttgtcccacacagacttctatgaggaaatccaggagtttgtgaaagatgtcttttcacctataggggagagactgggctgggaccccaaacctggagaaggtcatctcgatgcactcctgaggggcttggttctgggaaaactaggaaaagcaggacataaggcaacgttagaagaagcccgtcgtcggtttaaggaccacgtggaaggaaaacagattctctccgctgatctgaggagtcctgtctatctgactgttttgaagcatggtgatggcactactttagatattatgttaaaacttcataaacaagcagatatgcaagaagagaaaaaccgaatcgaaagagtccttggcgctactcttttgcctgacctgattcaaaaagtcctcacgtttgcactttcagaagaggtacgtccacaggacactgtatcggtaattggtggagtagctggaggcagcaagcatggtaggaaagctgcttggaaattcataaaggacaactgggaagaactttataaccgataccagggaggattcttaatatccagactaataaagctatcagttgagggatttgcagttgataaaatggctggagaggttaaggctttcttcgagagtcacccagctccttcagctgagcgtaccatccagcagtgttgtgaaaatattctgctgaatgctgcctggctaaagcgagatgctgagagcatccaccagtacctccttcagcggaaggcctcaccacccacagtgtgaatcctgaggtgccgccattggcggttctgctgcttcgctgcagggataaggtggagctaccgaacagctgattcatatgccaagaatttggagtcttctttcaaaccagtgggggttggacaatgaatgtagttaactggttcctgctcacactccagaattaaattctattgaaaaaggaaaatcagcaattcagcaaaaaaataaataaaaaataaaaatgtaaatatgatagtaataaaatagagcataacgaaactgtgaaactttctgaagccttgtcagtggttaaaagtatttaacactctactgttaatgacagatgttctgtttttataacctaccaaaaggaaactagaggcttcttggtgaagagcatttttgtgaagtgggttctgcaaggagcctataaagccaagggtggtgtccatttctgggaatggttaaacacaaaaggctgatagctggtatcacatagttggagtcagtgcataattccaagtggctttttttttttttggcacggggactgatcaggaagatatattcctgcataactcaatctgaaccaaggattgtagtttagttttcctccttgccttcccttctgtgtgaccgaccccttggccaaaaaaaaaacaaaaagcaaaaaacaaaaacctaccctgttctggtttttttcctccctttagttccacccccaacccccattccctggtgtccttcttagagatgaagaaataataaggaaacatctttcatagccacattaaataagagaaactgatatacattatttttttctttttaaagatgacttataagaaccctgaaatttatataggtgagacaatagaaataaaaagatcttcagccaggcctttctgaaggagttattctgctaaaaatggtcttagttgtctgaaaagccagctcttgaacctcttcacaacagtatcaacactggcttctcccggttcattttatgcgtgcgagaagtcagtggtaactgctgcagggcttaatacattagtggtaactggtttaaaaaacaaagactgtaagcctgtgtgtgccactgtttgcttcaacagtatatcctactaataagcctcacctatttaatccaatgagttttaaatctaaatctcattcccttcttctttccctaccttttttttctttttttcttaaaaaaatattttgtgttattaacagaaattcatatttggtgtggcttaacggtatttcagaaggtcatcagattgtgagactgcttccttgaaacatttttgtgctattgttttaaaaaaataattaaaaaacagttggcgttaaaaaaaaaaaaaaaaaaaaaa

SEQ ID NO: 61 - DNA, 3892 bp, Homo sapiens
tagaatacttgggtgacatctgcctgagagatctccaagaattacagaagacaaaaatactaatgcatttgagaaagcggtagttttggggggagggggaaaaagcaactgctttcctgatctgcaacttggctggatgctaagatgtcagtggacatgaatagccaggggtctgacagcaatgaagaggactatgacccaaattgtgaggaagaggaagaagaagaagaagacgaccctggggacatagaggactattacgtgggagtagccagcgatgtggagcagcagggggctgatgcctttgatcccgaggagtaccagttcacttgcttgacctacaaggaatctgagggtgccctcaatgagcacatgaccagcttagcttctgtcctaaaggtatctcattcagttgctaaacttatattagttaatttccactggcaagtttcagagatattggacagatacaagtccaattctgctcaactgcttgttgaggctcgagttcagcctaatccatcaaaacatgttcccacatcccatccccctcaccactgtgcagtgtgtatgcagtttgtgcgaaaggaaaacctactctctctggcctgtcagcaccagttttgccgcagctgctgggagcagcactgctcagttctcgtcaaggacggcgtgggcgtgggagtctcttgcatggctcaggactgtccactccgtacaccagaggactttgtgtttccattgcttcccaatgaagaattgagagagaaatacaggcgctacctcttcagggactatgtggagagtcattaccagctccagctgtgccctggtgcagactgccccatggttattcgggtacaggagcctagagctcgccgagtacagtgcaatcggtgcaacgaggtcttctgtttcaagtgtcgtcagatgtatcacgcacccacagactgtgccacaatccggaaatggctcacgaagtgtgcagacgactctgaaacagccaactacattagtgctcacactaaagactgtcccaagtgcaacatctgcattgagaagaatggaggctgcaatcacatgcaatgctccaaatgtaaacacgacttctgctggatgtgtctaggagattggaagactcatggcagtgaatactatgagtgcagtcgttacaaggagaatcctgacatcgtgaaccagagccaacaagcccaggcgagggaagccctcaagaagtacttattctactttgagaggtgggaaaaccacaataaaagcttgcagctagaggcacagacataccagcggattcacgagaagattcaggagagggtcatgaacaatctggggacatggatcgactggcagtacctacagaatgctgccaagctcttggccaagtgtcgatacaccctgcaatacacctacccatatgcatattacatggagtccggacccaggaagaagctgtttgaataccagcaggctcagctggaggctgagatcgaaaacctctcatggaaagtggagcgtgcagacagctatgacagaggggacttggagaaccagatgcatatagcggagcagcggaggagaaccctgctgaaagatttccatgacacctaagttgggatgtggatgtgccggggtgaggaagatgtggctgcaaggtctcccggctgccatactgcatgctgcaggctctgcctttcatgaccccaggcaacagccagggccccactcctgagagacactggcaacacctcttagttgatttctgttttcttctcttttcactttttgtttctaccagggtagaggccatgttgaactggcctcttttcaggacttttatttccccctggatggttgttgggagggagggaaagtgttttctgaatggctattaatagtattagatcattacaacttatgtaactttcaaaggttgtacaattatacaaaaaaaaaaaaaaaggcaaactataggataacacagagccctttttgaaaataaattggcattggagtgttttaccctctagctgttttacttagaatgtaacatatgctgcctacccacctcaaaatgtctgtactgcaagagggccctgggcctctgctttccatattcacgtttggccagagttgtagtcccaaagaagagcatgggtggcagatggtagggaattgaactggcctgtgcaatgggcatggagcacaaggggtcacagcatgcctcctgccttaccgtggcagtacggagacagtccagaacatggtcttcttgccacggggtgttgttgtctctggtggtgctgcatgtctgtggctcacctttattcttgaaactgaggtttacctggatctggctactgaggctagagcccacagcagaatggggttgggcctgtggcccccaaactagggggtgtgggttcatcacagtgttgccttttgtctcctaaagatagggatctacttttgaagggaattgttcctcccaaataaatttgctttaccttggtcctttcttttgtgccagtattcaagtggtatagctctgagcagggtcacatttggccaaacctgacactgtcttgctgcattctcctttggcaaacatcagggtcagaattcaggatagcccttcctagggcactggactttctggcatgggggctgtgtttgcacaagttattttcatgttacctggagagtgtccagaggctgctctgaggctgaggtgtgttcccccttgcctggttccagctgtcagagggataccatcctagggtctgggaatccaaggccacgagactccttggtttgtggtccgagatcctgtactaaggagggtctggccagaggaacagaccagcttttgcacaatgaagcgcaagggaacaagtggtttgcctggtgtcctacctgtcctgaacctggtcctgtgggccattgaaaagttagatctgtgatctctggggtttttgtggctttgttcaatgcttccactctagggcaggcagagcagtctatactctcccaagcctgcttgacctccaagtagagctgatacagagatctgtgaatattgtgatagaaattctttggtattcatacatttcagctgcaagtcagcaatttcccaggtaccatgtaagctataaaacagtcattcttaaagacagaggatagctgtgactcatgggatcatgaggtccatggctggttgcaggttccctttttccttcctcaggttttgtctcttcctgtgttgtccccagcaagggagagactgtggggtggattgggagaacagattaggagtatagcaaatgaacccagaatggaacagtggggagctaactgtgaatgaggagagtacctgctgcaggacctggaggtcaggtgtgaatgctgtattggcacagggaataaatatcctggcgtctggagccttcacctctccgtcaagtccttcctgtgatactgccatggcacaggatctgagttgcagctctgcaccctaaatcacaccctgggcattgtctgggctgcagggctgccaggttctgtacttgtgtccagctgtggccctggatgctggagctggagggttttctgtgctcagactgtagcctgtagctcttggcctgtgtagagccccctcctgtgccctcagtggctgtcgtttgttaacatcatcaggaagatgggaaaggtcaggcagaatttttctgccctacaaagggtggaagagaaaggacacagtattttcatgaatttaccatatatctttgtttttcttcaacgaaaaagttaattgaggcaatgtcatctgctcaaagttgagtggtttattcacaataaactgtaagtttctgattat

SEQ ID NO: 62 - DNA, 2905 bp, Homo sapiens
cctctgaaggttctagaatcgatagtgaattcgtgggacgggaagaggaagcactgcctttacttcagtgggaatctcggcctcagcctgcaagccaagtgttcacagtgaaaaaagcaagagaataagctaatactcctgtcctgaacaaggcagcggctccttggtaaagctactccttgatcgatcctttgcaccggattgttcaaagtggaccccaggggagaagtcggagcaaagaacttaccaccaagcagtccaagaggcccagaagcaaacctggaggtgagacccaaagaaagctggaaccatgctgactttgtacactgtgaggacacagagtctgttcctggaaagcccagtgtcaacgcagatgaggaagtcggaggtccccaaatctgccgtgtatgtggggacaaggccactggctatcacttcaatgtcatgacatgtgaaggatgcaagggctttttcaggagggccatgaaacgcaacgcccggctgaggtgccccttccggaagggcgcctgcgagatcacccggaagacccggcgacagtgccaggcctgccgcctgcgcaagtgcctggagagcggcatgaagaaggagatgatcatgtccgacgaggccgtggaggagaggcgggccttgatcaagcggaagaaaagtgaacggacagggactcagccactgggagtgcaggggctgacagaggagcagcggatgatgatcagggagctgatggacgctcagatgaaaacctttgacactaccttctcccatttcaagaatttccggctgccaggggtgcttagcagtggctgcgagttgccagagtctctgcaggccccatcgagggaagaagctgccaagtggagccaggtccggaaagatctgtgctctttgaaggtctctctgcagctgcggggggaggatggcagtgtctggaactacaaacccccagccgacagtggcgggaaagagatcttctccctgctgccccacatggctgacatgtcaacctacatgttcaaaggcatcatcagctttgccaaagtcatctcctacttcagggacttgcccatcgaggaccagatctccctgctgaagggggccgctttcgagctgtgtcaactgagattcaacacagtgttcaacgcggagactggaacctgggagtgtggccggctgtcctactgcttggaagacactgcaggtggcttccagcaacttctactggagcccatgctgaaattccactacatgctgaagaagctgcagctgcatgaggaggagtatgtgctgatgcaggccatctccctcttctccccagaccgcccaggtgtgctgcagcaccgcgtggtggaccagctgcaggagcaattcgccattactctgaagtcctacattgaatgcaatcggccccagcctgctcataggttcttgttcctgaagatcatggctatgctcaccgagctccgcagcatcaatgctcagcacacccagcggctgctgcgcatccaggacatacacccctttgctacgcccctcatgcaggagttgttcggcatcacaggtagctgagcggctgcccttgggtgacacctccgagaggcagccagacccagagccctctgagccgccactcccgggccaagacagatggacactgccaagagccgacaatgccctgctggcctgtctccctagggaattcctgctatgacagctggctagcattcctcaggaaggacatgggtgccccccacccccagttcagtctgtagggagtgaagccacagactcttacgtggagagtgcactgacctgtaggtcaggaccatcagagaggcaaggttgccctttccttttaaaaggccctgtggtctggggagaaatccctcagatcccactaaagtgtcaaggtgtggaagggaccaagcgaccaaggataggccatctggggtctatgcccacatacccacgtttgttcgcttcctgagtcttttcattgctacctctaatagtcctgtctcccacttcccactcgttcccctcctcttccgagctgctttgtgggctcaaggcctgtactcatcggcaggtgcatgagtatctgtgggagtcctctagagagatgagaagccaggaggcctgcaccaaatgtcagaagcttggcatgacctcattccggccacatcattctgtgtctctgcatccatttgaacacattattaagcactgataataggtagcctgctgtggggtatacagcattgactcagatatagatcctgagctcacagagtttatagttaaaaaaacaaacagaaacacaaacaatttggatcaaaaggagaaaatgataagtgacaaaagcagcacaaggaatttccctgtgtggatgctgagctgtgatggcaggcactgggtacccaagtgaaggttcccgaggacatgagtctgtaggagcaagggcacaaactgcagctgtgagtgcgtgtgtgtgatttggtgtaggtaggtctgtttgccacttgatggggcctgggtttgttcctggggctggaatgctgggtatgctctgtgacaaggctacgctgacaatcagttaaacacaccggagaagaaccatttacatgcaccttatatttctgtgtacacatctattctcaaagctaaagggtatgaaagtgcctgccttgtttatagccacttgtgagtaaaaatttttttgcattttcacaaattatactttatataaggcattccacacctaagaactagttttgggaaatgtagccctgggtttaatgtcaaatcaaggcaaaaggaattaaataatgtacttttggctaaaaaaaaaaaaaaaaaaaaaaaaaaaaaaaaaaaaaaaaaaaaaaaa

SEQ ID NO: 63 - DNA, 5216 bp, Homo sapiens
aagtccttgattaggagagtgtgagagctttggtcccaactggctgtgcctataggcttgtcactaggagaacatttgtgttaattgcactgtgctctgtcaaggaaactttgatttatagctggggtgcacaaataatggttgccggtcgcacatggattcggtagaactttgccttcctgaatctttttccctgcactacgaggaagagcttctctgcagaatgtcaaacaaagatcgacacattgattccagctgttcgtccttcatcaagacggaaccttccagcccagcctccctgacggacagcgtcaaccaccacagccctggtggctcttcagacgccagtgggagctacagttcaaccatgaatggccatcagaacggacttgactcgccacctctctacccttctgctcctatcctgggaggtagtgggcctgtcaggaaactgtatgatgactgctccagcaccattgttgaagatccccagaccaagtgtgaatacatgctcaactcgatgcccaagagactgtgtttagtgtgtggtgacatcgcttctgggtaccactatggggtagcatcatgtgaagcctgcaaggcattcttcaagaggacaattcaaggcaatatagaatacagctgccctgccacgaatgaatgtgaaatcacaaagcgcagacgtaaatcctgccaggcttgccgcttcatgaagtgtttaaaagtgggcatgctgaaagaaggggtgcgtcttgacagagtacgtggaggtcggcagaagtacaagcgcaggatagatgcggagaacagcccatacctgaaccctcagctggttcagccagccaaaaagccatataacaagattgtctcacatttgttggtggctgaaccggagaagatctatgccatgcctgaccctactgtccccgacagtgacatcaaagccctcactacactgtgtgacttggccgaccgagagttggtggttatcattggatgggcgaagcatattccaggcttctccacgctgtccctggcggaccagatgagccttctgcagagtgcttggatggaaattttgatccttggtgtcgtataccggtctctttcgtttgaggatgaacttgtctatgcagacgattatataatggacgaagaccagtccaaattagcaggccttcttgatctaaataatgctatcctgcagctggtaaagaaatacaagagcatgaagctggaaaaagaagaatttgtcaccctcaaagctatagctcttgctaattcagactccatgcacatagaagatgttgaagccgttcagaagcttcaggatgtcttacatgaagcgctgcaggattatgaagctggccagcacatggaagaccctcgtcgagctggcaagatgctgatgacactgccactcctgaggcagacctctaccaaggccgtgcagcatttctacaacatcaaactagaaggcaaagtcccaatgcacaaactttttttggaaatgttggaggccaaggtctgactaaaagctccctgggccttcccatccttcatgttgaaaaagggaaaataaacccaagagtgatgtcgaagaaacttagagtttagttaacaacatcaaaaatcaacagactgcactgataatttagcagcaagactatgaagcagctttcagattcctccataggttcctgatgagtttctttctactttctccatcatcttctttcctctttcttcccacatttctctttctctttattttttctccttttcttctttcacctcccttatttctttgcttctttcattcctagttcccattctcctttattttcttcccgtctgcctgccttctttcttttctttacctactctcattcctctcttttctcatccttccccttttttctaaatttgaaatagctttagtttaaaaaaaaatcctcccttccccctttcctttccctttctttcctttttccctttccttttccctttcctttcctttcctcttgaccttctttccatctttctttttcttccttctgctgctgaacttttaaaagaggtctctaactgaagagagatggaagccagccctgccaaaggatggagatccataatatggatgccagtgaacttattgtgaaccatactgtccccaatgactaaggaatcaaagagagagaaccaacgttcctaaaagtacagtgcaacatatacaaattgactgagtgcagtattagatttcatgggagcagcctctaattagacaacttaagcaacgttgcatcggctgcttcttatcattgcttttccatctagatcagttacagccatttgattccttaattgttttttcaagtcttccaggtatttgttagtttagctactatgtaactttttcagggaatagtttaagctttattcattcatgcaatactaaagagaaataagaatactgcaattttgtgctggctttgaacaattacgaacaataatgaaggacaaatgaatcctgaaggaagatttttaaaaatgttttgtttcttcttacaaatggagatttttttgtaccagctttaccacttttcagccatttattaatatgggaatttaacttactcaagcaatagttgaagggaaggtgcatattatcacggatgcaatttatgttgtgtgccagtctggtcccaaacatcaatttcttaacatgagctccagtttacctaaatgttcactgacacaaaggatgagattacacctacagtgactctgagtagtcacatatataagcactgcacatgagatatagatccgtagaattgtcaggagtgcacctctctacttgggaggtacaattgccatatgatttctagctgccatggtggttaggaatgtgatactgcctgtttgcaaagtcacagaccttgcctcagaaggagctgtgagccagtattcatttaagaggcaataaggcaaatgccagaattaaaaaaaaaaatcatcaaagacagaaaatgcctgaccaaattctaaaacctaatccatataagtttattcatttaggaatgttcgtttaaattaatctgcagtttttaccaagagctaagccaatatatgtgcttttcaaccagtattgtcacagcatgaaagtcaagtcaggttccagactgttaagaggtgtaatctaatgaagaaatcaattagatgccccgaaatctacagtcgctgaataaccaataaacagtaacctccatcaaatgctataccaatggaccagtgttagtagctgctccctgtattatgtgaacagtcttattctatgtacacagatgtaattaaaattgtaatcctaacaaacaaaagaaatgtagttcagcttttcaatgtttcatgtttgctgtgcttttctgaattttatgttgcattcaaagactgttgtcttgttcttgtggtgtttggattcttgtggtgtgtgcttttagacacagggtagaattagagacaatattggatgtacaattcctcaggagactacagtagtatattctattccttaccagtaataaggttcttcctaataataattaagagattgaaactccaaacaagtattcattatgaacagatacacatcaaaatcataataatattttcaaaacaaggaataatttctctaatggtttattatagaataccaatgtatagcttagaaataaaactttgaatatttcaagaatatagataagtctaatttttaaatgctgtatatatggctttcactcaatcatctctcagatgttgttattaactcgctctgtgttgttgcaaaactttttggtgcagattcgtttccaaaactattgctactttgtgtgctttaaacaaaataccttgggttgatgaaacatcaacccagtgctaggaatactgtgtatctatcattagctatatgggactatattgtagattgtggtttctcagtagagaagtgactgtagtgtgattctagataaatcatcattagcaattcattcagatggtcaataacttgaaatttatagctgtgataggagttcagaaattggcacatccctttaaaaataacaacagaaaatacaactcctgggaaaaaaggtgctgattctataagattatttatatatgtaagtgtttaaaaagattattttccagaaagtttgtgcagggtttaagttgctactattcaactacactatatataaataaaatatatacaatatatacattgttttcactgtatcacattaaagtacttgggcttcagaagtaagagccaaccaactgaaaacctgagatggagatatgttcaaagaatgagatacaattttttagttttcagtttaagtaactctcagcattacaaaagagtaagtatctcacaaataggaaataaaactaaaacgtggatttaaaaagaactgcacgggctttagggtaaatgctcatcttaaacctcactagagggaagtcttctcaagtttcaagcaagaccatttacttaatgtgaagttttggaaagttataaaggtgtatgttttagccatatgattttaattttaattttgcttcttttaggttcgttcttatttaaagcaatatgattgtgtgactccttgtagttacacttgtgtttcaatcagatcagattgttgtatttattccactattttgcatttaaatgataacataaaagatataaaaaatttaaaactgctatttttcttatagaagagaaaatgggtgttggtgattgtattttaattatttaagcgtctctgtttacctgcctaggaaaacattttatggcagtcttatgtgcaaagatcgtaaaaggacaaaaaatttaaactgcttataataatccaggagttgcattatagccagtagtaaaaataataataataataataaaaccatgtctatagctgtagatgggcttcacatctgtaaagcaatcaattgtatatttttgtgatgtgtaccatactgtgtgctccagcaaatgtccatttgtgtaaatgtatttattttatattgtatatattgttaaatgcaaaaaggagatatgattctgtaactccaatcagttcagatgtgtaactcaaattattatgcctttcaggatgatggtagagcaatattaaacaagcttccacttt

SEQ ID NO: 64 - DNA, 2346 bp, Homo sapiens
ccgccgtcgcccccgcctccccctgcctcagcggctgcccccgccagcgggccgcccgctcccccgggccttgcagcgggccccggcccggctggaggggccccgaccccagctctggtggcgggcagcagcgccgcggcccccttccctcacggggactcggccctgaacgagcaggagaaggagttgcagcggcggctgaagcgtctctacccggccgtggacgaacaagagacgccgctgcctcggtcctggagcccgaaggacaagttcagctacatcggcctctctcagaacaacctgcgggtgcactacaaaggtcatggcaaaaccccaaaagatgccgcgtcagttcgagccacgcatccaataccagcagcctgtgggatttattattttgaagtaaaaattgtcagtaagggaagagatggttacatgggaattggtctttctgctcaaggtgtgaacatgaatagactaccaggttgggataagcattcatatggttaccatggggatgatggacattcgttttgttcttctggaactggacaaccttatggaccaactttcactactggtgatgtcattggctgttgtgttaatcttatcaacaatacctgcttttacaccaagaatggacatagtttaggtattgctttcactgacctaccgccaaatttgtatcctactgtggggcttcaaacaccaggagaagtggtcgatgccaattttgggcaacatcctttcgtgtttgatatagaagactatatgcgggagtggagaaccaaaatccaggcacagatagatcgatttcctatcggagatcgagaaggagaatggcagaccatgatacaaaaaatggtttcatcttatttagtccaccatgggtactgtgccacagcagaggcctttgccagatctacagaccagaccgttctagaagaattagcttccattaagaatagacaaagaattcagaaattggtattagcaggaagaatgggagaagccattgaaacaacacaacagttatacccaagtttacttgaaagaaatcctaatctccttttcacattaaaagtgcgtcagtttatagaaatggtgaatggtacagatagtgaagtacgatgtttgggaggccgaagtccaaagtctcaagacagttatcctgttagtcctcgaccttttagtagtccaagtatgagccccagccatggaatgaatatccacaatttagcatcaggcaaaggaagcaccgcacatttttcaggttttgaaagttgtagtaatggtgtaatatcaaataaagcacatcaatcatattgccatagtaataaacaccagtcatccaacttgaatgtaccagaactaaacagtataaatatgtcaagatcacagcaagttaataacttcaccagtaatgatgtagacatggaaacagatcactactccaatggagttggagaaacttcatccaatggtttcctaaatggtagctctaaacatgaccacgaaatggaagattgtgacaccgaaatggaagttgattcaagtcagttgagacgccagttgtgtggaggaagtcaggccgccatagaaagaatgatccactttggacgagagctgcaagcaatgagtgaacagctaaggagagactgtggcaagaacactgcaaacaaaaaaatgttgaaggatgcattcagtctactagcatattcagatccctggaacagcccagttggaaatcagcttgacccgattcagagagaacctgtgtgctcagctcttaacagtgcaatattagaaacccacaatctgccaaagcaacctccacttgccctagcaatgggacaggccacacaatgtctaggactgatggctcgatcaggaattggatcctgcgcatttgccacagtggaagactacctacattagctatgcatttcaagagctcacacttatattgtggcatatagtcaacatggaagtagaccagctctgctgatttgaaatttagattttttaaattatgtactggggacaggtttttgtcgctttacattgcttcctagtttacagcatgatgcaaatgattttctaacttagtgttaggagaaattattttccatctttaacctcttagttgtctaagagttaaatattactgaatttcagacgttcaaattgatcatcacaaatcctttaaaacaattacctaaaagaaaccaaaaatcctgccttctttgtgggggaggggggagagaggggaaggaaatggaacaagttgtgtttgtgttagcatgtgggtgatgtaaacttcaaattgggagatgttccgacccc

SEQ ID NO: 65 - DNA, 724 bp, Homo sapiens
ttttttttttttcaatttttaaaactttatataaaagctctattataaatacaaagctaaactatctgagtactaacaacacagttcatacaaagaaacttaacagtagtaaaatacagatatataagatgcttatttttggtcctttaggataaaagaactaagttggtttttttcacatggctccaggcacaaaaatagaatataagatggtaactgcaacattcttagtgtttatccttgtaattctttaaatgtcaccagtcataatagcaatgaactcctcttggtttatttctccatcaccatctttgtcaaattcttctatcatagctcgaagttcttcatcactcatgttttcacccaattctctagcaacacgtcgcaaattcctcaagcttattttacctgaatcatcatcatcaaatagtttaaatgccttgagtatttcttcatggggatctctttccaatatccagtctgtcacaacttcattaaaatcttcaaaggtgattttccctgtggcttctctgtcataatctttaagaatcttcagtacatcagctttttttacatcaaaccccaaggctctcattgccacctttaattcatgataatctatcgcttcatctttgtctgtatcaaatagttcaaaagcatctttaattccttggttctgttcctcagacagtcctcttctttttttcctctttgtttggccact

SEQ ID NO: 66 - DNA, 2236 bp, Homo sapiens
cgagcggcggcggagcaggcatttccagcagtgaggagacagccagaagcaagctattggagctgaaggaacctgagacagaagctagtcccccctctgaattttactgatgaagaaactgaggccacagagctaaagtgacttttcccaaggtcgcccagcgaggacgtgggacttctcagacgtcaggagagtgatgtgagggagctgtgtgaccatagaaagtgacgtgttaaaaaccagcgctgccctctttgaaagccagggagcatcattcatttagcctgctgagaagaagaaaccaagtgtccgggattcagacctctctgcggccccaagtgttcgtggtgcttccagaggcagggctatgctcacattcatggcctctgacagcgaggaagaagtgtgtgatgagcggacgtccctaatgtcggccgagagccccacgccgcgctcctgccaggagggcaggcagggcccagaggatggagagaacactgcccagtggagaagccaggagaacgaggaggacggtgaggaggaccctgaccgctatgtctgtagtggggttcccgggcggccgccaggcctggaggaagagctgaccctcaaatacggagcgaagcacgtgatcatgctgtttgtgcctgtcactctgtgcatgatcgtggtggtagccaccatcaagtctgtgcgcttctacacagagaagaatggacagctcatctacacgacattcactgaggacacaccctcggtgggccagcgcctcctcaactccgtgctgaacaccctcatcatgatcagcgtcatcgtggttatgaccatcttcttggtggtgctctacaagtaccgctgctacaagttcatccatggctggttgatcatgtcttcactgatgctgctgttcctcttcacctatatctaccttggggaagtgctcaagacctacaatgtggccatggactaccccaccctcttgctgactgtctggaacttcggggcagtgggcatggtgtgcatccactggaagggccctctggtgctgcagcaggcctacctcatcatgatcagtgcgctcatggccctagtgttcatcaagtacctcccagagtggtccgcgtgggtcatcctgggcgccatctctgtgtatgatctcgtggctgtgctgtgtcccaaagggcctctgagaatgctggtagaaactgcccaggagagaaatgagcccatattccctgccctgatatactcatctgccatggtgtggacggttggcatggcgaagctggacccctcctctcagggtgccctccagctcccctacgacccggagatggaagaagactcctatgacagttttggggagccttcataccccgaagtctttgagcctcccttgactggctacccaggggaggagctggaggaagaggaggaaaggggcgtgaagcttggcctcggggacttcatcttctacagtgtgctggtgggcaaggcggctgccacgggcagcggggactggaataccacgctggcctgcttcgtggccatcctcattggcttgtgtctgaccctcctgctgcttgctgtgttcaagaaggcgctgcccgccctccccatctccatcacgttcgggctcatcttttacttctccacggacaacctggtgcggccgttcatggacaccctggcctcccatcagctctacatctgagggacatggtgtgccacaggctgcaagctgcagggaattttcattggatgcagttgtatagttttacactctagtgccatatatttttaagacttttctttccttaaaaaataaagtacgtgtttacttggtgaggaggaggcagaaccagctctttggtgccagctgtttcatcaccagactttggctcccgctttggggagcgcctcgcttcacggacaggaagcacagcaggtttatccagatgaactgagaaggtcagattagggcggggagaagagcatccggcatgagggctgagatgcgcaaagagtgtgctcgggagtggcccctggcacctgggtgctctggctggagaggaaaagccagttccctacgaggagtgttcccaatgctttgtccatgatgtccttgttattttattgcctttagaaactgagtcctgttcttgttacggcagtcacactgctgggaagtggcttaatagtaatatcaataaatagatgagtcctgttagaaaaa

SEQ ID NO: 67 - DNA, 825 bp, Homo sapiens
aagcttgatagcaagttcagcctggttaagtccaagctgaattccgtgcaccctgagccggagctgcccagtcgccgcgggaccggggccgctggggtctggacgggggtcgccatgatccgctttatcctcatccagaaccgggcaggcaagacgcgcctggccaagtggtacatgcagtttgatgatgatgagaaacagaagctgatcgaggaggtgcatgccgtggtcaccgtccgagacgccaaacacaccaactttgtggagttccggaactttaagatcatttaccgccgctatgctggcctctacttctgcatctgtgtggatgtcaatgacaacaaactggcttacctggagggcattcacaacttcgtggaggtcttaaacgaatatttccacaatgtctgtgaactggacctggtgttcaacttctacaaggtttacacggtcgtggacgagatgttcctggctggcgaaatccgagagaccagccagacgaaggtgctgaaacagctgctgatgctacagtccctggagtgagggcaggcgagcaccccaccccggccccggcccctcctggaatcgcctgctcgcttccccttcccaggcccgtggccaacccagcagtccttccctcaactgcctaggaggaagggacccagctgggtctgggccacaagggaggagacttcaccccacttcctctgggccctggctgtgggcagaggccaccgtgtgtgtcccgagtaaccgtgccgttgtcgtgtgattccataagcgtctgtgcgtggagtccccaataaacctgtggtcctgcctggc

SEQ ID NO: 68 - DNA, 715 bp, Homo sapiens
  misc_feature (487)..(487): n is a, c, g, or t
  misc_feature (559)..(559): n is a, c, g, or t
  misc_feature (576)..(576): n is a, c, g, or t
  misc_feature (590)..(590): n is a, c, g, or t
  misc_feature (601)..(601): n is a, c, g, or t
  misc_feature (609)..(609): n is a, c, g, or t
  misc_feature (640)..(640): n is a, c, g, or t
  misc_feature (661)..(661): n is a, c, g, or t
  misc_feature (682)..(682): n is a, c, g, or t
  misc_feature (698)..(698): n is a, c, g, or t
  misc_feature (706)..(706): n is a, c, g, or t
acttaaaattatttttccttttagaaagttcaccaggaaaccagctcccctcccaccacgccgggcaggcacagccatctttttaaaatccgcgctgattttccctcacacccccaaacaggaactcctcaggatggcctcagaaggctggagtctctccctgtctggcgggacaccctggtggcggtgaaggcccctctgccacaacggaggtttctgattgtgggacacagtctggtttttgttttcttcctgtcttctaattaaaaaagacattcctgggtgacaggcacagtgcaggagtgtgagctatcgaaacaacctggtgaagtctcgcaaggcccagcaaacttgtttacattcctcagcactagtgacttggcttgtggaagttcgtaagttgtttgtgtgttcactgtgaaaggctcccacggttgttttccttgggaaacctttaaggaattttcaaaccatcgacaaaaagtcngttctgttaaacctggcatgattctcccagaggcatttaggccacatctggtagggtatagggggggagggnaaaagcagcaggtgtgngcagtgggctgacnaactggctgtncaagcggntcatcactgtccatcgttctttcggaattcnagtcttctcatgatcattggnaaccccgtatgaatgaggtcnctagaaaccctgacanacattggnatccggggg

SEQ ID NO: 69 - DNA, 1903 bp, Homo sapiens
gggacgcgctacctgcctccgggcgcctgggcttcaggatgaaggaccgtctggagcagctgaaggccaagcagctgacacaggatgatgatactgatgcggttgagattgctatcgacaacacggcttttatggacgagttcttttctgagattgaggaaactcggcttaacattgacaagatctcagaacatgtagaggaggctaagaaactctacagtatcattctctctgcaccgattccagagccaaaaaccaaggatgacctagagcagctcacgactgagattaagaaaagggccaacaacgtccggaacaaactgaagagcatggagaagcatattgaagaagatgaggtcaggtcatcggcagaccttcggattcggaaatcccagcactctgtcctttctcggaagtttgtggaggtgatgaccaaatacaatgaagctcaagtggacttccgagaacgcagcaaagggcgaatccagcggcacgtcgaaattactggcaaaaagacaaccgatgaggagctggaggagatgttggagagtggcaacccggccatcttcacttctgggatcattgactcacagatttccaagcaagccctcagtgagattgagggacgacacaaggacattgtgaggctggagagcagcatcaaggagcttcacgacatgtttatggacatcgccatgctggtggagaatcagggtgagatgttagataacatagagttgaatgtcatgcacacagtggaccacgtggagaaggcacgagatgaaagcaaaaaagctgtgaaataccagagtcaggcccggaagaaattgataattatcattgtgctagtagttgtgttgctgggcattttagcattgattattggactttccgttgggctgaattaagagtggcctaagaggctgctgcactgaaataaactgatttcactccagactggtgtggccacccttgtcttcagatgagaatggagtctgaatggccttcctgagagcgagtgcgacccgttcctttgtttccttgcaaccacccttggacctgactcagctaacaatctagccctgggggaatgtgatctacctgatgcgaccctgagttctccccagagcctcctcctgccccaccagctctcaagtaccttttctcctggactgtgtggacccacccagctttcttcctccctgttgtgtgtcagattatgccttgcacttgggaaagctcttgtgagactctcccaaggtgctgtattttcctacctcaggagtattctccagaaactgcaatgtatttttttaggggagtatctttaacaaagcagaatgattcttctaagtttggcaacaagaaggcttggatctgagtcttctacctggcaggatgccaatcctgtttgttgtccgtatgtcctgaaaacatgagggactggcagatgtcattttggtctaaagagctgacttgtttgaaattcagccttaaattaagctcttagttgttcagcttggggggcaactttgatttttctctgtgttgtagtctctcatatttactcaaggaggaccaggatgatacagtcatctgaggttatgctttgcaaaaggctgacggtatggaatatgtttccatgtctgagtcttagaaactggctgctcattgttagaaagtgatgctttgtgagactattgtcttggggccaaaaataatcagggattttaaattgggcaagggagaaggtgctagaatcctaagctctggaaatatttcatgacactggtgtttcactcatgtgttccagatgtattctaattgtgtatgaaatgtatgtacacataagtgtgtgtgtctcaggaagtaggaaataaaaatggaagctattatgacctca

SEQ ID NO: 70 - DNA, 1637 bp, Homo sapiens
gaggcgaaccggagcgcggggccgcggtcgccccgaccagagccgggagaccgcagcacccgcagccgcccgcgagcgcgccgaagacagcgcgcaggcgagagcgcgcgggcgggggcgcgcaggccctgcccgccccttccgtccccacccccctccgccctttcctctccccaccttcctctcgcctcccgcgcccccgcaccgggcgcccaccctgtcctcctcctgcgggagcgttgtccgtgttggcggccgcagcgggccgggccggtccggcgggccgggggatggcgctgctggacctggccttggagggaatggccgtcttcgggttcgtcctcttcttggtgctgtggctgatgcatttcatggctatcatctacacccgattacacctcaacaagaaggcaactgacaaacagccttatagcaagctcccaggtgtctctcttctgaaaccactgaaaggggtagatcctaacttaatcaacaacctggaaacattctttgaattggattatcccaaatatgaagtgctcctttgtgtacaagatcatgatgatccagccattgatgtatgtaagaagcttcttggaaaatatccaaatgttgatgctagattgtttataggtggtaaaaaagttggcattaatcctaaaattaataatttaatgccaggatatgaagttgcaaagtatgatcttatatggatttgtgatagtggaataagagtaattccagatacgcttactgacatggtgaatcaaatgacagaaaaagtaggcttggttcacgggctgccttacgtagcagacagacagggctttgctgccaccttagagcaggtatattttggaacttcacatccaagatactatatctctgccaatgtaactggtttcaaatgtgtgacaggaatgtcttgtttaatgagaaaagatgtgttggatcaagcaggaggacttatagcttttgctcagtacattgccgaagattactttatggccaaagcgatagctgaccgaggttggaggtttgcaatgtccactcaagttgcaatgcaaaactctggctcatattcaatttctcagtttcaatccagaatgatcaggtggaccaaactacgaattaacatgcttcctgctacaataatttgtgagccaatttcagaatgctttgttgccagtttaattattggatgggcagcccaccatgtgttcagatgggatattatggtatttttcatgtgtcattgcctggcatggtttatatttgactacattcaactcaggggtgtccagggtggcacactgtgtttttcaaaacttgattatgcagtcgcctggttcatccgcgaatccatgacaatatacatttttttgtctgcattatgggacccaactataagctggagaactggtcgctacagattacgctgtgggggtacagcagaggaaatcctagatgtataactacagctttgtgactgtatataaaggaaaaaagagaagtattataaattatgtttatataaatgcttttaaaaatctaccttctgtagttttatcacatgtatgttttggtatctgttctttaatttatttttgcatggcacttgcatctgtgaaaaaaaa

SEQ ID NO: 71 - DNA, 687 bp, Homo sapiens
gcagtgtcccagccgggttcgtgtcgccatggggcagatcgagtgggccatgtgggccaacgagcaggcgctggcgtccggcctgatcctcatcaccgggggcatcgtggccacagctgggcgcttcacccagtggtactttggtgcctactccattgtggcgggcgtgtttgtgtgcctgctggagtacccccgggggaagaggaagaagggctccaccatggagcgctggggacagaagcacatgaccgccgtggtgaagctgttcgggccctttaccaggaattactatgttcgggccgtcctgcatctcctgctctcggtgcccgccggcttcctgctggccaccatccttgggaccgcctgcctggccattgcgagcggcatctacctactggcggctgtgcgtggcgagcagtggacgcccatcgagcccaagccccgggagcggccgcagatcggaggcaccatcaagcagccgcccagcaaccccccgccgcggcccccggccgaggcccgcaagaagcccagcgaggaggaggctgcggcggcggcggggggacccccgggaggtccccaggtcaaccccatcccggtgaccgacgaggtcgtgtgacctcgccccggacctgccctcccaccaggtgcacccacctgcaataaacgcagcgaaggccgggaaaaaaa

SEQ ID NO: 72 - DNA, 34875 bp, Homo sapiens
gatccgcctgcctcggcctcccaaagtgctgggattacaggcgtgagcgaccacacccagtcctctctctcatattctttaacacacaatgattaattactaaaatgaagactcttgttttctgaagggaaaaagaaatatttgacaaccagctccttgaagagcggaaccggcgccgtcggtgagggagcagccggctgtgctgtcagcggggcctggcggtggaagcgcctccagtgtgcatgagcgtgtctgaagatggggggctcagggggcacgtttgcgtttggacctgtctgtgcgttctcctgcgtggcagtcctgatttccatgcttctggagaatccatttcgttaacactgaaagccagttctcttttcctggcagtttttttcattttatttttggcattttttacaagataccgttcgggaaaggcttttgaaaggacggaagcgtattcactgtgcgccagtactcctggctgtgctgtggtttctcccgacgtgcacatcgatctcgtatgtgtggcatctgatattaaacgggaggttttaagaagcgtctgccgtgatcatggagcttcggaagcgggaatggttcttccgggtttgctgttttgtctgtttcccccttgtgtggtttccgcctgcgacagttccagaatttgctctcccactcagtgtgctctgcagctgtgaggaaacagccttcgttagaggcgggagcagagacgagccgctgctctgtgtcgtgtttgctgtggccgcagggagaggagcaggacacgcacctttccaggggcctctgtgtcccgcactgtgtgtgagtggaccgcagcgcgcagccacatgccctggctgccatgggccagaccgcctccacctcccccgcccgcctggcctgtcctgagtgcatttccctgcactgtgtcgtcactgcacagccagtcaccgcggtctcagtcatcggcgcggatggctatgctggggtcccagggtggccgcagcagtcagggtcactgtgggagccctggggtggagtgacaaaccgcattgtcctgtgcccgccatggcagaagcgcagcctttgtatggaggcccaaccgcgctcccgtctggagaagcggcttccggggtgtggctgccgggtcggctctggtccacagcacggtgccggggctgcaggttgttgagggctgtgactccgtggggctcagccaggctccagcagggtcagacgtgctgttaagagcaaagccacagacgatgacttgtccattctcagtggatgctccaggctgtgcctacacagcagtgctggtgacatgtccagggttccagggcccggtggcctgggagctgctttctccccactggctgggctgcatctggccctggctggaggccttgctttgaggggctgtgaccctcttcccccaggccctccccagccgacgacagccaccggagaggagatcggaacacgattgtctcagatgcagggcgctgtgcgggacgaagccgcaaggactctcgtatcgggcccttgggactcgggaggtgccagaggcggcggctgctctggacctcggtgttcactgacctttgtttcacttgcctctgctcgactccgagagcaggaaacccggccgtggcctggcagctccgcctcccatgcccgcacgctggggtctgtcttgtctggagcagtggggcacaccccggaggaggcgggggtcagggctgtcggccttggccccctgctggtcgctgtttcggggactcggggcggccagtaccaccgcctgaggcggggctcagcagcgttgcatgtacgggcctcgtactgcctcatggaaaatcctccggagccgccctccattgtgggttcctgagagtaggacacattgccatggttttgtgggaatcacgcgcccctgatggaacttttctgctgttgtgaagtacttttatccatttgcttctctgctgaccttgccaagttgttcgaggtggaattaaacacctcccagacctctggcttgtcttttctgaacccccaaacacatcccactgcatgggttgtccaagcttggaaatgggagagtgaccctgccatccccagggacatggcctggccttggggtggattcccacctcactggcgggcctagggtgctgtttaaacagcagccagaggctgggcgcggtggctcacgcctgcaatcccagcactttgggaggccaaggcaggtggataacctgaggttagaagttcgagaccagcctggccaacatggtaaaacctcatctctgctaaaaaaaattagcgagcatggtggtgggcgcctgtagtcctagcacctggggaggctgaggcaggagaattgcttgaacccgggaggcagaggttgcagtgagccgagatcacgccactgcactccagcctggccacacagtgagactccgtctcaaaaaaataaacagcagccaggggcctcactggggttcatgcctgtggccccagctactggggaggcttagatgggaggaacacttgtttggaggtcaaggctgcggctccagtgagccgagatcacgccactgcactccagccggaatgacgatgagcacctgtgttgcagcatagccctgcccagcaggtggaaccagaatgtgccagaggcccccttgtgcgtcccaccccgcctgcaccctctgcccttactgtcctgtgggctctgagggtgtcaaggccgctgggacaggccctgcctgggtgcttccctcagtaatggggggtcgtgggtgctctgggttgtcagccgggcagttgagtgggagtcaggggtgctgacctcacaggcacggccagtgaggagcattccggggccctgaggatgccagcatgggtggtcctgggctcgccctctccacagcatggctggcgttcctcgactgccgccggagccccgggaagacaggcttgaccccgtgcacacacgcagggagacgccaggagccctgccctcagaagcctgcacgctttgcctctcttctggcagctagctaaccctgcatccccacctgagcctgtccctggcactgaggacactggacctgtgtcactggggtggggtgtcctgggtcctgctgggtgctgagtgtctccatgccaggagctcccgcctctaccatcgagatgaccacagatgtccccagacgtggcctggtgctccgtggaaaactgctgtccacaaaccatggcgtccttcccctgacccccgccccttccctctctggcttggcccagcgggtgtctcagaacctgggtgcgtgcttctgccagccccccaaccacctggcccacactccccaacccccttcactgagccgcagagacccccatgtccctgccaatgctttttccgaagccggtctcacttgttcccgccctggcagtgtgaggggaattggggtcccccctcagtggcacagctgtgcctgtctgatgacttccaccaagcccccttcactgagctgcagagacccccatgtccctgccagtgctttttccgaagccagtctcacttgttcccagcagtgtgaggggaattgaggttccccctcagtggcacagctgtgcctgtcggatcacttccaacaaggtggccttggtggccgcacggggcacttcgtccatcttaaaggggcaacacaggcatgcagcgagaattccaaaccacagaaacctcactctcatgggccccactgcctgaggcattttctgttttgcttttgttggtgggttggttggttggttggttggtttgagacagggtctggctctgttgcccaggctggagtacagtggtgcaaacgtggctcactgcagccttgacctccctggctcaagcgatcctcccacttcagcctcccaagaagctgggaccacaggtgtgcaccaccatgcccggctaatttttgtgcttcttgtagaaatggtgcttgctgtgtttccgaggctaagtgatcctcatcggcctccaaagtgctgagattataggcgagagccactgcagctggcctgcctgagttcttgtgcctctctgcctccctccctgtgccagcctcacgccccctcctcaccttccccaattcctactctcaccccgccctgggtccttcccctctcactggcctgagctgtttctggaactgctgcctgccctctgctcatgtcctgcctctgccccgtgaaaccagctcctccatgttccctgtctcaggggtgtcctccagggcccggagttcctgaaccagattcttctccccacctacctcacctttctgtccagtccgcctatcagtcagccccctttgcagcagaatgccaccccaaaacccagcgcctggaacattctccacacagtttctgtggggccgggatctaagggcagcccggccaggggcttctagggtggctcgtggggctgcagtccacatgctggttggggccacatcatcagaaggctccaacggggctgggggtctgaggagcctcgctgggggcagcagcccaggagccacagcagccgcccatgaatatcaccgccattctgttggtcacacagagcagccccggttgaacgtgaagaccctataggggctgggcttggtggctcacacctgtaatcccagaactctgggaggccaaggtgggcagatcacctgaggtcagaagtttgagcccagcctggccaacatggtgaaaccccatctctactaaaaatacaaaaattagccgggtgtggtggtggatgcgtgtaatctcagctactcaggaggctgaagcaggacaattgcttaaacccaggaggcagaggttgcagtgagctgagattgtgccattgcactccagcctgggggacagagcgagactccgtctcaaaaaaagaaaaaagaccccataggaaggcaagagcctgaacagcaaacgcaagcccaggagccctgtcatcccagcggccagaggaccatcccccttggctcccactgaactcagctgcagtccccaccccatcccccaccaccactagggctaagagccagcagaaatccttgggctggcttcattgttcctcccgggaagagtccagggcagctgacacatgatcccagcatggcacgccggggacaggggaggcactctgctgtccctgactgtatttaaaaaaaaaaaatccacaagcaaaatccctaatgagcaatgttccacagtaagtcctgcctcagaactgtgcaggcatcagaaacaggaatgcctgagaaacggccacggtcccaggagctgaggaaacaccacgcctgatgccacgtagggtcctggatggagccctaggccaggaaagggcattagaggaaacccaggaaacttggatagagtgtagattttggtcagtaataatgtatcatgtgacaaatgtatcacactcatgaactgggcatggggtactcacaactctaaattattctaaaaatattgatataaatttaagaccaaaaccatggccaggcgtggtgcctcactcctgaatcccagcactctgggaggccgaggtgggcagatcacctgaggtcaggagttcgagaccagcctggccaacaaaccctgtctctattcaaaatacaaaaactagccgggcatcgtagtgtgtgcatgtaatcccagctactcaggaggctgaggcaggagaatcacttgatccagggaggtggaggctgcagtgagctgagatcttgccactgtactccagcctgggtgacagagcaagactccatctcaaaaaataaataaataaaaataaaaccaaaaccctacagcacgggcagctatgagaactagagaaggaagagggttttgtgcacctgccagcctcttaggttcttgtcagcttttcccccaagtctttattattattatgtattgtagagatggggtcttgctatgttgcccagactggtctcaagctcctggcttcaagtgatcctcctgcctcggcttcctaaagtgctgggattgcaggtgtgagccaccatgctgggcccctccaatccttttgagctgcccaagaacagagaccaggcctggctttgctcagcagtgggtccccagcccatggcacgaattcagtaaacacttgttgtggtcctcaaggggcccccagtcttgctagtcacctgtgttcacctaatttgagcctctgttttctttactttttctttttcttttttcttttttttttttttttgagatggagtctcactctgtcgcccaggctggagtgcggtggcacgatctcagctcattgcaacctccgcttcccggattcaagtgattctcttgcctcagcctcccgagtagctgggatttagatacagggtttcaccatattggccaggttggttttgaactcctgacctcaggtgatttgcctgcctcagcctcccaaagtgctgggattacaggcgtgaaccaccgcaccggcctttgcctctgtttttgtaatcataaaacaggcagacaaaacctccagtggaattgtgaaaattaaatgatatgcatgcagaaagcgttctgcaaactctgttttgctagtttgggtgtttagtgttagtttttatatcattagtactggttgtaaacttatcaatttaagcaagatggaaaatcgagggtgtgtcagggaagggggaagtttgagctgaaattatgacctcttaggggtgggaagaggaggctttggggttgtgaggtctgagcccccttactttgggatgagtccacatcgcggcgactcctctgcagaatgcggtgatgttgcggtaaggggtccgggatagctgcgaggcagctggaccaatcctgaacgaaagacatcagtgatcgcaagaggcgctaaaacttctgccgaaacccgggatcgaaccagggacctttagatcttcagtctaacgctctcccaactgagctatttcggctgggcggcagagtcgctctcgccgggactccgtcccgcgctgcgccttccctgcgcaggcgcagtcgtttcgcgtcagcaggccccacatcctttgtaaggtctcccagggcgccggagcgcagtgtcgtctctgtggcgcaatcggttagcgcgttcggctgttaaccgaaaggttggtggttcgagcccacccagggacgcgtggtgacttttgccctcctggaataacaagaaaatgagtgtcgcctctgtttttgtcggtccgccgcagacccgcggcccccacgtgcgcactccgatgacctttccgcctcgggtgatctgggggtgcacggcgcaacacgaccacggaggccgaaagcgcagcggaacctcccggctccaggttccggtttccgcatgcgctccgagccgctttgggcggcggccccgggaacccggagcgctaaggagaacggacctcagaggttgtctgaaggccgaggccaagatggcggtgctgtcaggtgagcgcggcaccggcggcgggtgtggggccgcgcgggtctggggccgtgggagcctcgggtgtcgtggtggcgtcgggggtcggtgccggcgtcgtggccgcggtcctctccgggcttctccgagccggccgctcctcgggctccccgcccggcttgcgatgaacggtcgccgttattgcgtccagagtacagtcggggaaaccgaggcccggtaggtcatgacgcaagcctccagcctcaggaaggcgctcggggtggaggctggaggggccccattcacgtccccgagaccagggcacggcccgcgaggctgctcttgagatgccctggagagagcggggcctgcctgacaggctgggaaactgaggcccattgagggtcttcgaggtcacagggccgggcctgggaaggaacaggacccaggacatccacgccaccctgctggaccctccacctccctccccacccctgggaggtaagggcctctcgcagagcctgtcctgctccagggacttttttgggatcagctgaagcctgcggacctctgctcagataaagttattaaatgcatggaataaaatccatagaattgcaaggaaatcagttacacggagaggcagttattaaaagattgtcttgaaacctgattggcgacttagtaatctaagtgcttcccttatgaacgcgatctagcggcaggtctaattgcgactgtgatttggaaggagtgaggagtggaaatgaggctttgatgatacggaaacgtctgcagcccctgcaccatagctaggaaacatctgtgattccgcttggtgaaaagttacaggtcctgctaatactgccgtattttgttgtctatgctaagaattttttatttatttattaagacagggtctgcctctgtcgctcagactggagtgcagtggtgccatcttggctcatcactgcaacctgtgcctcccaggctcaagcgattctggcacttcagtgtcctgtgtagctgggaccacaggtgtgcgccaccatgcctggctagtttttgtatttttagtagagatgggggtcttgccctgttgcccaggctggtctcgaacttctgagttcaagcaatcctcccacctgagcctcccaaagtgctgggagccacggcacccagcctacgctaagaattgaatgaagggctaattttccataagatgctggtgacaacaaagacatatatatttttttattccaagcaaattcacagttctgaatcctcaccaggccccttgttaagaatgcctggcccacgcgcggtggctcacgcctgtaatcccagcactttggaaggccaaggtgggcggatcacctgaggtccggagttcgagaccagcctggccaacatggagaaaccccgtctctactaaaaatacaaaatcagctgggtgtggtggcgcatgcctgtaatcgcagctactggggggctggggcaagagaatcgcttgaacccgggaggcggaggttgcagtgagctaagattgcaccattgcactccatcctgggcaacaagagtgaaactccgtctcaaaaacaaaaacaaaaacaaaccagctgggcgtggtggctcaggcctgtaatcccagcactttgggaggccgaggtgggcggatcccctgagttcgggagttcaagaccagcctgatcaacatggagaaaccctgtctctactaaaaaatgcaaaattagctgagcgtggtagcaggcgcctgtaatcccagctactcgggaggctgaggcaggagaatagcttgaacctgggaggtggaggttgcagtgagccaagattgtgccgttgcactccagcctgggtgacaagagcgaaactccgtctcaaaacaacaacaacaacaacaaaaaccctgacccagaggcacagaatcccatcacctcagaggttctcagaagagtatctcctctgctaggagctcatccaaagtcctgcattttcagcttgggaaactgacacctggagtggggcagctcccaccagagcctggggctgggcagttagcctgtctgctgtgcccagcctcaggcatgccaagaagtaggtcacaggcttgtgtccttcagagagttgtggcctggacggggccatgggaaacagcaaccccggatgaggctaaggctggggtgagggaggggctcagaggcaggagaaggccccatggatcgctgcattcaggggcatcaaaccctggccctggcccctggaggctgcccacagcctctccatcgggcctcacctcacccacagcgacaaagtaccatcacctgggcagcttcaacagaagctgattgttctcacagttctgggggctggaaggccaagattgggggtcagcagggttggttcctgctgaggcctctgtccttggcttgcccgtggccatcttctccctgcgtctttcctctgtacatgtttgtgtcctgatcgccttttcttacaaggacataagtcatatcggatgagggcccaccctcgtgacctcactgtcctttataatgaccctttattttattttttgagatggagtctccctctgtcacccaagctggagtgcagtggcgcagcctctgctcactgcaacctctacctcccgggttcaagtgattctcctgcctcagcctctcgagtagctgggattacaggtacctgctactacacccagctaatttttgtatttttagtagagacggggtttcaccatgttgcccaggctggtctcgaactcctgacctcaggtgatccacctgcctcggcctcctgaagtgctggaattacaggcatgagccaccacgcccaggcattaatgatccctttaaagaccccatctccaaaagcagtcacattctgaggtcctggggttagggcttcagatgcaggtcgggtggagggtcacagttcagccgtcaccagcaccaagcctgcctttctggattcttccttgtgagccaggattcctggcacctccaggtttcctcccgctgagtgccccgggcgtggcaaggccctgctctggccttagtcttcgcctcgggaaggctctcccaggagacttcgtgcaggcgcgttccctcctctgcgcttcctttgaggctggctcctctaggggtgcttttctgtgtagattgacgtgggcagcgccctccccgcttagcggactgcagattcctgcaggatggggcctgtgctcagctgcgtgggaaacgcccgagcagcagccagggcctggagcacccagcacacgcttgtcaggcacagctgaggccaggacgagcactgggtgcccagggaggccccagcattgctggagtggcaggcaccccacaagcacgcatagatggagatagaaccgggtgccggcaaccggaggacctggggtcctggtgtaggcgggacgccccgggtatctgaactgaaacctgcctcatgagaaggggccagcagtgtgcaagtgtgaggcggggtgtcccccgcagggcagcagccagtgtgcaagtgtgaggcggggtgtcccccacagggcagcagccagtgcgggggccctggcgcaggaaagcggcaggtgccagtgaagatcgccagggcggggagacggggcagcgtttgggttccttccggggccatgcagtctcaagcaggggactaagactctctcgtgttctgaaaaccccctcgttacctaacgtttgttaagtggcactcgagttgggatcagagctaggctgtgcgggcaggagcctgatggggaagcgcctggaggccggccctgcgtgctgcccgcagctcactgttcccaccccgtggtcctctctgcagctcctggcctgcgcggcttccggatccttggtctgcggtgagtgcctgagtctccagccctcagctgggaggggccttcagcagcgacagacgaacggggcggggggggtggggggtggggggagcgccttgttgaaggtcacgtgtcatgttagggacaggatgcaggtgacggtctgcacgctgcccgtgatgtgccgggaccctccctgggacagtccacgcagtggcaaaggctggacagtcaggaggaaaaccctgtgggcccggctcagtgccgtcagagctcaccgccacctggggtgggaaggcattctctgagccctgtgcagatggcagctggggcaggcctcctgcagacccaggtgactgacagggcggtgagggcgcatgcccagggatcttaccttggtcatgtgtggagggcctgctgccagtttccttctgtggatgatcctgggaccgtccttgcttggacactgttgacctgctgggtacgtcacaaaagaagttccattcaagtctgggccatcattgggggtcggggcgatggccgcatggctccagcggctctggccagtggcccaagtgttgacaggcagaggtgagaacagtctcgcagcagggaggggagaggcaggacaacagtgagtgcggctgggggagctggaggggcctgggacagccactgacccgcgttccatctcccggcagctccagcgtgggcccggctgtgcaggcacgaggtgtccatcagagcgtggccaccgatggcccaagcaggtgaagctggccttctgggggaggtcgtaccccctcgccccacccccatcccttccttattttctgcatcagtgccgcagccactgaggtgcatggatggggcagggagggggtcacacatcccagtccctgacctcatgtgggtccaggcctctggcagcggccgtgggggctcgcatccgcctctgggaagcacctgcgtggctgacgcctcctgtgcccgtgtgtctctgtgccagcacccagcctgccctgccaaaggccagagccgtggctcccaaacccagcagccggggcgagtatgtggtggccaagctggatgacctcgtcaactgggcccgccgggtgagtactatgagctgtaggccctcctcgagcgccagggcctctctgcacactcacaggcacacacatacacacaccaacgtgcagacacgtacacacacaacacatgcatgcacactcacatgcgcacatgtgcatgcaagctcacatgtatggacagatgtgtacacggaccacacgcacactcacgcacacaatgcacatatgcacactcgcacacatgcacacttgcacacacatgcacacacaagcacatgtgcacacacgcttgcacacatacacacatgcacacttgcactcatgcacactcatgcgcacatatacacatgcacacgcacactcgcacacacgtgcacatatatgcacagtcatgcacacacatgcacactcacacacatgcacacacgtccttgtgtggacacatgcatgtgtgcctgttggcatgcatgcacacaggcacactcactgatgcacacacacccctgcggccgtggagcagggcggaccctcccggaggcccctgtgctggcctggtggcctgtggttccatctgaggattcggaccctgctggagatgacccctccgtttccgtcattctctttctggcgtccgtgtgttcctcttgtttctcttttaaggtgaaagcagtgttttaagttaaaaggagcgcgtgtgaaggcagtagatccttctcggtacccgtttaaagcctcccctgcctgtggcgccagcccccacgcagcccctgccatccccctgcagcgtgagcacgtgcagctccctccagctcctgcggcacttgctgcgacagcccgggttcaacaatcccccattgatggacgttcactgtttccttttgttttttgtttcctaaacaatgccacggcgaacgtcctgccagggccgcagtggtcgagacaaggatagtttttaatgcaggatagttcttttctttttcttttcttttcttttttttttttttgagacggaggctcgctctgtcgcccaggctggagtgcagtggtgcgatctcggctcactgcatgctccgcttgccgggttctcctgcctcagcctcctaagtagctgggactacaggtgcccgccaccacgcccggctaattttttgtatttttatttttagtagagatggggtttcaccgtgttggccaggatggtctcgatctcctgacctcgtgatccgcccacctcggcctcccaaagtgctgggattacaggcgtgagccaccacgcccggctaatgcaggatagtttctaatggagggaacctgagacatggccagcggccgtcccaacacaggcttctggcgggcaggtggacctggccatttctgcccgggcagccctgcctcactctgtagcctgaccctgtcacccgccaacacatgcagcagggcccctgccaggtctcagagccgcgtgcagggagagcgggaacggtgggggaaatgagaagccacagggatggaggagaggggagggagtggccaaggagatctgagagggcttcctggaggcgtcgcacttggtatgtggacccagatctagttaacgcagagagttcccggttagacctgcgctactactcgcctgtagcccacgcgctcagagagtggctggagccccctgttgaaatggtgggacttaggatacactgggttcgaggaactatgtgatgaggacagatctcacccgtttctctctattttatgtatttgaatgtggctggtggggcgcgctttacaactcttggggcccggaggccacctgcaggagccgctgtgcctctcacctctgccggctgccgccccgggacatgagtcgggggttctgggtgctccacgtggagtctcacgctgggccacgcggggctccgggggtggcgtctgacccgagcccggcctccgcagagttctctgtggcccatgaccttcggcctggcctgctgcgccgtggagatgatgcacatggcagcaccccgctacgacatggaccgctttggcgtggtcttccgcgccagcccgcgccagtccgacgtcatgatcgtggccggcacactcaccaacaagatggccccagcgcttcgcaaggtaggcctcgtcccagccgcccagccgcccccagagtgagctgcgcacggaccccgcctctcttccaggtctacgaccagatgccggagccgcgctacgtggtctccatggggaggtgagtgcagggcggggggtctccagggacagacgtagcgtgagtgctggcctggccgtgccctgatggcgcttatcaaaagtgtcatctacattcagtgaaatcccacgtggtcccggcgctgcccttcagccgtctcggtgcctccaccctaggcagatgcgctggtgggcctctccccagaacgattcctcccatccacccccacgcagcagaccccacattccgcccagttctctgctttactcacacataagtgatgacaggtgctgtagatagttttataatctcagccttctcacttgccattagttttttttctttttttttttttttttgagacagagtcttgctctgtcaacccaggctggagtgcggtggaaccatctcggctcactgcaacctccgcctcccaggttcaagcaattttcctgcctcagcctcccaagtagctgggattacaggcatgcaccaccacacccagctaatttttgtatttttagtagagacggggttttaccatgttggccaggctggtcttgaactccctcaggtgatccgcctgcctcggcctcccaaagtgctgggattataggcataagccaccacgcctggccttgccctcattttttagtcatttccccgtaacattgaaaggtatttagtctcttaacattttaaaatatttatttatttacttaaagatggagtctagctctgtcgcccaggctggagtgcagtggcacgatctcagcccactacaacctccgcctcccaggttcaagcgattctcctgcctcagcctcccgagtagctgggattacaggcacctgccaccacacctggccaatttttgtatttttagtaaagaagaggtttcaccatgttggctaggatggtctcgatctcctgatctcgtgatccacccacctcagcctcccaaagttctgggattacaggcatgagccaccatgcctggccaatatttattatttttattttttagagacagagtctcactgagttgcccaggctggagtgcagtggtgcagtcatagctcactgcagccttgacctcctgggctcaagcggtcccccaaccttagcctctcagagtgctgggattacagatgtactccactgtgcctactttttaaaatttctgtagagatcaggtcttgataagtttacccttttaaagcgagcagttcagtggtttttaggccaccacctctaattccagaacattctcatcacccccaaatgaaatgctgtccccatcagcagtcactctgcatccccttccgagccccggtgcccacacctcccctccctgtctctgtggatgggcccgtcctggacatttcacagaaacaggatcacacgccgcatggccttctgtgtccggcgtctctcactgagcgcgacgtcctcaaggtgcatccgtgctgtggcctgtgtccgagcctcgtgccttttcttggctgaataatatcccactgtgtggacatattactaatctaattctaaacagttaattagaatattccagagttttcataaccgtctcccactgctgggcattcagggtatgtccatttttacggctgtgggaagcagtgctgggagtggagtctgtgtggtctcctggggtttccagctccctgccccgggtggaccccagcgcctcactgacagagccggaatcaggcgagggtgaggctcagccgccccatagacaggggctgggtgttggcactgtggctgtctgaagtggctttttgttgacacatgtgatctgacacatcccagccccgggaatcggtggtcaggagccccctcgggaggggagcacttttccccgagttatcagccacgtgtgagcttgcgccccactggtcccacagaggctctgggagcctgtgcgtgtttgctcattgcttctccgtgacaagttccagcctcgtaggtgcctggcctgcagttgaaggcgggtggggatggggcgaggcctcgtggagggagggtgggcaggcgggtcttcggcacactcccctcacggtgcctccccaacagctgcgccaacggaggaggctactaccactattcctactcggtggtgaggggctgcgaccgcatcgtgcccgtggacatctacatcccaggtagggccgggaccgcaccgcccacgagggagctggagacagggccagcgccacacggagcccggcggcccctgtgagggagtcccacacccccagcagacggcgggctcccccatcctatggatgggccgactcggagcgctgcctcttagtggagcctgtcccctgtgagaagtcggcgatgtattcaggcatcagagggatcagagggagcaggggaagctgagtggaattcctgacacacgcctggtttacagcagtttcatatggtcctacctggcacaaaccaaagacctgcagttagaaataccaagcgagaaggttcctgggggccaaggacactgtcccgcgccctcagccttacagaagggcacgcaggactccctgggacccggggtggccggatttggcaaatgaaaacgtgggaggcttagtttgactgtgaggttagggtgaatttgaccatcaggaaaactgttagtagtaattgtttagtacgagtatatcccaacaatatttgggctatactgacactaaaaagagcattggctgcatacctgaaattcacatcgcaccgggaacattctttatatctggtgatcccgtgggactcttgcacctcacgtggtcccacgagggccatccccccgggcgttcaccttgacagtggtccacggtaggcaggcttggaggtggcgctcatgtgggacaggggacagagtcctgttcttggccaccctgtgctgcgtgcggcattagctcatgcgcagagagcccagccctgagtcccgagtctgggggtttgggcaagcgagaggcacatcctggtgcctctcaaaagtggaggaacaggctctgactttggattccgcttccctggaaagggcgttgatttgttcagcgttctgcacggttcaggtcaccccgggggcagtggagagggcagcctgggcctccctgtgacttgacagcacagagaggtccatcctggggtcaggagctctgcccatgcccctggcgtcttcccctgcagtgcagaccaatggggcaagttgcgagtgtggactgtactcctccctccttgcagactgagctcctccctccctggggaccgcgctcctccctccctgcggactgtgctccctgtctggggactgcgctcctccctccttggggaccgtgctcctccctccctccctgcggaccgcgctcctccctccctggggaccgcgctcctccctccctgcggaccgcgctcggccctccctggggaccgcgcccctccctcccagcggaccgcgctcctccctccctggggacctcgctcctccctccctccctgcggactgtgctgctccctccctgcggactgtgcttctccctcccttggagcagcctggacttgccagagctctgccaggtggggcctggccgccctttcccaggccctgcagtggccttgtcctttctcacctgtttccactcctgctgtccccgttgggccctgggcttcgtcctcttgctcaagccctttgttctgaacctgcgtggcagccgggactgggggatccccagcaaagagctctggcttggggctcagaaagagggtcatcgggtcctcgtgggatgcccgggctctgggccacctcccctccctccgcccagcctccctgcctccatctccgtccagggcagccccgggccctgctccccactgctaagtgtgtctgctgagcgctggcccccattgagtcctgagggctggggccgggggccgggttagtgaggtcagcgtcttgtccgagaggtccctgtgacagcccgggatgagccacgggtggagggcagtggggccttgcccaggggaggaccccactcttcctgcagggacctcccctgcgccggctcccagtccctggcactgcgcccacccagggctgtcagcctccaccttcagaggccggcccgggaaacccttccaaagccgagccggctgcgctgtgcacgcggtcacgcgggctccggctgcgggaagcgagactgaggcaaggtccctgcaggctgcccacctacggccgaggccctgctctacggcatcctgcagctgcagaggaagatcaagcgggagcggaggctgcagatctggtaccgcaggtagcgccgccgccgccgccgccggagcctgtcgccgtcctgtccccagcctgcttgtgtcccgtgaggttgtcaataaacctgccctcgggctgccgcctcccagtgtggtgtgtgggtgaaaggagccggggacgtggggggatcacagaccccctgcggcgtgccgcccttgggctgggggcggttggagcagagccgggggcagagacgggcactgtgcctgccagcagggtcctttcccgctgctctgcgaagaccctggggtggacatcgtggcccaaagtcccgagcgtggaaggccgcacacccatccttcctgggagggccctgactcagtctccctctatgccctaaggcaggctgagcaaagcccgtctgagcctgccccggggttcagagtgtggcctgtggcctgcgtgtggacttgggcaggtcgccactgccctctggcccatttccaggcggtggcatgggctggttagctgagggctggggccagggagatggggaggtggcacctggtccaaaccaaagggctgcagggcaggactgtgagcctcacaggctgtctgaccccactttggggaccctctccacccagggctttcggggaaccctgactccaccccaccagccccttcatccgtcgaagtccaggcctcatcagggacgtgcattcattcagcaaacgtcccatcttcctgtgttcagcgccagatgccgccggtgctgggacctcgctctgcaggcccaccctgcatgcctgctgcacaccagggacagttctggggatcggcagttatgacgggccaggctgggatggggcccgggagactggggcgggggtggggaagaggcacccagcccagccgggtcaagcagcctggaagcaggacatgctggggtggggacagggcgtcagccagcggaacagcagccctgggccagagtgcagagcacaggagccggccttctctcagggcaaggaggtcagtggagggggcgagcaggacggccccaggaagatgggcgggctgcacacatgtggatgcagggggcaaagtgggaggcatggggtgaccagctgggcacaagggcacagacaggcaggacccgggatgttcctggggctgggcaggtggggctgcccctgcaatgggcccagcaggggcgatgcctcctgagaggaaaccacatctggaaatgggaggcttggggaacggggctgtcagcagccacgcccctcctggggcgggaggaggggagctcagggtgtgctggggcgggcagagaagtgggttcctgcctggggtgggcaaagatccttgtcccacccacaccccggccgtggtgctgccaccccctgagaccctgacctagttacccccttccctgaccccactgcaaagggtcaggtggctttcatctgaggaagggacatcgggcatcagctggagatgtctgctatgggcaagacagtggggggggcggggcggatcctggggccgctcagaaacctggaggggagtcacccacttttcctgtgtccatgggatgggcgggaggtgagggagcagccgctggaagtaacagtcgcacgctcactgccgactggccaagcccagcgccggcgtttacttcacctcagggaccctgcagtgggcagcagtgaccctcacagagaagctgggaaagctgctggtgacacacagctgggatcagccctgggctggtgggacccctcacagagaagccgggaaagcttctggtgacacacagctgggatcagcccagggctggtgcgacaccctggactcccggccaggaaggcacggaggagggcatgggtgtggccgggccggggtgggggctcagcctttggtcaccaggggcgtgatcatctgtgggaaggcgtagtagcggcagtcggccggtgggaccagcgccatcacctccgtacggatgttctccctccggaagccggcctccagcagcgcgggcacctgcgtctcctggtcggggatggcaccaggtcacctctgagggccatgggggtcacgtgcaccctggcgcccacccctcattgaagagtgtttacagatggcaaggcccgggtgggcggctgcagctcccgtgggcacgtggcagggcagccctggaagcccaggtgtgaacgggaatctccagctccccagtgcgggcagcagcttcccggctgtcctggaaccccagccccacactcgagccacccccgggcacctactccacagttctccagaccttgccagtgtggcgggtggagccaaagaatcacaccagaaaaagaacacaggccactagttcccattttggaagaaaagctgccccaggggccacaggcacccagccggctctcacaacagcagcccagggcaaccacatagagcccttctcagataggccgcctccaccaggcagagggaacagcgagacaagcactgctgaaccagcaaagacagccaggtggaggcagctggagggaggggaacacgcagggcttaggctgaaccacagggcactggggagccatgggaggttgttgagctggtgagggactttgatttccattttttttgtttttgttttgttgagatggagtctcggtctgttgcccaggctggagtacaacggtgcaatctcggctcacagcaacctccgcctcccatgttcaagtgattctcatgcctcagcctcccgagtagctggaattacaggcgcccgccaccacgcctggctaacttttgtatttttagtagagatgggattctgccatgttggccaggctaggctcaaactcctgggctcaagtgatccacccgccttggccttccgaagtgccgggatcacaggtgtgagccaccacgcccagcctgatttccattttttttttaaattttctttctttctttctttctttcttttttcttgagacagggtctggctctgttacccaggctggagtgcagtggttcgatctgggctcactgcaacctctgcccctggggcccaagcaatcctcctacctcagcctcccaagtagctgggagtacaggcacacgccaccacgcccagctagttttttgtattttttttttttaggaaagatgaggtcttgctctgtagcccaggctggtcttgaactcctaggctcaagcaatctgcccacctcggccttccacagtgctgggattatagacctgagccactgctcctggcagccactgcgccaggcaaaggactttgatttctaaatgaaccagcacagtccagcccacccagggggtcaggaagggaccctccccaggtagcaaggtggctccagcagccccttcccacccccatccaaggtcacttcctggagacccatggggaacttcaggtgggcgcacctcaaacatgatggtgatgtctgagtacttggacttcatcagctccccccaggaggtgaggttgcagtaggtgaggacgccccccggcttcagcaggcgaaaggcgtggttctgtggaaggggagtggccagtggtcaggacggaggtgggggtgtgggcagaggggcttccccgagggcctcccgcatcccagcaagtcagagagaaccaccttgatgaagttgaactggtgtgtgtgccaggtctcctccgagagtgggtacgtgtcgtacaggatccctgcacggagaacagaagcccacgcggtcagggccgggctcagcgcctcacccagcctcacccggctcatcccccagcgggtggaggtgcagtgagacggggccgtgggtagaggtggggctcccacacaggcttgagaaccccgagatcgcctccagggcccctccgtgagcatgcccatccccggtgctccgccatcccacagccaggcccacacccacttgggctctgtccccccagtgcacatcagagggacccccacaagcaaaggaggggctgcattggagctggggaggcccaccctgtgatacgtcccctcacccctcaccatcaaagtgaccgtcaggcagggtgggtgccacatcctcccacaggcctttcaaggggatgaccttgcagaggggaaaagaaaaagagaggacagggtagagaggtccccaggatctccccacctgcagaaagggagcggccagggggactcccgagagagaagaccacctcctccacctctgacagccccaggcccccaacccccaggaagcagtgccctcaccccaaggagtgggggtcctggagggcctgcgggcagaggggcaccttgtgtgtctgccgtggggcccagtcccggagccgctggaagacgccgtcattgcactcgatgatccaatgctcatcaatgggcgcctcctgcacctttgacgctgcgatggccatgccaaagcccacctccaggacccggccccctgggcagacacagggcgcctggcatcactaggtggggcgggcttaggaggctgcctggaggaggggcacagggcagggcagggctggggagactgcctggaggagggggcgcagggctgggctgggggtctgcctggaggggggcgtgcagagcagggctggagaggctgcctggaggagggggtgtggggcaatgctggggaggctgcctggaggagggggtgcggggcagggctggagaggctgccaggaggaggggatgcagggctggggaggctgtctggaagagggggtgcagagcagggctggggaggcttcctggaggagggggcacagggtagggcagggctgagctgggggtctgcttggaggagggggtgcagggctgaactaggctatgtgagtcacatttgccacaggacgggagggcaccctgggccagcatggacagaggcgggcggaacacagtagtcctgagcgggaacagcgtgggccctggccagcggccagagagaggatgaccagccagggaggccgaagacggccgcttttggggccaggcctgtggggaggcgagagccttggactttgagcccagcccacgctgtttgtcccgggtcccttatctctcgggttagttacttttctctccccctccctctatccgaaagttggatttgcaagagtggccaggcaagacctggacttgagactatctgggaggggaaggactggtccccagtgggccacacatgggccccccgctcaatcctgattggcactggacactggacgtgcccattttcagggtgggaacactgaggcccgacccctggacggggcctgtgtggggccagggagtcctttcttagcagcccttagcgtctgacgccaggcaggccagggccaccccggggacagctgtctccctgagctcagctttccgagtgctattcttagccgggcgagtcggggctgctctcccaggcaggcagaagggcagcctctccctggcacgaccccttcctcccgacctcagacagggagctggggacccggttccacccagtttcacccaggtctcacgtttgaggtccccatctggagagcggggggcctcactccccctggagaggaagtttctggtacttaggcggtgcctaacgtgtgcgggccccacgcctgccgcactccccgtgaacgcctccgtgtgcccccacctgcagccccacttcccaggcgaggagacagaggcgccccggcgggagggtgggctgcagagtccccgggtcggggcagccccggcctcagtttcccctgcgcccccgggggcggtgcaggccgggcgggggctacctttggaggaggcggcggcggccagcgcgtgcatatagggggtctcccagcgctccatcaccggcttgcccaggatgcgcaggtgcgtgtccgctgcgtcgtaggccgcgggcgccgccccccacgcggggctgcagttctcgccgggcgcgaagatgggggtcgcgctgggggcgctcatgctgcaggctggacggcgacccgacctcgatcgcgcgccgcccgggcccgctccctgcaggggcttgtgggccgggggcgggtccaacaggcccggggggcggacccgcgagaggacgcgcgcgcgcggctccgggagcggcctctagcggcggccacgcgagaggtggcgggagtggggtcggggccccggccgccccctccccaaggagcctcggtgccccctctgcggagcgggcaccgcagccccgcgcccggggacgcgaacctgcaggctggggactggaatccccgccttgccgcttacgcgccatagattcctcatctgtcagcaccgcagaaaggccccctcctcgctggggtgtgagaatctgaggatcttccaggcgctgttggaagtgctttaagtgtttaaaatcatttaatcttcagaagatgctacagtgagttctgtctttttttaatagagacggggtcttgctatgttgcccaggttggtctcaaactcctgggcgcaagcgatcctcccgcttcagcctcccaaagtgttgggattacaggcgtgagccaccgcgcccgccaggttctatgatgactgtcgtttttccttccttccttccttcctttcttttttgaaagcaagtttattaaggaataaaaatgaatggctactccatagagcagccgactgtcattttacagatgtggaaactgaggctttgagaagcaaagccggtggtctggtggccacgagggtggggacccagcattagagctctgatgcccccctttcatgagcccatgtcacacccccataggctgggggtcatctgagaccccgggtccctaatgggggattccgcccaaagacgcctccagttctggagaccaggactcaatcccagcagtgccctttcctccggcggccctgcagctggggtgtgcgggggtggaattaggcctcccccagcccagggtagccccttagggtcaagcacaccccccgcctgtttcctgggggcccccaagcccgctgcggtggcgtcctggctctgatagccggtttccttccccctctgaacgtggggccacagtcatgagccctgagcactgcctgcctgcctgcctgcctgcctgccgtgcgttctgcacgggttaacagatgcagttattatgcccatttaacacgagggaaactgaggcccagagaggttgaggttcacaggttgcagcagggccacggtgtgaacgcaggcagcctcggaaacagctcccgcgcgcggccttccctgcgccaccttgtctgggtagctgcctgccccatcactgcctgctcaacgcctccacatgcccctgccacctcttgcacagctccttagccccgggccttggcacacgctcttccccttgcccagacagcctctctcctggtcaggccgctttctcgttctgtctcaagctgagcccacgtgtcctctaggagacacccccattctgccccaggacaggcatgtcctggtcagaagctgttttgtttgtttttgtttttctgagacagagtctcactctgttgctcaggttggagtgcagtggcatgattttggctcagtgcaacctctgcctcccgggttcaagcgattctcctacctcagcctcctgggtagctgtgatgacaggcgcccgccaccaagcccggctaattttttttttttttttttttttttgtatttttagtagaaacggggtttcaccatgttagccaggatggtcttgatctcctgacctcgtgattcacccgcctcggcctcctaaagtgctgggattgcaaggtgtgagccaccgcacccacccggccagaagctgttttctctctctttggtagttcactaacggaaggtatttcttcatggtcctagcgtccctctcacagggctgtcagtgatcctggcacacagaacatgcttgataggctgggtgcagcagctcccacctgtgatcccagtgcctgggggaggtgcaggggctcaggcctgtgatcccaccactttgggatgccgaggtagaaggattgcttcagtgcaagagttaagaccagcttagaccacacacagagaccttgtctctacaaaaaaaaaaaagttttaaaaattagccagggccgggcgcggtggctcacgcgtgtaatcccagcactttgggaggctgaggtgggcggatcccctgagaccagcctggcaacacggtgaaaccccatgtctacaaaaatacaaaaatagctgggcgtggtggtgggtgcctgtaatcccagctactcaggaggctgaggcaggagaatcgcttgaacccgggaggcggaggttgcagagaacatcactctcagtgaaataagccagtcgcaacaggacaaatcctatgtgagtccactcctaggaggtccctggagtcctccgatccacagagacagaacgtaggatggcggggggggggggtgccaggggctggggaggggacagggagtgagtatttcacggggcagagtttcagtttgggaagatgagaaggttctggagaggacggcggtgatggttgcacaacaatgggaatgcgcttaatgccaatgagctgtgcacctacaaataattaaaatggggccgggcgtggcggctcacgcctgtcatcccagcactttgggaggccaaggcgggcagatcacctgaggtcaggagttcgagaccagcctcaacatggagaaaccccgtctctactaaaaatacaaaattagccgggcgtggtggtgcgtgcctgtagtcccggctattcgggaggctgaggcagaattacttgaacctgggaggcggaggttgtggtgagccgagatcgagccattgcactccagcctgggcaacaagagagaaactccatctcaaaataaataaataaaataaaaacaaaaataattaaaatggaaaattttatgtcacatatattttaccacaagaaaaaaaggggaccaaaactacataccgtgtgttggatctgtttatagtcacactgggagtaaattcagatcagtatctgcacagcctttttctcgctgcctttgccctggagtggaaggaaggaaatgaatggggaagagggagaagcggagaagtagcctcttctagttctttcttccttccttttttttctttttcttttcttttcttttttttgaggtggggtctcgcactgtagcccaggctggagtgcagtggcgcgatctcggctcactgcaacctgcacctctcatgatcaagcgattctcctgccccagcctcctgagtagctgggattacaggcatccgccaccacacctggcttttttttttttttttgagatggagtcttgcactgtcgcccaggctggagtgcaatggtgtgatctcggctcgctacaacctctgcctcccgggttcaagcgactctcctgcctcagccccctgagtagctgggattacaggcacccgccaccacgcctgcctaatttttgtatttttagtacagacagggtctcgccatgttggccaggctggtctcgaactcctgacctcaggtgacccgcccacctcggcctcccaaagtgctgggattacaggcgtgagccaccgtgcctggcctgtattttaaaaaatatattatttgtaatcagcttgtgcccgacttccttctttgggccacattctgtgcatttcatccacccactgcttcattgttcatttatccagtcaccaatagatggatgtgtggttatttcaaatgttccagtcttgttttgttttgtttttgatagaaacagggtcttgccatgttggccaggctggtctcgaactcctgacctcaggtgacccgcccacctcggcctcccaaattgctgggatcacatgtgtgagccactgagcccagattttttttttttttttggcagggtttggctccgtggcccaggctggagtgcagtagtgcgatgtcggctcactgaaacctccaactcctgagctccagccatcctcctgcctcagcctccaagtagctaggactgcaggtgcgtgccaccaaacctggctgatttttgtattattattattattattattttttgtagagatggggttttgtcatgttggccaggctggtcttgaactcctgggctcaagcgatcctctcatctcagccttccaaggtgctgggattacaggcatgagccactgcatccggccagttttattttaaatggggttttagtcccagctacttgggaggctgaggagggaggatagctggagtccaggagttcaaggctgcagtgagctatgactgcatcattgcactccagcttgggcaacagagtgagagcctgtctcaaaataaaagaaaaaaaagtgttttgtactatttgtctgtgatcttgttccttgtattttttttttttgagacagagtcttgccgtgtcgcccaggctggagtgtagtggcacgatctcggctcactgcaagctctgcctcctgggttcaagcaattctactgcctcagcctcctgagtagctgggactacaggcgcctgccaccatgccgagctaattttttgtacttttagtagagacggggtttcaccatgttagccaggatggtctcgatctcctgacctcgtgatccgcccaccttggcctcccaaactgctgggattccaggagtgagccaccatgctcggcccttttttttctaagagggagtcttgctctgttgcccaggttggtgtgcagtggcgcgatctcggctcactgcaacctctacttcctgccttcaagcatttctccggccttagcttcccgagtagctgggattacaggcgcccaccaccacgcccggctaattttcttttgtatttttagtagagacggggtttcactatatatgttggctaggctggtctcgatctcctgacctaaattgatcctcggcctcccaaagtgttgggattataggcgtgcgccacctcacccggccttgttccttgtatttatttaattctgtgatgatgaataaaccaaacgatcaggctgtcaatgtgctgtgagattaaggagaaaagcagtaggcagcacgtacccggttttacaaaaccctgcgggtcacctgtttactaccgtcagcctagaccggtttttccacctccttctgctgacattggaggacgggtatcattctttttggggggtcgtcgtgtgcactgcagggtgctgagcggcatgtctggtctggacccactcgatgccagcagcaccccgcactcaagttgtgacaaccaaaaccgtgttttcagacattgccaagttatcccctagggggcaaagtcacccagaagaagaaccactgatgtatgcaattaacagatgcaactaaaacagtatttggctattaatagtaatagcacttggggggggggtcaataatatcttttcatagtcattgaatttagttaattgttttgatttgattccagttcagccccgaactgggtgaccttggccaagtgactcagcctctcggaccctcgggatcctcttctgtgaaatgcggacaggggaaggagcctcgcgcgggacgctcacgtgccgttcccgctccgtccgcccgcctggggtgcgggcgggtacactcccactccccgcagcgccccacgcggctccaccgcttccgagtgaagagttaaagaggaagcggcagccgcgcctgcgcccacagtgcctagcccggagcgccggtctcgcaagcgcgcacgcgcacgcaagcccgcacgcgcgcgcacgcacgcacgtggctcggcccgcgcgcatcctccccttgcaggggcggggccagcgcagggactccatttcccagcgtgccccgcggcaacgccaggagcctccgaggagaaaggaaaacgcgcgacggccccgactgcggcggcgcgaaatccgcctcagggacgcacgcacagacggagtacccctggacccgcccccggagaccccgtgcgggagcgcgcccgggcgtgcgcaggggcggcggcgcggcggcgcggggacgcgcggtgaccgttggcgccgaggggaggaggcagccgccgccgccgccgccgccgccgccgccgccgccgccgccgttgcgcagatccgggccgcggctgtggggagggcgacggagcgggtgaccttccggaggcgggagcgagcgaggaggcccgggagcgccgagcgtcgccgccgccgccgccatgaacaactcgggcgccgacgagatcgggtgaggacgagcggcgcgggcctgcgtctccgccccgagcccggcccgccgctccccgccgcccggcctcagacgccgccccccggggccgccccgtcaaggtcacgccggccgggggcggactcgggacccggactcgccgcggcttcgcgccgggggccctggacgggtgcccggggtctgggggggtcctggcgcccccgccgccgcttcccggcttcccgtcctgggggatcctgaaggagagcctgaggggtccggggggccccgccgccgcctccagacttcctggtcgggggaaccccgaacggcaacctgggggggtgtcctggggcgcccgtgccgccgcttcccgactgcgcgtcctgagggaccccgaatgggagccagaggggttcaggggcccccgccgccgcttcctggttgtggcggccccgaacgggaacttgggggggtctggagcgtccccgttgccgcctgtagggcttcctggcctgggggaccccgaatgagaacctgagggagtctgcggggagtccagggcgccgtcgccgccgcctcccggcttcctggccagggggaccccaaactgtggcgtggggggtggtccggggcgcccccagcgcgcgcccaaacttggcgggcggcgcacgtggcgagccgaggcgagggttccggttctgccaccgcccaacctatcccactcggggctccgggctccccgctcccatcccacccccccaaagtggtaaggtcgggaggggttcgcaaacccagggcccagggggctcgggtcagccggggcctgctgtgtttacgttgcctcggcgcctccccgccgggggtgggcttgagctgcggaagggagagtcagcgcttccgaggcggcgacgggcccgcggatctttgctgcgccgaggcgtcccctcctataggagcctgacctgctccggaccccgcggggccgggaaacctcatttcgctgtgccccagggctcggcgccattctttggtaggagcggctcctgccgcagcgacgtcgttttagagttgcattcttccggcaaaacagtctgggttgggtttcctagtggtctggtgtaaatttctcggtgcccttagctttgagcagcgccctgtgttctcagcgctgggcttggctagtgcgggagcggttgctgctagagggttgccttggcaggcgcctctcgcaccagctacaggtcacacttgtggatgggaaatgccttttgtgggctctccccctccccagacaaaacaaaagagcaccttccgttggagaaccaggatgaaagcacttagcccctgcctagcccgtgctgtgagtcctctccaggcactttgacttggcagggtccgtgtgcctgtgtgagggacattgcagggatgggcctgagcagggagtccaccggccatgggggatggagccatcgactttggggtgaggcagggaaagggctcccagatggggtacctggattaggtccattcaagccgcgggtgaacgtgggcccgctccacccaagccgtggctgtgaggaggctggagagaggtgagggctcctgtcccctccctgcatggacacccttgggaagtggggcagctggggtcccagcctgggtctggaggggtcccacccacagcacaaataggctcgcaggccacccggacgccacgggctgcgtggaggagaactggagtgcatggaccctgctctcctccccggctgccaggagtgtccactgctttctaagtcagactccttgggcaagaagtgttgccacagccgcccgtcgcatgggagaccggcttccattctatgcggagtccacggtctgctctgatcttgctgtgtggagttgttgtgtgcgtgaaatgcttgtgaccctgcgaagcgccctcctggcaagtcccctgcaggtgcggtgggtgccatgcaggagggtgctgagcttggatggaagcaggccctctctgcggcagatggcggctctcaggacgccatgggtctgcggtgtcccttacccactgggggggctcggcagcctgaggagctccctcttcctgatgcagagccctcactgctcactgccatggaggaggcaggagatcccgccggaccccgcttggagggctgggcctggagcatgcatgggtgcggggtcaacgcctcaggagacttggagcttgggagccccctgttctgggacacttgtggccgtccagctgctgccctgggaatccacacctggaaggtgggttagggagccatccttgggggaagctctgcttttgagtctgagaagtcgtcccaagttttgagggtccctgtgctggcttagaagtccatgtaaagcttgatgggggatgaaagtcagctgaggcctgccggtgataacggatgccttacacacaccgacttccagtcagcttgaggggggcttcatgcaggaggaagcgcatacgtgtggtggggtgtggggagtccctctctggatcctggtgggtttggcacgcggaccctacatggtggatgtgatggacagtgtcctcctttgggagcggggcctgtcctggtcctcttgtgaagggtgggggacaggcactgacctgtcaggagggttagagggttggcaccagcaggtggcctggagcgctcagagcacgcgcgatcaggaaggcccgagtctccagtgtgccctccctggccttgtgaagtcatcttaaagtctggcttgagcgcctctgacttggattctgggaagctgacacagcgcggccggggtcgccacatcctgttgagtagccgctgggtgctaggcgcctgggtggtagaccaggtgtcagggatagggcccatgcctggcctactggggagaggacagaggctcagaggggtcacctcgagcgcccaggccattgtgttctgctggcttccaaggcagcacacggtcatggaactggagagagaggtttatggaagattttatctggtacactggggaatggtaagacagggacacctggaaatattgtaggaaagtcacagagggaggaaggactcagcggagagaggagaaagccgcctctgggcagcttcgaggatacccaggactgtggccgggggccatgcagctcagagccaggcccatggcaggtctctgggtttattgggtggctgtggaaggagacatcctgagtggggctcctggctgggcccctagaggccgtgactacttgtacctgtgcagagtgagcacaaggcacctggcaagattgttggtcaggccagagagggccgtgatctgggggaggctgttgcagtgcggggagtgatagggaacctcatggggccgtgccggcctttctggggctctcttggtgcatttggagttattccgaggcaggtctcctgggctctgtcagcactctggcctggatc

SEQ ID NO: 73 - DNA, 1201 bp, Homo sapiens
cctagttaaaacagcagcccatcaaagtctttaaccctcttagcatttactcagattactttttcatttagcatttatcaccatatatttacttatttttctctctcctcctgtactccttgaaatatgagctgcacaaaggacaagattattattttgttctattctaagcatctagtgtactttctggcagactgcaaatgaaagaaagaataaatgaaagcatgacttgtgttttattgcacaggaagcagtggctgggacaagctgtggaaaaagtacggatcacgctttccccaggatgacctctgccagtatatcacatcagatgacctcactcagatgctggacaacctagggcttaagtatgagtgctatgaccttttgtccaccatggatatatctgactgctttattgatggtaatgaaaatggagacctgctttgggattttttgactgaaacctgcaactttaatgccacagcaccacctgatctcagagcagagcttgggaaagatctacaagagcctgaatttagtgctaagaaagaggggaaggttctttttaataatactctgagtttcatagtgattgaggcataactatcaatcacaaaagtatattcaaaaattatattttgaacaactcgaatcactcatttgtttccatattaaaatcacaaactcatccattaatgtagataaagcactgtttggatatgagatgtagcaaattccaatacattattggacttccatttggaatcatatgggatactgctggtcttatcctgtccctcctccaggtagagagaccacatgcaggctcaacataacataagctagaaaaattagatgactgaatttctatggcatattgataataaaattcattccatttgctgattgtctgaaattttctagaatactaataaaatacatactatagattctttattagtgaagtatgcactaatcaatactttgaacacaaagcctgtgttactgatttggccgttttgtgaagaaacatttatctttgtacgttcttctattgtgctttctatctaatttttattaatttgtaagagtaagcacctttagaatattaaaaattaattctttatcacatgttgtcatttcttcccattgtgttttctcttgtaattttatctgtgaattaatagcttggggttggtct

SEQ ID NO: 74 - DNA, 1510 bp, Homo sapiens
agatctgaattcggcgaaatatggctacagagagccctgctacgcgtcgggtccaggtggcagaacatcctaggttactgaagctaaaggagatgtttaactccaagtttggatctattcccaagttttatgttcgagcaccaggaagagtcaacataataggagagcatatagattattgtggatattctgttcttcctatggctgtagaacaagatgtgctaatagctgtagaacctgtgaaaacgtacgctctccaactggccaatacaaatcccttgtatccggacttcagtactagtgctaataacatccagattgataaaaccaagcctttgtggcacaactatttcttatgtggacttaaaggaattcaggaacactttggtcttagtaacctgactggaatgaactgcctggtagatggaaatatcccaccaagttctggcctctccagctccagtgctttggtctgttgtgctggcttggtgacgctcacagtgctgggaaggaatctatccaaggtggaacttgcagaaatctgtgccaagagtgagcgttacattggcactgaaggaggaggcatggaccagtctatatcatttcttgcagaagaaggaactgccaagttgatagaatttagtcctctgagggcaaccgatgtaaaactcccaagtggagcagtgtttgtgattgccaacagttgtgtggagatgaataaggcagcaacttcccatttcaatatcagggtgatggagtgtcggctggctgcgaagctcctggctaaatacaaaagcttgcaatgggacaaagtactgaggctggaggaggtgcaggctaaactagggattagtctagaagaaatgctgttggtcacagaagatgcccttcatcctgaaccctataaccctgaggagatctgcaggtgtctgggaattagcctggaggaactccgaacccaaatcctgagtccaaacactcaagatgtgctcatcttcaaactctatcagcgggcaaagcatgtgtacagcgaggctgcgcgagtgctccagtttaagaagatatgtgaagaagcacctgaaaacatggtccagctgctgggagagttgatgaaccagagccacatgagctgccgggacatgtatgagtgcagctgccccgagctggatcagctggtggacatctgtcggaagtttggggctcaagggtcacgacttactggagcaggatggggaggctgtacagtatcaatggtacctgcggacaagctgcccagctttctagcaaatgtgcacaaagcttattaccagaggagtgatggaagcttagcaccggagaagcaaagtttgtttgctaccaaacctggaggtggggctttggttttgcttgaggcctgaaaaaatgtaaaaagtctgagagaaactacttagggcacttaggaattggcaggactttctgtgccacagtaaattaatcttccttctgttttgtattatgatgaacggttgct

SEQ ID NO: 75 - DNA, 2423 bp, Homo sapiens
cccgctggtcgctgccggacggcgtgggcggtggccgcgcagcagctgatgctgagcgcggcgctgcggaccctgaagcatgttctgtactattcaagacagtgcttaatggtgtcccgtaatcttggttcagtgggatatgatcctaatgaaaaaacttttgataaaattcttgttgctaatagaggagaaattgcatgtcgggttattagaacttgcaagaagatgggcattaagacagttgccatccacagtgatgttgatgctagttctgttcatgtgaaaatggcggatgaggctgtctgtgttggcccagctcccaccagtaaaagctacctcaacatggatgccatcatggaagccattaagaaaaccagggcccaagctgtacatccaggttatggattcctttcagaaaacaaagaatttgccagatgtttggcagcagaagatgtcgttttcattggacctgacacacatgctattcaagccatgggcgacaagattgaaagcaaattattagctaagaaagcagaggttaatacaatccctggctttgatggagtagtcaaggatgcagaagaagctgtcagaattgcaagggaaattggctaccctgtcatgatcaaggcctcagcaggtggtggtgggaaaggcatgcgcattgcttgggatgatgaagagaccagggatggttttagattgtcatctcaagaagctgcttctagttttggcgatgatagactactaatagaaaaatttattgataatcctcgtcatatagaaatccaggttctaggtgataaacatgggaatgctttatggcttaatgaaagagagtgctcaattcagagaagaaatcagaaggtggtggaggaagcaccaagcatttttttggatgcggagactcgaagagcgatgggagaacaagctgtagctcttgccagagcagtaaaatattcctctgctgggaccgtggagttccttgtggactctaagaagaatttttatttcttggaaatgaatacaagactccaggttgagcatcctgtcacagaatgcattactggcctggacctagtccaggaaatgatccgtgttgctaagggctaccctctcaggcacaaacaagctgatattcgcatcaacggctgggcagttgaatgtcgggtttatgctgaggacccctacaagtcttttggtttaccatctattgggagattgtctcagtaccaagaaccgttacatctacctggtgtccgagtggacagtggcatccaaccaggaagtgatattagcatttattatgatcctatgatttcaaaactaatcacatatggctctgatagaactgaggcactgaagagaatggcagatgcactggataactatgttattcgaggtgttacacataatattgcattacttcgagaggtgataatcaactcacgctttgtaaaaggagacatcagcactaaatttctctccgatgtgtatcctgatggcttcaaaggacacatgctaaccaagagtgagaagaaccagttattggcaatagcatcatcattgtttgtggcattccagttaagagcacaacattttcaagaaaattcaagaatgcctgttattaaaccagacatagccaactgggagctctcagtaaaattgcatgataaagttcataccgtagtagcatcaaacaatgggtcagtgttctcggtggaagttgatgggtcgaaactaaatgtgaccagcacgtggaacctggcttcgcccttattgtctgtcagcgttgatggcactcagaggactgtccagtgtctttctcgagaagcaggtggaaacatgagcattcagtttcttggtacagtgtacaaggtgaatatcttaaccagacttgccgcagaattgaacaaatttatgctggaaaaagtgactgaggacacaagcagtgttctgcgttccccgatgcccggagtggtggtggccgtctctgtcaagcctggagacgcggtagcagaaggtcaagaaatttgtgtgattgaagccatgaaaatgcagaatagtatgacagctgggaaaactggcacggtgaaatctgtgcactgtcaagctggagacacagttggagaaggggatctgctcgtggagctggaatgaaggatttataacctttcagtcatcacccaatttaattagccatttgcatgatgctttcacacacaattgattcaagcattatacaggaacacccctgtgcagctacgtttacgtcgtcatttattccacagagtcaagaccaatattctgccaaaaaatcaccaatggaaattttcatgatataaatacttgtactatagatgtacttctgctgtgagattccctagtgtcaaaattaaatcaataaaactgagcatttgtct

SEQ ID NO: 76 - DNA, 1563 bp, Homo sapiens
cctgtgggagagagcgccgggatccggacggggtagcaaccggggcaggccgtgccggctgaggaggtcctgaggctacagagctgccgcggctggcacacgagcgcctcggcactaaccgagtgttcgcgggggctgtgaggggagggccccgggcgccattgctggcggtgggagcgccgcccggtctcagcccgccctcggctgctctcctcctccggctgggaggggccgtatctcggggccgtcgccagccccggcccgggctcgataatcaagggcctcggccgtcgtcccgcacctcattccatcgcccttgccgggcagcccgggcagagaccatgtttgacaagacgcggctgccgtacgtggccctcgatgtgctctgcgtgttgctggctggattgccttttgcaattcttacttcaaggcatacccccttccaacgaggagtattctgtaatgatgagtccatcaagtacccttacaaagaagacaccataccttatgcgttattaggtggaataatcattccattcagtattatcgttattattcttggagaaaccctgtctgtttactgtaaccttttgcactcaaattcctttatcaggaataactacatagccactatttacaaagccattggaacctttttatttggtgcagctgctagtcagtccctgactgacattgccaagtattcaataggcagactgcggcctcacttcttggatgtttgtgatccagattggtcaaaaatcaactgcagcgatggttacattgaatactacatatgtcgagggaatgcagaaagagttaaggaaggcaggttgtccttctattcaggccactcttcgttttccatgtactgcatgctgtttgtggcactttatcttcaagccaggatgaagggagactgggcaagactcttacgccccacactgcaatttggtcttgttgccgtatccatttatgtgggcctttctcgagtttctgattataaacaccactggagcgatgtgttgactggactcattcagggagctctggttgcaatattagttgctgtatatgtatcggatttcttcaaagaaagaacttcttttaaagaaagaaaagaggaggactctcatacaactctgcatgaaacaccaacaactgggaatcactatccgagcaatcaccagccttgaaaggcagcagggtgcccaggtgaagctggcctgttttctaaaggaaaatgattgccacaaggcaagaggatgcatctttcttcctggtgtacaagcctttaaagacttctgctgctgatatgcctcttggatgcacactttgtgtgtacatagttacctttaactcagtggttatctaatagctctaaactcattaaaaaaactccaagccttccaccaaaacagtgccccacctgtatacatttttattaaaaaaatgtaatgcttatgtataaacatgtatgtaatatgctttctatgaatgatgtttgatttaaatataatacatattaaaatgtatgggagaaccaaaaaaaaaaaaaaaaaa

SEQ ID NO: 77 - DNA, 973 bp, Homo sapiens
tcccgtggagtggccggcgacaagatggcagcagcgtgtcggagcgtgaagggcctggtggcggtaataaccggaggagcctcgggcctgggcctggccacggcggagcgacttgtggggcagggagcctctgctgtgcttctggacctgcccaactcgggtggggaggcccaagccaagaagttaggaaacaactgcgttttcgccccagccgacgtgacctctgagaaggatgtgcaaacagctctggctctagcaaaaggaaagtttggccgtgtggatgtagctgtcaactgtgcaggcatcgcggtggctagcaagacgtacaacttaaagaagggccagacccataccttggaagacttccagcgagttcttgatgtgaatctcatgggcaccttcaatgtgatccgcctggtggctggtgagatgggccagaatgaaccagaccagggaggccaacgtggggtcatcatcaacactgccagtgtggctgccttcgagggtcaggttggacaagctgcatactctgcttccaaggggggaatagtgggcatgacactgcccattgctcgggatctggctcccataggtatccgggtgatgaccattgccccaggtctgtttggcaccccactgctgaccagcctcccagagaaagtgtgcaacttcttggccagccaagtgcccttccctagccgactgggtgaccctgctgagtatgctcacctcgtacaggccatcatcgagaacccattcctcaatggagaggtcatccggctggatggggccattcgtatgcagccttgaagggagaaggcagagaaaacacacgctcctctgcccttcctttccctggggtactactctccagtcttgggaggaagcccagtagccattttgtaactgcctaccagtcgccctctgtgcctaataaagtctctttttctcacagaaaaaaaaaaaaaaaaaa

SEQ ID NO: 78 - DNA, 969 bp, Homo sapiens
gaactggtggcagtgagagacttcggcggacatggctcccagcgtgccagcggcagaacccgagtatcctaaaggcatccgggccgtgctgctggggcctcccggggccggtaaagggacccaggcacccagattggctgaaaacttctgtgtctgccatttagctactggggacatgctgagggccatggtggcttctggctcagagctaggaaaaaagctgaaggcaactatggatgctgggaaactggtgagtgatgaaatggtagtggagctcattgagaagaatttggagacccccttgtgcaaaaatggttttcttctggatggcttccctcggactgtgaggcaggcagaaatgctcgatgacctcatggagaagaggaaagagaagcttgattctgtgattgaattcagcatcccagactctctgctgatccgaagaatcacaggaaggctgattcaccccaagagtggccgttcctaccacgaggagttcaaccctccaaaagagcccatgaaagatgacatcaccggggaacccttgatccgtcgatcagatgataatgaaaaggccttgaaaatccgcctgcaagcctaccacactcaaaccaccccactcatagagtactacaggaaacgggggatccactccgccatcgatgcatcccagacccccgatgtcgtgttcgcaagcatcctagcagccttctccaaagccacatgtaaagacttggttatgtttatctaatgttgggtccaagaaggaatttctttccatccctgtgaggcaatgggtgggaatgataggacaggcaaagagaagcttcctcaggctagcaaaaatatcatttgatgtattgattaaaaaagcacttgcttgatgtatctttggcgtgtgtgctactctcatctgtgtgtatgtgtgttgtgtgtgtgtgtgtgtgcatcgcaatatcgtgttccact

SEQ ID NO: 79 - DNA, 582 bp, Homo sapiens
tttttttgcagatcatagaacttttatttagatggaatcattgcgaattacatagaagctaccagcctaagccaaacccatgaggttcatgtgaacttacagttacacaaataagaaacaaatggtacatccaaaaccataaggaaatattctgatgcccagatgatgaagactggggtgaattaagtccacacatttatttcaagttgttaaagagtttgtgggccacgcaatggtccctcgcatgcaagaagtcaaagagctcctccgtgcaatcctcttctgtatgtgatcgagaggatacacgctcatcacagagctctagccgctcccgggcctttacacatttctccaactgctcgcattgctctctcactgttgttaggggatccactaattcctcctcttcctcttcctcctcctcaggatctccggattcggtaagcatcttttgctcgtcctccagtcccatgtctggctacggttctagattcaacacgagcagcaacagcgggcacctaacctcgtgacgaattctctggctcgaggcaaattcctatagtgggcggataaatcggaaca

SEQ ID NO: 80 - DNA, 876 bp, Homo sapiens
  misc_feature (446)..(446): n is a, c, g, or t
  misc_feature (514)..(514): n is a, c, g, or t
  misc_feature (608)..(608): n is a, c, g, or t
  misc_feature (630)..(630): n is a, c, g, or t
  misc_feature (657)..(657): n is a, c, g, or t
  misc_feature (670)..(670): n is a, c, g, or t
  misc_feature (674)..(674): n is a, c, g, or t
  misc_feature (690)..(690): n is a, c, g, or t
  misc_feature (694)..(695): n is a, c, g, or t
  misc_feature (732)..(732): n is a, c, g, or t
  misc_feature (761)..(761): n is a, c, g, or t
  misc_feature (786)..(786): n is a, c, g, or t
  misc_feature (795)..(795): n is a, c, g, or t
  misc_feature (812)..(812): n is a, c, g, or t
  misc_feature (814)..(814): n is a, c, g, or t
  misc_feature (819)..(819): n is a, c, g, or t
  misc_feature (823)..(823): n is a, c, g, or t
  misc_feature (833)..(833): n is a, c, g, or t
  misc_feature (837)..(837): n is a, c, g, or t
  misc_feature (859)..(859): n is a, c, g, or t
  misc_feature (865)..(865): n is a, c, g, or t
  misc_feature (867)..(867): n is a, c, g, or t
  misc_feature (869)..(869): n is a, c, g, or t
  misc_feature (871)..(871): n is a, c, g, or t
gaattctggcacgaggtgaacagtgtggcccgccatgttcttctccgcggcgtccgggcccgggcggctggcctcaccgcccactggggaagacatgtaaggaatttgcataagacagctatgcaaaatggagctggaggagctttatttgtgcacagagatactcctgagaataaccctgatactccatttgatttcacaccagaaaactataagaggatagaggcaattgttaaaaactatccagaaggccataaagcagcagctgttcttccagtcctggatttagcccaaaggcagaatgggtggttgcccatctctgctatgaacaaggttgcagaagttttacaagtacctccaatgagagtatatgaagtagcaactttttatacaatgtataatcgaaagccagttggaaagtatcacattcaggtctgcactactanaccctgcatgcttcgaaactctgacagcatactggaggccattcagaaaaagcttggaataaaggttngggagactacacctgacaaacttttcactcttatagaagtggaatgtttaggggctgtgtgaacgcaccaatggtcaaataaatggcaattacnatgagggttgacagctaagggnttgagaaattattggtgagccaaaggntggcaaaatcccnaaancaggggcaaggagtgncgcnntcttgtgagcaagctggggggcttaccctttgctgancacccaaggggcctggtttggggtcaaanaaggctttaatttaaattgactggnaaatgcccntggggaataaaattggntncaacnccgnaaaaagaaangaanaaaaaacccggagggggggccnggaccnantncnccttt

SEQ ID NO: 81 - DNA, 1267 bp, Homo sapiens
tgactctctgaggctcattttgcagttgttgaaattgtccccgcagttttcaatcatgtctgaaccaatcagagtccttgtgactggagcagctggtcaaattgcatattcactgctgtacagtattggaaatggatctgtctttggtaaagatcagcctataattcttgtgctgttggatatcacccccatgatgggtgtcctggacggtgtcctaatggaactgcaagactgtgcccttcccctcctgaaagatgtcatcgcaacagataaagaagacgttgccttcaaagacctggatgtggccattcttgtgggctccatgccaagaagggaaggcatggagagaaaagatttactgaaagcaaatgtgaaaatcttcaaatcccagggtgcagccttagataaatacgccaagaagtcagttaaggttattgttgtgggtaatccagccaataccaactgcctgactgcttccaagtcagctccatccatccccaaggagaacttcagttgcttgactcgtttggatcacaaccgagctaaagctcaaattgctcttaaacttggtgtgactgctaatgatgtaaagaatgtcattatctggggaaaccattcctcgactcagtatccagatgtcaaccatgccaaggtgaaattgcaaggaaaggaagttggtgtttatgaagctctgaaagatgacagctggctcaagggagaatttgtcacgactgtgcagcagcgtggcgctgctgtcatcaaggctcgaaaactatccagtgccatgtctgctgcaaaagccatctgtgaccacgtcagggacatctggtttggaaccccagagggagagtttgtgtccatgggtgttatctctgatggcaactcctatggtgttcctgatgatctgctctactcattccctgttgtaatcaagaataagacctggaagtttgttgaaggtctccctattaatgatttctcacgtgagaagatggatcttactgcaaaggaactgacagaagaaaaagaaagtgcttttgaatttctttcctctgcctgactagacaatgatgttactaaatgcttcaaagctgaagaatctaaatgtcgtctttgactcaagtaccaaataataataatgctatacttaaattacttgtgaaaaacaacacattttaaagattacgtgcttcttggtacaggtttgtgaatgacagtttatcgtcatgctgttagtgtgcattctaaataaatatatattcaaatg

SEQ ID NO: 82 - DNA, 2510 bp, Homo sapiens
tggggcttctgactgtggaattggattctagctgtgtgtgttatatcctgttactgttgagacacagaggcgggagtcggcgggggaagatatgtgctgagattagtcagcctgccctccctctcccccaagaaactcaggccccatctggggagagtgagaacttaagaaacttgagacagggaaggagagccgagagcagccaaaacctgctaagtctcagaagactggtttctgcacaagggaatggaagaagtgactggaggtggctgtggattcaactctggcctgagattgattcccttgagataagttgttttctgcaaatccagtttgctgatgacatgcaggagttcaccaaattccccaccaaaactggccgaagatctttgtctcgctcgatctcacagtcctccactgacagctacagttcagctgcatcctacacagatagctctgatgatgaggtttctccccgagagaagcagcaaaccaactccaagggcagcagcaatttctgtgtgaagaacatcaagcaggcagaatttggacgccgggagattgagattgcagagcaagacatgtctgctctgatttcactcaggaaacgtgctcagggggagaagcccttggctggtgctaaaatagtgggctgtacacacatcacagcccagacagcggtgttgattgagacactctgtgccctgggggctcagtgccgctggtctgcttgtaacatctactcaactcagaatgaagtagctgcagcactggctgaggctggggttgcagtgttcgcttggaagggcgagtcagaagatgacttctggtggtgtattgaccgctgtgtgaacatggatgggtggcaggccaacatgatcctggatgatgggggagacttaacccactgggtttataagaagtatccaaacgtgtttaagaagatccgaggcattgtggaagagagcgtgactggtgttcacaggctgtatcagctctccaaagctgggaagctctgtgttccggccatgaacgtcaatgattctgttaccaaacagaagtttgataacttgtactgctgccgagaatccattttggatggcctgaagaggaccacagatgtgatgtttggtgggaaacaagtggtggtgtgtggctatggtgaggtaggcaagggctgctgtgctgctctcaaagctcttggagcaattgtctacattaccgaaatcgaccccatctgtgctctgcaggcctgcatggatgggttcagggtggtaaagctaaatgaagtcatccggcaagtcgatgtcgtaataacttgcacaggaaataagaatgtagtgacacgggagcacttggatcgcatgaaaaacagttgtatcgtatgcaatatgggccactccaacacagaaatcgatgtgaccagcctccgcactccggagctgacgtgggagcgagtacgttctcaggtggaccatgtcatctggccagatggcaaacgagttgtcctcctggcagagggtcgtctactcaatttgagctgctccacagttcccacctttgttctgtccatcacagccacaacacaggctttggcactgatagaactctataatgcacccgaggggcgatacaagcaggatgtgtacttgcttcctaagaaaatggatgaatacgttgccagcttgcatctgccatcatttgatgcccaccttacagagctgacagatgaccaagcaaaatatctgggactcaacaaaaatgggccattcaaacctaattattacagatactaatggaccatactaccaaggaccagtccacctgaaccacacactctaaagaaatattttttaagataacttttattttcttcttactcctttcctcttgatttttttcctataatttcattcttgttttttcatctcattatccaagttctgcagaccacacaggaacttgcttcatggctctttagatgaaatagaagttcagggttcctcactctagtcactaaagaaggattttactctcccagcccagaaaggtgattctttctttaccatttctggggactttagtcttaattaggtaccttattaacaggaaatgctaaggtaccttctctgtggaacaatctgcaatgtctaaatcgccttaaaagagcccatttcttagctgctgaaatcagtgctctttcacttcttcagagaagcagggatggtacctacccggcaggtaggttagatgtgggtggtgcatgttaatttcccttagaagttccaagccctgtttcctgcgtaaaggtggtatgtccagttcagagatgtgtataatgagcatggcttgttaagatcaggaggcccacttggatttatagtatagcccttcctccactcccaccagacttgctcatttttcgagtttttaactagactacactctattgagtttaattttgtcctctaggatttatttctgttgtccaaaaaaaaaaaaaaaaaaaa

SEQ ID NO: 83 - DNA, 533 bp, Homo sapiens
tcgacaacagttggaacagtaatcagtttgctaacatatttaaagtcttgaatgttgaagaactcatgtgatttacccttttcaactttttggaaaacgatttaatttattctaattagattaaccctattaatctatggattgggtatcaaaatgaatgccagtccagatgtgcctagacacgaaattggagctgaggactctcacgatatgcaagttcatccaacgtgaagataccataagctttttctctgaaccagagaaatgaaagtcagtttaagaggctgatagatcttggccctgttaaggcatccacttcacagttctgaaggctgagtcagccccactccacagttaggccaagaattagattttaaaacttcatctgtctgtcccagttaactgttaaataaggcctcatcctccactgaagagtatggattgaaggattgtgaactatgtttagtgtgattgtgaacttggtgcctaatgttccatgtctgaagtttgccccagtgctacacgttggagta

SEQ ID NO: 84 - DNA, 1357 bp, Homo sapiens
ggcctgcggcctccgccacccggacgcttctcacggctcccaggaaaaaccctaagtgcctgtgatagagaaaatggagcaagacgcccactattgcttggttctacttcctttatcccgattggccgtcggacttatgccagtgcggcggagccggttggcagcaaagctgtcctggtcacaggctgtgactctggatttgggttctcattggccaagcatctgcattcaaaaggcttccttgtgtttgctggctgcttgatgaaggacaaaggccatgatggggtcaaggagctggacagcctaaacagtgaccgattgagaaccgtccagctcaatgtcttcagaagcgaagaggtggagaaagtggtgggagattgtccgttcgagcctgaaggacctgagaaaggcatgtgggggctcgttaacaatgccggcatctcaacgttcggggaggtggagttcaccagcctggagacctacaagcaggtggcagaagtgaacctttggggcacagtgcggatgacgaaatcctttctccccctcatccgaagggccaaaggccgcgtcgtcaatatcagcagcatgctgggccgcatggccaacccggcccgctccccgtactgcatcaccaagttcggggtagaggctttctcggactgcctgcgctatgagatgtaccccctgggcgtgaaggtcagcgtggtggagcccggcaacttcatcgctgccaccagcctttacaaccctgagagcattcaggccatcgccaagaagatgtgggaggagctgcctgaggtcgtgcgcaaggactacggcaagaagtactttgatgaaaagatcgccaagatggagacctactgcagcagtggctccacagacacgtcccctgtcatcgatgctgtcacacacgccctgaccgccaccaccccctacacccgctaccaccccatggactactactggtggctgcgaatgcagatcatgacccacttgcctggagccatctccgacatgatctacatccgctgaagagtctcgctgtggcctctgtcagggatccctggtggaaggggagggggagggaggaacccatatagtccgactcttgattatccacgtgtggattatccaccatgccaggaagacccataactggtttttaacactaactagagggaatgacttctttgcatagtgagtgacttgggccttcacaaacagggtgtggagtggcaggcagaggcctctaaatctcaggacaaacatggtgaatctatctctccggagataatttcatacagagattttaagaaaacatctttatattaaaaacagatctcatttgatccttaag

SEQ ID NO: 85 - DNA, 3186 bp, Homo sapiens
cgactacgaccagtgaggcggccgccgcagcccaggcgcgggggcgacgacaggttaaaaatctgtaagagcctgattttagaattcaccagctcctcagaagtttggcgaaatatgagttattaagcctacgctcagatcaaggtagcagctagactggtgtgacaacctgtttttaatcagtgactcaaagctgtgatcaccctgatgtcaccgaatggccacagcttgtaaaagagagttacagtggaggtaaaaggagtggcttgcaggatggagaagctgcaccagtgttattggaagtgagccaccatttgaatttgctagctcatgctgcagtattcagattatgccagcaggtttattttttgttttgcaagccagctctgcctccttacagtatgacatctgatgctggagggtcgcactttcaaaaatgagtcagctggtacatggggttatcatcaatttttagctcttctgtctgggagatacaagtttggaagcaatcttggggtacttacccacaaggctggtggagaccagatcaggagaacctcagtctgacgacattgaagctagccgaatgaagcgagcagctgcaaagcatctaatagaacgctactaccaccagttaactgagggctgtggaaatgaagcctgcacgaatgagttttgtgcttcctgtccaacttttcttcgtatggataataatgcagcagctattaaagccctcgagctttataagattaatgcaaaactctgtgatcctcatccctccaagaaaggagcaagctcagcttaccttgagaactcgaaaggtgcccccaacaactcctgctctgagataaaaatgaacaagaaaggcgctagaattgattttaaagatgtgacttacttaacagaagagaaggtatatgaaattcttgaattatgtagagaaagagaggattattcccctttaatccgtgttattggaagagttttttctagtgctgaggcattggtacagagcttccggaaagttaaacaacacaccaaggaagaactgaaatctcttcaagcaaaagatgaagacaaagatgaagatgaaaaggaaaaagctgcatgttctgctgctgctatggaagaagactcagaagcatcttcctcaaggataggtgatagctcacagggagacaacaatttgcaaaaattaggccctgatgatgtgtctgtggatattgatgccattagaagggtctacaccagattgctctctaatgaaaaaattgaaactgcctttctcaatgcacttgtatatttgtcacctaacgtggaatgtgacttgacgtatcacaatgtatactctcgagatcctaattatctgaatttgttcattatcgtaatggagaatagaaatctccacagtcctgaatatctggaaatggctttgccattattttgcaaagcgatgagcaagctaccccttgcagcccaaggaaaactgatcagactgtggtctaaatacaatgcagaccagattcggagaatgatggagacatttcagcaacttattacttataaagtcataagcaatgaatttaacagtcgaaatctagtgaatgatgatgatgccattgttgctgcttcgaagtgcttgaaaatggtttactatgcaaatgtagtgggaggggaagtggacacaaatcacaatgaagaagatgatgaagagcccatccctgagtccagcgagctgacacttcaggaacttttgggagaagaaagaagaaacaagaaaggtcctcgagtggaccccctggaaactgaacttggtgttaaaaccctggattgtcgaaaaccacttatcccttttgaagagtttattaatgaaccactgaatgaggttctagaaatggataaagattatacttttttcaaagtagaaacagagaacaaattctcttttatgacatgtccctttatattgaatgctgtcacaaagaatttgggattatattatgacaatagaattcgcatgtacagtgaacgaagaatcactgttctctacagcttagttcaaggacagcagttgaatccatatttgagactcaaagttagacgtgaccatatcatagatgatgcacttgtccggctagagatgatcgctatggaaaatcctgcagacttgaagaagcagttgtatgtggaatttgaaggagaacaaggagttgatgagggaggtgtttccaaagaattttttcagctggttgtggaggaaatcttcaatccagatattggtatgttcacatacgatgaatctacaaaattgttttggtttaatccatcttcttttgaaactgagggtcagtttactctgattggcatagtactgggtctggctatttacaataactgtatactggatgtacattttcccatggttgtctacaggaagctaatggggaaaaaaggaacttttcgtgacttgggagactctcacccagttctatatcagagtttaaaagatttattggagtatgaagggaatgtggaagatgacatgatgatcactttccagatatcacagacagatctttttggtaacccaatgatgtatgatctaaaggaaaatggtgataaaattccaattacaaatgaaaacaggaaggaatttgtcaatctttattctgactacattctcaataaatcagtagaaaaacagttcaaggcttttcggagaggttttcatatggtgaccaatgaatctcccttaaagtacttattcagaccagaagaaattgaattgcttatatgtggaagccggaatctagatttccaagcactagaagaaactacagaatatgacggtggctataccagggactctgttctgattagggagttctgggaaatcgttcattcatttacagatgaacagaaaagactcttcttgcagtttacaacgggcacagacagagcacctgtgggaggactaggaaaattaaagatgattatagccaaaaatggcccagacacagaaaggttacctacatctcatacttgctttaatgtgcttttacttccggaatactcaagcaaagaaaaacttaaagagagattgttgaaggccatcacgtatgccaaaggatttggcatgctgtaaaacaaaacaaaacaaaataaaacaaaaaaaaaaaaaaaaaa

SEQ ID NO: 86 - DNA, 357 bp, Homo sapiens
atgtccgggggcagcagctgcagccagaccccaagccgggccatccccgccactcgccgggtggtgctcggcgacggcgtgcagctcccgcccggggactacagcacgacccccggcggcacgctcttcagcaccaccccgggaggtaccaggatcatctatgaccggaaattcctgatggagtgtcggaactcacctgtgaccaaaacacccccaagggatctgcccaccattccgggggtcaccagcccttccagtgatgagccccccatggaagccagccagagccacctgcgcaatagcccagaagataagcgggcgggcggtgaagagtcacagtttgagatggacatttaa

SEQ ID NO: 87 - DNA, 899 bp, Homo sapiens
atgctgggcatctggaccctcctacctctggttcttacgtctgttgctagattatcgtccaaaagtgttaatgcccaagtgactgacatcaactccaagggattggaattgaggaagactgttactacagttgagactcagaacttggaaggcctgcatcatgatggccaattctgccataagccctgtcctccaggtgaaaggaaagctagggactgcacagtcaatggggatgaaccagactgcgtgccctgccaagaagggaaggagtacacagacaaagcccatttttcttccaaatgcagaagatgtagattgtgtgatgaaggacatgatgtgaacatggaatcatcaaggaatgcacactcaccagcaacaccaagtgcaaagaggaaggatccagatctaacttggggtggctttgtcttcttcttttgccaattccactaattgtttgggtgaagagaaaggaagtacagaaaacatgcagaaagcacagaaaggaaaaccaaggttctcatgaatctccaaccttaaatcctgaaacagtggcaataaatttatctgatgttgacttgagtaaatatatcaccactattgctggagtcatgacactaagtcaagttaaaggctttgttcgaaagaatggtgtcaatgaagccaaaatagatgagatcaagaatgacaatgtccaagacacagcagaacagaaagttcaactgcttcgtaattggcatcaacttcatggaaagaaagaagcgtatgacacattgattaaagatctcaaaaaagccaatctttgtactcttgcagagaaaattcagactatcatcctcaaggacattactagtgactcagaaaattcaaacttcagaaatgaaatccaaagcttggtctag

SEQ ID NO: 88 - DNA, 1877 bp, Homo sapiens
gctttcccgtttcttaaacattggcgttcccaagtttctccttggtcctcctgtcatttttatctactctcgtagcttcaaataccatctagtttatagtttatttagcatgttgttcaagccaccgtcttgggcccagggctctacctgtagcttttcatccacacttctcaggttgcttcttacacagcgccatagtagttaaaatacggtctggggatagtcgtctcttcatcagtctcccccgacgacctgcgcaggcgtggcttgaggaaacgcccgctgtgggcggagccacccgaaaggctccggtcgggggcgggaacaggatcggcccgcgggctggcgtcgataggctgccgcagagacagggcgggctctgctaagggacgcgcctcgccgtggggcggtgcctgcgcctgagcctctacgagagggaaggaacgctgctccgagctccgcgtcgcgtcgcgtagattcgcgtcgccgtcgacctcagaggcggggccggaagcgctacggtttgacccccgagtccctctgttcccgaaggggcggccgtctttctgccgacccgctccgcctcctctccttcttccccattacccggaggccgaagcccccagccagggcggggcggcgcagcccgagctcccggacccggaagaagcgccatctcccgcctccaccatggagcccaccgcaccgtccctgaccgaggaggacctcactgaagtgaagaaggacgccttagaaaatttacgtgtatacctgtgtgagaaaatcatagctgagagacattttgatcatctacgtgcaaaaaaaatactcagtagagaagacactgaagaaatttcttgtcgaacatcaagtagaaaaagggctggaaaattgttagactacttacaggaaaacccaaaaggtctggacacccttgttgaatctattcggcgagaaaaaacacagaacttcctgatacagaagattacagatgaagtgctgaaacttagaaatataaaactagaacatctgaaaggactaaaatgtagcagttgtgaaccttttccagatggagccacgaacaacctctccagatcaaattcagatgagagtaatttctctgaaaaactgagggcatccactgtcatgtaccatccagaaggagaatccagcacgacgccctttttttctactaattcttctctgaatttgcctgttctagaagtaggcagaactgaaaataccatcttctcttcaactacacttcccagacctggggacccaggggctcctcctttgccaccagatctacagttagaagaagaaggaacttgtgcaaactctagtgagatgtttcttcccttaagatcacgtactgtttcacgacaatgacactttattgccttttaatttttaatgatgacaaaaaatgttttaaagaatatgactttttataaaatggctgtaatcatttgtttacatttgatgcatgtcttttaaaatgcaatgtaagcatactttgtaaataggatttttagaattaaaaaagcatacttctaggatagctaactgtaaatcatgttgatcatgtactttttagtaatttctttttttcctttttaaggtctttcagtacttttttaaatattttctattttaagactgattttaatagggaatatatctctatttgagaatagacccttactaggaagaacgttttttcctcagtgcatttgtgctagaaattttcaagagtctaatagtctttgccagtcattcagcagcaaattttcagcattaagctgttcctgttcagtaataaaaccggtcactgatgggaaaactgccaatatagaaaaataaaaatctctttt

SEQ ID NO: 89 - DNA, 859 bp, Homo sapiens
tggaaagggctgtcacccggcttggccccttccacacccaactggggcaagcctgacccggcgacaggaggcatgaggggcccccggccgaaatgacagtgctggcgccagcctggagcccaacaacctatctcctcctgctgctgctgctgagctcgggactcagtgggacccaggactgctccttccaacacagccccatctcctccgacttcgctgtcaaaatccgtgagctgtctgactacctgcttcaagattacccagtcaccgtggcctccaacctgcaggacgaggagctctgcggggcgctctggcggctggtcctggcacagcgctggatggagcggctcaagactgtcgctgggtccaagatgcaaggcttgctggagcgcgtgaacacggagatacactttgtcaccaaatgtgcctttcagcccccccccagctgtcttcgcttcgtccagaccaacatctcccgcctcctgcaggagacctccgagcagctggtggcgctgaagccctggatcactcgccagaacttctcccggtgcctggagctgcagtgtcagcccgactcctcaaccctgccacccccatggagtccccggcccctggaggccacagccccgacagccccgcagccccctctgctcctcctactgctgctgcccgtgggcctcctgctgctggccgctgcctggtgcctgcactggcagaggacgcggcggaggacaccccgccctggggagcaggtgccccccgtccccagtccccaggacctgctgcttgtggagcactgacctggccaaggcctcatcctggggaggatacgtaggcacacagaggggagtcaccagcc

SEQ ID NO: 90 - DNA, 2848 bp, Homo sapiens
gacattggtcattcaggttttatttatgacaacttcttagaacacacacatccaatctaggaacagaaatgtacaacatggggcttaaataactttcatacactatgtacagccatcggcagaggtacaaaacatatatacaccttgtgctagtcacatcatggaggacagcaggagcctaatgaagcctgcagcctgggcaggacatgattgctagaaaagagttggtgggcagggcagggccctgattcatctcaggggtcttctctgatcctcggctctttgtggaggagtttctatttcctacttccctgcaaggccctcaggacatggttcacaggactgaactagatgtgataggggcttcaaaggaccggacccagagaagaggaaaactctaccggtgcagataagtggagcacagggatcagttgtccttgtttttttttggtcttttcttcatttgaagattaagtattggagccatgggaataaaggttcaacgtcctcgatgtttttttgacattgccattaacaatcaacctgctggaagagttgtctttgaattattttctgatgtgtgccccaaaacatgcgagaactttcgttgtctttgtacaggtgaaaaggggaccgggaaatcaactcagaaaccattacattataagagttgtctctttcacagagttgtcaaggattttatggttcaaggtggtgacttcagtgaaggaaatggacgaggaggggaatctatctatggaggattttttgaagacgagagtttcgctgttaaacacaacaaagaatttctcttgtcaatggccaacagagggaaggatacaaatggttcacagttcttcataacaacgaaaccaactcctcatttagatgggcatcatgttgtttttggacaagtaatctctggtcaagaagttgtaagagagattgaaaaccagaaaacagatgcagctagcaaaccgtttgcggaggtacggatactcagttgtggagagctgattcccaaatctaaagttaagaaagaagaaaagaaaaggcataaatcatcatcatcttcctcctcctcatctagtgactcagatagctcaagtgattctcagtcctcttctgattcctctgattccgaaagtgctactgaagagaaatcaaagaaaagaaaaaagaaacatcggaaaaattcccgaaaacacaagaaagaaaagaaaaagcgaaagaaaagcaagaagagtgcatctagtgagagtgaagctgaaaatcttgaagcacaaccccagtctactgtccgtccagaagagatccctcctatacctgaaaatagattcctaatgagaaaaagtcctcctaaagctgatgagaaggaaaggaaaaacagagagagagaaagggaaagagagtgtaatccacctaactcccagcctgcttcataccagagacgacttttagttactagatctggcaggaaaattaaaggaagaggaccaaggcgttatcgaactccttccagatccagatcaagggatcgtttcagacgtagtgagactcctccacattggaggcaagagatgcagagagctcaaagaatgagggtatcaagtggtgaaagatggatcaagggggataagagtgagttgaatgaaataaaagaaaatcagagaagtccagttagagtaaaagagagaaaaataacagatcacaggaatgtatctgagagtccaaacagaaaaaatgaaaaggagaagaaagttaaagaccataaatctaacagcaaagagagagacatcagaagaaattcagaaaaagatgacaagtataaaaacaaagtgaagaaaagggccaaatctaaaagtaggagtaagagcaaagagaaatcaaagagtaaagaaagagattcaaaacataatagaaatgaagaaaagaggatgaggtcaaggagtaaaggaagggatcatgaaaatgttaaagaaaaagaaaagcagtctgattctaaaggaaaagatcaggaaaggagtagaagtaaagagaagtctaaacagttagaatcaaagagtaatgagcatgatcacagtaaaagtaaggaaaaggatagacgcgcacaatccaggagtagagaatgtgatataactaaaggtaaacacagttataatagcagaacaagagaacgaagcagaagtagggacagaagcagaagagtgcgatcaagaacccatgacagagatcgcagcagaagcaaggagtaccatagatacagagaacaggaatacaggagaagaggacggtcacgaagccgagagagaagaacaccaccaggaagatcaagaagtaaagataggaggagaaggaggagagactcacggagctcagagagagaagaaagtcaaagcagaaacaaagacaaatacagaaaccaagagagtaagagctcacacagaaaagaaaattctgagagtgagaaaagaatgtactctaaaagtcgtgatcataatagctcaaataacagcagggaaaaaaaggctgatagagatcaaagtcccttctcaaaaataaaacaaagcagtcaggacgatgaattaaagtcctccatgttgaaaaataaggaggatgagaagatcagatcctcagtggaaaaagaaaaccaaaaatcaaaaggtcaagaaaatgaccatgtacatgaaaaaaataaaaaatttgatcatgaatcaagccctggaacagatgaagacaagagcggatgagtgagttatataaacttacttccattctgtttcggattttaagtttgagagacttgctaatgaatctcctttatgttgttttccttttcattgttttt

SEQ ID NO: 91 - DNA, 7221 bp, Homo sapiens
cgggcggcctcttgtgtgagggcctgtgggattctccggatatggccggagtgtttccttatcgagggccgggtaacccggtgcctggccctctagccccgctaccggactacatgtcggaggagaagctgcaggagaaagctcgaaaatggcagcaattgcaggccaagcgctatgcagaaaagcggaagtttgggtttgtggatgcccagaaggaagacatgcccccagaacatgtcagggagatcattcgagaccatggagacatgaccaacaggaagttccgccatgacaaaagggtttacttgggtgccctaaagtacatgccccacgcagtcctcaaactcctggagaacatgcctatgccttgggagcagattcgggatgtgcccgtgctgtaccacatcactggagccatttccttcgtcaatgagattccctgggtcattgaacctgtctacatctcccagtgggggtcaatgtggattatgatgcgccgagaaaaaagagataggaggcatttcaagagaatgcgttttcccccttttgatgatgaggagccgcccttggactatgctgacaacatcctaaatgttgagccactggaggccattcagctagagctggaccctgaggaggacgcccctgtgttggactggttctatgaccaccagccgttgagggacagcaggaagtatgtaaatggctccacttaccagcgctggcagttcacactacctatgatgtcaactctctaccgcctggctaatcagctcctgacagacttggtggatgacaactacttctacctgtttgatttgaaggccttctttacgtccaaggcactcaatatggccattcctggaggccccaaatttgaacctcttgttcgagacatcaacctacaggatgaagactggaatgaattcaatgatattaacaagattatcatccggcagcctatccggactgagtacaagattgcttttccttacttgtacaacaatcttccacaccatgtccacctcacctggtaccatactcccaatgttgtattcatcaaaactgaagatcctgacttgccagctttctactttgaccctttgatcaacccaatctcccataggcactcagtcaagagccaggaaccattgccggatgatgatgaggaatttgagctcccggagtttgtggagcccttcctgaaggacacacccctctatacagacaatacagccaatggcattgccctgctctgggccccgcggcccttcaacctacgctctggtcgcacccgtcgggccctggacataccccttgtcaagaactggtatcgggagcattgtcctgccgggcagcctgtgaaagtgagggtctcctaccagaagctgcttaagtactatgtgctgaatgccctgaagcatcggccccctaaggctcaaaagaagaggtatttgttccgctccttcaaagccaccaaattctttcagtccacaaagctggactgggtggagggttggctccaggtttgccgccagggctacaacatgctcaaccttctcattcaccgcaaaaacctcaactacctgcacctggactacaacttcaacctcaagcctgtgaaaacgctcaccaccaaggaaagaaagaaatctcgttttgggaatgctttccacctgtgtcgggaagttctgcgtttgactaagctggtggtggatagtcacgtgcagtatcggctgggcaatgtggatgccttccagctggcagatggattgcagtatatatttgcccatgttgggcagttgacgggcatgtatcgatacaaatacaagctgatgcgacagattcgcgtgtgcaaggacctgaagcatctcatctattatcgtttcaacacaggccctgtagggaagggtcctggctgtggcttctgggctgccggttggcgagtctggctctttttcatgcgtggcattacccctttattagagcgatggcttggcaacctcctggcccggcagtttgaaggtcgacactcaaagggggtggcaaagacagtaacaaagcagcgagtggagtcacattttgaccttgagctgcgggcagctgtgatgcatgatattctggacatgatgcctgaggggatcaagcagaacaaggcccggacaatcctgcagcacctcagtgaagcctggcgctgctggaaagccaacattccctggaaggtccctgggctgccgacgcccatagagaatatgatccttcgatacgtgaaggccaaggctgactggtggaccaacactgcccactacaaccgagaacggatccgccgaggggccactgtggacaagactgtttgtaaaaagaatctgggccgcctcacccggctctatctgaaggcagaacaggagcggcagcacaactacctgaaggacgggccttacatcacagcggaggaaacagtggcagtatataccaccacagtgcattggttggaaagccgcaggttttcacccatcccattccccccactctcctataagcatgacaccaagttgctcatcttggcattggagcggctcaaggaagcttatagtgtgaagtctcggttgaaccagtctcagagggaggagctaggtctgatcgagcaggcctacgataacctccacgaggcgctgtcccgcataaagcgtcacctcctcacacagagagccttcaaagaggtgggcattgagttcatggatctgtatagccacctcgttccagtatatgatgttgagcccctggagaagataactgatgcttacctggaccagtacctgtggtatgaagccgacaagcgccgcctgttcccaccctggattaagcctgcagacacagaaccacctccactgcttgtttacaagtggtgtcaaggcatcaataacctgcaggacgtgtgggagacgagtgaaggcgagtgcaatgtcatgctggaatcccgctttgagaagatgtatgagaagatcgacttgactctgctcaacaggctcgtgcgcctcatcgtggaccacaacatagccgactacatgacagccaagaacaacgtcgtcatcaactataaggacatgaaccatacgaattcatatgggatcatcagaggcctgcagtttgcctcattcatagtgcagtattatggcctggtgatggatttgcttgtattgggattgcaccgggccagtgagatggctgggccccctcagatgccaaatgactttctcagtttccaggacatagccactgaggctgcccaccccatccgtctcttctgcagatacattgatcgcatccatatttttttcaggttcacagcagatgaggctcgggacctgattcaacgttacctgacagagcaccctgaccccaataatgaaaacatcgttggctataataacaagaagtgctggccccgagatgcccgcatgcgcctcatgaaacatgatgttaacttaggccgggcggtattctgggacatcaagaaccgcttgccacggtcagtgactacagttcagtgggagaacagcttcgtgtctgtgtacagtaaggacaaccccaacctgctgttcaacatgtgtggcttcgagtgccgcatcctgcctaagtgccgcaccagctatgaggagttcacccacaaggacggggtctggaacctgcagaatgaggttactaaggagcgcacagctcagtgtttcctgcgtgtggacgatgagtcaatgcagcgcttccacaaccgcgtgcgtcagattctcatggcctctgggtccaccaccttcaccaagattgtgaataagtggaatacagctctcattggccttatgacatactttcgggaggctgtggtgaacacccaagagctcttggacttactggtgaagtgtgagcacaaaatccagacacgtatcaagattggactcaactccaagatgccaagtcggttccccccggttgtgttctacacccctaaggagttgggtggactcggcatgctctcaatgggccatgtgctcatcccccaatccgacctcaggtggtccaaacagacagatgtaggtatcacacactttcgttcaggaatgagccatgaagaagaccagctcattcccaacttgtaccgctacatacagccatgggagagcgagttcattgattctcagcgggtctgggctgagtactcactcaagagacaagaggccattgctcagaacagacgcctgactttagaagacctagaagattcatgggatcgtggcattcctcgaatcaataccctcttccagaaggaccggcacacactggcttatgataagggctggcgtgtcagaactgactttaagcagtatcaggttttgaagcagaatccgttctggtggacacaccagcggcatgatgggaagctctggaacctgaacaactaccgtacagacatgatccaggccctgggcggtgtggaaggcattctggaacacacactctttaagggcacttacttccctacctgggaggggcttttctgggagaaggccagtggctttgaggaatctatgaagtggaagaagctaactaatgctcagcgatcaggactgaaccagattcccaatcgtagattcaccctctggtggtccccgaccattaatcgagccaatgtatatgtaggctttcaggtgcagctagacctgacgggtatcttcatgcacggcaagatccccacgctgaagatctctctcatccagatcttccgagctcacttgtggcagaagatccatgagagcattgttatggacttatgtcaggtgtttgaccaggaacttgatgcactggaaattgagacagtacaaaaggagacaatccatccccgaaagtcatataagatgaactcttcctgtgcagatatcctgctctttgcctcctataagtggaatgtctcccggccctcattgctggctgactccaaggatgtgatggacagcaccaccacccagaaatactggattgacatccagttgcgctggggggactatgattcccacgacattgagcgctacgcccgggccaagttcctggactacaccaccgacaacatgagtatctacccttcgcccacaggtgtactcatcgccattgacctggcctataacttgcacagtgcctatggaaactggttcccaggcagcaagcctctcatacaacaggccatggccaagatcatgaaggcaaaccctgccctgtatgtgttacgtgaacggatccgcaaggggctacagctctattcatctgaacccactgagccttatttgtcttctcagaactatggtgagctcttctccaaccagattatctggtttgtggatgacaccaacgtctacagagtgactattcacaagacctttgaagggaacttgacaaccaagcccatcaacggagccatcttcatcttcaacccacgcacagggcagctgttcctcaagataatccacacgtccgtgtgggcgggacagaagcgtttggggcagttggctaagtggaagacagctgaggaggtggccgccctgatccgatctctgcctgtggaggagcagcccaagcagatcattgtcaccaggaaggacatgctggacccactggaggtgcacttactggacttccccaatattgtcatcaaaggatcggagctccaactccctttccaggcgtgtctcaaggtggaaaaattcggggatctcatccttaaagccactgagccccagatggttctcttcaacctctatgacgactggctcaagactatttcatcttacacggccttctcccgtctcatcctgattctgcgtgccctacatgtgaacaacgatcgggcaaaagtgatcctgaagccagacaagactactattacagaaccacaccacatctggcccactctgactgacgaagaatggatcaaggtcgaggtgcagctcaaggatctgatcttggctgactacggcaagaaaaacaatgtgaacgtggcatcactgacacaatcagaaattcgagacatcatcctgggtatggagatctcggcaccgtcacagcagcggcagcagatcgctgagatcgagaagcagaccaaggaacaatcgcagctgacggcaacacagactcgcactgtcaacaagcatggcgatgagatcatcacctccaccaccagcaactatgagacccagactttctcatccaagactgagtggagggtcagggccatctctgctgccaacctgcacctaaggaccaatcacatctatgtttcatctgacgacatcaaggagactggctacacctacatccttcccaagaatgtgcttaagaagttcatctgcatatctgaccttcgggcccaaattgcaggatacctatatggggtgagcccaccagataacccccaggtgaaggagatccgctgcattgtgatggtgccgcagtggggcactcaccagaccgtgcacctgcctggccagctgccccagcatgagtacctcaaggagatggaacccttaggttggatccacactcagcccaatgagtccccgcagttatcaccccaggatgtcaccacccatgccaagatcatggctgacaacccatcttgggatggcgagaagaccattatcatcacatgcagcttcacgccaggctcctgtacactgacggcctacaagctgacccctagtggctacgaatggggccgccagaacacagacaagggcaacaaccccaagggctacctgccttcacactatgagagggtgcagatgctgctgtcggaccgtttccttggcttcttcatggtccctgcccagtcctcgtggaactacaacttcatgggtgttcggcatgaccccaacatgaaatatgagctacagctggcgaaccccaaagagttctaccacgaggtgcacaggccctctcacttcctcaactttgctctcctgcaggagggggaggtttactctgcggatcgggaggacctgtatgcctgaccgtttccctgcctcctgcttcagcctcccgaggccgaagcctcagcccctccagacaggccgctgacattcagcagtttggcctctttccctctgtctgtgcttgtgttgttgacctcctgatggcttgtcatcctgaataaaatataataataaattttgtataaatagg

SEQ ID NO: 92 - DNA, 2613 bp, Homo sapiens
cttgcgagctcgtcgtactgaccgagcggggaggctgtcttgaggcggcaccgctcaccgacaccgaggcggactggcagccctgagcgtcgcagtcatgccggccggacccgtgcaggcggtgcccccgccgccgcccgtgcccacggagcccaaacagcccacagaagaagaagcatcttcaaaggaggattctgcaccttctaagccagttgtggggattatttaccctcctccagaggtcagaaatattgttgacaagactgccagctttgtggccagaaacgggcctgaatttgaagctaggatccgacagaacgagatcaacaaccccaagttcaactttctgaaccccaatgacccttaccatgcctactaccgccacaaggtcagcgagttcaaggaagggaaggctcaggagccgtccgccgccatccccaaggtcatgcagcagcagcagcagaccacccagcagcagctgccccagaaggtccaagcccaagtaatccaagagaccatcgtgcccaaagagcctcctcctgagtttgagttcattgctgatcctccctctatctcagccttcgacttggatgtggtgaagctgacggctcagtttgtggccaggaatgggcgccagtttctgacccagctgatgcagaaagagcagcgcaactaccagtttgactttctccgcccacagcacagcctcttcaactacttcacgaagctagtggaacagtacaccaagatcttgattccacccaaaggtttattttcaaagctcaagaaagaggctgaaaacccccgagaagttttggatcaggtgtgttaccgagtggaatgggccaaattccaggaacgtgagaggaagaaggaagaagaggagaaggagaaggagcgggtggcctatgctcagatcgactggcatgattttgtggtggtggaaacagtggacttccaacccaatgagcaagggaacttccctccccccaccacgccagaggagctgggggcccgaatcctcattcaggagcgctatgaaaagtttggggagagtgaggaagttgagatggaggtcgagtctgatgaggaggatgacaaacaggagaaggcggaggagcctccttcccagctggaccaggacacccaagtacaagatatggatgagggttcagatgatgaagaagaagggcagaaagtgcccccacccccagagacacccatgcctccacctctgcccccaactccagaccaagtcattgtccgcaaggattatgatcccaaagcctccaagcccttgcctccagcccctgctccagatgagtatcttgtgtcccccattactggggagaagatccccgccagcaaaatgcaggaacacatgcgcattggacttcttgaccctcgctggctggagcagcgggatcgctccatccgtgagaagcagagcgatgatgaggtgtacgcaccaggtctggatattgagagcagcttgaagcagttggctgagcggcgtactgacatcttcggtgtagaggaaacagccattggtaagaagatcggtgaggaggagatccagaagccagaggaaaaggtgacctgggatggccactcaggcagcatggcccggacccagcaggctgcccaggccaacatcaccctccaggagcagattgaggccattcacaaggccaaaggcctggtgccagaggatgacactaaagagaagattggccccagcaagcccaatgaaatccctcaacagccaccgccaccatcttcagccaccaacatccccagctcggctccacccatcacttcagtgccccgaccacccacaatgccacctccagttcgtactacagttgtctccgcagtacccgtcatgccccggcccccaatggcatctgtggtccggctgcccccaggctcagtgatcgcccccatgccgcccatcatccacgcgcccagaatcaacgtggtgcccatgcctccctcggcccctcctattatggccccccgcccaccccccatgattgtgccaacagcctttgtgcctgctccacctgtggcacctgtcccagctccagccccaatgccccctgtgcatcccccacctcccatggaagatgagcccacctccaaaaaactgaagacagaggacagcctcatgccagaggaggagttcctgcgcagaaacaagggtccagtgtccatcaaagtccaggtgcccaacatgcaggataagacggaatggaaactgaatgggcaggtgctggtcttcaccctcccactcacggaccaggtctctgtcattaaggtgaagattcatgaagccacaggcatgcctgcagggaaacagaagctacagtatgagggtatcttcatcaaagattccaactcactggcttactacaacatggccaatggcgcagtcatccacctggccctcaaggagagaggcgggaggaagaagtagacaagaggaacctgctgtcaagtccctgccattttgcctctcctgtctcccaccccctgccccagacccaggagcccccctgaggctttgccttgcctgcatatttgtttcgctcttactcagtttgggaattc

SEQ ID NO: 93 - DNA, 5035 bp, Homo sapiens
gcggcggcggcggcggcggcggcagcggcggccaagcggccaggttggcggccggggctccgggccgcgcgaggccacggccacgccgcgccgctgcgcacaaccaacgaggcagagcgccgcccggcgcgagactgcggccgaagcgtggggcgcgcgtgcggaggaccaggcgcggcgcggctgcggctgagagtggagcctttcaggctggcatggagagcttaaggggcaactgaaggagacacactggccaagcgcggagttctgcttacttcagtcctgctgagatactctctcagtccgctcgcaccgaaggaagctgccttgggatcagagcagacataaagctagaaaaatttcaagacagaaacagtctccgccagtcaagaaaccctcaaaagtattttgccatggatatagaagatgaagaaaacatgagttccagcagcactgatgtgaaggaaaaccgcaatctggacaacgtgtcccccaaggatggcagcacacctgggcctggcgagggctctcagctctccaatgggggtggtggtggccccggcagaaagcggcccctggaggagggcagcaatggccactccaagtaccgcctgaagaaaaggaggaaaacaccagggcccgtcctccccaagaacgccctgatgcagctgaatgagatcaagcctggtttgcagtacacactcctgtcccagactgggcccgtgcacgcgcctttgtttgtcatgtctgtggaggtgaatggccaggtttttgagggctctggtcccacaaagaaaaaggcaaaactccatgctgctgagaaggccttgaggtctttcgttcagtttcctaatgcctctgaggcccacctggccatggggaggaccctgtctgtcaacacggacttcacatctgaccaggccgacttccctgacacgctcttcaatggttttgaaactcctgacaaggcggagcctcccttttacgtgggctccaatggggatgactccttcagttccagcggggacctcagcttgtctgcttccccggtgcctgccagcctagcccagcctcctctccctgtcttaccaccattcccacccccgagtgggaagaatcccgtgatgatcttgaacgaactgcgcccaggactcaagtatgacttcctctccgagagcggggagagccatgccaagagcttcgtcatgtctgtggtcgtggatggtcagttctttgaaggctcggggagaaacaagaagcttgccaaggcccgggctgcgcagtctgccctggccgccatttttaacttgcacttggatcagacgccatctcgccagcctattcccagtgagggtcttcagctgcatttaccgcaggttttagctgacgctgtctcacgcctggtcctgggtaagtttggtgacctgaccgacaacttctcctcccctcacgctcgcagaaaagtgctggctggagtcgtcatgacaacaggcacagatgttaaagatgccaaggtgataagtgtttctacaggaacaaaatgtattaatggtgaatacatgagtgatcgtggccttgcattaaatgactgccatgcagaaataatatctcggagatccttgctcagatttctttatacacaacttgagctttacttaaataacaaagatgatcaaaaaagatccatctttcagaaatcagagcgaggggggtttaggctgaaggagaatgtccagtttcatctgtacatcagcacctctccctgtggagatgccagaatcttctcaccacatgagccaatcctggaagggtctcgctcttacacccaggctggagtgcagtggtgcaatcatggctcactgcagcctcgacctcctgggctcttaagcgatccttccacctcaaccttccaaggagctgggactacagaaccagcagatagacacccaaatcgtaaagcaagaggacagctacggaccaaaatagagtctggtgaggggacgattccagtgcgctccaatgcgagcatccaaacgtgggacggggtgctgcaaggggagcggctgctcaccatgtcctgcagtgacaagattgcacgctggaacgtggtgggcatccagggatccctgctcagcattttcgtggagcccatttacttctcgagcatcatcctgggcagcctttaccacggggaccacctttccagggccatgtaccagcggatctccaacatagaggacctgccacctctctacaccctcaacaagcctttgctcagtggcatcagcaatgcagaagcacggcagccagggaaggcccccaacttcagtgtcaactggacggtaggcgactccgctattgaggtcatcaacgccacgactgggaaggatgagctgggccgcgcgtcccgcctgtgtaagcacgcgttgtactgtcgctggatgcgtgtgcacggcaaggttccctcccacttactacgctccaagattaccaagcccaacgtgtaccatgagtccaagctggcggcaaaggagtaccaggccgccaaggcgcgtctgttcacagccttcatcaaggcggggctgggggcctgggtggagaagcccaccgagcaggaccagttctcactcacgccctgacccgggcagacatgatggggggtgcagggggctgtgggcatccagcgtcatcctccagaacctcacatctgaactgggggcaggtgcataccttggggagggagtagggggacacgggggaccaccaggtgtccacggttgtccccagcatctcacatcagacctggggcaggtgcgcagtgtggggaggggatggggtgcgtcagggcccagcatcgccgcctggcatctctctgccgcagcatttccccttctgaaccgtccagtgactgctttcaatctcggtttacgtttagaaattgagttctactgagtagggcttccttaagtttaggaaaatagaaattactttgtgtgaaattcttgaataaataatttattcagagctaggaatgtggtttataaaataggaagtaattgtgtcaggtcacttttatgccacattattttaattgcaaaaaagcatctatatatggaggagggtgggaaaatagaggtaggaaatagtagcctaaaggaaatcgccacacgtctgtctaaacttaggtctcttttctccgtaggtacctccctgggtagttccacacactaggttgtaacagtctctccctgaggagcagactcccagcatggtgtagcgtggccctgtcatgcacatggggtcccgcagcagtgactgtgtgtcctgcagaggcgtgacccaggcccctgtagccctcagcctcctctagaagcttctgtactccttgtaggatcagatcatggaaaacttttctcagtttacttctaagtaatcacagataatacatggccagtaatcccaggctggccattcattcaggttttttaaaggatatttaacttttatggactagaaggaatcacgagggctactgcacaatacatggcctaagttccctctgttccttcctctgaatcgaatggatgtgggtgaccgcccgaaggccttcacaggatggaagtagaatgatttcagtagatactcattcttggaaaatgccatagttttaaattattgtttccagctttatcaaagacatgtttgaaaaataaaaagcatccaagtgagagctggtgagaccacgtgctgctggcgtagtgtaggccagacattgacagtcctgacgggagctcagggctgcccagcgcccagcgtgcacgggacggccccacgacagagggagtcagcccgggaggtcaggagcgcggcgggcgagggccctgtgtggaccacctccaccaagctcagagatttgcaaccaggtgccttgttgcctccgctcaggatgaaagaggagctgagagaagtgctctgcctgccagtgcagtgcccagctccaaggctctagagggtgttcaggtacactgaggaggggacggctccgtcttcacattgtgcacagatctgaggatgggattagcgaagctgtggagactgcacatccggacctgcccatgtctcaaaacaaacacatgtacagtggctctttttccttctcaaacactttaccccagaagcaggtggtctgccccaggcataaagaaggaaaattggccatctttcccacctctaaattctgtaaaattatagacttgctcaaaagattcctttttatcatccccacgctgtgtaagtggaaagggcattgtgttccgtgtgtgtccagtttacagcgtctctgccccctagcgtgttttgtgacaatctcccctgggtgaggagtgggtgcacccagccccgaggccagtggttgctcggggccttccgtgtgagttctagtgttcacttgatgccggggaatagaattagagaaaactctgacctgccgggttccagggactggtggaggtggatggcaggtccgactcgaccatgacttagttgtaagggtgtgtcggctttttcagtctcatgtgaaaatcctcctgtctctggcagcactgtctgcactttcttgtttactgtttgaagggacgagtaccaagccacaaggaacacttcttttggccacagcataagctgatggtatgtaaggaaccgatgggccattaaacatgaactgaacggttaaaagcacagtctatggaacgctaatggagtcagcccctaaagctgtttgctttttcaggctttggattacatgcttttaatttgattttagaatctggacactttctatgaatgtaattcggctgagaaacatgttgctgagatgcaatcctcagtgttctctgtatgtaaatctgtgtatacaccacacgttacaactgcatgagcttcctctcgcacaagaccagctggaactgagcatgagacgctgtcaaatacagacaaaggatttgagatgttctcaataaaaagaaaatgtttcact

SEQ ID NO: 94 - DNA, 2755 bp, Homo sapiens
ttaggacggggcgatggcggctgagaggagctgcgcgtgcgcgaacatgtaactggtgggatctgcggcggctcccagatgatggtcgtcctcctgggcgcgacgaccctagtgctcgtcgccgtgggcccatgggtgttgtccgcagccgcaggtggaaaaaatctaaaatctcctcaaaaagtagaggtcgacatcatagatgacaactttatcctgaggtggaacaggagcgatgagtctgtcgggaatgtgactttttcattcgattatcaaaaaactgggatggataattggataaaattgtctgggtgtcagaatattactagtaccaaatgcaacttttcttcactcaagctgaatgtttatgaagaaattaaattgcgtataagagcagaaaaagaaaacacttcttcatggtatgaggttgactcatttacaccatttcgcaaagctcagattggtcctccagaagtacatttagaagctgaagataaggcaatagtgatacacatctctcctggaacaaaagatagtgttatgtgggctttggatggtttaagctttacatatagcttacttatctggaaaaactcttcaggtgtagaagaaaggattgaaaatatttattccagacataaaatttataaactctcaccagagactacttattgtctaaaagttaaagcagcactacttacgtcatggaaaattggtgtctatagtccagtacattgtataaagaccacagttgaaaatgaactacctccaccagaaaatatagaagtcagtgtccaaaatcagaactatgttcttaaatgggattatacatatgcaaacatgacctttcaagttcagtggctccacgcctttttaaaaaggaatcctggaaaccatttgtataaatggaaacaaatacctgactgtgaaaatgtcaaaactacccagtgtgtctttcctcaaaacgttttccaaaaaggaatttaccttctccgcgtacaagcatctgatggaaataacacatctttttggtctgaagagataaagtttgatactgaaatacaagctttcctacttcctccagtctttaacattagatcccttagtgattcattccatatctatatcggtgctccaaaacagtctggaaacacgcctgtgatccaggattatccactgatttatgaaattattttttgggaaaacacttcaaatgctgagagaaaaattatcgagaaaaaaactgatgttacagttcctaatttgaaaccactgactgtatattgtgtgaaagccagagcacacaccatggatgaaaagctgaataaaagcagtgtttttagtgacgctgtatgtgagaaaacaaaaccaggaaatacctctaaaatttggcttatagttggaatttgtattgcattatttgctctcccgtttgtcatttatgctgcgaaagtcttcttgagatgcatcaattatgtcttctttccatcacttaaaccttcttccagtatagatgagtatttctctgaacagccattgaagaatcttctgctttcaacttctgaggaacaaatcgaaaaatgtttcataattgaaaatataagcacaattgctacagtagaagaaactaatcaaactgatgaagatcataaaaaatacagttcccaaactagccaagattcaggaaattattctaatgaagatgaaagcgaaagtaaaacaagtgaagaactacagcaggactttgtatgaccagaaatgaactgtgtcaagtataaggtttttcagcaggagttacactgggagcctgaggtcctcaccttcctctcagtaactacagagaggacgtttcctgtttagggaaagaaaaaacatcttcagatcataggtcctaaaaatacgggcaagctcttaactatttaaaaatgaaattacaggcccgggcacggtggctcacacctgtaatcccagcactttgggaggctgaggcaggcagatcatgaggtcaagagatcgagaccagcctggccaacgtggtgaaaccccatctctactaaaaatacaaaaattagccgggtagtaggtaggcgcgcgcctgttgtcttagctactcaggaggctgaggcaggagaatcgcttgaaaacaggaggtggaggttgcagtgagccgagatcacgccactgcactccagcctggtgacagcgtgagactctttaaaaaaagaaattaaaagagttgagacaaacgtttcctacattcttttccatgtgtaaaatcatgaaaaagcctgtcaccggacttgcattggatgagatgagtcagaccaaaacagtggccacccgtcttcctcctgtgagcctaagtgcagccgtgctagctgcgcaccgtggctaaggatgacgtctgtgttcctgtccatcactgatgctgctggctactgcatgtgccacacctgtctgttcgccattcctaacattctgtttcattcttcctcgggagatatttcaaacatttggtcttttcttttaacactgagggtaggcccttaggaaatttatttaggaaagtctgaacacgttatcacttggttttctggaaagtagcttaccctagaaaacagctgcaaatgccagaaagatgatccctaaaaatgttgagggacttctgttcattcatcccgagaacattggcttccacatcacagtatctacccttacatggtttaggattaaagccaggcaatcttttactatg

SEQ ID NO: 95 - DNA, 2705 bp, Homo sapiens
cactgccttcttcctctagctccaccctgaatgaagtcaacacctcctcaaccatctcctgtgacagccccctggagccccaggacgaaccagagccagagccccagcttgagctccaggtggagccggagccagagctggaacagttgccggattcggggtgccctgcgcctcgggcggaagcagaggatagcttcctgtagggggctggcccctaccctgccctgcctgaagctccccccctgccagcacccagcatctcctggcctggcctgaccgggcttcctgtcagccaggctgcccttatcagctgtccccttctggaagctttctgctcctgacgtgttgtgccccaaaccctggggctggcttaggaggcaagaaaactgcaggggccgtgaccagccctctgcctccagggaggccaactgactctgagccagggttcccccagggaactcagttttcccatatgtaagatgggaaagttaggcttgatgacccagaatctaggattctctccctggctgacaggtggggagaccgaatccctccctgggaagattcttggagttactgaggtggtaaattaacttttttctgttcagccagctacccctcaaggaatcatagctctctcctcgcacttttatccacccaggagctagggaagagaccctagcctccctggctgctggctgagctagggcctagccttgagcagtgttgcctcatccagaagaaagccagtctcctccctatgatgccagtccctgcgttccctggcccgagctggtctggggccattaggcagcctaattaatgctggaggctgagccaagtacaggacacccccagcctgcagcccttgcccagggcacttggagcacacgcagccatagcaagtgcctgtgtccctgtccttcaggcccatcagtcctggggctttttctttatcaccctcagtcttaatccatccaccagagtctagaaggccagacgggccccgcatctgtgatgagaatgtaaatgtgccagtgtggagtggccacgtgtgtgtgccagtatatggccctggctctgcattggacctgctatgaggctttggaggaatccctcaccctctctgggcctcagtttccccttcaaaaaatgaataagtcggacttattaactctgagtgccttgccagcactaacattctagagtattccaggtggttgcacatttgtccagatgaagcaaggccatataccctaaacttccatcctgggggtcagctgggctcctgggagattccagatcacacatcacactctggggactcaggaaccatgccccttccccaggcccccagcaagtctcaagaacacagctgcacaggccttgacttagagtgacagccggtgtcctggaaagcccccagcagctgccccagggacatgggaagaccacgggacctctttcactacccacgatgacctccgggggtatcctgggcaaaagggacaaagagggcaaatgagatcacctcctgcagcccaccactccagcacctgtgccgaggtctgcgtcgaagacagaatggacagtgaggacagttatgtcttgtaaaagacaagaagcttcagatggtaccccaagaaggatgtgagaggtgggcgctttggaggtttgcccctcacccaccagctgccccatccctgaggcagcgctccatgggggtatggttttgtcactgcccagacctagcagtgacatctcattgtccccagcccagtgggcattggaggtgccaggggagtcagggttgtagccaagacgcccccgcacggggagggttgggaagggggtgcaggaagctcaacccctctgggcaccaaccctgcattgcaggttggcaccttacttccctgggatccccagagttggtccaaggagggagagtgggttctcaatacggtaccaaagatataatcacctaggtttacaaatatttttaggactcacgttaactcacatttatacagcagaaatgctattttgtatgctgttaagtttttctatctgtgtacttttttttaagggaaagattttaatattaaacctggtgcttctcactcacagactttgtggtctctctcgggtttgggttcctgcccatagggagtgtggagtggggcacatgaggctcacccagacgcagacccccagacaggtcccttcagctctgagtctcattcattcatctgtaaagtggggattttcgctctcccacccctcgctggaagctggggggcctagacttgggcttggtttccaaggtgggaagcgagcaggcttttctgctccacagagcctggccttgagtcgggcaggagggtgtggggctgcagggctgctccaaggctctggtgctgaggcgtctcactgcctccaccatgtgctttggctttggctatcagctgggacaccctcccctccactccgccacaggcccggattgaggccggcgtgctctgtgacaggcagctgctagagcccagattccaggtccaggtgagtcatgatcaggccccaggtaggagaagggcagacagagtgtccaaaagcgtgagagcacgaagtgaggagaaggtggagaagagagaagaggaagaggaagaggaagagaggaagcggagggaactgcggccagggtaagg

SEQ ID NO: 96 - DNA, 4445 bp, Homo sapiens
cgctccccgctcccgtggctgccgccgccccggggaagaagagacaggggtggggtttgggggaagcgagagaggaggggagagaccctggccaggctggagcctggattcgaggggaggagggacgggaggaggagaaaggtggaggagaagggaggggggagcggggaggagcggccgggcctggggccttgaggcccggggagagccggggagccgggcccgcgcgccgagatgttgctgctgctgttactggcgccactcttcctccgccccccgggcgcgggcggggcgcagacccccaacgccacctcagaaggttgccagatcatacacccgccctgggaagggggcatcaggtaccggggcctgactcgggaccaggtgaaggctatcaacttcctgccagtggactatgagattgagtatgtgtgccggggggagcgcgaggtggtggggcccaaggtccgcaagtgcctggccaacggctcctggacagatatggacacacccagccgctgtgtccgaatctgctccaagtcttatttgaccctggaaaatgggaaggttttcctgacgggtggggacctcccagctctggacggagcccgggtggatttccggtgtgaccccgacttccatctggtgggcagctcccggagcatctgtagtcagggccagtggagcacccccaagccccactgccaggtgaatcgaacgccacactcagaacggcgcgcagtgtacatcggggcactgtttcccatgagcgggggctggccagggggccaggcctgccagcccgcggtggagatggcgctggaggacgtgaatagccgcagggacatcctgccggactatgagctcaagctcatccaccacgacagcaagtgtgatccaggccaagccaccaagtacctatatgagctgctctacaacgaccctatcaagatcatccttatgcctggctgcagctctgtctccacgctggtggctgaggctgctaggatgtggaacctcattgtgctttcctatggctccagctcaccagccctgtcaaaccggcagcgtttccccactttcttccgaacgcacccatcagccacactccacaaccctacccgcgtgaaactctttgaaaagtggggctggaagaagattgctaccatccagcagaccactgaggtcttcacttcgactctggacgacctggaggaacgagtgaaggaggctggaattgagattactttccgccagagtttcttctcagatccagctgtgcccgtcaaaaacctgaagcgccaggatgcccgaatcatcgtgggacttttctatgagactgaagcccggaaagttttttgtgaggtgtacaaggagcgtctctttgggaagaagtacgtctggttcctcattgggtggtatgctgacaattggttcaagatctacgacccttctatcaactgcacagtggatgagatgactgaggcggtggagggccacatcacaactgagattgtcatgctgaatcctgccaatacccgcagcatttccaacatgacatcccaggaatttgtggagaaactaaccaagcgactgaaaagacaccctgaggagacaggaggcttccaggaggcaccgctggcctatgatgccatctgggccttggcactggccctgaacaagacatctggaggaggcggccgttctggtgtgcgcctggaggacttcaactacaacaaccagaccattaccgaccaaatctaccgggcaatgaactcttcgtcctttgagggtgtctctggccatgtggtgtttgatgccagcggctctcggatggcatggacgcttatcgagcagcttcagggtggcagctacaagaagattggctactatgacagcaccaaggatgatctttcctggtccaaaacagataaatggattggagggtcccccccagctgaccagaccctggtcatcaagacattccgcttcctgtcacagaaactctttatctccgtctcagttctctccagcctgggcattgtcctagctgttgtctgtctgtcctttaacatctacaactcacatgtccgttatatccagaactcacagcccaacctgaacaacctgactgctgtgggctgctcactggctttagctgctgtcttccccctggggctcgatggttaccacattgggaggaaccagtttcctttcgtctgccaggcccgcctctggctcctgggcctgggctttagtctgggctacggttccatgttcaccaagatttggtgggtccacacggtcttcacaaagaaggaagaaaagaaggagtggaggaagactctggaaccctggaagctgtatgccacagtgggcctgctggtgggcatggatgtcctcactctcgccatctggcagatcgtggaccctctgcaccggaccattgagacatttgccaaggaggaacctaaggaagatattgacgtctctattctgccccagctggagcattgcagctccaggaagatgaatacatggcttggcattttctatggttacaaggggctgctgctgctgctgggaatcttccttgcttatgagaccaagagtgtgtccactgagaagatcaatgatcaccgggctgtgggcatggctatctacaatgtggcagtcctgtgcctcatcactgctcctgtcaccatgattctgtccagccagcaggatgcagcctttgcctttgcctctcttgccatagttttctcctcctatatcactcttgttgtgctctttgtgcccaagatgcgcaggctgatcacccgaggggaatggcagtcggaggcgcaggacaccatgaagacagggtcatcgaccaacaacaacgaggaggagaagtcccggctgttggagaaggagaaccgtgaactggaaaagatcattgctgagaaagaggagcgtgtctctgaactgcgccatcaactccagtctcggcagcagctccgctcccggcgccacccaccgacacccccagaaccctctgggggcctgcccaggggaccccctgagccccccgaccggcttagctgtgatgggagtcgagtgcatttgctttataagtgagggtagggtgagggaggacaggccagtagggggagggaaagggagaggggaagggcaggggactcaggaagcagggggtccccatccccagctgggaagaacatgctatccaatctcatctcttgtaaatacatgtccccctgtgagttctgggctgatttgggtctctcatacctctgggaaacagacctttttctctcttactgcttcatgtaattttgtatcacctcttcacaatttagttcgtacctggcttgaagctgctcactgctcacacgctgcctcctcagcagcctcactgcatctttctcttcccatgcaacaccctcttctagttaccacggcaacccctgcagctcctctgcctttgtgctctgttcctgtccagcaggggtctcccaacaagtgctctttccaccccaaaggggcctctccttttctccactgtcataatctctttccatcttacttgcccttctatactttctcacatgtggctccccctgaattttgcttcctttgggagctcattcttttcgccaaggctcacatgctccttgcctctgctctgtgcactcacgctcagcacacatgcatcctcccctctcctgcgtgtgcccactgaacatgctcatgtgtacacacgcttttcccgtatgctttcttcatgttcagtcacatgtgctctcgggtgccctgcattcacagctacgtgtgcccctctcatggtcatgggtctgcccttgagcgtgtttgggtaggcatgtgcaatttgtctagcatgctgagtcatgtctttcctatttgcacacgtccatgtttatccatgtactttccctgtgtaccctccatgtaccttgtgtactttcttcccttaaatcatggtattcttctgacagagccatatgtaccctaccctgcacattgttatgcacttttccccaattcatgtttggtggggccatccacaccctctccttgtcacagaatctccatttctgctcagattccccccatctccattgcattcatgtactaccctcagtctacactcacaatcatcttctcccaagactgctcccttttgttttgtgtttttttgaggggaattaaggaaaaataagtgggggcaggtttggagagctgcttccagtggatagttgatgagaatcctgaccaaaggaaggcacccttgactgttgggatagacagatggacctatggggtgggaggtggtgtccctttcacactgtggtgtctcttggggaaggatctccccgaatctcaataaaccagtgaacagtgtgactcggcaaaaaaaaaaa

SEQ ID NO: 97 - DNA, 5316 bp, Homo sapiens
atcatggcggatggccccaggtgtaagcgcagaaagcaggcgaacccgcggcgcaataacgttacaaattataatactgtggtagaaacaaattcagattcagatgatgaagacaaactgcatattgtggaagaagaaagtgttacagatgcagctgactgtgaaggtgtaccagaggatgacctgccaacagaccagacagtgttaccagggaggagcagtgaaagagaagggaatgctaagaactgctgggaggatgacagaaaggaagggcaagaaatcctggggcctgaagctcaggcagatgaagcaggatgtacagtaaaagatgatgaatgcgagtcagatgcagaaaatgagcaaaaccatgatcctaatgttgaagagtttctacaacaacaagacactgctgtcatttttcctgaggcacctgaagaggaccagaggcagggcacaccagaagccagtggtcatgatgaaaatggaacaccagatgcattttcacaattactcacctgtccatattgtgatagaggctataaacgctttacctctctgaaagaacacattaaatatcgtcatgaaaagaatgaagataactttagttgctccctgtgcagttacacctttgcatacagaacccaacttgaacgtcacatgacatcacataaatcaggaagagatcaaagacatgtgacgcagtctgggtgtaatcgtaaattcaaatgcactgagtgtggaaaagctttcaaatacaaacatcacctaaaagagcacttaagaattcacagtggagagaagccatatgaatgcccaaactgcaagaaacgcttttcccattctggctcctatagctcacacataagcagtaagaaatgtatcagcttgatacctgtgaatgggcgaccaagaacaggactcaagacatctcagtgttcttcaccgtctctttcagcatcaccaggcagtcccacacgaccacagatacggcaaaagatagagaataaaccccttcaagaacaactttctgttaaccaaattaaaactgaacctgtggattatgaattcaaacccatagtggttgcttcaggaatcaactgttcaacccctttacaaaatggggttttcactggtggtggcccattacaggcaaccagttctcctcagggcatggtgcaagctgttgttctgccaacagttggtttggtgtctcccataagtatcaatttaagtgatattcagaatgtacttaaagtggcggtagatggtaatgtaataaggcaagtgttggagaataatcaagccaatcttgcatccaaagaacaagaaacaatcaatgcttcacccatacaacaaggtggccattctgttatttcagccatcagtcttcctttggttgatcaagatggaacaaccaaaattatcatcaactacagtcttgagcagcctagccaacttcaagttgttcctcaaaatttaaaaaaagaaaatccagtcgctacaaacagttgtaaaagtgaaaagttaccagaagatcttactgttaagtctgagaaggacaaaagctttgaagggggggtgaatgatagcacttgtcttctgtgtgatgattgtccaggagatattaatgcacttccagaattaaagcactatgacctaaagcagcctactcagcctcctccactccctgcagcagaagctgagaagcctgagtcctctgtttcatcagctactggagatggcaatttgtctcctagtcagccacctttaaagaacctcttgtctctcctaaaagcatattatgctttgaatgcacaaccaagtgcagaagagctctcaaaaattgctgattcagtaaacctaccactggatgtagtaaaaaagtggtttgaaaagatgcaagctggacagatttcagtgcagtcttctgaaccatcttctcctgaaccaggcaaagtaaatatccctgccaagaacaatgatcagcctcaatctgcaaatgcaaatgaaccccaggacagcacagtaaatctacaaagtcctttgaagatgactaactccccagttttaccagtgggatcaaccaccaatggttccagaagtagtacaccatccccatcacctctaaacctttcctcatccagaaatacacagggttacttgtacacagctgagggtgcacaagaagagccacaagtagaacctcttgatctttcactaccaaagcaacagggagaattattagaaaggtcaactatcactagtgtttaccagaacagtgtttattctgtccaggaagaacccttgaacttgtcttgcgcaaaaaaggagccacaaaaggacagttgtgttacagactcagaaccagttgtaaatgtaatcccaccaagtgccaaccccataaatatcgctatacctacagtcactgcccagttacccacaatcgtggccattgctgaccagaacagtgttccatgcttaagagcgctagctgccaataagcaaacgattctgattccccaggtggcatacacctactcaactacggtcagccctgcagtccaagaaccacccttgaaagtgatccagccaaatggaaatcaggatgaaagacaagatactagctcagaaggagtatcaaatgtagaggatcagaatgactctgattctacaccgcccaaaaagaaaatgcggaagacagaaaatggaatgtatgcttgtgatttgtgtgacaagatattccaaaagagtagttcattattgagacataaatatgaacacacaggtaaaagacctcatgagtgtggaatctgtaaaaaggcatttaaacacaaacatcatttgattgaacacatgcgattacattctggagaaaagccctatcaatgtgacaaatgtggaaagcgcttctcacactctgggtcttattctcaacacatgaatcatcgctactcctactgtaagagagaagcggaagaacgtgacagcacagagcaggaagaggcagggcctgaaatcctctcgaatgagcacgtgggtgccagggcgtctccctcacagggcgactcggacgagagagagagtttgacaagggaagaggatgaagacagtgaaaaagaggaagaggaggaggataaagagatggaagaattgcaggaagaaaaagaatgtgaaaaaccacaaggggatgaggaagaggaggaggaggaggaagaagtggaagaagaagaggtagaagaggcagagaatgagggagaagaagcaaaaactgaaggtctgatgaaggatgacagggctgaaagtcaagcaagcagcttaggacaaaaagtaggcgagagtagtgagcaagtgtctgaagaaaagacaaatgaagcctaatcgtttttctagaaggaaaataaattctaattgataatgaatttcgttcaatattatccttgcttttcatggaaacacagtaacctgtatgctgtgattcctgttcactactgtgtgtgtgtgcgcgtgcattgattactatccatttctttagtcaacgctctccacttcctgatttctgctttaaggaaaactgtgaactttctgcttcatgtatcagttttaaagcatcccaggcaaagatcatctacagattctaggaattctctcccctgaaatcaaaacctggagacttttttttcttattttagttgagaagttcataaactgctcaaggattagttttccaggactctgcggaggaacggcaggaagaacctcagagagggcagaggtgacttcaaagtgctggggactccgtcctgagggtcacttggccctgagcccctgcgtgcccttgcggaagcccagaagcttcttcctgctgcacctcccgtttccgctgctgctgacgtttatgcatttcatgatggggtccaacaagaacacctgacttgggtgaagttgtgcaatattggaggctgactgtagggctgggcagctgggagacaggctcatggctcatggctcatggctcagggcggtgcctgccctgggccgggacccccctccccaccccccacctaggctttttgggttttgttcaaggaaggtaaagtgagaggtttaggtcagtgtttttaagtttttgttttttttttaaagcaaatcctgtatatgtatctacatgggagataggtagacactacttatttgttacattttgtactatacgtttgtgttccaggtttcagcttccctcgctcctgttgttaagaagcgtccctgtcagcacaggtgtgcattgaggaaggggccccagggccttcgctccctcagcactggggtggaggcggcaggaaggggcggcccttacctggcaggtctgggcgcacctttagcaggtggactccgtggggctccaccagccagaagcctctggaaggcaacgaaggcaatgctgctccctgagtccagtccccgcccccaaacccagcccaggtgccttcagctacttcggcttcttaaaccctgcagtgttaaacagaggcattgagaaaggggaaaggcgggtatttttaaaagccaaagattgacccaagttacttgagggtagggaggcgggcccagtgcaggaggctgcatccctggcctgctggtgcccaccgggggctgtgcctgtgccgggccgcaggaagctggctgcccccattcctgctgctgctgctgctgctgctctgtggctgtttcaaagactgggcgaaaggctgtccggagggcagaccaggtgccttgccgcagagaaaacaccaaagtctcctgttcgctcataaagaagtttttgggatgggagagaatccagaccatcttggggcagccaggcccttgccttcatttttacagaggtagcacaactgattccaacacaaaaccccttcccctttttaaaatgatttctgttctaatgccatagatcaaaggcctcagaaaccattgtgtgtttcctctttgaagcaatgacaagcactttactttcacggtggtttttgttttttcttattgctgtggaacctcttttggaggacgttaaaggcgtgttttacttgtttttttaagagtgtgtgatgtgtgttttgtagatttcttgacagtgctgtaatacagacggcaatgcaatagcctatttaaagaactacgtgatctgattgagatgtacatagtttttttttttaccataactgaattattttatctcttatgttatcatgagaaatgtatgccaaatgattagttgatgtatgttttttaatttaatatttaaataaaatatttggaagg

SEQ ID NO: 98 - DNA, 5121 bp, Homo sapiens
gcgaggaggaaacggtgccggagcgcgcagggcttgctgccgccaccgccgctgcacaggctgccggagcgagcctgccgcgcgccgccctccccgctctccttcctgggcgagctgcggggatggggcggccgcgggagcccgagcgcgcgcaggaaccgccgccgccgccgcccgcgtctccgttgccgcgcgcctgagccgccgtcgccgccgcgcgccctgcccgggggcggcccccccagccccatggaggtctcccggaggaaggcgccgccgcgccccccgcgccccgcagcgccactgcccctgctcgcctatctgctggcactggcggctcccggccggggcgcggacgagcccgtgtggcggtcggagcaagccatcggagccatcgcggcgagccaggaggacggcgtgtttgtggcgagcggcagctgcctggaccagctggactacagcctggagcacagcctctcgcgcctgtaccgggaccaagcgggcaactgcacagagccggtctcgctggcgccccccgcgcggccccggcccgggagcagcttcagcaagctgctgctgccctaccgcgagggggcggccggcctcggggggctgctgctcaccggctggaccttcgaccggggcgcctgcgaggtgcggcccctgggcaacctgagccgcaactccctgcgcaacggcaccgaggtggtgtcgtgccacccgcagggctcgacggccggcgtggtgtaccgcgcgggccggaacaaccgctggtacctggcggtggccgccacctacgtgctgcctgagccggagacggcgagccgctgcaaccccgcggcatccgaccacgacacggccatcgcgctcaaggacacggaggggcgcagcctggccacgcaggagctggggcgcctcaagctgtgcgagggcgcgggcagcctgcacttcgtggacgcctttctctggaacggcagcatctacttcccctactacccctacaactatacgagcggcgctgccaccggctggcccagcatggcgcgcatcgcgcagagcaccgaggtgctgttccagggccaggcatccctcgactgcggccacggccaccccgacggccgccgcctgctcctctcctccagcctagtggaggccctggacgtctgggcgggagtgttcagcgcggccgctggagagggccaggagcggcgctcccccaccaccacggcgctctgcctcttcagaatgagtgagatccaggcgcgcgccaagagggtcagctgggacttcaagacggccgagagccactgcaaagaaggggatcaacctgaaagagtccaaccaatcgcatcatctaccttgatccattccgacctgacatccgtttatggcaccgtggtaatgaacaggactgttttattcttggggactggagatggccagttacttaaggttattcttggtgagaatttgacttcaaattgtccagaggttatctatgaaattaaagaagagacacctgttttctacaaactcgttcctgatcctgtgaagaatatctacatttatctaacagctgggaaagaggtgaggagaattcgtgttgcaaactgcaataaacataaatcctgttcggagtgtttaacagccacagaccctcactgcggttggtgccattcgctacaaaggtgcacttttcaaggagattgtgtacattcagagaacttagaaaactggctggatatttcgtctggagcaaaaaagtgccctaaaattcagataattcgaagcagtaaagaaaagactacagtgactatggtgggaagcttctctccaagacactcaaagtgcatggtgaagaatgtggactctagcagggagctctgccagaataaaagtcagcccaaccggacctgcacctgtagcatcccaaccagagcaacctacaaagatgtttcagttgtcaacgtgatgttctccttcggttcttggaatttatcagacagattcaactttaccaactgctcatcattaaaagaatgcccagcatgcgtagaaactggctgcgcgtggtgtaaaagtgcaagaaggtgtatccaccccttcacagcttgcgacccttctgattatgagagaaaccaggaacagtgtccagtggctgtcgagaagacatcaggaggaggaagacccaaggagaacaaggggaacagaaccaaccaggctttacaggtcttctacattaagtccattgagccacagaaagtatcgacattagggaaaagcaacgtgatagtaacgggagcaaactttacccgggcatcgaacatcacaatgatcctgaaaggaaccagtacctgtgataaggatgtgatacaggttagccatgtgctaaatgacacccacatgaaattctctcttccatcaagccggaaagaaatgaaggatgtgtgtatccagtttgatggtgggaactgctcttctgtgggatccttatcctacattgctctgccacattgttcccttatatttcctgctaccacctggatcagtggtggtcaaaatataaccatgatgggcagaaattttgatgtaattgacaacttaatcatttcacatgaattaaaaggaaacataaatgtctctgaatattgtgtggcgacttactgcgggtttttagcccccagtttaaagagttcaaaagtgcgcacgaatgtcactgtgaagctgagagtacaagacacctacttggattgtggaaccctgcagtatcgggaggaccccagattcacggggtatcgggtggaatccgaggtggacacagaactggaagtgaaaattcaaaaagaaaatgacaacttcaatatttccaaaaaagacattgaaattactctcttccatggggaaaatgggcaattaaattgcagttttgaaaatattactagaaatcaagatcttaccaccatcctttgcaaaattaaaggcatcaagactgcaagcaccattgccaactcttctaagaaagttcgggtcaagctgggaaacctggagctctacgtcgagcaggagtcagttccttccacatggtattttctgattgtgctccctgtcttgctagtgattgtcatttttgcggccgtgggggtgaccaggcacaaatcgaaggagctgagtcgcaaacagagtcaacaactagaattgctggaaagcgagctccggaaagagatacgtgacggctttgctgagctgcagatggataaattggatgtggttgatagttttggaactgttcccttccttgactacaaacattttgctctgagaactttcttccctgagtcaggtggcttcacccacatcttcactgaagatatgcataacagagacgccaacgacaagaatgaaagtctcacagctttggatgccctaatctgtaataaaagctttcttgttactgtcatccacacccttgaaaagcagaagaacttttctgtgaaggacaggtgtctgtttgcctccttcctaaccattgcactgcaaaccaagctggtctacctgaccagcatcctagaggtgctgaccagggacttgatggaacagtgtagtaacatgcagccgaaactcatgctgagacgcacggagtccgtcgtcgaaaaactcctcacaaactggatgtccgtctgcctttctggatttctccgggagactgtcggagagcccttctatttgctggtgacgactctgaaccagaaaattaacaagggtcccgtggatgtaatcacttgcaaagccctgtacacacttaatgaagactggctgttgtggcaggttccggaattcagtactgtggcattaaacgtcgtctttgaaaaaatcccggaaaacgagagtgcagatgtctgtcggaatatttcagtcaatgttctcgactgtgacaccattggccaagccaaagaaaagattttccaagcattcttaagcaaaaatggctctccttatggacttcagcttaatgaaattggtcttgagcttcaaatgggcacacgacagaaagaacttctggacatcgacagttcctccgtgattcttgaagatggaatcaccaagctaaacaccattggccactatgagatatcaaatggatccactataaaagtctttaagaagatagcaaattttacttcagatgtggagtactcggatgaccactgccatttgattttaccagattcggaagcattccaagatgtgcaaggaaagagacatcgagggaagcacaagttcaaagtaaaagaaatgtatctgacaaagctgctgtcgaccaaggtggcaattcattctgtgcttgaaaaactttttagaagcatttggagtttacccaacagcagagctccatttgctataaaatacttttttgactttttggacgcccaggctgaaaacaaaaaaatcacagatcctgacgtcgtacatatttggaaaacaaacagccttcctcttcgcttctgggtaaacatcctgaagaaccctcagtttgtctttgacattaagaagacaccacatatagacggctgtttgtcagtgattgcccaggcattcatggatgcattttctctcacagagcagcaactagggaaggaagcaccaactaataagcttctctatgccaaggatatcccaacctacaaagaagaagtaaaatcttattacaaagcaatcagggatttgcctccattgtcatcctcagaaatggaagaatttttaactcaggaatctaagaaacatgaaaatgaatttaatgaagaagtggccttgacagaaatttacaaatacatcgtaaaatattttgatgagattctaaataaactagaaagagaacgagggctggaagaagctcagaaacaactcttgcatgtaaaagtcttatttgatgaaaagaagaaatgcaagtggatgtaagcactctggggcctggcttaatctggcaaagttcttcagacgacttgggagcaaaatggctgcttgagctactctgtgtcgttaatttgttgtttgcacataggttccactttgggcactgtctttttaagagaccaaggcacatgcacagcttttagaaagcaa

SEQ ID NO: 99 - DNA, 913 bp, Homo sapiens
agagccggcgccgtcaccgcccgcattgccgctcccagtcccgcgctcggcacgacatgaaatcccccgacgaggtgctacgcgagggcgagttggagaagcgcagcgacagcctcttccagctatggaagaagaagcgcggggtgctcacctccgaccgcctgagcctgttccccgccagcccccgcgcgcgccccaaggagctgcgcttccactccatcctcaaggtggactgcgtggagcgcacgggcaagtacgtgtacttcaccatcgtcaccaccgaccacaaggagatcgacttccgctgcgcgggcgagagctgctggaacgcggccatcgcgctggcgctcatcgatttccagaaccgccgcgccctgcaggactttcgcagccgccaggaacgcaccgcacccgccgcacccgccgaggacgccgtggctgccgcggccgccgcaccctccgagccctcggagccctccaggccatccccgcagcccaaaccccgcacgccatgagcccgccgcgggccatacgctggacgagtcggaccgaggctaggacgtggccggcgctctccagccctgcagcagaagaacttcccgtgcgcgcggatcctcgctccgttgcacgggcgccttaagttattggactatctaatatctatgtatttatttcgctggttctttgtagtcacatattttatagtcttaatatcttgtttttgcatcactgtgcccattgcaaataaatcacttggccagtttgcttttctaccatccggctgtggctcagtgagactcctgctgggagggtggaggcccaggaatgggcgggcaggacaccctcatccagtcatgcggggctggtgtgaaaggcgctgggaaccggctttgaatgaataaatgaatcgtgt

SEQ ID NO: 100 - DNA, 1529 bp, Homo sapiens
cgggaagttgacgggcatcagtgaccccgtgactgtcaagacctccggctcgaggttcggatcctggatgacagaccctctcgcccctgaaggcgataaccgggtgtggtacatggacggctatcacaacaaccgcttcgtacgtgagtacaagtccatggttgacttcatgaacacggacaatttcacctcccaccgtctcccccacccctggtcgggcacggggcaggtggtctacaacggttctatctacttcaacaagttccagagccacatcatcatcaggtttgacctgaagacagagaccatcctcaagacccgcagcctggactatgccggttacaacaacatgtaccactacgcctggggtggccactcggacatcgacctcatggtggacgagagcgggctgtgggccgtgtacgccaccaaccagaacgctggcaacatcgtggtcagtaggctggaccccgtgtccctgcagaccctgcagacctggaacacgagctaccccaagcgcagcgccggggaggccttcatcatctgcggcacgctgtacgtcaccaacggctactcagggggtaccaaggtccactatgcataccagaccaatgcctccacctatgaatacatcgacatcccattccagaacaaatactcccacatctccatgctggactacaaccccaaggaccgggccctgtatgcctggaacaacggccaccagatcctctacaacgtgaccctcttccacgtcatccgctccgacgagttgtagctccctcctcctggaagccaagggcccacgtcctcaccacaaaggaactcctgtgaaactgctgccaaaaagataccaataacactaacaataccgatcttgaaaaatcatcagcagtgcggattctgacatcgagggatggcattacctccgtgtttctccctttcgagccggcgggccacagacgtcggaagaaactcccgtatttgcagctggaactgcagcccacggcgccccggttttcctccccgccctgtccctctctggtcaaacaacatactaaagaggcgaggcaatgactgttggccagttctcaccggggaaaaacccactgttaggatggcatgaacatttccttagatcgtggtcagctccgaggaatgtggcatccaggctctttgagagccatgggctgcacccggccgtaggctagtgtaactcgcatcccattgcagtgccgtttcttgactgtgttgctgtctcttagattaaccgtgctgaggctccacatagctcctggacctgtgtctagtacatactgaagcgatggtcagagggtgtagagtgaagttgctgtgcccacattgtttgaactcgcgtaccccgtagatacattgtgcaacgttcttctgttattcccttgaggtggtaacttcgtatgttcagtttatgcgatgattgttgtaaatgcaatgccgtagtttggattaataagtggatggtttttgtttctaaaaaaaaaaaaaaaaaa

SEQ ID NO: 101 - DNA, 1263 bp, Homo sapiens
ggactatgggggaactgatggcgttcctgttacctctcatcattgtgttaatggtgaagcacagcgattcccggacgcactctctgagatattttcgcctgggcgtttcggatcccatccatggggtccctgaatttatttcggttgggtacgtggactcgcaccctatcaccacatatgacagtgtcactcggcagaaggagccacgggccccatggatggcagagaacctcgcgcctgatcactgggagaggtacactcagctgctgaggggctggcagcagatgttcaaggtggaactgaagcgcctacagaggcactacaatcactcagggtctcacacttaccagagaatgattggctgtgagctgctggaggatggaagcaccacaggatttctgcagtatgcatatgacgggcaggatttcctgatcttcaataaagacaccctctcctggctggctgtagataatgtggctcacaccatcaagcaggcatgggaggccaatcagcatgagttgctgtatcaaaagaattggctggaagaagaatgtattgcctggctaaagagattcctggagtatgggaaagacaccctacaaagaacagagcccccactggtcagagtaaatcgcaaagaaacttttccaggggttacagctctcttctgcaaagctcatggcttttaccccccagaaatttacatgacatggatgaaaaacggggaagaaattgtccaagaaattgattatggagacattcttcccagtggggatggaacctatcaggcgtgggcatcaattgagcttgatcctcagagcagcaacctttactcctgtcatgtggagcactgcggtgtccacatggttcttcaggtcccccaggaatcagaaactatccctcttgtgatgaaagctgtctctgggtccattgtccttgtcattgtgctggctggagttggtgttctagtctggagaagaaggccccgagagcaaaatggagccatctaccttccaacaccagatcgatgattgcagatccctcttttccagttctccttcctctaggagccatgttatcctctgtcccccatagagtcaagcctagtgcttgaaggtcctgacgacacccacaacatacatgagagtaatgggattgagcatttatggcagcaacagaggagccacaaaatgttctttgttctttggctccaaaaagactgtcagctttcagtctcttttgatggactgttttatcagagtt

SEQ ID NO: 102 - DNA, 2366 bp, Homo sapiens
ggcacgagcgagggagccggaaagatggtggttaccagatctgcacgggctaaggccagcatccaagccgcgtcggctgaaagttccgggcaaaagagttttgctgctaatgggattcaagcgcatccagaaagtagtactggatctgatgcccgaactactgatgaatcacagaccactgggaagcaaagtttaatccctagaactcctaaagctagaaagagtaagagcagaactacaggctcactaccaaaggggactgaaccatctacggatggagagacctctgaggcagagtcaaattattctgtgtctgagcaccatgataccattttaagggtaactaggagaaggcagatcttaattgcatgctccccagtgtccagtgttaggaaaaagccgaaagtaactccaacaaaggagtcttacactgaagaaatagtgtctgaagcagaatctcatgtttcaggtatttctagaattgtgcttcctacagaaaaaactacaggagccagaagaagtaaggctaaatctctgacagatccaagccaagaatctcatacagaagctatatctgatgctgagacatcaagctcagacatttcattctctggaattgcaactagaagaaccaggagtatgcagaggaaattaaaggcacaaactgaaaagaaagatagtaagattgtaccaggaaatgagaaacagatcgtgggtacacctgtgaattcagaggattcagataccagacaaacttcccatttacaagcaagatctctttctgagataaataagccaaatttctataataatgactttgatgatgatttctcccacagaagttcagaaaatatattaacagtgcacgaacaggccaatgttgaatctcttaaagaaacaaaacagaattgtaaggatttggatgaagatgccaatggaataacagatgaggggaaagaaattaatgagaaaagttctcagctgaagaatctttctgaacttcaggacactagccttcaacagttagtttctcagagacattcaaccccccaaaataaaaatgctgtatcagtgcactctaatctgaactctgaggctgtaatgaaatcattaactcaaacatttgcaactgtggaagtaggcagatggaataacaacaaaaagagccccataaaagcaagtgacttgacaaagtttggtgattgtggtggtagtgatgatgaagaagagtccacagttataagtgtcagtgaagacatgaacagtgaagggaatgtagattttgaatgtgataccaaactatacacgtctgcgcccaacacatctcagggtaaagataattctgtcttactagttctcagcagtgatgaaagccaacagtctgaaaacagtgagaatgaagaggatactttatgttttgttgaaaatagtggccaaagggagtcattaagtggagacacaggaagtctgtcatgtgacaatgcattgtttgtaattgacacaactcctggaatgagtgctgataaaaatttttacttggaagaggaagacaaggcaagtgaggttgccattgaggaagaaaaagaagaggaagaggatgaaaaaagtgaagaagattcatcagaccatgacgaaaatgaagatgagtttagtgatgaagaagacttcctaaatagcacaaaggctaaacttctgaagttgacaagcagcagcatagaccctggtctgagtatcaagcagttgggtggtttgtatattaattttaatgcagataaactacagtctaacaagagaaccctaacacagatcaaggagaaaaagaaaaatgagcttctgcagaaagccgtcattacacctgattttgaaaaaaaccactgtgttccaccatatagtgaatcaaagtatcaacttcagaaaaaacgcagaaaagaacgacaaaaaacagcaggggatggctggtttggtatgaaagctccagaaatgacaaatgaactgaaaaatgatctcaaagcactgaagatgagagccagcatggacccgaaaagattttacaagaaaaatgatagagatggcttccccaagtacttccagattggaaccattgttgacaatccagctgatttctaccattcacgaattcccaagaagcaaaggaaaagaactattgtggaagactgctggctgattctgaattcagagatacaaccgaaggaagtactcagagatcatggctgaaaaagcagcaaatgcagcaggaaaaaagttccgaaagaagaagaaatttcgcaattaagatttaccaagcaaactgcaacattttacattgctcctttatttacttattaaagacgtttggaaaactaaaa

SEQ ID NO: 103 - DNA, 1453 bp, Homo sapiens
gagcagcagaagccggcgtcgtcggatgttgtgttgcccgccaccatgagctacacaggctttgtccagggatctgaaaccactttgcagtcgacatactcggataccagcgctcagcccacctgtgattatggatatggaacttggaactctgggacaaatagaggctacgagggctatggctatggctatggctatggccaggataacaccaccaactatgggtatggtatggccacttcacactcttgggaaatgcctagctctgacacaaatgcaaacactagtgcctcgggtagcgccagtgccgattccgttttatccagaattaaccagcgcttagatatggtgccgcatttggagacagacatgatgcaaggaggcgtgtacggctcaggtggagaaaggtatgactcttatgagtcctgcgactcgagggccgtcctgagtgagcgcgacctgtaccggtcaggctatgactacagcgagcttgaccctgagatggaaatggcctatgagggccaatacgatgcctaccgcgaccagttccgcatgcgtggcaacgacaccttcggtcccagggcacagggctgggcccgggatgcccggagcggccggccaatggcctcaggctatgggcgcatgtgggaagaccccatgggggcccggggccagtgcatgtctggtgcctctcggctgccctccctcttctcccagaacatcatccccgagtacggcatgttccagggcatgcgaggtgggggcgccttcccgggcggctcccgctttggtttcgggtttggcaatggcatgaagcagatgaggcggacctggaagacctggaccacagccgacttccgaaccaagaagaagaagagaaagcagggcggcagtcctgatgagccagatagcaaagccacccgcacggactgctcggacaacagcgactcagacaatgatgagggcaccgagggggaagccacagagggccttgaaggcaccgaggctgtggagaagggctccagagtggacggagaggatgaggagggaaaagaggatgggagagaagaaggcaaagaggatccagagaagggtgagttttcctggggtgcctggtgctagggcggctcttccaggggctcacagtgggagggacccagctgagggcagggttgcggcagacatgcggccagttggggacctcccttgtgggcccgagtgtgtgctggcagggggctttcttttcgccgcctccacccccttcccactcttcctcctccttcccaggcggaggctgtggatggtggtgacccctgcctagcacactggttttgccttcagatgggggcagctagtaaaagtgtggggaaccccaggcacgccccctgccctcggtccctcagtaacgcgcagttccaagtcctcagtggctggtgtccgatctgggaccctc

SEQ ID NO: 104 - DNA, 1535 bp, Homo sapiens
cggggatggtcctggcatcactcagcaccctctctgaggcagcgtggattaatttatgatgggttatgccaggaccatcctggaagagaacatccaggaccaagatgtcctattattgataaaaaagcgtgctccatcaccacttcccaagatggctgatgtctcagcagaagaaaagaaaaaacaagaccagaaagctccagataaagaggccatactgcgggccaccgccaacctgccctcctacaacatggaccgggccgcggtccagaccaacatgagagacttccagacagaactccggaagatactggtgtctctcatcgaggtggcgcagaagctgttagcgctgaacccagatgcggtggaattgtttaagaaggcgaatgcaatgctggacgaggacgaggatgagcgtgtggacgaggctgccctgcggcagctcacggagatgggctttccggagaacagagccaccaaggcccttcagctgaaccacatgtcggtgcctcaggccatggagtggctaattgaacacgcagaagacccgaccatagacacgcctcttcctggccgagctcccccagaggccgagggggccacagcagctgcctccgaggctgccgcgggagccagcgccaccgatgaggaggccagagatgagctgacggaaatcttcaagaagatccggaggaaaagggagtttcgggctgatgctcgggccgtcatttccctgatggagatggggttcgacgagaaggaggtgatagatgccctcagagtgaacaacaaccagcagaatgccgcgtgcgagtggctgctgggggaccggaagccctctccggaggagctggacaagggcatcgaccccgacagtcctctctttcaggccatcctggataacccggtggtgcagctgggcctgaccaacccgaaaacattgctagcatttgaagacatgctggagaacccactgaacagcacccagtggatgaatgatccagaaacggggcctgtcatgctgcagatctctagaatcttccagacactaaatcgcacgtaggtggcgttgttccactcggctatcaggccacagcagccccctggtgcggcccgagaccgggcagagtggacctcacctggaaactcaccttcagcgcctcagccctggactgttagaggtgctgcagcggctcctgctctctgatcttattgcttataaactttggtgacggtagtgtgtaaggccgtatttttagcatctgacaggtgtttacaaaaaagtggttgtcgcactgggaagtggagtgatggcctcgtctccagtgctcctctgggctcttgagttgctgcttgaattgccgtgtagacatttgcttggagagtccacttgttatttgacggaggtaggtttcaacccagagttaatgtcaagcatgctaatttaactagtcactcacagatgacttttctttaataaagtcccttttcctaaaaaaaaaaaaaaaaaaaaaaaaaaaaaaaaaaaaaaaaaa

SEQ ID NO: 105 - DNA, 5507 bp, Homo sapiens
ggccaggttatcaggggcttcactgtgaaacctgcaaagagggcttttacctaaattacacttctgggctctgtcagccatgtgactgtagtccacatggagctctcagcataccgtgcaacagttctgggaaatgccagtgcaaagtgggtgtcattggctctatatgtgaccgatgccaagatggatattatggctttagtaagaatggctgcttgccctgccaatgcaataatcggtctgccagttgcgatgccctcacaggtgcttgtttaaactgccaggaaaatagcaaaggaaatcactgtgaagaatgtaaagaaggattttatcagagtcctgatgccactaaagaatgtcttcgctgcccttgttcagcagtgacatctacaggcagctgctctataaaatcgagtgaattggaacctgaatgtgaccagtgtaaagatggttacataggcccgaactgcaataaatgtgaaaatggctattacaattttgacagcatctgtagaaagtgccaatgtcacggccatgtggacccagttaaaactccaaagatttgtaagcccgagagtggtgagtgcatcaactgcctccataacaccactgggttttggtgtgagaactgcctagaaggttatgttcacgacctcgagggaaattgcatcaagaaagaagttattcttccaacacctgaaggttctaccattttggtttccaatgcctctttgaccacatcagtgcccacccctgttataaatagtacttttacccctacaaccctgcagactatcttttcagtaagcacttctgaaaacagcacttcagctttagctgatgtatcatggacccaatttaacatcatcattttgacagtcatcatcattgttgtggtgctgctaatgggatttgtgggggctgtatatatgtaccgcgagtaccaaaaccggaaactcaatgcccccttttggaccatcgagctgaaagaagacaatatcagtttcagcagctaccatgacagcattcccaatgcagatgtttcgggattgttggaagatgatggcaatgaagtggctcccaatgggcagctgaccctgacgacgcccatacataactacaaagcctaaggagctagaactgttctgaattgttaaaccacagtgcttgctaagacagagtcagcccctgggccagacaaagcctggctagagtttgctgagaaagcaaaggcaaatagtgcatctgaaattttcaggtacaaatttgtaatgcgcttagcctatctattgctcttagttttcccatgaagatctgaagcgttcactgtcattaggacttgaagtaaagtatatttttgtaccaaaccacatgggagtatggaaaggctgaaccccatagtgcagcccaaaaccactttgacctccagatagactcctggggaagcattcaccaagccagtggtaacaagatgatgaatgtggagggggaaaagactgctggaagacttcatctccattcctgaaacattttttttaaaacagtgtcagggattatattcgttttactatacaaaaggacatcattgaggaaaagcttgtttctaggctgtatcacagtaaataatcttgattgtttctagaacaggggtagaaaagtcccaagatcttcagaagggcttggttttttcctcccaggattcttgctcagtgatgagttgaaagcacaggataagcttctaagggaggaaggcagcattggggagcaggaggctgatggtcctcctcagggtctcagtgtaaatgataaattgtctaaaaataaggaatattcctgcctctagagaaataaggtgtacatagttaatgtagcatatctggtcgacgttgtatttgtatctatttgtaaaaaaaaaatcatgtcatattttatcatctggaatttatttgtacagcagttaatggtgttgtaaaaagaaaaatatggggattgcttaaaatactgtaaaatagatggcaatattgctagagctgggactctggtgagcatccgtcatttttagtccttcttgaggacattgctgaaatttataagaggtcgaatgtttctttctttcctttctcagtctaaaagtagagttatatgctctttgacttactatgattcaagcaatagattttgaagtcagtaatcgttaagctgggacataggatgcattctccaaaaacattaatctaattagacattagccaccctatatattttacatagattaatataaaacatatcctcattaaaaaatgtttttcttgaatgtaaaagatagtcttccaaaggatagaaatattttagttccaagagaaaagccatcatattacttgggatctgtagttttcatgcctatgaaatatttataatcctccctcaccccaaataaaaaatctcctacatgtgaacatagcctgtcactcatttgccatgaggtatgtgccatctccctgcagtgctatagttctcccattgtcttcctgtctggttaatgagcagctttgtagatgggtgtgtctagttagttcttgctttttgatggagttttttcctagaggccaactactgttgctctcgtttattatgatattgacattttgggttaagcaaggtgggtgggaaaggtggtcagatgttaaatataacttattaggaggaacagtgaactgtgaagtggttagaaaaaaaataaaaacttcttattagattagacctaggaaattcaagctgacccctttgcctaacttccctagagaaaaacctagaacttggtcatccctttataggagacccctaagttgttctcagggtttggagatgatgttctggagggagtacaagcaaataatctacttctggtaatctgagggtgctttgcgtatttggccattgctcagaagaatagaggttacattatattacattatatgaaaattatttagtttttctatagccctttgtagtttgcaaagcacttttccatatgtgtgtcctctcttccacaccatagccccctgaggaagtaattgttgtccccattttatagatgaaaaggctgaggcacagaggagctaaatatcttgttcaaggctatacaatgtgtgtgattattaggcttggaatcagggcctctaactctaaagcacatgttttttcaactatatgcagaaattgcctagccatggacacaagaaagctgggaggaagagttctacttgtggatgtttttaattttttttaaatatcaggagcaatccagggccatacagctatgaagcacttagtgaaaagaacacaagaagatttactaactgaagttagtattagtgattagaaaacaaaactgccagtttgtgcttcattaaggtgaactcatctctccaagcaggaagggaaaatttgctttccctagcagttgctgcatatgtgtgtacagactgcacaattctaagaaattgtgcaaaatggcatacctgtctttctcccagatacaccgccccctgccccccccaaaaaaggtcaggattaaaggtggtgagaagtgaacatttattaaacagaagttaaaccaatagagagaaaggaggtttgttggagtctaagaggattttgaccatgtagaaattccttgaaacagaccttaaaaggtattgaaaaattgaatcacaaagaaagtttacctttaaatacttgttaatggctcctagatcatggttataatttttctcaatgggaaaaaaagtcttaaaatttgttttaaataagatcctctaatgtctcgagctttttgattctggaaataatttgctttaaaatataaatcaatcagaaagtgatctaccactgaaatcattctaggaaactagcatgggatgcactgcacaatgttctttcctctaaaggcatgggccccataaactgtggcatctggcagcaggatgccatcagtcctttagaaagcctaattttgggccgggtgcggtggctcacgcctgtaatcccagcactttgggaggccgaggcgggtggatcacaaggtcaggagttcgagaccagcctggtcaacatggcgaaatcccgtctctactaaaaacacaaaaattagccgggtgtacgtgcctgtggtctcagctgcttgggaggctgaggcaggagaatcgcttgaacctgggaggcggaggttacagtgggccgagatggcgccatttcactccagcctgggcgacagagcaagactctgtctcaaaaaaaaggaagaaaaagaaagcctaatattgggagaatgtttgtgtaaggattggaaatctgtttatttttaaataagatagcactgatgtgaatcttgtttggaaattacagatactgccattaagcgatgcttttatcttcattaattcattttggtaagcgcctatgcatttctgatggttaggtgccctaggtagtgttaagtatgtccgtgtcctcccttactcccctctcgctccctctaccctctatcccctagggttcttttattaatggaatttctccagttatagagaaaaaaatgacatttgaaaactaaagctcatttatattaatactaaggtcctgtgggcctagtgcgttactcttcccagtgatacctagattttaagagtagagaacagaggaaacatgggatgagaggagagaggttttttagacaacatttgtagacacctcaaattatatcactgttctctagcgccaatattcccaggtaaattgaccattaaagcaatactcactgacctactagtttattttggtcagctgagtaccatcaggatatttaaccctttaagtgctgttttgggagtagaaaactaaagcaacaatacttcctcttgacagctttgattggaatggggttattagatcattcaccttggtcctacactttttaggatgcttggtgaacataacaccacttataatgaacatccctggttcctatattttgggctatgtgggtaggaattgttacttgttgctgcagcagcagccctagaaagtaagcccagggcttcagatctaagttagtccaaaagctaaatgatttaaagtcaagttgtaatgctaggcataagcactctataatacattaaattataggccgagcaattagggaatgtttctgaaacattaaacttgtatttatgtcactaaaattctaacacaaacttaaaaaatgtgtctcatacatatgctgtactaggcttcatcatgcatttctaaatttgtgtatgatttgaatatatgaaagaatttatacaagagtgttatttaaaattattaaaaataaatgtatataatttgtacctattgtagatttgttgtttacttttttgtgtggtcagagttgtttcatgtcttcaaatacatgccaaggatcatttactttcagcccacttcataaaaatctttgaactctt

SEQ ID NO: 106 - DNA, 1143 bp, Homo sapiens
  misc_feature (379)..(379): n is a, c, g, or t
  misc_feature (382)..(382): n is a, c, g, or t
  misc_feature (437)..(437): n is a, c, g, or t
  misc_feature (471)..(471): n is a, c, g, or t
  misc_feature (517)..(518): n is a, c, g, or t
  misc_feature (963)..(963): n is a, c, g, or t
gacaagctgagctgctgtgacagaggggaacaagatggcggcgcgaagggagcctctgggtgaggacccaactggggctcccgccgctgctgctgctgaccatggccttggcggaggttcggggaccgcttcggctgaagcatttgactcggtcttgggtgatacggcgtcttgccaccgggcctgtcagttgacctaccccttgcacacctaccctaaggaagaggagttgtacgcatgtcagagaggttgcaggctgttttcaatttgtcagtttgtggatgatggaattgacttaaatcgaactaaattggaatgtgaatctgcatgtacagaagcatattcccaatctgatgagcaatatgcttgccatcttggntgncagaatcagctgccattcgctgaactgagacaagaacaacttatgtccctgatgncaaaaatgcacctactctttcctctaactctggngaggtcattctggagtgacatgatggactccgcacagagcttcatnncctcttcatggactttttatcttcaagccgatgacggaaaaatagttatcttccagtctaagccagaaatccagtacgcaccacatttggagcaggagcctacaaatttgagagaatcatctctaagcaaaatgtcctatctgcaaatgagaaattcacaagcgcacaggaattttcttgaagatggagaaagtgatggctttttaagatgcctctctcttaactctgggtggattttaactacaactcttgtcctctcggtgatggtattgctttggatttggtgtgcaactgttgctacagctgtggagcagtatgttccctctgagaagctgagtatctatggtgacttggagtttatgaatgaacaaaagctaaacagatatccagcttcttctcttgtggttgttagatctaaaactgaaggatcatgaagaagcagggnctctacctacaaaagtgaatcttgctcattctgaaatttaagcatttttcttttaaaagacaagtgtaatagacatctaaaattccactcctcataggagcttttaaaatggtttcattggatataggccttaaggaaatcactataaaatgcaaataaagttactcaaatctggggaag

SEQ ID NO: 107 - DNA, 227968 bp, Homo sapiens
gatcctccagcctaagcctgcccaatagctggaactacaggtgtgcgcccccatatccagctcattttaaattttttgcagagatgtggcgtcttgctatgttgcccaggctggtcttgaactcctgggctcaagtgatcctcccgtcttagcctcctgagtagctgagattacaggcgtgaaccactgcgtcctgctgactctgattttacaaccagcccacccctgccacaaacatcccagggaacagggatccctgacttctactccaggtggcctacctggtccagctgcctccccacacccaccaggccctggcccagctcttaccacaagctccagaccagcttggagctgcactttatagccgtagacggtggtaatcacttcctgcaagaagatggagctcctgggcggatccatcttgttgcgtccttccacgaggaggggctccaccccctcaggcagtacgtccacagtcttgatcagaacataggtcatgcggccttgcaagcggtagctgaagccgtcaaatgtgaggtaacgggggtcgccatagactgagcattgttcagactctgccaagaagtcagacagtgagaaggggccgggcgcagtggctcacgcctgtaatcccaggactttgggaggccaaggcgggtggatgacctgaggtcaggagtttgagaccagcctggccaacatggtgaaatcctgtctctactaaaaatacaaaaattagccaggtgtggtggtgcgtgcctgtaatcccagctacttggtaggctgaggcaagagaattgcttgaacccgggaggcagaggttgtagtgagcgccgagatcgcgccactgcactccagcctgggagacagagtaagacaccatctcaaaaaaacaaaagactgagaagggaccctgcccaggtgtgacagtccccagagtccctcccccacggtggcatcccctgtggccaccctcttaggctcaggctccctggatcctttcttttctttttttaattttctttttctttttttgagacagggtcttattctgtcacccagactggagtacaagtggtacgatcatagctcactgcagcctccacctcctggtctcgagtgatcctcctgagtagctgggactttaggtgcgcaccaccacccctagctaatttttttcttttttttttagaaatggccacactacattgcccaggctggtcttgaactcctggcctcaagaaatcctcccaccttggcctcccaaagtccaaagtgctgagattacaggcataagccaccaagcccggtacctagacttttttttttcaatacctactgacattcaattagaggccctttattattatttttatttttttatttttttgagacaagatctcactctgtgtcccaggctggagtgcagtggtacaatcatagctcactgcagcctcaaactcctgagctcaagcaattctcctgcgtcagtctcctgagtagctgggactacaggcacaagccactacacctaactaattttttaaaattttaaaattttttgtagggacagggtcttcctatgttggccaggttggtgttaaattcctgggctgaagtgattcttccacctctgcctcccaagtactgggattacaggcatgaaccaccatgcccagcctccctggatccttgatcttcaattttctctatctcctggcctgattaaaaaccttagagggggcgggcacagtggctcatgcctgtaatcccaacactttaggaggctgaggcaggaggaacacatgagcccatgagttcaagcccatcttgggcaacatagcaagaccccatctctagaaaaaaaatagcaaaattggctgggtgtggtggtccatgcctgtagtcccagctacttgggaggctgagatgtgaggatcacatgattgcaggcatttgaggttgcagctagctatatgatggtgccagtgcactccagcctgggcaacagagcaagaccctatctcaaaaaacaaacaaacaagaaaagaaaaactttggaggatctccttgaccagtcccctctttttgccctgcaggtggagggtcccagaggggatcaggacctggcacatggccacagagttagcaagagctaaactggaggccaggcctcctgatccagtcgcccgccccaacccctgactgtgctggggttcaggctaagccccttcccaccctgcctcttcctccacctccgccctggccacaggtgctcccctctccaacctccccggtcgctccccttactgtctgagacacaattgctgttgctgttgtcggaagtgagctggcagtgggacccagaggggcatcggaagtccccgcactgaatggctcctcccgtgcagacacacttctccgtgcaaccgctggagacccagctcttgcccagctgtagaagttacaggaagagaaagagagtgaggagggggctgggcgcggcggctcacgcctgtaatcccaacactttgggaggccgagacgggtggatcacctgaggtcaggagtttgtgacgagcccagccaacatggtgaaaccctgtctctactaaaaatacaaaaattagccaggtgtggtagcacacacttgtaatcccagctactcaagaggctgaggcaggagaattgcttgaacccaggaggcagaggttgcagtgagccaagatcgcaccactgcattccagcctgggcaacagagcgagactctgtctcaagaaaaaaaaaaaaaagagtgaagaggggagggccagttctccttcctcttgccccagcagcctggcccaccatctaaatggcttaattgatgctggccagaggcagccacagtgtcatttggtcatccaaaagacaactgtgcaggccaagtgtggtggctcacacctgtaatcttagtactttgggaggccaaggcgggcagatcacttgaggtcaggagttcgagaccagcctggccaacatggtgaaacccaatctctactaaaaattcaaaaattagcaggctgtggtggcgcttgcctgtaatcccagctacacaggagactgaggcaggagaatggcttgaacccaggaggcagagattgcagtgcgcagagattatgccactgcactctagcctgctggataatagagggagactccgtctcaaaaaaaaaaaaaaaaaaaaaggcactgtgtttgtgcttggtgacttacatatgttgtgcaggaggtactactgaacccattttacagatgaggaaacggatataacagaggtcatctgactcatcagtggcaccatcaggattcaatcctaggttaggctgaaatgagcccatggtctttccactataccatgccatgtgctgcttgtttggattcctcagatccaaaacccaaaccatgtgccatcagcccagacctggctggagatcaatgtgccactcacaccagccttcacacccccgggccagctgtaagtcatgggtatcccaggctgagagaggcagagaaaaggagaaagcactgccctcaagctgtgttgcctccagtcccatttcccatgcccactcacagggatggagccaccatgggcatccttgcagccacactgacttctggggacacacttgtcttcactcagcacatagccgggctgacaaatgcagccctcagcgcaggcagaggggactttggcgccctcacaccggccatccaggtcccagcaggagggtgagcaggagggaaggcagttggtgtagctgctgtaggcagggcattccagagctgtgggtgaaggagacagtgggtcagtggagagggtcacagggggccaaggtgggcaggggctgtacaaaccaagctatgggtggatgaccaacaaggcttggggagctttttttgttcttttgttattcattcagcaaacatttactgagtatgggttatgtgccaggctttgggggaaagcaaggaaaaagcggctgggcatggtggctcacgcctgtaatcccagcactttgggaggctgaggtgggtggatcacaaggtcaggagatcgagaccatcctggccatcatggtgaaaccccatctctactaaaaatacaacaattagccaagcgtggtggtgggcgcctgtagtcccagctactcaggaggctgaggcaggagaatcacttgaacctgggaggcagaggttgcattgagccaagatcacaccactgcactccagcctgggcaacagagtgagactgtctcaaaaaaaaaaaaaaaaaaggaacaagaatggctctcccaagccagcatgaaggacggtggtcaaacagcaacggcagcaggaccttgatgtgtatgatcagtaggtgtgttgacagcaagagcatacaaggcatgatggaggcacagagcagggaggtattaattctgttgggggagttaaagaaaggcccttaagcaaaaatagtgtgaacaaatggaaatgcataccatgttcatggataagaaggttcagcaacatggtgatgttagttctgcctcagtgaatgtacacatttaatgtgatctcaataaaatatacatatatatatatgtatatatatgtgtatatatatatgtatatatatgtgtatatatatgtgtatatatatatgtatatatatgtgtatatatatgtgtatatatatatgtatatatatacgtatatatatatgtatatatatgtatatatatgtatatatatgtgtgtatatatatgtatatatatgtgtgtgtgtgtatatatatatatatatatatatatatatatatatatattttttttttttttttttttttttttttttttttttttgcgggggacgggcagggatggagtctctctctgacacccaggaatgatcttggctcactgcagcctctgcctccctggttccagagattctcctacttcagcctcccaggtagctgggattacaggcatgtgccaccatgcctggctaatttttgtatttttagtagagatggggtttcaccatgttggccaggctggtctcaaactcctgacctcaggtgatcctcccaccttggcctcccaaagtgctaggattacaggcatgagccaccacacccagccaccaaaagtattttatatatgtgtgtgcttttaataggacaagatgatttcaaagttgagctgaagacataagcaaaccagaaaagccaggaactccctaaaaaaaagagccatcagtagtgaatggccctccataagtcgtttattttgttttattttatttattcatttatttatttttttgagatagagtttcgctctttccgccctggctggagtgcaatggcacaatctcagctcactgcaacctccacctcccaggttcaagcaattctcctttctcagcctcctgagtagctgggattacaggcatatactagcacgcccagctattttttgtatttttagtagagatggggttttgccatgttggccaggctggtctcaaactcctgacctcaggtgatccgcccacctcggcctcccaaagtgctgggattacaggcgtaagccacagcgcccagcccaaagctcattttaaattttcagtgattacgactttgtgttactgctacatgcaaatacagatggaccgacagaacagaggagaaagctcagatatggatccaaatatatctgggaatttagtatatgataaattgtggtatctcagtccctgcgcaaagacagactagtcatttaataatattggaacagctggctagccttctggagaaaaacaaaaacaaagttgattcatacctcattttacacatcaggataaatcttcatgggtcaaaaacttaaatacacacacacacaaaaaaaaaaacccacttaaatataaaaaaatgaaaccataaaagttctagagcaggccggacacggtggctcacgcctgtaaccccagcacttggggaggacgaggcgggcagatcacttgaggccaggagtttgagaccagcctggccaacatggtgaaaccccatctctactaaaaatacaaaaaaattatccaggcatggtggtgggtgcctgtaatcccagctactcggaaggctgaggcaggagaatcgcttgaacccaggaggcagaggttgcagtgatccgggatcgtgccactgcagcctgggccacagagtgagactctgtctcaaacaaacaaaatttctagagcaaagaatcagcaaactcttttgtagcttctgtggggctagcatttatagctattgctcaagatgcagaagacataaaacaagattaatatatttgaccccataaaaatttttgtcctgcatggcaaaaaaaaaaaaagtcaaaagatgaaaacaaaaaggactggaaaactttgtgtaactcagagcactaataaaggtctactttccataacagataaaggacttccatgaaatagttcagtaaagaccaacgactcaatggaaaaatggtgactggataagagcagatagtttacagaaagggaaattcaaagggttcctaagtacatgaaaaaatgtccaatctcactcataataaaaactcaaattaagtcttgttatttttcatgaccaggtgcagtggctcatgcctgtaatcctagcactttgggaggcttgaggcaggtggatcacctgaggtgaggagttcaagaccagcctggccaatatggtgaaaccccgtctctactaaaaatacaaaaattagctgggtgtggtggcacatgccagtaatcccagctactcggaggctgaggcaggagattcactggaacctgggaggcagaggtcacagtgagccgagatcatagactccagcctgagctacaaagtgagactcaaaaaaaaaaaaaaaaaaagtatagcaatgtcaaataaaaactcaggcttatagcttctttcaaaaaaaaaaatcagaggatctggtcacactggacccacagtgatgcccagcagctgtggggcagctgagcagcggcccccttctgcacgggacctgtgtgctgctttcaccctgacccttcagccagctcaggctgctgtgctcatgttgcctccactggccctgagaagctctgcagcaccccctgcacctctgctttgctcctggaacgcgagagtgttttaaagaaaaataaactttcttggccggttgagatgtctcacgtctgtaatcccagcactttgggaggccaaggcaggcagatcacaaggtcaagagatcgagaccaacctggccaacatggtgaaaccctgtctctactaaaaatacaaaaattacctgggtgtggtggtgcgtgcctgcagtcccagctacttgggaggctgaggcaggagaatctcttgaacccagaaggtggaagttgcagtgagccaaggtcacaccactgcactccagcctggtgacagagcgagattctgtctcaaaaaatatatataaaataaaaaaataaataaaataaaccttcttatgaaacactggcaaaaaaataataagacgttgtttttcaattctcagattggcaaaactccaaaagcacagagcatatagttttcttgtcttttgtttttttaatttttttgtagcgatgcgggggtctcattatattgcccaggttggtctcaaactcctggcctcaagcaatcctcccttcttggactcccaaagtgcttggattacgggtgtcagtcactgcacccagccacgaatataaatttgaatttgtttatatatgcataaataagtggtcttgggaaaaatactgagacatgaaccaggcccatggggtgagggtgggagggagacggtacactggtatctttttttgttttttggggagaatttttttttttctgagagtctcactctgtcacccagacttgagtgcagggatgcaatcacagttcactgccgggctcaagtgatcctcccacctcacccccacaagtagctgggaccacaggcatgcaccaccatacccagctagtttggtaattttttgtagagattgggtctcactatgttgcccaggctggtctcgaactcctggtttcaagcaatccacccacctcagcctcccaaattgctgagattataggcatgagccatcacacccaacctactgggtatcttttaatactttaaaagtattttaaattttttaatactttatacgtttttgaatcctgcaaatgtgttacctattaaaaaaaactctattgaattcctgttttaaattgtaaaagtttctggcgttatatagtagtgatggttgcacaactttatcaagatactaaaagacacttttttttttttttgagatggagtgttgctctttttgcccaggctggagtgcaacggcgcgatctcggctcactacaacctccgcctcccaggttcaagcaattctcctgcctcagcctcccgagtagctgggattacaggcatgtgccaccacacccggctaattttgtatttttagtaggatggggtttcaccatgttggccaggctggtctcgaactcctgacctcaggtgatccacccaccttggcctccccaagtgctgggattataggcgtgagccaccacacccagcaaaaaaaattttatataaaaattaaaaaatagtccttgtcaaagaaacaatgagggctgagttagtcaggaacgaacaggaaggagagtgagggagctctcagggaagcagagagggaaagggggtttgggaggggtttggggtgacagcagggcacactcatggcagaagctgctgtttctccagagtgggggcttgagcccctggctctggcaggtggccccgaaggcttgcagagcctggcagagggcctggtagagacctccgaactcacagagggtgtttgcacagtccaccaggaagggcgtgaggtctatgcgggaggcgcactgggcccacacaggagcccggagcgctgcctcgcacttttcccgcgccctgcggaggtcggccgccctgcagtttccactcgggttctcctgctgttccgctggaatctgctgctcatctaccgggagactctgacaactgggaagggaaaagaatcagcctagggacagccgtccccctactatgacacaaaatttttttttctttagggggagtcttgctctgtcgcccaggctggagtgcaatgcaacagtctcagctcactgcaacctctgccttccctcccatgttcaagcgattctcctgtctcactcagccttccgagttgctgagactacaggcacccaccaccacgcccgaccaattttttttttttttttggagacagagtctcactctgtcacccaggctggagtgcagtagtgcaatcttggctcactgagacctccgcctcccgggttcaagcgattctcctgcctcagcctcccgagtagccgggattacagccacccggcaccatgcctagctaatttttggttttggtttatctggagacaaggtcccactgtatcgcccaggctggagttcagtggtgtgatcttggctcactgcaacctctacgtctcaggttaaagcgattctcctgccttagccttctgagtagctgggattacaggcacccgccaccatgaccggctagtttttgtatttttaatagagacgaggtttcaccatgttggcaaggctggtcttgaactcctggcctcaagtgatccacccgcctcggcctcgcgaagtgctgagatatcaggcctgagccaccacgcctggccctatgacaatgatctggtgctcccaaatgacccagagagacctctcagggattccccaccctcctaacccttctggtgttcacagggaagctggtctgagctctggccaatcttccatcggcctcgtcttctctcagatttccttttttgcttcccaatctgtcgcccagtctggagtacagtggtgtgatcaaggctcactgcaacttcaatctcccaggcccaagggatcgtcccacctcagccttgtgagtagctgggactaaccacacctggttatttttctttcttttctttttttttttttttctgtagagatgaggtcttgctatgttgcccaggctggtctcaaactcctaggctcaagcaatcctcccacattggcctcacgaagtgttgggattagaggcgtgagccactgcacccggctgtttttaaactttttaagacagcatcttgctctgtcatccaggctggagtgcagtgatgcaatcatagctcactgtagccttcaaatctcggactcaaccaatcttcctgctgaagcctcccaaatagctgggactataggcatgtgccaccatggctggctaatttttgtttttaatttttttgtaaagatggggtcttgctatgctgcctaggctggtctcaaactcctggcctcaagtgatcctccagtcttggcctcccaaagtgctggaatcacaggcatgagcctctgctcctgctcctcctccaaggtttctaagcgaggaaaggaagctttcacatttcctcaagtgggttctagcagccttgagatggatcaattacacacatcgccccagaatgcccagaagtcatcgccctcaaatcacacacacaaagcaacattctggcctgtaatcccagcactttggggggccgaggcgggaggatcatttgagcccaggagcttgagaccagcctgggcaaacgtggcaagaccctgtctctacaaaaaatttaaaaattgaagaagaaaaaaggaacattctggtcttcctgccccaggtgtgccctacagtctggctccctagctcatgttgctatgaaaagctggaggggtggccaggcacagtggctcatgcctgtaatcctagcactttgggaggctgagtgggtccgatcactgagggagcaggagttgaggccgtgagttgaggtcaggagttcaatgccaccctgaccaacatgatgaaactccgtctctacctaaaatacacaaattagccagacgtggggcgtggtggtgtgcacctgtaatcccagctactcgggaggttgaggcacgagaattgcttgaaccccggaagcagaggttgcagtgagccaagattgcgccactgcactccagcctgggtgacagagcaagactccatctcaaaaagaaaaagaaaaaaagaaaagctagagggtccaggtgcactcgctcatgattacccagcacttcgggaggccaaggcggccacatctcctgaggtcaggagctcgagaccagcctggccaatatggtgaaaccccgtctctgctaaaaactacaaaaagtagccaggcgtggtggcgggtgcctgtaatcccagctacttgggaggctgaggcaggagtatcacttgagcccgggaggcggaggttgcagtgagccgagatcataccactgcactccagcctgggtgacagagcaagattctgtctcagaaaaaaaagaacaaaagaaaggagaggggccgggcgcagtggctcacacctgtaatcccagcattttgggaggccgaggcgggtgtatcacgaggtcaggagatcgaaaccatcctggctaacaaggtgaaaccccgtttttactaaaaaaaaaaaaaattagccggcggcggtggcgggcgcctgtattcccagctacttgggaggctgaggcaggagaatggggtgaacccgggaagcagagtttgcagtgagccgagattgggccaatgcagtccgcagtccggcctgggcgacagagcgaaactccgtttcaaaaaaaaaaaaaaaaaaaaaaaaaaaaaaagaaaggagaggaagaaaagaaagagaaagagagaaaggaagaaaggaaggaaggggaggggaggggaggggagggaagggaagggaaggcagaaagaaagaaagacaaagaaagaaaaagaaagaaaacctagagggtcttaggggaccactaccttgggtcaatgtccttatctttccaactgttcacaaattcactgtcactatttgctaacttttcatcgctgggcatcattagttcgtcctcttcctcatcattgaagttcccacacatgccgcagacctggcgggggagagtggtttttcggtgctggggaagcacgagaacagtttttctcccttccttccttctttccttccctcacgagagcagttttcctccctccctccctcccttccttcaagtttcactcttgtcacccagcctggagtgcagtggcatgatctcagctcacttcactatccgcctcccaggttcaagcaaccctcctgcctcagcctcccgagcagctgggattacaggtgggcaccaccacccccaactaatttttttttttatttttaatagagacggggtttcaccatgttggccaggctggtctcgacctcctgacctcaggtgacccacctgcctcggcctcccagagtgctgagattacaggcatgagccaccatgcccgggcagaatggtttttcctgttttttcctggaaacactcttgtccaccctacacagaaaggcgcactcctccactgccctgctccatcctgaggagtggcctctttgggcaggcacgatgcgaacactgccccccatccctgccggccaccaatctccctggggctgcctccccagcgagaagagccagatgttttcctcacctttccatagtaggttgtggggatttcaatctctaagagatgattcccgtcaaacttgacttgcaccccgatcttgatgttaacaatggtgtagatgctgctggacttgacactgaccccagggatctgggagatggcggggagggtgacctgtttgctgttgatctaaacaggaggacagtgaaggtgagtaggagcagggacaagagtcccctccccagcactccctcccagccccggtcaccacacccagctcactagcacacggtggcccttctgcagggtgacctgggcatcgtacatgtcaatgtagacctcatgaaggcggaaagcctcagttccaccttcctccttctcatgcttggcactgatcttgaacaagggcaaggccatggcggggtggcacactttcaccaggacaagagtgcaggcgtccgggatagaatggttactaccatcaaagctcacgtagtgggactcccctgggagctgacacactcccacacctgggaggacagagagacagctgggctatgacgctcctctggcaggtacagggtccctgggaaactagtcctgggttctccctgccttccagaaaagagtcaagaccccaggtccggctgtgcgcagtggctcatgcctgtaatcccagcactttgggaggccaacgtgggctggtttgataccagcctgaccaacatggtaaaaacccgtctctactaaaaaaaatacaaaaaaattagggtgtggtgacgtgtgcctgtaatctcagctacttggaaggctgaggcaggagaatcgcttgaaccagggagatggaggttgcagtgagccgagattgcaccactgcactccagcccaggcaacagagacactgcatcaaaaacaaacaaacaaacaaacaaacaaccccagggccagggctaggaggcgtggtgaggtttacgggtggaggaggggcatgattctttggaggaaggatttttttttttttatttgagacatggtctctctctgtcacccaggctggaatgcaatggcatatggtcatagctcactgcagcctcaaactcctgggctcaagtggtcctcctacctcagcctccagagtatctgggactacaggcataaagtaccctattcaactaattaaaaaaaattttttttagagacagggtcttgttctgttacccaggctggcatgcagactctaattcctgggctcaagagatcctcctacctcagcctcccaagtagcagggactacaggtgcaatgtctttaattttactttttaactttttagcttttatttttttgtagagatggggtctcactatgttgcccaggctggtcttgaactactagcctcaagtgattctcccacttcagcttcccaaaccactgggattacaggcatgagccaccatgcctggcctccaggaaaagatttatttatttagagacggagttttgtcgcccaggctggagtgcaatggcacgatctctgctcactgcaacctctgcctcctgggttcaagcaattctcctgcctcagcctctcgagtagctgggattataggctaatttttgtatttttagtagagacggggtttagccatgttggtcaggctggtcttgaacttctggtctcaagtgatccgcccgccttggccttccaaagtgctgagattacaagtgtgagccatggcgtctggccccagggaaggatttataatatcccatctaagttggtggccgctacaggagaaggatgggtgagccccaaggttcccttctcagcagttggaggtcatcttacccaccagaagctcttggttgcagcagagttaccagtcaaaacctgaaacccagtgctacaggcagcagggagtctgttggggagttgggagagtgggcctcagggctgtggagtccccccatcaccgtggtcctcctacctgaggcccgacaatggagcagcccatccagggcccagcatatctggttgggtttgcaggtgctctggaagcaggtgatgttgttgtggacggagcaggtgcagagcctggtgcaggtgttctctgtgtaccagcgctccccgacctgtgggccacagggatcagctgagccaacagaaagttggaattgggagatgggccaacgccccagttgaagctgggtgcagcatctgcccttcctcctcgccccccagccttggccagccctgcccctcccaggttctgagccttcctcctgcctctcctgagcttgccctgaccccaaacatgtgggcctggaaagggcggggcccctcctagctggcctctcaccgggtggtaggagcccgctgggtcagtgcagccacactggccaaggggcacgcaggaggttccactcaagatgtggcctttctgacattcacagctctcagcacagggcagtgctttggggcagtccctcgggttgtttatgctgctgcaggtgtctgggcaggggctgctgcaggggctgtagctgctgccaggtgggcacctcatagctaaagaaaatgagagcattaggaagagtggggtggcatgtccagcccccaaaccttggggcatcaaaagctcctagtagtggccaggagcggtagctcgcacatgtgatcccagcactttgggaggccgaggcaggtggatcacctgaggtcaggagttcgagaacaggctggccaacatggtgaaaaaccgactctactaaaaatacaaaaattagccaggcgtggtggcacacgcctgtagtcccagctacttggggtggcacacgcctgtagtcccagctacttgggtggctgagacacgagaatctcttgaacctgagaggcagaggttgcaatgaggcgaggtcagaccactgcactccagcctgggcgacagcgagactctcaaaagcaaaaaaaaaaaaaaacaaacaaaaaaaaacagacataaaatctacaattttaacaatttaatttttcttggagacagtctcgctctgtcgcccaggctggagtgcagtggcatgatcttgggtcactgcaagctccacctcccagattcacgccattctcctgcttcagcctcccgagtagctgggactacaggcgcccaccaccacgcctggctaattttttgtatttttggtagagacggggtttctccgtgttagccaggatggtctcgatctcctgacctcgtgatccacctgcctcggcctcccaaagtgctgggattacaggcatgagccaccgcgcccggcaacaattttttaaatgtacacttcaacagcactaagtacagtcacattgtcgtgctgccattaccaccatctactgccagaactttttgttttgttttgtttttcactcttgttttttgtttcactcttgttgcccaggctggagtgcagtggtgtgatctcggctcactgcaacctctgcctcccaggttcaagcgattctcccacctcagcctcttgagtagctgattacaggtgcttgccaccacacctggccaagttttgtatttttaatagagacggggtttcgccatgttgaccaggctggtctccaactcctgacctcaggtgattcacccatcttggcttgaacacaggaggtagaggttgcagtgagccgagattgcgccactgcactccagcctgggcaacagagtgagactccgtctcaaaaaaaaaaaaaagaatttagaggaagaaagggagggcagaattctggagggtgcctatgggctgtgggaacaggtggccagtcactcacggcagaaggttctgttccgccaggcaggggcctggccagcctgggcacacagggacgcgtaggcctgcagggagcggcacagggctgtggtgtcgcccttggtcccacactgaccatgcacgcaactggcaaagctggactggggaggcaccacctggtgacattgagagaagggtcctgcaggaagagagaaggcacatgagccaggggaggggccgggaaggaacagggccatgtggcttccctggggctgattcgacatccacttcagtcaaaacctggattttcccgccaggcacagtggctcacacctgtaatcccagcactttgggaggccgaggtgggcagatcacttgaggtcaggagtttgagaccagcctgaccatcatggtgaaacccaatctctactaaaaatacaaaaattagcagggcatagtagagggcacctgtagtccaggcaactcgggaggttggggcaggagaatctcttgaacccaggaggcaaaggtggcagtgagctgagattgtgccattgcactccagccgggcaacagatcaagactccgtctcaaaaaaaaaaaacaaaaaaaaaacttcttggattttccagcctgagcaatacagtgaaactgtgtctgtacaaaaattagccggccatggtggtgcacacctgtagtcccagctactcagcaggctgaggcaggaggatgagctatgattgtgccattgcactccaacctgggtaacagagaatataaacaagacaaacaaacaaaacccagatttgtgtggtggctcccgcctataacctcagcactttaggagggcaaagcaggagaatcacttgagcccaggagttcaagaccagcctgggctgcatagcaagacctcatctccagaaaatatttaaaaattaggccaggcatgatggctcatgcctttaataccagcactttgggaggccaaggcaggtggatcatttgaggtcaggagttcaagatcagcctggccaacatggtgaaatgttgtctttactaaagatacaaaaactagccgggtgtggtggcacaggcctgtaatcccagctacttgggaagctgaggtgggaaaatagcttgcgcctgggaggcagaggttgcagtgagctgagatcacaccattgcactccagcctgggcaacagagtgtgaaaaaaaaaattagttgggcatggtggtgcatgcctgtggtcccagctactctgaaggctgaggcgggaggattacttgagcccaggagttcaagcctgcagtgagctgtgatcgtgccattgcattccagcctgggcaacagagtgagaccttgtctctaaaaaacaagaaaaaagaaaaaacggccaggggtggtggcttatgcctgtcatcccaactacttgggaggccaagggggaggatcccttggggtccatagttcgagaacagcctgggctacatagtgagactcccccatctctattaaacttttttttttttttttttttgagacagagtctcactctgtcgcccaggctggagtgcagtggcgaaatctcggctcactgcaacctctgcctcccaggttaaagcgattcttctgcctcagcctcccaagtagctgggactacaggtgcccgtcaccaggcccagctaattttttgtatttttagtagagacggggtttcaccatgctagccaggctggtctcgaactcctgacctcgggatctgccctcctcggcctcccaaagtactgggattacaggcatgagccactgcgcccagcctattaaaacatttttaataggaaaaaaaaaaagaaatcccggatttatctactgcctgagacacaaatacagacccatcagtcataggtcccaagaaggtgactgctggctggccctgtgttcccatttgccttcctcatgcttttccatctgtttctggtcttgttgtttctccctccctgactagactccctccccagcctcctgtccttcagggaggaaaaagggccagcagggacatgtcttaccctgagggtttattaagatcgcacagttcttgttccaggcgtctgccatgctgttctcctggcagctggagggcttgccacccacaaggaaacagctaaatgagagagaatagaaactgagggctacaggttgggtgcagtggctcatgcctataatcccagcactttgggaagccaaggcaggaggatcgcttgagaccagaagttcaagaccagcctgggcaacatagtgagatcctatctctacacaaaatttttaaaaattagccgggcgtggtggcatgtgcctatagtcccagctactcaggaggctgtggtgggaggatggcttgagcccagcagttggaggcttcagtgagctatgattgcaccactgcactccagcctgggcaacagagcaagaccctgtctcaagaaaagaaaagaaaaaaaggaaaggaaaggaaaggaagaaggaagaaaggaaggaagaaagggaagagaaggaaaggaaaggaaagaaaagaaaagaaaaaaaaagacgagaccagacctgagggcctgaggaaccatctcccaaaccgaagcaaaagtggacagggggctgtgtgcagtggctcacacctgtaatcccagcactttgggaggccaaggcaggcagatcacctgaggtcaggagtttgagactagcctggccaacacggagaagcgctgtctcaaataaaaatacaaaaattagccgggcgtggtggcgagtgcctgtaatcccagctacttgggaggctgaggcaggataagcacttgaacctgggaggcggaagttgcagcgagctgagatcgtgccactgcactccagcctgggtgacagagcgtgactctgtctcaaaaacaacaaaacaaaacaaaacaaaaagtggacagggaaagagagagggatacaggagaagaggacaaaacggtgccctcaagtagcaaggcaaggagatgcagcaggaaggaaaaaggctagacctcagggtgaacttcccaagtgggccctccaaagagatcactaagcatgggagaaatcagcaggcgtgggcgtgggaagtcagaacagcttcttaccaactccaatcttggagagtctaaacaggagagattgccagtttcctgccagttgggaggtacagcacagagggagtggggacacacagaggacacttccaagctgccccccgaggcccttcccaggcccagcccctcctgcctggctcccctgacccccagctcacccaggttcagaggattcaggtaacttccaggcggcccccagctgcatggaatcgcctgcaagctttctgtcggggcgcaggttgtcatccaagctgttgttgttgtagttccctagaggagggagtcattaaaacaggcaagaaggggcccccagcaggccaggcccagggccaccatcctcctggcaccctcacttttcattctacatagcaaggttaacccttttctgtctctttttcttcttttttgagatggagtctgcttcttgaccaccgcgctggccccttctgtgtcttatctcgtcttcctaatctaccttcatgcttaatgtcctcaacgaattagtcagttgacaagtacttagaacacctcacagagatgttggggagctgggaccagtcacacgcgtactcattgtcccagctttcccccgcaggtgcccaggaaactcaccacacagcccacagagctggccgccataggaggaggggactgtcaattccaccaagtggctcccgtcgtagcgaacttggagcccaaagttcgtgtagaggaggacgaggttgctgctgagccttatggtcacccggccttgtgcaagccacacaggtagggccacccgatggccattcagctgcagaggcagggaggacgtagaaaggagagtcaggaaagaactcgggataaaggcaaggacgggggctcatgcctgcaaacccagcactttgggaggccgaggcggaggatcgcttgagcccaggatctcgagatcagcctgggcaacatggagaaagcccgtctctacaaaaagtgaaaaaaaaaattagccgtgcaggtggtgcatgcctatagttgcagctacttaggaggccgaggtgggaggatcacttgagcccagggggtcaaggccacaataagctatgatcgcaccactgcactccagcctgggtgatagagcaagaccctgtctcaaaaaaaaaaaaaaaaaaaaaaaaacggcaaaaaactggagcaggagggctgtgctgtgggtatttcacagagggaggagggagtccagagaagagggtctgggtcagctgcaggtgcttcccaggtgctctaaggagccagagaggtgggcatccgggcaaggaggggcacaggagagaagcaagcaggctgggtgttcagggtccaggaggcaggaggaagacacccaccatgaccttacagcctctgagcagtgagatgctgaggtcaaagactgtcacgtggacggctttgatgtaggagacctccaggatccccccgcggttctcgttggtggcgctcacaacaaaatagctgtcttgggacctggaccagcaaggccgggtcaggacataggtgcaggtgcccatgaagtggtgcaaggcgccatcgaaggtcaggtagtgggggtcacccgaggctgtgcaggtggcggcacctgtggagaagaagatggagttcacagtctcactcctccatgccccggaagctttgactcagagctgccatcctggagagcccacattggcatggtccccacggcccacccacagatgtggtgtttccctaggaagtgtggttggcttggcttggagctgcctaagagaaacactgacgtccccaacctcaccctttgggtccctgaaaatgctgcccctgctgcccctcccaggccctggtggagactcagctgtctggggaagctgctttgggcaggacccatcaccttgcctggtgttgcctgggcagcccccagctcaccttccaccctgatggctcaccttgggcatggcagccatagataccatcctgttggccacagaactcctgggccctacacctccagggctggcagcgaattctgttgttgctttcacagacgcacaactctttgcagcctggcttgtaccaccgctcccctacctggggaagacagcagggaaggaagagaaagtgtttttttttgctttgttttgttttttcccagatctgacaccagagctcaccagagctgttcagatcactggcttaatagtggggagacatcctctcttcctgaagctccgagattcgctgcaaaagcttggcatccattcgttttttcagtcactacatcatttctgggtctgttcatcatttcaaccaaaattgatctatccgaggccaggtgtggcggctcacgcctgtgatcccagcactttgggaggccaaggcgggtggatcacttgaggtcaggagtttgagaccagcctggccaacatggagaaaccccatctgtactaaaaatacaaaaattagcctggcgtggtagtgcacgcctgtaatcccagctacttgggaggcttaggcgggagaatcgcttgaacctgggaggcggaggttgcagtgagctgagaccgtgccactgcactccagcccggacaacagatcgagactctgtctcaaaaaaaaaacaaaaaccaaaaacaacaacaaaaaaccaaaaaacaagggccaggcatggtggctcatgcctgtaatcccagcactttgggaggcccaggtgggcagatcacaaggtcaagagatcaagaccatcctggccaacatggtgaaaccgccccctaccccgtctctactaaaaatacaagaattagctgggcatggtggtgcatgcctgtagtcccagctactcgggaggctgaggcaggagaatcacttgaacccaggaggcggaagttgcagtgagccgagatcgtgccactgcactccagcctggcgacagagcaaaactccgtctcaaaaacaaaacaaaacaagaaacgaaaagaaaagaaagagcttgcagggggtgtgagagcagggagcaggccctttctagctgcagggctgagaggtccacgcagccgctcaccttgaagtagctgcctgcagggtggaggcacccacactgggagcgaggtatgcactcgaggccactgaggacgaagcccggattgcattcacaggcctccacgcaccggtctgagcagaacatgccggagaatcctgaatggcaggtgtcagggcatggcttcgcacacagggagtacttgctgttgggcgggcaggccattgctggtggagggagaagcttgggtgagaaggagacgaacaagccacggggctgggtgggaaacaggaaggacacgttcggaagggccccagctccaggcttctggccaatctcgagaagagagagtgactgtgagaagcttccccaaggagcctggctggctccctggggctgcagggccagcactaaggcgccggccctgagagacttagatagacctatggtgggagcagatggacccaccactggcagcgctgctgtgtagacatgccccaggtgagctgttggcccgcaggggaccggggccacctgtgaggtctgagtcaggggataggcctgccctaaagcagcttccccaaagagctgggccacaccaggagctgggaggcagcctcgttgcctcccctgcctagggcctgtaccgtgtgcctgcgtgtgatgacttgggctgcacagaaacacttttttttttttaaagacagagtttcgctctcactgcccaggctgtagtgcagtggcgcaatctctgcttactgcaacctccacctcccgggttcaagcgattttcctgcctcagcctcccaagtagctgggattacaggcgcccgttgccacacacagctaatttttgtatatttatttatttattatttttattattttttgagatggagtctcattctgtcacccaggctggagtgcagtggtgcaatctcggctcactgcaacctccgcctcccaggttcaagcaattctcctgcctcagcctccaagtagctgggattacaggtacccgttgccacacacagctaatttctgtatttttatttatttatttatttattttattttattttttgagatggagtctcactctgtcgcccaggctggagtgcagtggcgcaatctcggctcactgcaacctctgcctcccgggttcaagcgattctcctgcctcagcctccagtgtagctgggactacaggcatatgccaccatgcctggctaattttggtatgtttagtagagacggggtgttggccaggctggtcccaaactcctgatctcatgatccacctgcctcggactcccaaagtgctgggattataggtgtgagccaccgtgcccggcctctcctctgagtttggcacaactcacggcagaagtggggttccctccagggcttcacagcgtggcctgcgtcctggcaggtggtggtcatggtggacatgtgtgtgcacagcaggtgctgcagcccctggaatccgcacatatcaagcatgcagctgtcgaagaaggaagcggccttcacgtgcagcaggcatgtcctgaggggagtgaccaagtcagggggaatgcagtggaagggggtagagccttggaggagcccaggtgccaagcatcgcccctgtgcgaccctgcctgccctccttcatactcaaatgggccatgagtgtcgaccagccgtccacagaaccctggccccgacatgctgctctgcagagatgaatcacaagacggggaattcaccacctggtacttctgacacctgcaagagacccaccccaaactccctaaagacaaagctcgcttccagctcatccctaacccagcaggcagcaaggctggcaggccgggaccggcaaaccagcctgtcagctgggaaacccctcccagaggatgtttgaccactgagccctggccaggcactgtgggaggccgaggcagggagaattgcttgagcccaggagttccaggccagcctgggtaacacactgagatcccatctctttaaaaataaatatgaaattatttatttcatatttcatatggcgcacgtccatagccccagctactcaggaggctgaggtgagagaatctgttgagcccaggagttggagcctgcagtgagctgtgattgaaccactgcactccagcctgggcgacagagcaaggccctgtctctaaaaacaaacaaacaaacaaacaaaaaagaatattgagcaactgaaagaacaacttgaagtctccagggtagagaggagaaaggggcaatgccagtcattttttaaagggagggcacaggctgggtgtggtggtgatgcctgtaatcccggcattttgcattttgggaggccagggcaggtgaatcacctgaggtcaggagttcgaaaccagcctggccaacatgatgaaaccccgtctctactaaaaatacaaaaatcagacaggtgtggtggcatgtgcctataatctcattgggattgaggcgtgagaatcacttgagcccaggaggcagaggtttcagtgagctgagattgcacaactacactctagcctgggtgacacagcaagactccatctcaaaaaaaaaaaaaaaaaccgttggggagggccagcagcctggtcaaccccccatctggtgagaaccccatgtctaccaaaaaattttgttaaagttagctgggcatggtgtagtccaagctacttgggaggcagagaagggaggattgcttgagctcaggagtttgaggctgcagtaagccacgatcgtgccattgcactccagcttggaagacagagggagatcccatctcaaaaaaaaaaaaagggcgggtggagggctggacgtggtggtgtggtggctcacacctgtaatcccagaactttgagaggccaaggcaggtggatcacttgaggccaggagtttgagaccagcctggccagcatggtgaaaccccatctctacaaaaatactaaaattagctgtgtgtggtggcaggtgcctgtaatcccagctactcgggagactgaggcaggataattgcttgagcctgggaggcggaggttgcagtgagctgagatcgcaccactgcactccagcctaagcgacagaaggagactccatctcaaaaaaaaaaaaaaaaaaaaaaaagagagttccaggaaggggacggaaccttcccagggccccggtgggagggctccttgctcactcctggtcctcgtcctggtccgtctgccagctgttccccagctcctccttgtctcctgctgggctgccgtccaacttcaggtggtcattgtcactgttgccgtcatagttcccacacaaaccacagagtttgccagagtatgtgctaggggaacaggagaggagctggcgttaatggagagaagcagcctcggtcctcgaggggcagtggcagagaaggcaaggagctgggatcctaaaacagagggcgtgaggaggatgaagaggtgcggactggacaagaggaccccatggccctcccccaagcctccttcccctctgttcattgtccagccacagcaaaccccttgctggccctaaaacactcccactttatttatttatttatttatttatttatttatttatttatcctttttttcagatggagtctctctccgtcacctaggctagagggcagtggcgcaacctcggctcactgcaacctccaacctcccgggttctagagattctcctgcctcagccttccgagtagctgggattacaggcacacaccaccacgcccagctaatttttttgtatttttagtagagatggggtttcaccatgttggccaggctggtctcaaactcctaatctgcctgccttggcctcccagagtgctgggattacaggtgtcagccaccgtgcctggccaaattatttatttatttttttatttattttagagatagggtcaccctctgtggctcaggctggagcacagtggtgcaatctcggctcactgcagcctccaactcctgggttcaagcgattctcccacctcagcctcctgagtagctgagactacaggcaagtaccaccacgagaagctaatttttttttaagagacaggatctcactatgttgtccaggctggtctggaactcctggcctcaagtgatcctcttgcttcggcctcccagcatgctgagattataggtgcagccactacgcctggctaatatttaaatttttttgtggagatatggtctcactatgttgcccaggctggtctggaattctggccccaagggattctcccgtctcagcctcccaaagttcagggctacagggcgggaaccctgcacctggcctctataaagtatttttataaaagtctttctttcgccggggcacagtggctcccctgtaattccaagactttgggaggcgaggcaggaggatcgcctgaagtcaggagttcgagacaagcgtgggcaacatgatgaaatcccatctctagtaaaaacaaaaattagctgggcatggtggtgtgcgcctgtaatcccagatacttgggaggctgaggcagaagaattgctgaacctgggaggcagaggttgcagtgagccgagatagcaccactgcactccagcctagggaacagagcgagagatcctgtctcaaaaaaaagaagaagaagaatcttgctttcccttgttttgtccatctggggagccactcttccttcgagaatgggaccaggtgactgcccttcagaaagcctccagaactcactagtgctccttctagcacattcccaaagcatgtacatccatcctgctatctatcacatgccccgaaaccattttctcctgtctcctggtccaaagggatccctgccacttaagcagggtgcttcccatccgtgaatgcataaaggatcaagtagtggtgccagggatggaaggggagtgggcagggtgggcagcaggaagaagaggcagcaggaagaggcagcaggaagaagtggcagctgcctggctgggacactgccttacctggacacagtaacatacagctgctggtcaccatcccatctcacccgcaaaccgaactccgtctgcagctccacaaaccgcccgcttgcacccaggaagacgcctttagagggtatggctgggagagtaacttgctgacccccaacctggaaggcagggcagaggcaagagacagacagagctgggggtcaaggaggaccccagcagactttcatttccatagctgggaggcaggacaccatccacagcggcctaacaatctcatccaccaggagtggactggagcttcctcaccactgttttgtttttgtttttgtttttaggagacagtgtcttactatgttgcctaggctggagtgcaatggtgcaatcacagctcactgcagcctcgacctcccaggctccagcaatcctcccacctcagcctctggagtagaggggacaacaggcaagtgccaccacaccaggctaattttttctattttttaagagacagggtcttgctatcttgcccaggctggcttcaaactcctggcctcaagcaatcctcccactttagcctcccaaggagctgggattgcaggtcactgtcttgttgaaccccatccgtggaaaggttcagggattggaagggttggccaggacacacagtcagaccctgcaaggatggtgggggtggaatggggctcaccagagtgcgtctgcccttaagcagggtgacggtgctctcgggcagggtcacgtagactttgctcaggcaggacacgccttcctgtccctgctcctcattcttggctgtcaccctgaagaatgggtctgggtagggagaggaatgaagagagcccagtggctcatttctgaacatctgccgcgagcagtgccctgagcctggcgccgcagggagagatgagcgccaccgagacaccagccccaaagtccagtaggggaggccggatccacacaggagcagaccacgactgcctcttccagaagagcctgcagccgcagcgtgtctgtctccactcagtggctggaacatcctccagggcgtctgtgctccctaaccactaccactgccttctttgcttttttgtttttaacttcatttatgtgtgtatttatttatttttcgagacaagatctcactttgctacccaggctggagtgcagtggtgtgatcatagctcactgcagcctccaactcttgggctcaagcgatcctcctgcctcatcctcccgactagctgggactataggtgtgtcccaccatacccagctgattttttaatttttttttttttctgagacagagttttgctcttgctgcttaggctagagtgcaggagtgcagtggctcgatcttggctcactgcaacctccgcctcccaggttcaagcaattctcctgcctcagcctcccaagtagctgggattacaggtgcctgccaccaagcctggctaattttttatatttttagtagagacggggtttcaccatgttgaccaggctggtctcaaactcctgacctcaggtgaaccccccacctcggcttcccaaagtgttggggttacaggcgtgagccactgagcccggcctgatttttaattttttttttcatggagatgagagtcctgctgtgttgcctaggctggtctcaatctcctggattcaagtgatcctcctgcctcagcctcccaaagtgctgaggttaccagtgtgagtcactgtgcctggccttcaaccctcaccttacagaagaacttgctcctatcttgcctcttcccccatctgtgccctgccccttcctgccacccaccatgccccatgcctagcagcgctgcccacagaccctccccccaggccgcagtggcatctccagggcctacctgttgagttgccacagggctgggccaagatgtaagtgcacttgcccatgaagccaaagtgcctcccgtcaaaggtgacataatgagggtctccgtagaccaagcaggtggcagtgcctgctgggagggggaaggagaacaggcgaagctgcttctgtggctcctccaggctggaccgcacatgctggcccacccgctgcccggtggcaggcccccaatcctgtgctcaagcgagggattgggatcctggcgtcacgtctactccaactggctggcaggcagggacagcatggggaggggctctcaccgtaggggtggcatccatactggccattcttaagctggcacacggtgtgtgtcccacactgagagatttggcactcgacccgactgccgggccagcagcggcaatgttctgtgcagttgggggtgaaccactttgccccaggctgggagaaagggatgtgaggtcacacagtcatatagctcctagagtacttctccctttgcctttctttttcatttatttatttatttatttatttatttatttatttatttatttgtgatggagtcttgctttgttgcccaagctggagtgcagtggcgcaatcatggctcactgcagccttgaccccctgggctcaaaccatcctcctgcctcaacctcccaagtatttgggactacaggcacatgccaccatgcccgaattttttttttttttttttttaacgttttggagagatggagtcttgctgtgttgcctaggctggtgttgaattcctgagctcaagtgaccctcctgccttggcctcccaaaatgctggtattacaggcgtgagccactgcacccagccttatgtctgtctgtttttttgtttttttttttttttttgagacggagtctcactctgtcacccaggctggagtgaagtggcgtgatcttggctcactgcaacctccgccttcagcgttcaagcgattctcctgcctcagcctccagagtagctgggattacaggcacccgccacgacgcccggctaatttttgtatttttagtagagacttggtttctccatgttggccaggctggtctcgaactcctgacctcaggtgatccgcccgccttggcctcccaaagtgctaggattacaggcatgagccactgcacccagccaatatctgtctttacccaacatcttagccctcccatgagtgctctcattcagtaaatacttgctgaatgaaggagtaaaccaagaccccatgtgtctctctgaatctgagggcattatgagggcaaggaccacagcctattcgtggcgaccccagtgccagcagagtagaaagtactaagtaggctgggtgtggtggttcaccactgtaatcccagcactttgggaggctgaggtgggaggatgggttgagcccaggagttcatagaccagcctgggcaacagagccagaccccatctctaccaaaaaaaaaaccccaaaaaacaaaccaaaaaaacacacctttgaagaaagtactaaataaacatttgttgaatgcataaatgaatctattagaagtgaatacagccaggcgcggtggctcacgcctgtaatcccaacactttggaaggctgaggcgggcggatcgcctgaggtcgggagttcaagaccagccttactaacatgaagaaaccccatctctaccaaaaatacaaaattagctgggcgtggtggcgcatgcccgtaatcccaggtactccggagtctgaggcaggagaatcgcttgaacctgggaagcggaggttgcagtgagcggagatggcaccattgcactccagcgtgggcaacaagagcgaaactctgtctcaaaaacaaacagacaaacaaacacggctagaatggtttttgcatcaatagagaactgtgagtgaatagtttgtcaaaaaaaaaaaaacaaaagtgaatacatgcctcctagggcagagggaagagcttcttggtgccaatggttgtgacagatctttctgcccaggctgtggctgaagctaatctcagcagcaactcagagagacccaggagactggttaaaggaggcaggggaaagaaataatagtcccaaaagggacaagcagaagctctgatgtcaatgggaagaacacctgcagctgggaagaggctctgcacattaatgaatagcttaatgcacttttctttttttttttttgagacagggtgtcactctgtcgcccaggctggagtgcagtggcacaatcatagctcactgcagcgtcagactcctgggctcaaccaatccctccacttcggcctgctaaagtgttgggattacagctgtgagtcaccacgctgggccctttaatgcacttttaattaataggttgcatatatttatcataaattgctaatgataataattaacacttattaagtaattgtatgtgttaggacttaatttcatctttacaataatcttatatgaggtagaaaatcttactgtgtacactttataaatatggataaaagatttaaagacgtaaagaatatatggtgaaaccctatctctactaaaaatacaaaaattagccagggtggtggcgtgagcctgttatcccagctacttgcggggctgaggcagagaattgcttgaacccgggaggtggaggttgtagtgagctaagatcgtgccactgcactccagcctgggtgacagagctagactctgcctcaaaaaaaataaaataaaataaaaaaagaaatgtgcccagccagacacggtgacttatgcctataatcccagcactttgggaggctgaggcaggaggattgcttgaactcaggatttcaagaccagcctgggcaacgtggtgaaaccctgtctctaccaaaaatacaaaaattagctgggcatggtggcatgtgcctgcagtcccagctacttgggaggctgaggtgggaggatcactggagcccgggaagtggaggctgcagtgagccactatgatgccactactctccagcctgagcgacaaagcgagaccctgtctcaaaaaaaaagaaaagattgaatgaataacttcgccatcctgtgaccattgcttctgagctgaccccttgggactatccggtgatccctgttgccttcacatggggagcagatggagctggaacccaggtgttctgccatcaatctccctcatgggaccccagcatcccggggggcttacctcatagtagtcgttgttgtagcagcaattgcaggaagaggcctggatgcagtggttgtcactaaacaaaaagccagggttgcagacacagccctcccgacagaggggcccacagctaggcctggggctcttgcacgaagcaggacaagcacaggattcgtagcgggcatttggagggcagcgctctaaggggaaaacagcctctgtcatgctttcattccatggctttctcagggagtctccctgtctctcctctacccccaaactcaagttcttctctaggaaacaggaccatattatttagccataaaaaggcctgaaggctgggtgcggtggctcacacctataatcccagcactttgggaggctgaggcaggaggactgtttgaggccaagagtttgagaccaggctgtgcaacgtagtgagaccccatccctacaaaacaaatttaaaaataaaacaattttaggctaggcacggtggctcacgcctgtaatcccagcactttggtaaaccgaggcggacagatcacttgaggccaggagttcaagaacagcctggctaacagggcgaaaccctagagccgggcacagtggctcacccctgtaatcccaagactttgggaggccgaggctgaggcgtaattacaggattacacccctgtaatcccaagactttgggaggtcaagaccatcctggccaacatggtgaaaccccgtttctactaaaaatacaaaaattagccagtcgtggtggtgcaggcctgtggccccagctactcaggaggctgaggcaggatagttgcttgagccccagaggcagaggttgcagtgagccgagatcacacctctgcactccagcctgggtgacagagcgagaccctgtctcaaaaatataaaaaataagaaatactccatttatttatttatttatttttatttttaattttttgagacggagtctcactttatcacccaggctggagtgcggtggcatgatctcggctcactgcaagctctgcctcccgggttcacgccattctcctgcctcagcctccggagtagctgggactacaggcacccaccaccacgctcagctaatttttttgtattttcagtagagacggggtttcactgtgttagccaggatggtctcgatctcctgaccttgtgatctgcccgcctcagcctcccaaagtgttgggattacaggcgtgagccaccgtgcctggccagaaatactttttttaaaggaatgaagtcctgatgcatgctacagtatggatggcccggaaaacattacactcagtgaaagaagccaaacacaaaggctcacatgttgcatgattccatttgtatgaactgtccagaactggcaaatccatggatataggaaagaaatgtgtggttgccaggggctgggggaaggcggagtggggagtggctgctaataggtataggatttctttttggagtgatgaaagtgtttggattagaaagtgatgatggttgcacaaccttaggaatatactaaaacccacagaattgcttttgctttttttttttttttttttttttaggacgatgtcttgctctgttgcccaagctgaagtgcagtgacacaatcatggctcactacagcctcagcctcctaggctcaagtgatcctcccacctcagcctcccgagtagctgggactacaggcgtgcgccaccacacccagctaatttttttttttttttaattttaaagtggagacagggtctcactatgttgcctaggctggtctcaaactcctgagctcaagcaaccctctcgccttggccccccaaagtgctgggattacaggtttgagctaccgtgcccggcctagaattgtacactttaaaagggtgaattttatgaaatatggattatatctcaataacaaacaacgagaaggaagcctcgtggttcagtcctgacacccccacccactccagccctgccatccctctcgctctgggcagtcctccccatttcctctgaagtcgccatggactacttcagctctcctctgagagtactagaagcatctagaagcaactagaaggcttctaccagaagcatccctttccctgactgtctcctagtcattgtctctgactttcagccttggcccacgctccatccacctcatacctgtactggatctggaggttgtggtagtgcccagaatcacactggtcataggggtacttggagcatgtggagacatcaccaaggctgccagcccagtggctgtggggctgggatggggtggcctcagggctgtgagcttctctgtgggaatggtgggtttttctgtggggatggtgggtttttccgtggggatggtaagtttttccgtggggatggtgggtttttccgtggagatggtgggtttttctgtggggatggtgagtttttctggggagatggtgggtttttctgtggggatggtgagtttttctgtggagatggtagtctcttcagtggggatggtgggtttttccgtggggatggtgggtttttccgtggagatggtgggtttttctggggagatggtgggtttttctgtggggatggtgagtttttctgtggagatggtagtctcttcaatggggatggtgggtttttccgtggggatggtgagtttttccgtggggatggtgagtttttctggggagatggtgggtttttctgtggggatggtgggtttttctgtggagatggtgggtttttccatggggatggtgagtttttctgtagagatggtagtctcttcaacagaggtggtggtttcttcagtggggagagtgggtttttccatggggatgctgggtttttctgtggagatggtggtctcctcagtgggggtggtgggctcttctgtggagatggtgggtttttctgtggggatggtgggtttttccgtggggatggtgagtttttccgtggggatggtgagtttttctggggagatggtgggtttttctgtggggatggtgggtttttctgtggagatggtgggtttttctgtggggatggtgggtttttctgtgggggtggtgggtttttctggggagatggtggatttttctgtggggatggtgggtttttctgtggggatggtgggtttttctgggcagatggtgggtttttctgtggagatgatagtctcttccatggagatggtgggtttttccgtggggatgctgggtttttctgtagggatgctgggtttttctgtagggatgacaggctcttccatgtaggtggtggtctcctcagtgggggtggtgggctcttctgtggggacggtgggtttttctgtggaaatggtgggtttttctgagggaatggtgggtttttctgagggaatggtgggtttttctgtgaggatggtgggtttttctgagggaatggtgggtttttctgagggcatgttgggtttttctgaaggaatggtgggtttttctgtggagatggtgggtttttctgtgggaatggtgggcttttctttggggactgtgggcttttctgtggtgacactgggtttttctatggaaactgtaggtttcttggtggagattgtagggttttctgtgaggccagtggtttcagaagggccagtggaagaaactggagatacgggaggaagctctggtagcacttttactgcaaagaaaaataagaatccctggagtttagtcaaaaccataccaccaccctctttactgccatctaactggagtgggctcccatgggtggcttattcacacctctctttctactcccaaaccccaaccttcatccactcaacgaacactaatatatgtcagatattatgccagaaatgaataggatatgggtccagccttcaagactgcagaggaaggagttctggatccagcccccaaaatccatggtatcgaagccacattcacccaggcaaacatcttgaagtgcaggggaaggagaggtgtgttgaagatggaaaaccaagccagctgggtgagaattcgggctccagggaggactcacattttaagcagttcatagagagaactccagggaactcagggcaccgcccccttcctggagcctgggctttggtcttacctggacaagtcccaggattgatcaagatgaaacccatagcaaccacagaggccgtgttgcttccctggatgcccttgaaaataagctaaaggcgacaagggagagagacggagagagaaacaaaaatgaatctccagcaactctgtgattccactgggcatagaatctgttctctgccaaaatgtcgccttgttccagcctcaacagtccagccccatcccggcccctttctcactttctgtaacacgaagttccccttttctcggctctctttccagctttccacctcttcagcactggtggcgcccccagatcccaggcattggccctctcacctcacacagacaggacccccgcctccgtctctcacctgcatgggctgttggtgtcctgaggggacggtgacggaggtgttctgccagtaagggcgctgagaccccacgcgtttccagagaggaatcgggggactccccgcaggacttcccaggaggagttcgagcatagtaccctccccaaggccatacatgtggtatgcgaactccacgcagatgtcacctggggcgcagaagggccggctcaccagtctgactgactggcctgcgtgggagaactcgtcagcctcaaggtagatatagtgaccccctaggcaaaggaagggaacaggcaaggtaagaagcctgcacaggacatgccaactgctgctttagcaaagctttgctttctgaacgggaatctgagcaaacactcaaatttcccaggtcgtagcattattttttctgctcattttagacatctaactaaagaaggtgggatcacaaagaaagggaaaagcggccaggcacggtggctcatgcctgtaatcccagcactttgggaggccgaggctggcggatcacgaggtcaagagatcaaggccatcctggccaacatggtgaaaccccgtctccactaaaaatacaaaaattagctgggcgtggtggcccgtgcctggagtcccagctactcgggagtctgaggcaggagaattgcttgaactccggaggtggaggttgcagtgagccaagatcacgtcactgcactccagcctggcaacagagcaagactccatctcaaaaaagaaaaaaagggaataacaaaccagcaacctagattacattcattaatgtcgtgtgtgtgtgtgtgtgtgtgtgtgtgtgtgtgtgtgtgtgttgtttttttgatcggctcactgcaacctccctgcctgattctcctgcctcagcctgccgagtgcctgcgattgcaggcacgcgccgccacgcctgactggttttggtggagacggggtttcgctgtgttggccgggcgggtctccagcccctaaccgcgagtgatccgccaacctcggcctcccgaggtgccgggattgcagacggagtctcgttcactcagtgctcaatggtgcccaggctggagtgcagtggcgtgatctcggctcactacaacctccacctcccagccgcctgccttggcctcccaaagtgccgagattgcagcctctgcccggccgccaccccgtctgggaagtgaggagtgtctctgcctggccgcccatcgtctgggatgtgaggagcccctctgcccggccgcccagtctgggaagtgaggagcgtctccgcccggccgccatcccatctaggaagtgaggagcgcctcttcccagccgccatcacatctaggaagtgaggagcgtctctgcccggccgcccatcgtctgagatgtggggagcacctctgccccaccgccccatctgggatgtgaggagcgcttctgcccggccgagaccccgtctgggaggtgaggagcgtctctgcccggccgccccgtctgagaagtgaggagaccctctgcctggcaaccaccccgtctgagaagtgaggagcccctccgcccggcagctgccccgtctgagaagtgaggagcctctccgcccagcagccaccccatctgggaagtgaggagcatctccgcccggcagccaccccgtccgggagggaggtgagggggggtcagccccccgcccggccagccgcccggtccgggaggtgaggggcgctctgcccggccgcccctactgggaagtgaggagcccttctgcccggccaccaccccgtctgggaggtgtgcccaacagctcattgagaacgggccaggatgacaatggcggctttgtggaatagaaaggcgggaaaggtggggaaaagattgagaaatcggatggttgccgtgtctgtgtagaaagaagtagacatgggagacttttcattttgttctgcactaagaaaaattcctctgccttgggatcctgttgatctgtgaccttacccccaaccctgtgctctctgaaacatgtgctgtgtccactcagggttaaatggattaagggcggtgcaagatgtgctttgttaaacagatgcttgaaggcagcatgctcgttaagagtcatcaccaatccctaatctcaagtaatcagggacacaaacactgcggaaggccgcagggtcctctgcctaggaaaaccagagacctttgttcacttgtttatctgctgaccttccctccactattgtcccatgaccctgccaaatccccctctgtgagaaacacccaagaattatcaataaaaaaataaattaaaaaaaaaaaaataaataagtcagatcaagtcactgctcaaaatcctgcaaaggctccccattcacacagaataggaaagccacagtcctgacaatggccttcaaggctctatgtgatctgccgctcctgtggatctcaggtcaccctcttcatgctggccacatggctctttgctgtgccttgatcccctccttccccgacagccccactgctacctcaggacctttgcacagctggcccctcagcctggaatgtcctctgctactacctcacctttttcaagttcgtgctcaaatgtgtcctgaatgtgacctactctgaccagcctatttaaaatcggtaactcgcccaggcacagtggctcaacgcctataatcccagcactttgggaggccgaggtggccggatcacctgaggtcagcagttcaagaccagcctggccaacgtggtgaaaccccgtctctactaaaaacacaaaaattagctgggcgtggtggtgtacacctgtagtcccagttacttaggaggctgaggtaggagaatcaattgaacctgggcagcggagcttgcagtgagccgagatagagccactgcactccagcctgggagacagggcgagactctgtctccaaaataaataaataaataaataaataaattcttttgtagagatgggggtctccttatgttgcccaggctgatctcaaactcctggcctcacaccatcctcccaccttggcctcccaaggtgctgggattacaggcctgagccactgtgctgggccgagacctctctttaggcacggctgcttccagagtcaaagccctaatagctctacctggcagacccaatacagccagctcctcatctcctttctcattcttctttttttttttttgagacggagtctcactccatcgccaaggctggagtgcagtggcacgatctcggctcactgcaagctccacctcccaggttcatgccattctcctgcctcagcctcccaagtagctgggactacaggcgcccgccaccgcgcccggctaattttttgtatttttagtagagacggggcttcaccgtgttaaccagaaaggtctctatctcttgacctcgtgatccgcccgcctcggcctcccaaagtgctgggattacaggcatgagccaccgcgcccgccctggatcctcttcttgttgtgcaaggacggagagaaaagggtccgagggcaggcgggaggagggacagggactcaccgcgattacaggagccccggcggatagagagggcatccagggcgatgtccaggtaggcagtgctaccccgtgttccctcaaacatcagctgcaagaggataaggggaccccaaccccatgagcccctcagccaggcctcctggctcctagttttcttcctgaattcagatggcttggcccccacaatccctttttgccacacccccaccctcaggctctccaacacccagactcccccccgaggtcccacaatttgtccccggccttacccgggtgggcagggtgaaccctgcgggcacagtgacggtggtgagcatccaggagggtctctgggtgttccagtgtttccagagcacatcggggcggcggccctcttcacccgagagcagcagcagcctgagctgggcgccccaagacagcccgaacatgtggtgggcaaagtgcacacagagggggccttgctcccataggtcggggctgagcaggcgggccactcccccacggtggaagctgttcgattccatatgcagatagctgccctctgggggaggcagagcccaagacactgaggcccagccacctctgagggctgcccccacccatccccttctcagagcccaggcatccaggtctggctgcctcccttctctctccatctagccactcccgcctcccagccacctccctgctcatggtcccctggaaaccatagcccctcacctccgttagggtaccccccgggggccccggtggagccggtgggagagggcccactggctcgaacccagtcttcatcgtctgcggacacttgggaccagtcacagaggggtttggcgtcatcctcaaaatcacactgggtgaggacatctaggaagaatgggtcacagtgaggtttcagagagggcaggggcagggcccagagccacacagggagagggaagtagcaagattgctacacttagagaaagctgccatgaaatcagccgggtgtggtggcgcacacctgtagtcccagctactggggaggctgaggcaagagaatcgcttgaacccaggaggcggactttgcagtgagccaagatcgcgccactgcactccagcctgagggacagagggagactccgtctcaaagaaaagaaaaagaaagctgttgcaaagccttggggtccagagcagaaattgctcgtctgttttttgtggagatggagtcttactatgttgcccaggctgctctcaaactcctggcctcaagccatcctcccaccttggcctccctaagtgttgggatgacaggtgtgagccacagcacccggcccagagcagagatttgaaagagagaatcttttaggagaaattcggggctgggagagtggacagaatgacaaggtccggggtcatgaactgaggttggagggctggacttggcctggcaggacacattttgtagtcctggctgatgcccggaggggactggaggtggctgctcctgctaggaactcaggaactggcattctggtggcagaatgtgggttcggaggagggaggagaaatcttagcactcctggtttccaactcacagttgtccctagagctgcgaacaaccagcttctggtccggaggcttctctttccttgggggtcgtttgaagaaagcaaaaatgcaactcgtgtcattatcaagaattataagattcagtgactgtgagctttctgagtggtcacgtaaggatgatcagtgtttatgcagtgaatgtgtctgacttgactttttttctttttttcttttctttttttttttttccggcacccaggctagagtgcagtgatacaatcacagctcactgcagcctcaaacctctgggctccagcaatcctcccacctcaacctccccagtagctgggactacaggagcatgccaccacgcccagctaatttatttttattttttatagagatggggtctttctatgttgcacaggctggtcatgacctcctggccttatgcaatcctcccactttggcctcccaaagtgctgggattaccggtgggagccactgtgctcagccctctgttttttgttgttgttgaagttctacttgttcaaattctcccaaacacactgcaggacaccaagacatccatcatttctttttttttttcttttgagatggagttttgctcttgttgcccaggctggagtgcaatggtgcaatttccgctcactgcagtctccgcctcccgggttcaagtgactctcctgcctcagcctcccaagtagctgggattacaggcatgcaccaccatgcctggctaattttatatttttagtagagacagggtttcaccatgttggtcaggctggtctcaacacctgacctcaggtgatccgcccgcctcggcctcccaaagtgctgggattacaggggtgagccgccgcgcttggcctgtcatccgtcatttctttgctgcctcgtacttaagtctctctcatcagctgggtccaccctgggtcttgtccgtttcctgagggcctgacccctcaatccttctctcctaggcttagatctgtcttccagctctgcacctcctccgtcccttctcacattgtagccctgtcccgctcccagaacccgccccttaattcctgttcagcagtcaaggtcaacccatttccatcccaccgggtttcccccttcctctcaaggtctttttttttgtttttttttttttgagacggagtctcgctctgtcatccaggctggagtgcaatggcatgatctcagctcactgcaaactccgcctcccaggttcaagcgattctcctgcctcagcctcctgggtagctgggactacaggtgcacaccaccacgcctggctaattttttgtatttttagtagagacgaggtttcaccatgttggccaggatggtctcgatctcctgacctcgtgatctgcccacctcagcctcccaaagtgctgggattacaggcgtgagccaccgtgcctggcctctctccagatcttttgtagttagcctgctcgccccctccagctctgtccttccatattccttacagccaccctcagctgaccctggtttatcattaccccctgggcccagcttacctgaaaagggcagcccccaccagaagcagcagagtccagactggaggaaccatgaggaccctaagtggttgctcccaggggagaggggaagggcacagttgggagcctggactccttttattcccccctggcctccttagcttggcatccttccaaggatgccatgaagaatgaacagagaaacacagaaaagctctgggaaattaaaattatgagagttgaaagttaccatccagtagaagcatcgtagattgaaatcgagggaaataaactagagagaagagaaaaaaaaagagaaagaaacaaaaaggaaacaggtttggaggatcaatccaggaagtctaacctcaaacgaaaggagttcaaaaagagagaacaaaggaaaagaaattattattttaaaaagaaaaacgcacaagaaaatatccagaactgaaatatacaagtctctagattaaaaaggtgtccagggtgatgaaagcatagagacccatggaagcactggacttcagactatcaggggtgaagagaagatctgaaacactttcagatagaaaataacaagtcatataccaaggatcagaaatcaacatggcatccagcttttcaatagcaaccatggagtctaagagccagtggaacattgtctgcagaattccaacagaaaaccatttcaaacctaaaattctataactggcaacagtggcaactggagagttaggtgaaggaaggactgcaaacggctggacgtggtggctcacacctgtaatcccagcatttgggaagccaaggcgggtggatcacttgaggtcaggagttcaagactagcctaactaacatggtgaaactccatctctactaaatacgccacttcacttaagggttgtgcaggcgagtctcatacttgcgtcctcaagtgatccacccgtctcagcctcccaaagcatttttttttacaggtgtgagccactgcaccccaccctcattattgtctttttaaaaaattatttctttatatatatatatgtgtgtgtgtgtatatatatatgtgtgtatatatatgtgtgtgtgtgtatatatatatatatatatatttttttttttttttttgagacggagtctcactctgtcacccaggctggagtacaatggcgtgatctcggctcactgcaagctctgcctcccgggctcacgccattctcctgcctcagcctcccgagtagctgggactacaggcgcccaccaccatgcctggctaattttttgtgtttttagtagggacggggtttcaccgtgttagccaggatggtctcgatctcctgaccttgtgatccgccctccttggcctcccaaagtgctgggattacaggtgtgagccactgcgcccagcctctttttatatatttttaagacagaatcttactctgttgccccggatggagtgcagtggtgcgatctcagctcactgcagtctccacctcctggggtcaggcagttctcctgcctcagcctcctgagtagctgggactacaggtgcacgccaccactcccggctaatttttacattttttttagtggagtcagggtttcactatgttgcccagctggtctcgaactcctgacctcaagtgatccacctgcctcggcctcccaaagtgctggaattaaaggcgtgagccaccatgcctggcctatttttttatttttaatttttagagacaaggtcttgctctgttgcccaggctggagtgcactggttcaatcatagctcactgcagccttgacttctgagctgaagcgatcctcccacatcagcctcgcaagtaggtgggaccacaagcacacaccaccacatctagctaattaaaaaaaaatttttttttctagagatggggttctcactatgttgcccaggctgagctcagactcctgggctcaagcaatcttcccgtctcggcctctcaaagtgctggaattgcaggcatgagccactcataaacgtctagactgaaaatgaggtggtgggttttgaagctttgggctccatgaagtgagatgcctgggttttctcaggatttcagtgaccccccagccctgagaatctttaagttactctgctatctccacaattccagtaccatggaaaacttccgaaaaaaacacctgtggactgatcttcccactgcctgaaacaacgtctcccatcagtcacagcagccagcctgctacctgggagcagactgagtgatttcttggcgtgagcgctcctcaatctcctcacctgcattagggaaacctcccgcagggcccatgccatggacgggtccatttttatgtccgagggcccagtgtccaccatccccggaagtctggacccagtcacagaagggatgggcgttgtcttcaaagtcacactgaggaaaaccctctgggggatcaaaataggatatttgagcaagttgagtgacgctctccagccctcccccagcccaccccggattctgagagatccgggcctctcagggcctgctctcacccccacaaggagcaatgctggttgcatcaactgccacagctggctctggggtctttccaaaaacgcctaccacggcaaactggagagaaagggagatggagcaggagtgagcacacagcccacacccccaagcccctgatctaactcgactccattccaggacccagaatccctactccctgtgcccagaccctcaattcagttctttctttctttttttttttttttcagagtcttgctctattgcccaggctggagtacagtggtgtgatcatagctcactgcagccttgacctccagggctcaagtgatcctcccacctcaggctccctagtagctgggactacaggcacacatcactgtgcccgcctaatttttgtatttttttgtagagatggggtctttctatgttgcccaggctggtcttgaactcctgtcctgaagcgatcctccctcctcagcctcccaaagtattgggaatacaggcatgagccacagcaccaggcccctcaatttatttcaacattgggtgtgcctaccatgtgcaaggacctgaccccttgcttctctgtacctgtatccgtcccacggctgtgtaattgacagaaacagcctgccagttgggcccaggttgtcctgagaagagagtgtgtttccggatactccctgcagtgaaaggaattggaaggagaagtgagcttaaggggactgggaaacgactttgaactatacctaggaggatgaggagcagagggcatagctggggacgattaccaccaaatgaaagcacaatcttcttttttattttatttattcattatttttttttgagatggagtattgctctgttgcccaggctggagtgcagtggcactatcttggctcactgcaacttctgtctcccaggttcaagcgattctcctgcctcagcctcttgagtagctgagattacaggcgtgtgccaccacacctggctaatttttgtatttttagtagagacaaggtttctctatgttggccaggctggtctcgaactcctgacctcaggtgatccaccagcctcaccctcccaacgtgctaggattacaagcataagccactgtgccaggccagcacaactttcttttttatttgagagggagtcttgctctgtcaccaggccggagtgcagtggcgcgatctcggctcactgcaacctccgcctcccgggttcaagcgattctcctgcctcagcctcccgtgtagctgggactacaggcagctaatttttgtatttttagtatggacggggtttcaccatgttagccaggatggtctcgatctcctgacctcgtgatccgcctgcctcggcctcccaaagtgccctcccagccatgatttccacttcatggaatagtctcgcacatattccagacctccctagaccctgagggatgccccatgtttccccatcaagccaaccctgggagatgcgcccagatcagtgtaaatcccattaattctccgctctaacccaagactgaagcataaatgtggagggctgcaccaggagactggccccggaggatgtagtggaaggaaaagctcagacagccagaggacaggctcacggggctcaggaggacagctttctgcccaggtcttgcattcttggggtccaggagcatgtagcagccacctgtgaagcaaaaggccagggaactggggtggatggaattgagggaagatggcagcagagatagggccctgaggaggctgtggacttgtctctggggatccccaacagcagcctagaatcaggcagcactgaggtggtcctatcccaactgactgaggtcttcaacttttcctagaaatgcttgggctgggtaaggacccggcgctgccatgggaagcggcggacaccttctccaaagcagcaactagaactttgacctttgggtgctaactctttgttgttgttgttttgtttttgtttttgagacagtctcactctgtcgcccagtctggagtgcagtggcgcaatcatggctctcatggttcactgcagactcaacctccccgggctcaggtgatcctcccgcctcagcctccttaagtagctgggactacaggtgtgcgccaccacgccctgctaatttttgcatttttttttgaaaagatagggtttcaccacattgcccaggctggtcttgaactcctaggttcaaatgatccacgcaccttggcttcccaaagtgctgggattacagacatgagccatcacatctggcctgggtgctaactcttaaggtccactagagtcatagcctgttccttttcttttttcctttttcttttttgagacaaggtatggttctgttgcccaggctaaagtgcagtggcacaggtctcaaactcctaggctcaagcaatccttttgccacagcctcctgagtagctgggactccaggtgcggacctggagtccgcccagctaatttttttttttttaagagatgggcggtctcacgatgttgcccaggctggtcttgaactcctggcctcaagcaatcctcccgccttggcctcccaaagtgctgggattacaggcttgagccactacacccgattgcctcttccttttctttacccgctggacataacctattcacgcaaactggccagagatacagcggctctgacacagaggagcaagaggcaaaccccctctcacccaacaccacctcggcccccagctcagacagccaatcagcgtggacctcgctaggtgacgcaactggtagcgaaaaagaaaatgtaagcggctgccactcgtggggagcgcgctcgcgtgcgtgctcacgcccgagtccaagggagtcttgcctggcgcgcgctcactcctgcggaaggtgggatcctgagcggcggcgaagaggctggaatggcgggaatgggcgggaggaaggagaagaaaggaaacaaccgggaaggaagagggaagggaaaggaaaggaagtgggaaaatgatgaaagagaaatcaaggacacgggctggcgcggtggctcacgcctgtactcccagcactttgggagaccgaggcgggcggatcacctgaggtcaggggttctagaccagcttggccaacatggcgaaatcccgtctctactaaaagtacaaaaattagccgggcgtggtggcgggcatctgtaatcccagctactcgggaggctgaggcaggagaatagcttaaacccgggaggcggaggttgcagtgagctgagatcgcgtcaccgcactccagcctgggcgacagagcgagactgtctcaaaaaacaaacaaacaacaacaacaaaaaaaaaaccaaggagacctatgagaaacagaagaggagaaatgggagaaaaagaagtgaaaggtgaagaaaataaagacacagaatctgggcctcacattagtcttctaaatcactgggggcttcacttcccggctcttggcattgcacagattagactcagtcccataccaaaatgcacgtctgaattaatctgcgtcaaggccaggtgcagaggctcatgcatgtaatcccagcattttgggagactgatgagtggatcacctgagatcaggagttcgagaccagggtgccaaacatggagaaaccccatctctaccaaaaaacaaaacaaaaacaaacaaacaaaaaaacacaaacacacacacacaaactagccgggtgtggtggcatgtgcctgtaatcccagctactcgggaggctgaggcacaagaattgcttgaacccaggaggtggaggttgcagtgagctgagattgtgccactgccctccagcctgggtgacacaacaagaccctgtctcaaaaaataaataaataaaataaaatgaattaatgtgtgcctttttttgcccccaggaggctgcccactggccactgggctatgagtgtcatttcatgtctcctagcacttagtgcaaaggcttggttcacagtagccattctataaacttggaataaatgttttaaatgtttctaacgtacttgcctctcacatccatcccaggagtggtcagacagttcaggtttgataactactctttttgcgggggaggggatgggatctggttttgtcacccaggctagaatgcagtgatgtgatcacagctcactgcagcatctacctcccaggcttgagtgattctcccacctctgcctcctgagtagctggcactacagctgcatgccaccacatccagctaatgtttaaatttttttgtagagatgggggtctcactatgttgcccagggtggtctcaaactcctgagctcaagggatcctcccacctcagcctcccaaagtgctgggattacaggcgtgagccacaacatctggttgaaaattactatttttttattatattttagaaactgaaagcagtgagaagtctgaagacagttgtggaataagatcagtgaccctgaatcctgcagacggagaggagggaggcaaaagcgggttgctcattgatgagatgtttgagccttagactacaaatcaggctaagaggtggacagcctttgggattaggagtcctaaatcctgtgctcaggttctagctcagtctcttattagccagattccttcggcttaagaacaagcctcttagctccgatgtcagcagcctaagagggagatttctcctttactgactcacagcattcctggtgcaagaatcaaatgccatctgtggaaaccaccaatataaatgtgtattgaaatgtaccaaggctacagccagcctgattgctcacgcctgtaaacccaacactttgggagccgaggtgggcggatcctctgagctcaggagtttgagaccagcctggtcgacctggtgaaactccatctctactaaaaatacaaaaaattagccaggtgtgttagcaggcgtctgtagtcccagctactcgggaggctgaggcaggagaatcgcttgaacccgggaggcggaggttgcagtgagccgagatcgcgccactgcactccagcctgagtgacagagtgagactccattgaaaaaaaagaaaagaaaagaaaagaaaagaaatgtacaaggtcagagccctaaggatctatcgcttgtaggtttctctagcagttcctagtaagacctgaagagggcactgtagcccacgagccggttagaacagagggaaaattctcttgggtcctcccctttggcgactcctcgcatcccagctccacacctaccgccccgctccctacacacctgtcaagtaccctccaacctccaaaaccttcccgtaatttttcctgctgcggattgcaaaacattctctcccgtttgcatatgtgcaggggaacacaggctgaattctctacagttgatgatacaagcagaaagaccggccctcacatatgggataacaaccaggatcggggtcccatacagttgtttttgtttgtttgtttttgttttgtttttgagacagagtttcgctcttgtcgcccaggctggagtccagtggcacgacctcggctcactgcaacctccgcctcccaggttcagtgattctcctgcctcagcctccagaatagctgggattacaggagcccaccaccacacccggctaattttttgtatttttagtagacatggggtttcaccacgttggccaggctggtctcaaacacctgacctcagatgatccacccacctcagcctcccaaagtgctgggattacaggcatgagccaccgtgcctggcctcccatacagttttatgacagcttttgctgtctgcacaggtccctcctcagtggtcctttcccgctgaagcattatttttgagaaggaatctgaagttgtggtcagagtaaaggggaaaatgagaagtagaaatcaagagtggaagtagagttcatttgttccatgtcccccaccccaggggagtaaaggagcaggtagggattaggtagaaggaataaaccaggcgcaatggctcacacctataatcccagcactttgggaggctaaggagggaggatcacttgaacccagagtttgagaccagcctgggcaacatagcaagaccccatctctaaaaaaaataagataaaaataatttaaaaattagcagggcatggcgatgcatgcctttagtcacatctactcatgaggctgggactagaggattgcttgagcccaggagtttgaggctgcagtgacccatgattgcaccactgcactccagcctgggcaacagagcaagacactgtcactaaaaacaaacaaacaaacaaaatcacaaatatataaatggaccacctagagtggcccttgtccccgagcagatgctgtttatagaggtggctccaaccgcacctgtgtgtaccgccccttttgtgaatttcagaggcgagtattcatggtgacagtccccaggtgagtaaaggaggcagctggacttagcgaggatgtgcattgaggcggaaggctgatgctgggagtgtggcatcagccgaagagaccaaagaagaggcagaaattaacaagggccagtgaccagggttggcagctgttaccagcccccaaaactcccaaaaggacccgtcctctggcctccctctccttgatgacaatctcagcgcactgcagccttgccctgggcagggttggcagctgccttactgcggtgaggccttgaatggagacaccttattgaccagcgtaggcagagcttgtggcctcaggcccggtagggtcgagaggtcagacaggctgtgtgagacagcacgtagggcccagccccctccacccctcgtttcccggacctggacctgctgcactgctgccaggagtgggacagagccaggggatttggaggttcccagaaaacagaaaagccaagagtcatattggtggtttcagttcttgtcaatgaggttgaagaatacacaaaacttggaccccatgagagccagaggccagcccccatcctgtcttcatggttcccaccaccccggtgtcaagggggctcttgccaccaagggagtgcccatgcccgtgagacctggagaagtcacagcttgccacctaagttctccaggtcatcctgtccctgatggtaggtgcgaaaacaggtaaatcgcctccaaagcgtgtcctggcatcaaattttgcagggtgccgagtgagctcaggcgtcttcccagcatggctctgtccctgagtttaaagctgctctctgaatgcttcctgctctgggccctcaagttggccctgtgacatccttagatctcagagttgctctctggacagttcctctggcccctgagatgtcattgctggcactggagtgtccatgggacaggctggcgctgagctgagagcccctcgacggggttcaggagtggcgggggagggtgtggcacaagcaatgttggtgagggaggtggtggatatgcccaggtggacacacctggtcatctgtcccctgtcctgcaggcctcccctgtgtacagcttcagctttccccggaggaaattggagtagactcggaagagtttgcggaaagtgtcagcagtgattgttcggagtggagcagctgaggccgcatctggaggggagatggcttccttctgccaaggagaaaacaggaggtcgctgcagtgccacagaaagggaaggaatacggacagttcctgtactccttagcaagacccttctccccttcttacagaaagggcaagcagaagtgtccgctcctactcacctgggctcccagagcccgaagcagagtggtgaggctgcgaaggccactgacggctttatccacatgcagctgcaggggctcccacggctgggaagagttgaccaacagggcctggccccgcaggacagcttccgacagcagggccaggccctgccagacttctacggcctgctgcccgacctacagggagtggactctgggagtcagctgacccatgtcaccctctccctcctgcccctcagcagccccaagcaccaagctgagcaaacagaaggtatgcaataagacttgttgaatgaatgaatgaatgaatgagtgagtgagtgagtgaatgaataatgaatgtattccatacagccctcattatttttcttttttcttttcttttttgagacagggcctcactctgtcactgaggctggagtgcagtggtgtgatcacagctcactgcagcctcaaattcctgggctcaagcgatcctcccgcctcagccttccaaatatctgggactaccaccatgcaccacttcacctgactaatttttttaaatgtttgtagagatgggggatctcactatgctgcctaggttggtctgaaactccagggctcaagcaattctcccatctcggccatctcagcctgggattatagacgtgagcctctgcgcccaggcagcctcatctctgctgctccattttacctttccctcgatcattctccctttcatccaaaatcaggctcgcaaatgagattctccaaaagaaaggaaaaaaaaaaaaaaaggaactcacctccatcctcttccaggcatagaaattaactttggtgtctgggacagtgatattctcattcaagctgcagtgttcagcacagcccgtctgaaatgcacacagcccggggagtcaagggtccctgaaggctctggccctggcccacaggccgtaggatctgctggctttgctccttgcctagtttccaggtatggtttggggccaccagacttattcttatgtaggggggcagtgtctagcttcccaactccaccccaaaccaagtgccaggttcctggatctgggaggagttccctgaagccctgagcgtgagttctgtggaatgtgctggggaaggggtctcaccgtgatattctcggcctccttggcctccaagaggtacctctccaggactcggctgtcacagatgaggcgtggtggggcgcccaggactgggaggcccagagggagcgacagcagggacaggagaagccacagccaggcaggacattctagaacagatagccaggctgagagtcaggcggggagggagaagggtggctgtggaaggacagcttccttcatccccacgtctctgccccagctcgtccttcctgtccccaaccatgcaagcactcaggtgctgcctccctggccttcattcaatcctgctgccgtgtgcacaccccacccccagctaccagcatccacttctccggccaaacttcaatcctggtgtgacagaggcttcccctctggcagataagtggtggctccagcgcccaggttatcagcttatcagcttcctctccactggcacagcagaacccccaaaccttcttcccctcaacccccaaactgtgtccccttcacaggtcaggtttttgccatccccaaggactcccccaagtccccgctggcacgtggaggctgccccacccccctcccccttccggggtccttgacaagtcgccggtccttgaacccagccacctcctggccaatagccggggcgctaaatccccgctcaaacagggacccgggcgggcgggagcgcccagcccgcgagtactcaccgtgcacccccatctccgcgcctggccggggtccctcagcgacctggggcgcgccgggtgaccacaccgggggccctcatcccgggaagctcggcggtgcagggccagccccacgggcctggaggagagggcggctgtccagggggcgcggtgtcggagcagagcgggcgcggtggccccggtccggctccgggaggacagcgcggtgcggcgcagcgcagcgagcggccggggtggcccagggactctgcggctctggccgggggtcggggctgttatctgcatgtgtgcgtgcgcgggtgggggtgggggagaggctgtgtgcgtgaggggtcgccaggggtaggggccacccggggtcagagcaggggcaggacgcctgggttgaggctcgccggggcgtgagcggggctgctgcagacgtgcgtgtgggtcatgggggctgctcccgggccctgggtcgcgggaggggagtgcagccggttgcgcacccttgggactggcggagcgtgctatctgggaaaggctgggctcccggacacctcccctggggggcatcccggtcttgggcggagactcagagatgcctgggttgctgagttccgcaaagtagctgggtctggaagcccagaagctttagggaggggcaaatgagtggtctcccttcccacaatcccaggacatgttctagaaacaatgttgaccatgttgaggaatttgatgggggcaaatagggcaagaaatttggggttcttcctccccacctcactcctcaccgtctagtactctgcaaacccagacacttaactttttttttttttctggagatgtagcctccctatgttgcccaggcagtgcagtggtgccatctcccgttcactacaacctctgcctcctgggttcaagcaattctcctgcttcagcctctggagcagctgggactacaggcacacctttacacccggctatgttttgtatttttagtagagatggggtgttgccatattgcccataccggtcttgaactcctgacctcaggtgatccaccctcctcggcctctcaaagtgctgggattgcaggcgtgagccaccgcacccagcccccaccccagacacttaacttttagtgcacagagcacacagtccattgtgcaggacacacatgcaccttgacatctgtttatttgacctgtggtgtaggttagctaggctgcattgctgagttcttaagaacactgaaatacagctaacaccaagagtgatgggggctgggatttacagctaaggttttatggcttctggaaaccctgagccagatgagtgagattcccagagcaggagaccaagactagctggtctctcacaccttagaaagtggcctcgtccttgagccctcaatgtcctcatctgtcaaatgggtgtggtgaaactaccagcctatcccattcaggtttcataaaagacaggaaaggtccaggcgccgcagctgacacctataatcccagcactttgggagaccaaggcaggaagatcctttgagcccaggagttcgagaccagcccggacaacatggcaagaccttgtctctaaaataaataaataaataaaaaataattagtcaggtgtggtggctcacgcctatagtcccaaatatgcaggaggctaaggcaggaggatcacctgagcccaggagttcgaggccgtagtgagccatgatcgtgccactgcactgcagcctgggcgacagagtgagagcctgtctcaaaaacaaaaaaagactggaatgtgtagatctgagctgtaagagttagccgggagaaatcaagaaagatttgagggaggaggtgacaatgacctcagccttgaaggggggtaggacatcaatgggaagaggtatgaggtgggtgggggattgtcgattcagcaaagtgaatggagagtcaggtgagtattgcgggatctggccagcagcccgcaatgcaacagggctctctctttgttcccaggcggatcagcaggttgagaaataatagacacacacaagatagtgaaagctggtccaggggggtcaccgccttctggtcccgtggtgtcaacaatgcaccagatgtaccatcatttattattaagtttagtgagggcgggggtaggttagtgagggatttagggtcatttgattatgaggtgagatggtcacatggggatgaattaattctttaacataacatttatatgtagaagtacagtacctttgtatgcagaagtacagtatacagagataagaatttacaatatagtgtgtgcatcagtaatttctaacagagccttaaaacagaaacacaatctttccataacctatgattagcaagatactaatcagcagtaacaattgcaacaaaagctggttacagacaatccatggaaacaggacatgaagctagacaaccagttagaccagaaattctcagaagggagtatgccttaaccctaaagaggcctagaagagccatggcaagatgagggcgtttatagccctatcttatccatatggacaggtgcccccccgccatgcgtccgtttataggctctccacaagggtcgcattccattcccagagctatgaacatctgcttttctgggatagaaatcttggtgatgtgaaacctccctgactgcaggtccgttcataggctctccgcaggcggaagcacatcacaggctgttggctcattctggcagtccaacctggcattgtttgtacacaatcctgcatgcaattttgtatttacaataatcaggagcatttcatcttttattccgtagcagtagtttcagggggtctccctacaggtgagcagaagggaagatggagaagagagaggtggaagatgaggccagggtgctgcttagggaggagtcaggctgtctatggccttgaatgcctctctgaagaatttggattttgtttggaaagagtgggaaacattcactcattcattcaaaagatatttatggatttcctacctacccctggccaaggacctggggatagagcagtgaatgatacagccaggaatgcctgccctggtggagctgacgttctagtggggttgccaatgatgaacacaaaaatgggtacaagacagaggattttggctgggtgaggtggctcatgcctgtaatcccagcacttcgggaggccaaggcaagaggatcacttgagcccaggagttggcttgaccagcctgggcaacatggtgaaaccccatctttacaaaaaaatacaaaaattagctgggcatgatggcatgtgcctatagtcccagctacttgggaggctgaggtgggaggatcacttgagcccaggaagttgaggctgcagtgagctgtggttttgctactgcactccaccctgggcaacagaatgagaccctgtctcaaaaaaaaaaaaaaaaagaaagaaaagaaaagaaaagatagaggatttcaaatagccagaactaaggagaaaaggcacaggcagggttatctaaaataaggtagtcagagacactaggctgagaaactgacttgaataaagacctgttgggggtgagggaccatgagggtgtggtgaggtgaagagcttgatgggagggggatttgggccaagtgtagtggctcacacctgtaatcccaacattttgggaggctgaggcaggaggattgcttgaggccaggagtttgagaccagcctgggcaacatagtgagatcccatgtctataatttttatttttgtttagctagctgggcatggtggtgcacatctgtagtcccagctactcaggaggctgaggtcagaggatctcttgagcccgggaggttgaggctgcagtgagctatgatcacgccactgcactctagactgggcaacaaagggagaccctgtctcaaaaaaaaaaaagaaaaaatgagtggtttggcaagatggttgggtgggggtcaggagacagaggctggtatgcttctggctggcctaattccctcagaccctgctcccctgcatcctctgctcaccttgagccttcccaaaactgctgtccaggctcccccagccccactcggctcctggttctgatcccttccagagtcctgggacgtgcaccatcacactcacatccacacatggccgcacgtgcgttctgtcttggctgctccccttccccagcctctgctctcccaggaccctgactcctgcgtcaatgccctgacctaaccatggagagggggccggagacagatgggtggggtggacacagctggaggaggaggagccttttgggctgtgggacctgcccctcccctcacacagcttctcgggggtccctgcatccttgtctgcagttgaagaggagtgagagatgggccaggggcaccagcctctaaatgctgtagcctgctggataggagtagtgactgccttgtcccctggggcttctggagagagagctgtgattgcagcttgggagggaggagaggatcttggtccaccccatacccaatccgaagccatagtaattctctttttgagatggagtctcactctattgcccaggctggagtgcagtggtgccattatctcagctcactgcaacctccacctcccgggttcaagcaattctcctgcctcagcctcccgagtagctggaattacaggcatgtgccaccacgcccggtaatttttgtattttcagtagagatggggtttcgccatgttggccaggctggtctcgaactcccaacctcaagtgatccgcccgcctcggcctcccaaagtgctgggattacaggcgtgagccaccacaaccggcttgaagccatagtaattctgctaagaggggagaggctggtttggagcccagagcctcttggatactgagcaatgcagggtccattcatctgtccttgaggaacaggaagaaaacaagaagctccatggggctccccgaccaatgcccaccatccccctgcccagtgccccccacccccgtcatctgcctgctcttcatcttctagcagatgctgacccacaggcccaggaccactgcagagcatctcctcattgacccctccagttaatccctaaccctgctgctcaattaactttcccactgaacagcctcatttgtgctaattccctgagcaggaacctgccacggcttcctattgcctcagaactgagaccctccaaggtctaccattcacttcatgttccaggctgttctcccgctttgctcactcccactccctccaccacaggagatggtttgtgccttcctgcccttggctcatcctggattaccctcccacaccatctcctcgttttctttaaagcccaaatctgtgcatcgcctcctccatgaagcctttcttgatctcccagcaggaaatcgtctccttccctggcactgccgtcatttatgtacatgtcttaggcatctcactggcaggaccgccatggacagccgtcaaagctgagcactgcccaactcccaggggcatccatagagactctgaagggaatggtaccgtctggagtcacgtagtgcaggtgccctagtcatcgaagagagcgaagggctgcgtatggaagttctgatgcatttttctgtctaccaagcgtccagcatgtcccttttctgtggtaaccacccaagtgtggattgcattatgtggtccctccactacatgctcagagaagaacccaacctagagggggcactgagccatcccccggtcaacccagctccctgggatcctggggcgtgtgaagcttccatgcacttcctgagcaggcagccactgaggcagggtttgaaaagggccagttgtgacaggaggatggcgggcgtggaggcaggctctgctccacggattcctcctggcagtggattcagattggaaatccaagcagaagcaaatttacagccccccgagctgtcccagacccccaggcagcacggagccccagctgcctggagtcggacttgggaaggggggcctcctggcttctctttccctcctcatttccaagcagtggcttctcagctcagctcgagttcagccagaggcccagaagaccttctgtgctgggaggggaggtggctggggaccttgttgggtggcctttggggaactgtgaaggaagcaagaatgctggagggccaggcacggtagctcacgcctggaatcccagcactttaggaggctaaggagggaggatcccttgagcccaggagtttgagaccagtctgggcaacatagggagaccctgtctctacagaaaatttgttaggcatgctggcacatgcctgtagtcccagctactcgggaggctgaggttggaggattgcttgagcccaggagttggaagctgcagttagctatgatcgcaccactgcactccagcctgggcgaaagaacaacaccctttcttaaaaaaaaaaaagacgctgaagaagggattcctgctggagaaccaaaggaaaatcctttgccaaagtcctcaaaggaaaatcctttaccgcacctggcctaccaaagttttatgaagcctattcctgactgatcctttgttctctaagtaaggtgatcaaggagttagttatcaaactgatgaggggccgggtgaggtggctcacacctataatttcagcactttggaaagctaaggtgatcatttgaggccaggagttcaagaccagccggggcaacacagtgagaccctggctctataaaaaataaagaagttattttttatagagttatattttttatataaaaaataaagaagttagccaggcatggcggcacatgcctggtgtcacagctacttgggaggctgaggaaggatgatcatttgaacctaggaggtcgaggttgcagtgagctatgatcatgccactgcactagagcctggggaactgagcaagacccatctctaaataagtaaaaataaaactgatgagatacctcaagaagttattttattgcccgttccactaactaataaatatctgatgaatgaatgggtcagtggatacatggatgatgcagaggagaatggcttgctgtctcctctataacaagcctctgctcccttaagaaaaggcaaccgtcttgtcacttgaagaatgcaaacagagggtggactttcgccttcacaggacctgctagattccttccaactcagtctattagtcttgtttgctattagacaaatatacttccctgaaaagggaaaaattatttgctggttgatgaactaagacacgagcagaagagctcacttaggccgggcacggtggctcacgcctgtaatcccagcactttgggggctgagacgggcggatcacgaggtcaggagttcaagaccagcctggccaatatggtgaaaccccatctctgctaaaaatacaaaaattagctgggcatggtggcgcacacctatagtcccagctactcaggaggctgaggcagaagaatcacttgaactcgagaggcggaggttgcggtgagccaagattgtgccactggactccagcctgggcgacagagccagactctgtctcaaaaaaaaaaaaaaagcaacttttatgatgaacttttgctcattacaaaaacaatacgtgaccaaaattagaaaacagcgctaaactcaaacacataaactgaaaaacacccataatgtcattagggtcttgggaccttaagtggccattttcacaggcttccttctggtaggatgacctttgcctcatcccaaatctctgtgcaattggacatctgtttcctaaggaactacaattgacacgttctcgtccaacctctctagtggtttgagggtttgtgaaacaccatttttccctcaactcctgaccaagcaccagaaactcacctgggacaaagtgctgggcttctctagcaggatcatcagcctgatcaaaccacttaatatttcaaggtcccgtccccttccctgctatgcgagccacaactgagtctggctcagttgttagtttctactaataactcagacttgagaattaaacgcacacaaaattgccttccttcacttctccccattcctattaagaagcctaaaaccatttcttagcaaaatggcttcatactaaacaatactagctcttggccgggcgcagtggctcacgcctgtaatctcagaactttgggaggctgaggcaggcggatcacctgaggtcacgagttcgagaccagcctggcaaacacggagaaaccctgcctctactaaaaatacaaaaagtagccgggcttggtggaacgtgcctgtaatcccagctactcaggaggctgaggcaggagaatcagttgaatccaggaggcggaggttgcagtgagctgagatcacgccattgcattccagcctgggcaacaagagcacaactccgtctcaaaacaaacagataaacaaacaaagaaaacaatagtagctctttttttttttttttgcctgtagtcctaactacctgggaggctgaggcaggattgcttgagcctagaagtttgaggttgcagtgagctatgattgtaccattgcactccagcctaggctacagagtgagaccctgtctctaaaataaataaataaataaataaaatgtaaaaaggagggcagggcattgcatttgcacacaccttctgcctccatctcctcacccctctcccgtttttcaagcttttttctttttgagactgagtctccctctgtcacccaggctggagtgcaatggcacaatcttggtgcactgcaacctccacctcccgggttcaagcagttctcctgcctcagcctcctgagtagctgggattacaggcgcctgccaccacgcccagctaattttgtattttcagtagagacggggtttcaccatgttggccaggctggtcttgaactcctaacctcaggtgatctgcctgcctgggcctcccaaagtgctgggattacaaacagacgtggctcactgtttctggcctcccaagctttgacggaagtcactttggagagccagtagagggaggagaacagaggctggagctagcctccctacggtcgggcctgcaggcagggttccctgccccacctgccctgcatggactctagtagatgcaggagcctggttcacgcccccccacacacaaaagagtgagccccaggccccactcttccttcagtggcaatgtggaggtctgtttctgcagaactgccactgagggaagccccactggcaagcagtgagaaaacatggagtagaaacaacaaacaaataggctgcaggagggaactgccaaaacaaaccagatgggaaaggctgcctgccaccacctctgctgggctcaggcccggagcacatacgtgcagggagacacagctccatccagcttcctgccggctccccgctcggctattggggggctcccgggcaaggaagccttgcagtcaggctgatggaaaggatgtggcctgatagaaatgtccgcagccagccaggtacggtggctcacgcctgttatcccagcactttgggaggccgtagggggcagatcacgaggtcaggagatcgagaccatcctggccaacatggtgaaaccccgtctttactaaaaatacaaaaattagctgggtgtggtggtgcgcacctgtaatcccagctactcagctacttgggaggctgaggcaggagaatcgcttgaaccagggagtcggaggttgcagtgagccaagatcacgccactgcactccagcctggcgatagagactctgtctcaaaaaaaaaaaaaaaaaaaagaaatgtctgcagccttgtctcccagtacctcttgctttctagccacctcgagtccctccagtcccagaacgtagctgcctattcattaatcccctccctgcccactgttttttgagacaggttcttgctgtttcacaagccctcagtcacggcttactgcagcctcaacctcttgggctcaagcaatcctcccacctcagcctcctgagtagctggaccacaggtgcacaccgccaagcccagttaatttttaaatttttgatagagacaaagtcttactctattgcccaggctggtctcaaactcctgagctctagcaattttctctcttcggccttccaaagtgctgggattacaggcgtgagccaccgcgcctggctttttctttttttaagaagctgtgacccacaaatgggtcacaacccgctttgataaacattgctttagttgactttagtttgataaatatgaaaaatcaggtcatcccacaaatatccaaacagaaagtattacctgtgtgcccagtaattatttggagtgaggggttccttcgccactggagcagcccagtgagaagggtctgaaggccgggcgcagtggctcatgcctgtaatcccagcactttgggtggccaaggcaggcagaacgcttcaggtcagaagtttgagaccagcctggctgacatggtgaaaccccttctctactaaaaatacaaaaaattgcagggcatggtgatggatgcctatagtcccggctactcaggaggctgaggcagaagaatcccttgaacccaggaggcagaggttgcagtgagctgagatcgcaccactgcactccagcctggatgacagagtgaagctgtctccaaaaaaaaaaaaaaaaaaaaaaagggtctgaagggctctgcacctgaaagcccgggtatcatctaggtaggccctgcaggtccaggaattaaatgaagccacttgtcagtccctaccatggagcctgacactaagaaggtcctgaagtcttagtttgcttccttttttttttttttttttttttgagatacggtcttgctgtgtcagcaaggctggaggagtgtagtgcggtgatcacagctcactgcagccttgaactcctgggctcaagcgatcctcctgcctcagctaacgaggtagctgggattataggtgcaaaccactacacccatctagttttcaaaaattttttgcatttgggaggccaaggcgggcagatcacttgaggtcaggagttcgagaacagcctggccaacatggtgtttccactaaaaaaatacaaaaataattagctgggcgtggtggcactcacctgtaattccagctactggggaggatgaagcaggagaatcacttgaacccaggagccgaacgttgcagtgagccaagatggcaccactgtactccagcctgggtgacagagcaagacttcatctcagaaaaaaaaaaaaagtggtttttttgcatagactaggtctcagtatgtcatctagattggagtgcaggtggcatgatcataactcactgcaccttcaaactcccaggctcaagcactctttccgcctcagcctccgccagtagctcagactacaggctggagccactgcacccaactagaagacgaaaatctttaaaacaaacattggggctgggcacggtggctcacgcctgtaatcctagcactttgggaggccgagatgggtggatcacaaggtcaggagatcgagaacatccctgctaacacgctgaaaccctgtctctactaaaaatacaaaaaaattagccagggtgtggtggcaggcacctgtagtcccagctactcaggaggctgaggcaggagaatggcgtgaactcaggaggtggagcttgcagtgagccaagattgcaccactgcactccagcctgggtgacagagtgagactctgtctcaaaaaacaaacaaacaaacaaacattgggatgactgggtttctgcactgtactgttttgttacactgctcatagcataatctatgctctctatagaggcaagaaacacttgggttcccctttcacctagatacctgtagcgtttcctaccatccctattcaggcacacacagaatttacacaggaaagaatcagtggcagtgggatggcaggacactagtgcaacaggattttttatttatatggcaatagttacagaccgcatacacacactcaggaaggcccactaactgggcccaccaagagacaattacccccaccctcaatgcagagtcctttgggcttccagggaacaggccttttcttacatggctctggtccgaggtccagtactcagcatgcgaagagccatatcacggaggggataagtggaggagtgtcttttcaattacttgggtgtgaccctgaagactcggatgtggatggctgagttgttgcggatccgagtcagtggctcccgtgtgtcggtctctggctccagctcatcaacaagctccacggtggaggtattggcagccacctgcaaggacccgaagctgcccgcctgcagctgcagcgcgatgttgatggcgcggttgatggccaggcccaagccgtgaatgtagatctcagagcacgcgttctgaccccgggcccctccgtccagcagcttctggcagcgggccagctgggccttaaagtccgtcttcatgttgacataaatgtcattgggtctccggggcaggcggctgggaagccttttcctaagggtgtattccactggatccagttcagcctccacagcaccgcggggctctcggttttctgccatgctgtgtgccctggcgtgggaaagggacgcgatcagagggctcagagggacctcgaagcctttcctaccccttttcctgtacaaagggtgcacctggccgggcagtggctcacgcctgtaacctcagcactttggaaggtcgaggcgggaggatcactggagcccgggtgtttgagatcagcctgggcaacatagcaagaccctgtcttaagaaaaatttttttaattacccgggccgaggggggaggatcgcttgagatcgggagttcgaggctacagtgagccgtgatcgcgcccgccactgcactctagcttgggaaacagagcaagcctctgtctcaaacaaaaacaaaaacaaaaataaagggtgcacccgagaagggacacactcgatgtccctgtttccttccggcccctcgtcctctcccactcacctccagatcccgcgtctccccaccccccgttccgattcattcatcgcgtcgccctcaaactcgcgcccctccgccgcccctcccgtgcttactctcttcgttccacagggccctccaggcgcgcgaggcccgctccccgccaggccactcaagggttcgccggccagcccaagtaaccgcgaccccaggtcccagagaaagaaggatgtgggtgcaagcagccagccagctcgtgggcgccctgcccgcgccggggtcctgaacgggctgcggagtgcgcacgcgcgcccgtaccccgcgagctatgaatcgccttcccggcttccgttcgccccgccccttccctgagcgcaagggcgactgcgcgaggcgtttgagaaacgcgagacttccgggcgtgacgggatctacacgtgtacgcctcgggaactggcgggcggccgagggcgggaaccaggtccgagccggggaggagctagaaagggccgggtcggcgtctctaggcctggcggagttcccggccggcggaggggtagcgtagggaagacacctggaggggaggctgttctaggggcagggttcttccccatgggagcagggaaggggccgagttcaggagaccgcggtcgccaaggggcctgaactccgcgtccgtcgcagctcctctggtcagaagaggcctgggcagggctggcagaactgaccccctagtctaatgtccctgtggcccgaggaccgagggggaactgagggacatagccggtccccacctcgctggaggacagcgtcccgggactcccctgcagttcacgggaagctgtccgcctcctgtctgtgctggggacccacgctgtgagccctaagcccaggcttcacgggtccccaaggaacgctgacccacccacgcccctcaaccatctcccaccagctctgcagcaggcgaccccggatcagggacttgccgccccctggcgggcaaggtggggaggacgcgcgccggattcgtggctctcaggccagtggagtgggggctctgcccagatgggcatagtttctgcagagttcccttctgaaatgagtaggacctgctgcactggggaccttgaactactctgtttgcccagcattcaaatggggatgttcacaacagctccaccatattgcacatgcattttattgaatggctagctgtatagcttctgtctacaaacttgcatgcatttatttttgagacagggtctctgtggcccaggctggactgcagtggtgtgatctcagctcactacaacctctgcctaccgggttcaaacgattcttgtgcctcagcctcttgagtagctggaattacaggcgcacgccaccgcacccggccagtttatttcatttttttgagacagggccttactctgtcacccaggctggagtgcagtggcgttaacacggctcactgcagccctgaactcctgggctcaagcaattctcccgccccagccacctgaacagcttggactacgggcatgcactagcatataaagttgtattttagaagttaatccttggtattgaaattttcgatatgttggccgggcgcggtggctcacgcctgtaatcccagcactttgggaggctgagacgagcggatcacgaggtcaggagatcgagaccatcctggctaacacggtgaaaccccgcctctactaaaaatacaaaaaattagccgggcatggtggcaggcgcctgtagtcccagctactcgggaggctgaggcaggagaatggcgtgaacccacgaggcggagcttgcagagagccaagatcgcgccactgcactccagcctgggggacagagccagactccatctcaaaaaaaaaaaaaaagaaattttcgaaatgttcacataattgttgggagcgattcattcctccacacatgatgtgcctcctctctcccatatcctgttaattgtagcagttgcgggcatttgcgatgacaggatatacggatggtgccacacttgaccttgagtactggaatgctctgaggtcaagcatatgccacagtgcttgagactgtgggcatcacctgtagtgtctttttctccaactcctgtctccttggtcctagggaggtctggctctaattgctagtttccagagattcattcctttttttttttttgagacggagtctcgcttcgttgcccaggctggagtgcagaggcacgatctcagcttaccgcaacctctgcctctgaggttaaagcgattctcctgcctcagcctcctgagtagctgggattacaggtgtgcaccaccacgcccggctaatttttgtattttcagtagagatggggtttcaccatgttggccaggctggtctcaaactcctgatctcaagtgatcctcctaccttggcctcctaaagtgctgggatgacaggcttgagctattgtgcccagcctcatttttaagctttggatcacaggaagaagcaacaagaaactatacccaactcaaaacattttaggagaatcataaaattggtccatttagaaggtagagttgggtccattaagttattgttgcaagaggttgcatattcaatgatcagttatataaaataatgttctcgttagtatgcttttcataatctgttttatcatacatgtaacattcaaactgacaaatacactgacttgggaataaaggatatgaaaacactggtttaaaaaaaatggggatgctaattcctttcttgcagttgagttgtgaaacccaaggtaatgttgtaaactgtaaacctacacaggtgagttggcatatttatgtctcccaggcccttctcagttccctaggatggagtctgaccccatttgatcaaaggttgaagagagttcagattctagagaaatttgctcccagcaccccatttcaatcccatagttctttcctttacttcagattctttcattaaccacaagattgggattgaattggaagatccaacatattatagtaaagataccaattctcttcaaattaatctataggggccaagcatggtggctcacgcctttaatcccagcactttggaggccaaggtgggcagatcacttgaggtcgggatttcaagaccagcctggccaacatggtgaaaccccgtctctgctaaaaatacaaaattagccgggtgtggtggcacgtgcctggtactaatcccagctactcaggagactgaggcaggagaataggtggaacccaggaggcagaggttgcagtgagctaagatcacaccactgcattccagcctaggcaacagagcgaactccgtctcaaacaacaacaacaaaaacccaaattgatctataggcgtaatgcaattcctacaaaaatcccagcagtttttttgtattaaatatagatgtttattctaaactttatatggaaaggcaaaagaagtagaatagttaaaaccactttgaaaaagttgttggaatcacactacctgattttaagacttactatataaataaagttatcaagaaagtatggtttccccagtgggatagacacaaaaatcaataagatggaattgagagctcagaaatagattcacacaagtgcagccaactatctctctttaaaaaataattttttgtttgtttataagacagtgtctcactttgtcacccaggcttggagtgcagtggcacaatcttggctcactgcagcctcaacctcatgggctcaagtcatcttcccgcctcagcctcccaagtagttgggactatcagcacgcgccaccatacccggctaattttgttttattttttgtagagacgaggtcttactacgttgaccaggctgatctcgaactcctagactcaagcaatcctcctgcctcagctccctcaaagtgctgagattacaggcgtgagccactgccaaacaacttgtttttgacaaaggtataaaagcgtttcaatggggaaaggatgatcctttcaagtggtggtgaaacaattggacaaataggcaaagaaatgagcctcagccctatgcaaaaagttaatacaaaatggatagtagatttaggaaaaaacttcatggtgtagggtcaggtgaagagttttgtttttttgtttgtttgtttttttgagatggagtctcactctgtcgcccaagctggagtgcagtggcgcgatctcggctcacttcaacctctgcctcccgggtttaagagattctcctgccttagcctcctgagtagctgggattacaggcacatgccaccatgcccagctaaaggcgaagagttcttagacatgactccaaaagcacaatccataaaagaaaaacaattgggctgggcacggtggcttatgcctgtaatcccagcactttgggaagctgaggtgggtggatcacctgaggttaggagttcaagaccagcctggccaacatggtgaaaccccgtctctactaaaaatacaaaaaattagccgggcgtggtggcatgcgcctgttatcccagctactcaggaggctgaggcaggagaatcacttgaatccgggaggcggaggttgcagtgagctgagattgcgccattgcactccagcttgggcaccaagagtaaaactccgtctcaaaaaaaaaaaatgataaattggacttcatcaaaatgtttaaacatttgctgtgtgaaagatcacattaataagatgaaaagagtagccacagactggaagaaaatatttgcaaatcatatatccaacaaaggacttgtttccagcatatataaagcactctctaagctcgagaggtagaaaccgaacaacccaattagaaaatgggcaaatccagcctgggcaacatggtgagatcctgtctctacaaaaaatttaaaaattagccaggcctggtggtctgtgcctacagtcctagctactcaggaggctggggtaggaggattgcttgagcccaggaggacaacaccgcaatgaactgtgatcataccactgcactccagcctgggcgacaaagtgagggtctgagaaagaaagagagaggaaggaaaggaagaaaaagggaaggaaggaaggaagagaggagagaaagagagaaagaaaaaacagaaaaaaggaaggaaggagggagggaaggaaggaagcaagcaagcaagcaagcggtggctcttgcctgtaatcccagcactttgggaagctgaggtgggtggatcacctgaagttgggagtttgagaccagcctggccaacacggtgaaaccccgtctccactaaaaatacaaaaattagctgggcgtggtggcgggcgcctgttaatcccatctactcgggaagctgagacttgaaaatcgcttaaacttggaaggcaaaggttgcagtgagccaggatcacactattgtactccagcctgggcgacagagcaagactgtctcaaaaaaaaaaaaaaaaaaaaaaaaagaaaatgggcaaatcttaaacggacatttcagtgaaagaaagtataaaaatggtaaataagcacatcataagatgttcaatatcactagccattaaggaaatacacatgaaaaccatgacgagctaccaataacacgtattgaaatggctgaaatacaaaatacgaacaataccaagtgtggatgagaatgcagggaaactggatctctcatacatacactgcttgtggaagtggaaaatcgtacagccatcctagaaaacagtttggcagttccttctaaaattaaacgtacacttaccaaatgacccagcaagaacatttcttggcatttaaaaatctgtacatgaacatccatagcatttttttttttctttttttttttttgagatggagtcttaatctgtcactcaggctggagtgcactggtgcaatctcagctcactgcaactgctgcctcccagatttaagcaattctcctgcctcagcctcccgagtagctgggattacacacgcatgccaccacgctcagctacatttttttgtatttttagtagagacggggtttcactatcttggccaggctggtcttgaacttctgacctcgtgatccacctgcctcagcctcccaaagtgctaggattacaggcgtgagccaccgtgcccagcccgtccatagcatttttatttgtaatagcccaacgggaagcaacccagatggctttcttttcatattaatttattatgtagagatgggggtctccctatgttgcccaggctggtcttgacctcctgtacttaagcaatcctcctgcctcaccctcccaaagcgctgggattgcaggtatgagccaccgacctccggataacttttgatcagtgcatggtaaacaatctatggcacatccatcccatggaatattacacagctataagggatggatcaaggtgacctgttaggctgcgaacataccagttatattacataatactgtgctgaactgctcatattgtagtgtgcaagacaaggtgagcatgatcgcatgacctgtgctgaggggacatgaataggattgggtggatccccaaggagagacagccaatatcatcttgagggatccaaggttttccaagaggaagtaatgattaggcagagacaggaatgtttagcagtaggtcctatatcctgttcccttttttttgagacagggtctggctctgccacccaggctggagtgcagtggcttgatctccacttactgcaacctccgcctccctggcttaagcaatcctcccacctcagcctcctgagtagctgggactacatgtgtgcactgccacgcccggataatttttgtattttttgtagagatggggttttgtcatgttgtgcaggctgctcttgaactcctgggctcaagcgatcctcccgcctcagcctttcccaaagtgctgggattacagatgtgagccactgtgcccgacccatatcctgttccaatagggaggtctgagccctgggaggatggggagaagaggaggaaccagtaaaatctgagaaatagcagctagtgaggtgggaggaaaaccaacagaatatagcatccagaaagccaggtgaagatggtatttctggagggagtgaccgtctatgtcactggctggtaacaggtcatgtaagataatggaccagtagatttcacaatgtggaagtcattggtgacttacaacgcagttacgtttggttgagcaaagaacttagcgcagggccaaaagtaattctgaatgcagtaaattaattttaacgcccattatgtctgataattaacaataagcacagtttatgagctatcactccattactcaggtcatgtgtctttccatggtacctaaaatatgttttgcaaactctgatatccacataaatatcaaggctcgcaatttaggtggatgaagacaagctctgtaataaaccgatttgacaataaactgatctgacaacaagacagtccttatctccttgcatgcatttcttttttttttgagacggggtctcgccctgtctctcaggctggagtgcagtggcccaatctcagctcactgcaacctccacctccaaggttcaagtgattctcctgcctcagcctcccgagtagctgggattacaggcgcctgccaccacgcaggctaatttttgtatttttagtagagacgggggtttcaccatgttggccaggctggtcttgaactcctgagctcatgatccacctgcctcggtctcccaaagtgctgggattacaggcgtgagccaccgcatccagccctctccttacatttcatcaaaggaaaacactgaagaggaatctgccattaaaaaaaaaaaagtgggggcggggcgggcgtggtggctcatgcctgtaattccagcactttaagaggccaaggcaggtggatcacgaggtcaggggatcgagaccatcctggctaacacggtgaaaccccgtctctactagaaatacaaaaaattggccaggcgtggtggtgggtgcctgtagtcccagctactcgggaggctgaggcagaagaatggcatgaacccgggaggcggagcttgcagtgagccaagatcgcgccactgcactacagcctgggcatcagagggagactccgtttcaaagaaaagaaagaaagaaaaagggccaggaacggtggttcacgcctgtaatctcagcactttggaaggctgaggcaggcagatcacctgaggtcaggagtttgagatcagcctgaccaacatggcaaaacccatctctactaaaaatacaagacgcttgaacccggaggagcggaggttgcaccactgcactccagcctgagcaacacaacaagactctgtctcaaaaaaaaaaaaaaaagaaaagaaaaagaaaagaaaggcagaggctggctgtttggtctgcgtgagaccactctttcatctccattaaccttccaaacaaatctctttgtttagttaaaaagtttgcaaatttagaacacagaccaagacattttacagagcagcacctgaacaaacaaaaacacattagctccaaatgatttctttattttgagatggagtttcgctcttgttgcccaggctggagtccaatggcgtgatctctgctcaccgcaacctccgcctcctaggttcaagcgattctcctgcctcagcctccctagtagctgagattacaggtacgtgccaccacgcctggctaattttgtatttttagtagagacggggtttctccatgttggtcaggctggtcttgaactcccaacctcaggtgatccacctgcctcagcctcccaaagtgctgggattacaggtgtgagccaccatgcccggccaattaggtccaagtgatttctttgtaatttttaaattcttcatgggagactcacagttcttttttgttttttattatattttttcacttttctctctttttgagtcaagaactcattttgttgcccaggctggagtacacaaccttgtccttctgggctcaaggaaggacaaggtttattagcagcatgagaactgactaatacaatcacggtggaagaccagaggggtctccctggatctcctggacaccaatgtgtgactttggacaagtaatccccaccaactgtaaagtgtgaacactgatgctgaagtcagcagaaattaaagcctataaactccctctttgagaaaggaagctagctggcagggcacggtggctcacgcctgtaatcccaacactttgggaggccaaggcgggaggatcacttgaggccaggaatttgagaccagcctggccaaaacggtgaaactccatctctaccaaaaatacaaaaattagctgggcatggtggcgcctgtctgtagtctcagctactcaggagactaaggtgggaggatcacttgaacccaggaggtggaggttgcagtgagctgagatcacgccactgtactccagcctgggcgacagagcgaaactccgtctcgaaaaaaattaaaatattaaataaaatataaaaacagacagcaggacaggcacagtggctcatgcctgtaatcccaacactttgggaggccaatatggaaggactgcttgagcccaggagttcgagaacagcccaggcaacatagtgatacttcagtctgtacaaaaatttaaaagtaaaaaataatagctgggccaggcacagtagctcgtgcctgtaatcccagcacttttggaggctgaggcaggtagatcacctgagttcaggagttcgagaccagcctggccaacatggtgaaaccctgtctctactaaaaatacaaaaattagccaggcatggtagcacacacctgtaatcccagctacttgggaggctgaggcacgagaactgcttgaacctggggtcggaggttgcagtgagctgagatcacgccactgcactccagcctgggcaacagggtgagactctttctcaaaaaaaaaataaataataaataatacccgggtatggtggtgtgccactccctgcaatcccagctactcgggaggctgaggagggaggatcacttaagcctaggaggtcgatgctgcagtgagctgattgtgccactgcactccaggctgggcagcagagcaagaccctgtctcttaaataaataaaatagttaaaaaaggaaaacagacaggaaaactccaagtgcagagaagcctagtggtacttggtgggggaaacaaaagttgttccaggtataatagttcctgaagtcaacactctatcatggcaagacaccaggcactcaaattccaagtcatgaacttaccttttccttgttttgaggattacattgtgttgggcgacagctcttttaggcttctgggaagtaaggtatacattctggagtaacttccaaagaaaaaggtgaaagcatacgcggaacttttgagccttgaaaaagttcagcgagtcattcttgaaaagtcctttttttaaacaaagggggtttcagtcacctcacatttgcatagcagtttctctcttgtcaaagcctttcacattcacttattttaattcttacagcactcaaggaagagtgtggagttgggggtcgggggttgggtgcagagcagtgttaacatccttctgtaagagaaacggaggcttttgagaggccaggcgtggcggctcatgcctgtcatcccggcaccttggaaggaggatccatttgggtccaggagttcccggcactttggaaggaggatcatttgggtccaggagttcaagaccagcctgggcaacatgggggaaaccctgtctctacaaaaaaaaaaaaaaaaaaaaaaaagctgggcgtggtggtgtgccctggtagtcctagctactcagggtgcttgaggcaggaggattgcttgagcccaggaggcgcaggatgcagttaaccgtgatcgcgccactgcactccagcctgggcgacagagcaagactctgtcttggaaaacaaacaaacaacaaatacaataaattaaaaaaattagttgggtgtggtggcacacagctgtagtcccagctactcaagaggctgtggcaggaggatcccttgaggccaggagttcaagaccagcctgggcaatgttatgagacacgccacccgcccagtctttacagagaataaaaaagttatctgggcgtgatggtgcacacctatagtcccaacaattcaggaggctgagatgggaggatcgcttgagacacgggagttggaggctgccgtaagccgagatcgggctagtacactgcagctggggcaacagagtgagaccctgcttcaaaaaaataaataaataggggccgggcgcggtggctcacgcctgtaatcccagcactttgggagggcgagacaggcggatcacttgagtggtcaggagttctagaccagcctggccaacaaaaataagccaaacgtggtggtgtgtgcttgtaatctcagctactcgggaggccaaggcatgagaatcacttgaatccgggaggcggaggctgcagtgagccgagatcgcgccactggactgcaacctgggggacagagcaacactctgtctcaataattaaataaataattaaaaaaataaagaggctcctgagagtcaacttatttgcctgagccacttatttcacacatcccaggacgcctgatgaagggttctggattttattgtctcctgtcatccaggcgggcttcctggaggaaaccggaccgccagggaggccgcggcctcggtcccagaggtcgcgcgtcgcggggccgggggaggtgggggagaggaggccgctctggggccgatcccgcccgcagctgggggcccccgtcacgtgaccagccgggcgcccaggtcacgtgtcggggcggggaggggggggctgtcgggggcgacgggcgtccgggcagtggcgcgcgcggcacgcgagcagcgcacgaggagaggtggcgcgggccggagccgcggagggaggcggcggcggcggcggcggcggcggcggcggcggcggtggaaggggcggccccgcggccccgcgtccgcgtcacgtggtgcgaggcgggcagccatcttgctacaaacacaaacacagaggagccggcccgccgccggagccggccgagcttagagaagcgcccggagccaggcgcgcggggccgccagcgaggacctcccccgtctcctccccgaggccgccgcagcccggtgcgtcctcccgctctcccgcccgctccggcccatccccgccgccgggaccctcccccagagccggccagcctcggggaggccccgggagccggcgcccggcttagggggcgaccgctcgcccccctcgcacctggcgcccctccctgaagggcacgccgtcctcccgggccggcgcgctgccttccacccccgcgctcctaacggtcgcccccgggcccctgccaagccctgccctgggccgcctgggggcccccgaccctagcgtcctagggtggccgggccccgcgcttcccggagttctccccagcgcgcctttgggttcccctcggaacgagctgggccttgcggttccccaagtccaagcgttccacgactttggccaacatggaagccttgccctccacccaggcacctcgcctgggtcctcctcacctctgtttcctttcgctccggcgatcttagtgctgggtcattggggtctccttcttcccagttgctcggccgcgggaaataccttccttagcagagactgcttgtcctccccgtcccaggccaggcccttctcagctcatgcccctccgtgcagcagctccctggccacagctctcacactttgccttaaaaaaaaacaaaacaaaaaaatttccgagtaactttttaaaagcccctcgtctctcttctctgttatacagtcattactcgcattcccggtcagactccaggtctgttgcatcctagtgctaggaactaggagatgctacataaagacttgttagctggattggattttttttttccagccacccaagccttacttccctcctgcctctcaaagtgtcgttctggaagatcgtcagctttcccaccctcttgtgcactgcctcttcgagtctatatagaagtttcaatttagaaccccgccaacccctcgcctttggcatggaaacaccatcggtggtaccagtaagggtctctcctttgctgccgacatgggggatttggggttctttctccttcccatctttcctgtgccctttgcagacctaggctagccaccctccaccaggctagccagctccaatctgattttcttagattgtaggtcttggtcccccagcggtctgtcgtgccattgggaaggatttgagggtagacctggccttggtgtccctgccattgcctggggaccaggggccctgagggtcccacgtggtggttagtcaagtggaccatgtgcttaaacttctggactagctttttctgctgttggacacatcagtcttgtgttcgtgatctgatgcgttagccctaacttttacatctgctattggaatttgggaattaaagaaaaatagcccactttagaggagagaagatgagaggaggaggctagatgaaggatgttgaaagtctaacaaatgtaaaatggcttcaaactcacagaataatgcttgcgagtttgggatggttactgctaccgtgcgcacctccagtcttgcatagtgtcaaggatgtcggggcactctgtcggagcagcttcctccttcttttccctggctggagcccaaggctgggcaagtgggcaaaagggatcacaggaggtaaagagtgaaaatcctttgaaaactgttaacttgtagacaattgccaagcggtggtgtgatttgctgggatggctcagagaggagagagctgggataaccgaccagccgcgaagaatgcgggtttgcatctcttttttaagcctcagcgtcctcaccctaccacgcttggagaatctccatcctgagaaagggccaggtcccctccagcaggcctggggctgggcggttgttccagtgttgaggaattggggactgtgcttctgtttaagtggctctgttctgtgccaaggcacagtgctctgtgttggagctaattttaggggtgatggagtgaggagataatgttcttagctgaatgtgcactgggaccgcctgttctctgtcttttctttctctcttgagttctgagccccagagagcaggctccctttcccgcgcgccctggcgcctactggagcacccgggcccagcgtgtcctcgccccttgtctccggcagggggcagtctttcaaaagcattgattcagatgctgggggagtgagggtagacaggcccgagaaagagaaggggtggggaaggggcgaggagccgaagtaggccgaggcttgagggcagggccagggcgggggacaggctggaaggggcctgtgagaaggagaccctgagctgagaaagctcagccgggtaagctgagacgggcaggtggcagtaccccagcccccgccacctcctgctcttaccttcattggacagggatcagatacctggccctgagagcttgcaatagacaaacttaggcagtttttcttaaaaaaaaaaaaaaaaaaatctattcttttctcaaagattttctcctggcaggatttcagatttccctcgtgggacagtgtaattagggaatgatgtccctgctgttcagagaggagaatgacccagcgtgcacacacctgccttcccttgccttccccttggcccagtagacccccaagggctgtgcccatgctcgtggcgcagaggagggtgtctcagcactggcgcacttggtatctggagtcacatagctcttggctgtggggctgccctgtgcaccccctgcccagtggtgacaacccagaatgtctctagacttggccaagagccccctgaggagcagaggtgcccccagtccagaacctgttggagggtgggagccccatggtggcctgcaggtgtgccactagttcctttagtccaaggaaggggccaggcaccatcagcttccggcaccagaccctgctgtgggggtgcctagagagttaacctcactctcctggtttcttcccaagaaggcgggtggcatgggctttttcctgctctgggcctgctctctcccctgtcttggtgtcgctgtcctcagtctgcatgagccattctccctttgtgtgccccttgcagccaagacacagccaggatgggtgacttgagccggaggcacctaggagagctgcccttgctgcgcctggcagggggcagtgtgaggccatcgctttaaattttttttttttttttttttttgagacagagtcttgctctgttgcccaggctggagtgcaggggcgcaatctcagctcactgcaacctccgcctcctgggttcaagcgattctcctgcctcagcctcccgagtagctgggattagaggcacctaccaccaggactggctaatttttgtatttttagtagagacagggttttgccacgttggccaggctggtctcaaactcctgacctcaggtgatctggctgccttggcctcccaaagtgctgggattacaggcatgaaccaccacgcctggccactttttcttttttaaaaaatgtttagaattgtttctgtagagtcgtggtcttgttctgttactcaggctggtctcggactcctctcttcaagcctcccacagtgctgggattataggcataagccattgtgctggccaggtggtcccttttctgttctactctctcccaccctcatgcctccaggatgagcttctggccttctagaaggaatgaactggaggaggcccaaaatggcctctcctgaggctgatttgaaggaatgtggggtgtttttcttggagtggggaaaacttaggtatgcggtggttatctccagataccttttgttccctaaagcttttttaaaaaaatgattattgtggtaaaatatacaacaaaatttggagactttaactgtctctaattgtgccattctgtgttactaagtacactcacattggtgtgcggccatgaccaccagcggccccaggatcccctcctcagttgaggctctggacccttcagcaacagctccctgtcccctcagcccctggtggctgcccttctaccttcctccctcaatgagtgactgctctagagacctcatgaaagagaagtaaggggtagctctccttttttggctggtctgtttctcttagcgtgatgtcctcaaggctcatccagtccccagattgctctaggtggccacctgcagtcagtgacaggctggtggcttttcatgtcatggaacacaccaccactggagcatccagccgaggcagaggaaggagaggtcccaggggaggccagcctggccttgggttgcctctgagcccggtgtttccccctggagtgcctggactctgagcaggcctcggcttgtcatgggctgctggctcagctggggctgatggcctttcctcctcagcaccctggttgaacccgcttcctcttctttcccagactgtggcgtcctggagttgatgggagctgcagcaccaagccgggccagcctccctcccagccagtgacaacaccgcagcacctggaccccgcccacccgcttgagtcctctgcctggggccccagggatgcgcctcctcctgaaagtcccctccatcctcccttagaggaacaggctgccgccgcgcccccatcagcctccattgccctgaccttatttccacctgatggtgccagaggctgcttcccagctggtatcctgagatcctcgttcccttggtggcttggttgtttaagcctccattattgattgggggcggtggtctgggtgtgattcctgtgggggaaaccagcccgaggtgccttggctcaggcttgcctgcctggagtccttgtcgtgtacccgtctgtggccctagagtcacctcctgctccttttcactgggtttctccccagaccaagcccctggatttgagcttctgagcagccaactgatttttttcatgagggaaagaattttgctcctagatttatttctaatccttttctccgtaactgaccttttctctgtaagctatttgtggctctagtgggtttttgtttgcttgcttgtttttgttttatctttgccctgaacgtccatcctggcctcggctgcctccctccccgagttcttcactacacctcctgtctcagcctcccagagagggtggcgagggtgctgatgcccagagacaccatccggcgaatggacctctcctgtcatgcggggcagggcagggctgccggcagagccatgtcctgaaccctccctcctcccccctgctctccttaagggtctttcccagatgtgaaggtccctcccaggctctactgaggtcagaccaattcccagtggcttgggtaccctcgttcactccagcaccagcccctgccctccttcttcccgggccaggctgccaggtgagccccgggccaagggtggttgccctgctgaggccgaaaggactcgagcttcccatctcctcgcctcccccaggtctttcaccgtctggactcatctctgggtaactcatggtgtgagtggccacgtggctggctcaggtgagtccttttagaccccaggtgacccaccagctagtccggggcccattgttgtgcccactaggatgtcccccatggtgtcctccctgcgctttaaaggtctccttcgtgtgctgttcttcatggcccctgttcccccacaggtgtttggacagtgaacgccaggtcccctcctccccacccccggcctctcaaacacgcccagccccacgatggcagcagagacactcaactttgggcctgagtggtgagtcacttgtgcctcggctgccgtggagattcgagaaagcacagtcaggctgccctgacctctgtcttcttctctctgtgttgtgtccaggctcagggccctgtccgggggcggcagcgtggcctccccacccccgtcccctgccatgcccaaatacaagctggctgactaccgttatgggcgagaggaaatgctggctctctacgtcaaggagaacaaggtgggtgcgtgggcgaggggggttggcggtggtggcctctgcctgtggaggggatctggcagcatgtggtgtcttggctgtcccaacccactgccaggtcccggaagagctgcaggacaaggagttcgccgcggtgctgcaggacgagccactgcagcccctggctctggagccgctgactgaggaggaacaggtgggaccgggccaggagctgaggctgcgggagcctgggaggggaggccatgggttgggttaggaggagaggggccagcgctgaggagacaggcggggagggtgctgtggggtgggggtggaggtggttgggtgcctgggtcctcactcccgcccctggctccctcctcagagaaacttctccctgtcagtgaacagcgtggctgtgctgaggctgatggggaaaggggctggccccccccctggctggcacctcccgaggcaggggcagcacgcggagccgaggtagaggggtgatggcgtgtcctggggacgggcagatctgggcccctgacttcgagaacgtgcagcaggtttcattgtgcgtctggcctcttctctaggccgcggccgtggtgacagctgcttttaccaaagaagcatcgaagaaggcgatggggcctttggacgaagcccccgggaaatccagcgcagccagagctgggatgacaggtggggccgggagggggcatggcgcagagccgggcaggccagggaggggaggcctgggccctgtcgctagagggtaacagaggcccaccagataagccctgtccgagatcccggtgctcctgacccctggtttcgtttgtccccttcctccctccactgcctcagggcacagtggacaaggcatggggcggttgcacagggtggcaggggaggctgtactgtttctgacccacacgtttcccctgctgcagaggcgagaggcggtttgagaagtcagcaaggcgggatggaggtacgaggctgctgagggcggcggccggggcggcagggaggaccaagatgggtggcccagtctgggggtgcttatttcggaggtgttgggggcaggagggcctggagctggccccccaacgtttcttgagggtccaggcaccacgctgcctttctaataactgcccctgtcttcccgtctcccagcacgatgtggctttgaggagggaggggctggcccaaggaaggagcacgcccgctcagacagcgagaactggcgctccctacgggaggaacaggaggaggaggaggagggcagctggaggctcggagcagggccccggcgagacggcgaccgctggcgctccgccagccctggtgagattggggcctggtagcattggcgggggcagtggggagcaggaactgtaatgagagggtgggctcctgtagccacggggagggagcagaggctggctggtgtgggagtggccgggacagcagccctggaggtgctccgtgagctgcagcagagggggccgctggcttcgcttgggtacccactcttcttctccctgacttttcctgtgcagatggtggtccccgctctgctggctggcgggaacatggggaacggcggcgcaagtttgaatttgatttgcgaggggatcgaggagggtgtggtgaagaggaggggcggggagggggaggcagctctcacctgcggcggtgccgagcgcctgaaggctttgaggaggacaaggatgggctcccagagtggtgcctggacgatgaggatgaagaaatgggcacctttgatgcctctggggccttcttgcctctcaaggtatctgtgaggaggcgagggtgggaacctgcccttccggggtcctcttcctccccacccaccccagctgttctctgctccccaccccggccccatgcagaagggccccaaggagcccattcctgaggagcaggagctggacttccaagggttggaggaggaggaggaaccttccgaagggctagaggaggaagggcctgaggcaggtgagccgcggggtgcccagcgggcctggggctgggccgggcaggcactggtgttctttgccgggctgggcattggctgcccacctacctgtagaatcaggctacttagatctggaagaagagtgctgagaggtggggaggaaccagggggtagcagagccatgtcttcaaggcagtgtaccagatagaaatcaggcgtaatcaaaatgacctttgaaagtcccttgaagaagctgtagaacctggagtgacgtctgcggtgttgtgtggtgttgtgcgatgttgtgatatgttcctgccgcgtctggcagcgtggaggcgagggtcagggcaccacattccctctgccattagttgagttgacccaagtgaagtggtggactcggcctaagggagtgtgacccgcggttccagccacactcaagggcttgtgctaactcgcgtggcaggcccagcccttggttctgaactctggccatctccctcttctaggtgggaaagagctgaccccactgcctcctcaggaggagaagtccagctccccatccccactgcccaccctgggcccactctgggggacaaacggggatggggacgaaactgcagagaaagagcccccagcggccgaaggtaggaagggaggatggcctacctcccgggtgcgctggggctgtgggagaaagtgctccccactcgtgggggtgggcacacagggcattcacattgaggagccatggcaagagcgtggtgttctggagtgagagtaggcgaaagctatcttgtctcctccccgcccttctttccacctcctatctcatgccttccagatgatattcgggggatccagctgagtcccggggtgggctcctctgctggcccacccggagatctggaggatgatgaaggcttgaagcacctgcagcaggtgtgggggcctgagaaagcgggagggacccttcccacttctgacctgacctgcttggccccagccccggccccagctcaagctccatccccatccccatcctgatgttgctgagattggcagctgagcctttcttctttttctgggcatccaggaggcggagaagctggtggcctccctgcaggacagctccttggaggaggagcagttcacggctgccatgcagacccagggcctgcgccactctgcagccgccactgccctcccgctcagccatggggctgcccggaagtggttctacaaggacccacagggcgagatccaaggtacctgtgtgggatgggagggctgctcaaggccgttctggttcagggtgtctctggcataccctgtgaccccagtggttctcccgctccctcgctccctgtccaggccccttcacgacacaggagatggcagagtggttccaggccggctacttttccatgtcactgctggtgaagcggggctgcgatgagggcttccagccgctgggcgaggtgatcaagatgtggggccgcgtgccctttgccccagggccctcacctcccccactgctggtgagccgcttctcccctgcatggagggacagggtgtgaggggtgccggcaggagtccagcagagtcccctcctccctgctgggggcactggccgagctctcacctgagcagggaaacatggaccaggagcggctgaagaagcaacaggagctggccgcggcggccttgtaccagcagctgcagcaccagcagtttctccagctggtcagcaggtatggggggcctggggtgggctgggagaaggcccggcgctggctctgtggcccaccatctccactgtcccatttgcagccgccagctcccgcagtgcgcgctccgagaaaaggcagctctgggggacctgacaccgccaccaccgccgccgccacagcagcagcagcagcagctcacggcattcctgcagcagctccaggcgctcaaaccccccaggtgcgtggtgcgtgcgagccctcaggatacagggtgggggggggatgggggcagaccagagatggatttggggtcctaagaatccacaatttgctcctcagaggcggggaccagaacctgctcccgacgatgagccggtccttgtcggtgccagattcgggccgcctctgggacgtacatacctcagcctcatcacagtcaggtgtgtggcctgactggtccccacccccaaggcagtctccgggtgaaatggggtctggggtctgctccccacccccacacgcccctagctgccattctggctggggagcccactgctgcggctggactagatcagtgggcccaagtgcccacctgcagccgcctctgcccccctgccccctgcaggtggtgaggccagtctttgggacataccaattaactcttcgactcagggtccaattctagaacaactccagctgcaacataaagtgagtgggcatcctggggctgaggccctgggaatgaagggtggaccgaggcaggccccaggctgtcccctgcagctctcccctctgatgggccactggtctcagttccaggagcgcagagaagtggagctcagggcgaagcgggaggaagaggaacgcaagcgtcgagaggagaagcgccgccagcagcagcaggaggagcagaagcggcggcaggaggaggaagagctgtttcggcgcaagcacgtgggtgctcccaagcctcagctggctggggggacaaccctcgccaggtcccctcaccatgtccccctcttaggtgcggcagcaggagctattgctgaagttgctacagcagcagcaggcggtccctgtgccccccgcacccagctccccgcccccactctgggctggcctggccaagcaggggctgtccatgaagacgctcctggagttgcagctggagggcgagcggcagctgcacaaacagcccccacctcgggagccagctcgggcccaggcccccaaccaccgagtggtgagcaggccgggaacctcccgggctccccctacagtttccagggtggcacagggagggggatactgaacccagacttgtgcagccccagccccagtcccagcctctcctgtgatggcaacagctcttgtggccctcacctcacctgtctccctttgccacctaaacaagcctccccatccgcttttctggggtgcctttgtttgagccactctgatcttctgccatctgtagcagcttgggggcctgggcactgcccccctgaaccagtgggtgtctgaggctgggccactgtggggcgggccagacaagagtgggggcggcagcagcggcctggggctctgggaggacacccccaagagcggcgggagcctggtccgtggcctcggcctgaagaacagccggagcagcccatctctcaggtgggcgtggcacctggaggctccgggatggccctgagggggaaggtggcagacccccccaacccctgccagctgatttccaaccctgactcaccctcccccttcagtgactcatacagccacctatcgggtcggcccattcgcaaaaagacggaggaagaagagaagctgctgaagctgctgcagggcattcccaggccccaggacggcttcacccagtggtgcgagcagatgctgcacacgctgagcgccacgggcagcctggacggtgggcgagcggctcccaggaggtgggcgggacctgggtctccagacccggccagggggccctgacagccttcgctcatcctgcagtgcccatggctgtagcgatcctcaaggaggtggaatccccctatgatgtccacgattatatccgttcctgcctgggggacacgctggaagccaaagaatttgccaaacaattcctggagcggagggccaagcagaaagccagccagcagcggcagcagcagcaggtgaggcagccggcaccagcagctggggtgggcttgcctggtgcctcctgaccttcaccctcctctccgctgccttaggaggcatggctgagcagcgcctcgctgcagacggccttccaggccaaccacagcaccaaactcggccccggggagggcagcaaggccaagaggcgggcactgatgctgcactcagaccccagcatcctgggtgagctgggctggggcaggagcgggacttccttggcacagggcaggaggagcccaggagagagctcagacgcagcttctccccggcttcagggtactccctgcacggatcttctggtgagatcgagagcgtggatgactactgaccagcccggacccccagcccctgggctgtaggccagggcagccacagcggcgtggaccgagggtcccagcctgcaggctccccgcagagagcacaggaagaggcaggggcggggtccccagcacttgttacaaacacacgatgcaccttaactcacccaccacgaggcactttacagactgggggagggggtttttctttttattttttttttaattttaaacgactgaagaaaacattaggagaggcaaaaatattgttaaaaactagactctaaacaccccttcctgctgtgaggatagtgggtgtgacaatggaaggtccacagaggtttttgttttttggtttttttttttttttttaagaaaaaaagatgaaaaatgaaaaaaaaaatggttaggaggctgaaagaaaaaacacactgttattttggggcagtggggacacaggccccgtggacctgtcctgcctggcccccaaggccatacttaccccccagaaggcgggccatggggtaactggaagctgggggccagcagtttgcacaggaggcctgtctgagccccacccgccagacctgttgtgagcagctcctgtcactgaggctggctgaggtgtccggggtggggccaaagtagccccttggcttcgctgctttgggggacagttgcacaaattggacgagcggccccagctctctggctgccatcttgtgctggccgagtagacgggaggggccaagccgtgccaacctctctggctggcagggtggggcagcaggactctggctctggtgaggggcgtctcccactgctgccattttgggggacaccctgggtttgaacctgaaagccccagctctctgccttgccacgtgaatgtattctttgggccacaagcccccgcctcacccctgcctgagctgcctcacccctgtgagcggcgggggtggatgattgctccagaggctgcagagagaaggctgagctgtttctccagtgaagggggcaggaggaggggcctcaaaggcaaggagtgggtggctttgggcttagggttggagtagaggggctgccgcccggggccccaacctgtagccagctcgtaagatgtggaccacccagctctgcacctgacccttccgctgaccaaatgggagaggagcaggtggccttccgggtctgatatgatgcgctttttaccgttgggtaaggttggggtgaagagaagtgtgcggctcctgggtcagaggaggctgccccttctattgctcacccacttcttattcccggtcccctacttgggttcgtctccgcccattttgggttttgtaacagttttgtcttttgggtttctcatccagctcctcccattgacctcattgctcagagtgcagtattagggcaaggcttcgccactgcctccctccatgaatgtatttctccctcctgccctggggacatggggagtggcccgtttctttccccatctagtcccagaaagatggtgtttggttttctgttgttggattttttttttttttttttttttttgcaccaaagtggcaactaggtcagtgttgggggatcaagctggcctcggggtggggggcccccacctgcctctccctggttcccacagtgttagcgtccctgaaaagacaatattctctctaaagcaataaggggtgacgggccggggggagtgtttgctgctgctggcccccagctccccttccctcttgccaggtgtgggggagactcctgttgtgactgaatgtaacccccccacccctgccgcagccaatgcaggggaagggggacactcttcctgtctcttctccccagctaaagagactttggacttagggggcccatgagcctggagaggccttaaccctgtgaggaagtatagggggagccctctcccacccccatccccttctgagagtggtcaatgtttacaagcccctgagcccccctgcccagggactcagaccctgttgctgtccttccccggccccggtcttcctgggccctcgctgctcccctgcccttcctggggttggggtgggtgcaggggtcaccgtgttccctgtctgccttgtacccacagtctccccgccccctctccaccctgtgtgacttccctctcttttacctgctcctgtaaatactcccttctcccaataaaacttggtgtgtgttctcccgttccgcctccactgctcgttatctggggagagccatggggatgagtggctctgcacagagctgggaactaggagctctgagcagtgcccgcctggtcaggctggctctggtcagcagcctgacgggggaaaccatggtgagggctgcttatccgagaacctctggacggaaggctctgggctggggcttcagctttgctctgagggagagtggggaccccacccccagccccagctgcctggcaggccccataccttccccaccatccaccccctcagcagccctcaggcaacaaagtccagaaacaaggagaacacagcaagggcagagaccaggtacagagttggaattggctcctttatggaaaaactgaaaatataataaaaattaaaataaaaccagttttaaaaaagccagcccctggggtttccacctcctgcctccggccctccagaggggtgaggccccaaccccagggcagcagaaggatgagggcctcctgctcctcctcttcccccattccatccccttcttatctccacagtgggggccccgggaggaaccaaacctgggtgggagggcagggacccaaggccccgtggcccggggaagggggctgggattgcgccagccccgcagccctggcctgtagtgtgggcatgggcagggcccctcctggcctgggcccagtgggggtggggccattagttccagatcttgaggaaggagtcccaggagcccgtggccacagccatgccatcgtcggtgaccccgaggcagctcacgcggttgtcgtggccagcgaggactcctgtgaagaagagagaagtcagaacccattgggcctgggctccaggtccctgcccacccagcctgggccccagctgtcacctgcacggtcgcccttcatggcatcccagatgttgcagttgaagtcgtcgtagccagcgagcagcagccgtccgctgcgcgagaaggcaacagaggtgatgccacagatgatgttgtcatgggagtacatgaggagctcctgatcggcccgcaggtcgaagaggcggcacgtggcgtcgtcagagccggtggtgaaggcgtagccgttggggaagaactgcaggacacgggacccagatggggtgagggtgagggtgaggagcagggccgggagcctggtggggagggcctggcctagctcgccccaaaactcacagccactgcattgatgtcggattcatggccgatgaaggtctgtcggcacatggaatcccgcacgtcccacagcttgatagaggcatcacaggcgcctgacacaaacgtgcggccatcgggggccagggacagggacatcacatccccactgtgtccagcaaaacccactgtctgctggcctgtctcaatgtcccacagggcactggagaggtgacaggaagaaagaaaagataagagacagggcgaagaacagagtccctgttctccccgccccaccacgtgagcccaaccctgtggaagggtccagggaggctcttctcagagccttaggtggggaggggacgcatccctccctgacccccttagcgcccaccaggagagggaggctacggtgcatgctgcatgttgagcactgggacggtggcccctgaggcaggaagtgtgggtttgcccagactgcccagccctggcagagcctcaccaggtggtatccccagagctggtgatgatttggttgtcatccaggaagcggcaacacgacaggtaccctggggaaggagctggtcagccaggtctccacacggagggcagtgcaccccccaaccccaaaaagggcccgaactgggccaggcccctcaccagtgtggccaggcagctcccggctgaccctgacgttgccctcgcgggtcttgaggctgtagatggagcagatgttgtccaaccccccacaggccacaaagttccctgagggcgcgtaggcacaggtcattacccaggaggagcgcagcgggatggcgtggacctgcggagcaggggaagcgccggggtcagagccagccagggccctgtggccctgccccaccccgcagcccgcgccaccctaccttgttggtggtgtagctgtcccagatgatgagcttcccatcctgggaggcgctgaccagcagcctggtggggaacggtgtagggagagcagaagggtggcgtgaaaacaagacacacccccttccctttgggtgggagaaggtagggtctctctctgttgtgcaggctggagtgcagtggcaccatcacagctcactgcagcctggaactcctaggctcaagtgatcctcccacctcagcctcccccgcatagctgggactacaaggtgagcaccaccacacccagctcatttttcaatttttagtagagccagggtctcactatgttgcccaggctggtctcaaactcctgagctcaagtgatcctgccctggcctccccacgtgctgggattacaggcgtgagccacctgagagacagtctccagctgcagcccacaagttctcaccagcatggtcctgcctgtccaggtctggcggacatgtctgggagtcaccgtttttccagacgtacgctgggtattttggtggcctgcttactccgccagatctgaggctgctcccacggcctgctagaaagtcggcccacagcgccagcccgcgcacacacacacaccttgagtcggtcccccagtgcatggcatagatctttgccaggtgcccacggagggtcctccgggtcctcatctggattctccccactgggtccagcccagctgtgatctggaggtagagacagaatgcgctcggggaggcccaggcagcaggactgcagagggcagcggcctctgatccttgccccttcaacccctagttacgctctggccaccaagtgccctcacctgggtcagtgttgagtccccacatgcttttcgggcatcctgtaagggatggcagagccagagagacgcgagagaagacaggttggggaggaaagggagagaagagaacagaagacaggagtggacagggtcagattctgagccattaaggggccctccctcccccttcccccaccaacaccctcacccaacccggtccagggcaccgggcggtgtacacatgaatcgcccgccccgcaccaggccctcacccggatctggttccggagctgctcggcctcctgtctcagttgctccagctcactcatggcgccgggcccgtggggcagggttgggggcggctgggggccgcgggacgggggctgggggaggcagctcctggccgctggcccgaggcctgggggatgcagggctgacgtcaggcccgaggccgccggggaagtggggagaaaggcggggttgcagcgcggcccggaaggggtaagcaaggggagggggaaggggcggcgcggccgccgtccccgggcacaaccagggtctccggcaccagagacgtcgccgagtaagagccgacttccccaatcttcctcccgccccccggaaacggagcgggaagtgcaagaggaagcgcaggggaaacccctccctcggacacagcccgggcaggacacccgcggcaggaactggggcggggggggcgggggtgtcccttcgaaaacagacctggcttctgccccagcccgcacaggcaccgccctccaagcacctaattttaaaaggggcggtgcctcttgaaattcaccccacaaggcgcacaccctccacacacacccccagcttcgatggtggcgggtggggggagagaccagaggggaaagctgggctgttcgtggggttgcctaggcaaccgtcacccggaccgagagcacctcattggtgaaatgcccccaccctagccccgttgccaaggcaaccgcatccacggcagagacctgtagggtgggtgaccccacccccggccccatcgcccccgcccgacccagcctcccgccctccccagaaccggcccgggtggctgtttacaggatttgggaaaagccgattgggcgctaataggttctggacggctcaccccggataatccccggtccggctgcgccccattagccgtccgccgcgggtgggggtgacagcggcggggaaggcagccccgagccgctgctccctccagcgcagggaccgcccgccccgccgcgcccgcagaaagcccgtgggagccgctctcgagtaattacggctccgcaacgaggtccccggccccgaggcgcggaggtgctctctcccaggcgcgggcgggcggccccaggcggcctggccgcggcgccctggacacccggggggcccagcccgcaggctcggcgcccgggccccaggggcccggctggctccgctccgggagcctgagtccttccccgcccgcgggacacctgtgcgatccggccgtacacactgcacttggccggcccaggcgtcccccacccagctcccacttcccccaggcgcagggcgttcctcttccccactgacatttcccctccttgtaagttcagctttctacgccagtgccaaggggtgaccctcaaaatcgggggatggggggtgcgggcagaactccttactctacccaacccccaggcccgcacaaagcctcttccacctactagcagcccaggcctggcggcaccgccggaggcccagggcagaaggaagcacggctggaggaagaaactgggggcgggggcgacgttctcagccctcggtccccatcaccccccagggccctcagcagcccccagactctagggatatagcagccggcgctccatagagaaatgagggtgcaaccgcctccgcaggtctggcggggctcaggagagtgacgggagggtccctggatctggcagctggaaggcgcgggctggtgcggcgctgcgaagcgcagtgggcctggccctccagcccctacgacctccattttgcctaaaagaaagctgggcggggggcgggcgcctgggagctgggcttggggtgaggatctgtaaagggaatagggcgccgagggctccagtttcggcgagtggggccagaaaccacgggcagcacccaaatcgtgggtagggtggagacgaaaggaagggtggcgcgcggccttgcctgcttctccccgattttggagttgtgcaaggcgagggccggcaggggtgcgacagtggaggacacgaggggtgctccccgggggcaggcgggagggtggcggtggggaaagggggcggggcggggcctagaggaagcccggaatttagccccccaacttccgagggagcaagaggcagtcggggctgggctggggtctggggtcgggcaaaaacttcgctgatggtgcggggaagcgcacgcacggtggggggcgagggttccccagttccccttccgggtttgggagcgaccgggcaagaggggaagggagcggaggtctggggagttacgtccgctcccaggaggccagccccgggagaccgaaggaagagaggttcccctgggggaaattggggctggggggcgagaggactccttttgccagcgaaggtacctgtggcggtgggactctgcggcgggggtcgctggcggtgcgcgggcggcgctgtcttcctccgcggcggaggcggcggcggcggcggcggcggcggcggcggcgcggatggatttcctcagtggccccagccccgccgccagcgctgcctccccagagcggagggatcccgcccgccagtgacgcggctgccgccgccgcgcccaggacccggctgggcgagaccaactgcctcgcacttgggggaagccaggagacaaaaccccaccgagggagcaaagacgggcccagtcgctcccaaggttctcaccctacgctttgtggacgcaaaccgtactcaaagggtttgcttcacggaaaggagtaagacatcccccctctgggactggaggaggtggtactggcatatgaggagggtgagaccgctcgctggtcacgtgatcagcctcccgccccgcctggaatgggtggctccagactgggaaggggagttcgacgccccagttcccggttgggccacgccccggccctgaggaggccacgcccctcaccagggggcggagctaaagagacctggacggggccggcctcgaggctgctggaagaagaagcgcgattccgagaaagtccccgagccgggagtgggtaggggctgatgcgggcgccccgggaatgccatgagaagggtcgtgtccaggcatttcctcagcctcgcccactgggcctttgtagaccccctttcagggcttgccactgaaataacaactcatttattgagagccacactttttttttttgagacggagtctctctctgtcgcccaggctggagtgctatctcaactcactgcaacctccgccgcccgggtgcaagcgattctcctgcctcagcctcctgagtagctgggactacaggcgtgtgccaccacacccggctaattttttgtatttttagtagagacggggtttcacggtgttagccaggatggtctccatctcctgacctcgtgatctgcctgtctcggcctcccaaagtgctgggattacaggcgtgagccaccgcgcctggcccgacacttattttttaattggagtacagtgacgcgattgtaggtcactgccacctcaatctcctcggctcaagtgatcttcctgcctcagcctccctagtacctgggaccacaggcgtgccccagccaccatgcccagctaatttttaaatttttggtagaggtggggtcttgctatgctgcccaggctgacatatgttaagtctcacaatactgggaaattaagtgctaacattctccccattttcttttcttttcttttttttttttttggagacagggtctcactctgtcgcccaggctgaagtgcagtggcatgatctcggctcactgcaacctccgcctcctgggttcaggcgattctcctgcctcagcctctggagtaggtgggattacaggcgcccgccaccatgcccagctaatttttttttgtatttttagtagagacgaggtttcaccatgtcggccagcctggtctcaaactcctgacctcaggtgatgtgcccgtctcggcctcccaaagtgctgggattacaggcgtgagccaccgcgcccagccttctccccattttctaatagtggaaagagacctgaggctgcagagtttagatatgaacccaggcagccaaaactttactgtacattccagtttatctgtatgagcctctagatgaaccccttcctccagggaccttgcctgtaaagggacaagaacgtaggtctaggcctcagtttccacatctgttaaatggggatgttgacagcatctgccctccaagtcccggattcttactgagaaccccatcgattgtggaaatgctttgggaagttcaaggcaacgaatagccttcactgagtccttgtaatttgaaagtatcaaaacacgcagccataagaaagaacgagatggggctcacgcctgtaatcctagcactgtgagaggccgaggcgggtggatcacttgaggtcaggagtttgagacaagcctggccaatatggtgaaaccccgtctctgctaaaaatacaaacattagctgggcgtggtggcacacacctgtaatcccagctactcaggaggctgaggcaggagaattgcttgaacccgggaggcggaggttgcagtgagccaaaatcacaccactcactgcactccggcctgggcaacagagcaagactttgactcaagaagaagaaagaaagacaaaagaagaaaaagtaaaagaaagaaaaggagggaaggaagggaaggaaagaaaaaaagaaaggaaagagaaaggaagagagaaaaaagaagaaatcatgtcctttgcagcaacatggatgcagaaaagagagagagagagaaagagaaagaaaagagagaaggaaggaagggaaagaaagaaagaagaaacaaaagaaaagaaaagaagaagaaatcgtgtcctttgcagtaacatggatgcagctagaggcttttatcctaagtggataaatttctgcaggaacagaaaaccaaacactgcatgttctcacttataagtaggagctaaacactgggtactcatgaacataaagatgggaacaatagacacgggggattactagaggggggaagggttgaaaaactacctattgggtactgtaccccaggtgacgggatcaattgtaccccaaacttcagcatcacaagatatacccatgtacatgggtacattcatgtgcacatgagtcagaatctaaaaagatgaaattatattttaaaaagtatcaaaacatactcttcatttagtctctgtgaaagacattacaaatcacttttcaaaaacaattgttttttcttttttcttttttttttttttctgaaatggagtcttgctctgtcacccagagctggagtgcaatggcacaatctcggcttactgcaacctctgcctcttgggttcaagcgattctcctgtctcagcctcccgagtagctgggattataggagcatgccaccaggcctggctaatttttgcatttttagcagagatggggtttcatgttggccaggttggtcttgaactcctgacctcgtgatctgcccgcctcggcctcccaaagtgctgggattacagatgtcagccaccgtgcccagcctacaattgttttttccaaatcgaatatgttatgaacatagtagttgtctttgtaatgggtacacacactcacacacacagaatgatctgcctggtggggcagggaattgtaaacatgccaaagggaaaatgaaaaaagaatcctgtaggttttcattattttaggcaattatgtccatatcacttacaaagctattgccaaatctgtctaaggaagcagagtttgaaggtgggccgggggggacatctgggagaaattcgaaaatggcataacagagctctcaatatgagaaacaaaagcccaatatttttttaaagaaaatataaacaatcgtattcgtagttagatgcaaattctatttatgcatacctgccaattcagtgacatataagcaatagataacagatgtcaactacacatgagaatttgggagggacctcagagataattacgttgatttcctcaatctgtagatggccacgatgacttccctaaagtcacttaacaacaagcagcgcaggactacagcacaattttgtcaatctcaagagggcatgtgtgctgctttggtttctgtgctaataagctttcctgttttaactcattccgttgatatttactgaaccggatgatgtatcaggcactgccctaggcaatgaggatgcaaccttgaatgacaggtgcaccctcctcatggagcttgcaatctatagaggaggcagatgggcattgaaatatggattagggtcaggcgtggtggctcacacctgtaatcccagcattttgggaggcagaggtgggcggatcacttgagtccaggagttcaagaccagcctgggcaacatagcaagactacgtcgttaaaaaaaaaagagagagaaagaaagaaatacatggtggcgtgcgcctgtagtcccagctactcggaaggctgaggtgggaagatgacttgaactcctgaggcaaaggttgtggtgagctgaatttctgccaccgcactccagcctgggtgacagagccaggccctgtctcaaaacaaaacaaaacaaaacaaacaaacaaaaatgaaaaaataacagtgcttggcctggaggtattgtttacttcgagcagaacatttgagatggaacatattctgggaggaagatcaagagtttaagattgggaagttttaggtttgaagtgcctatggagaaaattttttttggtgtttttggttttgttttttttgagacagggtctcactctgtcaccaagactggagtgcagtggcgcaatcacagcttgctgcagcctcgacctcctgggctgagatgatcctctcacctcagcctccccagtagatggaactactggtgcacaccaccatgcctggctaattttttgtatttttttttgtagagacagggttttgtcatgttgcccaggctggtctcgaactcctggcctcaagcgatccgccagcctcagcctcccaaagtgctgggattaccggtgtgagccaccgcactcagccggatctcgctctgtcgcccaggctgtagtgcagtggcgcaatctcggcccactgcaacctctgcctcctgggttcaagtgattttcctgcctcagcctcctgagtagctgcgactacagatacgtgccaccaggcccggctaattttttgtatttttagtagagacggggtttcaccgtgttagcaaggatggtctcgatctccttacctcgtgatccacctgcctcagcctcccaaagtgctgggattacaggcgtgagccactgtgcccggcctctttttttgttttttttaacttttattttagattcacggggtacgtgtgcaggtttgttatatgggtaaattgtgtgacactgaggtttggaatacgattgatcccatcacccatgtaatgagcacggtacccaataggtagtttttctttttctttttttctttgagacagggtcttgctctgttgcccaggctggagtgcaatggcacgatctcagctcactgcaacctccgcctcctgggttcaagtggttcgtctgcctcagcctcccaagtagctaggattacaggtgtgcaccaccacacctggctaatttttgtattttaagtagagatggggtttcgccatgatagccaggctggtcttgaactcctggcctcaagtgatctacctgccttggcctcccaaagtgctgggattacaggcgtgagccaccatgcctggccccattaggtattaatagttttcaacccttgccccgtcttcttccttcttccccctagtggtccccagtgtctattgatgccgtctttatgtccatgagtacccaatgtttagctcctgtttacaagtgagaacatatggtatttggttttctgttcctgctctaaattcacttaagagaatggactccagctgcatccatgttgctgcaaaaaacatgtttctttgtttcttcattttgtttctttttatggctgcatagtattccataacatacatgtaccattttctttatccagtccaccattgatgggcacctaagctgagttcatgtctttgctcttgtgaatagtgctgcaaggaacatacgagtgcatatttctttctggtagaaggattttttttcttttgggtaaatacccagtaatgagattgctgggtcaaactgtagttctatttttagttctttgagaaatccaggagaaatgtttaataggtggctgtagacacagtcctggaattcagcagagaaatctgggttggaatagagccccaagagtgagtggcacattctagcagatgacgtcataaagaggtgcagggaaaagacaagatggcctaagaccaagctctgaggaactccgacatttagaggtcaggtggagaacaagttgccaaaggagaagccggcgaactaagaagaaaatcaggaggatgcggacttctggaacccaaaagaaaagagtgttccaaaaaaggaatgggaaactgtgctgaaggctgcagagacatgaagcaagcctgccctgagaagtgtgcagtggattgggtagaagccactgtagctctgcctacggcatttgcaatgggtgagtgagaaatgatgcagtggagaaaaacaacgtggaccagactttgggtatctcagcttggccggggaccatgtacaaagctggtgcagcagtgagaagaggaagtggaatcaagatagtcggggttttttaggccgggcgcggtggctcatgcctgtcatcccaacgtttttgggaggctgaggcaggaggatcgcttgaggtcaggagttcgagaccagcctgggcaacatggtgaaacctcatctctactaaaaatacaaaaaattagccaggcatggtggcgtgtgcctgtaatcccagctactcaggagggaggcgggagaattgctggaactcagattacagggagtcgagattgcaccactgcactccagcctgggcgacaagagcgaaactccatctaaaaaaaaaaaaaaaagatatgtatattttttaggctgggcgtggtggctcgtgcctgtcatcctagcattttgggaggctgaggcaagaggatcgcttgaggccagcttgcacaacacagcaagatctcatctctacaaaaaaaattgtagaaaccctgtctctacagaaaaattacatatatatatatatatattttttttttttttccttttgaaacagagtcttgctctgtcactcaggctggagtgcagtggtgctgcgatctcggttcactgcaactttcacttcccaggttcaagcaattctcctgcctcagcctcccaagtagctgggattacaggcatgtgccaccacgcccaactcattttgatatttttagtagagacagggtttcaccatgttggccaggctggtctcaaactccggacctcaggtgatccagtcgcctcagctccccaaagtgcttggattagaggcatgagccgccgcgcctggccgttatttgagttttgatgagagctactggagctaatttagatggtaatgaggagggcaggaggaaagagagaggaaaaagaagttggccagatgcaaggaaggacagagttgccaggtgatgaccaatgagtagccaacttatctgagcaggcaggaccctcgagagcaagtggcggatgtggctctgatgggtcacagggcctccttcctctacctcttctggcttcttagcatctcctcctcctcagggcactctgcaaacattgtttttcccagaatactgactttggcctcctctgctcactctccatgttattcattggtgacttcatccattactgtctccagcccagatgtctcttccccgtgtgccgacttggtgtacatccaatggctgactgaatatccccacttagatgcccgtggacagtggcatgctggcatccgctcatgccaggtcacgagtgcccattgtacacccagctccttattcagtgaaggcatcttggtagcagaaacttgaagagctgggcgcggtggctcacgcctgtaatcccggcagtttaggaggcccaggtaggtggatcacctgaggtcaacatggtgaaactccgtctctactaaaaaatacaaaaaaattagctgggcgtggtggcgggtgtctgtaatcccagctactcaagaggctaaggcaggagaaccgcttgaccccaagaggtggaggttgcagtaagccgagatagcgccattgcactctagcctgagtgacaagagcgaaactccatctcaaaaaaaataaaataaaataaaataagatagtaggaacttgaactcagccaaggtgtgactgtttacgtcatggacattggcaaatgcttccgatcagggctccccctttttgaagagctggttgttaggaatggtggctcaccaccaggagtttgagactagcctgggcaacacagcgagaccccatcttcaaaaaaaagattaaaaattatccaggtttggtggcatgcctgtagtcccagcaactcaggaggctgaggtgagaggactgcttgagcccagaagttggaggctgcagtaagctatgatcgcaccactgcactccagcctgagtgacagagcaacaccctgtctcaaaacaaacaaacaaaaaaccatttactacacaccactgttcacagacatttcacattcaacatattcaaaactaagttaatcatcttcccctgagcccaaccctgcccaaccttaccccttccctgaatatcctggcccagttgacagcaccagcacccactcagatatttcccatgccttccctccccatatccaaaggatggtcagttagggtataggcgaagcggctataacaaagaattccccaaaattcagtgacttaacctcaaaatagatactccaggactgtggggacatctctgccatcttttttttccttttgttttctttttgtttttgttttttttgagagggagtctcgctctgtcatccaggctggagtgcagtggtgcgatctcacctcactgcaacctccgcctcctgggttcaagtgattctcctgtctcagcccctgagtagctgggattacaggtgtgtgccaccacacccggctaagttttgtatttttagcagagacggcatttcaccatgttggccagactggtctcgaactcctgacctcaagtctgcccacctcgggctcccaaagtgctgggattacaggcatgagccacggcacccagctggtctctgccatcttaaacatgtggcttctatctctctgttccatggggcctaggcagaaatcaccatcatatctgaatgtgggaagggggttaaagcaggaagcacaggtcctttcctgattaaggacaccactaacctgctcagaagttgtccagatgcagctggacacagtggctcatgcctgtaatcccagtactttgggaggccagaagaaggtttgcttgaggtcaggagttcaagaccagcctggttaacatagcaagacccccatctctattatttaaatttctaataaaaaatgaattaaagtccgggcacggtggctcacacctgtaatcccagcactttgggaggccgaggcgggcggatcacgaggtcaggagttcgacaccagcccgaccaacatggtgaaaccctgtctctactaaaaataaaaaaaaaaaattaaccaggtgtggtggcacacacctgtaatcccagctactcaggaggctgaggcaggagaatggtgtgaacccgggaggtggagcttgcagtgagctgagattgcaccactgcactccagcctgggcaacagagtgagactccgtctcaaaattaattaattaattaatcaatcaatcaattaattaattaaaataaaaagttagtcagatgcaaggaaagctgggacatgtagtctctatccatgtacacagctaaaacattattaataaacaaagaaggcaatttaggaggccgaggcagggggattacttgagcccaggggttcgagaccagcctgggcaacgtagtgagaccctgtctctataaaaaataaaaaataataaaataggctgagcatggtgactcacacctgtaatctcagcactttgggggccgaaggagaaagattgcttgagctcaggaattcgaaaccagcctgggcaacatagtgagacttcatgtttgctaaagataaaaataaataaattaattaaccagatgtggtggctcatgcctgtagtcccagcaactcaggaggctgaggtgggagggtcccttgagcccaggggattgaggctgcagtgagctatgatcacacccctgcattccagcctgggtgacagagtgagaccctgtctcaaaaaataaaaataattgatgataacaataataaacaaagaagggcaatgggaaatggtataagagtagcagtctatgcctagtggatccatcatgtcaatgttatcgctctctctttttttttttttttttgacagcctcaacctcctgggctcaagtgatcctcttgcctcagcctcctgagtagctagaactacaagcacgcaccaccacgacaggctaattaaaaaaaaatttttttttctatagagatggggtctcgatatgttgcctagagtggtctccaacactggcctcaagtgatcctcctgcctcagcctcccaaagtgttgggattacaggcatgagccactgtgcccagcccaatgctatctcttgaatactgcttaaatccatcccttctacggtgtgccaattgctattaccttgattcctgcccatttcctggcctctaacttagtccctttctaatcaatctaccaaatggctgccagaggtatctttctaaaatgccaattgggtcaataaccctcctgttcaaaatcttgcagtagttcccaggggtttccaggagaagagtcaacttctttgcatgacacaaaggccaggtcttgtcccctcaactcagaaatgcctttcacccctcctccagctccacttccttgtctgccagaaaaacccaggccatttcctgggacttagtttaaatattgttttaaatgttgtttgtgccccactgcaatgctggctccattcctgttgaagcctttactggactgtgtatttctgggcacttgccatccatcctgggaccggggctccctgtgaagccaaggcacttggtttatctgacagaaggctgggtgaaggctgggtacagtggctcaggcctgtaatcccagcacctttcgaggctgaggcaggtggattgcttgaggtcaggagtttgagaccagcctgggcagcatggcaaaacctcatctctgcaaaaaatacaaaaatcaggccaggcacggtggctcacacctataatcccagcactttgggaggccaaggcaggcggatcacctgaggtcaggagttcgagacccgcctgggcaacatggcaaaaccctgtgtctactaaaaatccaaaaatttgccaggcgtggtggtgcgtgcctgtagtcccagccacttgggagtgagacagaagagtcacgtgaacctgggaggcagtggtggcagtgagccaagatcatgccattgcactccagtctgggcttcagagcaagactctgtctcaagaaaaaaaaaaaaccagttgggtgtagtggtgtgtgcctgtggtcccagctgctcgggagactgaagcaaaaggattgcttgactccgggagactgaggctgcaatgagctgtgatcacgccactgcactccagcctgagtgacagaacgaaatcctgtctcaagaaagaaaacaagggctgggtgtggtggctcacgcctgtaatccaagcactttgggaagccaaggtgggtgaatcacttgaggtcaggagttcaagaccagcctggccaacatggtgaaaccctgtctctactaaaaataaaaaaaaaattagctgggcgtggtggtgcatgcctgtaatcccagctactcaggaggctgaggcaggagaatcgcttgaatccaaaaggcggaggttgcagtaagctgatattgcgccacttcactccagcctgggcgacagagcgagactccttctcaaaggaaaaaaaaaaaaacagccagcttgggaaacatagcaagaccctgtttctaccaaaaacaaaaaaaaggccgggcgcggtggctcacacctgtaatcccagcactttgggaggctgaggcagttggatcatgaggtcatgagttgaagaccagcctggtcaagatggtaaaaccccatctccactaaaaatacaaaaactaaccaggcgtggtggcgggcgcctgtaatcccagctactcgggaggctgaggcagacaattgcttgaacccgggaagtaaaggctgcagtgagccaagatggcgctactgcactccagcctgggtgacagagcaagactccatctcaaaaaaaaaaggaaagaaagaaacaaaaataaacaaataaaaacggttgtaggcatgaacccattggttttatttttattttattttattttattttatttttaagagacagtgtctcactctgtcacccaggctgcaatggtgtgatcatagctcactgcagcctcgacctcatccagctggtcattaattacttcatctcatctcctcctgacactgacctctgtcagcggctcacatccaaccctccttctagactgaactcctatttccacatattccagaagttttcatgtccttagacctctgtccatgctgttctctttgtgggatatctttcccgctttcttcacctatgagcttctattcatccttcacggtttttgtttgtttgtttgtttttgagacgaagtttcactcttgttgcccaggctggaatgcaatggcacaatctcagctcactgcaacctctgcctcccaggttgaagtgattctcctgcctcagcctcccaggtagctgggactacaggcgcccaccaccacgcccagctaactttttgtatttttagtagagatggggtttcgccatattggccaggctggtcccaaacgcctgacctcaggtgatccacccgcctcagcctcccacagtgctgcgattacaggcctgagccactgtgcatgaactcatccttcacagtttagttccaacttcacttctagaagatttcctggattctcagcgacaggtaacccctccctcctccgggcatcttttttttttttttttaattgaggtggagtctcactctgtcacccaggctggagtgcagtggtgcaatctaggcccactgcaacctccgcctcccggttataatctattttcctgcctcagtctcctgagtagctgggataacaggcgcatgccaccacgcccagctaattttttgtatttttaatagagacggggtttcaccatattggtcaggctggccttcaactccttacctcaaatgatccactcgcctcggcctcccaaagtgctgggattacagacgtgagccactgcgcccggccctggcctccttttcacctctcttctgtgcgtatctgagctccccactgcaccaaagctccttgagagcaaggatatcccgtatgtcacccatctcagtatccctcctatgtctagcatggtgcctgccacacagtaggcatcaaagatgtttcttggccaggcacagggctcatgcttgtaatcccagcattttgggaggccaagacaggaggatctcgagcccgggagttcgaggctgcactgatccgtgaccataccactgcgctccagcctgagcaataaagcaagaccctgtctctttattttattttttgagacatggtcttgctctgctgcccaggctggagtgcagtagtatgatcatggctcactacagcctcaacctctcgggctcaagtgatcctctcacttcatcctcccaagtaactgggactacaggatcacaccaccatgcctggctaattttttagaaaactttttgtagagatgggttcttgatatgttgctcaagctggtttctaactccaaggttcaagccatcttcctgccttggtctcccaaagtgctgggtttataggcatgagccaccatgtccagcacttgtctcttaaaaaggaaaaaagggatatttgttgaatcaatgaatggataagtgaaatgtattaattgctttaccctaaccacttccataatacacagaatcttatgtcagatcccatgacaaaagaaaattggtcacagttgactggggttaaatcaagttctgccctgtagttagccaactgtagctttccccccagccatgagaagaaaattcactgcttattaccaaatagactgcaggtttccaacttaatgcataataatattaaggccttaaaacatccacagggacacttactgaatagtcctgtatgcccagctttcagccagacactgactccagaatcagatgggggcctcatcgccagctgtcctgtagatagagacagcacaacttggtgagaaacacagaggtgttaggaaacaaaggcatatctcaactgggtgataagagctgtgggttctaatcctggctctgatcccagcggactgtgtgatccaggacagagctcaggttctagctggaaaaaaaaaaaaaaaacaaaaaacaaaaaaaacctgtagaactcctacaggcacacaccagcatgcctggccagactggacaagtttccttttgtttttttattctttttagatggagtcttgctctgtcacccaggctggagtgcagtggtgtgatcttggctcactggctcactgcaacctccccctcctgggttcaagcgattctcctgcctcagcctcccgagtagctgggactacaggcgtgcaccaccacacccagttaatttttttatttttagtagagacaggatttcacaatgttggccaggctgctcttgaattcctcacctcaagtgttccacctgccttggcctcataaagtgctgggattaaaggtgtgagccaccattcccagccaagactggggaagtttcttttcttcttcatttttttttttttttttttttttggggagatggggtctgtttgttgcccaggctggtctcaaactcctggcctcaagcgatcctcccacctcagcctcccaaaatgccgggattataggcgtgagccaccacatgccctgcctgggcaagtttctaaatctgagatggttggggtggtggggaggaaagaagggatagtaggaattggcaaggtgaacttcagagtaagcgaggcaacatcattaaatgccaacaaaaggagagggataagatgaatataatcactttccaccccaacattcctttcatcctcacctcagcattttaaacgataagaaatgcaagcactcggctgggcatgctggctcacgcctgtaatcctagcactttgggaggcagaggtgggccgttcatttgagatcaggagtttgagaccagcctggccaacatggtgaaaccccgtctctactactactactactactaataataaaactagccaggagtggtggcacacacctataaccccagctacttgggaggctgaggcagaagaattgtttaaacccaggaggcagatgttgcagtgagttgagattgcgccattgcactccagcctgggcaacagagtgagactccagctcaaaaagaaaaaaagaaatgtaagcactttaagagatccactcaattcttccagacctcaatggactgacctagggtcactttggaaaaatctcactctcccagctcctgagtcggccctctcccctacagctcaccactcctgctgaaacctggaccctttcagtcttagaagccaagtctgaacttggaaccaaccctaggcattgaaatgccaccgtcgtcagtaggtaatccatgagccagctaaagccatctgtcctttggccggggaggggtggagtctcttccagggtgggcatgtggtgagcagagaaccttcaggggcacgcggacctcacatagtatccacttcctgtgctatctctggtctcaaagctccctcgcccccaaacaagtagatgggcatagtcaacacacacaagcattcagatgtgcatatgtacacacatgcacccatatgccaacacacatagacacatacatacagacacacacacaccctcacataagagtccctcacctaccccaagttgtcagagctgctcctttgcctttgctaccaaaactgtggtactgggagcccagaagaacctgggatccaagcagtagaaaaccctgttgttagccaggcgctgtggctgacacctgtaatcccagtgactgaggaagccaaagtgggaggatcacttgaggccaggagttcgagaccagactgggcaacatagttttttcttaaaaaaaaaaaaaaaaaaaaaaaagccaggtgtggtggtgtgcacctgtaagtcccagctactcaggaggctgaggcgagaggatcacttgaacccaggagttcaaggttacagtgagctataagtgtgccactgcactccagcctgggtgacggaagaccctaactcaaaaagaaaagaaacaaaaaccctcttgttgataaatgcctcctcaggagaacaggcgctgaagagagacagatggagaaaggaagctaaagccagatgggctgaatgcctgtgtgtgaacgtatgtacacatgtgtaagcatgtgtacacatgtataaggcctaggtactgcggggggtgggggggaaagcaaggcaaggaaaaaaggggccaacgaaagacaaaggagggaagttggacacggtggctcatgcttttaatcccagcactttgggactttgaggccaggagttcaagaccagcctgggcaaggtagcaagacccagtctcttaaaaaaaaaaaaaaggtaaaaacagagagagatggagacacaccccctttggtccctctctcaatcttcccttccctccctctcccggtgattccatttagaccttggtgattccatttaggcctgggtgtggcagaaccgggctcagagcagcctgaagatagataacccttctgggaactggacctctctccccaatcctgctttaaaaagtaagggggtagaggtcgggcgcagtggctcacgcctgtaattctggcatttcgagaggctgaggtgggaggatcgcttgaggccaggacttcgagatcaacctgggcaaaagagcaagaccccgtctctataaaaaatttttttttaatccaggcgtgctggcacctgcctgtaatcccagctacttgggaggctgaggaggatcgcttgagctcaggagttcgagaccagcctgggcaacatcacaagacctccgtctctaccataaaaataaaaataaaaataaaaagcaaggggatagggacctcatcagtcgtcctgcagagtcctggtctccgcctcttccctgctctcctctctgccgccagttccttagcgacggtctctaagtccctgctaggtgccccctgccccatctcctcctggccgcttaatagagtgtatcttcccctttaaagcagctgcccccggtcggtcattgtctcgcctggcagccaatcggcggcgccgttggagcgggggatccggcctcccaattggccgctgagagtcccgccccgccagggatcccgggagctgtccggccgcctcggtgctgatcccgccaccgcccacgggccgctagcagcgcagcgggcactatgagcgggggcgtctacggcggaggtgagcgagcctcgggcccccggctcccgcagccctgcgttccaaacccgcgccatccatccgagctctgggcaccccggggcctgtcacctccgcgcacgagcgggtcgagtctcaggctcgggtctcccgccacccctgcgctcggtcctccccagacgccccgcgcgcacagggccctaccttgcaacccacctccacctggccccgggccccttcctttcccgtcgggagggtgccctgagcaaggccattgggcaagaagggaccctggcggtgtgatgcccccacccccagtcccaggacctcggactccaggcccagctcccaccggccccagactggtgttgaaagtggcgagactgtggctctgccctgactttctctcggagctacctagcgggagagagttcgggggaggtccccttacaggcctgtctccccgcacagatgaggtgggggcgctggtctttgacattggctccttctcagtccgcgctgggtacgctggggaggactgtcccaaggtgagccttccagtctcctctccaaatcctaggggcttcggacccttcttcaggctttccagtgacccagggctctcccagatcgcccagaagctctgctgagcgggaatatgggaataaacccaggggcggtctgaggaccctgctgtggggctggacaggggcaagagggtgacctctctccctgccaatactcccccaacccttccccaccaggctgacttccccaccacagtggggctgctggccgcggaggaggggggcgggctggagctggagggggacaaagagaagaaagggaagatcttccacatcgacaccaatgccctgcacgtgcctcgggatggagcggaggtcatgtcgcccctcaagaatggcatgagtaaggggcccccacccatcacctcctgacagaaaaggagcccgctccccacaatctgggtcatagcagcccccactccccgcggagtcttccttgcagccccagggttcttctggctgccagggttcttctcgctgggttcccttcccaggggcccaccaggtttctgggaaggggggcgttcccctggagctggactcactgaccctcctttgggcttggcctttctccctccttttcttcctgtccctgtcccctgcctgccttcttgcgtctctgcacgctgctcttctggccccagtcgaggactgggagtgcttccgagccatcctggatcacacctacagcaaacacgtcaagtctgagccaaacctgcacccagtgctcatgtccgaggctccggtgagtgcctcctccatcctcatgtccaaccctgatctccactgcacctccttcccaccatccacctctcctcctctcccctcaagccactgctctgagccacttcccttcccttttcagactcccctcacccatcccaaacaatttccttccttcttggctaagtctccatccctcctgctctcttcttgctctatgcactctgctgcccttctctgtctccaagtcctttttaaattttttttttttgacacagtctcactccgtcacccaggctggagtgcaatggtgagatctcagcctctgcctcccgacatcaaaggaatctcctgcctcagcctcctgagtatctgggattacaggcacccgccaccacgcctggctaattttttgtatttttagtagacagggggtttcgccttgttggccaggctggtctcgaactcctgacctcaggtgatccacccgccttggcctcccaaagtgttgggattacaggcatgaggcaccacgcccagcctccaagtccttttttgaccttttcacttattattattattatttttattattatggtcaactttggtgagctggggatgttggctcacacctgtaatcccaacactttgggaagccaaggcaggaggatcacttgagcccaggagtttgagaccaccctaggcaatatggcaagacccgtctcttttattaaaacaataaaaattaaaaattttttgccgggtgtggtggctcacgcctgtaatcccagcactttgggaggccgaggcgggtggatcacgaggtcaagagatcaagaccatcctggataacacggtgaaaccccatctctactaaaaatacaaaaaattagccaggcatggtggcgggcacctgtagtcccagctactcgggaggctgaggcaggagaatggcgtgaacccgggaggcggagcttgcagtgagctgagatcgcaccaatgcactccagcctgggcaacagagcgagactctgtctcaaaaaaaaaaaaaatttaaaacctcatttaaaaaaatgttcttacccacctccttataaattcctctttataaaagcaactgtttttctcctttttagctaatgttgggggtattttcttccatatctctaatactacacttaaattgctgcctgtggagtgtttagttttaggtattatcgctgaattttccactttagaaaatgatcgcttagctctcttttcctccccagcctatgccacacgtatttcttatcaccctcctttaagtacagtgggttttgttgttgttgttgttgttgtttggggttttgtttgttgtttgtttttgagactttgcctcaaaaacagggggtctgctcagtttgtcacccaggttggattgcagtggcacaattcttcagccttggtctcctgggctcaagtgatcctctcatttcagtctccagagtagctggaactacaggcataagccaccatgcccagctgatttttaaattttttttagagacagggtttcatcatgttgtccaggctggtcttgaattcctgggctcaagcaatctgcccgcctcggcctcccaaaaggctgggattacaggcgagatccaccacacccagcccagttgtattttagactttaaaagaaatcagtattcagtatttacattctttttaaattagaaataattttaagagaatcttttgcagagatggggtctcatcatattgcccaggctggcttcaaactcctgtgcttaagcgatccttctacttcagctaacaaagtgctgggattacaggcatgagtcactgtgctcagcccaatatttacactcctattactatgtatgctaatcaggcctgagacaggcaatacaccatgatcacctttcctttcttgtgcaactttttgttttcctagaactggaaaaaaaatgtgttcaagttctttttttttttttttttttttttttttttttgagacggagttttgctctgtcaccaggctggagtgcagtggtgcgatctcagctcactgcaagctccgcctcccgggttcaagtgattctcctgcctcagcctcctgagtagctgggactacaggtgcgtgccaccacgcccagctaatttttgtatttttagtagagacggggtttcaccatgttggccgggatggtctcgatctcttgacctcgtgatccaccgaccttggcctcccaaagtgctgggattacaggcgtaagccaccatcccagccctgtgtttgattatatttggtctggttttctatctacttaacagtgtgaaccctaaatcattcatcaattgtatcttttgtcaagacgtcaattccattagatattttatcaatttctttttttttttttttttgagacatagtcttgctctgttgcccaggctggagtgccatggcgcgatctcggctcactgcaagctccacctcctgggttctcctgcctcagcctcccgagtagctgggactacaggtgcccaccaccacatccgactaattttttgtatttttttttttttttttgagatggagtctcactctgttgcccaggctggagtgcagtggtgcgatctcggctcactgaaagctccatttctcctgcctcagcctcccaagtagctgggactcacaccattctcctgcctcggcctcccaagtagctgggactataggcacccaccaccacgcccggctaattttttgtatttttagtagaggcggggtttcaccgtgttagccaggatggtctccatctcctgacctcgcgatccgccggcctcggcctcccaaagtgctgggattacaggcgtgagccaccacacctggcctctcatcaatttcatttcttgaagaaatttcttcaggagcccactgacctggtccagtttgcactagtagccctctgccaggggacagacctgtcatgctggcatcttccttcaccatcatcttgtagaatccttttgcctctgtcctggttagaagtcctgtttcctgtacttgactccttttcttgacttattcctttgttttcatggagcaggtccttcagtaactgccttagaaaggtcatgagaggccagagacagtcgctcactcctgtaatcccagcactttgggaggccttgagtccaggagtttgagaccagcctgggcaatatactgataccttatctctaccaaaaatataaaaattagctggccatggtggtgcatgcttgtagtaccagctactcggaaggctgaggcaagagaattgcttgtacccaggaggcagagattgcagtcagcctagatcatgccactgaactccagcctgggcgacagagtgagactccatttaaaaaaataattaattaaataataatctaaaaaaaaacttttttttttttttgagatgaagtgtcactcttgtcccccaggctggagtgcaatggcgtgatcttggctcactgcaacctccgcttcccgggttcaaggattctcctgcctcagcatcccaagtagctgggattacaggcacctcccatcacacctggctaatttttgtatttttagtagagacggggtttcaccatgttggccaggctggtctcaaactcctgacctcaggtgatctgcccgccttggcctcccaaagcgctgggattacaggcatgagccaccgcgcccagcatctaaaaaaaaaatttaaaataaggtcatgggaagtatattttttgagactttgtgtgtctcaccttgagttgatagcttagctaggtatcccatgccaggttagaaatcattattcttcagaatcttgaaggcacttttccattgtccttcttccagcatatatcgttgccatttagaaggatgaaaccatctgatttctgatcctctgatgtaatgtttttctttctgaaagtttatagaatttttactttatcctcagtgtggtgtattttcattcatggctctaggcacttagtatgtctcttcattctgaaaacatatgtctttcaattcagtgaaaaagaattatttatttaattatttatttctctccattttctctcttgggattttctgttattggattttgttgccccctgaattggtcccctaatttaattcccttttctcttatattttccatctctttacctttttcctttggtttccaagatattccctccactttatgttccaatccttctattgagtttttcatttctgttcatgtagttttaattcccacaagctccttactttaaattttttttttaatgagacagcatctcactatgttgtccaggctagtttcgaactcctgggttcaagcaatcctcctgcctcggcctcccaaagtgctgggattataggcgtaagccaccctgtctggcctgtgcaaatgttttaaatgcatgtgtgtgtgactgtgagtgtgaatatatgtgtatgtgtgtgtgtgagtttgtgtgtgaatgtgagtatatatgtgtttgaccgtgtgtttgtgagtgtgtttgcatgtgtgaccgtgagtgtatgtatagtgtgaatgcatgtgtgtgtttatgtgtgtctgtgaatgtgagtgtatgtgtgtgtgtttgagtgtatgtgtgtgtgtgtgcaagtgaatgcatgtgtgtatgaccgtgagtgtatgtgtgagtgtttaggttgtgtatgtgtgtgcaagtgtttggatgtgtgtgtgtgaccgtgagtgtatgtgtgagtgagtgggttgcgtgtgcgtggatgtgggtctgtgcctctcccttcctgaatcctccccctctgcactttctccacagtggaacacacgggccaagcgggagaagctgacagagctgatgttcgagcagtacaacattcctgccttcttcttatgcaagacggctgtgctcaccgcgtatcctctggactgagctgctctgactgggtggagggctggggtggggcctgtgctgagctcagctgtgatgagctggagggtcaggcctggttctctgaagatcagtgtcccaatgggcagacacctccctctgccccactagtgcagaaggcccagtggactgagcacctccgactctggggtggccagatcagcggcccctttcggttccccggatcaggctgagcagacagtgagctgggcccgggagagagtaggggctggaactggacagaggagggagacgtgtagaacactgcggcagtcccttcccaagaactccttcaacactgactgtttttaggatctgccttgcattgaaccctgtgctatgcactggggtgatagcgaccctaatttcagggaatctgtaggacacaaccaaaaataaaggggctggccaggcgcggtggctcacgcctgtaatcccagcattttgggaggccaaggcgggcagatcacttgaggtcaggagttagagaccagtccggccaacatggcaaaagcccgtgtctactaaaaatggaaaaattagccaggcatagtggtgggcacctgtagtcccagctacttgggaggctgaggcaggagaatctcttgaacccaggaggcagaggttgcagtgagctattgcattccagcctgggcgacaaaacgaaactcagtttcaaaaaaaaaaaaataactaaagaagtaactggggtcgccgggtgtggtggctcatgcctgtaatcccggcactttgggaggccgaggcgggcagatcacgaggtcaggagatcgagaccatcctggctaacacggtgaaatcccatctctactaaaaatacgaaaaattggccgggcgtggtggcaggcacctgtagtcccagctactcgggaggctgaggcaggagaatggcatgaacccgggaggcggagcttgcagtgagctgagattgcgccactgcactccagcctgggagacagcaagactccatctcaaaaaaaaaaaaaaagaagtaactggggtctcagagcctttctccaggagatgagtcatcaccagggggagagatttgcagactggggatgggctggaccccggtagagcagagagtgaccagacaagatctgggcccaggcccctcacttgctgctgctgtctctttgacttacccatccgatgccagctttgcaaacgggcggtccactggcctcgtgctggacagtggagccacccacaccacggccattccagtacatgacggctacgttctgcagcaaggtggggcttcggcagggggtgggggtgctccaggaggaccaggtcctgacagtgccttccttctaggcatcgtcaagtcccctctggcaggggacttcatctccatgcagtgccgggagctgttccaggagatggccattgacatcatcccaccttacatgatcgcagccaaggtggggcctctggggacatggagctgccactagagtcctggccactcgccccatggccgtcaaccctctgacacatgagatatcagagcagagagcagcaggctccccagtgggtcctggctccagttcctccttttataatcgaggcatccgaaatccagacaggctgagggatatgctgaggtcatgaaaccagctggcagacagcaggatgtgtgagggccagtgtggtgggttctagggtccaatatagacccaggttcaagttctgcctctgccgtgcaagagctgcaggaccggtcaggcatggtggctcacacctgtaatcccagcacttcgggaggctgaggcaggcagatcgctttgagctcacttcgagaccagcctgggcaacatggtgaagccacgtctctactaaaactgcaagaactagccaagcatggtggtgcatgcctgtagtcccagctacttgggaggctgagactggagaatcacctgaaccccggaggcagaggttgcagtgagccgagatcgcgccactgcactccagcctgggcgaccgagtgagactccatctgaaaaaaaaaaaaaaaaagagctgtgtgaccaacagcatgatatcaaagctccctgggcctcaggtttgtcttatgtaaagtggaacggcagtaggcagtagccagggtgctgtgagtatgaagtgacactgtgtgcttagctccattccgtgccctcacatggatcatgaccccctaggaggccattcccttgaggttctgtcactgctgtattcctggtgttctccagatcagctgcacccaccgcatgaaaggcacacatggagagagaggcatgccccattctctctcctctccatcagggaagggtgagaaacccctcttgcaggcagcacagcagagcctgcagcgccaggtagctgcagagctgggaacagtgccaggaaggtgggggtgggggtcaggtgggctaggaaagggtgttcctacactgtgcccccacaggagcctgtccgggagggtgcccccccaaactggaagaagaaggagaagctaccccaggtctccaagtcctggcataactacatgtgtaatgtgagcctctggagagggccacctgaaacccccctcccctgccatgaatcgggggcgggacagaggccccgcatgggagggggagcagggagggggagcggggcagggggtgctgctcacggggaaggcaggccctcaccacctccgctgggatttcaggaggtgatccaggacttccaggcctccgtgctgcaggtctcagactccccctacgatgaacagtgagtgtggctcagggctttggggtgggagagagggcagaaccggcactcttggggtgggctggggggctctggtgctgcccacgcactgatccttcttgagcaccccaggcagagtcctgctcccttctgggtagggtggctgcacaaatgcccacagtgcactacgagatgcccaatggctacaatacagactacggcgccgagcgactccgcatccctgagggcctgtttgatccctcgaacgtcaaggtttggctgtgtggcgaggactggggtgggtgctggctgcagtccctggatcctggggcgtgggggaggctgggaaggattgcaggggtctggggggaagggggagagagcccacagccccagtcacctctctctgcagggcctgtcggggaacaccatgttgggtgtgggccacgtggtgaccaccagcatcggcatgtgtgacattgatattcgcccggtgaggccaggccggagctgaggctcggcaaaggggcccaggggaagtggggagacggggttggggggctgcccccgcagctcactccttctccctgctctcagggcctgtacgggagtgtcattgtcaccggcgggaacacactgctgcagggcttcactgacaggctcaatcgagagctttcccagaagaccccaccggtaggagcccacccctgacccagagccctggacacccgtcctggctcagctgtccaggactgagtcccttcatccttcccatgtccttccttctgttctggccaccagagcagaacccctgcccctgtggcttcccaagtcttcccctctcccccaagccctgtcccttcccagaacctaggtgtctgcttcccccagcccctttttacccccagagcatgcgactgaaactcattgccagcaacagcaccatggagcgcaagttcagcccctggatcgggggttccatcctggcctcactggtgagaggaaagggacctggcctagcactgactgtgggggagaggggagacccagacagtgcccgccactttgactgcctcttcgttcattcattcattcaacaaacatttagttttgagaaatgtcagtcaatgaatgttcccagaagggtgaacaggacacaaatcggggggcaggggcccggtatggtggcccacacctgtcatcccagcactttgggtggctgaagtggggggatggcttgaggctaggagttgaaaacccagcaggggaacatagcaagacccatctctacttttacaaactggggagaagaggctgcgcacagtggctcatgccggtaatccctgcagtttgggaggccgagacgggtggatcacttgagctcaggagttcgagaccagcctggccaacatgacgaaaccttgtctctactaaaaatccaaaaattagccaggcatggtggtgcatgcctgtaatcccagctattcaggaggctgaggcaggagaatctcttgaacccaggagacggagactgcagtgagctgagatcgtgccactgcactccagcctgggtgacgcagtaagactctcaaaaaaaaaaaaaaattgggagtagagggacaggtagttggagagattggtcaggatgagattttggtgatacacccactgtgctcagtcagcagaggggagaccctgatgttttggggcaagggagtgatgtggcaatgcaggcatgattggaaagactgccaggcatgagtctttggggtcggggtatgagctggggtcaaggggaccttacaaggaggctgttttgattgtcccggagtcatagcatgggtagcagtggggatggggtggacagcaaggggcaactagtaaaggaggcaggcaggttggttctggggcaggaggtggtaagttcagtctggacctgctgctgggttcgaaggaaggtactgagcagggagctggagttgcaacccgcatctggagggtatcagtcacacagaggggacagtggggccatgacagacaaggaggacatccacgagaaaggaagtcccccagggagacagaaaccagggtcagaaagacagaggctggcagtctgaacttagctcagggctgaagcatgtcagccacacagttcttgtttttttcctttttttgtttttgtttttgttttcgagacagtctcactgtcgcccaggctggagtgcagtggagcaatcttggctcactgcaacctccatctcctgggttcaagcgattcttctgcctcagcctcccgagtagctgggattacatgcgtgagccaccacgcctggctaatttttggattgttaatagagatggggtttcaccgtgttggctaagcttgtctcaaactcctgacctcaagtgatctgcccatcttggcctcccaaagtgctgggattacaggtgtgagccaccatgcccggcctgaaattaagtattaataatatatcctggacaagtggagtggctcacacctgtaatcccagcactttgagaggccaaggcgggaggatcatttgagcccaaaatttctagaccagcctgggcaacaaagcgagacctcatctctacaaaaaatttaaaaagcaactggcaatgtggcgcatacctgtagtcccacctacttgggaggccaaggttggaggatcactggaacctggaaggttgaggctgcagtgagctgtgccactgcattccaacctgggtgacagagcaagatcctgtctcaaaaaaaacccaaaaaaattgggtgtgtattttccacttagagcacgtctcaatttggaccagggctggtgagctacaggaagctagtggccactgcattggacagcacatgtgtgtaggctgagaaagatcaaagaagcccagccgtggtagctcacgcctgtaatcccaacattatgggaggctgaggtggaacgattacttgagcccaggagtttgagaccaggctgggcaacatagtgagacaccatctctacaaaaaataaaaattaggctgggcgcggtggctcacgcttgtaatcccagcactttgggaggccgaggcgggcggatcatctgaggtcaggagtttgagaccagcttggccaacatggcgaaaccctgtctctactaaaaatacaaaaattagccgggcgtgttggcacgcgcctgtaatcccagctacccagcaggctgaagcaggagaatcgctggaacctgggaggcggaggctgcagtgagccaagatcgcaccactgcattccagcctgggcgacagagcaagactccatctcaaaaaaataaaataaaaataaaaataattaaaattaaaattttaaaaaaatagagagaagggacactctgagatgctcattgcaggaaccctcaaggggcaagttgtaatgccgaaggctgcagatggggtgccacagtgttggaatggtgaggtggagggaatatcttccttgggaaagagggagactggcggtgttccaaagccctgatggagtgagaagaggacacctggtggggaaggactgtgtgtgtgtagggggtgttgagtgccaggtgcaggttgcctggcctggggctgtgcgtgccatccccccagctcaggaacagggcctagctcagggcagagactgctgttcaataatacttgttgaatgaatgaattattgattgaatgatatgaagaggatactctccctctgaatatgaaaggggacagaccgaggaggggaggatgaggtggggaggggcttcagagggatgtgaacccaaggggtggttggggcctgttggaggattcccaggggctgcacctgcctgtccacacctccctccaaggccaccctgaccctgatattaccccctccacccagggcactttccagcagatgtggatctccaagcaggaatatgaggagggcgggaagcagtgcgtggagcgaaagtgcccctgatggcactcctccccacacacctgctcccaagctcagatggaagtcccttaacccccatgccacattgcccccctcctcctttccctcttgtcctcataaatggtgatgtttctgggttgaaagaagtaaaaatgttttaagaaaaaaaagtttggcctccgtggggtggggagtgggcacaggggtctggagggaggtgaggggagggagtctcacttctacacccatgccgatcccacagtgggtgctgggacacagccccaggggccatggattcctcaggtttcctaggggttgtgacccagggagggccacatgacgaggaccgggggttgggggagttgctgggggctaacagttgtggtgggaggtgggaggggctgcagggtgcagtggaggggcacggcctggggtgagtgtggcaggaggtgggtggagcaggaggtgaagcctggatgggcggaacaggaggtggggcctggtgggcggggcctcagcgtaggccttaggtctcaggggagcagcacgcctgagcaccccaggacctgcgctcaggtgagatgcgctatgccctccttcctggggctcttggtggtgacagacatggggcggggactagggcgctggtgcatcccagcagctcggaacttctctggacctgagtaggagctgatgttccccaggggaaacccgaaagggaaacttggtgggaccctgagccctcctcttcagagctacttgtcttggggccctcggaagggtttggggacctgcgccccctgcctgtttagcagtttatgcctgtgacatgtttctggggtgaggctaactggcctttcatcagcctcagaacccaaagaggtagaaacccatgtgatccaagtccttcggtgaccaaacgggccggtgcccagggaggaccatgacttgtccagggtcacccagctctgcccacaccttggcggggactctgatcactcctccccactgacccacatatccctgaccccaggacccctatctgggagctctcgctggtctcatctgaccatgtgctcccacctgtgcccctccttctccagcagccagcaggagtctgagaacgacctttcaaaagagacacacatgcacaccaccagaccagacccccaagtcacaccactgtggtgcctccagcttagaatgccactggggcaagtgtcaggacagggaggacagctgatatgtcacaggaccggggcactgggggactctgaaggccagatgaggaaggggcagatgtcttaggggtgaatcttccacctgggcatggcggggcttaggaaggggtccccaggatccagggaggggtaaaagcaggagaggggagggggcacccatgtctctgccctcccccactatcggcccccttcccccacccctgatgggaactaggaggccaaagtccgccccaaggtcaaaaaattgattgttttgcagggaggaggcaggcgtggggctgtggagagattggcaggggagagcacagccccttgtgctctggcctggacccgggggccacgtctggaaggctggactgaggccaggactgtgcccccacccttgggggtggtgaggagcagccttggttcaggctgcctgccaggactgataaggggccctcctagggctcccacaaacggtttatcggtttatcgctgggggacagcctgcaggcttcaggaggggacacaagcatggagcggctttggggtctattccagagagcggtaagactagtgggattgggaagaccccttaggccttctctctaagtccctcagccccctcccaagcccctgaggctggcccctcctggaccgtgtcctgacctcgcttcttcccacccctgcccctcccccacgcccccaccaccatgctcatttgacacccccaagtcactgacctcattattgccagatgcctccccaccccccaggcctcttgccccaatctcatgcccacctcgcctgcacagcaacaactgtccccaagatcctctcagaccgtctaccagcgtgtggaaggcccccggaaagggcacctggaggaggaagaggaagacggggaggagggggcggagacattggcccacttctgccccatggagctgaggggccctgagcccctgggctctagacccaggcagccaaacctcattccctgggcggcagcaggacggagggctgccccctacctggtcctgacggccctgctgatcttcactgggggtgagagccgtccccctccccagaagtgaagggcttgggctgggggagatttctggggtccagaggtgggcataaagagaatccccatcttgccacccgccagccttcctactgggctacgtcgccttccgagggtcctgccaggcgtgcggagactctgtgttggtggtcagtgaggatgtcaactatgagcctgacctggatttccaccagggcagactctactggagcgacctccaggccatgttcctgcagttcctgggggaggggcgcctggaggacaccatcaggtagggatggccctgccccatcctgttctcgagtgtccctcccctcatccgctcagactgggcctccctgcctcctggcccaggcctctggtgtctgggtccccctcctgagtcctcccatctgccttcctggcccccctgttcagcggtcctgggaaggatggcaggcattcggagctgaggttccaggggactgaggctctgagggtggcatatttgggaggtgagggagctgactgtctgagatcagaggggtgcagcatccagtatcagactggacagacccagaaaagccttgaatgcctcacccaggcgcctagatttggagcagggagcgctgaggggttctgagaagccgcattctagggaatcagaaaaccaagcaagcaagcctgggcaatacgatgaaaccccgtctctaccaaagaaaacacaaaaattagctggggatgatggcgagtgcctgtagtcccagttacttgggagcttgacgggggaggattgcctgagccggggaggcggaggttgcagtgagccgagattatgccactgcactccagcctgggagacagagcgagaccctgtttcaaaaacaaaataacggcagggtgcggtggctcaggcctgtaatcccagcactttgggaggcggaggcgggcagatcactaggtcaggatatcgagaccatcttggctaacacggtgaaaccccgtctgtactaaaaacacaaaatattagccgggcatggtggcgggcgcctctagtcccagctattcgggaggctgaggcaggagaatggcttgaacccaggaggtggagcatgcattgagccgagatcacgccactgcacttcagcctgggcaacagagcgagactccatctcaaaaaaaaaaaaaaaagaaaagaaaaaaagaaaaacaagtaagcaaatgcatttgtgggtgcagatccagaagctaggtccacccatagccctcttttgggacgggagtaatttttcagtggattcgcctgggttttctaagtaggtaatcagctaagctacagatagtaggagatggagattctcttttccaatgcttataccttctacgtttttttttttttcatttctcattgcatttgagaggacatgaatttaaggtaaccgtggcagtaggtatccttgcctatttcctgactttaatagcaatgcttttataatactttgccattgacaatgaactttgctgtgctccagacagctttttaaaattgaattaaggaagtttcctttcactcctagctcactgagacttttattgattgattgattttttgagacggagtctccctcttatcacccaggctggagtgcagtggtgcaatcttggctcactgcagcctccgcctcccaggttcacgcgattctcatgcctcagcctcctgagtagctgggattacaggtgtgtgccatcacgcttgattaatttttgtattttttagtagagacagggttttgccatgttgcccaggttggtctccaactcgtaagctcaagcgatctgccaaagcgcttcggcttcccaaagtgctgggattacaggcatgagccacagcacccagcctcttctttaatgtttatatagtaatttgtgttaatagatttccttatcttcctgagctcaacgctaaccttgatcaaggtgtatgattactcttttgatatgttgctgggttcacctgctgaaagaccttgagtctgtggaatcaacaatgttcagggctttatttttttgagatagggcctcactgtcacccagacagtgccgagatgatagctcactgcagcctccaactcctggacccaagtgatcctcccaccttagcctttcaagtagctaggactacagatgtgtgccactatgcccggctatttttttttttttactttttttgagacagagtttcactgttgcccaggctggagtgcagtggtgcgatctcggctcatggcaacctccacctcccaggttcaagcaattctcctgccttagcctcccgagtagctgggatcacaggtgcctgccaccacacccaaccaattttttgtatttttagtagagatggggtttcaccatgttgggcagactggtctcaaactcctgacctcagatgatccacccaccacggcctcccaaagtgcagggattacaggcatgagccaccatgcccagcctaatttttaattttttttagtagaaacgaggtctccctatgttgcccaggatggtctcaaactactggcctcaaacaatcctcccacctcagcctcccaaaatgctgggattataggaattaggtaccgcacccagcctgctcagggcttttaaattaaattacaggtcaggcatggtggctcacacctgtaatcccagcactttgggaggccgaggtgggcagatcatgaggtcaggagatcgagactatcctggctaacatggtgaaaccccgtttctactaaaaacacaaaaaattagctgggcgtggtggcgggcacctatagtcccagctacttgggaggctgaggcaggagaatggcatgaacccgggaggcggagcttgcagtgaaccgagatcgcgccactgcactccagcctgggcgacagagcaagactctgtctcaaaaaaacaaaacaaatacaaaattagccgggcgtagtggcgcatgcctgtaatcccagctactcgggaggctgaagcaggagaatcgcttaaacccaggaggcggaggttgcggtgagtcaacgtcgtgccattgcactccagcctgtgaaacagagcaagactccatctcaaaaaaaaaaaaaattaaattacattaattttttttgagacagggccttgctctgtcacctaggctagaatgcagtggtgcaatctgggctcactgcagcctcgatttcccaagctcaggtgattctcccatctcagcctcctgagtagctgggtctacagggaggggccaccacgcccagctaatttttcatttttcttttttcaaaattattattattatttagggacaggatttatttatttttatatatttgcaaccaattctcactctgttgcccaagctggagtacagtggcatgatcttagctcactgtaacctccgcctcccggcttcaggtgatttttgtgcctcagcttcccaagtagctgggactacaggcgtgagccaccatgcccagctaatttatgatttttttgtttgttttttgtttttttcttttttttttgtgagacagagtttcactcttgttgcccaggctggagagcaatggcacgatcttggctcactgcaaactccgcctcccgggttcaagcgattctcctgcctcagctccccgagtagctgggattacagtcatgcgccacgacacccagctaattttgtatttttagtggagatggggtttctccatgttggtcagtctggtctcgaactcctgacctcaggagatccacccacctcggcctcccaaagtgctgggattacaggtgtgagccactgcgcccggcaatttatgtattttttttagggacagggtttcatcatgttggccaggctggtttcgaactcctgggctcaagcaatcctcctaccttggcctcccaaatttcttggattacaggcgtaagccatggtgcccagcctgttcagggctacttttatttttttgagcagtatttggtcatctgggtacaggctgagcaggtagatagtttgacaggtctagaagcggggtgtggcactgaggcaaaagtagcagttttggggagagagcaaggatgttgcagtgagccgagatcgcgccattgcattccagcctgggcaacaagagtgaaacatggctctcggtgggatggagagggaagagaaagtggggggagatgatacatgtggagctataggacatttgtcatgttcaatggggttgaagagcaggtacagcgaggataactgggggagttggaacctgacagggtctactcagagagtaggattctggatccttgaaaacttcctgatacaatatatcctgtctatctcagagtctccagcacctaccacaatgcctggcacttactagatgttcagtagatcctcaatggataagtattccagagatggagtgcgggtaatgacaagatgcaggatacgggccaggcacagtggctcacgcctgtaatcccagcactttgggaggtcaaggcaggtggatcatctgaggtcaggagtttgagaccagcctggccaacatggtgaaatcctgtctctactaaaaatacaaaaattaactgggtgtgatggtgcatgcctgtaatcccagctactcgggaggctgaggcaggagaatcacttgaaactgggaggcagaggttgcagtgagctgagatcgcaccaatgcactccagcctgtgaaacagagcaagactccatctcaaaaaaaaaaaaaaaaaaaagatgcagggtgtgaccagggaagtggagtgcctggactggaggtgacaatgatgaagtaattaattcatttatccaacaagtattttggggcatctactacgtggcaggtactaagctaagcaggtggtggtgagatagagactaaaacagtctaactttgttctcatggtgcttacaatccactggagaaaaccaatactaaactaacaatcattcacgactacataattatgactggaatcattgctttgaaagaaaagcaaaggatgtgaggctcagtgtggtggctcacacctgtgagcccagcactttgggaggctgaggtgggaggatctcttgagcccagtttgagaccagcctgggcaacatagagagatcctgtctcttaaaaaaataataataatttgaccaggcacggtggctcacacctgtaatcccagcactttgggaggccaaggcaggtggatctcctgaggacaggagttcgagaccagcctggccaacatggtgaaacactgtttcaccctttttaggctctactaaaaatacaaaaaaaattagctgggcatgttggcgggcacctataatcccagctacttgggaggctgaggcaggagaattgtttgaacctgggaggtggaggttgcagtgagccaagattgcgccattgcattccagcttgggcaacaagagtgaaactccatgtcaaaaataataataataataataataataataattttttaaaaaataaaaataaaaaattagcccagtatggtggtgcatgcctagagtcccggctattcaggaggctgaggcaggaggatggcttgagcttaggagctgaaggttgcagtgagctatggtcatgccactgcactccaggctgggtgacagagtgagaccctatctccaaaaaaagaaaagaaaaggggccgggcgccatggctcatacctgtaatcccagcattttgggaggtgaaggtgggctgattgcctgaggccaggagtttgagaccagcctagccgacatgccgaaaccctgtctctactaaaaaaatacaaaactagctgagtgtggtggtaggcgcctgtggtcctagctactcaggaggctgaggcaggagaatcacttgtacccaggaggcagaggttgcagtgagctgagattgcacgactacacaccagcctgggcgacagagcgagactccgtctcaaaaaaaaaaagaaagaaagaaagaaaaaagaaaagaaaagtgtgtaaagaaagactataaccaggatcctgatttagattgcagttcagggaaggcttcgttgaggaactgacgagtctaaactgccaagatgagtaatttgccaggcaaagagactgtggaaaaacattcaggctgagattcaccatttgcgaagggtctgaaatgtgaagatggtggcctcttggaggaagggaaagatggtccatgtggccggtgaggtggatgtagctcaggccctaaagggccttactggctactttaactgttttgaattgaattttcctgcctcatccctgagtgatcctccccactcccctccccataagcaccttatctcacgcttttgatgtgtagctttaaatacacatatggggcgggtcgtcatggttcatgcctgtagtcccagcactttgggaggatcgcttgaggccaggagttcaagaccagcttgggaaacacagcaagacttctcgtctacaaaaaatttttaaaaatcagcggttggtggcgtacacctgtagtcccagctgctcaggaggctgaggcgggaggatggcttgagcccaggaaccggtgattcccctgagtaccttggtgtaaagtgtctccatgaggcccacgtggaggatgggggagatgaggagggtctgctgcctgcccagttagctctttcgaaggaaagtgtttgggtgctgtgtgtgtgtgtgtgtgtgtgtgtgtgtgtgtgtgtgtgtgttgacgtcgggaggaacgaggttgggggagagagtttggcttgagccgggaagaacctacaggatgatgggcaggacccccagctatgggaagtcaggttttaagcagagtgaggtcctgagagtctccggcgccgccctggtggtgatgggagaaaatgggtccgcggagggccctgcactgcggctcgcgcctgtaatgccagcactttgggaggccgaggcgggcagatcacctgagatcaggagtttgagaccaacctggtcaacatggtgaaacccgtctctactaaaaatacaaaaattagccgggcgtgatggcacgtgcctgtaatccctgatacgagggaggccgaggcaggaaaatggcttgaaccaggaaggcggaagttgcagagagccgagattggtccactgcactccagcctgggcgacagagcgacactccgtctcaaaaaaaaaaaaaaaaaaaaaaaaagcgtccgcggggagcgctcttttcctaaactcaggaacccctcgccgcccctgcccctggcgaccccacgtctctggcatccttccctcttccctccctctcctccgggcgcccagaaaagtccccacctctccccgcttaggcaaaccagccttcgggaacgggtggcaggctcggccgggatggccgctctgactcaggacattcgcgcggcgctctcccgccagaagctggaccacgtgtggaccgacacgcactacgtggggctgcaattcccggatccgtgagtgcgcgcgcgggcggggggcgcgcggggagggggacgcggctcggggcgctcaccagccccgctccccagggctcaccccaacaccctgcactgggtcgatgaggccgggaaggtcggagagcagctgccgctggaggaccctgacgtctactgcccctacagcgccatcggcaacgtcacggtgagcaccccctgcccgctcctaggatggggcgcggcacgagccctttcctgggtctcgaaggagggacgcggggagcgcgcctcaccgtcctcgtgtccccagggagagctggtgtacgcccactacgggcggcccgaagacctgcaggacctgcgggccaggggcgtggatccagtgggccgcctgctgctggtgcgcgtgggggtgatcagcttcgcccagaaggtaagtgtccctggacagagggagggcttgagcccgggaaccggagggtcggactgccagtgagaatcgttcagggtgctgtgagagggagacaggaaagaaccatgtggctggatggtaagaaaatataagctgggcacgatggttctcacctgcaatcccagcactttaggaggccaagacaggaggatcgcttgaggccaggaattcaaggcaacacggtgagaaccccctctctactaaaaaaaaaaaaaaaaaaaaggttctttttttttttttttagttagctgggctggtggcacatgcatgtggtcccagctactccggaggctccggtgggaggatcgcttgagcccaggagtgccaggctgcagtgagctatgatcgcgccactgcactccagcctgggcaagagagactctgtctcaaaaagaaaaaaaaaaaaaagagagagaaacagagaagggagggagggagggaggaaggaaggaaggaaaatgttggctggtctgggaattgaatcagaaggaaaaaagaaaatgttggctgggaacaaattgggtgttgggggaaatcagatggggaagggaacagaaacatggggtaccctggagcccggtggggtttgagggctgcctaggagctgctgaggttgggaagacacaggccaggtagtgcccccacatcctctccgtgggatggacagttgcaagcaaaggccttgccatttcctggtttctcctgcccttatgaatcgggtttttttctgggaggagtcctctagtcaccttcctccccaggtgaccaatgctcaggacttcggggctcaaggagtgctcatatacccagagccagcggacttctcccaggacccacccaagccaagcctgtccagccagcaggcagtgtatggacatgtgagtctggggaggctggtcgtgctgttcccaggtcccgaggccacaccttcttgctcagaatagggctggcatgtttttcgtttttcctggaagcccagctcgcagctttgcgtgggcacccctttccctgcaggtgcacctgggaactggagacccctacacacctggcttcccttccttcaatcaaacccagttccctccagttgcatcatcaggccttcccagcatcccagcccagcccatcagtgcagacattgcctcccgcctgctgaggtgaggggagtgttggggaccagaagaggaggaagcagagagaggaaggctgcagcgaggccacagggtgattgtgggtgaactagaaaaaggtgactcttgtttaagcctgcagtgagccatgactacaccattgcactccagcctgggagacagagagaccctgacctttttttttttttgagatggagtcttgctctgtcttccaggctggagtgcagtggtgcaatcttggctcactgcaacctccacctcccgggttcaagtgattcttctgcctcagactccagagtatctaggattacaggtgcccccccaccacgcccggctaatttttgtatttttagtagagggtttcaccatgttggccagactggtctcgaactcctgacctagtgatccgcccatctcggcctcccaaaatgctgggattacaggtgtgagccaccatgcctggccgggaccctgactctttaaaaaaaaaaaaaaaaaaaaaaagtgactcttctggatggacacagcctttctccagggtctactgtctggcaactaaagttcccactggattgcacacctacctcagctgagaaccatccaaggcagccctgactgcactgccctacccaggcagcgtccagaggcagcgatctggagccagaaagggtgggagggaaagaaataaggaaaagagtgatttggactcttctgggtctctctacaacttccccctttctgccttcctcctctccaggaagctcaaaggccctgtggccccccaagaatggcaggggagcctcctaggctccccttatcacctgggccccgggccacgactgcggctagtggtcaacaatcacaggacctccacccccatcaacaacatcttcggctgcatcgaaggccgctcagagccaggtatgctgtgtgtccagtatcactcacagctggtggtgggctgggggaatttctgcccatacaccctggcaagatagggggctggtgcacgaggccccaagaggggacaggagtggtgcccagaggagggaagctggcaagttgaggctgaactgggtctgatggtggcagcagtgaacagacctcaccttccagcctgtctagtgatggaatgggggttgttgcccagtagtgagctccccagcactggaagtgagtaagcctaagttggatgatgttgtaatagaaactcaagcatgggccgggtgtggtggctcacgcctgtaatcccagcactttgggaggcccaggcaggtggatcacttgaggtcaggagtttgagaccagcttggctaacatggtgaaaccccgtctctactaaaaatacaaacattagctgggcccggtggcatgcatctgtaattccagctattccggaggctcggacaggagaatcacttgaacccaggaggtggaggctgctgtgagccgagattgtgccattgcactccagcctgggcaacagagcaagactttgtctcaagaaaaagaaaaaaaagagaaagaaagaaagagagaaagagaaagaaaaaaagaaagaaagagagagagagaaaggaaggaaggaaggaaggaaggaagactcaagcatgaaagaaagatcagatcagattagatagaagcatagatggccctttcaagcatagctagatgtggatggcagtggagaattaaaataagtaattgacagatggggcaacaaagccaagacttcacaaaaaatttaaaaataagagaaattggctgggtgcggtggctcacgcctgtaatcccagcactttggaaggccgaggtgggcggatcatgaggtcaggagatcgagaccatcctggctaacatggtgaaaccctgtctactaaaaatacaaaaaaattagctgggcatggtggcaggcgcctgtactcccagctactcaggaggctgaggcaggagaatggcgtgaacccgggaggtggagcttgccgtgagccaagatcgtgccactgcactccagcctgggcaacagagcgagactccaaaaaataaattaaataaataaataagtaagtaagtaaaagaaattagccgagcatggtggcacacatctgtggtcccagctacttgggaggctcaggcaggaggatggcttgagccagggagtttgaagctgcagtgagctatgatcacaccactgcacactccagcctgggtgacagaaaccttgtaagtccagaatgaccgcaggcacccagctgaaggagcacaccatccaggaagggccaagtggggaggggcgccctctttagggactggagggactgcagggctagggttgccggaattgtgatgggctgagagacacaggcagatggaggatgcccccagggtgcagggtgcagtgtcagaagtgggtcccaaacatcccctccccagatcactacgttgtcatcggggcccagagggatgcatggggcccaggagcagctaaatccgctgtggggacggctatactcctggagctggtgcggaccttttcctccatggtgagcaacggtaaggtcagggccagggcctgggcctgggctaggcagcggtgggcctgtggcccgaggaggatagggcagagaggcagtgagggacacagactggccagtggtcacttggacctcggcatccacattgtacctgagtggccctgggccagtcacttcacctctatttcgtcacctaaaaatgaaagtgaggccgggtgcggtagctcacacctgtagtcccagcactttgggaggccgaggcagatggatcacctgaggtcaggagtttgagaccagcctagccaacatggtgaaaccctctactaaaaatacaaaaattagccaggcgtggtggagggcgcctgtaatcccagctactagggaggctgaggcaggagaatcgcttgaacctgggaggcggagtttgcagtaagccgagatcgcaccactgcactccagcctgggcaacagaatgagcctccatctaaaaaaaagaaagaaaagaaaagaaaaaaagtgacatgaatgataatcatagtccatgggtctgtgtcaagattaagcatgttgggctggacgtgatggctcatgcctgtaatcccagcactttgggaggccaacacaggagaatcgctggagaccaggaattcaaaaccagcctgggcaacatagggagactgcatctctacaaaagttttttaaaaattggctggacttagtggtgcatgcctgtaatcccagctacttgggaggctgaggcaagaggatgacttgaacctgagaggtcaaggctacattgagccatgattgcaccactgcactccagcctgggcgagagagtgagatcctgtctcagagagagagacagagaaacagagaccctgggggaccaggacagaagaagacaaggggagggtctttgcttggcccctgctaagcctgtcctccttcccctctgtccccaggcttccggccccgcagaagtctcctcttcatcagctgggacggtggtgactttggaagcgtgggctccacggagtggctagaggtgatacggggtcccgggcaggtcgttaggcattggggagaggtgggggtggggggttcccactccacactggtcacccacccacagggctacctcagcgtgctgcacctcaaagccgtagtgtacgtgagcctggacaacgcagtgctgggtgagctggggcagtgccaccacctggccccctggggtccacccttgcctctggggctgagccctgagcctggcatccctcccctcccctttttccaggggatgacaagtttcatgccaagaccagcccccttctgacaagtctcattgagagtgtcctgaagcaggcaagagcaccccaggaatagggggtgaaggggagtaggttgcggggaggagcagagcctgatcagtgcccttccccaacccccaggtggattctcccaaccacagtgggcagactctctatgaacaggtggtgttcaccaatcccagctgggatgctgaggtgtaagttgggggggtagggagagctggggagggatgtgggggagcctgaacccacagatggttccaacccacctgcccccaggatccggcccctacccatggacagcagtgcctattccttcacggcctttgtgggagtccctgccgtcgagttctcctttatggaggtgagacgtcctccccctgccccagacacagcgctagtccttcagcctgtctgcctccgccccagcgtccaccctgtcctggcaggacgaccaggcctacccattcctgcacacaaaggaggacacttatgagaacctgcataaggtgctgcaaggccgcctgcccgccgtggcccaggccgtggcccagctcgcagggcagctcctcatccggctcagccacgatcgcctgctgcccctcgacttcggccgctacggggacgtcgtcctcaggcacatcgggaacctcaacgagttctctggggacctcaaggttcaagaggcccaccccgctcttggtctctgggagtgggaggcactgcccaggccagggggtccagccccttctctctgcattccctggggtctaggtcctctctggcaatccagcccattaaccccctgcctccagtctcccagcccccagcatgtgccatcgcccaacctggcaggtgcaggatcttctccccactcccttcatcctgcctccagcactctgtcctcgtctacctcctccctcctgccaggccaggggtcccagcccccttccccatgctaggcgggggtccttgtccccatgctaggcgggggtcctggcccctgccgccagccccagcccgcgcctccccaccccaggcccgcgggctgaccctgcagtgggtgtactcggcgcggggggactacatccgggcggcggaaaagctgcggcaggagatctacagctcggaggagagagacgagcgactgacacgcatgtacaacgtgcgcataatgcgggtgaggccccgccctcctcgccccgcccccagtgtcccgcccctcccctggggctccacctcctggacctggccccgtctgcgcgctcctctctctccccgcctacacagtcccggtcctctggatgctctcttcccagtcctggacacgcagtgctcatagatcggtcaggctggaggacccgagcgatcaaagtgatgaaatggacagggagggccagcctcttggccacagtcgcctggtttacgcctggcagaactgggacaatccaccctcccccacccctccccgctgactcccctcctatagctcccactgcctcctcgacccttctggaaagaaaaagcatgtccacactggtccacaatacgaggttacaggctgggaagtgcagaaggctaaagatattcagagtaagagagctgttttccttctgataatgaaatgggtgaaatccagaaaggctgcctggaggaggtgtcacgtgaaagttaaacaagagcttattccctcaccaatcccttctgcttagctttgaatcctttgcagcccacaccccacctccagttccaactcctccacttccttccattttcttactccaagaactcaacccctcaaccctttgatgtcaagaaatgggtgagtagggactgtggccatggggaaaggtctgcagggcaaaatagtaaacaggatcatcctcaatgagtgtggggtgagctgggaactgcagtgtacacagagccacttgtgcacacacactcacggttttcagagccagcatggctaccccttggaggctcatgttatctctcctccttgcattttcctgcttgtgccctctgcctgtcccccttggccatttacaaacctattgctcttgctcgttctcccttgcccagactagagtgcagtggcaccatctctgctcactgcaacctccaactcctgggctcaagtgatcctcccacctcagcctccctagtagctgggagtacaggcacgtgccatgacgcccggctaaatttttctattttttgtagagacagggttttaccatgttgcccaggctggtctcaaactcctggcctcaagtgatcctcctgcctcggcctcccaaattgctggggttacaggcgtgagctactgaacctggccttctcctctccttcttatatctctttctccattcattcttctttaacctttgcctcctctactggaacaggggtgaccctggggtgaggcaataggttgggtatggttcattctcattcacagatcttggtttaacctcagctgtgtcagcatgcagaagacaaaaagacacccacctttcaaagttgccatacccctgtccccaccagggataaaagggacctgcgtgtaagatgcatgacttaggccaggcacggtggcttacgcctgtaatctcagcactttgggaggctgaggtgggcggatcacctggggtcaggagttcgagaccagcctgaccaacatggagaaaccccgtctctactaaaaatacaaaattagctgggcatggtggcacacgcctgtaatcccagctactcaggaggctgaggcaggagaatcacttgagcctgggagatggaggttgcagtgagccgagagcacgccattgcactccagcctgggcaacaagagcgaaaatccatctcaaaaaaaaaaaaaaaagaaaaagaaaaagaaaaagatgcatgactcaggctcagggatggagagggaaggactcaggacttcagagcctgcaatacaggattgggccagacccagtgaattttatggctctagaccaggggttggtgaactactgcccattggccaaattcaaactgccgcttgtttttttgttttttttttttctgagacggtctcactctgttgcccaggctggagtgcagtagcatgatctgggctcacggcaacctccacctcccgggctcaagcaatcctctcacctcacctcagcctcctgagtagctgggactacaaggacacactaccacactccgctaatttttaaaattttttgtagagatgggatctcactatattgtccaggcttgtctcaaaatcctgggctcaagcgactctcccacctcagcttcccaaggtgctgggattacaggcgtgagcctctgctccctgtttttgtaaataaagttttattgaaacagccatgcttattggtttcacgctctctatggctacttttgtgtaatagcagcaacgttaagtagctgcaataaaagcagcatggcctgcaaaatctaaaatatttactatctggcatttcacagaaaaagtttgctgaccttggctttagactgtgacttggatcttgaagaacaggcaggatgtggattgatgcaaagtaaagaggacatttcagggtggagagaccagaattcgggtgtggcagtgaaatcagtctggttttacttggaagcggggtgtggaccagcagagccagaacaggggccccatggagaggcagaggggagggaaccaccaaatgtggtgttatcgatcaactgtggggagcctcgaacaccaggattagaagtttggatgttaagggtcttagcatcaaggaaattagagaggtttttgagcagagaggtgatgtgagcaaaggggagtttttatttttatttatttttctttctttattttttggagacagtgtcttaatgtcacccagactggagtgcagtggcgcgatcccggctcactgtaacctctgcctgtcgggttcaagtgattctcccacttctgcctcccgagtagctgggactacaggcgcgcacaaccatgcctaattttttttttttttttttttttttggtagagaaggggtttcatcatgttggccaggctggtcttgaactcctgacatcaagtgatctgctcacctcagcctcccaaagtgctaggattacaggcgtgagctactgcgcccggctgggagtttttgtttttgaaatgaggtctcactgtgttgcccagactggtattgaactcctgggctcaagtgatcctcccaccttggcctcctgagtagctgggactataggtgcacaccaccacacccgactaattttttatttttatttttgtagagatgagggtttccatacattgcccaagctggtctcaaactcctgagctcaagtaatcctcctaccttggcctcccaaagtgctgggattacaggcaggagccaccatgctggacaacaaagtagagtttttaggagtgattttggtcagattgcaaatgtcttgagagtggcaggtgggagcaaatgctcataggtggggactggaccgatgtcaggtgtttagaaggagaaattgacagatttgatgttgagggaagaggaggagaataataataatagttgtcttagaatagaagaataataaaatagcagttgccatttgtttttgtttgttttttgagacggagtctcgctctgtcaccagactggagtgcagtggcacgatctcggctcgctgcaacctccgcctcccgggttcaagctattctcctgcctcagccttctgagtagctgggacaacaggcatgtgccaccacacccagctaatttttgtatttttagtagagacggggtttcgccatgttggccaggatggtcttgatctcttgacctcgtgatctacccaccttggcctcccaaagtgctgggattacaggcatcagccactgtgcccggcctgtttgtttgtttgtttggttttgttttctgagacagagtcttgctctgtcacccaggctggagggcagtggcacgatcttggctcactgcaacgtccgcctcttgggttcaggctattcttgtgcctcagcctcctgactagatgggattacagggacacatcagcatacctggctaaattttttgtatttgtagtagagacagggttttgccatgttggccaggctggtctcaaactcctgacctcagatgatccacccgcctcagcctctgaaagtgctgggattacaggcatgagccactgtgcccagctgcagttaccatagtagaaggttaccacatgctagaggatttatttcatttgcttcccccagcgctgaggttgctagtattatatccagaaactggggctaggagaggctaagaaacttacctgaaatcatatagttagtaagtggaagagccgaaattggaggccaggtagtctaccttcaaagcctgtgctcaccccatgctcactcccctttgagggtgacagcttgacacctgcagaaagccatgggccacatgagtgtgggcccaacgcccaggtttgggaagagatcggtactgatatgtccaggtgctcccaaacccagtggggaggtccagatggctggagggcaggattccagtgggtcattgggtggggagatttggcatctgtccccacagaggtcctggttgacatcaggggcacagatgagctctgtgagtgaatgatggaggccttaaaaagatgtgagcatctgaaaatcagctgggtatggtggcacgtgcctgcactcccaactactcaggaggctaaggcgggaagatcacttgacctctggggtttgggttgcagtgagctgtgattgcaccactgcactccagcctgggtgacagtgagaccctgtctctaaaaataaaagatgtgagcatctgagatcaccccctagagattctgattttactggggcggtgcccaggcaatgataatttaataggtacagagaagagggaggtggaactttgagacctgcccacgggtggaagcagaacaaaccagagatggggctaggagaggctaggaaactaggagaggctggcagaaaggagggaggagattaggtcaggagcaaggccgtctcaggaaagacggaacagcagctgcgtcagagggaggaaagccaggcttttcatgaggactggactgtccccttgaccttcgtctctgggctgtggacattggtgggggtggagaatgactcggtgtggggaggtgtggtgttaagaagggaacagcagggcgatagattgttctttgaggctttgagcattcactgaatgggtgaggaaggaagactcgggagaactacatgcaggcttaggggttctagagatagaaggggaggcctagcgcggtggctcacacctgtaatcccagcactttgggaggccaaggcgggcggatcacttcaggttaggagttcgagaccagcctggccaacacggagaaaccccgtctctactcaaaatacaaaaattagccgggcgtcgtggcgggtgcctgtaatcccagctactctggaggctgaggcaggagaatcgcttgaacgctgaaggcggaggttgcagtgagccgagatcgtgccactgcactccagcctgggagacagagcgagactccgtctcaaaacaaacgaacaaacaaaaaacaaacacaaaaagaaaacaaacaaacaaaaaaacaaaaagactggctggcgggaagggtgactcgggcctttgctcccgagccagagcccccaaccctgacctgatccccctctctgcgcaggtggagttctacttcctttcccagtacgtgtcgccagccgactccccgttccgccacatcttcatgggccgtggagaccacacgctgggcgccctgctggaccacctgcggctgctgcgctccaacagctccgggacccccggggccacctcctccactggcttccaggagagccgtttccggcgtcagctagccctgctcacctggacgctgcaaggggcagccaatgcgcttagcggggatgtctggaacattgataacaacttctgaggccctggggatcctcacatccccgtcccccagtcaagagctcctctgctcctcgcttgaatgattcagggtcagggaggtggctcagagtccacctctcattgctgatcaatttctcattacccctacacatctctccacggagcccagaccccagcacagatatccacacaccccagccctgcagtgtagctgaccctaatgtgacggtcatactgtcggttaatcagagagtagcatcccttcaatcacagccccttcccctttctggggtcctccatacctagagaccactctgggaggtttgctaggccctgggacctggccagctctgttagtgggagagatcgctggcaccatagccttatggccaacaggtggtctgtggtgaaaggggcgtggagtttcaatatcaataaaccacctgatatcaataagccacctgttgacatctgttattgataagcgccttcatgcttcttcctcaccctcatgcccatcccatcccatcatcccttcctagagacctagggaattgggcagaagggaccagagagggtgcacacaggaatgctgtctccacggggaaaaccgagctgtttctatcactcaaggaaaatgcctaaggaaatactgaaggccccttctccaaagaccaccataaagcaggtggtctttggagaaggggccttcggtatctttttttatttttgagacggagtctcactctgtaacccaagctggagtgcagtgacacaatctcggcccactgcaacctccacctcccgggctcaagcgattctcctgcctcagcctcctgagtagctgggactacaggtgtgcaccaccacgcccggctaaatgttttcgtattttagtagagacgggggtttcaccatgttgcccagggtggtcttgaactcctgagctcgggcaatctgcctacctcaacctcccaaagtgctgggattacaggcatgagccaccacacctggccagtatcttgtcctgggatgaggaatggttacataatttgcaagacctgctgcaaaatgaaaatgcaggaccccttgttcaaaagcagaaacaagctgggcacggtggctcatgtctgtaaccccagtgctttgggaggatgaggcgggaaggtcatgtaaagccaggagttcaagaccagcctggacaacacaggggagaacctgtctctacaaaaactaaaaaactttagttgggcatagtggtgtgtactgtactcccagatactcaggaggctgaggcaaggcagggataatttgagcccaggaatttcaggctgcagtgagttatgatcgagccactacactccagtctgggtgacagaatgagaccttgtctcaaaaaaaaaaaaaaaaaaaggaacaaagcttttttttgtttttgttttctacaatttctcaacctgtcatggtattcttttatttgatatttaatgttgcactcctttggatatggggacacactttcaaaacataaattcatgcttgaacccgggaggcagaggttgcagtgagccgagatcatgccactgcactccagcctgggtgacagagcaagactctgtctcagggtaacaaaaattattaggaatttcaaggttggcacagtggctcacgcctgtaatcccagtactttgggaagccaaggcaggcagattgcttgagcataggcgttccggagcagcctgggcaatatggtgaaatcttatctctacaaaaagtaaaaaaattgctgggtgcgctggctcacgcctgtaatcccagcactttgggaggccgaggcaggtggatcacgaggtcgggagatcgagaccatcctggctaacacggtgaaaccccgtctctactaaaaatacaaaaaattaggtgggcgtggtggcgggcgcctgtaatcccagctactcgggaggctaaggcaggagaatggcgtgaacccgaggggcggagcttgcagtgagccaagatcgcaccactgcactccagcctgggcaacagagcgagactctgtctcaaaaaaaaaaaaaaaaaaaaattagccaggtgtggtggcgtgcacctgtagtcccacctactctagggtgctgaggtgggagaattgcttgagcttgggaggcggaggtggcagtgagccaagatcatgccactgcactccagcctgggcaacagagtgggagagtggaaccctgtctcaaaaaaaaaaaaaaaagaaaaagaaaaagaaaaagaatgtcaacataacaatctcagagcattaaaccccaagcacagaacccccttctgagcatggggccctgtaagactccaacagtggttacacacattagatgattggccctgcctggaacatcctccaggatccccccgcctcctttttttttagacggagtctcgcactgttgccccaggtagagtgcagtggcgcgatctcggctcatggcaacctctgcctcccaggttcaagcaattctcctgcctcagcctccctagtagctaggattacaggtgcccgccaccacgcccagctaattttttgttgttgttgttgtatttttagcagagacagggtttcaccatgttggccaggctggcctcgaactcctgacctcatgatctgccctccttggcctcccaaagtgctaggattacaggtgtgagtcaccatgcctggccaggatcccctttgaccagtctttgtccagtgagggtggagacactgaagtgtaagctactggaggcagggaattctaagtgctgctggcaccgtgtgcctttaatcacagcttcaggaggctgtggtcttgacagctcttcaagacactgggaagtaaaagcttcttggtctaaggcttgggatgccacagggctctggatttcaggatgcaactgtaccctccttagccccctaagcttgacttgttgagttctcagaaccctgaattaggatcagaaacctcctgagctatttgcttccctgagatacagtccagacaagtgtcccaaagcaccttctcaacccttcttcactttgtccatttctccctgtggtagacagaataatgatctggacaaaaatgtccatatcgtaatccctgaaacctgtgaatgaagtccctaaaacggacattgcacatgtgatcttgagatgggtgaattaaggatcttttggtttgtttccttacttatcggaaatttttaattttaattcagcctccagagtagctgggattgcagacatgagccaccacgcccagctaagtttttgttttgtagagatagagtctcactatgtggcccaggctggagtgcggtgctgcaatcatagcttattgcaacctcaaactcctgggttcaagagatcctcccacctcagcctcctgagtagctgggactgcaagtgtgagccaccatgcctggctaattaaaaaaaaaaaaatgccaggtgtggtggctcatgcctgtaatcccagcgctttgggaggctgaggtgggcctgaggtcaggagtttgagatcagcctggccaacatggtgaagccctctctataattatacaaaaataagtcaggggtggtggcgcacctctgtagtcctagctacaaaggaggctgaggcaggagagtcacttgaacccaggaggtggaggttccagtgagccttgattgtaccactgcactccagcctgggcgacagagcgagactccatctcaaaaaaaaaaaatttttttttagagacaggctcttgctatattgtccaggctagtgttgaacttctggcctcaagctcttctcctgctctggcctctcaaagcactaggattacaggcgtgagcccctgcccccagcccctcagaaagccttcttgaccacaccagtaacaaggtcttttcacaagtactcacaagaccattaacctatgtggcacctcgaatgcgttttggggacctgggcgcatccagactggtgtgaacggatatcttccatacacatgtaatttagcaaaggggtttcctgggctatggcaagagctgtccccagactcctggacacaaacggcacacccattctccatgcagtatcagggccacaccccactggagccagttctgggtgtgagagggagaagactcccagggtagtggagcaggtcccaatgcccctaaagtaaagctggaacaactgatcaccttccagtgctgtgacagcctgggtctgtcttaatatcttgctgatctttgttcccagtcaaccatctgcccagagtcactggctctccctcctttttattttttttgtagaaatggggtctacgctatgttgtccaggctggtcttgaaaccctgggctcaggcaatcctcccaccttggtctctcaaagcactgggattacagatgtgagccactgagcctggccattctccctcttcctctgtttctcctcaccctgcacctgaaggagggcaggtgagctggaagcttgcttttgtaaatcttattcttttcctgtaccctagttttttctttttttttttttttcctggttaaggtgaggttatgtcaagcaatactatttcccccatattggtagggactttggtgtttctgatccatgggagttgaagccttgtttcttttttttagatggagtcttgctctgctgcccaggctggagtgcaatggcacaatcttagctcactgcagcctccacctctcaggttcaaatgattctcttacctcagcctcctgagtagctgggattacaggcacctaccaccatgtccagctaatttttgtatttttagagacaaaatttcaccatgttgggtgtattttttgtatttttagagacaagagttcaccatgttggccaggctggtctcgaactcctggcctcaagtgatccactcgcctcggccctgcaaagtgctgggattacaggcatgagccactgtgcccagccaagggagttgaagtcttaaaggaaagacccaggaaaacagatatagggtccaaaaggcagaaaaggattctaggggttgtaaacacccaggtaaccctggtgaaaggctttgttgcctccagatggtgggacaggagttccaccgcaggcaggattaggtggtattttcattcatttctttttaggttaatacattggcttagggacaggatcctattccagggctgaaggggatcttgagaatcaacttgcccaatgctctcattttgtaggtagaatctacagctcagagaaattaaataatttgctcatggtcacatagtttttcagcgcaagcaccaggagtgacctaactcttctaaatcctcgctgggcctcatcactgccccaagtgcctgggtcccctgggaacaggggtgggagaactagaggatgtctgagtaccaaaaaagaagtgggaagacaggggcaagtaccctacatttctgattatcattttaaaaatgtattttattcaacttggaaaatgagtacaaatccctgggtgttttttgtcagggaggagtggggagtaggcaggaaagagaagagggtaggaggcaaggtaaggtatgagcatcacagtggctgcctcaagaccctgcccagggagggtggggtgggctgggggttgagcacggagctcaggtccggaggaacaccatggtgaggaggcctggaggggggacaaagaaagaatagggtcgcatgggcagccctggggctctgttagctctcctcccgtcccttctccctttttcctggggcctgggtccctggccactactgtcctcacccaagacgtaggcggccaccaacttttgtcccagggagacgtgcaggacttgaggcagctggctgccgagttcgtccgggagtgggagcagcaggaaggccacagacacaatccccgtcagcaagaagaggaggaaggagctggtggccagttgctggcgggggtctgagaaacaagactcatcagatgctgcagcccccactcctgcccagcccaggtcctccagggagaagcctgaacaaggaagatgtatctactttttttttttaattatcttttattttttgtagagatggagtctcactacgttgtccaggctggtctggaactcttggcctcaggtgatcctcctgccttagcttcctaagtagctgggactatgggttcatgctaccatgcccggctaatttttaagttgtttgtagatggtcttgctatgttgtccaagctgatcttgaactcctggcctcgagcaattgcaatcctcccaccacttcagcctcccaaagcactgggattataggtgtgagtcaccacaccctgtatctacttttttttttttttgagacggagtctcactctgttgcacccaggctggagtgcagccacacaatcctgactcactgcagcctctgcctcctaggttcaagtgattctcctgccttagcctcccgactagctgggattacaggtgcgagccaccactcccagctaatttttgtgtgtttttagtagagacggggttccatcatgttggtcaggctggtattgaactcctggcctcaggttatcagcccacctcagcctcccaaagcactgggattataggcgtgagccatcacaccctgtatctactttttactgccctccaggggtacactgcaagtgtcctctccttcctacagcctctgtccccaccaccacaagaactctctcctccagtccctcagcattcattttctctcttctgtggacctatccgacaggcagggacctctcttgatctcatacccagcacacaacttggtacagggttaattgctcaatacaggtttcttattgaactgaactgagctaccacatgataggaagtactgcggttacagtcaaggaagaactttttcctctaagtagaagtcagaaaccagggaagctgtaagtcttttccccctcacctgatataaaatctcaactcggaggaatgtttccaccaaaagacaaaagactgaaccaggagacttcttcaaatccaatttatctcatctctagggaaatgctagttcctccctccctacagaactcaagatcccagtctcccaactcacgctcctggaagtgtctggccgtgggtggtggtgtcccagcaggaggccctgggcgaggcgctggatctggctgtccctgaagctcaagggggtacgctggggctctcagaatggaggtaatgtccttgcgtcccaccactcggccctcagctccttcctcagacagctcaatgcggaagcggtcctggacatcatagtggctgggaatgggtgccacatggcgaatcacactggtcccaaggtaggagagaagcccattggggtgaatgaggcagtaatccaaggaaatctgggcctccccccagaagtctctcccttaggggcacaggcagaggatagggcaaataggttaaagggggcaaggtctcagacctcagacaacaggtggcagcgacccctggcttccacaagcctccccaccctcccagctcactcacatgtcaatgcaagactggggcttcacatatccctctgcgtcaaacaccgtgtatttggcaggtgctgtgcacaggactgggggatagagacacacacagacaagccctgccatgtgggtcatttaagtcccctctgccttctgccccggaggctggacatgactttcccagtccaccaaagctggacgtgcaaccctacccatctgactcctccagccaacacaaccccccagtgtccggccaccagcccccacgaggcgccgatccctttacctcggaagcgaagcgcagttcctgtggggttatagagggtcagcagctgtcggggtccgctccgctggtccgccctgaatactagatccgggggaaagaccaggaccgggacaacgggtcccaagggaggaggggcgccccgggacccccgcccagggggccccggacccaccagctcctggtcctggggcgccccacggcgcatgcaggctctgggcggtcggacatccgagggcagagctcaggggacagggcctggagtcagagctggggggcgtgaggggcgaaaggggacaagatgagctcccggagcagggcctcgactgatgccgccgccgccttggaaccccgctagatggggctcccgcagacccaggcccagggcccccaagacctttcctcttccagctctgccccaggttccttcggacccgccgagccccacctcgacggccacgcccaccccgctaaacccggcccctcgcagctcccaacccggccttctcctcacgcccagctcacgatctccataagccccgccccgccgctggcctcgccccttccgggcgttcccggacgcccgcctcctctctccagccagactccgcccgctgcagcgggcgcctgcagagcgacctgtgacgccgcctgcttcctgggagacctgtgtttgcgtctccggcccctccctaagctcggacacgggccccatcgggcttctgcctcaaaacggtcgctcgcgttaggatgcccaccttgtggttaaagcacctgccagtcagcttgtggtcagattaatgttgccatgttccagagagtccttttctatacttccgccgtacggcctctgtcattggctaggacgtctttgtttctgccgtaactatacgccgattggtgtgctgaaagaccaaacaacgccctccttctgtcgtctgcgattggctggattccggtgacgtaacagttgtactggctcgaactcgagccctgaagtaactcagagaaccgggggcggggtttcgaactgggctttgttctttcctccctattcttgagatggtccaagtcaatctcccaccgggaagcccttttcctcctcttcattccaggctctagaagcctctgcaggaaccaagcctgttttctttgcttttttttttttttttttgagacgaagtctcgctctgtcacccaggctggagtgcaatggcacgatctcggctcactgcaaccaccgcctccagggttcaagcgattctcctgtctcagcctcccgagtagctgggattataggcgtgcgccatcacgcccgggtaattctttgtatttttagtagagacggggtttcaccatgttggtcaggctggtctcgaactcctgacctcaggcgatccacttgcctcagcctcccaaagtcctgtaattacaggcgtgagccaccgtgcccgccctcttttttgcttttttagagacagagtctcactctgtcgcccaggctggagtgcagtggcgctatcattgctcactgcagcctccaactcctgggttcaagcgattctcctgcctcagcctcccgagtagctgggattacaggcgtgcatcaccatgcctggctttttgtaattttttgtagagacgatctcgctatgttctgcaggctgttctcgaactcctgggcccaagcgatcctcccacttaagcctcccaaagtgcatgagagccactgttccttccccaggctcaaagtctgttttctatgggttggaggttcctcccatctgggactccagactaagtcttgcctcctgtttctcaccttcctgtgagggacgtgggaaatcactcacatttgcacagggaattaagatttgctgatttcaaacccatgttgtttgagtaattatatattttaaaaaaggatttgctaaaccctgccactttaattgcatcgaatcttcaactccttttacagcctggataaggtgaagaatctgggtctctgagggcacccagttagcaatggagcaaagacaaagttgatcttatctgaaagtctcctctgaacatcttgtgtagaatccccgtgttctcttttacattttctttttctttttctttttttttttttttttttttgagacagtcttgtgctgtcacacaggctggagggcagtggtacaatcatagctcactgcagtctccacctgcttggttgcgctcaaccaatcctcccacctcagccttctgagtagctgggactacaggcgcgcgacttcacacccggctaattgtatttgttttttttgttttgtttggtttggtttattttttgagatggagtctcgctctttcacccaggccagactgcagtggcgcaatctcggactgcagtggcgcgatctcagctcactgcaagctccacctcccgggttcacaccattctcctgcctcagcctcccgagtagctgggactacaggcacccaccaccaaacccggctaattttttgtatttttagtagagatgatgtttcaccatgttagccaggatggtctggatctcctgaccttgtgatccgcccgcctcagcctcccaaagtgctgggattacaggcgtgagccaccgctccctgccctgtatttgtttttttaatagcacttatagtgatacatgacctcctattttattgtttctctctcctccagtagaatgttttttccttttcacaagagcagggactttgtttagttttctgttgtatctttaggacttatgacagtgcctaccatttggaatgaacaaatgaatgagtgactaggatgaactttgagcagagatctgactggatttaggaagtgaaccatgagatatgtctatgggagagaattctggatagaggaaatagcaaaggcctaaaacagaagtgtactagaaatgggcaacaaggccgggtgcggtggttcacccctgtaattccagcactttgggaggccgaggcgggcagatcacaaggtcaggaattcgagaccagcctgaccaacatggtgaaaccccgtctctactaaaaatacaaaattagccgggcgtggtggcacatgcctgtagtcccacctactcgggaggctgaggcaggagaatcgcttgaatctgggaggcggaggttgcagggagccgagatatcgccactgcactgcagtccagccagatcatgccactgtgctccagcctgggtgacagagcgagactccatctcaaaaaaaaaaaaaaaaaaaaagaaatgggcaacaaactgaagttgccaatgtgactggaacagatgatacataggagataatagacatgaagctacgaggcaggagagagaatgcagatgatatagggccttgaacccttggtaagacttaggaaactacaggaaagttttgagtaaaggagggacaagatgtgacataatcggccgggcatggtggctcacgcctgcaatcccagcactttgggaggccaaggggtgtgcatcacctgagattgggagttcgagagcagcatgaccaacatggagaaaccccatctctactaaaaatacaaaattagctgggtgtggtggtgcgcacctgtaattccagctaatcgggaggctgaggcaggagaatcatttgaacccaggaggcggagtttgcagtgagccgagattgcgccattgcaccccagcctgggcaacaagagtgaaactccgtctcaaaaaaaaaaaaaaaaaaaagagtgacatattttcttttcttttttattttatgttatttttttcagacggagtctcactctgttgcccaggctgaagtgcagtggcacaatctcagctcactgcaatctccacctcttgagttcaagcaattcttttgcctcagcctcctgagtaacaggtgcccgccaccacgcccagctaatttttttgtatttttagtagagacggggtttcaccatgttggccaggctggtctcaaactcctgacctcaagtaatctgcctgccttggcgtctcaaagtgctgggattacaggcatgagccaccgcgccccgccaagacatgacatcttttctttttacttttttagagacagagtcttactcttttgcccaggctggagtacagtggtgtgatcatagctcactgcagcctcagagtcctgggctcaagcaagcctcccacatcagcctcctgagtagctgggaccacagatgagtaccaccatgcccagctaattattttttgtaaagacagaatctggccatgttgcccagactgatctcaaacttctgacctcaagtgatcctcccaccttagcctctcaaagtgctgggattacaggcatcagccactgcacctggcctgtgacttacattcttttttttttttttgagacagggtctcactgtgttcccccaggtggagtacagtggcatagtcacagctcaccgcagtcttacctccccgggatcaagcgatcctcacacctcaacctgagtagctgggactacaggtgtgcaccaccacgcctggctaatttttgtatttttttttgtggagagggggttttgccatgttgcccaggctggtcttaaactcttggcctcagcaatcctcctgactcagcctcccatagtgctgggattacagctgtgagcagccacccctggccacattcttaaacgattattctgtatagtaaatatgtgttgagttaattaattaatgaaaagaaatcctcaagatggaccccaataccataagcatggagatctgacccattcctcattaagaaacatttatttggataagaaagaaggcctgagggctaggggccggggctggcctgcgtctcagtcctgggacgcagcagcccgcacaggttgagaggggcacttcctcttgcttaggttggtgaggatctggtcctggttgggccggtggagaaccacaaagctctctggaggaaggacggggcctctgttctcttctacctggcccatcagcagataactgactcctggaagaaggagggaggggttgagatctcttattcttgagacctgtcagcaggtctcaagattccacaccttgatcatttctgtgtggcttagcttgacccatccccatttccccacatctctgttacctttcttcatgggggggcactgcttgcaaggcacgtaaaacttcagggaggcaccagtgggtggagaaggcaggtccagtcctccagttttataagcaccaataagactgacagtcacggcaaggccctcccctggctcccgaaccatggacttcactgtcgcagtcaccactgtgggagaatgggagtgagagatgaggagatgggaggttccagatggcaggactggaaacagaagcaggaggtggttcgaggagctggaatggggttgggggtattcttaccaaggctgctggcacagaagttgctctgcaaggtgcctgtccggcggcactgctttgggcaggtgggtgcatctaggagggaggagggtggagggtgacctgctcagcaggtaggagggagcactgtccccataacagcctcattgacttgaactgttcagagctctgtcaggcttccggtcctagcacccagtaggggtcatcggcaggaaggaggcaccagtgagtaccagatgaatcaatgagtgaatgtagccaaggaagaacttttttgtttgtttaagatggagttttgctctgttgcccaggctggagtgtagcggcacagtcatggctcactgaagcctcgaccttcccagctcaagcaatcctcccacctcagcctccggagtagctatgaccacacgcctggctaagttttttttttttttttgagacagaatctcactctgtaacccaagttggagtgcagtggcacaatctcggctcactacaatctccacctcccaggttcaagcgactctcctgcctcagcctcccgagtagctgggattacaggtgtgtaccaccacacctggctaatttttgtatttttagtagagatgtggtgttgccatgttagccggggtggtcttgaactcctgacctcaggtgatctgcctgccttggcctcccaaagtgctgggattacaggcgtgagccaccagcccagcctaattttttatttttgaaaagacagggtcttgctatggtaaactcctaggcttaagcgatcctgctgtctggacctcccaaaatgctgggattacaggtgtgagccacagcccaggtcagaactttttgaaatggcccccttcagtctgtttccccttcctcccctatcccagactcaccaggggctgaaggagattcctctgttttctccggaggttgggacttggggggcagcttgactttaggctcagttccccgtttggggccgggcccttgcccttctttggcagtgccccgcggcagggtcttgtaggaggctgagaagccatcagcggtgacactgagatctgagacgaactggacgaggagttcattcccttcggaggagatggagctgcaggtggccaccgagcattgggggaagtgtcagggcgggcgtgcaccacactcttctcagccccatgaccttttttgtttgtttgagacagggtctcactttgtctcccaggcttgagtgcagtggctccatctaggcttactgcagccttgaccttctgggttcaagtaatcctcctgcctcagccccgcaagttgctgggactacaggcacgccaccatgcccagctaattattttgtatttttggtacagacaaggttgcgccatgttgcccaggctggtctcgaattcctaagctcaggtgatcctcccgcttcagcctcccaaagtgctatgattacaggcatgagccactacccctggccaggtggccttttaacttcgtcccaacttcgcagagccccagtcgcctctctatccgcggaccccagacccggggccaaatctcctctttgcctggcctccaacctgctcccctcgccggtttggagccctggggttcagatcccgtccctttagctgaaccccgcccctccaaacagccgcgtgcgtgcggtccgccgactctctcccggactcgcccaggtcccgcccctcaccccgggactgcgtcgccgcagaacttccccagcctccgggagtcgtcgctcacggctccgttgaacacgctgaccgagtcatagcggcagtaggtgtccggctccaggtcaaacttctcgaaggtcagcgcgatgacctggcggcgggcggaggcggggactgcgcggcgggacacccctgggcgcctgcacctcatctcctactgggtgcctgcagcagctcccactcccacctcccgcgtcctctgggcccccctcctgaaggcgttcacaccacagcacggaggaccacacacacccatgggaccctgcaggggtgtcggtcgtcgtggttggcaaggtcaagtcctggcgcactcacaagtgacaggcccgcgtgttataccaggaccctgtacctcgctctcctgagacttgtctcagttgtaatttttacatttttgtttgcgtgcatgcaggggttggggctgttttgggtgcccaccagcgcaagcgcagtgctcgggacacagcagatcttcaataaatctctgctggctgcaagctggagggcgccgcctgggtcccctagggcagcccggggaggagggtcggtacctggtccgggggcgcgatgatgtgccaggaacagctgatgcccggggggtaatcggactcgggccagttgggcgtggtcagggttccctgggccttctccagccgccccccgcaaaattggtgctctggggaggggagagaggagcgggggtggggggcggtggagaccctcggtcagcttcaggagaactctaggctgggagccccggcaggcagctcggatgtctggggctcaggatgaggggacgagaagaaggggaggtaagatgggggcaggttaacagagagcggccgggaggagcgcggctcggggaagtctggggccgcagggcgcactggcgggcggtggaagcgggaggaggaactggctggacgcccccttctggcccctccccgacccgcggccgcaccgcgcctcttcccctaggagatcccatctccccggccctgcagcagagtcccctttcaggctggagagggtgtcctcgacttggggcacagcccccgaggacccctttagggaggtccccgcctgaaacattgcaagggagacttctgccgccaggagggggtgatgggaccgcaatcgggagcccagggctgggtgtaggggccccccggggttggaggaacctagtccccccagccctggggtgccccctcgcgcccgacggagggagcccgattgcggacgggggccggcagttactcaccgtcccagtaaccccaggccgcccattccacccgcgggtcggtgacccatttccgcctcgcgcctggggggggccctggaagagggatgggtgggtgcgggaggaggggagagaagacggggaggagggactgaaggggcggttagtgaggaaaatgggtcagggaggtagggggccctaggcactggggcgcggggtgggcggggcggaagttagggctgggggcggggctgcggccggggcggggcctggagggggggaaggcggaggtgagggagttctcaccagtgcccgaggtggcccgcccgctgtaccagagcaggaagcctcgtcctcctgtgccctcatccgtcgtcatcctcagggtcacctggttgccgggggcgactaggggcgcaggccggaaggtcccacaaaagcgtccgagccgctggccggaagtcccagacccagcgaagacctccagagcatcgtagcggcaggcggggtgcagctccaggtcgaagactcggaatgagagggacacagtctggccctcggggacctgatagcggggacagaggcggggacccacagagtcaggccccacacaacccagccagagggcagctcccctgccccaagcgtttcttgcagaaacggactgaatgggaaggggcctccatgtgagtgcagagcagagggcctggtctctgcagctctgctggtagcctgtgcaggggacaagagctgaggctttggaagaggagggagggccggggactggagaatgaagatttgagggaagggttaagatgatgcgtgttacggtgggaatgatgccttcagtgacagagggaagacacttggagctgccccaggttgagaaggtggtgcgggggggacggggggggggtcccttcgcagtcaggcctttttgctctgagactttaacaaggggtagtgcccagaggggtttctcaccgttatggtccagatgcactccttattaggggggtagaggttggggaacccctcacttgccacgtaacctgattcccccttcacatcccctccgcacaggaacacgggtctggagaacagaaaaggggtcaggaaagagcagggacgggtgggacgggggagcactggcaagatggggatgaggtgatgaggatgaaactccaaggagggaagctgggggatgaaatggaaaggccttgagagacctggggcagcttccaccagccaggacagggctggggtgtcccagactcccacaaagataagggaaaagtgggcctggcaactcgaccatccctccaaccccaagagtccccacccccaccccaacaggaattcccggaatcctcctcggccccccttccagactcccgcctcactctgcctggcagtccagggacaggagccgcctaactacttccagatgtggacacagccacgaggcggtaggggggagggggtggagagatggagggagctgcagtggcgatggccctctgattgaacctggaggccaggctccgcgagttccacaccttagccctgcccctgttccaaactacttcagattctgactcccaagtctccactcactgccccctcctccccctacaatccctctcgaattccttcctggaatccagctaccaggcaagttcaggagcttggctctctcttgggttctatggggggtcaaggatctgggtgggtggggagacttaagagaccagaggacgaaggtgggggaatgggagcagtggtggcctgcaggagaccaaggtcttgcagcagatggggaggatttgggggccagagaagggtgaggcggtggggaatctggggagtggtgtgtcagcaagggaacccaaaatatctccaggcataaccccaaaggaatcgggggtctgaagttcactggagctgtctggaagatgccaagagacctacctggtgtagttgggggtctggccctgggcaaaaggcagcagggcgcaggcagtgaggaggggccccaggagggaggctgtggctgcaggcagcatggccccgggggaaaggcgctggggtcctcaagacagaggcagcagctgaattttgcagagcagcagcagcggtggcggcagcagcaggataatcagcgccagatggggcagccttgggtgtgtgggcgtggggactggccagtggggcgggcaatggggaaggcgggacagtggcgtgtcctgggacctctctaggtctaggacacataaatgttgaccttaggagggggaggagcagtgaggggcagaggccgtctcccaggcctcaagtaacgtcatcgggaaccccactctgtccagtgagggagtatctccgggaacttctgaggactccctagcccccatcctccccccgcccctgcttcctcagctcaggagccctcattgctcaccccctgcctgaccacccctgccagctcattttccacttcaatttctttttttttttttttttttttttgagacagagtctcattctgtgacccaggctggagtgcagtggcgcgatctctgctcactgcaacctccgcctcccgggttcaagcaattcttgtgccttagcctcccgagtagctgggactgcaggtgcatgcctccacacctggctaatttttgtatttttagtagaggcagggtttcagcatgctgtccaggctggtctcaaattcctagcctcaggtgatccgcccacctcggactcccaaagtgctgggattataggcgtagccaccacacctggcctccacttcacatctccattgccttctctccagacctgggccagactaggccaaggagaaggaattctcacccatgacctcttccaactacttgaaggtacaggaagcaaggcaggaggcatggggtgtggatgaagggagtgtccttgttactcaggaagaggtggaaggagtagaaaatagagcccaaacctgggaggtaaacagaagggagagaggaggggggctggcttcaggccgaagggagatgggtgggaagctttcgggggtcaggaggaacaggctgcctcaggatggggacaagtctagtgggcaggggatcccagtggggtagccaagagcatctgtgcatagagttgttccagaaggtagggccagaacttcccagtccaaacgaccaggtgtgctcttgggagcagggagtggacaacaatgtgaagggttcaggcagcatcagctctgctgcacctgagacctggagctgcttgtgctgcctgcccctgcctgggctcctgccctcctgcacccaccaagccgggcacccacccaccccatccctgcccctgtccctcccagcccccaaggcttccacaccaggcctcgctgcagccttttattctatccatcaaatctcttgtccatgatagtcaggttgggggcccctcctgggcagccccctgaacattcttaccctggttagccgtccccaccccctagcaaccccttcccacacgcatgtgcacaatggtcattgctccttagtccctggcctggggccggactccctcctccagggactaggctagcatgagggggattaggtctcaggggctgggggccctacaccacccccgcctccttcagccctctgcagcatgtccagggcctcccagaagaagtccttctgtgcggccatcaggggcatccaccctacgatctccttcatcttctccgtgcggtcctgcaacgtttggcaactgtggatctggctgaggtactcctcgcaggcctgggccatccccccggggtcctggggtgctctggcccccaggctgggctcaggagtccccaccaccctgctggctggcaggtggcgatagggggcgtgctgctcaatgtcgtggctggacaggatgtataggcactccctggtggcacagagggcacaggcacacagagggaccttggaggaggagagaaagggggcatggctgagtggtgctttccttgcagggtttcccagggtgcccgggctaatctgcctattgcattcttccctctcacaccagccctgagccggctaagtcccaggggtgtgtgaggttgggcaaggccagcacagtctgctaagggagaaagcagagagcgtggtgtgcggcagaggagggaggtggggtggtgctagggaaatgggaccccctgggtccctgcaggagccccagctacagcctgtgggcttcctggttcatggctctcatcctccctgggtgcccactctcctgaccccgctctgaccttgacttggagcttgacgaaggaggcactccccttgggccagcctgggaggcggcccccagccccacagccgcagcccagcagctccttgctgaactctgagctctggctcagcaccagggagtggttgaggccgcaccacagggtgatgggccgctgcaggtaacaaacctggggacacacggccagggtccctgagcagggagcaccaagggacgggggggctggggtgggaaaaggttgactggaaggctcggggcagaatgaactggggaggaggaaatgggagccagcactgtcccacgccccaggtatgccctgctgacccctgcagcccccatactctaactggtcacatagggtcttgcacttctgttggtatctcatctatgcccccagaaaatcagctccttgcctgagcccagggcctgctgtggtgtacccctcattctcagcccacccgtctatgccagtccagcctctcatcctgcctgccagcctcggggagacttgcttcttgtgcaattccaggttagaccccaacaccaccctgaggaaggactttcccttccactatccctcccttcctgctctagtattatcttttctttctttctttcttttttttttttttgtttgagacagagtcggaaggctggagtgcagcagtgcgatctcggctcactgcaacctctgccttcctgggttcaagtgattctcccacctcagcctcccaagtagctaggactacaggtccttgccaccacacccatctaatttttgtatttttagtagagaaggggttttgccatgttgaccaggctggtctcgaactcctgacctcaggtgatctgcctgccttggcctcccaaagtgctgggattacaggcatgaaccactgagcccagcctccactctagcatttttattttctcttttctttttttagagatggggtctcattctgttgcccaggctgaaatgcagtggtgcaatcatagctcactgcagccttgacctcctgggctcaagccattcttctgcctcagcctcctgagtagttgggaatacaggcatgtgccaccacacccggcatgtgcctataatttttaaattttaaatttttaaattttctatagagatagtgtctcactatgttgctcatggtgatctcgaactccgggcctcccacctcagcctctagcattttttttttttttgtagagacggagtctcgctctgttgcccaagctgaagtgcagtggcacgatttcagttcactgcaacctccgcctctccagttcaagcaattctccttcctcagcctcccgagtagctgggactatgggtgcacaccgccacacctggctaatttcttttgtattttagtagagacggggtttcaccatgttgcccaggctggtcccgaactcctgggctcaggcaatccacctgccttggcctcccaaagtgctaggattacaggtgtgagctagttgaaatgcttagcctagcattttcaacttatcacataattcttttccaaaatggccaccctgtttttgaaaaaaaagcttctacttgcttcctgccgcttcctgcctctctctcttaagcagcagagttggttacatgaccaatctgaggctgaccacattactgttccttcccacagccagtctatccagcacctccctgggatctcgcttttctctctattacattactgacatgctctctctagaggcacttggcctctcagtggctaaatcccagggcgtcttctgccccctcattctcctgagcctgttagcgctttaattctgaagacactgataagtaatttatggtcattctagaaaaattatgaaacattggcaagcaaaaaattaattttaaaatcattggaaatcccaccatctactattaacatcttgctagatattcttcactgttggctaaacaaacaaatacacataaattgtatattttttattttttagagatagggtctcagtgtcacccaggctggagtgcagtggtgatcacagctcactgcagccttcaactcctggcctcaagcaatcctcctgtctcagcctcctgagtagttgggattacatatgtatgccaccatgatgggcaagttgtgtatttttaaacaaaaaatgggatggggccgggtgtggtggctcacacctgtgatcccagcactttaggagtctgaggtgggaggattgcttaaagccatgagttcaatataagcttgggcaacatagcaagaccctgtctctaaaaaaaaaaaaaacaaaaaaaacaaaaaaaacaaaaacttatctgggcgtagtggcgcattcctgtagtcctagctgcttgggaggttgaggcgggaggatctcttgagccctggagttgaaagctgcagcaagctacgattgtgtcactgcactccagcttgggaagcagtggagaccatgtctcaaaaaagtaataataaaaataaaaagaggctgggtgcggtggctcacacctgtaatcccagcactttgggaggccaaggtgtgcagatcacctgaggtcaggagtttgagaccagcctggccaacatggtaaaactccgtctctactaaaaatacaaaaattagccgggcatggtggtgggcgctgtaatcccatcttggcaggctgaggcaggagaatcacttgaacctgggaggcagaggttgcagtgagccgagatcgcgccattgcactccagcctgggagacagagcaagactctatcttgaaaataaaataaaaataaaaataaaaataaatggtactatgtaaaccatttcataaaagtctttttcacctaaaaatatggcatgactatcttttccatgtcagtagtaaatgtatcttacattgtcacaccatcaattaaccctaccacccaccccatttggaacttccttctcatgtggcttctgggacagtgttagaggggtgcacggcctgtcttagaggcacctcttcatcccctgtctaccacagggcctacttctcagagttgcttttcagtctctacttctgtttgttcaaccatgttcccaggtagaatctaattgccagctagacgtttccaattgagtgtggtttttgttttgttttgttttgagacagagtctctctccgttgcccaggctggaatgttgtggcacgatctcggctcaccgcaacctctgcctcccaggctcaagcaattctcgtgcctcagactcccgagtagctgggactaaaagcacccaccaccacacctggctaattttttattttttctagagacagggtttcaccatgttgtccaggctgatctcatgctcctgggctcacgtgatccacccaccttggtctcccaaagtgctgggattacaggtgtgagatatctttcttccagagccacctctgtcttatacccctctcttctacatctaatcagttttgaggccctattcattttcttcccaaatagctcctgtatccattccttcccattctcgctgcagcaccaggcgcttgtctcaagtgctgtcatcactcaacagcctcctggcgggctcccctccttggcctcctctgcacaaggctcctgacacattctcagtcacctcttgggggttgccttctcctattccagaacctgcagtgactcttccccaaatctacacctctctaagcttgtgcccacctgtaccacctcatacctcagtgattcccaagatgccttctgtgctttagtgagacccgtcttgtcactgtcccaggtatgtgcaagtttcgtgcctatccccctcctcatcacacagaatgccttctctatccctacctaagtcttatgtaacccacgatgccctgctcacatcttttttctttttctttgagacggagtctcgctctgtggcccaggctggagtagggtggcacgatctcagctcactgcaacctcagcctcccaggttcaagagaatctcctgcctcaacctcctgagtagctgggattgcaggcatgtgccaccacagccagctaattttttatatttttggtagagacggggtttcaccatgttgcccaggctggtctagaactcctgacctcaagtgatctgtccacctcggcctcccaaagtgtcgggattacaggcgtgaggctctgcacctggcccctgctcacatcttacctcttctagaagtctctagcctgcccaggtcacccaccctaccccttcactaaattcctattgcatttacagtgtgcactgcacagaatggacctcgtagtgccaaccctgggtaagacatggggtagtaccactggcattacatactgagtggcttaacttcccaaaggaacagaaattggattctgtggaatctggagaagtggacagatctgggggttagggaattggaggaaaggggttgggatgagagttgctgggaaatagtctcacctgtgtgggttcccctcggtccattttgtcccctgttcctagctgcccgtatctgttatttccttgcatgaagattcggccaaattcatccaccaggccaaggtggttgtagccaagagcacagaataggatctagcgtgcaagatagaaaggggatagggattccattccctccagaggaactctgagttccagagtctccaagccactaacctgccatccccagctgatctctttctatatatatattttagagatgggatctcactatgttgcccaggctggtctagagctcctgggctcaagcgatactccctcctcagcctccctccgcaccgagcccccagctgatctcttttggcatacctctccctggggatcccctgcccctctggatcaataatctgattcctataatacttcagaccttccaatccctacagcgccacccctctggtttgccccgtccctccaggagcctaccttggcaggcagtgagagagcaagcggcatctgctggtccagggggtcaaaggcttgaagggtcccaaagagatcgcgatacacccctggggtatgcacctcaaaatacactcccccctggtctggggggtcaggagccctcagctcagcagctttgggcacccatttcctagggataaggccccacctgggatgaaagctacaagatccaaggagtctcatacccactaggaatgcatcaactatgatgcctgggaactgaaaacacatcttttgagaccgagtctccctcggtcacccaggctggagcgaagtggcacgatctcagttcactgcaacctctacctcctggttcaagtgattctcctgtctcggcctctggtgtagctgggattacaggcgcctgccatcacacccagctaatttttgtattttagtagagatggggtttcgccatgttggccaggctggtcttgaactcctgacctcaggtgattcacctgcctcggtttcccaaagtgatgggattacaggcatgagtcaccatgccggccctaaacacatcttttcactaggatgccctcaggggttcaccatgcagctggagtaagggtgaagggtgttgatgtttagagggtctaaccaaggctgcgggcttgagccggggggaggtggtccatacctgtgacgtagagggtgctgctctggttggaagtcatgcaggccacgcgcaggtgaggcaggtagtgggacaccttcctcagggccagctgaaccgtgtaggagcgtggctggtcaagctgggtctcattcactaccaaagagtagatctttccttcctctgggggtaggggaagcaattagttggggaggggattctccaatatccacataaacatcccaagagactccctaggccatatgggtgacacatttactgccctagagtggggctgagaaagaaataagggaagagtgaccccaagtcccccagactccagttcccaccataaatcagggaagtacttcagcatgagagatgagcagagagaaaaatctagcagatttgttagaatccgatttgagtgagaggtctggggattgagggccctgcctggcattcagaagtttagaggtggtcaagtgtggtggctcacacctgtaatcccagcactttgggaggccaaggcaggaggatcacttgaggcagggagttcgagaccagcctgggcaacatagcaagaccccatctctaccttgctccaaaaaagaaaaaaatattttaagaaaaagcctaaagggtctcaggcctggggatgtggttgagtataaaggacattgggaaagtagggagcagtttggagtatagtgaggtggttggcatggaagctggggacatctgatttttttttttttttttttttttggagatggagtctcactctgtcacccaggctggagtgcagtggcataatctcggctcactgaaacctccacctcctgggttcaagcgattctcctgcctcaggctcccaagtagctgggactacaggtccatgccaccacgtccggctaatttttttttttttttttttttgagacggagtctcgctctgtcaccaggctggagtgcagtggcgtgatctcggctcactgcaacctctgcctcctgggttcaagggattctcctgcctcagcctcccaggtagcttagactacaggcacgcgccaccacgcttggctaatttttgtatttttttttagtagagtcaggcagggtttcaccatgttggtctcgatctcttgacctcgtgatccacccgccttggcctcccaaaaactgggattacaggtgtgagccgccgcacccgacctaatttttgtattttttagtagagatggggtttcgccatgttggccaggctggtctcaaactccagatctcaggtgatctgctcacctcggcctcccaaagtgctggggttacaggtgtgagccaccacacctggacagggccttttattcatataaaatattaagcagaatcctagactaggagacagagaagggcagagctgtttagatggagactaggataaggtggcatatggaacccagtctgaggggcctccctccccctcctctgcagcagggtctgaggaatctgcaggaaacagtttgcaaaagccattgctttgggccacacctgtgaggagcagtagagcccgctgggtctcctgaccaaccagcacgatctgcttgaaggtcattgagtggtggaatgtcatcttgaagacccgctgcccactagactgcagatagacctcaacacagtcacaggcccggctgctggtggtacccaccacttcctgcggctcccgagtggccaagacgtagaggtatttacggtaaactgtgtcacaccttgggtccgaggcaaactgggggaaaagatgagggcgtctgggatctagagtttcaaaatgggatggggctggggcagctggatcctggggtgggaagtgaaatgcttgggtccagagttgggaaatgagcccttgatttcaggttcctatgtgggagggcagaagtcataggaaagacacctcaagactgatgggggcctgggtcctcaaaagagaggtggtgatatggttaggctctgtgcccccacccaaatctcatctcgaattgtaatacccagtgggaggtgattggctcacgggggcagtttcccccatgttgttttcgtgatagtgggttctcacgaggtctgacggatttataaggcagttttccctgctcttgcttgtgtgctctcgcctgctgccatgtaagacgtgcctctttcccttctgccatgattgtaagtttcctgaggcctccccagtcatgtggaactatgagtcaattaaacctctttgccttataaattacccggtctcaggtatgtctttttttttcgagacggagtctccctcttgttgcccaggctggagtgcaagggtgcgatctcagctcactgcagcctctgcctcccaagttcaagcaattctcctgcctcagcctcccaagtagctggaattataggcacccaccaccacacccagctaatttttgtatttttagtagagacgggtttcgccatttggccaggctggtctcgaactcctggtctcagctgatccgcctgcctcagcctcccaaagtgctaggattacaggtgtaagccactgcacccggcctctggtacgtctttatagcagtgtgaaaatggactaatacaggtgggctctcagctgccagggttctgctactcacatccttggctccacgacacaacacaacatagcgacaggcccgcttccactgcatctggccgagggtggagaccagggcatttttgaggaagaagagggtccccacgtagtcaagaatgaagacgtgatccttggtgggcaagaagcggcggtagccgtgggctagcaagggggccacgctcttgctgagacatcggcggcggcctccaaatgcctggaaatacaggcccttcgtgtctggaggaaggaaggagatggaaggttcaagggatgagatgacacgagggagatgagttggagcttgggtagatttcttagacacgctggtttgtagttcctccccatccccaggacaggggaacaaacagaccccttatgaaggagatgtggaaaataagcttagattatactcgacatgtgaactttagtctccaccccacctcagcccagggtcaaacatttgcttcttagtgagcagttctttggtgcaaccttgcatcagtgatgttgaggaaaactctaagaataaagacacagaggctgcgtgcggcatccacccccctcaccctgagcccctcctcccatcctcacagctcagtgaatttttgcacgcctgtaatcccagcactttgggagcccaggagtttgagaccagcctgggcaacgtggcaaaaccccatctctactaaaaatacaaaaattatccgggtgtggtggcgggagcctgtaatcccagctactcaggaggctgaggcacgagaatacttgaacccgggaggtggaggttgcattgagccaagattgcaccactgtgctccagcctgggtgacagagcaagaccctgtctcaaaaaaaaaaaaaaaaaaaaaaaatcaaagaaaaagaaagaaaagagaagagacagaaacaggagtgaaaaggaatgattgatgaaggccggtcatcctccctcacccctagctttggatctgttttctgggtcccccttctcttttaatctcccagtgagtgtaagaagtacaccctgggggatccctggaggggaagagggtttatggcatggttctcaggctaggggtgattttgtccttcaagggcattggttgtcacaattaagggggatgctgctggccatctggtgggtggaggccagggttgctgcttaaacatcccaccatgcagaggacagctccccacatcaaggaattattttgcccagaatatcaacagtgagttcagaagccttgggttagaggagggaaaactccaggtttggggagtgagggatgcctctagggaaaaagcgggaagtgtctgtgtacagagggagacttggcagggaggccgctaacgggggctgtgggtggattccgaagacttggaggaagtactcaagggagaatgtttgaactggacccgtttcttccggagaaaggggccctggaagcactgttgggagtgtgggggtcatcaggggactttagagagcaggaaggctaaggcgggacagaggcaaggagaacgggaggttctggggaaggtgtacagttcagaatggcagctctcttccagggccggactccagaaccctgatcttggaggcgcggactgagtctgcgacagatgcgtctccacacgccttccccatcgcacacttcgtggaagtagcggcaggtctggccgagggcaacaaggtctctgactgggaggaatgagatgatatgctccacctgggagggaggagggaagaagcggggagtctttggtggcccctcggtgatctggcccccaatcctattattctcaatccccctccccaaggactcaccagctctggggggaacaactggatggaaatcggatttcctttccccctcttctcttcaaccccaagctccgagccacaagaagggcagcttctcttcacctacccaagaaggggtgcatagggtcccatgagggtcccacatccttttttcccttctctccgcctaccttggggctcatctgactctagctgggcacagttatttcctcccctctctctccagacccatccctaacttctccaaataactcctcccgatctcctgcggccaatccccctcacccggagcccctcctcccgtccacacagcctggtgaatttttgcagcttccgtctctggcttcccctgaccatcctgattgccccctccctgctcctgccctcctgtctcctaggcccttggcccccccgttcctgctggctttcccacaccatgtccccagcctaggcttgggggacctctgaggcccctctgcctcctaggcccctcccccatggagtctggggctaacaaacctctctgtgacctcactgtttggccactgtgacctgttccctttaatcttgcccaggacccatctcttagacagctcctgggttctagctcagttctagccatcacatggctcaagggatatgcattttactggagaaataaagtgtgaattactggtaggtgacatctttatttcagggagcaggaggaagttttcctatttgaggcccttttagcactaactctgtagagaaacactagtgaattcctcacatttcagcaggccaaggcctctagggattggtagctcaagagtatagactcaaaaaactataaactcagtttgacaggtgagatggagaggtgactgtgctaataatcgtttagctcacaaatgattcagcaaactctttagacttgtgaaaaaacacatccaaaaggagactgcagcctggtgccggtggctaacgcccgaaatcccagcacttttgggtggccatggtgcaaggatggcttgaggccatgggtttcaagaccagcctggtcaacatagaccctgcgtctattaaaaaaaaaaaaaaacttaaaaattacccaggcgtggtgatgcacccctgtagtcccagctacacaggaggctgaggcaggaggattgcttgagcccagtttgaggcagcagtgagctatgatcgtgccactgcactccagcccgggcgagaatgatacccagtttcaaaaaaaacaaacaaaaaagaagactgcttttgctttcctgagggacagtaacatcattgcatgtataaaggacaacctattaaggtgggagaaagggatggatttcctctgaaagcttaggatttctcccagggtctctgatattagctttgtcttatgtggggtgacatttatcaggagaaacagcaggggtcagggttgtgtctgtcccactcaggccagatctacaccaataaatccaaggagtggctggctcttgcaggggctcaaaggagtcccatcctgccagaccaccagccctcaccacacagtgtcacagatccgttcattgactgcaccagactgaccacccaaattcccttatgtatggtgcctagccatggctaggctgggatgcctgagatggaattttaattcttcagcaactactcaggaatatcaacctctgagatgtgaactaaggagaaagcaacttcagtgacttatttctgggcaacctaccacatagggaggggactgcattagggactcatgccacttagaaaggaagatctccaagtagacagaaaggtattttccattcctcttgcatttgggtcccctttatccactccatttcaccccaggaggcaaacgagaggttgtgaatagaaaaagtccactgtgggccaggctttgtggctcacgcttataatcccagcacttcgggaggccgaggtgggagcattgcttgagcccaggagtttgagatcagcctgggcaacatagtaggaccctgtctctacaaaaaatacaattagctggcatggtggtgcgtgcttgtagtcccagttactcgggaggctgaggtgggaggttgaggctgcagtgagctgcgatcaagccactgcactccagcctgggcaacagagcgactctgtctcaaaagaaagaaaaagtccactgtgggccgggtgcggtggctcacgcctgtgatcccagtactttgggaggcagaggcaggatcgcttgaggtcaaaagtttgagaccagcctgggcaacatagcaaaaccccatctctacaaaaattgaaaataaattagccaggtgcagtggtgccgcccgtggtcccagctacttgggaggctgaggcaggaggatcacttgagcccaggcattcaaggctgcagtgagccatgactgcaccactgcactccagcctgggcgacagaatcagaccttcttaaaaaaaaaaaaaaaaaggccgggcgcggtggctcacgcctgtaatgccagcactttgggaggccgaggagggcatattgcctgagctcctgagtttgcgaccagcctgggcaacacggtgaaaccccgtctctactaaaatacaaaaaattagccgggtgtggtggcgggcgcctgtagtcccagctactcgggaggctgaggcaggagaattgcttgaacccggacagtggaggttgctgtgagccgagatcgcgccactgcactccagcctgggcgactgagcgagactccatctcaaaaaataaaaaaataaaaagaggaagggaacggaagggagagggagggagggaggaagagaggaagggagtgaaaacatccactgtgaaaactgagggagcgggaaagggctgtgcgtggaggatccagagacctggtttctagagcaagccagctgtcaggaacttgctgttcgctcttgctaacgcatcaacttccctctgcctcagtttctgcattcgtagcaccaagggcgtgttctaggcggtgagatcctttctaagcctctaaaaccccgtggtctggtcccctctccattcctgtccaggggagctcctcgggtgagacggcagaccgtgcaacgctgcacctacaccctccctcctcgagctgggcatctccaggctctgggaagccccccgcccgcccccagcccgggggtcccgagacccctgccagaggcttcacagtcggaggtccccccgctgccccttcagctgcgacaaccgccagtgcactggcctcaagcagtcgcccgaatcccctcaagccctggacgccggctagccccctaacacgtccagctcgcactcgccactgcagcggcgaactgcgttcccggccggccaggggctccgcgttcattcttaacctcagtcttaaagttctagctcacccgcctcctccttagcaaagggaccgccttctcgcccatgctattggtaggtagagccgtccctcagagaagaggcaggtccagattcccttcggaggctctaattggccttcttgacagtcactcgcctgtatctggcttacgattggtctttgggggacgaggactaggcaccccctgcttgcggtccctcggcccgttttcctgctagtggagtgccggtgtcccctcctcttggttggacctgattggctccacctcccgatctgagcattgtgattgggtgcagctgcgctgggcgggacggcctggagcgtcggccgttggcgagcgctctatccttgttcccctcccttctctcgtcagactccggcgccggagctccacccccactgacgggttctgattggccgcttctgacgcgtctcggggccacgattggtccgtccggtcccggacaccgctccctcccccttgaggcaactacggcggctccaaggagggggtgggggaaggagggacggccggtcccgtcagtcaggcagcgggagccgccgggagcggatggcggcggccgtagcggctccactcgccgccgggggtgaggaggcggcagccacgacctccgtgcccgggtctccaggtctgccggggagacgcagtgcagagcgggccctagaggacgccgtggccaccgggaccctgaacctgtctaaccggcgcttgaagcacttcccccggggcgcggcccgtagctacgacctgtcagacatcacccaggctggtgagtgcagccgggccccgggcccaaccgggtccctcatttgcatagccccaccccgggccccgcccggcccggggagtcgggcccgccccttcacctggcggccaggttgctgcccctcctgattgccctaaacctgcagccatcttctcccatctttgagaaccccctagacaatgaacgtgcttctcgtttgcacagaacgccctgcgcctccgagcgttgggagagattcctcctttctctttatttgcatatctgcgcacctgtaggatggtcccgcccctcacctggttggcttatttacatgatctcttaacctcagctccaatcggtctatgaagcagtccccacgagctcctctaataactgctttctctccctcttcatctacacttcttaacccccgtcccaccgagatccgagcagccccgggcacccccttcccagtgactggcccctaagcccgaggtttctgctttctgtgccgcaaccccgccccctaaggtcctggccctctccactgtccacgcagctctccagcctatgggaaagaaacaaatctctacctcccctcactcttttctccctgagctcttccgcctattatccccaaccggcttatctgagattcctcctcctccttcctaagcctgtgaggtcactgtggagcctgtgacctcatagggatcttagaattcccatttcagtttctgctttcccccgggggagggacttgaggccgttgctggagggaaggaaatcttatctcctagctgggagtgctggccagctagagactgtccttccacgcctccacccgcaggatctgtccaaccatgcaccctccaccctggtgtctgtggatggtagggggtgggggacttaactgtgacaggtgagtcaagcctcagctactcaggaggcagcctatgaccttgggccggcagctgggggtggggatcaggatcagggaggaggactgcattcccgaagcctcaccccagcccaggcctcttcctcctctcatctgcacggtgggggaccagagctggaggatagtgcttacttctccctaagcaggtgcctgctcacctgggaacactcaggccggcactggcacacatcctcttccctcttctggggagaaccagtcgaaacctccccactgatctcgcctgctctgcaacacttgagatggggaatgagtgagctccaggagccattcctgccccttacagccctgttccctcccacccccacctaaccccacactccagattgacctcagcagctgtgtgacactcactgtctgttcccttcccctcccccttggttgttttttgacaaagaccaaatgttattctttacttccttaggctgtctctccctgtgtggactcttggggaaaactacccggagctccccggcccctcccagctcccgcccccggccccctcctcccccagcattccggctcagggtgcagccgtgctcctgtgagcttgggggggggtcggaaatcccagcttcccaagaaccctcctctgccccactctctacacagggcccaggttctaggccaagtggggtccctcttgtccagaattctctcctctgtcccctctccgcaagcagggacagaaaggggaagtgacaaaaacatacagttgcccataccctgccctccatctctcctcgccctccaagcagacgaaaagcatcagtgccttgctgcccggactgccttgagccttcccctcccgtctcccatctctttctgagtgtcttcgctgcgtgtcgcctagtcttgggtccctgatctcccttggactaggctccctggggtgatagtaggaagaatcctgaggtggcggggaggggccatcttgcaaaggagaagtgcagctcattctctcccagaccacatcctgtgcccccagtgccctgcctcctgcctgagctcccttccgctcctagcttttgtccccgccaccgcctaccccatcagaactctgagaactcggtctccacccccttcgtccacatgcacacacacaaacacatttgcagagaaagcgggcaggtggaggcgaggctgggaggggcaaatgccatccccccaccctctccagaacggtcatctctgaggccagggcttctgtctgtgcaccagggctgggcagagaggaagagaaaggggtcccggggcatcaggctgtcatccaccctggtaaacacggggcctaccagagccagaacctgacagattgtttctacttcatttcctgtcacaagactcatttccttgggggatatacccggcttctctcctctgcttgcttttgctggcctgcccttccctgagaagggcccttggagaagctcaccaggtctgtggcctgggactccgcctcgcgggccctgggcccctcccaggacaggctgggccgaggaaacagaaaggcaggcttctccaggtctaagccgttagtgggtccgtgctacagggaatcccaaggctgccagcctccgcatagcaaggcagtgctccagataagagggcgattgtagaccccaggccctcccacactctccaccctcgccgtgcctgagatgctcacacagttgctgatctcttgaagtctgtgtcagtaagagaggaagcagagccgggctgctagggctagcagagggtaggaaggatgcctgccctgggccagagaagcccagatgggagggacctgggaactccagctcccatctccaaccaggtcttcttgcccttccctcccagcccttgggaatcagtaactttatgattctttggacctggcttgctggtccttggggctggcgaaaaactcgtccggtgtcggggactttatctctagaaccaagatagagtgacctgtggtttttcccgtgttgaaaacacactggagtagggaagaagggccccgaggagggatgggcactccctgtggtttgccccaggggtttcccatcttccctccgggagccccccagcccctcgccttactgttttcccatgagcactgacccctcctctcaccttcggtcctccgcctcacctggcatctctgaacaggaaccacaggagttagagattccagctgctctccaggatagccctccattgacattccccaacccccaagtctgaggcttctctagcccagtgacgctaaggcctttgccttccctgtgccattctggtcacgcctggaatgtgctcccgttggcagaaggctttgttatctctcctgggaggccacattgatggccttgaatctttaggtgtggaggtgagggagtgggcagccggctctggggggactgaaggtcctgtccgggctgggcctttccgcaactctccccgacacctccttttccccagacctgtcccggaaccggtttcccgaggtgcccgaggcggcgtgccagctggtgtccctggagggcctgagcctctaccacaattgcctgagatgcctgaacccagccttggggaatctcacagccctcacctacctcaacctcaggtagggaggccgagccagggccacgtgggagcgtgtgcttctcagtctcaagtactactgagtgacccacccagtgaccccgagaggatggcagtgctgggatgccatgcctggggagccagtccgctgcctttctcccttccacagccgaaaccagctgtcgctgctgccaccctacatctgccagctgcccctgagggtcctcatcgtcagcaacaacaagctgggagccctgccccctgacatcggcaccctgggaagcctgcgacagcttgtgaggatggggacgggaccaggaaagggacccctgagccaggcagcgggaccttctagggggaggttggggagggcctggagcaaagacagagatgggagggtgggttctgctgggcctggtctcatggccccttcccactgccttcctgataccaggacgtgagcagcaacgagctccaatccctgccctcggaactgtgtggcctctcttccctgcgggacctcaatgtccggaggaaccagctcagtacgctgcccgaaggtgagaagaatgaagaactggagaggaggtgtttgtatgtgcgtcccagttggctcaggctgcggtaacgaaaacactgcagaccgggtagcttatacatggcaggcattcatttttcacagttctggaagctgaagttcaggatctgggtgcttccatggtcagcttctggcagggtgcttttcctggctgcagactgccggctccttgtggtactctccgatggcggagagcagagacagccctctggggcctctttgataaaggagcacaaatctcactgatgagggctccaccctcatgatctcaattacttccctaaggcctcgcttcctaatcccatcactttgggggttaggatttcagcagaggactttttgggtgacacatttcagtccataacagtgtatgtgctttgaagaagttacaggccaggaatcttcagaggagaattacaccttcattgtccaggcttttgcagtatataaaacaaactgtaaacgatctgatttgatcttgacctagcaaccctctgatgctggcagggcgcagatgagcagctgtgttagaaacgtggacacaggcacagaaggggagctggtgggtgcatcagctctaggtagactggcaaggtcagaaggggccttcaaggtcacccagcagccctgctcaccccagcaggggctctcaaacacctgagtcgggatgctccgccactcctcccggagatgccagggccagtgccagagcccaggtggcccatctaatgtgcttgttgtgatgcactgatagcctctgccccaaagcaggcatgccttttgttcagcaggcagcagcatgtgtgtgtgtctgtgtgtgttatgtcttgtgtctgcgtgcatgtgtgtgtctgtgtgtatgtatgtgtttgtgtatgtgtgtgttgtgtctgtgcatgtgtatgtgtgtttgtgtctgtgtgtgtctttgtgtgtgtgtttgtgtttatgtctgttgtgtgtgtttaggtctgtgttgtgtgtgttgtatgtgttgtgtgtgtttaggtgtgtgttgtgtgggttgtgtgtatgtgttgtgtatgtttatgtgtgtgttgtgcatgttgtttgtgtctgtgtgtatgtatgttgtttgtgtgtgtgtgggttttgtgtgtgtgtgtgtgtgtgtgtgtgtgtgtgtgtgtgtgatgtgtgtatgattcctgtgttgggatcaggtagatgcgggtgatgtgactaagatctggggccatctcttagggatttaatggcttcttgaggagagacagtcatagggaagttccgtcagggggttccccagacgggggctagagggaggtggcactggactctgcgtgggggtcctggggaagacttcaccggaggcgcaggcgcagtgggagccgaacattgaaggagaattccccagccttctgcatccaggcagaggacccagcatgtgcaaagcatggggttaggaaggtgagccaggcatggcaggaaggcctgtgccatgctcaagtgtgaacttggttttgaagaacaaggagggagtgaggtggtcatccactttccctgtctccctactccctgaccctttctgcacctgccctcttccttcccagtcaaaaggggtaggaagggctctctctgggccataaaaagaaatccaagcaagatgtcctggggacagaggcaagagcaatgagttccatccaatctgggatgtctggaacgatccaccgaggaggtggtgatgcttgagctgaaccttgaaagatgcatggatggggaaaatggagttctcccagctgagcaaacagcacctgggaaggctcagaagctgagggcccggaggggtgggcagtgaggtgggaaacgcgggtggagccaggttgtggaagccttcctcatgctgggttagggagctgtgggttttattctgtgcttagggccgccatgaatccagactgtgccttttttttttttttttttgagacagagtctcgctctgtcacccaggctggagtgcagtggcgcaatctcggctcactgcaagctccgcctcccaggttcacgccattctcctgcctcagcctcccaagtagctgggaccacaggcgtccgccaccacacccggctaattttttgtatttttagtaaagacaggttttcaccatgttagccagggtggtctcaatctcttgaccttgtgatccacccgccttggcctcccaaattgctgggattacaggcgtgagccaccgtgccggtcccagactgtgcctttttaagatgagcaaaaggcacctttccctgtgggcaggcagcatttcatgcagggtgcagtgctgggcccgtgctggggaaaggggactcccgggcggccacaatccgctcaacatctgcagccctggttgcatgtcacaggaggtgtttgaacagggtttgtgccttgtgctgatcatttgaaaatggagggtgggttcgagtgtggagtgggcaggcgaggagatgaggaggacagacagggctgggcgggacctgacgtccggatgggccttcccggggaagctgagctgacgtccagatgggccctctcagggaggctcgcttagaccgtggaccagaatcatgtggagagaggagcagggaggtttctcccggggaatgacttgagccacccaggggagaggctgtgctgggcccagggtgactggccagctggagccaagggtgagggagtgagcacgaggccacagccctgagcatgttcctgacttttcccttgcccacctgttccagagctgggggacctccctctggtccgcctggatttctcctgtaaccgcgtctcccgaatcccagtctccttctgccgcctgaggcacctgcaggtcattctgctggacagcaaccctctgcagagtccacctgcccaggtgaggcgggtgcctggggggccacgaggacaggggtgtggctaggcaggagtggggttggtccccttggatagctgagcaggatccggggagctgccctccctgccaactccctggcgtgtgctgccccgcacacaggtctgcctgaaggggaaacttcacatcttcaagtatttgtccacagaggccgggcagcgtgggtcggccctgggggacctggccccttctcggcccccgagtttcagtccctggtaagtcctaggtggggaggaaggaagccctgggatactgaatgccccttcccggccccaggcaccccctgctttctggcaggaggatggggggctgttgtccagcatcaggctgaccagatccgcctggctggccccagccctgcagaggatctatttccgggacatcggtacgatggtgggctggactcaggcttccacagcgttgatagtggcagcaagaggtggtctggaaatgaggtaagggcgtcctgtccatgggtgattgagggtgtcagccctgggagagcacctctgaactggggacctccaaattgcagggtgccaggcagaagctggagctgtcctcttccttccctctgcccagcatccagggaagggctggctcagcagagacctgagcttagtccacacaggacccccaggtcctgagcccccatgtacagagaggccatctcccatctctgcctctgcctttacagtcaacagatgaattttcagagctgtcattccggatctcagagctggcccgggagccccgggggcccagagaacgcaaggaggatggctcaggtgagtagcacggctggccgggagctgggctggaccagggcctgggtccccgctcacttgctgacatgctggcctccccagcggacggagaccctgtgcagattgacttcatcgacagccatgtccccggggaggatgaagagcgaggcactgtggaggtgagagcccagctatgcctctcccaagggaggggagctggaggaggggacagggcaggcgtgggcacaggcctgccctcagctgctctgctgttctctccttaggagcagcgaccacccgaattaagccctggggcaggggacagggagagggcaccaaacagcaggtaccccaagcccccaaactgacgccactgcccgatcctcccaccccccaaccgcctccttccctgaccccggggtctgcccctcttgccctgtcttggtccctcaggcgggaggagccggcaggggaggagcggcggcgcccggacaccttgcagctgtggcaggagcgggaacggcggcagcagcagcagagcggggcgtggggggccccgaggaaggataggtgggacccagggccgcccggggctgttgctggacactgagccctggaaatggggccaccgagccccgctgagccgttctgccttggggctagctgaccccacctctccttgttccagcctcttgaagccagggctcagggctgttgtgggaggggccgccgccgtgtccactcaagccatgcacaagtaggtttcctgccagcatcccctccccactcctcttcctatgaccatcatccctctaattcccttctgtctctcctcagcggctcgcctaagtccagtgcctcccaagcagggggctgcagcggggcagggagccccgcccctgcccctgcctcccaagagccccttcccatagctggaccaggtgggacagggattttgggaggaggatggggcctgtgttggtgagggctggttgggagagagggacacagaggggatgcctgtctcacctgcccctgtcgctgtgtccctggttccggccccagcgacagcacctgctccacggccacttggctccattcagagaccaaacagcttcctcttccgttcctcctctcagagtggctcaggtgggtgtcctgccctccccagtgctgacccagtgcttgccagcaccaacggctacatcacccttctgccctgggagccctctgggtctgttgtaccttttgtacctttgcgttgaaaatcccacaagcaagccgggtgtggtggctcacacctgtaatcgcagcactttaggaggcccaggtgggaggatcgcttgagcccaggaattcaagaccagcctgggcaacatagcgagaccccatctccatgaaataaaaaaaaatcccacaagcagagaggcaggaggtgtaggtgccaggccactgggacccagctacagagtcagtggtgagcagtggaggcagccccatgcccccctttttctcctaggcccttcctcaccagactctgtcctgagacctcggcggtacccccaggttccagatgagaaggacttaatgactcagctgcgccaggtgagcagaggcgggagctgcgtgggcaggggcctgggccgggcacctccttgtgttgctgtccttgggaccagcctccctccacatctctgtgcccactctggcacctcccctgaggacaggaagggacaggcacaagttccctgctagccctgagccccccactctccctgcctcccagacgcctctccttccctgacccctgctctatgtggtctacactgccaggtccttgagtcccggctgcagcggcccctgcctgaggacctggccgaggctctggccagtggggtcatcctgtgccagctggccaaccagctacggccgcgctccgtgcccttcatccatgtgccctcccctgctgtggtcagttggggctggggaagaggtgggggatgggccggggcgcctgtggcctctcccttaccacattttcttctttcacccaccccagccaaaactcagtgccctcaaggctcggaagaatgtggagagttttctagaagcctgtcgaaaaatgggggtgcctgaggtatgggggctgctttctaaagagtggtggcatgccggactcagccgagcatgtggcatggatggtgggcttccatttgcagcggatgtctgctctcagatgaaggcacaggctgcccctgccctgcccagcatgccccctgccctgcatgccccctgccctgcatgtcacctgtcctacacatcccctgccctgcaggccccatcttgtcctgcatgtcacctgtcctgcacatgccctgccctgcactcctcctgcactgcactccccctgcccagcacgtcagcatgtgggcgtggttctggccccagcacgtgagggcaggggtgggagggactgtcctgctgctgctgctgacgtctgtcccttgtccttgtccacctgctctcctctcccccaggctgacctgtgctcgccctcggatctcctccagggcactgcccgggggctgcggaccgcgctggaggccgtgaagcgggtggggggcaaggccctaccgcccctctggcccccctctggtctgggcggcttcgtcgtcttctacgtggtcctcatgctgctgctctatgtcacctacactcggctcctgggttcataggccccaaaatcggccctccctcacccctttcccttcctctctatttataaggtccctgctccacccgaccccacctgcggtgccttcagccccaaccaaagacactagtgcacccccttcacagacactgacctcagaggccccactctggtgcccccagaccctgggcccccagcctctggcctccctccagtagccccacgagtccccacctctcagtgctgacggtgccttcatgtccccgccggccctgcccctgccctctgtaccccgtgaggggtggcaggagctggagtctcccccttcctcctgtgccctccccttccccccccaacagctgctatgggggggctaaattatctctattttgtagagaggatctatatttgtaggggttcggggcccaggccgggtccctatctctgtgtataaactgtacagaccgtggccgccctgcctgtgtgtgtgtgtgtgcgcgcgcgcgcgcgtctgctccgcgtgttggtggctgtggccatggctctgtgcccaccagcatctccctcctgagatgccggcctctcatgctcccggagcgtccgccaaccccccgtgtcacctcccttctgttatcgctgacagctttcttgcgtctcatttgtcgccgagccccgagcgcacggtgatgctcgggtctgcccccgaccccctgccacaggccggaagccgcagggggcaccgtggggaagctaacccggccccttcccccaggagtcactgtgccagccccaccacatcctggaagaggagggggccccgggaaggggcctcccctacatcgctgctgtcgtccacgccctgctggaccggccttaggggtgaaggtgggggcacagggcccaccccgcccgggaccccgggagcagaagacgcgcctgggctccgcgctctcagagaagcacgtggtgagggtggcctgggcctgggcacccttggcctgccggcctggctgcctctggggtcgagggtctgggtggaaggaccgcgggtgtcgcaggtgtcgtgtcagccgcaataaacagaagccagaagccctctgggtggccctcaggtgtaactgtgtctgagagcacgtgcgtcgcggggttgttgggggggcctctgtttccggaattcaccgcccagtcgccagggggcgcccgcgggagcccggcgggggcacgcgccacgtggccgggagacgcacagggcgccagcgtcgccgcgaggcctctggggtgggttcgccaggagggcacgttcgcgccgcgccgcggagggaggctgagagggccgggccgggcggcggggacacggcggtaccgtcctgcgctcgggaacgcggaatgttgccctggtcgccgccgcggtggggcgcgggcccggaggaggcgcccgagggaccaggccttccggcgggcaaggaccagggcgagccctggagcgccggagcggacgcccccagggagctggggacacccccatgggacaggtgaggggctcggacggagccgtggggggacagagactgggggcctccatgcgttcaccacgcgctctacggaggcttctccattgtccctgctggagattgggtccctcggtctcccttgcaccaggcacccttgggctccaggggagggtgcgtgggggcggtgtggctgcagcctcagtccctgcccctccagcccacagcccccatcccgtagcccttcctggatctggagagagcagctgctgctgccccaccacctgccaggcccggccactgagcagccccccggagccccaggtaggacaggccctgctgcctctactacccctaagagcctctcactgactgtgagcctgttataatccccaagcgtccccccagatccccgttccccccaggtggcctgggaggtggccccctcgaggatgactccactagcgccctgggaccccaagtatgaagccaaagcaggacctcggccggtgtgggtgagttgggggcaaacctgtgggactggctggggtgctcagggagctgtgcggtggcctgaggctccagtgctctgtcctcctcaccctagggggccaactgtagctcaggagcctcgttctcaggccggacgctgtgtcacccctcattctggccgctgtatgaagcagcctcgggcaggggtctcaggcccgtggcccctgccacagggcactggaatggacagcaggcgcccccagatgcaggtacctcccttggtcccccgggggcgcaaggctgccccaactcctctgggaaccagtgcccaggggtgggagcccgcagcccgccaccctagtggtgtttcctcctagggttcccggtggtgtgctgtgaagatgtcttcctctcggaccctctgctgccccgggggcagcgtgttcccctgtacctgtccaaggccccccagcaggtgagagctctttcccctccctgtccttaccccagcctccaggcttgcctggcaggaaacacattccattctctctcctcagatgatgggctccctgaaactgctgccgccgccccccatcatgtctgccagggtgctcccccgcccatcaccctcccggggcccctccactgcctggctcagcgggccggagctgatcgctctcactggcctgctgcagatgagccagggggagcctaggcccagctcctccgcggttggccccccagaccatacctctgacccacccagcccctgtggtagccccagcagttctcagggtgctgacctctctctcccacagaccccagacacccattgtccatagccttctcagggcagagtgggctggttgtgttgacaataaaacagtgttggtttgcaaaacaggctccgtgtggctgggagcagagtaagtcatagaggcaggaatggggtctctttctgtctcactgcagatcaccccctgctgtgttaggcggagggcgagggtatccatgacctaaggcatttctgggctgactgggcagagcccctttaatgagtgggtgggtggtctgcatggcagtgcagggctgaatgtataggaagcaggcgggggagtaagtaggggcacctcacttttaggggacactagccccacacctcttgtgctggggctccaggagttcagttctgggctgggtggggtagttgtctggctcagaggagacacaaagaatgcactgcaggtgtgtgggggagggtgccggtccatgtaaatgtcaccactggcagaaaggtggccctgccgcagcctacctgagactctagagattcttgcacgaactctgtagagaaacaggatcagggtttcagctgagaaagcccagaagtgtgtagtctcggtggtttgggcggggataggttctagaattttctcccataaaatagcccaacttcttggagaaccttctactcaagacttaggtgccacagctggaagggacacagggggcaggaccccagcttgttgccctgcaggtcacttgtccgaggtggcatctgggccttaaagcccctcacacggtggggagttaggaggcagggcgggggcgttacaatgccattccctccagtccctccctcaaccacccccccatcagtcagcaggagagagctgcctgggtctcaggtctcctcaccgcatagctatgtgggcggagcgtgtgggccctggggacgtcaccaagtgcccccagagaaaggaccaggtccagatcgacgtagctgaggcagctcgtcaggggctctggcctggcggtgccggttccgaggctctctggggccgataacttggtgcacacttcactccctagccagctctgaggggggcaggagcagcgctgagtccctacccatccccagccagcccccacatcgcgatgggcactcctgggcctgtgtccaggctcctgaacccagacttgtaggaatgggctcatagtcactccctgctcccttggttatgtagcccccacccagccccttagggtagaaggctgctgtccccagcctcgccaaggtcttaagggctgcttgctcgatcccctctcccagacaccctggacggctcaggccaatttaatggtccgcaaaaggtggggtctcagggatggggaaaagggagtttgaagggggttataggagggtccccgagcacctgggccttgttattgggccgggaaaacttttttttttttttttttttttttttttttttttttttttttgagacagagtctagctctgttacctaggagtgcagtggttgatcttggctcactgcaacctccgcttccccggttcaagcgattctcctgcctcagtctcctgagtagctgggattacaggcatgtgccaccacgcccggctaatttttgtatttttagtagagatggggtttcaccatgttggccaggctggtctcgaactcctgacctcaggtgatacgcccgcgttggcctcccaaactaatgggattataggcgtgagccaccgggccgggcctgtgcccggagaactctaaacctgcccctttaatgtttgaactttcggcgacctgggggaggggcgagccacggagaaaccacagccagaagcccccgaggcccccggaagcccggggctcgggcctcaccggcatcaccgcgctcctcgagcagggtgttgtatcacgcctgctgctccgcctcgcctgccgccgccacgcgcaggctgctgtcgcgggtgtagaggacgatcaggtggtgctggcgcgcatctgcgcacttgctggtggtgcacgcacccgccaggctcaggctgcgctggagccgcgctcggcacgcgcgaaacttctgctcgctctcggaacactcgggacgcggcgggtctgcgcgcaggtggccgcagaaccgcacgtcggcagggcaggcccagggcagcggctggctgaggggcacggcggccattcccggctctccccggggccgccgcctgcgggcttcattcaggggcgaaggcaataaagtggctgcagaagaggcagagacggctgggtctcgtgtcttgagcacggggagaggccagcaggggtgggggtgaggtggcgaactcggcgggccgggagcagcggccgggcaggctgccacccgtcttgatgcccagcgtctctcccgggctcccgactggaagtttggggcaaggactctgcgcacagcgagtgtcccggtgactgttgcccctggcctgggctccccactacctccctccctccgccgaccgctccggaacccccaccccacgagactaatcctcacgtcgcccaggaactggagtttgagtagggaagtccaagagaggcggcctcgaccccaagactgagcctttataggggcagagagcgtgggggcgtctctaccgatcagctgactgcggtccggacacgtcgtcggggcaaccgagaaagcctcggtgtgaggccagtgatcggacttgtggcagcggtggtggcgctggcgattagagggctttggaacggggcctccatgcaccctgctggctcctgccacgccccgctcggcctgtaggtgtccttcctgtgtgtacccccttcccatccaggagtggttttgtgcccttccaagtaaccaaaggagccaccgccactgagcactgcgctggattatttctgagctggagattgagtttcttgaaagtttggggtgataggaggtgacttgggctaagtaagctcagggggtagtccctgtgcacagaccatacccgctggaacccagtcaagtggccactgaaggagacctcggaggaagaggccatctctcaggaagaccccttcgggctgccccattgctctgggcccctccttgccaccactgcccaaaaatactaccccgggaccacctgaaggctctgaccatggacgtgtggacttcctcatggaggtaccctttgcttcttgaaaaaattgcgattgggctggggactggacatttttgcactcagttctgatccaaggaccactgaccccctccaaggggatgggggtgaaggtgcaccagacaaaccagcaggtgacacctggtgggaccttagaggaccctgagatatcacccaaggcaagtaaggtgcctaaaggggaaagccgagggtcagggaggagaggccaacatgcagcccccataaagatggcattcagggaggagctccctcagggaaggaacaagatatgacaaagacagaacaagagaacagatgcaaggacccaaacctagcccaagggccagggcagcctgagcagggtgggcagggcttcccgccacacttcctgcttcctggggaaggggccccacgtgagtgggaatatgggaggcaagtgctgtgtgcatggagctggggtcctcacacacctattccaaggtcacattgagagggagatgcagggaaccaaccagcacccagccagcaggcaggtgggacccagggcctgctccaggtgacctctggtaagccaaagccccactggggtgcaggagaggctcgaagcacaggtggtgtggtgtggggcgggggggccgtggggcggggctcggcaactgcccagtgttgggtgttggccacagaggcaatcgctccgtaagtggccaacaaaaccggactgtgttcaaggccatagccccacgtggccaagggccttgatacaggcaccatgtgcaaaggggcagggacacaaaggacatgtgcacacccctccccctcccagtcctgctgctgcctcaaagaggccaccaaagggcccctgtccctgctgcactccgggcccaggagtcttttttactccctgaggcttgaagatacctgaggaagatctctttattccttccccttcccactccccatcaaccaggtccccctgcagcacccttccttgtgaaatcacagctgctatgacagtgaccagctccaaaccaccctgtgtcactgaaccttgggtgctgggtgacacatgggcaggaaaggcaggaagagcagggatctgagggcctgggggctgggcaagcctcaggggtggggtgggtgctgatcaatgccaggtgatcaatgccaggtgattggacccactgagtaccaggacaaacctggagtcacgcaactggcctacatcagttgccttggcaacacactgcccttgaccttacccggaaaagatttatttcagccggtagccctggtaacttgagtggctccccagggacaggaagtggcagaacctcaactctgcctctcctgacctgaggggttcacttttcatccctgtcagggacggggcactgcgttctcagcccctatggaagaatgttatgggtttgggggaatccacggggaggagactaggctgttccagcgtgcccctccttcctcagcctgaggccttgctcctctgtggaaggcaacacagggacagagccacacattcagcccctaccctcagccctgctcccatcccctggcccacaggtctgacccgcaagctccgatgtggagacacttggtggctgactcctgcttcctcacacatggggatggcccacaggtgaccgactggctgaatgctggggccatgctagaggactgctgtctgcagagcatggtccctgcattggccagaagttggtgtgagcccaggtgagtcactctagccccgtggtgtgtgtggtgggtttgaatctgcagctaccaggcaatgttttctccatttcctctcaagccaggcctttctccattctttgctactctccaggagaggcggctcactggagggctggagcctgagctgctggagctgtccccggccaaggagagcagctcctagtgtcagcctgtgcccagggaaccctggggcccgaggctgacctggcgttaacttcttactgctcatccagctctcaccagccagcaggctggagtccttgtgggctggaggggagggagtctgcagggaggacccgggcctggacccagatagtgaggagatgccgggagacagcacagggtgacagaagcaggagaaagcccttcggtttagcctcagttccaaacctcggcgctcctggcattaagggaagggtgatggaagctggggggaaataacagaaaggctcctccccctaatacaccataacagattccagcttccctccctccggctctaagcagaaaggaaagaactggtaagagaattaggtagagggacacagagataatctagggtggcgaagaggggagaaagagaagagatggaacatgcaaaggccaggagcgaagcgggagaccacccaggagacagaaggagggcagaggctgggagaagaacaggaacagacaggatggggtcctgattgttggaaaagacagggaggccaatcccagccttgcaaatagcagcagctagaggttatttccagaaaaatctgcaaagtaaatacactgatcacccaactcccatatctctttgctgctctctgtggaagactcagacaaaccccaagaatgaatggccacggggccagggcaatggtggaaagggaggggcctcacctggccttgggccaaacagcaaggtggcctctgcccagccaggtgaggtgtttgccacccaccccctgaccaggtctgtcttgtcaccacacaaatagcccagacaccacagctggatgttgtcacaacatccccaggtggaaagagcctggggcagagaatgttccagacccaggaggggtctacttccagcaccacattggcaccaacctcctttgcccaccctggccccagtgggcattcccctcacatccaacaaactccagtccccggcagtggtggctcctctcccgccacgcttcttctcattgctaatgcgggactcttgttcagacagggacgggctctgccctgtctctggccaatggcagcattatcactggcccaggcagtccagcccagcagagccaggtcaaggatcagtcatgttgactgacctgcaacccctcaaagtggcctgaagcaaaaccacaggcgccgttttctctttcgttcaaatgcagttcttttccaacattgcctgcaatgagctttggtgcagagatttggggacagggaggcacatggagaaaaaaaaaaaaaaaaaagaccaggcaattgcacaaagcctttccctggaaaacccaggctctggggatggtgggggtcaggacacatggctgccccccctccagccctggagctccggctttgatggtcgaggcacagatggggattcatcccattccccacatacgagagcagtctgggagcgggagatcggctgggtgtgtgtatatatgtatgtatgtgcatatagatagatctatttatatataataggctatattagaaaatcctctctatgtataaatataaaacactggtatccaaacatgacaccaacagctaactaaagtgcttgacaggagccgggcccgggtaagctcgatggtaaaccgctcatcctgggcgctggggaagcaaaacaatgggggaccccttcagcagggggtgctgcaggaggaaagtgtgtgctggccaagctgggccaccaagagcacttgggccacctgggccttctgggtctcaggactgtctggtcactgccccatcaacactgtgcctcatctttcccctaccttccccactgcgctcccgtccatgaggagcacagcgctggcgagctaggcccagggaagagctgttccacaggggactgatcatttgaaaaaaatccctccccctcaaccatcactcctccaggtcaggccctgcccgcactcctcctgggcttcctgcctgggtgggggtgggacgagggaggggagagaggctttgtggaatctgagggcagccacctttcacctgtaggccccaagcaaagcattagcacctccaccatccccaaggcccatagaaatgcccacaggcaagtggtcaccagagctctagggagcagaggggccccagaaggcagggaagaggccccccaaaaacacagtgctacaagaaggggttggtggttggaggtttggaggcgaatgggcttgatgagggtccagtctggaaagaaagaacaatacattttccagttaggggagaggaactggaagcttagaagaaaggcagccaggagtcctttctcctgaaaaatcgctatgctgagggcagtgggaaagtgagggagaaaaggccaggcacggtagctcatgcctgtaatcccagccctttggcaggccaaggtgggctgatcacctgaggtcaggagttcaagaccagcctggccaacacgggaaaaccctatctctactaaaaatacaaaaattagccatgtgcggtggtgcacacctgtagtccctgctacttgggaggctgaggcaggagaattgcttgaactcaggaggtagaggttgcggtgagctgagattgggcctgggagacagagtgaggctgtctcaaaaaaaaaaaaaaaaggaaagtgagggagaagggagccaagggcagggctggaacagcatgggagatgccagtgcccagaagagctgaggcccaagctcagccctggcttggacaacgcagaccttcacgaggaaggggcacaggggccacctcacatcagcctcttctggaaggattgtcccagagggaaagcccacgagccctaccacagcacccctgctggcacactcaccatgaaggggttggtggagatcccagctggctggctcagtggcctctgccccaacttggctgatcctaagtccccgaaggaagagcctagggggcgagagcagtcactcagctgacaccagcctgccttcctgcaggcggacagcaaggggggccctcctaaactgggggagtaagggaacagagcagtggaagtacccgggcgggtctggtgcttccctggtcccccctgctggtcagaaagggcactgcatgggctctgatgaggtcggaggaacaactaactgatctctatgcagagatgggatggggtgaaagggtttgtccatctacagctcttaccattctgctgctgaacaagcggggtctgcggggggaacagcggtgctgggaaggagctggcaaaggccccagtgggtggcactgcctgggggaagccaggcccagcactgctcatcccaaagccgggccctatggagtgaaagacgggaggctcaggtgaacttctggaaggtgggctggagaactgtttttcctaagtccctccaagatgggaaaatgggatatagttttttcctgacatgaggaacgagggacccagccatggaactcttctgcttctcacaccaccaaacaaccctgccctctccctgcccgggggtacgtggcagggagggcatggtagttccaggcacgggcgcggtgcaggactgggctagcctcccactaaactgcaaaaacagcacaaacttctaacgctgtctgtgcttcagttctcatctctaaaatggggacagtccgtctcatagggctactgtgaagatcaaatcagggccacgaagccctcagcactgggcccaccacacagctcttctgtgtttgctcttattcctctctccccagcctcaaggcttcagccagcatgagtctgaggggagagcagcagaggctggggagggccagggtgagagaagacaacaggcctggagttgatggaagcagggaacagcgtgagtgtttcaggtggcttaagcttcgggacacagaagggactggggctgggtgcccaaagggacactgctgagggctggagacaggagaatcgctgccactgtcagtcaactctaaaacagtcttcagtgcggtctccggtaagtagccacctgtgtgcttctaattctaaaatctggctctgtgacctgggtgctaggtggcctggcaccgtgtgggcaggggaagaaccaggctgtctgcttctcctgacagcgtgagacaaagggttaagggagaggctgcagggtaatgtgtgccttggaagtctcagatggtcaggacaagggaccatgctggaggcttacctggcgccaagccattgggctggaacgggttggtggaaggcagcggggactgggcggcgggagctgtgaaagggttagtgaaggctgcccaggtggaatggggagcggcaggaaagagagagatggttactttttttctcacgtgcttcatcctgtgatgcctgagcattcctctcaatctctccccttcccaccctgtccagagtccttagactcctcctggcctcaggtcccctcccctgggtctccacaggcaggactcacctccaaaggccagccctgtgctgctgccgccgccgccgcccatcgtgacagactggagcggggggacctggccagccatcccgaagaggctacaacacggggagagagaagtcatacacagctgccagggccaatcaaacctgagcaaggggccaggagatgccaaccctgctctccagggtgagtaagggagaggaggggaggggagaactgccaggagatgccgatggggctgggaggaacatggccaggcttcgggcggctctcctgccctacagcagactgcccactgtctgtacctacctgctaggaacacctgcagcgggcaccccgggtcccaggaagctgcccacgtctgcgaggctgtttggctgactggcgggtgccaggggagtggcaccaaatggagtcccctggctgctccctgggcagttgtggaaaatacaacagggagagctgaggtaagacagggcgggaggggcaggagagcagatggaggtggtggtggtgatggattggagtcatggcatgacaggtgcctgctgggttctctgaggcagcccattttctcagggaccacccagttcaggaggtcttgtctcccaccaagagttctgggcaaggtgacagcccagcccttctccgtgtcccctgcgctcaaagctgcgctgcggagaggaaagcagctcgtccccaggtcaggctgtcctcctcctgctccagtttggctttcatgtcccacttttccctcaagagatggaaaagcctgtcctttcctcaagcccgcatttccatttatcagaacatggcagggaggggcaggcagaggcaccatggaggacagcaagtcccatcacactcaggaggctcctggcctgtgcagcctccagctatcagcactgtcccttccccatttagccgctgcttctcgggaggccgccccagtgccctgagcctggaggcactgttcatggggccagccccgctgcggggttctcctgccctgcctcttcttcagagccaaaaagaaaaagcacagagggcaaggcccacatggaaatcttacaaaacagctgagggccaagagtcctggaaattccaagcaatcttgtctcaggggaagaggctgagtccctgtcattttaagaaagcctcctgtctgcacatcaaagtctcgtctctatcttgggaccctatcgaccacactgggctgctgtgaatgtaaaaggagggtccagatggaaagaggctttattgacaggacgcggcagttcatgcctgtaatcccaatactttcagaggccaaggcgagcagattacttgaggtcaggagttcgagaccacccttgccaacatggtgaaaccctgtctctactaaaaatacaaaaattagccaggcatggtggcaggtgcttgtaatcccagctacttcggaggctgaagcaggagaatcacttgaacccgggaagtggaggttgcagtgagctaggatcacaccattgcactccagcctgggcaataagagcgaaactccgtctcaaaaaaaaaaaaaaaagggagatctggccaggtgtggtggctcatgcctgtaatcctagcactttgggaggccgaggagggcggatcacgaggtcaggagatcaagaccaacctggctgacacggtgaaaccccgtctctactaaaaatacaaaaaaaaaaaaaattagccaggcatggtggcgggtgcctgtagttccaactactcaggaggctgaggcaggagaatggcgtgaacccgggaggtggagtttgcagtgagccgagatcatatcactgcactccagcctgggcgacagagtgagactccgtctcaaaaaaaaaaaaaaaaaaaaagggagatcttccacatgccaggcactatgcataaataacagcgacccgggccctaaatgggtgaagctgagaatctagtagggaagacgaagtgcccagtgcctacctgctgccaggtcctgaagccccgctccctctcactgagtgtcggcacttgtaagacagtgctctcctttgccacctccttcctaaatgcctgggctttctagatgaatgagtgctggctgccagcttcctcctgggcaaggctacaatgccactgtgcttacttggtcatcaatcctttctaatccacaggatgcaagacaggctagaaagccacctgggtggggccaggcccagtggctcacacctgtaatcccagcactttgggaggctgaggcaagcagatcgcttgaggtcaggagtttaagacaagcctggccaacatggcaaaaccctgtctctactaaaagcacaaaaataagctgggcgtggtggtgcatacctgtaatcccaactacacgggaggctgaggcaccagaatcacttgaacctggaagaggaagattgcagtgagccaagattgagccactgcactccagcctgggcgacagggcaagactgtttccaaaaaaaaaaaaaagccagcagcatggtgttggatcctctactgactctcccagccgaggcctttccctgcctgcctgcctccaagtacagtatgtggaatttccacgcaagcacggctccctttcctcggatggctgactctttgtgctgctgtggtcctgcatgttccaggagcttcacccagtgaggaccaggctgggagagaggctgcaggccatgctgtgcctccctgtggacactagggggcagaaccatccctagcccaggcagggttggccctttgcacagagggtgcattctcacaaaggaggcggtggcccaagaaacacctgcactcctgtttgcttttcatttcatgcactttttttttttttttttgagacagggtctcattccaattgcccaggctggagtgcagtggcatgatctcagctcactgcagcctcgaccttcagggctcagctgattctcccaccttagcctcctgagtagctgggactacaggcacgcaccactatggccagctaattatttgtatttttggtagaaatgaagttttgccatgttgcccaggctggtctcaaactcctgagctcaggtgatctgcccacctcagcctccccaagtgatgggattacaggcatgagccaccacacccggccttcatgcgcttcttataccacgcagctagatttctaccctgccttatcacagtttgagggagagaagcagttttgaaaacccctctctccatactccccctcagaaatataaaaataaaagcaggtttgtcagaagagacacccacctctcaaaatctcctctctcagttcacacccaacagctaagtcacactcacgggaacacctgcatgatcatggtgtagtgggaagcggttctgccaattatcagcattagatctgggccaagttgagccagtttcctgcaaagggaagctctttccttcctcatggacataatgcatgaaggcacccaacaatggcaggatcctcggaaatgttccttggctctgggtttggctgtagattgactgtttttgttttgtttgagacagagtcttgctctgtcacccagagtgcagtggcgcaatctcagctcactgctacctcagcctcccgggttcaagcaatcttcctgcctcagcctccccagtagctgggactacagtcacgcaccaccatgcctggctaatttttgtattttggtagagaggggtttcaccatgtaggccaggctggtttcaaacttctgacctcaaatgatgcaccccactcagcctcccaaagtgccgggattacaggtatgagccactgcgcccagtgactgactgctttttgagacagccagatagtggacaaaaggtttaatgcttgggacatccgtggagctgagcccttccttctctctgagtctgccccaaaaactgtctttacggtgaaaccctgtctctactaaaaatacaaaaaattagccaggtgtggtggcgggtgcctgtggccccagctactcaggaggctgaggcaggagaatagcgtgaacccgagaggcggagtttgcagtgagccgagattgtgccactacaccccagcctgggtgacagagtgagactccgtctaaaaaaaaaaaaaaacaaaaacaaaaacaaaaaaaactctgtctttagagcaatcaattgtactgggaaggcatttcaaaagggacgcatctataacaactttatataggctgttccctcgagtgctcccattcctaggagcacacctttcttactaaaaccgaatattcttgcaccaaggtgcaattctgcaaactgcgcacaagaaggtcatttttcccccgacatataatcccagaactttgggaggccaaggcaggcggatcacttgaggtcaggagattgagaccggcctagccaacatggtgaaaccccgtctctactaaaaatacaaaaattagccgggcatggtggcatgcgcctgtaatcctgctactcaggaggctgaggcaggagaatcgcttgaatgagatcacgccattgcactccagcctgggcagcagagtaagactctgtctcaaaaaacacacaaacaacaaaacaacaacaaaaaccaaaatgtgacctatgtgatttgtctttgttagaatttatggagattttgtttcctatagtttatttcttacttgtctattagtcatgtgggaaagcatattatagtctcctagtcctttggcttattaaattctgattgtgtctaatagtttttgcttcgtgaatctcatgggtatgcggtcagttattttaagtacatgattttgagaacctctttgtgaattttaacttttttttttttttttgagacaagagtcttactctgtcactcaggctggagtgcagtggcaggatctcggctcgctgcagcctctgtctcccaggttcaagtgattctcctgcctcagtcccctgagtagctgggattacaggtgcctgccaccatgcccagctaatttttgtattttgagtagagacggtgtttcaccatgttggccaggcttatgtcaaactcctgacctcaggtgatctgcccacctgggcctcccaaagtgctggcatcacagatgtgagccaccacgcccagccaacttttatcaatataaaatgtttcttcttatagccctccaaaacgataaaataaaaacaaaagcagctaatcagctcacagtggcacagtgagaaggctgtgggcagagcatgagtcaagaagtctgggctctggtctcagcttggtcgctctgtggcctgcatgactagggaaattgcttaactgccttatctgtcaaatggccaaattttaagggttccttccagccctcaaaactctatgatcagaggcacttgggtaggctctggggtggggataataacttaccaaagctgtaactttcagttagcatccgactggctggcagtgagggtggagaagagaagggtgggtagaggaagggagaaagaaagagtgtatgtcactggcttttccccagacatctgagcctgacggcgagcactgcagctgccctcccatgtgtccaggatgtccaatggcagaaggcacccaaaggctatgaagactcaatgtgtagagcttaggaaggagcagaatgctttaagaaggcctgaagagtctcttgcaatggctaaataacatagtttatttggttttgtttgttcgttcgtttgttttgagatggggtctcactctgtcacccagactggagtgcaatggcacaataatcactcactacagcctcaaactcctgggctcaagcgatcctcccacctcggcctcccaaagtgttaggattgcaggcgtgagccattgtggctggcagcaacatagagtttacaggcctttggtcttagagggatggatgaggacttctggagactaccttgacccttgaccctttgggacagcgtactatgcagacaagagcaccttagagaaaaagtcacgtccattttcaatttttctaggactcaggtcttccatacttcctagtgaaaagtttcctagtgtataacccacacagctcctgctgcaatcttagtcattttcctttcatgaaaaagcagaacagtagagccccctctccctgacaagaatgtgtcagacacgctcatcctctcctggagctgcttctctttgtgctttgctgctttgagcagttctttaggatagtgaggatatgaatggtgatttatagacatgaacaaatggacacggttggaagagaaaggaagccagtggggcagagtttacctgcaggagttggctgggcctggaacgaggcttgaccagctggagggaggcttccaaacacagaagagctggggccactgctaaaggcatcaaagttggcaaagcctccttgggaaggtgtctggcctgtaggtggaagaaacataaaggttatatagaaaattgtcgggtgtggtagctcacgcctgtaattccagcactttgggaggccgaggtgggcagatcacttgaggtcagaagttcaagaccagcctggtcaacatggtgaaatctgtctctactaaaaatataaaaattagctgggccttggtggtacatgcctgtaatcccagctaccttggaggctgaggcatgagaattgcttaaacctgggaggtggagctagcagtagccaaactcatccactctactctagcctgggtgacagaatgagactctgactcaaaaaaaaaaaaaaaaaaaaaaaaaaacccgctctcacacaacaaaaaaaaaaaaaaaaatgtatatgcctatccatgtaatatagctactaattctaaaggccaaaggccactcttatgggacatctgcctttccacagggttctcttcagaaggaaatgggtggggcctggggccaagagccatacccacacaggggaacaggggcacccagggcctccaggttcactccctgccctcttctgtccttactccatgaggcattaacatttttgtcagggcctagtttggagcatgaaaattttttttcatggaggaaggagcttgaattttttttttttttttttttttttttgagacggagtctcactctgtcacctaggctggagtccagtgatgcaattgtgattcactgcaacctccacctcctaggttcaagcaattctcctgccttagcctcccaagtagctgggactacaggcacatgccaccacacttggctaattttttttttctttttagtagagatgaggtttcaccatgttggccagactggtcttgaactcctgacctcaggtgatctgcccacctcagcctctcaaatgctaggattacaggtgtgagccactgtgtctggcttgaaaatttttaaaaagggaaaacagattctatgctgctgaaccctctactggctattgctgatttgggggaagaataatctttggtgaactggaacacatgataatccccctcctcccattttaacagagacagaaaataataaaaaaggctatttccagtgttctaaaaggaagtgctaggagccctcaactataatgttttaggatcaaacccccaaacataatcctggctgtacttatttgaccccagtcctcccagcctcactgcttcagagtgaccctcacatttgtttgcatgagaagatctagagccatggttacctccagggactggatctctcatgttgtaagcatatacgctgtagggagggtcccatcccaaaacccacttacccccaaaggcagggaatgcagcaaaagctggtgccatctggggtgcagcaaaggggtctccaccgatgtcagccagcaggtcagtactggcttttttgacagaggagtggggaggtggctgagtgctccgggcatgggatgtccgagcgtgagactgactgacgggcttggaggagaaggaatgcatacagcccttagaatcccagacatgccccaggcctctctggctctcgagttgcctcagataggcaggtagagagagaagacagtgagtaactgccctgaacatagaagattcctgggcaggagctgctttagcccttctcagagctcatatcatcctcatcttctcagtacacgtgctccaagaaccacacattttacagcacatgagccaaggtaaccctgagatatacaggaatactgcccaatactgcccccagggctgttactcctcaaccttcccaggtattggacaccatattccagccccttctgtgtttctttgatggaatgctcaggtttggagctgatattctgactttcctaaataccacttcgtgttaggttctgacttccaaaagatatgaggtccagaagtgacaaatacaagatacaggttaacagcagagccgagacccaactcacagctcctgcactgttgtctgctaagtccggggaatctgattcaggaaactgacactcctgtctcccaaatctcaaaagaaacatgacgagcagatctgagagttacctggctcgaggtggaggcagcaactgagagagacggtgcaggatcacccagaagtgtccgaaggggcttcccttctgggatggagccctgcacaggggtggaggcactgcctttggtataagtgggccccttgacttggtctggggggacatacctttgagaaagaatagttaggctgtaaagagagggataaaactttggaccacgctcagctgagatgtttgggaagacacaggagtcaaaatctatgctcatttttctctactgattcccttttttgaagggaaccgagcaacttagcaaagttctgcctatcttgagcatccccttgaacatcttttggtttttttgagacagggtctcgctgttgcccagggtggagtgcagtggggcaatgttggctcaacacagccttaactacctaggctcaagtgattctcctgcctcagcctcccaagtagctgggaccacaaacaagtacatgctaccatgcctggctaattttttaattatttgtagagaagaggtctcactatgttgcccagggtggtctcaacctcttggcctcaggtgatcctcctgccttagcctccaaagttctgggattacaggcatgagccaccacacctggcaaaggtccccctcttttatttcctgggtgtttcttcagactccttcttctcagctccatagaaaagctgcctgccgcctcatcctctaggtgctcacaatccacacttccatcctgccagctcctgccgggacaattcccttccactacagtgtatgtggcccctactctgtaagtgtcagcttaatcctgaggacatccctaggagggactccacagtgtggtcttatccacatcaatctctttgttctctgcattctcttctctacctcacagttacctcccaacatgtacacaccccagagatcccacaagaagtgataccaggggagaggaaaggtaagggagaatggagatgctgtttccttcatcaggaagacaaaatatagttgtcccatggtatcctcagggaactggttccaggatccccctgacaattccataatcagaggacgggacactcaagtctcttatataatatggtgaagtatttgcatcaaatatgtatatcctccaatatactttaaatcatctctaggttacttataatacctaatacaatgtaaatgccatgcaatagttgctatattgtattgctttttatttgtattattattttttttttgagacggagtttcactctgtcacccaggctagagtacagtggcacgatctcagctgactgcaaccactgcctcccgggttcaagcagttctctgcctcagcctcctgagtagctcggattacaggtgcccatgaccatgcctggctaattttttgtatttttagtagagacggggtttcaccatcttggccaggctagtcttgaactagtcctgaccctgtgatccacccgcctcggtctcccaaagtgctgggattacaggcatgagccaccacacctggccttatttgtattattttttattgttggattgttattttttgtgttccccacttttttttttttttttttttttttttgagacagtctctctctctttgcccaggctggagtacagtggcatgatctcagctcactgcaacctccgcctcctgggttcaagcaattttcctgcctcagcctccagagtagctgggattacaagtgtccacccccacacccagctaattttttttgtatttttagtagggacggggtttcaccatgttggccaggctagtctcgaactcctgacctcaagtggtctgcccacctcagcctcccaaagtgctgggattataggcgtgagccaccttgcctggcctattttcccaaatatttttgatgtgaggttgattggatcctggttggcggaatctacagatacagagggctggactgtacatataaatcatgaaacacgccggcacggtggctcacgcctgtatcccagcactttgtgaggccaaggcaggcagatcatttgagcccaggagtttcagacccgcctgggcaacgtggtgaaacctcatttctacaaaaaatataaaaattaaggccgggcgcagtggctcacgcctgtaatcccagcactttgggagccaaggtgggcggatcacgaggtcaggagatcgagaccatcctggctaacacggtgaaactctgtctctactaaaaatacaaaaaattagctgggtgtggtggcgggcgcctgtagtcccacctactcgggaggctgagacaggagaatggcgtgaacctgggaggtggaacttggagtgagccgagatcacgccactgcactcccgcctgggtgacagagcgagactctgtctcaaaaaaaaaaaaaaaaagaaatatatatatatatatatatatatatatatatatatatatatatatataaattagccaggcatggtggcacacacctgtagtcccagttactggggaggatgaggtaggaggatcacctgagctccaagaagctgagactgcagtaagctgtgactgtggcactgcactctagcctgggcaacagagtgagaccttgtctcaaaaaaaaaaaaaaatcataaaatgatgggttaaaggaataaaactataggatgtgtgcttccagccatctctccccatacataagatcagctgagctataaaaatgaacacccacaggcctacctcccgactccaatcagtctactatctctccaaaagagaggacataaaatctgcagggttagtgactgagaacaagttgtcctttcatgtagatttattttagccgtaactgaatgtgagtggaacagaatcgacccaagtctagtcttttgtgagaaggccaaattcaactctagaaactggactgtcagatgaagaatgtcttgaacacgtttccatagcaacctctttcctactccttaccatctcttcttctcatatttttcctggagaaactccttcactttctgaggatccctggaatctggtactaaagatgtccgagcatcaaacagacccaaccaaatcttccggcaaacctaaaagaatgaaggtgtcagaggagtgggagcagaaagcaggaaatacaaaaaataccacttccttttttttttttttttttttttttgagacggagtctcgctctgtcgccgggctggagtgcagtggcacgatctcagctcactgcaacctccacctccggggttcaagcaattctcctgcctcagtctcccaagtagctgagactataggcatgcgccaccacgcccagctaatttttgtacttttaatagagatgaggtttcaccatgttggccaggatggcctcgatctcttgacctcgttatctgcccacctcagctacccaaactgctgggattacaggcatgagccaccgcgcccagccaccacttcctatttattcatcagtaaatacatattggctggatgtggtggctcacacctgtaatctcagcactttgaaaggccgaggtgggtggatcacttgagtacgggagttcaagagcagtctgggcaacacagcgaaacccactctctaaaaaaatacaaaaattagtggagcatggtggcatgtgcctatagttcgagctacttgggaggctgaggtgggaggatcgtttgagcccaggaggttgaggttgcagtgagccaagattgcaccattaagctccagcctgggtgacagagcaagcaagagcttgtctctgataaataaataaataaataaataaataaacaaatattgagcatggacacagtgctaggatctgggtctacctacaaaccagatatgattcctgtcctcgcagagtttataatccaatggggcagtcatatcttagataaataaaactaaagttataatcacattttgtgacatgtattgaaaaaggaaaatagagggccatgagaattatggagaattaaatttcactaagggtagggtccaggacaattttcagagctctggcttccaggacacctccagaggcccttgaggataccctctaagtaaaccaatcacccataagctggggtactgctaacgccaaggatagcaacttctgatcggcagatttagctagggaaggggtttaagtcactttccagtacaagatatgcacttaaatccaggttgtcgaggctgaaggcagcagagctggctccaggaaagcttcctcagaggggctggcccagtcaactctgaatgctcacgctctggagctctggtcattctacccctccattgctcaggtgccacatcctacaacgatattgctacttcccctgactcctgaaaaggaggcctagacaaaccatgatttgtataacagaataaagattctgtaaatatacctaaggaaagaaatcatacatatgaaaaaattaagagaaactcaaccaaaaataaaaccgtaaggtttccctacaatcttgaggcaaagccccacctgcagataggtgaccttctcaccactccatcggtggcagctcacctcatttccacgggattgcaggaatactacttcaggctcagtgaaagttgtcatggagattgacttgacacgatgaggggggttcagccctctcctatgggagagaaacaggaagaaagagaagtataatgcagttagcatggcaggctgttcatgggaggaggaggaggagggagaaagggtgaaagaatagcatataaactaagctcagatagaacccccccatctgaagctacttcctaattccaggaaagaagggaaatatttggaatattttggagatattagaagtctccaaagagaggccaggcacagtgactcacacctgtaatcccagcactttagaaggccgaggcaggcagctcacttgaggccaggagttcgagaccagcctggccaatatggtgaaaacctgtctctactaaaaatacaaaaattagccgggcatggtagtgcacgcctgtaatctcagctactcaggaggctaaggcacaagtatcgcttgaacctgggaggcagaggctacagtgagccaaaatcaccccactgcactccatcctgggcaacagcaagactctgtccccactcccaccacccccctccaacccccaaaaaaaagaatctccaaagagacagggaagagagagtcaggaacatcctgtgatcccagtagttctggagaggaaaggtagagcctgcccatccagaagcctcctctagcctggctcagatcccagtagtttcagtgttcagcctgtaggccgaggggggtacttctgggaactcagacacgtgaccacttcccacttcctactttatcattgttttagacctacagcccatcccaaggtccagggcccacaaaaacacaaatccttcaagcatgagggaaggcaaaaatgaaggcccactactattcttgataacactaacaaaaacaggatatggtgacaaaaaacagtctctagccagctggtctccttgtgtctacaaagaaggtggagtggtggtgggatggacaggtcctctctttcagaagcctctctagaaaagaatatttgatttcttatttctgtatctctcaataaagcaggaagaagtcaagttcaaccatgagctataaggctggcatgggcgaggaatatgtaacctgtggcaatgcttttgtgcctcctctgtatgttctgttaactccctgggaatccagttctgcctccaggaaccctgtggagattataagagaagagaaggcttccttgtccccactcaactggtctcaggagtgttctaatacaggaaacttggggctaagccaggcagggcttcataggttcccctgtccttgcaccttaagtattattctggtctaggtctactaccctcactggattaaacaaaactgcccaaaccaaaacaagctagatcctgggacaggagggaagcagtctcagcagatgaggcctcttcagacttttactctcatggaaaaaaaaaaaatggccaaatcgagttgctcaaataaaaatccagaatagggtcctggctgacatcctcaggaagcgcaaagggggaaaaagagacaaaaatatttaacagatgaaaatcctgaaaattcacaaagaaggtggggaaaacatacattcacactaacaggtgcacacacagaatccaagtgctcctgccaagtctgggagaacagcagcgaggtgtaagcaaaagcagcggtggtgggggtggggggcagggagtgggcggactcagtacagagtgaacagtaagggcggccaccctgcggatgataaattactcattatgggattttaacaaaggacaggacactggaggctccagttgacgctgtttgcagcaattctgctgctagacctttaggtataaagggtctcaaaaatgctcttataaaagacaagcaatatcaaagaggactgatgcccccaaggaaagataagctcagggaaaaacgaaagcaaggctttgttactacatatcaaacaatagctcttaagcttggtctgccccgaagactgtcttccgatc

SEQ ID NO: 108 - DNA, 8093 bp, Homo sapiens
ctcagctccctgtggtgggggatggcagaggcttcccgctccccgcagctggtttgcacagcctcccgactgtgccgtggtgtctccttccctaaagtgggacagtcgtttctgtgtcctgctggcctctgaggaacagacgtgtgtgagaggccttcagggcctgatggctggggtggtgacagtgcctggagaatgggtggggactggaggggccaggtggctaaccactctcctcttccatggcagcggagctggagttcgcccaaatcatcatcatcgtcgtggtggtcacggtgatggtggtggtcatcgtctgcctgctgaaccactacaaagtctccacgcggtccttcatcaaccgcccgaaccagagccggaggcgggaggacgggctgccgcaggaagggtgcctgtggccttcagacagcgccgcaccgcggctgggcgcctcggagatcatgcatgccccgcggtccagggacaggttcacagcgccgtccttcatccagagggatcgcttcagccgcttccagcccacctacccctatgtgcagcacgagattgatcttcctcccaccatctccctgtccgacggtgaagagccacctccttaccaggggccctgcaccctgcagctccgggaccctgaacagcagatggaactcaaccgagagtccgtgagggccccacccaaccgaaccatatttgacagtgatttaatagacattgctatgtatagcgggggtccatgcccacccagcagcaactcgggcatcagtgcaagcacctgcagcagtaacgggaggatggaggggccaccccccacatacagcgaggtgatgggccaccacccaggcgcctctttcctccatcaccagcgcagcaacgcacacaggggcagcagactgcagtttcagcagaacaatgcagagagcacaatagtacccatcaaaggcaaagataggaagcctgggaacctggtctgattccttccaacgtgcacttcagctggagaaagaaaccaagaagggaagcggccgctgggcccctcctgcgcacagtgttgttcagtttcacatggtacaaataagtaaaaccaaatgagcaaacacggtctttgtttctgattccttttaggggaattgcatgcaaactagactgaaatgatacaaacttccatctggtctgaccgcaaacagtgtttatttggggacaggggttgggatgggggtgtgggcaggggaaaacagagaacgggatgctttgaagataccatgaaataaaacccacagaggtatttgatgtatttaattgtgaaaggagactttgcagataaatgaggccagaatggcatgttttataattaactgaataaagaaggaagcattattatatattattgtggggaagaaccagccagttcgctttttctcctaaggtgtggacttttattttgttttaaaaatatgaatcaaaattcctgtgttgtgtgccaaggtataaagtggagaagttagatgagtgcaaggagctcctttgtgttgtgatgatgtgttttaaaagttgcactatcttaatgttgaaaatatttacaagggaactgttttacgtgaagttctgtatgttgtcttttcacctgtggattgtaatcaggcccaaggaatatcctggagtggtccccagaagcatccaagaaaagatatttggggacgtagcctaacattttaccaacttacgtaaatcaaaaaagtcattattgttgcaggagtttgcatcaaatagcagtgcatcgctgaagcttttggagacttttggatggaagataagatagggaagattaagttccagcatttctgacttgttattttgagttactctgctactcttaggctgcatagtttatgagaaaatgaacacatgcatttatggatccagtatcatgcagtgctgccctcatcctccagcagtgcaatttcttcagtaatttagatttttttcactatagcatgaaatatattcaaatacataccttattttatgcaataaattgtttaaaatgcaaggtggttattctgcatactgttgaaatatgtgactcctcagtatattcccattgcctctccccctttcctcgacagcttagttcagttctgcagggctgctcagttcacaggaggctcccagcagccaccccacatccagcctacacagaactttcgtgtgggagtggtgtgggtggtggttttcttatgctttggaagcccctagaaataatgacggaagaatgccatgttgctgatcgtggtaataagccattgtgggttattgtatgtcactagtattagcatagcattcttaaaggaatgcagtgttcaaaacctacccaaattccccgcaggattttaccaaacccttccccaggccagttttgtactgaaggcaagaactggacagtcagagaacagtggagggggcaagtgactgaagagcaccgggtaaaaagcacaacatgcagttaaaatgcaaactagaaaactaattttaaatattgttagttttaatatttcctgatatttacaaatattcattcttatatacaatgaaaaaaataactttcttctgcagatgtaagcactggcttttataagagcagcagccaacacgtttagcagacactgcgcgtggagaagggcttatctgcagtacactctgccatgtggagggtgggcctctgtggcctcttcacataacaagatgagctggaatgatgattccatgactcccacctatgcagccttaaagccaaatccgcgtgtgtgtgtttgtgtctgtctgtgggtctcgaaggtgatccgtcggtgcggtggctctgtgctgtaactggagagactgttccaaaccccaagagttgtctgatcctagtctgttcccttctgcttcttacctctgtagataggtcactggtttttgtttgtttgttttgaggattggaatttccattacattcatcctttgcacacagtaacatccacagaactagtccaactcttaaaaggagagaggaaaaacacaggcaccagttgtcagctcatgcttacaacctgtgtggaagtatatacagttgagagtcacagtggaggttctgagactggattcagtcttgttccagtgacagttggaaggcctctgctggagagacaccagctctcagggcagagattggcttggggccagaaggaccctccccaaccctggagacaccctgaaggttcactggctctccagattagcctctcttcctctgtcaggcaaagatgaggagcccgtgttcccatcgggccctgctggcagggacttgcagtggattcttggtcaggtgtgcccacagatgcggaggcgaggtgagtgattccatcatttcagttctcacctgcagttttggtgaagcaggagatgcaccccacagctctagctctcaaatggcttcacagtccttacttctctacctgcctcaagaaggggctcagagcagagacttgtgaattccttagtaactgtgagtatatgaatgtgttgcacatgtccacagtattggcgagataattacataattcagatacctttaatcatctttcaagaaagaggctcctcccattcaaccaccctagagaactgcctttgttaaatagttatttaaagactcatacatatcaaaccatgactttgaaaggtcttcgaggctggggctctgtaatgaattagtttaaaagccaaggtcataacatgaattgatggtcaatttcccttcagcagaaggaaaaggtgatttagatcagtagctcttttgaaggttgtggctgacctgttcataccgtgtcgcctcatggctagtgtggcgttgaaagagtagcgactgggaagatacaacttacacagtggggcctattgttctttcaagaaccctttttttagcttatagaacccatgggtccagtttagtaacgagtgatttaggcaatcaatgataggtttataatcttagattattccagcaaagtgtggattgcattgttaggaagaacatttggtgggaatgaacactcctgggcataccgctgacttttgtcccttgttcccggtgtaggagacccaaggcatcttgaatcccatctataagaacacaatcttccagcatacgtttgctttttcagaaactctagcattctctttaaatactgacgcaatccttaatggaaaagagatttcatgaagcaaattatgtatttcaatagttcttctatttttagtgtccaaaatttactaatacagaagcttgacaagcatgtcctcaccctccccaccacataaacacatggacacacacccaagccacaagaaatcccaagagagcagaagcgaatttttaaaagatttatcgtgaggactgcatttccattcactaattttggctcaaacttatgaggcaggaaataggggccaacagtaaatgggggaggcctcctgacaccagcagaggaattttgtacccaggcgaggacttcttgaacttctgcgtatctccgtttgatctctttcacctttatttcatcttcataagaatgagaaaggctcaaaaggaagcacttttagaaatcttctctgacctagaagaatccatccaaatccctgccttcctctctgaaccaacagttcccttctctgacagggggccatcctctatcttccatccagcggctcttccttttaggaaggctctggtgcagagcacttcaaatatgtcctcaggccagatactgattgctagtagagagacacccggcacccagtccgaagccctccctcaaaggaccggcttatggcgttggtcactggcaggctcagagacattctactgtgggcgcagggagcccggccccccatgcagccatgactggatgcgcccccatctcgggggcttgctgcactgcttgtttattgaattttgctacttagaatggcaacattaactttgtgtaccattcattttttaaaaattttccaaagctcggcagtgtatgaaagaaaaaactgggaaagatacttggtttctgttaacttttgtgttgcttgcttaagtgattaaagccagtgcttggagccaagccttcatgccacgaacatgctccacagcctgccctttgctctcctgctcacactgaccaagaatgccgcgtgcttggcctactgaggtgaaaggacaattgaatgacaggtgggcaaagggagaacttccccttcttggtgcgaggaaagtcacaaatttaaaaatgttgcttccagcccagatcctaaatgctagttctcagcagctgcgtggcttaccgttcgccatttccaccaccgccagctgccagcaccgctacagatcacagagatgtgaacagacaatggaaagcactcttagccttgcagtggtctacattttttaggaaccaatatttcagcattctttattacccggcacgctgtgtcctttgcagagttcaagtttatgttactgccagggtcagacagtcatttgctgctgctgctgctgctgctgctgcttctcgaactggatgcattaggaagctgctgtctgagtgtaggaatgtcttgctaagaaagcaatgtcttccttcatccttttctttcttccctctgcgtgtccttgtttttgtgtaatgcgggagagggttagagctatagagattatatatacactatccgtgcacattatatatatgtagatatacccctatcatgtcagagatctgcatgtcagtttttcagcaactaaggtgcctcatgttctgagttcagcagatataggaaccaagccgccccctcctgcacttgatgctcccacctttgttgtgcctcacttaaaatggtgcttttttcagttgtctgtcttttcttatgtttttatttgtaaggtgctgtatataagttgaatatattatgcacatatcctacccaatgggtagaacaaaaagttgttaatactgtaatataatgtatagatgataccaattttaacagaaatggcatagaatttgtgaatgcctatgtgctttgtcctcttttgtaaggaaatttgcaaatggatgcatacagattaaagtctatgtagtttattttcctattaaatatcaatattataacacaagagaaagaagtgtgaacaaacaagcaacagtttatgaccagcgtatatatagcaatggaaagttgcatctttgctgtgaaaacactttaaagaaaatactttttaaaaaatcccacagctttttggttgccactagacgcttcttattttaatcattttagtaatgctcagctggaccagtgttagttatatttgagtcagaaaaatgttgtttttcaacttgctttataatctcctgcatctatctcctgctgtagcatcaygaaggtgtcaggcaacagtgaaaagtgcacatttttgttgttgcagaaactgtgtcagaggaataagtaaatcagcctgcagcagaagactttgttcagctccagaggcatctgtgaccgtctgtgtccaagtctctctgtgcctttttcttttacaaactgaagctgtggagccaatgaagtaacagtagagattgtagggaaagaatacctcaggaaaaacaaatacacttacaagaagaccctgttcttagaaaatgtgtttagttatgggttagcactagaagagacttggctgtcagccagccaagtgaaggacctctcatccattcccattcatgtcccatcataatacggacmcaaaaagcaaactcggttttgccatcagttagaaattacgttttggattgtatattgttacatctctcttccagcttagtttttagtgtctgattgtgacctctgcatttatcttcaaataccctaattttaaaacaaaagaacaagaaaagtttataacaccatgttcactaaaaccacggttgaatcttgggtgtgggcatcctttcgagtgttgtccataagagcagttcgtggaattttgcccatctgacccatattatcagcttattctgccaccagagtagagtctaataaattccaaagtttttatttgctccatggtgtatgttctgactttgaaaatgtcagattctataatcatacccctaacatccaggagacaaatgacagattatctttaaactgaaattgactctacaatgcaacccttaatgctgaatggattaaaaaagtcagcccttttagtatctgtttgaaagggccgtaaaaagttgacacttttgttgttgtggatcctgcgtgtctagacccacgtgttgtttccatcgtatactgtagggtgcaccccttgggattcatcattaagaactgaggctcactgttgtcagaaacaaagctcccaccccccaggttcaaccttgtgggagaactgttgagcatgagaatgttctagactcagaggtactaaaatttgttaccacatcattgcttcctttctacaggacgaattgaggcttaaactttactgttaatgatactggttcattttaatgtgcttgttggtatgttgctatttttcatttcatagctttcaaaaatcatgctaattgtatacttgtctagtttaaggctattttaaaatatgtacaatactattcacagcatttagttcgtttaatttttattataaagcaatctactaaaaaagtacaactgtatttgaacttttcaatagttgtttgtgagctatgataatcaaaagtcattaaagtcttttttaacaaacattcgtgcttacttttcaacataattcccagttatatacagaaaaagatttccacctgtcacgtatctgcctcttttacctgagcaatggtgtagttcttagacctaaggtctgtaattgcaatacttttaaagaaagatgttgctctaagtgctgtttgttagttatgaaatcagatttttctgcttgttcttaatgctgtggtcaaaccatagcacaaaatcattaaaaataatcagcggcatac

SEQ ID NO: 109 - DNA, 6559 bp, Homo sapiens
cgacctgctgttgcggctgctgcaggcgccggagttggagacgcgtgtgcaggccgcgcgcctgctggagcagatcctggtggctgagaaccgagaccgcgtggcgcgcattgggctgggcgtgatcctgaacctggcgaaggaacgcgaacccgtagagctggcgcggagcgtggcaggcatcttggagcacatgttcaagcattcggaggagacatgccagaggctggtggcggccggcggcctggacgcggtgctgtattggtgccgccgcacggaccccgcgctgctgcgccactgcgcgctggcgctgggcaactgcgcgctgcacgggggccaggcggtgcagcgacgcatggtagagaagcgcgcagccgagtggctcttcccgctcgccttctccaaggaggacgagctgcttcggctgcacgcctgcctcgcagtagcggtgttggcgactaacaaggaggtggagcgcgaggtggagcgctcgggcacgctggcgctcgtggagccgcttgtggcctcgctggaccctggccgcttcgcccgctgtctggtggacgccagcgacacaagccagggccgcgggcccgacgacctgcagcgcctcgtgccgttgctcgactctaaccgcttggaggcgcagtgcatcggggctttctacctctgcgccgaggctgccatcaagagcctgcaaggcaagaccaaggtgttcagcgacatcggcgccatccagagcctgaaacgcctggtttcctactctaccaatggcactaagtcggcgctggccaagcgcgcgctgcgcctgctgggcgaggaggtgccacggcccatcctgccctccgtgcccagctggaaggaggccgaggttcagacgtggctgcagcagatcggtttctccaagtactgcgagagcttccgggagcagcaggtggatggcgacctgcttctgcggctcacggaggaggaactccagaccgacctgggcatgaaatcgggcatcacccgcaagaggttctttagggagctcacggagctcaagaccttcgccaactattctacgtgcgaccgcagcaacctggcggactggctgggcagcctggacccgcgcttccgtcagtacacctacggcctggtcagctgcggcctggaccgctccctgctgcaccgcgtgtctgagcagcagctgctggaagactgcggcatccacctgggcgtgcaccgcgcccgcatcctcacggcggccagagaaatgctacactccccgctgccctgtactggtggcaaacccagtggggacactccagatgtcttcatcagctaccgccggaactcaggttcccagctggccagtctcctgaaggtgcacctgcagctgcatggcttcagtgtcttcattgatgtggagaagctggaagcaggcaagttcgaggacaaactcatccagagtgtcatgggtgcccgcaactttgtgttggtgctatcacctggagcactggacaagtgcatgcaagaccatgactgcaaggattgggtgcataaggagattgtgactgctttaagctgcggcaagaacattgtgcccatcattgatggcttcgagtggcctgagccccaggtcctgcctgaggacatgcaggctgtgcttactttcaacggtatcaagtggtcccacgaataccaggaggccaccattgagaagatcatccgcttcctgcagggccgctcctcccgggactcatctgcaggctctgacaccagtttggagggtgctgcacccatgggtccaacctaaccagtccccagttccccagccctgctgtgacttccatttccatcgtcctttctgaaggaacagctcctgaaaccagtctccctgggctgagacaacctgggctcttcttaggaaatggctctccctccccctgtcccccaccctcatggcccacctccaacccactttcctcagtatctggagagggaagggaagtcaggcttgggcacgggaggttagaactcccccaggccctgccattgggttgtctgtctccgtcatggggagggtccctgctcagttctggagacactggagttggggtgggggtggttctgcattcccttctcctgctgatagcagtcagcttgaggaggatgaaggaaggcagcctcagacaggaattaaggcaatgcccaggcgggcctgggcactgtattctgagcaagggcctgggcccaggagccagccagggatgagtgccatcatggctctccactcagactgtgcctggcccctgcacttacaacttcctgccgctctgtggccttgccctgtaatcactcagtgcccttagctagcctgactaagtcccagatcccctacagcttccttcggtgtggtatcttttgccacatccagggcgagggttgaggcaaaccagccctccctctgacttccttgtcactgcagccagctttgctgcacttgctggtgcacaggagcctcctgtttgggcctgggtctgggcatggggaggccgtgcctcaaagcccaccctaccccatgccttggtgctgtgcctcaggctccttcctggtctggcccagctggcttccccagcccctcagccatccagggctacccactgcttactcagggaccaggcagcccccatggcagtaaaagcagcctagacagaacctgcagctctgtggaaagaggcaaagtcctgaaaaggcaaagggttgtcacttagggcagcttctccaactttaacatgcatccaagtcacctgggaatgttgttaaaatcaggagatctggggtggggcctaggactctgcatttcttacagattcccaggtgagctgatgctggtggttaagggtagcaaatctctaaagcacgaagccctcacaaatctttgccatttcccaaacactccgctccatggtctccagtcatcagagcaactctacctggtattatcatccccattttacagataatgacactgaggctcagaaaggttgaggataagcccactttcctgtcattagtggcagccccagatccagacctaggcctcctggcacccagtccactggcagtggaattgctttcctgagaatcattctgaggctgggctattgcttctcccttgcttcaaagaatctagcagcgggggataggattttgcaacaaaaagctgacccagaggccatacagagcaggaatatcccattgccccctcctccactgggttcagagggtaagaaagcaccctccaataaacccaggctccaggccgtgggggctgctgaaggctctttccccgcaagggccaggtgttgacaccttaaagctggctgcgcccccagccccactcttggctgtgctggccaggtgactcctagttcttggccacatcatcagaaagtcaaaggtctcactccaggtttggggctccttccttccactcccctccctgccagagtctgtcttggccagtgccagcctcgatgctttggttttgaccccacctgatcctcctttcctcatgcagcacaagtgctcaccggggccagagccagggcatggatatgacaagcagggcagcctggacactgccctcacaggacagcgccaataacaatacagtgtctgagtatctccaggggatgatttctggctctttgtctccaatcagtcccactccctcctgaggtccccaagggcagtattcagagaggtttcctgcgttttatttctatttggtataccctccactgttgtccactgccctgtgtggccttctggttgacctctgcccgatcttctgtctctctgagggaatcagagtccagcatccagccccagctggaacagctgaagtcacaagcctcctctaagccaaggccagtgtgttcagaggtgactgccacccatactaggacaaacacagctcagatcaccaggtcaagcacctaggcctggcttctcctgagacagaggactcagaagtggcctttcctccaaagcctgctcagacacaggtctgtagggccagggtgttctgcttggctgggctgcagctgctacccctcggttggggctgagtcagccagatcctccccctacttctccccaagggccaagaactgctcagggacattaaaggtcaaaagtccagccacactcattcatcctttccccaggcccatgaagagaggcatctcattgtagaatgtatgaggaagtgggaagtatctcagagaatcagctaagtttcctaacttgtccatccaaatgtgatcaccacgattcaacaatttggggcattgctgatctagccgttcctagtggggcttgctcaaggttgcacagcgagtcagtagaagccctggctggccccacttggtaccaatccaccaggcagctcagggctcctgcccagcccagcagcttctgttgtctaacgtatggcaggcagactgggagcaggaaaacagagggccccaaagcccaaggcaccagaaggtttgtttcagtttgctgaagctgatttgtaatgattggcactcttcagccaggggagtgggtaggccatagccaaggatcgattccccaaccacagcaaaggcaacactcttcctccagagatcaccaagcccctcttacctccctccctccttcccaaggctggcactaaccaggtaccacattcattgttaaggaatggctgatgactgctacacgtgttgggaacctggttggggctgtgcagtttgggctggaaggagagatgccagccctcgtgctgcctctggtccctgaagtgtcacctctctcaggacctctcctctggcctgtggggttataagtgatggatagcagaaagggagaactgactcctgtcccaaatagctcctctgccacctgtcctgcagtgggcctgtgtgggttatgattctagatcctagacagaggctgggtcagctgtggatggggtggtgccttggtctctcttgactacctcgtccaaagagagcactgcccttagacaagagttgcttgtcctgctgtgggctgggcttccagctgcagacctccagttgcttggtgttcactttgctcctcttgccctctgtcttctggtccaggcagatcaggggctctggggaaactgctggaactcgaggtgaggatcagccttttccagcatcctgtgagagaccagagagagagtttggatttcatgtggggaaccctcaaggcctgtctggagaagtgacacaggatttactggggtgggctggtccaggtagctctcctgaacctcctccttccccaagctgagaagctgagagctggaggacaatatccagggacatggctctggaaaataactttttttttttaagagacagggtcttgctctgttgtccaggctggagggcagtgacataatcatagctcactgtacccttgaactcctgggctcaagtgatcctcctgcctcagcctccttagtagctgggactaccagtgcataccaccatgcctgggtgattttttaaattttttatacagacaaggtcttgctatgttgcccaggctgatcttgaattcccgggctcaagtggtcctcctgcctcagcctcccacaggatcgggattacaggcaagagcctccacgcccggccatgaaatataattcttaatatcatacaggaaaaagtcagcgggtcaagctagcctgtggcccagccacaactagctgacaaagcttcctggccttccctttaacacagttctgctgccatagttccatctataaaatgggaatggagggaaataggggaactgggagagagaacacagccttgccaagcagcaatgttagcctgatccttcctccacctagctcgccatctcgcccttggaaaatggctcctggaggattaggcagccatctgcaaggagaggggcaacctgggacaagacacccagagggtaaggattccaggaatgaagctgccatttctggttgggaggagaagaggaaacttttaagagaaagggctccattatgagcatgggttcagggccctgcattacccaatcagaacagccgggatgagcaggaggccagctcccaggaggaaggggaaccccttcataaagttcagagtggctgggtagagtgagttgaagatgccggaggccgtcagcatggccaggctattcacacaggccacagcagaaaagagagcacctgtgaagaaataaataccatactctggagtccgaaagggccatattccaactctggcaccaccacctcacagctgtgtgaccgggagtagtcacttaacctatgtctccccttcctcaccagtaaatcctgctacatcatgtactgtgacaaggattcagtaaggtcatatgtggacagtagctggcacagaggggctactaaacaaatggctgctattaaatccacattaaaagtacatgtgatctgacagaacccagcacataaaagaaaaaaaaaagt

SEQ ID NO: 110 - DNA, 3032 bp, Homo sapiens
gaattccggagaaaggcgcaggggtgggagctgttgccgaagctgccacagcaaaagttctcccccctccccccttcccctcctctcaaggcccctagaaaggttggagctgccggccctgcagtcggtgaccgctgacgacttcggccgcgcccgcggatagcgggaggaatcagcagcttggaaattcaagcacgtgatctggcgggatgggcgtttgcctaacgtatttaatggaggaatcggatggcataagtgattaaggtggtattgaggatttctgaagcctatgaaaggtagaaactcaaccatgatttctttttcaactctacagcattcctttccttgaagtcttcgtttttaccttagtctcgggcagttatacttaagcatgaacattgacgacaaactggaaggattgtttcttaaatgtggcggcatagacgaaatgcagtcttccaggacaatggttgtaatgggtggagtgtctggccagtctactgtgtctggagagctacaggattcagtacttcaagatcgaagtatgcctcaccaggagatccttgctgcagatgaagtgttacaagaaagtgaaatgagacaacaggatatgatatcacatgatgaactcatggtccatgaggagacagtgaaaaatgatgaagagcagatggaaacacatgaaagacttcctcaaggactacagtatgcacttaatgtccctataagcgtaaagcaggaaattacttttactgatgtatctgagcaactgatgagagacaaaaaacaaatcagagagccagtagacttacagaaaaagaagaagcggaaacaacgttctcccgcaaaaatccttacaataaatgaggatggatcacttggtttgaaaacccctaaatctcacgtttgtgagcactgcaatgctgcctttagaacgaactatcacttacagagacatgtcttcattcatacaggtgaaaaaccatttcaatgtagtcaatgtgacatgcgtttcatacagaagtacctgcttcagagacatgagaagattcatactggtgaaaaaccatttcgctgtgatgaatgtggtatgagattcatacaaaaatatcatatggaaaggcataagagaactcatagtggagaaaaaccttaccagtgtgaatactgtttacagtatttttccagaacagatcgtgtattgaaacataaacgtatgtgccatgaaaatcatgacaaaaaactaaatacatgtgccatcaaaggtggccttctgacatctgaggaagattctggcttttctacatcaccaaaagacaactcactgccaaaaaagaaaaggcagaaaacggagaaaaaatcatctggaatggacaaagagagtgctttggacaaatctgacctgaaaaaagacaaaaatgattacttgcctgtttattcttcaagtactaaagtaaaagatgagtatatggttgcagaatatgctgttgaaatgccacattcgtcagttgggggctcgcatttagaagatgcgtcaggagaaatacacccacctaagttagttctcaaaaaaattaatagtaagagaagtctgaaacagccactggagcaaaatcaaacaatttcacctttatccacatatgaagagagcaaagtttcaaagtatgcttttgaacttgtggataaacaggctttactggactcagaaggcaatgctgacattgatcaggttgataatttgcaggaggggcccagtaaacctgtgcatagtagtactaattatgatgatgccatgcagtttttgaagaagaagcggtatcttcaagcagcaagtaacaacagcagggaatatgcgctgaatgtgggtaccatacgttctcagccttctgtaacacaagcagctgtggcaagtgtcattgatgaaagtaccacggcatccatattagagtcacaggcactgaatgtggagattaagagtaatcatgacaaaaatgttattccagatgaggtactgcagactctgttggatcattattcccacaaagctaatggacagcatgagatatccttcagtgttgcagatactgaagtgacttctagcatatcaataaattcttcagaagtaccagaggtcaccccatcagagaatgttggatcaagctcccaagcatcctcatcagataaagccaacatgttgcaggaatactccaagtttctgcagcaggctttggacagaactagccaaaatgatgcctatttgaatagcccgagccttaactttgtgactgataaccagaccctcccaaatcagccagcattctcttccatagacaagcaggtctatgccaccatgcccatcaatagctttcgatcaggaatgaattctccactaagaacaactccagataagtcccactttggactaatagttggtgattcacagcactcatttcccttttcaggtgatgagacaaaccatgcttctgccacatcaacacaggactttctggatcaagtcacttctcagaagaaagctgaggcccagcctgtccaccaagcttaccaaatgagctcctttgaacagcccttccgtgctccctatcatggatcaagagctggaatagctactcaatttagcactgccaatggacaggtgaaccttcggggaccagggacaagtgctgaattttcagaatttcccttggtgaatgtaaatgataatagagctgggatgacatcttcacctgatgccacaactggccagacttttggctaaaaaaaaaaaaaaagtgaaataatactggcactttagaacagattaatcaagagtggggttactatgtgtaaatggagtgctgtacagatttaagagcaatgcgtaataacaagttaagctgatatacgatgataataactgcatttcgtttggttagtcagcattctttgaactgccttacatgttgtcacctttatagaagcaatgcattacttgttttagatcagaaacttgctattccacccacaccaagtaa

SEQ ID NO: 111 - DNA, 553 bp, Homo sapiens
  misc_feature (239)..(239): n is a, c, g, or t
  misc_feature (242)..(242): n is a, c, g, or t
  misc_feature (273)..(273): n is a, c, g, or t
  misc_feature (380)..(380): n is a, c, g, or t
  misc_feature (392)..(392): n is a, c, g, or t
  misc_feature (408)..(408): n is a, c, g, or t
  misc_feature (441)..(441): n is a, c, g, or t
  misc_feature (483)..(483): n is a, c, g, or t
  misc_feature (520)..(520): n is a, c, g, or t
  misc_feature (546)..(546): n is a, c, g, or t
ttggcctagtgtgtggctttggatgaatccgtgtagagagaggtgagcttgtcctgttacagatgctgtcagacatagcgatagtaggcacctagggaggaagtggccgttagttttacactgactttttaagaatggagaatgcacgtgggtttctgttgcggatgattcatagtaagcaagcggttgatgctgttaataccggccccacccgattgacattaagtttattcagcttntanaagatgatgaagaactagggggaacaaattnaagttttgttgcaacttaagccacacatgcttccctggtaccagctggaatcagcagctcacaggcatcttcaggacacttcagtgtatatgacacagtactttgtnagcgtctgcgtngtgtatggaaagttgncaaaaaatggcatgaaaagatcatgattggatnttcttttaaacctgcccttcctgtaaaaaatagtttagatanttttaaattagtaggtatgtgtggcttcctttttccnaacatcccagcaaatttttgctgctnagactaa

SEQ ID NO: 112 - DNA, 2029 bp, Homo sapiens
cgggcgtgcagacaaaatacatggatgtggtcaaggagcgaatccgtttagctcgacagattgagaaatctgagtatcggaacttccaggcttgcctgcacaactcttgggattgagcaggcagcagctgccctggagattgagctggaagaagacatgtataagggaggaaaagctgaccagcaagaagaacgtcggagacaaagcagatgaaggttctgaaggaggagctgcgccacctgctgtccagccactgtttacggagagccagaaaaccaagtatccactcagtctggcaagccgccccttgcttgtgtctgccccaagtaagagcgagtctgctttgagctgtctctccaagcagaagaagaagaagacaaagaagccgaagagccacagccggaacagccacagccaagtacaagtgcaaattaactggtcaagtgtgtcagtgactgcacattggtttctgttctctggctatttgcaaaacctctcccacccttgagtttcactccaccaccaaccccaggtaaaaaagtctccctctcttccactcacacccatagcgggagagacctcatgcagatttgcattgttttggagtaagaattcaatgcagcagcttaatttttctgtattgcagtgtttataggcttcttgtgtgttaaacttgatttcataaattaaaaacaatggtcagaaaaaaaaaaaaaaccggaaccggcggcaccagctcggagagaaatcgatgttgtagtgaccttcagtaaaagagcggtttttcatagaggtgccgttttagactacctatttaagaggcacgaaaaacaaatacatctaataggttaagtaaaaaaccatctatttcggacaataaaagttattttctacacacgttggtcttcattttactcgttaacagtatcatacatccttctaagcttatctttttgacgtgaaagtgtagtagtatgtctccacctggcagctatgtagttaatatttttgtctgttgtaatgttatcaagtaccgaacattttcctaatgaaatagtggaaaagacaacctttttctccatttctatttggatttttagatcacgtacataacaaggaatcgaataaataatgaagtgttttataaagagtatccgtcttggagggagattccagttgggaggttccataggcagttcttaccaagaagatgtcgattccattctccaacacccactaccgaattccacaaggatttgggaatcttcttgaagggctgacacgcgagattctgagagagcaaccggacaatataccagcttttgcagcagcctattttgagagccttctagagaaaagagagaaaaccaactttgatccagcagaatgggggagtaaggtagaagaccgcttctataacaatcatgcattcgaggagcaagaaccacctgagaaaagtgatcctaaacaagaagagtctcagatatctgggaaggaggaagagacatcagtcaccatcttagactcttctgaggaagataaggaaaaagaagaggttgctgctgtcaaaatccaagctgccttccggggacacatagccagagaggaggcaaagaaaatgaaaacaaatagtcttcaaaatgaggaaaaagaggaaaacaagtgaggacactggttttacctccaggaaacatgaaaaataatccaaatccatcaaccttcttattaatgtcatttctccttgaggaaggaagatttgatgttgtgaaataacattcgttactgttgtgaaaatctgtcatgagcatttgtttaataagcataccattgaaacatgccacttgaagatttctctgagatcatgagtttgtttacacttgtctcaagcctatctatagagacccttggatttagaattatagaactaaagtatctgagattacagagatctcagaggttatgtgttctaactattatcaaatgaataaatcctctctatcacatcccccaaaaaaaaaaaaaaaaaaaa

SEQ ID NO: 113 - DNA, 1762 bp, Homo sapiens
cttcttccgcaagatgtcatcctcaggggccaaggacaagcctgagctgcagtttcccttccttcaggatgaggacacagtggccacgctgctagagtgcaagacgctcttcatcttgcgcggcctgccaggaagcggcaagtccacgctggcacgggtcatcgtggacaagtaccgtgatggcaccaagatggtgtcggctgacgcttacaagatcacccccggcgctcgaggagccttctccgaggagtacaagcggctcgatgaggacctggctgcctactgccgccgccgggacatcagaattcttgtgcttgatgacaccaaccacgaacgggaacggctggagcagctctttgaaatggccgaccagtaccagtaccaggtggtgctggtggagcccaagacggcgtggcggctggactgtgcccagctcaaggagaagaaccagtggcagctgtcggctgatgacctgaagaagctgaagcctgggctggagaaggacttcctgccgctctacttcggctggttcctgaccaagaagagctctgagaccctccgcaaagccggccaggtcttcctggaagagctggggaaccacaaggccttcaagaaggagctgcgacaattcgtccctggggatgagcccagggagaagatggacttggtcacctactttggaaagagacccccaggcgtgctgcattgcacaaccaagttttgtgactacgggaaggctcccggggcagaggagtacgctcaacaagatgtgttaaagaaatcttactccaaggccttcacgctgaccatctctgccctctttgtgacacccaagacgactggggcccgggtggagttaagcgagcagcaactgcagttgtggccgagtgatgtggacaagctgtcacccactgacaacctgccgcgggggagccgcgcccacatcaccctcggctgtgcagctgacgtagaggccgtgcagacgggccttgacctcttagagattctgcggcaggagaaggggggcagccgaggcgaggaggtgggcgagctaagccggggcaagctctattccttgggcaatgggcgctggatgctgaccctggccaagaacatggaggtcagggccatcttcacggggtactacgggaaaggcaaacctgtgcccacgcaaggtagccggaaggggggcgccttgcagtcctgcaccatcatatgagtgttctcaccaccacttatgcccctagaagggaaggggagagggaaacgtgccctctgtttgatccttgttttgtgacatttttttttttttttttttttactcaaagttaacctacctgtaactttttaaaaacttgtaaaataactgaccctcccttcctgtccgccctcttcccctctaatgctcacgctcccaacacaaggtgggcagggaggcaccattcaggaacctggaccaaagctgacgaggctgggccaagccagggatggggccacagccagaaccccgagccctacttccaggttctggttagctcagccccagcccagcccagctgctctgcccagagctgggtgagtggggagacacctcagagccccgcaaaacccactgaccggaggcaaaaggcagtggggctgggggtagttttccatggtcacagagaactagtggtggctctgagaaggggaggacctctgggctttgattccatctccttgtcttttttctttgtttttagagacagggtcctgctatttc

SEQ ID NO: 114 - DNA, 6786 bp, Homo sapiens
gaggaaggcggctcgcggttcctccaccgcctccgccgccgcatcctccgcttgtgctaccgccgcgggcgctgggccgctctgctggtccggcatgagaccgtgagacgagagacgggtcggggccgccgacatgtttggccgctcgcggagctgggtgggcgggggccatggcaagacttcccgcaacatccactccttggaccacctcaagtatctgtaccacgttttgaccaaaaacaccacagtcacagaacagaaccggaacctgctagtggagaccatccgttccatcactgagatcctgatctggggagatcaaaatgacagctctgtatttgacttcttcctggagaagaatatgtttgttttcttcttgaacatcttgcggcaaaagtcgggccgttacgtgtgcgttcagctgctgcagaccttgaacatcctctttgagaacatcagtcacgagacctcactttattatttgctctcaaataactacgtaaattctatcatcgttcataaatttgacttttctgatgaggagattatggcctattatatatcgttcctgaaaacactttcgttaaaactcaacaaccacactgtccatttcttttataatgagcacaccaatgactttgccctgtacacagaagccatcaagtttttcaaccaccctgaaagcatggttagaattgctgtaagaaccataactttgaatgtctataaagtgtcattggataaccaggccatgctgcactacatccgagataaaactgctgttccttacttctccaatttggtctggttcattgggagccatgtgatcgaactcgatgactgcgtgcagactgatgaggagcatcggaatcggggtaaactgagtgatctggtggcagagcacctagaccacctgcactatctcaatgacatcctgatcatcaactgtgagttcctcaacgatgtgctcactgaccacctgctcaacaggctcttcctgcccctctacgtgtactcactggagaaccaggacaagggaggagaacggccgaaaattagcctgccggtgtctctttatcttctgtcacaggtcttcttaattatacatcatgcaccgctggtgaactcgttagctgaagtcattctgaatggtgatctgtctgagatgtacgctaagactgaacaggatattcagagaagttctgccaagcccagcattcggtgcttcattaaacccaccgagacactcgagcggtcccttgagatgaacaagcacaagggcaagaggcgggtgcaaaagagacccaactacaaaaacgttggggaagaagaagatgaggagaaagggcccaccgaggatgcccaagaagacgccgagaaggctaaaggtacagagggtggttcaaaaggcatcaagacgagtggggagagtgaagagatcgagatggtgatcatggagcgtagcaagctctcagagctggccgccagcacctccgtgcaggagcagaacaccacggacgaggagaaaagcgccgccgccacctgctctgagagcacgcaatggagcagacccttcctggatatggtgtaccacgcgctggacagcccggatgatgattaccatgccctgttcgtgctctgcctcctctatgccatgtctcataataaaggcatggatcctgaaaaattagagcgaatccagctccccgtgccaaatgcggccgagaagaccacctacaaccacccgctagctgaaagactcatcaggatcatgaacaacgctgcccagccagatgggaagatccggctggcgacgctggagctgagctgcctgcttctgaagcagcaagtcctgatgagtgctggctgcatcatgaaggacgtgcacctggcctgcctggagggtgcgagagaagaaagtgttcaccttgtacgacatttttataagggagaagacatttttttggacatgtttgaagatgagtataggagcatgacaatgaagcccatgaacgtggaatatctcatgatggacgcctccatcctgctgcccccaacaggcacgccactgacgggcattgacttcgtgaagcggctgccgtgtggcgatgtggagaagacccggcgggccatccgggtgttcttcatgctgcgttccctgtcactgcaattgcgaggggagcctgagacacagttgccgctgactcgggaggaggacctgatcaagactgatgatgtcctggatctgaataacagcgacttgattgcatgtacagtgatcaccaaggatggcggcatggtccagcgattcctggctgtggatatttaccagatgagtttggtggagcctgatgtgtccaggcttggctggggagtggtcaagtttgcaggcctattgcaggacatgcaggtgactggcgtggaggacgacagccgtgccctgaacatcaccatccacaagcctgcgtccagcccccattccaagcccttccccatcctccaggccaccttcatcttctcagaccacatccgctgcatcatcgccaagcagcgcctggccaaaggccgcatccaggcaaggcgcatgaagatgcagagaatagctgccctcctggacctcccaatccagcccaccactgaagtcctggggtttggactcggctcctccacctccactcagcacctgcctttccgcttctacgaccaggggcgccggggcagcagcgaccccacagtgcagcgctccgtgtttgcatcggtggacaaggtgccaggcttcgccgtggcccagtgcataaaccagcacagctccccgtccctgtcctcacagtcgccaccctccgccagcgggagccccagcggcagcgggagcaccagccactgcgactctggaggcaccagctcgtcctccaccccctccacagcccagagtccagcagatgcccccatgagtccagaactgcctaagcctcaccttcctgaccagttggtaatcgtcaacgaaacggaagcagactctaagcccagcaagaacgtggccaggagcgcagccgtggagacagccagcctgtcccccagcctcgtccctgcccggcagcccaccatttccctgctctgcgaggacacggctgacacgctgagcgtcgaatcgctgacccttgtccccccagttgacccccacagcctccgcagcctcaccggcatgcccccgctgtccacgccggctgccgcctgcacagagcccgtgggcgaagaggctgcatgtgctgagcctgtgggcaccgctgaggactgagtcagtgccggggcctccctttgtgtgtgtggccccgctggtagggaccccagtgccgctgactggcaagacacactgggagcacccaccattctgtgcggcccccagcagccatctcaaccacctatccctgcgctcccttgaatgggaagaagccccacgttgtccttgaattcctttttcactttgcatctcttcacgtgcaggctgggaccagcggagacaccgcggcgaatgcagatgactgcaccggccactcagggagctgcctgggctccgtgtctctgagccccgggtggcaggacccaccggcacctctttcttcctctgtcatatggctcctctgtcaccagccccagtgtgcacagaagaattggaccaggtcactgtacgtagaaatttgtagaaaagcagacttagataaacatctcctttggatatttatttccgcttttggcagcaggtgaacatttatttttaaaacttctatttaaaagaagtccaaaaacatcaacactaaggtttgatgtcatgtgaaaagtgtaataataacagttaagatttcatgatcattttcactggacctttcctgatattttgtttcagagttcttagtgtggctttttccatttatttaagtgattctttgttactcactaactctgcaagcctgtggaataatgaagtaccttcctggaaagtttggattattttttaaacaaaaacaagggagatacatgtattctcaggtacacacagagctgagagggctgaatggttttctgctatagcagccgagaggcctcccatcatggaaagatttctccaggaaaaggaggaatgtagccagctccccactcaggacgcttcctcatttctcttcaccaaaaccaaacagagacagcttccagcaccttcttcagtgttaccatctctaagaaggaaccagttgggaccgtgaagactcccgaccctgtggccatgatggaaatcaaaggaagacaccctctacgtcacctgccctcgactgtgtgtgcccacatgtgccgagagatggcccagagccagttcccctccagctgcaagggcatggtgtccccagagctctgagtctgtcactctccctctgctactgctgctgatctgaatatggaaaccccatggttcccttccccattcggactgggtgtgtacaagcaaggacccagatgcatcagacacagcccccaagatgttcctttctactcggccagctcgggagccagacacagcactcacagcccaggccgtgatccaccctccccaagtccaccagggccagcggcccctcacctctctggtcactggtgagaccttccacaactttcctccagacctgccagcagatgtgcccaccaggggcattaggtatccgccggagcctggccatagggtagtctcgggagccgcgctgagatcttttgccacctgcattttagaagaacatggtctctgtctcctcggcccagccagctgtcccggcaaggcctgccgagggcagttttcaacctcatgaaggaaacacagtcctgccaaggagggggagtggcgcccatggggacaggcctcagtccttagaagccctctgggtagctgtgcccacccagccttcatggctgcaggtacaaggacctttgcttccatagagaaaacgcacagctcagaaagggggccacatgggcagaaacccaaaggaaggacaaaccacgaccaccgtggccatctgcagaatccctggaagagaaggaaggcagggtggagcggggggaagaccatcatggagagaaggaccacagcatcaggagacgggacacgccacacccagcaggcagcctgtgtgttgcttaattttttaagagcaagaggggtagagaggatcaagctggccctggctggagatggctagcccctgagacatgcacttctggttttgaaatgactctgtctgtggggcagcagaaactagagaaggcaagtggctgccccaccccaaggcgtgaccaggaggaacagcctgcagctcactccatgccacacgggtgggccaccagcctgctgtcagaagtctctgggctccaactggtcttgtaaccactgagcactgaaggagagaggtcttggtcagggctggacagcatgcccgggaggaccagcagaggattaaaggtgactgggaggaccagcggaggataaaagacactgctcagggcagggcttctaccctgcatccctggccaagaaaagggcagtccccatgtgggcttgcagggtcactctcaggggcctctttcagctggggctggcaacttgcgtctgggggacacctccaggtgtgtggggtgaggatttcctataaccagggctcccagaagctttgcttatgtaaggaggtctgggagccagcccattggaggccaccagccattttggcttcaaaggaccccacctcacccaggtctcagcggcagtgggcacagctatgtcttcaggagctcccgtcaaacctcatagctggggcgctcccagacaggccagtccagacaggacacgctgggcccctggcatccagaggaagagccaggagtgtgggaaggcccacagtgggggctgtggcttctgacactcaggtcatagcctcagaggtctgaggtcagcccccacagacccatccggcccgccccccaagtccctgcagagagcacttagagttatggcccaggccctggtccacccttcccctgtgcacctccggctgggtttgccaagtcagggagcagggctggccgcaggaactcccaaaccttggctttgaatattgttgtggaggtgtgctcgtccctttctggacgtgcaaggtacctgtcccagcaggtcagatggggccagctgaggcgctcccccaggcaggaagggccagccttcaccatcgcgtgggattgggaggaggggcctccgtgagcagcccctcctctgccgctgtcccagcccagtccctctcccggagccttggcagcctcccacaacccagacacttgcgttcacaagcaacctaaggggcaggtgaagaagcgcagccctgccagacgcgctagattcctctaaggtctctgagatgcaccgttttttaaaaaggcgtggggtgaactgattttgatcttcttgtctagatgcaataaataaatctgaagcatttaatgtagtcatcttgacattgggcctacactgtacgagttccttatgtttccttgagctaaaaatatgtaaataatttttgtcccagtgagaaccgagggttagaaaacctcgatgcctctgagcctcgggaccgctctagggaagtacctgctttcgccagcatgactcatgcttcgtgggtactgaacacgagggtggaaatgaaaactggaacttccttgtaaatttaaacttggcaataaaagagaaaaaaagtt

SEQ ID NO: 115 - DNA, 4611 bp, Homo sapiens
ggcttggagatggaccccatcgactgcacaccacccgagtacatcctgccagggagccgggagcggccactgtgtcccctgcagccccaaaaccgtgactggaagcccttgcagtgcctgaaagtactcaccatgagcggatggaacccgcccccggggaaccggaagatgcacggggacctcatgtacctgtttgtgatcacagccgaggaccggcaagtcagcatcaccgcgtccacacggggcttttacctgaatcagtccacagcttatcacttcaaccccaagcccgccagcccccgcttcctaagccattccctagtggagctgctcaaccagatcagcccgaccttcaagaagaacttcgctgtgctgcagaagaaaagggtccagcgccacccgttcgagaggatcgccaccccattccaggtgtacagctggacagccccccaggcggagcatgccatggattgcgtgcgtgcagaggacgcctacacctcgaggctgggctatgaggagcacattcctggacagacccgagactggaatgaggagctgcagacgacgagggagctgcctcgcaagaacctgcctgagcggctgctccgagaaagggccatattcaaggtgcacagcgacttcaccgcggcagccaccaggggcgccatggccgtcattgacggcaacgtgatggccatcaaccccagcgaggagaccaagatgcagatgttcatctggaacaacatcttcttcagcctgggcttcgacgtccgagaccactacaaggacttcgggggggacgtggcggcctacgtggcgcccaccaacgacctgaatggcgtccgcacgtacaacgcggtggacgtggaggggctgtacacgctgggcacggtggtggtggattaccgcggctaccgggtcacggcccagtccatcatccccggcatcctggagcgggaccaggagcagagcgtcatctacggctccatcgacttcggcaagaccgtggtgtcacacccgcggtacctggagctgctggagcgcacgagtcggcccctcaagatcctgcggcaccaggtgctcaacgaccgtgacgaggaggtggagctctgctcctcggtcgagtgcaagggcatcattggcaacgacgggcgccactacatcctcgacctgctgcgcaccttccccccggacctcaacttcctgcccgtgcctggcgaggagctgcctgaggaatgcgcccgcgccggcttcccccgcgcccaccggcacaagctctgctgcctgcgccaggagctggtggacgccttcgtggagcacaggtacctcctctttatgaagctggccgccttgcagctgatgcagcagaacgccagccagctggagaccccctcctccctggaaaatggtggtccttcctccttggagtccaagtctgaggatcctccaggacaggaggcgggaagtgaggaggagggtagcagcgccagcggcctggccaaggtgaaggagctggcagagaccatcgccgcagacgacggcacagaccctcggagccgggaggtgatccgcaacgcgtgcaaggcggtcggctccatcagcagcaccgccttcgacattcgcttcaatcctgacatcttctcaccaggggttcgtttccctgagtcctgccaggatgaagttcgggaccagaagcagctgctgaaggacgcggctgccttcctgctctcctgccagatccctggcttggtgaaggactgcatggagcacgcggtcctgcccgtggacggggcaacgctggcagaggtgatgcgccagcggggcatcaacatgcgctacctgggcaaggtgctggagctggtgctgcggagcccggcccgccaccagctggaccacgtctttaaaatcggcattggagaactcatcacccgctcggccaagcacatcttcaagacgtacttacagggagtcgagctctccggcctctcagccgccatcagccacttcctgaactgcttcctgagctcctacccaaaccccgtggcccacctgcccgccgacgagctggtctccaagaagcggaataagaggaggaaaaaccggcccccgggggctgcagataacacagcctgggctgtcatgaccccccaggagctctggaagaacatctgccaggaggccaagaactactttgacttcgacctcgagtgtgagaccgtggaccaggctgtggagacctacggcctgcagaagataacgctcctgcgggagatctcgctgaaaacagggatccaggtcctgctgaaggagtacagcttcgacagtcgccacaagcccgcgttcaccgaggaggacgtgctcaacatcttccccgtggtcaagcacgtcaaccccaaggcctcggatgccttccatttcttccagagcgggcaggccaaagtgcagcagggcttcctgaaggagggctgtgagctcatcaatgaggccctgaacctgtttaacaacgtctacggagccatgcacgtggagacctgcgcctgcctgcgcctcctcgcccgcctccactacatcatgggcgactacgcagaggccctgagtaaccagcagaaggcggtgctgatgagcgagcgggtgatgggcaccgagcaccccaacaccatccaggaatacatgcacctggccctgtactgcttcgccagcagccagctgtccaccgccctgagcctgctgtaccgcgcccgctacctcatgctgctggtgttcggggaagaccaccccgagatggcgctgctggacaacaacatcgggctggtgctgcacggggtgatggagtacgacctgtcgctgcgcttcctggagaacgcgctggccgtcagcaccaagtaccacgggcccaaggccctcaaggtggccctcagccaccaccttgtcgcccgagtctacgagagcaaagctgagttccggtcggccctgcagcacgagaaggagggttacaccatctacaagacgcagctgggcgaggaccatgagaagaccaaggaaagctccgagtacctcaagtgcctgacccagcaggccgtggccctgcagcgcaccatgaacgagatctaccgcaacggctccagcgccaacatcccgcccctcaagttcacggcccccagcatggccagcgtcttggagcagctgaacgtcattaacggcatcctcttcattcctctcagccaaaaagacctggagaatctgaaagccgaggtggcgcggcggcaccagctccaggaggccagcagaaacagggatagagccgaggagcccatggctaccgagcccgcgccagcgggggccccaggagacctgggctcccagcccccggctgccaaggacccttctccgagcgtgcagggatagagagggagccagacggacagccagccagcggccccgtcaccagggagcccgactgcgggagaagggggcgagcctgcgggcggaagaggaagcaaggccctcttcctccacgtctcaccccaccccacccccgtgtcctcctgggagcctggcctgcctgccccgcagaaggtgtttttgcgctggttcaatgaatagatgatgcagaggccccattggagacacgtgaatggcgtgtgcggccatcagttcccggctggggggcaggtgttgcttcggcccccgccctccggccggcgtgtgcgagtgcgcccctggctgtgagtgttgaccgttcctctcccctgtacatagcccgagccagtcctgagtgggtgactcctgagtgggtgacgcgcagacgggatttctcaggtcatttgtatggtcgacatgatggctgctgctttggctgccaccacccccgggcccagcctgtctgaaagttcagggtttaggccgaaaaacccggtggggaggggtggggagccggagctctgtggcggggctggagggctggggtgcactttagtttggggcgggacgggagccgccgttgtgactggcgtggtctggctgctgctcccgaacggaggggtcggggttggcttgctgggccctcagagcccagtgggtggctctgactcggctccctactccctgcacccagctgggcgcagccttggggcctgcggtctgaatgtatccctcccctcagttttaacctgagctgccgaacgcacagtgggccgggggcgaggctgggggaagcggggcccaattacggatcccgggagttacaggtgccgacgtgatgtcgcttctctggtgcccagctcccttcctggtctgagactagctctgggggtggcgggggcccccacacgctgctcccgctccaccctgcccgtgctgctgctctgtgcctgctgtcagagccctggtgggggaggatgtggccaccctgagacccggaggagacgggcgtctgcctgggtttgcggagagccgcttatgggtgtggtccgtccagacaccttgtttcaagggggatgggcgtgagcgggcaagcagagcatccccaccgctgagcaagaactttttcttgtttttaaaccatcacgtcctcatttcacattggaataaagtgagtttttgaaacctgcg

SEQ ID NO: 116 - DNA, 3079 bp, Homo sapiens
gggccctacagagggtccgccatgttccccggcggcgccgccgcttggctctggtagccgccgcccccgcccccaaccccgcccggcccagagcctagccgagccccgggcccagcatggccgccccggagccggcccgggctgcaccgcccccacccccgcccccgccgccccctcccggggctgaccgcgtcgtcaaagctgtccctttccccccaacacatcgcttgacatctgaagaagtatttgatttggatgggatacccagggttgatgttctgaagaaccacttggtgaaagaaggtcgagtagatgaagaaattgcgcttagaattatcaatgagggtgctgccatccttcggagagagaaaaccatgatagaagtagaagctccaatcacagtgtgtggtgacatccatggccaattttttgatctgatgaaactttttgaagtaggaggatcacctgctaatacacgatacctttttcttggcgattatgtggacagaggttattttagtatagagtgtgtcttatatttatgggttctgaagattctatacccaagcacattatttcttctgagaggcaaccatgaatgcagacaccttactgaatattttacctttaagcaggaatgtaaaattaagtattcggaaagagtctatgaagcttgtatggaagcttttgatagtttgcctcttgctgcacttttaaaccaacagtttctttgtgttcatggtggactttcaccagaaatacacacactggatgatattaggagattagatagattcaaagagccacctgcatttggaccaatgtgtgacttgttatggtccgatccttctgaagattttggaaatgaaaaatcacaggaacattttagtcacaatacagttcgaggatgttcttatttttataactatccagcagtgtgtgaatttttgcaaaacaataatttgttatcgattattagagctcatgaagctcaagatgcaggctatagaatgtacagaaaaagtcaaactacagggttcccttcattaataacaattttttcggcacctaattacttagatgtctacaataataaagctgctgtattaaagtatgaaaataatgtgatgaatattcgacagtttaactgttctccacatccttactggttgcctaattttatggatgtcttcacgtggtctttaccgtttgttggagaaaaagtgacagaaatgttggtaaatgttctgagtatttgctctgatgatgaactaatgactgaaggtgaagaccagtttgatggttcagctgcagcccggaaagaaatcataagaaacaaaattcgagcaattggcaagatggcaagagtcttctctgttctcagggaggagagtgaaagtgtgctgacactcaagggcctgactcccacagggatgttgcctagtggagtgttagctggaggacggcagaccctgcaaagtgccacagttgaggctattgaggctgaaaaagcaatacgaggattctctccaccacatagaatctgcagttttgaagaggcaaagggtttggataggatcaatgagagaatgccacctcggaaagatgctgtacagcaagatggtttcaattctctgaacaccgcacatgccactgagaaccacgggacgggcaaccatactgcccagtgacccactacttcccagggactctcacatctcgggccccaaatggacagatcacccgaggagctggaggggtcggccaagctgactgtaaatttcacagtctctctgaagaaaccattgtgcttctgagaccctagcccccttcctggatggaggcttgagggccctgggacatgtgctatctgataagattgggtcatcgctgccaaggtggagagcagtgagcaaggggcttggggcaatttccagtggagggcatccacacctccattttatgcttgtggttcacacatttaagtttacaaatcagatttcttttccccttcagtagaattagattttgtttttcaatcatgatttcaaatgcaatcctaagagctaatgtggacttttctttttccatgaaatgtctttaaaggatgaattagcatggtcttaaaatacatttctgaggttactagctgtattttgaattgtgagcaaaatgccgagaaacccagttggcatttatacaaaatgttgacctcaggtctatagttcttaaatgtggctaattctgtaacatagtcttggtattttttaattatgaatgcatatcctatttccaggcaggctctcttacttgaacacaaatccaaaaactaatttagagtcttttttgcccagatcttttaagacttacaccccagagatttaagaagaaaacctctaaatttcaaaattatgaagaattacagaattactcatttaaggtactttaaaagaagtttgtacattgtcaaagtaaattttaattcaaatcatgtctgtaaaacttgacgtattttgtgtatgcatgttttcattttgcaaatatttaatatatagacctatgatgtacaggtacgacatgtataggttacctagatgttatgagaaattttagtttattgtgagtactcaagttgcttagagagccaccagggtgatttgctgctggctttctatcatttttatgttttaatgcaaaggaaattttaaaatgttctggaagtgtttttgattaagcaatgcagcctagaagcaatggttctgttcaatcattcagatgttagtggaagcataaaagtcaagactgcatgttgaaacctttcttttgatagttactgaactgcttggttaaactaaatggaaccatgtgctaatttttcacaattattgacctgtattgattgccactgtagtttggtatttccctttactttggtggcctgcttccctcatgccctggaatacaactcagagctccaggcagcggaaccatctattgttttgtttgccagaaagtgcaccctgtatggtctcctgtctaagttggaaatattatgcatgtgcaggactattcgagtatt

SEQ ID NO: 117 - DNA, 4164 bp, Homo sapiens
gcggcttgttgttgtggaggccaaaatggcggctcaggcggcggcagcggcccaggcggcggcggcccaggctgcgcaggccgaggcggccgactcgtggtacctggcgcttctgggcttcgctgagcacttccgcacttccagcccgcccaaaatccgcctgtgcgtgcactgcctgcaggccgtgttccccttcaagccgccgcagcgcatcgaggcccgtacacacctgcagctgggctccgttctctatcaccacaccaagaacagcgagcaggcgcgcagccacctggagaaggcgtggttgatatcacagcaaatcccacagttcgaagatgttaaatttgaagcagcaagtctgttgtctgaattgtactgtcaagagaattccgttgatgcagcaaagccgctgctgcggaaggcgatccagatctcacagcagaccccatattggcactgccgcctgctcttccagctcgctcaactgcacacgcttgagaaggacctggtgtctgcctgtgacctcctgggtgtaggggccgagtacgcccgggtggtgggatctgaatacacacgggcgctgttcctcctcagcaaggggatgctgctgctgatggagcgaaagctgcaggaggtgcacccgctgctgaccctctgcgggcagatcgtggagaactggcaggggaaccccatccagaaggagtcgctgcgtgtcttcttcctggtgctccaggtcacccactatctggatgccgggcaggtgaagagcgtgaagccgtgtctgaagcagctgcagcagtgcatccagaccatctccacactgcacgatgatgagatcctgcccagcaaccccgctgacctcttccactggctgcccaaggagcacatgtgtgtgcttgtctacctggtgactgtgatgcactccatgcaggccggctacctggagaaggcgcagaagtacacggacaaggccctcatgcagctggagaagctcaagatgctggactgcagccccatcctgtcatccttccaagtgatcctgctggagcacatcatcatgtgccgccttgtcacgggtcacaaggccacggcgctgcaggagatctcccaggtctgccagctgtgccagcagtccccccggctcttctccaaccatgcagcacagctgcacacattgctgggcctgtactgtgtctctgtcaactgcatggacaacgcggaagcccagttcaccacggccctgcggctcaccaaccaccaggagctgtgggccttcatcgtcaccaacctggcgagtgtgtatatacgggaaggaaatagacaccaagaggtactctacagtctgctggagaggatcaacccggaccacagcttccctgtcagctcgcactgcctccgagcagccgccttctatgtgcgtgggctcttctccttcttccagggacgctacaacgaggccaagcgatttctgcgggaaactctgaagatgtccaatgctgaggacctgaaccggctcacagcctgctccctcgtgcttctgggccacatcttctatgtgctgggaaaccacagggagagtaacaacatggtggtgcctgccatgcagctcgccagcaagatcccggacatgtcggtacagctgtggtcgtcagcactgctgagagacctgaataaagcctgtgggaacgccatggatgcccatgaagccgcccagatgcaccagaacttctcgcagcagctgctccaggaccacattgaggcctgcagcctccccgaacacaacctcatcacgtggacagacggtccaccccccgtgcagttccaagctcagaatggacccaacaccagcctggccagcctcctgtgaggccttgatggggccatccagctccgcagggcctgcgcgtctccggcttccacccagacggcactcaagcctgcccccgaggcgtgcttccttcctgattgtctctagagcttccaagtcctgggaatgtgcggggccagtccctgccctcccaggaggggtggtagccgttcccacctcgcagcaggacccccagtgcagaggctcacaggtggcacacaggcgctgtctctccagagccatccttcagagtggacctcagtgccagtcctgcctcagcatctgggtcacgtcggccaggagtagggtgcaggcctccagcaggtcctaatcctgtgtgccagggcaggcagtgccccaggggcaccacgcctgactctccatcacccaggccttgatgccgagcgggagtagagtgtttcctctgctcaaggcaatttccagagcccggatgccagtttctggcctgaatttggagggaagaagtaatggccctagtgtgggacgaagcacagatcccagcacttttcccagctttctctccagcatcagtccctgcagcagctggggcctctggtcaggaaccctcagggacccaggaactcagcttccaaacatctgcaccttgaccggactcgccatcccgccgtgggggtgcaggtgattgtaaacacgggtgtgcatgtggatgcacacgggtgtgcggtgaagatctgtggagatggagctgggagctgaggctcctgttgcaccagccaccttcccccatcttgtggctgctgaggggcaggaagcgggggagtgggctcgtctcctaaatttaagatcacctcctcagctagcttagagtgcgtggcacgggccccccgcccccgagatctggagcccagggactttcttcctggcagatctgtggccttccctgctcagcctcttggtccccccactccctccaccgcctcaccttccctgctgggtctctggggcacagtgtgaaacccgcaccctagccaggccccagggagcctccgctgggcccagacagcagcgtttggttttatccacttttcttggataatcaggaggtgccccagtggtcacagtgtggcattccgagttggggcgggtggtcgggtcaagatagcagcagcaggtgtcagggctcaagacaccaccccctccagcttctggggcccaggagcctctccctgctacagggggtgggggtcctgctcagcagggtaggtggtggttttaggtcttgtcaccctcactcagtggaactgcctctgggagctttggcgtctgtgactaaagggacgctggattgctcaggtcagctgctcggggctcccaggctgggtgtgccttagccacaggcagggctgtcaataacccccttcctcactggccaccacctgacatcagcaccagtgacaggctggtcagagggcggggctggtgagggtttgtcctaagaggaccaccgccatctctgggtctccagggggagagcctggccctgtcctttgctacccagggctgcccccaggcccatgaagccaataggagagcgtgtggcactggcccacaaactgtccctgtcctgtcttcctcccgagccatggcctctgctagctccaccttgaaggagccccccacatcctcccctacatcccagagatgccaccacttgtgtctccacaatgtgctcctgcccacccgggttccgcactgtccgacccctgcacaccactcatgtcaccacggcgtgcatcatgttcatccccatctatttatttaagcctttctttgcttgtagggcattttgtatgtagagcagttgaaaacagaacctcagaacttaacatctgtcctgatgttaaagtgcttttcatgaccaccctgttatctatgtatatgtaaagttaaggatgagatcttaagtttacaattaaaaactcagtactcaatatttaatattctactcgagctttatggaagccaaatcatgtgcatgtgtgtgtgtgcgtgtgtgcaagctttgaacctccttccacagccgcatcttctcatgacacaaagcttttgataagtactttcctgtgggtcgctcagggcctcatagcatctcattcaattacaagaatagaggccagacacggtggcgcatgcctgtagtcccagctaactgggaggctgaggcaggaggatcacttgagcccaggagattgaggctgcagtgagcatgatcgcgacactgcactccagcctgggtgacggtgagactttgtctc

SEQ ID NO: 118 - DNA, 5704 bp, Homo sapiens
gagtcctgggaaaggcgcatgcgctctcattgcagcctcggcgtttgtagaagaggagcatctgctccagatggaaaatgggtaaggaacaatcaaattcaattcgggaagaatatagaggtggtaataattggtaaaagtctgcagggttttttttaaccaaaggaaactggtttgagaaaattgtgaaatcagcattgaaatttgttacctactccaatcaagatttgcaaactacaaaaaaatcattctgaagctttcacctataaatatataccaagataatttcagataagaatgtccagcaaggaagtgaagactgctctaaaaagtgctagagatgcaatcagaaacaaagaatacaaagaagctttgaaacactgtaagacagtgttaaagcaagagaaaaataactataatgcctgggtttttattggcgttgctgcagctgaactagaacaacctgatcaggcccagagtgcctataaaaaagctgctgaattagagccagaccaattactagcttggcaggggttagcaaacttgtatgagaaatataatcacataaatgctaaggatgacttgcctggtgtttaccaaaagctcctggatctttatgagagtgttgacaagcagaagtggtgtgatgtctgcaagaaacttgtggatctatattaccaagaaaagaaacacctagaggtggctcgaacatggcacaagttgataaaaacacggcaggaacaaggtgcagaaaatgaagagcttcatcaactatggagaaaattgactcagttcctggctgaaagtacagaggaccagaataatgaaactcagcaattgctttttactgcttttgagaatgcactgggattatcagataagattcctagtgaagatcaccaagtactttataggcatttcattcagagtttatccaaatttcctcatgagtctgctagattgaagaaggcctgtgaaggaatgataaacatctatcctactgtacagtatccattagaagtgctttgtttgcatttaattgaatcaggaaatcttactgatgaggggcagcagtattgttgtagattagtggaaatggattcaaaaagtggtccaggcctcattggcttaggcattaaagcattacaagacaaaaagtatgaagatgctgttaggaacctaacagaagggttaaaggaaagccctgtctgcacaagtggatggtatcatctggcagaagcccaagtcaaaatgcatagacctaaagaagctgttctttcatgcagtcaagctctgaagatcgtagataatcttggtgcgtctggtaacagtctttatcagaggaatctttgtcttcatttgaaagcagaggctttgattaaactctcagattatgactcttcagaggaagcaattcgtacgcttgatcagatttctgatgcagataatatcccaggacttttggttctcaaaagcttggcctatcggaacaaaggttcatttgatgaagctgcaaagattatggaagaccttctctcttcttaccctgacctagctgaagttcatgcccttgaggctttgattcatttcaccaaaaaggactatctacaagcagaaaaatgttttcagagagctcttgagaaagataccgaagttgcagaatatcattaccaacttggattaacatactggttcatgggtgaagagacaagaaaagataaaacaaaggctcttacccactttctgaaggctgcaagactggatacatatatgggcaaagttttctgctatttaggtcattattatagagacgtagtgggagataaaaacagagctcgtggatgttataggaaagcctttgaattagatgacactgatgctgaatctggagctgcagcagttgacctaagtgtggagcttgaagatatggaaatggctttagctatcctaacaacagtaactcaaaaggcaagtgctggaacggcaaaatgggcctggcttaggcgaggactatactatttgaaagctggtcagcattctcaagcagtggctgatttacaggcagcattaagagcagacccaaaggacttcaattgttgggaatcgttaggagaagcatacttaagcagaggaggctacacaacagccttgaagtccttcacaaaagccagtgagctgaacccagaatccatatacagtgtgtttaaggttgcagcaatacagcaaatcctaggcaaatataaggaggctgtagctcaataccagatgatcattaaaaagaaagaagattatgtgcctgctttaaaaggtttgggtgaatgccatcttatgatggcaaaagcagctctagttgattatcttgatggaaaagccgtagactacatagaaaaagcactggaatattttacttgtgctctacagcatcgagctgatgtgtcctgcctctggaagctagctggggatgcttgtacctgtctgtatgctgtcgcaccatctaaagtgaatgttcatgttttaggagtccttctaggtcagaaagaaggaaaacaagtattaaagaaaaatgagctcctccaccttggaggaaggtgttatggtcgtgcattaaaactgatgtctacatctaatacatggtgtgaccttggaattaattattatcgccaagcacaacatctagcagaaacaggcagcaacatgaatgatcttaaggagttgctggagaaatctttacattgtctgaaaaaagcagtgagactcgacagtaataatcacttatactggaatgctcttggtgtggttgcatgttacagtggtattggaaattatgcccttgctcagcactgtttcatcaaatcaatccagtcagaacaaattaatgctgttgcatggaccaacttgggagtgttatacctcacaaatgaaaacattgagcaagctcatgaggctttcaaaatggctcaatcccttgatccatcttatttaatgtgctggattggacaagctcttattgctgaggcagttggaagttatgacaccatggatctcttcaggcacactacagaactaaatatgcatactgaaggagcattaggttatgcgtattgggtctgcacaacattgcaagataaaagcaacagagaaacagagctgtaccagtacaacatcctccagatgaatgctattccagcagcacaagttattttgaataaatatgtagaaagaattcagaattatgccccagctttcacaatgttgggttacttaaacgaacatctacaactgaaaaaggaagcagcaaatgcataccaaagggcaattttgttgttacagactgcagaagaccaagatacttacaatgttgcaataagaaattacggcagattgttatgttccactggtgaatatgataaagctatccaggcttttaagtcaacaccccttgaagtgttagaagacatcataggttttgcattggctttattcatgaaggggctttataaagagagcagcaaagcctatgagagagccttgtctattgttgaatcggagcaagacaaagcccatatcttgacagctctggcaataactgaatataaacaaggaaaaacggatgtagccaagacattgctatttaaatgctctatcttaaaggaaccaaccacagaaagccttcaagccctgtgtgctctagggttggcaatgcaggatgctacactgtcaaaagcagcacttaatgagttactgaagcacatcaaacacaaagacagtaattatcagaggtgccttcttacatcagcgatttatgcactccaaggccgcagtgtggctgtgcaaaaacaaatatctaaagctgttcacagcaaccctggtgaccctgctctttggtctctgttgtctcgagttgttgcacagtatgctcaacgaaatgcaaagggaggtgttgtagcaggaaatgtggctcatattctggactcaaatcatggaaagaaggcattactgtacactgcggtaaatcagttggctatgggaagcagttcagcagaagatgaaaaaaatactgcactaaagaccattcagaaggcagctctcctttctccaggtgatcctgctatctgggctgggctaatggcagcctgtcacgctgatgataaactggccttagtgaacaacactcagccaaagaggatagatttatacttggcactgttatctgctgtttctgcttcaattaaagacgaaaaattctttgaaaattacaaccagtcccttgaaaagtggtctctctcacaagctgtcactggtctaatagacacaggaagaatatctgaagctgaaactctctgcacaaagaatttaaaaagtaaccctgatcagccagccgttatcttacttttgagacaagttcagtgtaaaccactcctggagtcacaaaagccactcccagatgctgtacttgaagaactacaaaaaacagtcatgtccaactcaacctctgttccagcttggcagtggctggcacatgtgtatcaatcccaaggaatgatgagagctgcagagatgtgttacagaaagagtctacaattggcatcccaacggggcagttggagtgggaagctctcaagtctgttgagactagcactacttgcattaaaagtctgtatggctaacatttccaatgatcactggccatctttggttcaagaggctacaactgaggccttgaagctttgcttttgtccactggctgttcttttacaagctttgttacaattcaaacgcaaaatgggggcaagagagacacggcgtcttttggaaagagtggtatatcagcctgggtatcccaaatctattgcatcaactgcacgttggtacctactgagacacttatatgccaaagatgactatgagcttattgacgtgctggtaaacaatgccaaaactcatggagatacaagagcattggaactgaatcagagattgtcctcacaataacattggattattttatagtaaggaagcaaagaaaaagctgtaagaatgaagcaatgaatcaagacttctacccaaagcaacatttttttaaactatatttattccttttctaaaggaatctagagaagttgaagtttttaagttaggaatgcaattttctgttaactccaaacctgattttaatctgaaaaaaaaaaaatttaatttgggaaaaccagaatgaaaggaaaaccattattgccttggttgcttaacattatttgtaaaccattattttctgcatcttgcatggtgcacaatagaatatcttttactgtaatcccttacaataaagccttaatagccattttctatgtaatatgcaaaagtagattagcacaatgcacaattttcttttgttaaaaatcaaattcaaagatttaattcttgctatgaattctaaagttcggcaaaccaattcatcataaaatccaaataatcttgtaacctatttatctagtgattcatctccaattctgttgaaaaagcataatataaatgttgatgagactagactctaatggatatgtttatataattccaaacactcaggtgtgtgaatgcatttaaaaacattaatggaaaataatgctgataatatttaattgatcatgcaattccttcaattatgatggaaagacttgaactttctgaaataaaacaaaaatacagc

SEQ ID NO: 119 - DNA, 5006 bp, Homo sapiens
ggggcgcccgcgggccggagccggggcgggggccggggcctaggcgcgcggacctgcgagcggacccgagaggcggcggcggcgcagcggaacggcagagcgggccggaggcggccgaggcgcccggcgcaggcacccgtgcctcccctctgccaggaaccttggggccttgtgtgtgaccaggacctggtggcccccgggcggtggcagagcccctgtcccaagctgcttcctgccggcacctctgatcaagtgcctagagggatgtgtgtgccagccctcggtccagtgcccgctcctgagctgactcctgctgggccccgacagcttgccgtgtttcctgtgcctgtagctccctggttggatagctgccgcccgggagaggtgacccgggcgccctgctagggtgaaggcccctgccctcggcccgggatcatgaaaggcctcggtgacagccgcccccgccacctctccgacagcctagacccaccccacgagcccctgtttgcagggaccgaccgcaacccctacctgctgtcgcccacggaggccttcgcccgcgaggcccgcttccccgggcagaacaccctgccaggagatggcctctttcccctcaacaaccagctgcccccgcccagcagcacctttccccgcatccactacaactcccacttcgaggtgccagaggagagccccttccccagccatgcccaagccaccaagatcaaccggctgcccgccaacctcctggaccagtttgagaagcagctgcccatccaccgtgatggcttcagcaccctccaatttccccgtggcgaggccaaggcccgtggtgagagccctggccgcatccgccacctggtccactcagtccagcggcttttcttcaccaaggcaccctcactggagggcacagcgggcaaggtcggtggcaatggcagcaagaagggtggcatggaggacggcaagggccggagggccaaaagcaaggagcgggccaaggctggggagcccaaacggcgcagccgctccaacatctcaggctggtggagctccgatgacaacttggacggcgaggccggcgccttccgcagcagtggcccagcctctgggctgatgatactaggccgccaggcagaacgcagccagccacgctacttcatgcacgcctacaacaccatcagtgggcacatgctcaaaaccaccaagaacaacactactgagctgactgccccaccacccccgcccgcacccccagccacctgccccagccttggggtgggcactgacaccaactacgtcaaacggggctcctggtccactctgaccctcagccacgcccacgaggtctgccagaagacctcagccaccttggataagagcctgctcaagtccaaatcctgccaccagggtctagcctaccattacctgcaggtgcccggcggcggcggcgagtggagcaccacgctgctgtccccacgcgagacggatgccgcggccgagggccctatcccgtgccggcgcatgcgcagcggcagctacatcaaggccatgggcgacgaggacagcgacgagtccggcggcagccccaagccctcacccaagaccgcggcgcggcgccagagctatctgagggccacgcagcagtcgctgggagagcagagcaacccccgcaggagtctggaccgcctggattcagtggacatgctgctgccctccaagtgtccgagctgggaagaggactacacccccgtcagcgacagcctcaacgactccagctgcatcagccagatttttggacaggcctccctgatcccccagttgtttggccatgagcagcaggtacgggaggcagagctgagtgaccagtatgaggcggcctgcgagtcagcctgcagtgaagcggagtccacagcggcagagacgcttgacttgccactgcccagctacttccgctcccgcagccacagctacctgcgtgccatccaggcaggctgctcgcaggaggaggacagtgtctccctgcagtccctctccccaccgcccagtaccggcagcctcagcaatagtcgcacgcttccgagttcatcatgcctagtggcgtataagaagaccccgccaccggtccctccacgcaccacttcaaagccgttcatctcagtcacagtccagagcagtactgagtctgcccaggacacctacctggacagccaggaccacaagagcgaggtgactagccagtcgggcctgagcaactcgtcggacagcctggacagcagtacccgaccgcccagcgtgacacggggtggagtcgccccagcccctgaggccccagagccacccccaaaacatgcagctctgaaaagtgaacaagggacgctgaccagctctgagtcccaccccgaggccgcccccaaaaggaaactgtcatcgataggaatacaagagaggactagaaggaacggttcccacctctcggaggacaacggacccaaagcgatcgatgtgatggcaccctcctcagaaagcagcgtcccctctcacagtatgtcctcccgacgggacacagactcggatacccaggatgccaatgactcaagctgtaagtcatctgagaggagcctcccggactgtacccctcaccccaactccatcagcatcgatgccggtccccggcaggcccccaagattgcccagatcaagcgcaacctctcctatggagacaacagcgaccctgccctagaggcgtcctcgctgcccccacccgacccctggctcgagacctcctccagctccccagcagagccggcacagccaggggcctgccgccgagacggctactggttcctaaagctactgcaggcagaaacagagcggctggaaggctggtgctgccagatggacaaggagaccaaagagaacaacctctctgaagaagtcttaggaaaagtcctcagtgctgtgggcagtgcccagctactgatgtcccagaaattccagcagttccggggcctctgtgagcaaaacttgaaccctgatgccaacccacgccccacagcccaggacctggcagggttctgggacctgctacagctgtccatcgaggatatcagcatgaagttcgatgaactctaccacctcaaggccaacagctggcagctggtggagacccccgagaagaggaaggaagagaagaaaccaccccctccggtcccaaagaagccagccaaatccaagccggcagtgagccgcgacaaggcctcagacgccagcgacaagcagcgccaggaggcccgcaagagactcctggcggccaagcgggcagcttctgtgcggcagaactcagccaccgagagcgcagacagcatcgagatttatgtcccggaggcccagaccaggctctgagaccatgcaggaggaaagaaacgattttaaatcattaaaaacacaaaaactaagtgcgaacggaacagagttttctcaacctttgctatggttattctgtctagagaccctgagccaactttcaaattgacgcatacaagggctcacaatttggcttttttgggtccctcccagctttaggttatgaagattttactcacaaaaaaaatcaacaaaaatcacgaaactagaaaactttttttttcctcttgctggccgtggtggactagatagatggacgtcggcaactcccggcccagcctccatactgcggtctttttactcgttctatctgatgagaactcacactagcttgtttacaagatgacgacagtccaagggcagccttgggcacctgccatgtccctcctttccccagctatccccgctctgaccttgattttcattcttatgtttttctcttttcccttcagagctcacacagtggtcaccattgtggcaagcggctttctgggtctcagccctctctgcggttgagggcccagaggacagagagatggacatgcgtcccctccctccccccgccaagtgctcacacacaacctcacgcgcacacacacacacgcagatggaggcgcctcactgggaggtgccccgccagccctgggcagtgtcaggcaggactcactcaccgctgagcagatgagagaagttttagtcttggcgggtggaaatgagacgaagccacagttatcacactccagactcctgcccttttattttctccagccccttcttccttcagcaaaatctaggactcccgagtggcttccagggggccgtcagtcctcagccgcgcctgtgtccggtgcccgaggggcgggcggcggtgtctgtatgtatgtgtacatatgcacatagaccttagagtgtatagttaacaaacgcccatctgctcacccatgcccacccagcgccgccgccgctggctctcggggcacctggcaggaggcgggtgtgtgaatagcatatatttttacatgtactatatctaggtgtgtgtacaagtgtgtgtaaaaatatataccttgtgtgtaagcagccctttttttttttggtctccacccccctccccccgccccgcactcctaagggcccatctgcccagcctctgagttttctgttctattttttttttaaccccaattatccttctctctctcctgcccccgcatcccactcccagggtgtcacgagccctgagctgcaatggcccgggcctgcagggcggggtaggggagggcaggggctcagccccgaagccagctcagtacctgaggggctgctctatgctgtgtatgcgcctctctggcatccgagacatcctcttggctggcgcttgctgcaggggggaccccccccccgtccccaggtgaaccaagggtctgctccggggcccatttccagcttggccgccgtctgtgaccttgggcaagtcacttgacctctgtgtgcctcaacttcctcctctgtaaaacggggacagtccctgcccctccctacctcacaggcatgttgtgagaataaatgaggtaacgtgt

SEQ ID NO: 120 - DNA, 7302 bp, Homo sapiens
cctctccagagatatggacactctcttgctttatatcaggaaaacatctttatgtatggaggcagaattgaaacaaatgatggcaatgtcacagatgaattatgggtttttaacatacatagtcagtcatggagtacaaaaactcctactgttcttggacatggtcagcagtatgctgtggagggacattcagcacatattatggagttggatagtagagatgttgtcatgatcataatatttggatattctgcaatatatggttatacaagcagcatacaggaataccatatctcatcaaacacttggcttgttccagaaactaaaggagctattgtacaaggtggatatggccatactagtgtgtatgatgaaataacaaagtccatttatgttcatggagggtataaagcattgccagggaacaaatatggattggttgatgatctttataaatatgaagttaacactaagacttggactattttgaaagaaagtgggtttgccagataccttcattcagctgttcttatcaatggagctatgcttatttttggaggaaatacccataatgacacttccttgagtaacggtgcaaaatgtttttctgccgatttcctggcatatgacatagcttgtgatgaatggaaaatactaccaaaaccaaatcttcatagagatgtcaacagatttggacactctgcagtagtcattaacgggtccatgtatatatttgggggattttctagtgtactccttaatgatatccttgtatacaagcctccaaattgcaaggctttcagagatgaagaactttgtaaaaatgctggtccagggataaaatgtgtttggaataaaaatcactgtgaatcttgggaatctgggaatactaataatattcttagagcaaagtgccctcctaaaacagctgcttctgatgacagatgttacagatatgcagattgtgccagctgtactgccaatacaaatgggtgccaatggtgtgatgacaagaaatgcatttcggcaaatagtaactgcagtatgtctgtcaagaactacaccaaatgtcatgtgagaaatgagcagatttgtaacaaacttaccagctgtaaaagctgttcactaaacttgaattgccagtgggatcagagacagcaagaatgccaggctttaccagctcatctttgtggagaaggatggagtcatattggggatgcttgtcttagagtcaattccagtagagaaaactatgacaatgcaaaactttattgctataatcttagtggaaatcttgcttcattaacaacctcaaaagaagtagaatttgttctggatgaaatacagaagtatacacaacagaaagtatcaccttgggtaggcttgcgcaagatcaatatatcctattggggatgggaagacatgtctccttttacaaacacaacactacagtggcttcctggcgaacccaatgattctgggttttgtgcatatctggaaagggctgcagtggcaggcttaaaagctaatccttgtacatctatggcaaatggccttgtctgtgaaaaacctgttgttagtccaaatcaaaatgcgaggccgtgcaaaaagccatgctctctgaggacatcatgttccaactgtacaagcaatggcatggagtgtatgtggtgcagcagtacgaaacgatgtgttgactctaatgcctatatcatctcttttccatatggacaatgtctagagtggcaaactgccacctgctcccctcaaaattgttctggattgagaacctgtggacagtgtttggaacagcctggatgtggctggtgcaatgatcctagtaatacaggaagaggacattgcattgaaggttcttcacggggaccaatgaagcttattggaatgcaccacaatgagatggttcttgacaccaatctttgccccaaagaaaagaactatgagtggtcctttatccagtgtccagcttgccagtgtaatggacatagcacttgcatcaataataatgtgtgcgaacagtgtaaaaatctcaccacaggaaagcagtgtcaagattgtatgccaggttattatggagatccaaccaatggtggacagtgcacagcttgtacatgcagtggccatgcaaatatctgtcatctgcacacaggaaaatgtttctgcacaactaaaggaataaaaggtgaccaatgccaattatgtgactctgaaaatcgctatgttggtaatccacttagaggaacatgttattacagccttttgattgattatcaatttaccttcagcttattacaggaagatgatcgccaccatactgccataaactttatagcaaacccagaacagtcgaacaaaaatctggatatatcaattaatgcatcaaacaactttaatctcaacattacgtggtctgtcggttcaacagctggaacaatatctggggaagagacttctatagtttccaagaataatataaaggaatacagagatagtttttcctatgaaaaatttaactttagaagcaatcctaacattacgttctatgtgtacgtcagcaacttttcctggcctattaaaatacagattgcattctcacaacacaatacaatcatggaccttgtgcagttttttgtcaccttcttcagttgtttcctatccttattgctggtggctgctgtggtatggaagatcaaacaaacttgttgggcttctcgacggagagagcaactgcttcgagaacgacagcagatggccagccgtccctttgcttctgttgatgtagctctggaagtgggagctgaacaaacagagtttctgcgagggccattagagggggcacccaagccaattgccattgaaccatgtgctgggaacagagctgctgttctgactgtgtttctttgtctaccacgaggatcatcaggtgcccctccccctgggcagtcaggccttgcaattgccagtgccctaatagatatttcacaacagaaagcttcagatagtaaagataagacttctggagtccggaatcgaaaacacctttcaacacgtcaaggaacttgtgtctgagaaatggaaaccgctcctgtatattctgtactgttttacttcgggcttctgttaaagctgttctatggccttggattttatggaggcagatctctgtatcatccagagcctgagtacagtttccttccaaatggacaatgacccaggtggccaaagaatgttcatgagttttataaaagtattgatggtcacaggtgataaagtcagtttttaccactatcttaggcttattatagctaacattaaattactctggaaaaagatgtatattgtttcttaatgaagatgaaaaatatgtaattcatataaatcaactgtttatatcccaagactttaaagaaagacattttttaatgcctgaatgatgagaattgtacagtttttgcctcataagcaaacttgaatcacctgtgtatgaacagggaatgaacacattgcaatggctttaaatgctcttttatctcgttgtaaaggtaaggcaagattttgatgtagtaggatgtaggtaatgtatttaaatatttcatatgaccatatcgtgtccaaactcagtttgagaatgtgacagctttccgcctaactagaatgcagaccagaatgagttcaactcattctgtgcaacttcacagggggtttattagaatgctcagtgtagaggacattcctgtcatccatgccaactacctaactcgttatcagagctgatagagcatggaaaagtctgtccagcgatcagttgttcccctccttccaaaaacagcctccaataccacaacctgaaaagagccgaaatggttattttacagcatacaagcttctgctccagtatgataatttttaattgcctaagaatcattggatcagacctaaatgatccatctgcatttttataagaatggatctttctttgcccttcctctcctagctgctagattttaactaccttttacaaatgttacaaaatgtattttagaggcgacatctctcaagatgacctgagttccttcctgccaactgttccacctagaatacaagtagagaagagcactggctggcaagcatcaacaggagtcttcttcccaacacgagcgcatccatgtcctgagaaaaagtctgtggtttagaaaatatgtccatggttgcccacagtcagcacactcttagtgactcaaaattctgaattatggcagaaaggaaaaataaaacatacttcacattagaacacagaatcatttacatcctaatactgaccacagttcactaaagctcagtagcattaacagatatagtttggaattgcagtttcctcacttcagggtgacaagatatgtataacagtgacagaaatctccaaagctgctgtatatgatatagctttgttaaatatgaaggtcctttaaatacaattgatgtttagtactatatatgtacttttcacattctttggatttctggaaggttatgacactttactgtttacagctaatgcatagttacttgcatgccatggttgtacagtagcagactatgaccctattgtgatattaagtgtttatttcataatgccatttatacatagctgaatttgatgaggattgaatgtcatatataagaggaatgatcatacaatatgtagttgcatcttatgtaagatttctaggttgcatctaaccatgactatgtcattattttgataattaggcatttatgaattatagtatatattcctcatgttggcatgataattttgctattttccatgcattaaaaataagacaaattcttagagtaattttagtaattttatctataatctgtggggtttttttggagggggaggccactggttgtttctacttccctgtgatattttctctctcattaaaggaatgagctaagtttgtaaatatctcctaaaaacaatcaagtaattttattagcttcttttggaccctctaaatattgacttctctcatgaaaaaataaattgatgaaactaatgattacaaagatataatcattttttaaaaagtgattgcccaatgtatttctctaacaattgtcacaagagaaagcataacaataaaaatacaaaaacatacagatttagatgtaaaatctatataagctatatttttagggaggctaagcagatagtattactgtggaagaattatcaagttttattcacctcaaatcccactgggttcttaaaacttgaaaattcaaattgtagagaattatgagacacaatgtgatgtttagttaaagtcatgctatacctttctgggccacatattgctaactctgtggctaattatgcaattaattctcaacgtatcaaagcttttcactggcagtaaattctttgccctcaggtgaagtggattgaaaagacatcaaggatcaaggataatcactttgaatctgttggtttttccccctacattccagacactttaaatttggatgctttcattttttttaaatcaaaccacacaaatatgcagatactttcccagaatttcgcagttaaatggctgatcctcttgaaaactaaccttaatggaattctaaacatttcagtttagaatgactttgaaaaattccttagatttttaggatgttttattctgccaagtatgaaaaaaaaatggttaaatacaatggagttttaaaaattaacctggggattctatttgaactagaaaattcctattggaaaagaatttgcacatacttacagattcagctaataaattttaagaggattaggattctcataattctttaaatgaaaatttgttttagtgatacacagagatgccgtatactatagtgttatgttcagtaggaaaacttcaaatagttcgtatttaaaaaggtaattgatccttgctgtacttcccaacatctcatcttcttttagctgcagtaagatagaggtgactgtatggctacagttcatggtataaggtcatttagggtgcacactggcacacaggctggaaaacgggcactggacccagctttcaggtgtgtggtgctgggtaagtttcacctttgaagcctcagccctccatctgtaaagggcggtaatggtgcccacctttcgaggcattgcgaggctagatggtaacacacagaaagctcccacagtgggaccttgatgcagcgtagctggtattaacaaccgtggggacaccaggccactctttttctaccagttgttttatgaatccacctattaattttcatccatcttttggtcgtaggtaaaggtcaatcaggtttttcaaaaagactccctgaataacttaagttcctgtatttctaagatatagggatttctacaaaacgactttgacatttagtcaataaagacttaaactcttcttaaatctatagttttaggagagtttttcttaaaattactgactgatgacattgagacaagagcatcaatgatcacctttcacgtacaaactaggcaagacagggtcagtgcttacattttgtggttatacatgatacatcttttctcagtgaacataaaactatgatttgaaaggtgtcttatatttaaaaaagattgtaaaatgaaaactgaccaaatgaactaattctacccacctatggtctttttaaatgtcgagtttcaaaacccatttgccgtatactagagtgagcttggaaacttacctgattacaggaattgcttgggttcaggcagattcccactttcacctctagagatttagattcagaaacactggggtaggccctggagagcagtactcttaacaagctcctcagtgcttcttaccattaggcaaattagggaaacactgcattgggtcaaagtgctgcctttaatcgaccattagagggagttctctaaataacaaagttattactctaattcaaaatgctttaaagaattttccaaggaatacaagccatctggttggtgttagttatagcagtgatttcattagagtgtacatttaacattttagttttatcaaaattttttgaaattaagaattagaaccagagctcctatcagtatatatgtacacaggtgtgcatgccagtgttcaaaacagattgtgtaaaagttcaagcccgttttagaaagccaacattttatgttataatatgctgttaatcaggactttattaaataaaaacattggctcttccaacccccac

SEQ ID NO: 121 - DNA, 2682 bp, Homo sapiens
gaattcgcagcgagagctggaggtgttgggtcgggagaccagccattcgatcccgccgcaggtaggagctggtttccatcctggcaccacggcacacacctccagcctcgagcccggcgctgctgcccgggggtctccttcaggctctttgacgccgttccagggggcacctatccaggcatcctctgggcctctagccagaggactggctcccggcttcagcactccgggctgcagtaagaagtgcccttatcgctctgagccctgccaccatcccgtgaaccaccgaaaccctggtccagcgcgacagccttggacctgggactggacggatccaaaacgctcagcctcggccccccacagacggggctctgcatcgtctctgatatgtcacccaccatctcccacaaggacagcagccggcaacggcggccagggaatttcagtcactctctggatatgaagagcggtcccctgccgccaggcggttgggatgacagtcatttggactcagcgggccgggaaggggacagagaagctcttctgggggataccggcactggcgacttcttaaaagccccacagagcttccgggccgaactaagcagcattttgctactactctttctttacgtgcttcagggtattcccctgggcttggcgggaagcatcccactcattttgcaaagcaaaaatgttagctatacagaccaagctttcttcagttttgtcttttggcccttcagtctcaaattactctgggccccgttggttgatgcggtctacgttaagaacttcggtcgtcgcaaatcttggcttgtcccgacacagtatatactaggactcttcatgatctatttatccactcaggtggaccgtttgcttgggaataccgatgacagaacacccgacgtgattgctctcactgtggcgttctttttgtttgaattcttggccgccactcaggacattgccgtcgatggttgggcgttaactatgttatccagggaaaatgtgggttatgcttctacttgcaattcggtgggccaaacagcgggttactttttgggcaatgttttgtttttggcccttgaatctgccgacttttgtaacaaatatttgcggtttcagcctcaacccagaggaatcgttactctttcagatttcctttttttctggggaactgtatttttaataacaacaacattggttgcccttctgaaaaaagaaaacgaagtatcagtagtaaaagaagaaacacaagggatcacagatacttacaagctgctttttgcaattataaaaatgccagcagttctgacattttgccttctgattctaactgcaaagattggtttttcagcagcagatgctgtaacaggactgaaattggtagaagagggagtacccaaagaacatttagccttattggcagttccaatggttcctttgcagataatactgcctctgattatcagcaaatacactgcaggtccccagccattaaacacattttacaaagccatgccctacagattattgcttgggttagaatatgccctactggtttggtggactcctaaagtagaacatcaagggggattccctatatattactatatcgtagtcctgctgagttatgctttacatcaggttacagtgtacagcatgtatgtttctataatggctttcaatgcaaaggttagtgatccacttattggaggaacatacatgacccttttaaataccgtgtccaatctgggaggaaactggccttctacagtagctctttggcttgtagatcccctcacagtaaaagagtgtgtaggagcatcaaaccagaattgtcgaacacctgatgctgttgagctttgcaaaaaactgggtggctcatgtgttacagccctggatggttattatgtggagtccattatttgtgttttcattggatttggttggtggttctttcttggtccaaaatttaaaaagttacaggatgaaggatcatcttcgtggaaatgcaaaaggaacaattaatatatatgctactggacattctagcaaggtaattgtagtttagttttaattcggagagcaatgataatcagtgcacaggagtataaaatattattttaaacagcgaaattaataatataaaatgccaaatggttgaaaaaatagaaacctttctgtatatttgatcatattttttttttgccttgtcaatgtatttaaagtttacttaaggtcaggaaattctaaaacaacttttctggccttgttatttgatgtatatcttttaaatttactgaccaaagcatgttttaagctgcaatgcagtagtcacgggtggtaaccatgtagtcaggtattgttattagtacctatcactgctgagctgtatttaaaattttggtacaatatataaaatggagaagagcttgatattcaggtactaaccacaactagtctgacattgttggcagttaaaatcttattttgaattgtaaattagttaaattttatgtggaatttgctgagaaaagaatatagactactgaaatgtcattttagttatttttcttatgaccacattgtacaaatgaatctgtgttaaaaagactattttaaatgtatttcctgcttttgtaagcattaaagatttgaattccaccacactgg

SEQ ID NO: 122 - DNA, 1859 bp, Homo sapiens
acgccaagcttggcacgaggtggctgcccccagctggcgcggggctaggcttgttcaatcggcgttaagagtctggcaggtgggccctcatgtcgcgagggagcgggtgatccctttttcctcactcttaggcttccaacggaggtgcgtgtcctgcgtcgcggggtccgctttctctggtccccgcttggcctcggcttctcgcagtaatggccagggctctgccctggaccacttcctcggattctctcagcccgacagttcggtgactccttgcgtccccgcggtgtccatgaacagagatgagcaggatgtcctcttggtccatcaccctgatatgcctgagaattcccgggtcctacgagtggtcctcctgggagccccgaatgcagggaagtcaacactctccaaccagctactgggccgaaaggtgttccctgtttccaggaaggtgcatactactcgctgccaagctctgggggtcatcacagagaaggagacccaggtgattctacttgacacacctggcattatcagtcctggtaaacagaagaggcatcacctggagctctctttgttggaagatccatggaagagcatggaatctgctgatcttgttgtggttcttgtggatgtctcagacaagtggacacggaaccagctcagcccccagttgctcaggtgcttgaccaagtactcccagatccctagtgtcctggtcatgaacaaggtagattgtttgaagcagaagtcagttctcctggagctcacggcagccctcactgaaggtgtggtcaatggcaaaaagctcaagatgaggcaggccttccactcacaccctggcacccattgccccagcccagcagttaaggacccaaacacacaatctgtgggaaatcctcagaggattggctggccccacttcaaggagatcttcatgttgtcagccctaagccaggaggatgtgaaaacactaaagcaataccttctgacacaggcccagccagggccctgggagtaccacagtgcagtcctcactagccagacaccagaagagatctgtgccaacattatccgagagaagctcctagaacacctgccccaggaggtgccttacaatgtacagcagaagacagcagtgtgggaggaaggaccaggtggggagctggttatccaacagaagcttctggtgcccaaagaatcttatgtgaaactcctgattggtccgaagggccacgtgatctcccagatagcacaggaggcaggccatgacctcatggacatcttcctctgcgatgttgacatccgcctctctgtgaagctcctcaagtgaccaccctctactgaccctcccagggcattccagctcaagctgctggcaggaactgaccagttctttccttggctggggaccctccaggcactggtgagagacatgaacactgactggccactagctggcctggccctgttgagtctgcacagtccctgcccagctgtgtcttctgttggaagaaggaacctgccttagctcagtttccaggtggttcttctgcctggcaccacagctacaaaggtgtagctaagaagatggcccattggtgggagcaatgtcaccctgcctccagctagctatgggcccagagtttctccctgagtcgctgttgctagcagggagatttctcttcctgccctcacttctttcaccttgaacttggataagaactcgtgtctcctgagtgaggtagcgcctcccatctgctccccaattcttgatctctcccaccccatccctctccccagtcttggatactaataaaatataagcattctggttctaaaaaaaaaaaaaaaaaaaa

SEQ ID NO: 123 - DNA, 4715 bp, Homo sapiens
gaagaaggaggaggaggcccgcgtcgcctccggcggggctcgcgctcgccccgcgctcgccctccgcctcgcccgagccccgggagggtgaaacgctttctcccagcatgcagcgggaggagggatttaacaccaagatggcggacggcccggatgagtacgataccgaagcgggctgtgtgccccttctccacccagaggaaatcaaaccccaaagccattataaccatggatatggtgaacctcttggacggaaaactcatattgatgattacagcacatgggacatagtcaaggctacacaatatggaatatatgaacgctgtcgagaattggtggaagcaggttatgatgtacggcaaccggacaaagaaaatgttaccctcctccattgggctgccatcaataacagaatagatttagtcaaatactatatttcgaaaggtgctattgtggatcaacttggaggggacctgaattcaactccattgcactgggccacaagacaaggccatctatccatggttgtgcaactaatgaaatatggtgcagatccttcattaattgatggagaaggatgtagctgtattcatctggctgctcagttcggacatacctcaattgttgcttatctcatagcaaaaggacaggatgtagatatgatggatcagaatggaatgacgcctttaatgtgggcagcatatagaacacatagtgtggatccaactagattgcttttaacattcaatgtttcagttaaccttggtgacaagtatcacaaaaacactgctctgcattgggcagtgctagcagggaataccacagtcattagccttcttctggaagctggagctaatgttgatgcccagaatatcaagggcgaatcagcgcttgatttggcaaaacagagaaaaaatgtgtggatgatcaaccacttacaagaggcaaggcaagcaaaaggatatgacaatccgtccttccttagaaagctgaaagctgataaggaatttcggcagaaagtaatgttaggaactcctttcctagttatttggctggttgggtttatagcagacctaaatattgattcttggctcattaaagggctaatgtatggtggtgtttgggctacagtacagtttctttcaaaatcctttttcgatcattcaatgcatagtgcattgccccttgggatatatttggcaaccaaattctggatgtatgtgacgtggttcttctggttttggaatgatctcaactttttatttatccatcttccattccttgccaatagtgttgcacttttctacaattttggaaaatcttggaaatcagatccagggattattaaagcaacagaagagcaaaagaaaaagacaatagttgaacttgcagagacaggaagtctggacctcagtatattctgcagtacctgtttgatacgaaaaccggtgaggtccaaacattgtggtgtgtgcaaccgctgtatagcaaaatttgatcatcattgcccatgggtgggtaactgtgtaggtgcaggcaaccatagatattttatgggctacctattcttcttgctttttatgatctgctggatgatttatggttgtatatcttactggggactccactgtgagaccacttacaccaaggatggattttggacatacattactcagattgccacgtgttcaccttggatgttttggatgttcctgaacagtgttttccacttcatgtgggtggctgtattactcatgtgtcagatgtaccagatatcatgtttaggtattactacaaatgaaagaatgaatgccaggagatacaagcactttaaagtcacaacaacgtctattgaaagcccattcaaccatggatgtgtaagaaatattatagacttctttgaatttcgatgctgtggcctctttcgtcctgttatcgtggactggaccaggcagtatacaatagaatatgaccaaatatcaggatctgggtaccagctggtgtagcgacatcttatcctatgaagcatattgctgagtggtgcctgaaaattgtgtctgtccgtgtctttctcacactcgaatccacatcctttgaacaagagcatgctatgtgtagggctaatggtgaattttacagtctttttttcaacacttttattaacaaaagtaaacatggacagaacacactgccatttctgggaagagtaaagatgataaaaaataattttaatggttcttaatgtggaaattcacaacatactcaacttttgggttttgttctcacagtatttttcacaaaaaaagggtaaacttattctattgacagacatggtgtactgatcagaaatgttcagttttaactaaaactaaatttatgttatttggctaaatgttatgatgcagtctagtacgagtattgcatctaattccaggagcattgttttaagttgattgactagttattatgtacatttcagaatgtacacataaatactgtgatgaaaatcatgtgattgggatctactgtgatgttgtcttcaaaggcaggagaaaataatgttcacaataaaatgtgctaacaatgttttgtttctatcagctgttgcaatgctgatatatttctagttcagtgaaataatttgtagtaaccttactctgaggttttacggtctgataatgaagcacttgcatgagtatagtaagtcatgtttttttgttcaaatttaaaagccctgctaattgcatgacacaccacatagaatgtatactagcagatactatccagtgaagcataaattagaatttaatttgatgttcaaaaacagttccatttttaagggttaaggtggtattttcaagaaaaggcagaacaaataatgcaaaattctcagtaatagtgatacatggatatacttccttttaaattctcagctgcaaaataattgtagacaaaataatggcatttaactaaagatggagcatgatctaagtacatagcacatgtgaataaaagaaaagctgacagtatattctggtttcaataaaatgacctatcagaaagtagaatttcatccccaagagtatttcagtttatccaatattgagtaagttctgaaacagttttagaaaaaattttctttttgttaaatgtgatgcactgatcaatttttgtcacagcattttcataccttcatggtggactactagtcactgcttccataaatattgtttacagggtgagatttggtttattcatcttaagtgctgtagcaaactgtggttcgagcaacctgtgggaaatctgtgagagggaatggggtgggagatgtgggggaatggtggtcagactgatgacagatcctagaccaatgtaaagaatgtgtatctgtatataaataatttatcaaatagttttctctttgtgtctgtgttagtgtttttaaagctgctcatttcattttgtccaaccaaaaagaaaagggagataactaatgagcttctagtgatgttcaaaattgctgttaataggcattataccctgcaagttcactgcatgtctgatgcttggtaaaactagtcttccctgtaaaatgcagattacaggtattaaagcaatctagtggtatacccgccccttgccttagtaagaggagcagtgaaatgtatatagttgatgttcagtatttccaagtaccatttttatatagtagcttatttgaccataagtcacacatcaaaaaaagattacccttagtgtatgtgttttaatattagaaaattggcatatgtactttatttttgaaaagggaagagatgggtgtggggtggcaatagcattgtgccattttgtcatagaatgtaaaaattggttaactttacaaatgtcagctagttttgactactaattgggggaaattttagataatttttaaattcaaagttatttataaaatgctagaatttgttttaattttttgtattttgagccacttcacatgaagactcagttgcatttttatcgaatacatttttatcaacagttaaagactatggtggttttttcagagtttggctaagaatgttgttaccatcttctttgtttgtggtacaatattttcagtgcaaaagagatgtcattcagttaaaaagacaaacctctagatgtgtaattacatggaaaatactagcaatgtgaatgcttttgtagtaaccatcttgtagtacctgtgaaatctataactcagaaatggtcagatggtcaggagccagctatgcagcagtataccatctgtttaattattttgtaggtcctgtgtgtggaaccaactataaacccagttctaaagttgtgtatgatggtgaacctttgggaatagttcttatcaacttaattggatacttttagcaaataggaacttaattctcagcactgaacatgaattacttccttggagttttttttcattcatatttttgttgtttccaggaatttatttgatattaatgggcgtaaaacagcatcattgtacttaagctatggatgtttttattttatattttctttatttataactgtgccaagtattattttgctacttaccgtgttattctgtggaaagaaaaacctgtaaagtgtttaataaattagccctccttacataaattaaatgtcaaaattttgtaaaatattaatcagaataaatactgactctt

SEQ ID NO: 124 - DNA, 1903 bp, Homo sapiens
aaaccatgagttgtggaaatgagtttgtggaaacattaaaaaaaattggttatcccaaagctgataatcttaatggagaagactttgactggttgtttgagggcgttgaagatgaatcgtttctgaagtggttttgtgggaatgtgaatgaacagaacgtgttgtctgaaagagaattggaagcttttagcattcttcagaaatcaggcaagcctattctagaaggggcggcattggatgaagctcttaaaacgtgtaaaacttctgatttgaagacacctagactggatgataaagagctggagaaattagaggatgaggttcaaactctactgaaattaaagaacctaaaaattcagcgacgtaataaatgtcaattgatggcttcagtaactagccacaaatctctgaggttaaatgctaaagaagaagaagccactaaaaagctgaagcagagtcaaggaattctaaatgcaatgatcactaagatcagtaatgaacttcaggctcttactgatgaagttacacaattgatgatgttcttcagacattctaatttaggtcaagggacaaatccactggtatttttatcgcaattttccttggaaaaatacctaagtcaggaagagcaaagcacagcagcattaactttgtataccaaaaaacagttctttcagggtatacatgaagtagttgaaagttcaaatgaagacaattttcaacttttagatatacagacaccatctatttgtgataatcaagaaatccttgaggagagacgactagagatggctagactgcagctcgcatacatttgtgctcaacatcagttaattcacttaaaagcaagtaattcgagcatgaagtcaagtataaaatgggcagaggagagtcttcacagcctaaccagcaaggctgtggacaaagaaaatttggatgctaaaatttctagcttgaccagtgagattatgaaacttgaaaaagaggtcactcaaataaaagacagaagtttacctgctgtggtaagagagaatgcccagttattgaatatgccagtggtaaagggagattttgatctgcagattgctaaacaagattattatacagcaagacaagagttagttttaaatcaattaataaaacaaaaggcatcatttgaacttctacagttatcatatgaaattgaattaagaaagcatcgggacatatatcgtcaacttgaaaatttggttcaagaacttagtcaaagtaacatgatgctctacaagcaattagaaatgttaacagatccatcagtttctcaacagataaatccaaggaataccattgatactaaggattattctactcataggctttaccaagttttggagggagagaataagaaaaaagaattgtttctaactcatggaaaccttgaggaagtggctgagaaattgaaacagaatatttctttagtacaagatcagttggcagtatctgctcaagaacattctttctttctgtccaaacggaataaggatgtggacatgctttgtgatactttgtatcaaggaggaaatcagcttttgcttagtgatcaggagttaacagagcagtttcataaagttgaatctcaactgaataagctaaatcatctcctcactgatattcttgctgatgtgaagacaaaaagaaaaactttggcaaataataaattacatcaaatggaaagagaattctatgtatattttttaaaagatgaagattatctgaaagatattgtggagaatttagaaactcaatcaaagattaaggctgttagtcttgaagattgaaaattactgaaaactgaatctttattacgtgtcctcttttatttattagaagactgtgtataataaacactactaaatttttaaaa

SEQ ID NO: 125 - DNA, 215 bp, Homo sapiens
tccaggtgacagtgcgggacccatcaggcaggcccctccgcctgccgcctgtccttcctcatcccatctttgacaatcacgatcgtcaccggattgaggagaaacgtaaaaggacatatgagaccttcaagagcatcatgaagaagagtcctttcagcggacccaccgacccccggcctccacctcgacgcattgctgtgccttcccgcagctca

SEQ ID NO: 126 - DNA, 4039 bp, Homo sapiens
  misc_feature (219)..(219): n is a, c, g, or t
  misc_feature (3032)..(3032): n is a, c, g, or t
  misc_feature (3043)..(3043): n is a, c, g, or t
ctgcaggtagggccctcccaccccttcgccgcgccttacgaggcaagtctcccgcccttctctcagccaacatagaaaagcagcggagttcattctgctgtccggttgctgcacgggctccagcgcttcgcaactttggtttttttccacagatccagtggggtccggacatgggccccgcaggcgaaacgaacgttccagccaccaggaggccacctnattgtttcaaaaataaagactggttcctctcttggtttcagactgctatttttttcatggttggggatcagcgggagacggggaggtgctaggaggagagggcgggaaaagagggctctctcctcttccaatcctctgatcttcctgtgttgggagggtcagattactgtgccccagcccacgtccccccacgacccccgcacccccacctccccccacgaccccccccacctccgagcgggttctgtgcccaggtggcgctggagaaaggaacagcggaccccgcccaagtcattactaatgtagcaatcgtcttgcataaacccaggccacggttcctattggctgaagtcctctgaggtgacgtcatcgggacgtactaagactagggttgggccgagagtcggagccattactgcaggaaaaggtcccggagagctgagcagtcaagatggtggggcccaggtcttgggagacgggcaggattggggacgagaggcaggaagagacgggtcggggggcgaggagaaggcaggggtaggaggcaaagggaatctgaggacccgaaagttggaggtggggttggaaagactggggccctgcggggcaagcgagtctgcagcctgaaacaggagctttgtgggtcagagtttgtgggtcagagtttgtggggctgggatagaaactgggggattggcgttcagatgctgaccacttccctcttctctgagcagtgtgacttcaccgaagaccagaccgcaggtaggttatctctgatccctaccgaggtccacccttagggagagggacaccctccccccagcacctatcctctaatcttaatctgtcatctctttagcacccccatgagattaccccctggattattttctcttcttctggatcctccattttcttttctcactttcttcctccctccccttccactctagatctgatcccaagcactgggtgagttttaggtggtgtgggtatgaaaaaacttggtcacttaatgcctgctgtgtgtggggtctgggagggtgtataaagctgcctgctttcctttgtcctttaatcagctacttctgcctcttttctcctcttgtgataactgtccccgccctcccagcttcgagcacgttgtgaagattgtagagcagtgacctgatattgtgtcagatggggcacagacaggggagtttgctaaggataatgactgtagctatacctctggaagttctcttatatactggaggggtgcgaagtggctggttgggatgtccctagtcccaggctgctgctcccacttccttataaggacaggactgagactgggcggtggcgaattccagccctgagaagtgtagtagcagcagtggagattggcaggcctccgcgcaggaagtgcgagttgtgtaaatggatgttaccaggctgccagaaggggaggaagcctctatatagaacactttgagttgggaggaagagaaatagagccctcttaagtagactttggtgtacagtttggtgcagatatctcgtttcctcagcatgatcaaagttgaatgggcacgagagctctgaggtagggtttggattaaccctcaaatcctgtgttgacattcatctgaatcctagagttcaaggaggccttccagctgtttgaccgaacaggtgatggcaagatcctgtacagccagtgtggggatgtgatgagggccctgggccagaaccctaccaacgcggaggtgctcaaggtcctggggaaccccaagagtgatggtgaggggcctaaagaacaactcctcattgtcatgggcccacattcttcagctaagagcttccctttatcttcataggccccaaactcaagcaagtctggattacgaaatcccatggatttccttgcttttagtggggagtcatctgtcatctctctgttcagttgaggtctctataatcccctgtcctgagaacttgtgttacttctctggcctgacacttcacctcctttatggcagagatgaatgtgaaggtgctggactttgagcactttctgcccatgctgcagacagtggccaagaacaaggaccagggcacctatgaggattatgtcgaaggacttcgggtgtttgacaaggaaggaaatggcaccgtcatgggtgctgaaatccggcatgttcttgtcacactgggtaaggttctgtgtccttgtccttgagctgagatggcaccctaggtacctcacttgtcacccaattccaaaaatgctttctttccccctgcaggtgagaagatgacagaggaagaagtagagatgctggtggcagggcatgaggacagcaatggttgtatcaactatgaaggtaagaggtgaactgcgctttctcagagaaagcagccatatggggcaggtcaagtatagtgtctggggctttccctatccctggacttgggctccaaaaagagccaggaggcaaggtgcagggccctgccagcccagcccaggagtgggaggtcagggcggtataacaggaaaggaagggggtagtagtgtagagggtgggaaggaatgagaagtgaaataatggaatgtctgtcccactgcctgacccctcaccccatgtctttgtacttgtcttcaaccattaatgtctcttccttcctgcagcgtttgtgaggcatatcctgtcggggtgacgggcccatggggcggtacggctcctcccagcctctcctctagttgatctccccagtgtttcttttttccccaacctgtgctctttatcccctgcccttaccctactacnatctgacttcntcctggcatgtttctgcatggagctgactagggaggggagggattctcaaagaggaagaccaacctgggggtacagtacctccttactctagaatgggccctgaggttttacttatgcggccctgggtgctggtgtctgggaacctcaccagcctgtataccagtcttgctttagggtgaccttctggccctggagcatgggtagctggcatagaggggtatgggttgcctgccccattctgctgctatagctgaacagtcctttccccttccctcgctgggcagcttggcaggtaccctaacccaaaactctgtcctctcctcccgccagtggctgacagtagctgtaggtgtagtggagaacttttctgcctctgctgtgttcttgctgcttaggtttgggtgggggactaacagctgctgggaggggagctaggggcatggagaactggtcagactcaaggtggctcctctgcaaactgaccccagggttggttgctgtgggcatgttcccgcttatgctacctttgcagtctggtagtcccctggcccttggcgtacccctccacagccctgttccctggctcatcccacctttcctttccacagagctcgtccgcatggtgctgaatggctgaggaccttcccagtctccccagagtccgtgcctttccctgtgtgaattttgtatctagcctaaagtttccctaggctttcttgtctcagcaactttcccatcttgtctctcttggatgatgtttgccgtcagcattcaccaaataaacttgctctctgggccctcggttcggttctttctttcctgaacagggtaaaggggaagaaggtgagatggtgatgatttctgccctgaggcagagtccaaggtcaatcaatggtgcaggggttgaggaaagctgggggaggccctgtactagccatctgggcttcatttaaaaactactggccccattcatccatcttacacagctacctctt

SEQ ID NO: 127 - DNA, 2149 bp, Homo sapiens
  misc_feature (1603)..(1604): n is a, c, g, or t
  misc_feature (1607)..(1607): n is a, c, g, or t
cgacccgggttccgccgcttgctaccgggctgctccgtgcatctttccccccaggcgtcaggaactgcgcctcatgggcgaggtgaaggtgaaggtgcagccgcctgacgccgatccggtcgaaatagaaaacaggattatagaattatgtcaccagttccctcatggaatcacagaccaagtaattcagaatgaaatgcctcaatatagaagcccagcagcgggcagtagcatcaataggttgttgtctatgggtcagttggatctcttaaggagcaatacgggccttttatatagaataaaggactctcagaatgctggtaaaatgaagggatccgataaccaagaaaaactagtatatcaaatcatagaggatgcaggaaataaaggaatatggagcagagatatccgctataaaagtaatttgccattaacagaaatcaacaaaattctgaagaatctggaaagtaaaaagcttatcaaagctgttaagtctgtagcagcctcaaaaaagaaggtgtatatgctctataacctgcagccagaccggtctgtgactggtggagcctggtacagtgaccaggattttgaatctgaatttgtagaggtgcttaaccaacagtgttttaaattcctacagtccaaggcagaaacagcacgagaaagcaaacagaacccaatgatacaaagaaatagttcatttgcctcatcacatgaagtgtggaaatatatctgcgaattgggaatcagtaaggtagagttatccatggaagacattgaaaccatcctgaatacactcatttatgatggaaaagtggagatgacgattattgcctgcaaaagaaggcacagttggcagtgtagatggacacatgaaactgtacagggcagtcaatccaatcatccctcccacaggtttggtccgggccaccctgtggactctgccccggtttttgatgactgccacgaaggtggtgagatttcaccatctaactgtatttacatgacagagtggctcgaattttaatagagagctatgaactttattgacattttgcaaatgaagttacttagggagcagataatttaattcatgatggaacacgaaatctccttgaaagcaaacttcacaataatggacgtagacttgctgctatgaaaacatattttttttatttatgaagactaaatttatattggtaaaatagccagtagaatatgaaagaaataaggttagtagtgaaattcattcttcaataaataaaacactttgaaactccggaggaccacatctttcaagacttctgatgggcgaagcccaaagatgccaacatacccgtatttaccaagtactatgataatggctagagtataaaaatgttctttttaaagttatttattaagttcttcattggacgcttttttttatatctggttcactaccaccattttctgtttcctactttctcagtggtttcattgaaaagaaattagaaggggttaaaggcaggaatagcaaagagtgcaaacttggggtatgactgggggagagtggaacatgccttttccgcacaatattaattcctttttgtatcagaaaggnnctnttaggagttatgctaccatacttacttcaaacccaatgactactgtcaaggtcatattttcagtacataaatactatcattttcattctaaagaatattttcactgttccttctttcttaaagtcttatgtttcactctttaactcaaatgtattctttgttagaatttaccctagattcttatttaatgtctgcagtagactgaatgtttgtgtgcccccagaattctaatgttgaaatctcatttccaatgtgatggtatttggaggtggggcttttggtaagtgataggtcaggagagtaacagcgctcatgaatgggattagtgcccttatataaagagacccagagagctccatcaccccttctgccatgtgaaagggagaagacaaacatccacgaaccaggaagtgggtcctcaccagaaaacaaatctgtaagcaccttgatcttggacttcccagcctccagaattgtgagaaataaatttctgttgttgatttttttttttttttttttttttttttttttttttttttttt

SEQ ID NO: 128 - DNA, 979 bp, Homo sapiens
cggtgcctggtgcgggagctacggggcccagggattgtgtttaaagtagtgcttctaccaacatgtcccgtggttccagcgccggttttgaccgccacattaccattttttcacccgagggtcggctctaccaagtagaatatgcttttaaggctattaaccagggtggccttacatcagtagctgtcagagggaaagactgtgcagtaattgtcacacagaagaaagtacctgacaaattattggattccagcacagtgactcacttattcaagataactgaaaacattggttgtgtgatgaccggaatgacagctgacagcagatcccaggtacagagggcacgctatgaggcagctaactggaaatacaagtatggctatgagattcctgtggacatgctgtgtaaaagaattgccgatatttctcaggtctacacacagaatgctgaaatgaggcctcttggttgttgtatgattttaattggtatagatgaagagcaaggccctcaggtatataagtgtgatcctgcaggttactactgtgggtttaaagccactgcagcgggagttaaacaaactgagtcaaccagcttccttgaaaaaaaagtgaagaagaaatttgattggacatttgaacagacagtggaaactgcaattacatgcctgtctactgttctatcaattgatttcaaaccttcagaaatagaagttggagtagtgacagttgaaaatcctaaattcaggattcttacagaagcagagattgatgctcaccttgttgctctagcagagagagactaaacattgtcgttagtttaccagatccgtgatgccacttacctgtgtgtttggtaacaacaaacaaacatcatggaggtccctggattgaaaaaggagcctctcccactcctcctaccaccgaagtggttaggactctatataaataaaaacaaggcttttggaaaaaaaaaaaaaaa

SEQ ID NO: 129 - DNA, 1574 bp, Homo sapiens
agaaagccttcgaaagcagctaggccaggaccctttctttgacatgcacatgatggtgtccaagccagaacagtgggtaaagccaatggctgtagcaggagccaatcagtacacctttcatctcgaggctactgagaacccaggggctttgattaaagacattcgggagaatgggatgaaggttggccttgccatcaaaccaggaacctcagttgagtatttggcaccatgggctaatcagatagatatggccttggttatgacagtggaaccggggtttggagggcagaaattcatggaagatatgatgccaaaggttcactggttgaggacccagttcccatctttggatatagaggtcgatggtggagtaggtcctgacactgtccataaatgtgcagaggcaggagctaacatgattgtgtctggcagtgctattatgaggagtgaagaccccagatctgtgatcaatctattaagaaatgtttgctcagaagctgctcagaaacgttctcttgatcggtgaaaccataaggagcccagtgttcctgttcatgaaatctcccttttactggaaaacaggaatattgactaccaaatcacaatgcaattgaagccgtactgcttttttgagcagttattcattccagtgattaaaactgattgtgcagaatattctaagaggtcagaaattggtgtgtataactacatttttagtgatgcaatttattgattagtgagtaagatactgtttttattgagagatttgatttttataaagtaaaaatacggctgcattagggttacaaacagaaaagtgtcttaatgtctaaggagggcatattagctacactacaaaaacaaattttttctgtacttctgaaaagaattttgttgtttctcagctgttttccaaaagcaaaggaagtctttatggtttttttctatttcatgttattgtgatttgtttataagtttgggtggggtgcataccatattcttggttcttaaaatctatcacttttcaccttacacttgatgtgtgaaaactataaaaacaatgtgtgaaacccaggggttctaaaatacaagcatagattttatcagggtgttttgtcaaagcaggttattcagtgattcctccccaccattcttaagaacgttaaataatgctgttgtgttagctctgagtagaaaggaaaaagtaaaacctctgtttggaggtaatattgggttgaattctgactgcccctttctagctggacctttaacaaatcacccaatcttttttgtgtttctctaaagtcatttatacattaaatgtaattatagcaactgtggggttctgttgagaattaagagctaacactatatatgtaaagtttccagtactagtcccagaatttagaatatgctcaacacaaagtaaacagcattatataagtttatatttttgtgagttataaagtactttgatatattctcattaaatctgtaaatcacctctataagtaagtggtaataataaagcagatatttttgtccccatttaaaaaaaaaaaaaaaaaaaaaaa

SEQ ID NO: 130 - DNA, 2131 bp, Homo sapiens
ctctttataatttagtttccatagaagttatatgtgcatttaaaaaaattcaatgctggagcgaccgtgtctggggagccgagccccgcttctcgctgcggtgagcccggactggggcacgcactgcgcagactccccgctgcagtgggcggagtcccacaggccccgcccctcctcccaccctcgttcagcctgtccagacagaagctggggcccagcggaggtagcagcagacgcctgagagcgaggccgaggccctcagggtttggagaccctgacacacccaccttctcacctgggctctgcgtatcccccagccttgagggaagatgaagcctaaactgatgtaccaggagctgaaggtgcctgcagaggagcccgccaatgagctgcccatgaatgagattgaggcgtggaaggctgcggaaaagaaagcccgctgggtcctgctggtcctcattctggcggttgtgggcttcggagcctgatgactcagctgtttctatgggaatacggcgacttgcatctctttgggcccaaccagcgcccagccccctgctatgacccttgcgaagcagtgctggtggaaagcattcctgagggcctggacttccccaatgcctccacggggaacccttccaccagccaggcctggctgggcctgctcgccggtgcgcacagcagcctggacatcgcctccttctactggaccctcaccaacaatgacacccacacgcaggagccctctgcccagcagggtgaggaggtcctccggcagctgcagaccctggcaccaaagggcgtgaacgtccgcatcgctgtgagcaagcccagcgggccccagccacaggcggacctgcaggctctgctgcagagcggtgcccaggtccgcatggtggacatgcagaagctgacccatggcgtcctgcataccaagttctgggtggtggaccagacccacttctacctgggcagtgccaacatggactggcgttcactgacccaggtcaaggagctgggcgtggtcatgtacaactgcagctgcctggctcgagacctgaccaagatctttgaggcctactggttcctgggccaggcaggcagctccatcccatcaacttggccccggttctatgacacccgctacaaccaagagacaccaatggagatctgcctcaatggaacccctgctctggcctacctggcgagtgcgcccccacccctgtgtccaagtggccgcactccagacctgaaggctctactcaacgtggtggacaatgcccggagtttcatctacgtcgctgtcatgaactacctgcccactctggagttctcccaccctcacaggttctggcctgccattgacgatgggctgcggcgggccacctacgagcgtggcgtcaaggtgcgcctgctcatcagctgctggggacactcggagccatccatgcgggccttcctgctctctctggctgccctgcgtgacaaccatacccactctgacatccaggtgaaactctttgtggtccccgcggatgaggcccaggctcgaatcccatatgcccgtgtcaaccacaacaagtacatggtgactgaacgcgccacctacatcggaacctccaactggtctggcaactacttcacggagacggcgggcacctcgctgctggtgacgcagaatgggaggggcggcctgcggagccagctggaggccattttcctgagggactgggactccccttacattcatgaccttgacacctcagctgacagcgtgggcaacgcctgccgcctgctctgaggcccgatccagtgggcaggccaaggcctgctgggcccccgcggacccaggtgctctgggtcacggtccctgtccccgcacccccgcttctgtctgccccattgtggctcctcaggctctctcccctgctctcccacctctacctccacccccaccggcctgacgctgtggccccgggacccagcagagctgggggagggatcagcccccaaagaaatgggggtgcatgctggcctgccccctggcccacccccactttccagggcaaaaagggcccagggttataataagtaaataacttgtctgtaaaaaaaaaaaaaaaaaaaaaaa

SEQ ID NO: 131 - DNA, 5655 bp, Homo sapiens
aaaaaatcctgcggtgcagtttttataccagaaactgataggttggctaaatgaagatcaaaggaaggattttggtttcctggtggacattttgtacagtgctctccggtgctgtgacaatgatatggaaagaaaaaaagtcttggatgatctaaccaaggtggacttgaaatggaattctcttcttaagattattgaaaaggcatgtcctagttcagataaacatgctttagtaactccttggctcaaaggcgatatccttggtgagaaattggtcaacttggcagattgtctttgtaatgaggacttggaatccagggtatcttcagaatctcacttctcagaaagatggactcttctaagcttggtattatcccaacatgttaaaaatgattacttgattggagacgtatatgttgaaagaatcattgttagacttcatgaaactttattcaaaacaaagaaattatcagaagctgaaagcagtgactcatcagtgtcttttatctgtgatgtggcctataactatttcagctcagcgaaaggatgcttgctaatgccatcatctgaagatttattattaactctctttcagttatgtgctcagagcaaagaaaaaacacatttgccagattttcttatctgtaaactgaaaaatacttggctctctggtgtaaatttattggttcatcaaactgacagttcatataaagagagtaccttcctacatttgtctgctctgtggctgaagaaccaagttcaggcttcatctttggatatcaacagtctccaagtcctcttgtctgctgttgatgatttgctaaatacacttctagagagtgaagattcttatcttatgggagtttatattggaagtgtaatgccgaacgacagtgaatgggaaaagatgaggcagtctcttcctatgcagtggttacatagacctcttttagagggaagattgagtttgaattatgaatgtttcaaaacagattttaaggaacaggacataaagacacttcccagccatttgtgtacttcagcattattgagcaaaatggtcttaattgcactgagaaaggaaacagtcttagaaaataatgagcttgagaaaataattgcagaactgctttattcactgcagtggtgtgaagaattagataacccacctatttttctaattggattttgtgaaatacttcaaaaaatgaatattacgtatgataacttacgtgtacttggtaatacgtcgggccttttgcagctgttatttaacaggtccagagaacatggcacactgtggtctcttattattgctaagttgatcctttcccgaagcatttcatctgatgaagtaaaaccacattataagagaaaagaaagtttttttccactaactgaaggcaatttgcataccattcaaagtctatgtccatttttgtcaaaagaagaaaagaaagaatttagtgctcaatgtatacctgctcttttgggctggactaagaaagatctttgcagcactaatggaggttttggacatcttgccattttcaattcttgtctgcaaaccaaaagtatagatgatggagagctattacatggaatattaaaaatcataatatcctggaagaaagagcatgaagatatttttcttttcagttgtaatctatcagaagcaagtccagaggtactgggtgtaaatatagaaataatccggtttctttccctgtttctgaaatactgctcatcccctttggcagagagtgagtgggacttcatcatgtgctccatgttggcttggttggagacaacaagtgagaatcaggcattgtattctattccacttgtgcaactgtttgcctgtgtcagctgtgatttggcctgtgacctcagtgctttctttgattccacaactctggataccattggcaatcttcctgtaaatctaatcagtgaatggaaagaatttttttcccaaggcatccacagtttgcttttacctattttggtgactgttacaggagaaaacaaagatgtgtctgaaacatcctttcagaatgcaatgctgaaacccatgtgtgaaacattaacgtatatctcaaaggaacagctattgagtcacaaacttcctgcaagattagttgctgaccaaaaaacaaacttaccagaatatctccagactttgttaaatacattggccccattactcctcttcagagctaggcctgtgcaaattgctgtttatcatatgctatacaaattgatgcctgaattaccacagtatgatcaggataatctaaagtcatacggagatgaagaagaagagccagccttgtcaccaccagcagcactgatgtctcttcttagcattcaagaggacttactagaaaatgttttggggtgtattcctgttggacagatagttactattaaaccactgagtgaagacttctgttatgttctgggataccttctcacttggaaattaatactaactttcttcaaagctgcatcatcacagcttcgggctttgtattccatgtatcttcggaaaacaaagagtttgaataaattgctctatcacctgttcaggcttatgccagaaaatccaacctatgcagagacagcagttgaggtcccaaataaggaccctaaaacattctttactgaggagctccagctgagtattagagaaacaacaatgcttccataccacattccacacttggcttgttcagtctatcatatgacattaaaagacttgcctgccatggttaggttgtggtggaatagcagtgagaagcgtgttttcaatattgtggatagatttacaagcaagtatgtcagcagtgttctttcttttcaagaaatatcttctgtacaaacaagtacacaactatttaatggcatgacggttaaagctcgagctactactcgagaggtaatggctacttatactattgaggacatagttattgaacttataatacaactgccttcaaattatccactgggttcaataatagtagaaagtgggaaaagagtaggagtagctgttcagcagtggcggaactggatgctgcagttaagcacttacctcacccatcagaatggaagtattatggaaggcttagctttatggaaaaataacgtagacaaacgttttgagggtgttgaagattgcatgatctgtttctcagtcattcacggtttcaactattcccttcccaaaaaagcctgtagaacatgcaagaaaaaattccattcagcctgcttgtacaaatggtttacatctagcaacaaatccacttgtccactgtgtcgtgagacgtttttctgagatttttttcactggaagggatccctgaagtacatcaaacaaaggcattggatttggatccgtctgaaagtgtggatgtggggaagccagtgagcattacttttaaataggaccttctctggaaaattattttggttaatgtaataatcctaaaatcaggtttacttaactttagattgctttgtaaatgtttggaaactttcttttacaaaagaatattacatatttgagagaaaatatttctattaatggtttaatttctttgtatatttaaaaataaatatgaaaaacccctaaattacagaattggaatttgtgaaaagattgcacaactatattattgataaacccattccgtttgttgatctgtgttttagaatagtccaagtgaagcaaaacgaactgagagagctgatttacatctatagatattttaagccttatttattagttatgacaataaattagtattctgatatttgtagattattttaatgataaaaatgacactaagctattaatacggcttgtcttaagatatctggaggcatgctctgaaatcctatataaaagagtttaaactgaactttaaggtgcctccatttatcaagggttatgaaactcagaaaattaaattcttgatgctgacctttttgcttgtgggagaattatttctatatattagtgaaatttgaattgtaaacttgtcagtgaatttatcactctgagcgagtctctagagggtgagaatttgagagaaatagtaatttgattatttcattcatgaagcggagtggtagttatccttctattgagagggaagaaataaatgagtattactgaaacttaaagatcagtggaaaaaaaaaacatttaaaaatgttgtaggagactttcaattttggaagcaaactgagctattcttaccagccaaagttatactaaataagagacttgggggagcaaatgtttttcagccttcagaaatgaaagttaaggattttagcactaggtaaaattcagtataataggctgaagtggagtaagtgaaaacctgccttttgccactcttaaaaattgtgcccaaaatataaaagtgtggaactttagaacttggaataattttattgcagtcttccattacatggaaatagcatatctaatatctaggttacttgagagaccagctaatcatctctgttgcacatgtttaattggcaaaaagcaattcatgataaataaaattactgctttccatctactgggtaaaatgactattgaaatagtatgaatgtggtcagaggattatagttgagagtgaagtactatgtgtgagttatagatctctcgaattatatttatagatgcagtgtcctgcccagttttgtttgcctcctacattttactgtaaaatatttattgtcttctagccttgagcctctgagggtcagtaagtgaagtacagatagcaaaattttactacctcgttaacccttttcttaaaatattctctatctttctatgtctctttctgacatagtaatcccaaaggattgtgttactccccgtgaaagttattacttttcctttaaaaatggttttataataagactgtttaaaacctttccagtattggtacatcttggcttctggcccaaaccccaagcagaaaagaaaatggaataatggagcattgtttttccacattagtattagggcatcagattcttggtgaaacactataattaagtagttataattaaataactgttcttcatacttaggactcttaatacatttctttaagacttgtaagtataattgtaaagcttgttaactgtttatatactaaagaaaaagctttacaagataagactgaaattcagaataccacattaaagttttatctgtacagcgttgacaactctaactaaaaggattacagcccttaaaattttagcttaaggacattttaaaattgcatgagattagcaaaattattaatttaaaaccccaaagtaaattgcaaattttaaaatttatttttgactcttttatcacatgctccaatgtatgtacataagtgtctgtggcttaaataatatgttgttatttgatacatttttgtggtgcaagtaattaatgttattatttgattgttataccatatgtgcccattaaaattctttttaattaaaaatatttcaaatatgcagaaaaataataatataaatgcccttgtacccttcacatactattttgccatatttgcttctgatttttaaataaataaaatgttactcttttgtacttct

SEQ ID NO: 132 - DNA, 3236 bp, Homo sapiens
gacccggccatgcgcggcctcgggctctggctgctgggcgcgatgatgctgcctgcgattgcccccagccggccctgggccctcatggagcagtatgaggtcgtgttgccgcggcgtctgccaggcccccgagtccgccgagctctgccctcccacttgggcctgcacccagagagggtgagctacgtccttggggccacagggcacaacttcaccctccacctgcggaagaacagggacctgctgggttccggctacacagagacctatacggctgccaatggctccgaggtgacggagcagcctcgcgggcaggaccactgcttataccagggccacgtagaggggtacccggactcagccgccagcctcagcacctgtgccggcctcaggggtttcttccaggtggggtcagacctgcacctgatcgagcccctggatgaaggtggcgagggcggacggcacgccgtgtaccaggctgagcacctgctgcagacggccgggacctgcggggtcagcgacgacagcctgggcagcctcctgggaccccggacggcagccgtcttcaggcctcggcccggggactctctgccatcccgagagacccgctacgtggagctgtatgtggtcgtggacaatgcagagttccagatgctggggagcgaagcagccgtgcgtcatcgggtgctggaggtggtgaatcacgtggacaagctatatcagaaactcaacttccgtgtggtcctggtgggcctggagatttggaatagtcaggacaggttccacgtcagccccgaccccagtgtcacactggagaacctcctgacctggcaggcacggcaacggacacggcggcacctgcatgacaacgtacagctcatcacgggtgtcgacttcaccgggactactgtggggtttgccagggtgtccgccatgtgctcccacagctcaggggctgtgaaccaggaccacagcaagaaccccgtgggcgtggcctgcaccatggcccatgagatgggccacaacctgggcatggaccatgatgagaacgtccagggctgccgctgccaggaacgcttcgaggccggccgctgcatcatggcaggcagcattggctccagtttccccaggatgttcagtgactgcagccaggcctacctggagagctttttggagcggccgcagtcggtgtgcctcgccaacgcccctgacctcagccacctggtgggcggccccgtgtgtgggaacctgtttgtggagcgtggggagcagtgcgactgcggcccccccgaggactgccggaaccgctgctgcaactctaccacctgccagctggctgagggggcccagtgtgcgcacggtacctgctgccaggagtgcaaggtgaagccggctggtgagctgtgccgtcccaagaaggacatgtgtgacctcgaggagttctgtgacggccggcaccctgagtgcccggaagacgccttccaggagaacggcacgccctgctccgggggctactgctacaacggggcctgtcccacactggcccagcagtgccaggccttctgggggccaggtgggcaggctgccgaggagtcctgcttctcctatgacatcctaccaggctgcaaggccagccggtacagggctgacatgtgtggcgttctgcagtgcaagggtgggcagcagcccctggggcgtgccatctgcatcgtggatgtgtgccacgcgctcaccacagaggatggcactgcgtatgaaccagtgcccgagggcacccggtgtggaccagagaaggtttgctggaaaggacgttgccaggacttacacgtttacagatccagcaactgctctgcccagtgccacaaccatggggtgtgcaaccacaagcaggagtgccactgccacgcgggctgggccccgccccactgcgcgaagctgctgactgaggtgcacgcagcgtccgggagcctccccgtcctcgtggtggtggttctggtgctcctggcagttgtgctggtcaccctggcaggcatcatcgtctaccgcaaagcccggagccgcatcctgagcaggaacgtggctcccaagaccacaatggggcgctccaaccccctgttccaccaggctgccagccgcgtgccggccaagggcggggctccagccccatccaggggcccccaagagctggtccccaccacccacccgggccagcccgcccgacacccggcctcctcggtggctctgaagaggccgccccctgctcctccggtcactgtgtccagcccacccttcccagttcctgtctacacccggcaggcaccaaagcaggtcatcaagccaacgttcgcacccccagtgcccccagtcaaacccggggctggtgcggccaaccctggtccagctgagggtgctgttggcccaaaggttgccctgaagccccccatccagaggaagcaaggagccggagctcccacagcaccctaggggggcacctgcgcctgtgtggaaatttggagaagttgcggcagagaagccatgcgttccagccttccacggtccagctagtgccgctcagccctagaccctgactttgcaggctcagctgctgttctaacctcagtaatgcatctacctgagaggctcctgctgtccacgccctcagccaattccttctccccgccttggccacgtgtagccccagctgtctgcaggcaccaggctgggatgagctgtgtgcttgcgggtgcgtgtgtgtgtacgtgtctccaggtggccgctggtctcccgctgtgttcaggaggccacatatacagcccctcccagccacacctgcccctgctctggggcctgctgagccggctgccctgggcacccggttccaggcagcacagacgtggggcatccccagaaagactccatcccaggaccaggttcccctccgtgctcttcgagagggtgtcagtgagcagactgcaccccaagctcccgactccaggtcccctgatcttgggcctgtttcccatgggattcaagagggacagccccagctttgtgtgtgtttaagcttaggaatgccctttatggaaagggctatgtgggagagtcagctatcttgtctggttttcttgagacctcagatgtgtgttcagcagggctgaaagcttttattctttaataatgagaaatgtatattttactaataaattattgaccgagttctgtagattcttgttaga

SEQ ID NO: 133 - DNA, 2667 bp, Homo sapiens
tctgagaggcgaggccgggtgaggcggcgagggcggcccgacgggcgcgggacgggacggggcagcgagggcgccgggagccgcggcccggaatcggggcgcttcgccccgggccccccagcatgaagaccccggcggacacagggtttgccttcccggattgggcctacaagccagagtcgtcccctggctcaaggcagatccagctgtggcactttatcctggagctgctgcggaaggaggagtaccagggcgtcattgcctggcagggggactacggggaattcgtcatcaaagaccctgatgaggtggcccggctgtggggcgttcgcaagtgcaagccccagatgaattacgacaagctgagccgggccctgcgctattactataacaagcgcattctgcacaagaccaaggggaaacggttcacctacaagttcaatttcaacaaactggtgctggtcaattacccattcattgatgtggggttggctgggggtgcagtgccccagagtgccccgccagtgccgtcgggtggtagccacttccgcttccctccctcaacgccctccgaggtgctgtcccccaccgaggacccccgctcaccaccagcctgctcttcatcttcatcttccctcttctcggctgtggtggcccgccgcctgggccgaggctcagtcagtgactgtagtgatggcacgtcagagctggaggaaccgctgggagaggatccccgcgcccgaccacccggccctccggatctgggtgccttccgagggcccccgctggcccgcctgccccatgaccctggtgtcttccgagtctatccccggcctcggggtggccctgaacccctcagccccttccctgtgtcgcctctggccggtcctggatccctgctgccccctcagctctccccggctctgcccatgacgcccacccacctggcctacactccctcgcccacgctgagcccgatgtaccccagtggtggcggggggcccagcggctcagggggaggctcccacttctccttcagccctgaggacatgaaacggtacctgcaggcccacacccaaagcgtctacaactaccacctcagcccccgcgccttcctgcactaccctgggctggtggtgccccagccccagcgccctgacaagtgcccgctgccgcccatggcacccgagaccccaccggtcccctcctcggcctcgtcatcctcttcttcttcttcctccccattcaagtttaagctccagcggcccccactcggacgccggcagcgggcagctggggagaaggccgtagccgctgctgacaagagcggtggcagtgcaggcgggctggctgagggggcaggggcgctagccccaccgcccccgccaccacagatcaaggtggagcccatctcggaaggcgagtcggaggaggtagaggtgactgacatcagtgatgaggatgaggaagacggggaggtgttcaagacgccccgtgccccacctgcaccccctaagcctgagcccggcgaggcacccggggcatcccagtgcatgcccctcaagctacgctttaagcggcgctggagtgaagactgtcgcctcgaagggggtgggggccccgctgggggctttgaggatgagggtgaggacaagaaggtgcgtggggaggggcctggggaggctggggggcccctcaccccaaggcgggtgagctctgacctccagcatgccacggcccagctctccctggagcaccgagactcctgagggctgtgggcaggggacctgtgtgccccgcaccccccatgcttcttttgctgccttaagccccctatgccctggaggtgagggcagctctcttgtctcttccctgcctcctcccttttccctccccacattttgtataaaactttaatttcttttttttaaaaatggtgggggtgggtgggtgcccagggctaggggctattccctgtctctgtgggtttctaagctctgggcaaattggtggtagggggagggagggggaagttaagggggtcacctccattctggggaatttatatttgaattgaggctttggccttaacacccaggaacttttctattacaatcgcttaggaagtaaagccttgtctccctccctgttctctgcctcttgtacccctctgacccacccgctctgccccactcccagccctcctcagccccagccctgcctgccctgcccctccagggggccatgagtgcctaggtttctcataccccacaaggtcacagcaggggagggagggacaattttataatgaaccaaaaattccatgtgttggggggtggggggcggaggagggtgaggggtgccgcccatgggccacaaatctctacaagtgcctgctatccctctcccactccccaccccagcaccggtccaaccccttcatccccagctgctcctaggactggcccatgggcaggcgggtggggggatgggaagggggtgccctgaaaccaaactggaagccccctctgcctcccagctggggcctctggggtggggtggggggctgtggtcaagccttattctgtattggggactgagggtggggggagtagaggggccgctggagaatgtattcaaaacaataaactttggacctttggaaaa

SEQ ID NO: 134 - DNA, 3820 bp, Homo sapiens
agcatcacgccgaggcccattttccagacgaccacgacgaggccggggtcacgaactctggcgccccttaccagcttccagtctctcgaggtggccagtgtggtgcttggtccttgtttccaggatggacttccccagctccctccgccctgcgttgtttctgaccggcccccttggtctgagcgacgtccctgacctctctttcatgtgcagctggcgagacgcactgactctgccagaggcccagccccagaactcagagaatggggcactgcatgtgaccaaggacctgctgtgggagccggcaacccctgggcctctccccatgctgcctcccctcatcgatccctgggaccctggcctgactgcccgggacctgcttttccgcggagggtaccggtatcggaagcggccccgagtcgtgctggatgtgactgagcagatcagccggttcctcttggatcatggagacgtagcctttgcgcccctggggaagctgatgctggagaatttcaagctggagggagcggggagccgcactaagaagaagacagtggtcagtgtgaagaagctgctccaggacctcggtggacaccagccctgggggtgtccctgggcttacctcagcaaccgacagcgccgcttctctatcctcgggggccccatcctgggcacgtcggtggcgagccacttggcagagctgctgcacgaggagctggtgctgcggtgggagcagctgcttctggatgaggcctgcactgggggcgcgctggcctgggttcctggaaggacaccccagttcgggcagctggtctaccctgctggaggcgcccaggacaggctgcatttccaagaggtcgttctgaccccaggtgacaatccccaattccttgggaaacctggacgcatccagctccagggacctgtccggcaagtggtgacatgcaccgtccagggagaaagtaaggcccttatatacactttcctccctcactggctgacctgctacctgacccctggccctttccatccctcctcagctctgctggccgtccgctctgactaccactgtgccgtgtggaagtttggtaaacagtggcagccaacccttctgcaggcgatgcaggtggagaaaggggccacggggatcagcctcagccctcacctgcccggggagctggccatctgcagccgctcgggagccgtctgcctgtggagccctgaggatgggctgcggcaaatctacagggaccctgagaccctcgtgttccgggactcctcttcgtggcgttgggcagacttcactgcgcaccctcgggtgctgaccgtgggtgaccgcaccggagtgaagatgctggacactcagggcccgccgggctgtggtctgttgctttttcgtttgggggcagaggcttcgtgccagaaaggggaacgtgtcctgcttacccagtacctggggcactccagccccaaatgcctcccccctactcttcatctcgtctgtacccagttctctctctacctagtggacgagcgccttcccctggtgccgatgctgaagtggaaccatggcctcccctccccgctcctgctggcccgactgctgcctccgccccggcccagctgcgtgcagcccctgctcctcggaggccagggtgggcagctgcagctgctgcacctggcaggagaaggggcgtcggtgccccgcctggcaggccccccccagtctcttccttccaggatcgactccctccctgcatttcctctgctggagcctaagatccagtggcggctgcaggagcgcctgaaagcaccgaccataggtctggctgccgtcgtcccgcccttgccctcagcgcccacaccaggcctggtgctcttccagctctcggcggcgggagatgtcttctaccagcagctccgcccccaggtggactccagcctccgcagagatgctgggcctcctggcgacacccaacctgactgccatgcccccacagcttcctggacctcccaggacactgccggctgcagccagtggctgaaggccctgctaaaagtgcccctggctcctcctgtgtggacagcacccaccttcacccaccgccagatgctgggcagcacagagctgcggagggaggaagaggaagggcagcggctgggtgtgctccgcaaggccatggcccgagggcagctcctgctgcagagagacctgggctccctccctgcggcagagccaccccctgcacccgagtcaggcctagaggacaagctcagtgagcgcctgggggaagcctgggcaggccgaggggctgcctggtgggagaggcagcagggcaggacctcggagcccgggagacagaccaggcggcccaagcgccggacccagctgtccagcagcttttcgctcagtggccatgtggatccgtcagaggacaccagctcccctcatagccctgagtggccacctgctgatgctctgcccctgccccccacgaccccgccctcccaggagttgactccggatgcatgcgcccagggcgtcccatcagagcagcggcagatgctccgtgactacatggccaagctaccaccccagagggacaccccaggctgtgccaccacacctccccactcccaggcctccagcgtccgggccactcgctcccagcagcacacacccgtcctctctagctctcagcccctccggaagaagcctcgaatgggcttctgaggacacaaggtgggctgccctcaagccccagagagcccctcatccttcctctgggaccagatgtgccttccacagttgaaacttgagaagcagagctcgccaccttctggaggccactgtgatgatgagccaagcaatttggagccaagttgaagggacagggcaacaaaatacagtagtagtttcttttgtattttgtatattcgcctgaagatcatcccgcaaggcaggctggaggtgccggtgggcctgtgttgctgggattttagtctgtgctgggaggcagggctccgtgcgcctcagctgtgggggcctcaggcaggtccctcagttctcacgccttcctgtccagtggaatgggggccaggagtgctggctcctcgtgtttggtgagggtggagtgaggcccctgcagagctgctgatgaggtgggcacagcggccgttggcagctgctgttgtgggttgctttgtcaatctctgccccggtctgatgtttcctacagggagatgccgtggatccaggttcagggactaaatacacttggcagctgaagatgaattggaatggtcacgttttttaggctggacagcgtcccgccacagctactacctgacactgagctcatgcagagagatgatggctgatgttccttctcccttgggacatgggtctggcacctgtgggctgtcgatagtgccctctgagcagagggtcacggtcatgtcagtttgggggaattctctgttgtgcctcagagactcccccctttctttcctccctccccttctcattttgatgtctaaagcatcaagtccctcttcctcagagtttctctagctgcagtggaagattctgttttcctgtggggaaaatgctcacttgagattttgcagggacccgggtctgtctggtttctgatgacatagtaagagaaaggtcttttttcaggttggctggtgaaaggaattgcatgtgactcacacaaacaggagctagcccaatcatacactgactcgcgtgggtgtttaaatgtttatcatgcctaagggagacatttataattaaaccatttatgctacataa

SEQ ID NO: 135 - DNA, 2517 bp, Homo sapiens
ggaattccgtggccgggactttgcaggcagcggcggccgggggcggagcgggatcgagccctcgccgaggcctgccgccatgggcccgcgccgccgccgccgcctgtcacccgggccgcgcgggccgtgagcgtcatggccttggccggggcccctgcgggcggcccatgcgcgccggcgctggaggccctgctcggggccggcgcgctgcggctgctcgactcctcgcagatcgtcatcatctccgccgcgcaggacgccagcgccccgccggctcccaccggccccgcggcgcccgccgccggcccctgcgaccctgacctgctgctcttcgccacaccgcaggcgccccggcccacacccagtgcgccgcggcccgcgctcggccgcccgccggtgaagcggaggctggacctggaaactgaccatcagtacctggccgagagcagtgggccagctcggggcagaggccgccatccaggaaaaggtgtgaaatccccgggggagaagtcacgctatgagacctcactgaatctgaccaccaagcgcttcctggagctgctgagccactcggctgacggtgtcgtcgacctgaactgggctgccgaggtgctgaaggtgcagaagcggcgcatctatgacatcaccaacgtccttgagggcatccagctcattgccaagaagtccaagaaccacatccagtggctgggcagccacaccacagtgggcgtcggcggacggcttgaggggttgacccaggacctccgacagctgcaggagagcgagcagcagctggaccacctgatgaatatctgtactacgcagctgcgcctgctctccgaggacactgacagccagcgcctggcctacgtgacgtgtcaggaccttcgtagcattgcagaccctgcagagcagatggttatggtgatcaaagcccctcctgagacccagctccaagccgtggactcttcggagaactttcagatctcccttaagagcaaacaaggcccgatcgatgttttcctgtgccctgaggagaccgtaggtgggatcagccctgggaagaccccatcccaggaggtcacttctgaggaggagaacagggccactgactctgccaccatagtgtcaccaccaccatcatctcccccctcatccctcaccacagatcccagccagtctctactcagcctggagcaagaaccgctgttgtcccggatgggcagcctgcgggctcccgtggacgaggaccgcctgtccccgctggtggcggccgactcgctcctggagcatgtgcgggaggacttctccggcctcctccctgaggagttcatcagcctttccccaccccacgaggccctcgactaccacttcggcctcgaggagggcgagggcatcagagacctcttcgactgtgactttggggacctcacccccctggatttctgacagggcttggagggaccagggtttccagagtagctcaccttgtctctgcagccctggagccccctgtccctggccgtcctcccagcctgtttggaaacatttaatttatacccctctcctctgtctccagaagcttctagctctggggtctggctaccgctaggaggctgagcaagccaggaagggaaggagtctgtgtggtgtgtatgtgcatgcagcctacacccacacgtgtgtaccgggggtgaatgtgtgtgagcatgtgtgtgtgcatgtaccggggaatgaaggtgaacatacacctctgtgtgtgcactgcagacacgccccagtgtgtccacatgtgtgtgcatgagtccatctctgcgcgtgggggggctctaactgcactttcggcccttttgctcgtggggtcccacaaggcccagggcagtgcctgctcccagaatctggtgctctgaccaggccaggtggggaggctttggctggctgggcgtgtaggacggtgagagcacttctgtcttaaaggttttttctgattgaagctttaatggagcgttatttatttatcgaggcctctttggtgagcctggggaatcagcaaaaggggaggaggggtgtggggttgataccccaactccctctacccttgagcaagggcaggggtccctgagctgttcttctgccccatactgaaggaactgaggcctgggtgatttatttattgggaaagtgagggagggagacagactgactgacagccatgggtggtcagatggtggggtgggccctctccagggggccagttcagggcccagctgccccccaggatggatatgagatgggagaggtgagtgggggaccttcactgatgtgggcaggaggggtggtgaaggcctcccccagcccagaccctgtggtccctcctgcagtgtctgaagcgcctgcctccccactgctctgccccaccctccaatctgcactttgatttgcttcctaacagctctgttccctcctgctttggttttaataaatattttgatgacgttaaaaaaaggaattcgatat

SEQ ID NO: 136 - DNA, 4546 bp, Homo sapiens
taccagtttgaatacatggcccagcacctggtgtttgccaactgcattcctttgatcctaaagttcttcaatcaaaacatcatgtcctacatcactgccaagaacagcatttctgtcctgaatgaaagtggcgcgccgcccctgacgttacccggatcggagaggttggaattcagattacggctgcgattcgggtgtctcggaccccggtgtgcaccggaccacggggaggcggctccaaaggcgcggtgaacgttggtgagggagggcagctctgcgccccaagagatggctcacaacaagatcccgccgcggtggctgaactgtccccggcgcggccagccggtggcaggaagattcttacctctgaagacaatattaggaccaagatatgatagtcaagttgctgaagaaaatcggttccatcccagcatgctctcaaattacctaaagagcctaaaggttaaaatgggcttgttggtggacctgacaaatacttcaaggttctatgaccgaaatgacatagaaaaagaaggaatcaaatatataaaacttcagtgtaaaggacatggtgagtgccctaccactgagaatactgagacctttattcgtctgtgtgagcggtttaatgaaagaaatccgcctgaacttataggtgttcattgtactcatggcttcaatcgcactggtttcctcatatgtgcctttttggtggagaaaatggattggagtatcgaagcagcagttgctacttttgcccaagccagaccaccaggaatctacaagggtgattatttgaaggaactttttcgtcggtatggtgacatagaggaagcaccacccccacctctattgccagattggtgttttgaggatgatgaagacgaagatgaggatgaggatggaaagaaggaatcagaacccgggtcaagtgcttcttttggcaaaaggagaaaagaacggttaaaactgggcgctattttcttggaaggtgttactgttaaaggtgtaactcaagtaacaacacaaccaaagttaggagaggtacagcagaagtgtcatcaattctgtggctgggaagggtctggattccctggagcacagcctgtttccatggacaagcaaaatattaaacttttagacctgaagccatacaaagtaagctggaaagcagatggtactcggtacatgatgttgattgatggcacaaatgaagtttttatgattgatagagacaattcagtatttcatgtttcaaatctggaatttccatttcgtaaagatcttcgtatgcatttatcaaatactctcttggatggcgagatgattattgacagagtaaatggacaggctgttcctagatatttgatatatgacataattaaattcaattcacagcccgttggagattgtgattttaatgttcgtctgcagtgtatagaacgagaaattataagtcctcgacacgaaaaaatgaagactgggctcattgacaaaacacaggaaccatttagcgtcagaaataagccgttttttgacatctgtacttcaagaaagctacttgaaggaaattttgccaaagaagtgagccatgaaatggatggacttatttttcagcctactggaaaatacaaacctggtcgatgtgatgatattttgaaatggaagcctcccagtctgaattctgtggattttcgtctaaaaataaccagaatgggaggagaagggttacttcctccgaatgttggcctcctgtatgttggaggttatgaaagaccctttgcacaaatcaaggtgacaaaagagctgaaacagtatgacaacaaaattatagaatgcaaatttgagaacaacagctgggtcttcatgagacagagaacagacaaaagttttcctaatgcctacaacactgccatggctgtgtgtaacagcatctcaaaccctgtcaccaaggagatgctgtttgagttcatcgacagatgtactgcagcttctcaaggacagaagcgaaaacatcatctggaccctgacacggagctcatgccaccaccacctcccaaaagaccacgccctttaacctaagacctgcctgtgacttgagggttaagaagaaagaggaatgaggaaaaaacgctgttgcccatttttgtcgccgagaaattgaaaaacgactgtggcttgatgttgatacacatttgaaattttttttaaaaaaaaagaattatcgtagccagcctgtaaatacttgatgcattcgtttcctcagtgctgcaatacatcatggacttaaacatcttatttatctgataaactcagccttaccttgtggaatctgaagattgaaatatccaaaggtttaaacaagatggaaatcaatgaaaaagaggccttgtttatatatgggtagcttcacatttaatttataaagttaacaatctggaaactgtgagcccataaaacagtattttttagaagttgtgttacaactgtagcaaattttccttttaaaaaatccaggcaatggcattaaacattcttgctatcatttaccatggatttcctacatttctgagatccctgtattcaaaaacaaatgacagggttgttaagttgtactatattaaacaacttggtctggtttatatcattttaacaagttttttggaaatgtaaaagaaaaaagtaaagctccatttttgtgaattgcattgtttctaaaggaagtattttgagtattttcatctgtttgtattgtttcgactatgatatcagatatccagtgtgtccattctggcagtggttttgagttacttcatggaacttggacatacaccaccaggtcctttatgtgttgttctcctgggagacttctttttttaaatgccaggctacttctgctttacctcagtggtatcagcacattgttaattacgttaaaacacacaactcactgtgatctatgggagtgatatcaaatacaaacgatgttgtgttccttctctcgaacaaaacagcaaagggaatgccagctaacttctttgattagaaggtaatgtcatggaatagaatgctgtcaccagaaaatgctctcccactgctagataaatgcagaggcaaagtgtagacatctgtaggaactaaatatcaaggaaatcaagacatttattttcaaagcgagaattctatctacattctattctgcggatgttatttctgttatacatctgaattttaaaatgtttactgatagataatggatttaaagggcggctaattgattgtctgccattgttgataaactgttctaattggtttgtgaaagaactctgagaattagctaaatggaggctagtgtatttatttttagaggtacatgttttaagtaaatgtatttaaaacaaattttcatggtctgaattgtatatgtaaatgcatatctgtgtaagtatatgcaagtgtatattctttctactgatttcagtcagacacgaaatccaactgaattacccggtagactgaatatctgacgggatttctatatggacatagcacagatgaaccaaaaatgtatttatattcacctgagttttaatgtttttaaacaaagttttctcctgcagtgcttttctatatgaaatagttgagtcaagcttgggcttttttcttcgttgttcccaagtcatgtaatgtatagtgaatttatccaaaacgccattgtaacgttttttactagagtgtttttgcacatttgggcgctaaagggattaaaacaactgatgccacaatgactattgaaggagggaaaattctcaaggttccatagtatctttacaaaatggattaaaaaaaaatgcctatgcaacttcaaatagtctgatgcctgcttccccaggacgagtgactcttccacggtgtgctgctttccctccgagcctgtggaaaggcagagcccttttgcagatacgaaagcaagcttttgccaatgatctttaatggagttaaaatgtttatggtaattgtaacctttcaaatgagttacgtgaaaagagcatctcacttttaatacacccagatattttcttcaagtctttgcgcatttttagcaggacttaattttcctaaatttattctttcctttcaattatagtgacatagagtagttggccttataagtagatcccatttagcccctgaacataataccatctgcagtattataaaagtcatttagaaggtcagggggataatctagaggcaggattttggacattgtgaaggaaatgtgctccttctcagctcacttcaataactattttctgagactgaagttttttagacaagaataagaaaactttgctttcttcagttatcacatgtgaaagcttttgctttttgttaggaaaaggtgtggatgactctactgcgtggatggttacatttgctttccgtgaaatgctcagaaaatgtcaggacattccttttccaattgtgtgtcagtgcgtattgtaataaaactactgatggaattccggaaaaaaaaaaaaaa

SEQ ID NO: 137 - DNA, 1587 bp, Homo sapiens
gcgcggaggcccggcgtgacaagcggcccagactcccgtgggcgccgcacacctgttgtttgcagcagccagcgacccgcactaccgctctcggcgggcggggaagcggccgcagcggagccgacccggcaggtggccgcgggcggggccggcgagcgaaagtgcgcgggggcccgaccaccgcggggccgggacgcgacgcgatggcggcggcagagcccgcgagctcgggccagcaggcgccggcagggcaggggcagggccagcggccgccgccgcagcctccgcaggcgcaagccccgcagccgcccccgccgccgcagctcgggggcgcggggggcggcagcagcaggcacgagaagagcctggggctgctcactaccaagttcgtgtcgctgctgcaggaggccaaggacggcgttctggatctcaaagcggctgctgatactttggctgtgaggcaaaaaaggagaatttatgatatcaccaatgtcttagagggaattgacttgattgaaaaaaagtcaaaaaacagtatccagtggaaaggtgtaggtgctggctgtaatactaaagaagtcatagatagattaagatatcttaaagctgaaattgaagatctagaactgaaggaaagagaacttgatcagcagaagttgtggctacagcaaagcatcaaaaatgtgatggacgattccattaataatagattttcctatgtaactcatgaagacatctgtaattgctttaatggtgatacacttttggccattcaggcaccttctggtacacaactggaggtacccattccagaaatgggtcagaatggacaaaagaaataccagatcaatctaaagagtcattcaggacctatccatgtgctgcttataaataaagagtcgagttcatctaagcccgtggtttttcctgttcccccacctgatgacctcacacagccttcctcccagtccttgactccagtgactccacagaaatccagcatggcaactcaaaatctgcctgagcaacatgtctctgaaagaagccaggctctgcagcagacatcagctacagatatatcttcaggatctattagtggagatatcattgatgagttaatgtcttctgacgtgtttcctctcttaaggctttctcctaccccggcagatgactacaactttaatttagatgataacgaaggagtttgtgatctgtttgatgtccagatactaaattattagattccatggaaacttgggactgttatctacctctaactgtgtaacattttagacttcttaataacctaaatatttaaaataatgaatgtaacaccttttgttcactgattctgaagtgttcttccctaatacttctttacttcacaaaacttcaaccataaaaacaaagggctctgattgctttaggggataagtgatttaatatccacaaacgtccccactccccaaaagtaactatatctggatttcaacttttcttctaattgtgaatccttctgtttttcttcttaaggaggaagtaaggacactacaggtcatcaaaacagtggccaaggactcattactg

SEQ ID NO: 138 - DNA, 1640 bp, Homo sapiens
ggatccacgagctggagtgattagagccctggaagggaattgttactcccgtggagaagtccccttttcctggcagtcgtctgcactgtacacgctggatgcctctctccatccaccccactcactcgctcctctctcacctcctctctccctctcctgcattgatttttttttttcctttttagttgactgaaacaaaacaaaacaaaagggccactggatgtctgccttcttggggggtgagccagacagactgacaaacaaacagccccaactgtgttcgggggagggtttcgcctcccgttttgcccggcagcagcagcatggacgtgttggctagttatagtatattccaggagctacaacttgtccacgacaccggctacttctcagctttaccatccctggaggagacctggcagcagacatgccttgaattggaacgctacctacagacggagccccggaggatctcagagacctttggtgaggacttggactgtttcctccacgcttcccctcccccgtgcattgaggaaagcttccgtcgcttagaccccctgctgctccccgtggaagcggccatctgtgagaagagctcggcagtggacatcttgctctctcgggacaagttgctatctgagacctgcctcagcctccagccggccagctcttctctagacagctacacagccgtcaaccaggcccagctcaacgcagtgacctcattaacgcccccatcgtcccctgagctcagccgccatctggtcaaaacctcacaaactctctctgccgtggatggcacggtgacgttgaaactggtggccaagaaggctgctctcagctccgtaaaggtgggaggggtcgcaacagctgcagcagccgtgacggctgcgggggccgttaagagtggacagagcgacagtgaccaaggagggctaggggctgaagcatgtcccgaaaacaagaagagggttcaccgctgtcagtttaacgggtgccggaaagtttatacaaaaagctcccacttaaaggcccaccagaggactcacacaggtgagaagccttataagtgctcatgggagggatgtgagtggcgttttgcacgaagcgatgagctcacgaggcactacaggaaacacacaggtgcaaagcccttcaaatgcaaccactgcgacaggtgtttttccaggtctgaccatcttgccctccacatgaagagacatatctaaaaaaccgaaaggccagagttgccatggcatcggctagtgtctaaaggaaacgccatgaggcagggggctggacttcaggcggggacccattgcctcgcagaagaaagctctcacttataaacctctgtacacacacacacacacacacacatatacacacactcacagacccacacacatacacactgtcatgcactcaactatatttaaaatatatacgtctattctttatgccttgccctagccagatggaagaagatgaagaaggaaaccaggtgaactcagcaaggcagactggctgcttacttcagcactattggaattatttcccgctgttgccaatggaaatcaaagaaaatggatgtgacgtctgtgcaggtggacggcagtccgaggggcttatttcac

SEQ ID NO: 139 - DNA, 1413 bp, Homo sapiens
ggtgagtttccggggcgacccaggtcctccggcggaacggggagcctctgtcggccgcggaagcctggagtgggcggtacgcagacgcgcgcggcgagacccgctgtctgctcagcggactctgcccgcccccacctccccctgcgtcgggccgacatgaaggactcgctggtgctgctgggccgtgtcccggcgcacccggactcccgttgctggttcctggcctggaaccccgcggggaccctgctggcctcgtgcggcggcgaccggagaatccgcatctggggcacggagggtgacagctggatctgcaagtctgtcctttctgaaggccaccagcgcaccgtgcggaaggtagcctggtccccctgcggtaattacctggcctctgccagctttgatgctaccacttgcatttggaagaagaaccaggatgactttgagtgtgtaaccactctcgagggccatgaaaatgaggtcaagtcagtggcttgggccccatctggcaacctcctggccacttgcagccgagataagagcgtttgggtctgggaagttgatgaagaggatgagtatgaatgtgtcagtgttctcaactcccacacacaggatgtcaagcatgtggtttggcacccaagtcaggagctcttagcttctgccagctatgatgacacagtgaagctgtaccgggaggaagaggatgactgggtatgctgtgccacccttgagggccatgaatccactgtgtggagcttggcctttgacccgagtggccagcgcctggcgtcttgtagtgatgaccgtactgtgcgtatctggcgtcagtatctaccaggcaatgaacaaggggtggcatgcagcggctctgaccccagttggaaatgtatctgtactttgtccggcttccactcaaggaccatttatgacattgcttggtgtcagctgacaggggctctggccacagcttgtggggatgacgcgatccgcgtgtttcaggaggatcccaactcggatccacagcagcccaccttctccctgacagcccacttgcatcaggcccattcccaggatgtcaactgtgtggcctggaaccccaaggagccagggctactggcctcctgcagtgatgatggggaggtggccttctggaagtatcagcggcctgaaggcctctgagctaccacgtctttggacagagtaatgactccccagaaaacgtcatataagacttttaccagcccctgagaggaccaggaggagcatccttgaccttcatttaacttggctcacttctcttcagacttgggtagaagtgcagagccacagaattgctttccttccccgcctttgacatgaggccttcagtaaagagctacagaacatgaaaaaaaaaaaaaaaaaaaaaaaaaaaaa

SEQ ID NO: 140 - DNA, 781 bp, Homo sapiens
ggaacatggcggatcggctcacgcagcttcaggacgctgtgaattcgcttgcagatcagttttgtaatgccattggagtattgcagcaatgtggtcctcctgcctctttcaataatattcagacagcaattaacaaagaccagccagctaaccctacagaagagtatgcccagctttttgcagcactgattgcacgaacagcaaaagacattgatgttttgatagattccttacccagtgaagaatctacagctgctttacaggctgctagcttgtataagctagaagaagaaaaccatgaagctgctacatgtgtggaggatgttgtttatcgaggagacatgcttctggagaagatacaaagcgcacttgctgatattgcacagtcacagctgaagacaagaagtggtacccatagccagtctcttccagactcatagcatcagtggataccatgtggctgagaaaagaactgtttgagtgccattaagaattctgcatcagacttagatacaagccttaccaacaattacagaaacattaaacactatgacacattacctttttagctatttttaatagtcttctattttcactcttgataagcttataaatcatgattgaatcagctttaaagcatcataccatcattttttaactgagtgaaattattaaggcatgtaatacattaatgaacataatataaggaaacatatgtaaaattctgttatgacataatttatgtctccattttgttgtattggccagtacttttacaatc

SEQ ID NO: 141 - DNA, 899 bp, Homo sapiens
gagggcaacggaggggaaataaaagggaacggctccgaatcggccccagcggccgctgcgagacctcggcgccgacatcgcgacagaagcgctttgcacgccaggaaggtcccctctatgtgctgctgagccggtcctggacgcgacgagcccgccctcggtcttcggagcagaaatcgcaaaaacggaaggactggaaatggcagaccatatgatggccatgaaccacgggcgcttccccgacggcaccaatgggctgcaccatcaccctgcccaccgcatgggcatggggcagttcccgagcccccatcaccaccagcagcagcagccccagcacgccttcaacgccctaatgggcgagcacatacactacggcgcgggcaacatgaatgccacgagcggcatcaggcatgcgatggggccggggactgtgaacggagggcaccccccgagcgcgctggcccccgcggccaggtttaacaactcccagttcatgggtcccccggtggccagccagggaggctccctgccggccagcatgcagctgcagaagctcaacaaccagtatttcaaccatcacccctacccccacaaccactacatgccggatttgcaccctgctgcaggccaccagatgaacgggacaaaccagcacttccgagattgcaaccccaatgtcatagacactgatttcatcgacgaggaagttcttatgtccttggtgatagaaatgggtttggaccgcatcaaggagctgcccgaactctggctggggcaaaacgagtttgattttatgacggacttcgtgtgcaaacagcagcccagcagagtgagctgttgactcgatcgaaaccccggcgaaagaaatcaaacccccaacttcttcggcgtgaattaaa

SEQ ID NO: 142 - DNA, 2565 bp, Homo sapiens
cgactgagccccagactggaggagaggtccgaggaggtgggcgttggactctttgcgaggaccccggcggctggcccgggggaggcggccgaagcggcggcggcggcggccgggggcgacatggcggaggagcaggatctatcggaggtggagctgagccccgtgggctcggaggagccccgctgcctgtccccggggagcgcgccctcgctagggcccgacggcggcggcggcggatcgggcctgcgagccagcccggggccaggcgagctgggcaaggtcaagaaggagcagcaggacggcgaggcggacgatgacaagttccccgtgtgcatccgcgaggccgtcagccaggtgctcagcggctacgactggacgctggtgcccatgcccgtgcgcgtcaacggcgccagcaaaagcaagccgcacgtcaagcggcccatgaacgccttcatggtgtgggctcaggcagcgcgcagaaagctcgcggaccagtacccgcacctgcacaacgctgagctcagcaagacgctgggcaagctctggaggctgctgaacgaaagtgacaagcgccccttcatcgaggaggctgagcggctccgtatgcagcacaagaaagaccacccggactacaagtaccagcccaggcggcggaagaacgggaaggccgcccagggcgaggcggagtgccccggtggggaggccgagcaaggtgggaccgccgccatccaggcccactacaagagcgcccacttggaccaccggcacccaggagagggctcccccatgtcagatgggaaccccgagcacccctcaggccagagccatggcccacccacccctccaaccaccccgaagacagaactgcagtcgggcaaggcagacccgaagcgggacgggcgttccatgggggagggcgggaagcctcacatcgacttcggcaacgtggacattggtgagatcagccacgaggtaatgtccaacatggagacctttgatgtggctgagttggaccagtacctgccgcccaatgggcacccaggccatgtgagcagctactcagcagccggctatgggctgggcagtgccctggccgtggccagtggacactccgcctggatctccaagccaccaggcgtggctctgcccacggtctcaccacctggtgtggatgccaaagcccaggtgaagacagagaccgcggggccccaggggcccccacactacaccgaccagccatccacctcacagatcgcctacacctccctcagcctgccccactatggctcagccttcccctccatctcccgcccccagtttgactactctgaccatcagccctcaggaccctattatggccactcgggccaggcctctggcctctactcggccttctcctatatggggccctcgcagcggcccctctacacggccatctctgaccccagcccctcagggccccagtcccacagccccacacactgggagcagccagtatatacgacactgtcccggccctaaagggggccctgtcgccaccaccccccgcccagcccctgcccccagcctgtgtgccctgttccttgcccacctcaggcctggtggtggcagtggaggaggctgaggaggctgaagaggctgacaggtcggggggctttctgtctggctcactgccctgatgacccacccgccccatccaggctccagcagcaaagccccaggagaacaggctggacagaggagaaggaggttgactgttgcacccacactgaaagatgaggggctgcaccttcccccaggaatgaccctctatcccaggacctgagaagggcctgctcaccctcctcggggaggggaagcaccagggttggtggcatcggaggccttaccactcctatgactcctgttttctctctcacagatagtgagggtctgacatgcccatgccacctatgccacagtgcctaagggctaggccacccagagactgtgcccggagctggccgtgtctcccactcaggggctgagagtagctttgaggagcctcattggggagtggggggttcgagggacttagtggagttctcatcccttcaatgccccctccctttctgaaggcaggaaggagttggcacagaggccccctgatccaattctgtgccaataacctcattctttgtctgagaaacagcccccagtcctcctccactacaacctccatgaccttgagacgcatcccaggaggtgacgaggcaggggctccaggaaaggaatcagagacaattcacagagcctccctccctgggctccttgccagctccctcttcccttactaggctctatggcccctgctcagtcagccccactccctgggcttcccagagagtgacagctgctcaggccctaacccttggctccaggagacacagggcccagcacccaggttgctgtcggcaggctgaagacactagaatcctgacctgtacattctgcccttgcttctcaccccttgcctcccagtggtatttgaataaagtatgtagctataaaaaaaaaaaaaaaaaa

SEQ ID NO: 143 - DNA, 2121 bp, Homo sapiens
gccgaagtcagttccttgtggagccggagctgggcgcggattcgccgaggcaccgaggcactcagaggaggcgccatgtcagaaccggctggggatgtccgtcagaacccatgcggcagcaaggcctgccgccgcctcttcggcccagtggacagcgagcagctgagccgcgactgtgatgcgctaatggcgggctgcatccaggaggcccgtgagcgatggaacttcgactttgtcaccgagacaccactggagggtgacttcgcctgggagcgtgtgcggggccttggcctgcccaagctctaccttcccacggggccccggcgaggccgggatgagttgggaggaggcaggcggcctggcacctcacctgctctgctgcaggggacagcagaggaagaccatgtggacctgtcactgtcttgtacccttgtgcctcgctcaggggagcaggctgaagggtccccaggtggacctggagactctcagggtcgaaaacggcggcagaccagcatgacagatttctaccactccaaacgccggctgatcttctccaagaggaagccctaatccgcccacaggaagcctgcagtcctggaagcgcgagggcctcaaaggcccgctctacatcttctgccttagtctcagtttgtgtgtcttaattattatttgtgttttaatttaaacacctcctcatgtacataccctggccgccccctgccccccagcctctggcattagaattatttaaacaaaaactaggcggttgaatgagaggttcctaagagtgctgggcatttttattttatgaaatactatttaaagcctcctcatcccgtgttctccttttcctctctcccggaggttgggtgggccggcttcatgccagctacttcctcctccccacttgtccgctgggtggtaccctctggaggggtgtggctccttcccatcgctgtcacaggcggttatgaaattcaccccctttcctggacactcagacctgaattctttttcatttgagaagtaaacagatggcactttgaaggggcctcaccgagtgggggcatcatcaaaaactttggagtcccctcacctcctctaaggttgggcagggtgaccctgaagtgagcacagcctagggctgagctggggacctggtaccctcctggctcttgatacccccctctgtcttgtgaaggcagggggaaggtggggtactggagcagaccaccccgcctgccctcatggcccctctgacctgcactggggagcccgtctcagtgttgagccttttccctctttggctcccctgtaccttttgaggagccccagcttacccttcttctccagctgggctctgcaattcccctctgctgctgtccctcccccttgtctttcccttcagtaccctctcatgctccaggtggctctgaggtgcctgtcccacccccacccccagctcaatggactggaaggggaagggacacacaagaagaagggcaccctagttctacctcaggcagctcaagcagcgaccgccccctcctctagctgtgggggtgagggtcccatgtggtggcacaggcccccttgagtggggttatctctgtgttaggggtatatgatgggggagtagatctttctaggagggagacactggcccctcaaatcgtccagcgaccttcctcatccaccccatccctccccagttcattgcactttgattagcagcggaacaaggagtcagacattttaagatggtggcagtagaggctatggacagggcatgccacgtgggctcatatggggctgggagtagttgtctttcctggcactaacgttgagcccctggaggcactgaagtgcttagtgtacttggagtattggggtctgaccccaaacaccttccagctcctgtaacatactggcctggactgttttctctcggctccccatgtgtcctggttcccgtttctccacctagactgtaaacctctcgagggcagggaccacaccctgtactgttctgtgtctttcacagctcctcccacaatgctgaatatacagcaggtgctcaataaatgattcttagtgactttaaaaaaaaaaaaaaaaaaa

SEQ ID NO: 144 - DNA, 1440 bp, Homo sapiens
ggaattccgtagctattgatttcccggatctggtaacatggcaaaagatgccggtctaattgaagccaacggagaactcaaggtcttcatagaccagaaccttagtcccgggaaaggcgtggtgtccctcgtggccgttcacccctccaccgtcaacccgctcgggaagcagctcttgccaaaaacctttggacagtccaatgtcaacattgcccagcaagtggtaattggtacgcctcagagaccggcagcgtcaaacaccctggtggtaggaagcccacacacccccagcactcactttgcctctcagaaccagccttccgactcctcaccttggtctgccgggaagcgcaacaggaaaggagagaagaatggcaagggcctacggcatttctccatgaaggtctgcgagaaggtgcagaggaaagggaccacttcctacaacgaagtggcagacgagctggttgcggagttcagtgctgccgacaaccacatcttaccaaacgagtcagcttatgaccagaaaaacataagacggcgcgtctacgatgccttaaacgtgctaatggccatgaacatcatctccaaggagaagaaggagatcaagtggattggtctgcccaccaactcggctcaggaatgtcagaacttagaggtggaaagacagaggagacttgaaagaataaaacagaaacagtctcaacttcaagaacttattctacagcaaattgccttcaagaacctggtgcagagaaaccggcatgcggagcagcaggccagccggccaccgccacccaactcagtcatccacctgcccttcatcatcgtcaacaccagcaagaagacggtcatcgactgcagcatctccaatgacaaatttgagtatctgtttaattttgacaacacatttgaaatccacgatgacatagaagtgctgaagcggatgggcatggcttgcgggctggagtcggggagctgctctgccgaagaccttaaaatggccagaagtctggtccccaaggctctggagccatacgtgacagaaatggctcagggaactgttggaggcgtgttcatcacgacggcaggttccacgtctaacggcacaaggttctctgccagtgacctgaccaacggtgcagatgggatgctggccacaagctccaatgggtctcagtacagcggctccagggtggagactccggtgtcctacgtcggggaggacgacgaggaggacgatgacttcaacgagaatgacgaggacgactgacgtcctccccacttcagattcggcttcaggaaaacgtttagcgaaaagaaactttttttttaatgtgggttttctgtttccttttggcctagtcccaagaagatattggtaagctattgaatttagatatgcacctctgataagcaaggattgtttcccgtagattagga

SEQ ID NO: 145 - DNA, 2219 bp, Homo sapiens
attcgcggcccctacagtcgccgccgctcccccagctacagccgccacagctcctacgagcggggcggcgacgtgtcccctagtccctacagcagcagcagctggcgccgctctcgcagtccctacagccctgtgctcagacggtctggaaaatcccgaagcagaagcccgtattcatctaggcattcaagatctcgtagcaggcacagattgtctagatccagaagtcgtcattctagtatttctcctagcacactaactctgaagagtagcctggcagctgaattgaacaagaataaaaaagcacgagcagcagaggcagcaagagccgcagaagcagcgaaagctgcagaagcaactaaggctgctgaggctgctgccaaggctgcaaaagcttcaaacacttctacacctaccaaggggaacacggaaactagtgccagtgcatcacaaacaaaccatgtgaaggatgtgaagaaaattaaaattgaacatgcaccttctccctcaagtggtggaactttaaaaaatgacaaagcaaaaacaaagccacctcttcaggtaacgaaggtggaaaataatttgattgtagataaagccaccaagaaagcagtcatagttggaaaggagagtaaatctgctgctacaaaggaggaatcagtatctcttaaagagaaaaccaaaccacttacaccaagcataggagccaaggagaaggagcaacatgtagctttagtcacctctacattaccaccgttacctttgcctcccatgctgcctgaagataaagaagctgatagcttacgaggaaatatttcagtaaaagcagttaaaaaagaagtagaaaagaaactccgatgtcttcttgctgatttaccgctgccccctgagctaccaggaggagatgatctttcaaagagtccagaggaaaagaaaacaacaacacagttacatagtaaaaggaggcctaaaatatgtgggcctcgctatggtgaaaccaaagaaaaagatattgactggggaaaactctgcgtggataaatttgatatcatcggaattattggagaaggtacttacggacaagtttacaaagccagggataaagacactggagaaatggtagccttaaaaaaagtacgtctggataatgaaaaggaaggctttccaattacagcaattcgagaaattaaaattctccggcagcttacccatcagagtattatcaatatgaaggaaatagtgactgataaagaagatgctttggatttcaagaaggacaaaggtgcattttatctggtgtttgaatatatggaccatgatctgatgggactactggaatcaggcttggttcatttttatgaaaatcacataaagtcatttatgagacagctcatggagggtctggattattgtcataagaagaactttttgcatagagatattaaatgttccaatatccttctaaataatagagggcagataaaacttgcagactttggacttgctcgattgtatagctcagaagaaagtcggccgtatactaacaaggtaattactttatggtaccgtccacctgaactgctactgggagaagaacgatacacaccagccattgatgtatggagctgtggctgtatccttggcgaactcttcactaaaaaacctatatttcaagcaaatcaggaacttgcacaactagaattaataagccgaatatgtgggagtccatgtcctgcagtgtggcctgatgtaatcaaactaccatatttcaacaccatgaaaccaaagaagcaatatcgtcgaaagttaagagaagaatttgtttttattcctgcagctgcgctagacttatttgattacatgcttgccttggatcctagtaagcgctgcactgctgaacaggctcttcagtgcgagttcctccgagatgtggaaccctcaaaatgcctccaccagatctccctttatggcaagattgtcatgagttatggagtaaaaagcgaagaagacagaagcagatgggcatgactgatgtttccaccattaaagcccccaggaaggacttgtctctgggcttggatgacagcagaaccaacacaccccagggtgtgctgccatcttcacagctgaaatctcagggcagctcaaatgtggcacctggtgaaaaacagacagatccatcaacaccacaacaggagtcttcgaaaccgttgggagga

SEQ ID NO: 146 - DNA, 2219 bp, Homo sapiens
acaactgactctcagaaactgctacaccagctgaatgccctgttggaacaggagtctagatgtcagccaaaggtctgtggtttgagactaattgagtctgcacacgataatggcctcagaatgactgcaagactaagggactttgaagtaaaagatcttcttagtctaactcagttctttggctttgacacagagacattttctctagctgtgaatttactggacagattcctgtctaaaatgaaggtacagcccaagcaccttgggtgtgttggactgagctgcttttatttggctgtaaaatcaatagaagaggaaaggaatgtcccattggcaactgacttgatccgaataagtcaatataggtttacggtttcagacttgatgagaatggaaaagattgtattggagaaggtgtgttggaaagtcaaagctactactgcctttcaatttctgcaactgtattattcactccttcaagagaacttgccacttgaaaggagaaatagcattaattttgaaagactagaagctcaactgaaggcatgtcattgcaggatcatattttctaaagcaaagccttctgtgttggcattgtctatcattgcattagagatccaagcacagaagtgtgtagagttaacagaaggaatagaatgtcttcagaaacattccaagataaatggcagagatctgaccttctggcaagagcttgtatccaaatgtttaactgaatattcatcaaataagtgttccaaaccaaatgttcagaagttgaaatggattgtttctgggcgtactgcacggcaattgaagcatagctactacagaataactcaccttccaacaattcctgaaatggtcccttaactggattattacagcaccaaaaaacttctctgaagcctttctccacaaccttgttctatggattccataatgttacaatggatttaagctatgaagcctcaaaacatcacgagataagcatgatggtctcagacttgggaaaactgcctaatattatgctgtagtggaattatgtttagatttgaattcatctgtgaagcattcaaagcaaagctaaaagcctaaatgtgaaatgctaatgacaagcctgagaaggtaaactgtgaatcttcatttctatcattgatctaactttagatattggatcaatatatttaggtggtattgaaaatgctattggaggagtcacactaatactatcaactatcagtcttcccacagcttcaatcactgtcattattctaatcctactcctacttaaattttaagttatgaggtttatgtcaaaagcaacatttcacaaatgtacttttaaggcataataagggttaacattctaggcagtataaacacaccccataatgcaagtaataggtaatctagagatgtggactttattgctatatgggaattacatttaaatttgagggcatttatataagaaatacagacctataagttggcatattcattaagttatctttaatatttttctagaaacaggtgacatttgatctatcgataaaattttatacagaacctactgcctcaaactgaatcccatcaagaaaactagtttctattgtattagtaactcaaaataaattatcacttcgaaaacttgctttcccacactaaggtaagttcagactagattgaacactccagaattttttactacagactgtttttaagttagaagtgatggcaattttataaatagagaatatacttccactgatgcccttactgtgccaaaacaaaaatcttaagaaaagcaagtagacaccttcataactatgaatgaagctgctgaagtagtgtttaggatcctccatggcagttagtgaatgtaagaagtacagtgttaaagtgttgtaaacagttactcagtgcaatgtatagcctgagtctatccatgatggctatatccaatttgacatcacgttatggatcagtacacaatgaaaaaccaaagaaccacgtatatcttattcttaacttttgtaaaccatgttttatgggtaactttttagttttcccaaaaggctgataaatttcaatattttgaatacatcattgttaattttgagttggcagaggtaaactaaccaactaccattatgttttagtactaagggatatacctttcaataaagttaatgaaattcaaaaaaaaaaaaaaaaaa

SEQ ID NO: 147 - DNA, 4707 bp, Homo sapiens
gatcaccatcaccgagaccacctcacacagtactcccagctacactacctcaatcaccaccaccgagaccccctcacacagtactcccagctacactacctcaatcaccaccaccgagaccccatcacacagtactcccagcttcacttcttcaatcaccaccaccgagaccacatcccacagtactcccagcttcacttcttcaatcaggaccaccgagaccacatcctacagtactcccagcttcacttcttcaaataccatcactgagaccacctcacacagtactcccagctacattacctcaatcaccaccaccgagaccccctcaagcagtactcccagcttcagttcttcgatcaccaccactgagaccacatcccacagtactcccggcttcacttcttcaatcaccaccactgagactacatcccacagtactcccagcttcacttcttcgatcaccaccactgagaccacctcacatgatactcccagcttcacttcttcaatcaccaccagtgagaccccctcacacagtactcccagctccacttctttaatcaccaccaccaagaccacctcacacagtactcccagcttcacttcttcgatcaccaccaccgagaccacctcacacagtgctcgcagcttcacttcttcgatcaccaccaccgagaccacctcacacaatactcggagcttcacttcttcgatcaccaccaccgagaccaactctcacagtactaccagcttcacttcttcgatcaccaccaccgagaccacctcacacagtactcccagcttcagttcttcaatcaccaccactgagacccccttacacagtactcctggcctaccttcgtgggtcaccaccaccaagaccacctcacacattactcctggcctcacttcttcaatcaccaccactgagactacctcacacagtactcccggcttcacttcttcaatcaccaccactgagaccacctcagagagtactcccagcctcagttcttcaaccatctactccacagtcagcacatccacaactgccatcacctcacattttactacctcagagactgcggtgactcccacacctgtaaccccatcttctctgagtacagacatcccgaccacaagcctacgaactctcaccccttcgtctgtgggcaccagcacttcattgactacaaccacagactttccctctatacccactgatatcagtaccttaccaactcgaacacacatcatttcatcttctccctccatccaaagtacagaaacctcatcccttgtgggcaccacctctcccaccatgtccactgtgagaatgaccctcagaattactgagaacaccccaatcagttcctttagcacaagtattgttgttatacctgaaaccccaacacagacccctcctgtactgacgtcagccactgggacccaaacatctcctgcacctactactgtcacctttggaagtacggattcctccacgtccactcttcatactcttactccatcaacagccttgagcacgatcgtgtcaacatcacaggttcctattcctagcacacattcctccacccttcaaacaactccttctactccctcattgcaaacttcactcacatctacaagtgagttcactacagaatctttcactaggggaagtacgtctacaaatgcaatcttgacttcttttagtaccatcatctggtcctcaacacccactattatcatgtcctcttctccatcttctgccagcataactccagtgttctccactaccattcattctgttccttcttcaccatacattttcagtacagaaaatgtgggctccgcttctatcacaggctttcctagtctctcttcctctgcaactaccagcacttcttcaaccagctcctctctgaccacagctctcactgaaataacccccttttcttatatttcccttccctccaccacaccctgtccaggaactataacaattaccatagtccctgcctctcccactgatccatgtgttgaaatggatcccagcactgaagctacttctcctcccaccaccccattaacagtctttccctttactaccgaaatggtcacctgtcctacctccatcagtatccaaactactcttactacatatatggacacttcttccatgatgccagaaagtgagtccagcatctcacccaatgcttccagttccactggcactgggactgtacccacaaacacagttttcacaagtactcgactgcccaccagtgagacctggctgagcaacagttctgtgatccccctacctcttcctggcgtctctaccatcccgctcaccatgaaaccaagcagtagcctcccgaccatcctgaggacttcaagcaagtcaacacacccatccccacccaccactaggacttcagagacaccagtggccactacccagactcctaccacccttacatcacgcaggacaactcgcatcacttctcagatgaccacacagtccacgttgaccaccactgcaggcacctgtgacaatggtggcacctgggaacagggccagtgtgcttgccttccggggttttctggggaccgctgtcagctccagaccagatgccagaatgggggtcagtgggatggcctcaaatgccagtgccccagcaccttctatggttccagttgtgagtttgctgtggaacaggtggatctagatgcagaagatttttgcagacatgcagggcttcaccttcaagggtgtggagatcctgtccctgaggaatggcagcatcgtggtggactacctggtcctgctggagatgcccttcagcccccagctggagagcgagtatgagcaggtgaagaccacgctgaaggaggggctgcagaacgccagccaggatgtgaacagctgccaggactcccagaccctgtgttttaagcctgactccatcaaggtgaacaacaacagcaagacagagctgaccccggcagccatctgccgcgcgccgctcccacgggctatgaagagttctacttccccttggtggaggccacccggctccgctgtgtcaccaaatgcacgtctggggtggacaacgccatcgactgtcaccagggccagtgcgttctggagacgagcggtcccacgtgtcgctgctactccaccgacacgcactggttctctggcccgcgctgcgaggtggccgtccactggagggcgctggtcggggcctgacggccggcgcgcgctgctggtgctgctgctcgtggcgctgggcgtccgggcggtgcgctccggatggtggggcggccagcgccgaggccggtcctgggaccaggacaggaaatggttcgagacctgggatgaggaagtcgtgggcactttttcaaactggggtttcgaggacgacggaacagacaaggatacaaatttctatgtggccttggagaacgtgacaccactatgaaggtgcacatcaagagacccgagatgacctcgtcctcagtgtgagcctgcggggccccttcaccaccccctccgccctgccccggacacaagggtctgcattgcgtccatttcaagaggtgaccccaggacgcgggcagcccaggctcctgctgttcttgggcaagatgagactgttcccccaaatcccatccttctccttccaacttggctgaaacccacctggagacgcagttcacgtccaggctcttccactgtggaatcttgggcaagtcagtaacgagcctcagtttcctcacctgcaaaacgggtacagcattcctgtatgatacgtcacgccgttgttgtgaaaaccacatagacttggtcaattctcggtcctactctgccctcccgtctcagccctcgtgttgccattgcctctctcggatcctccaatcctcacgtccttcacctggtctctggccctggttcttattttctctcaattccctactgcctgtttcttactttgaacctggaggcagcctgcagccccatcccatctcctgccctctcctgatctaactccctgctgcatctcttgctcccattccttagacgtcctccccttttgaccccgttccttcatccatcctgcaccccagtcccccagccctaaatcctccctcctctcctcacatcctggcccctagcaaggtatagatagcctctgtgtcttaggataccccgggtgctgttccctcggtcatcctgttgcccagttccccgtttctcttgctctcattcctgtatcctttccccttttgagcccgtccattcatcggttctgcccccgactcccccagccctaaataccccagctgctgttccccccatcaccctgctgcccaattctttattctccacccctttctctcacccctggagccctgcgggtgggggcagggcatgagttccccagtccccaaggaaaggcagccccctcagtctccctcctcctcattcccttccatctccctcccctctgccttttaaacccatcccctccgattcccctcctcccccctctctccctggtgtcacctggattcctgcagtaattctgagcccttgaaatcctcagtcgccttggcggggaagattggctttggggacaggaggtcggcacatctccaggtcttcatgtgcgcaatatagagtttattgtaaaaagc

SEQ ID NO: 148 - DNA, 1041 bp, Homo sapiens
ctaaagatctccctccaggcagcccttggctggtccctgcgagcccgtggagactgccagagatgtcctctttcggttacaggaccctgactgtggccctcttcaccctgatctgctgtccaggatcggatgagaaggtattcgaggtacacgtgaggccaaagaagctggcggttgagcccaaagggtccctcgaggtcaactgcagcaccacctgtaaccagcctgaagtgggtggtctggagacctctctaaataagattctgctggacgaacaggctcagtggaaacattacttggtctcaaacatctcccatgacacggtcctccaatgccacttcacctgctccgggaagcaggagtcaatgaattccaacgtcagcgtgtaccagcctccaaggcaggtcatcctgacactgcaacccactttggtggctgtgggcaagtccttcaccattgagtgcagggtgcccaccgtggagcccctggacagcctcaccctcttcctgttccgtggcaatgagactctgcactatgagaccttcgggaaggcagcccctgctccgcaggaggccacagccacattcaacagcacggctgacagagaggatggccaccgcaacttctcctgcctggctgtgctggacttgatgtctcgcggtggcaacatctttcacaaacactcagccccgaagatgttggagatctatgagcctgtgtcggacagccagatggtcatcatagtcacggtggtgtcggtgttgctgtccctgttcgtgacatctgtcctgctctgcttcatcttcggccagcacttgcgccagcagcggatgggcacctacggggtgcgagcggcttggaggaggctgccccaggccttccggccatagcaaccatgagtggcatggccaccaccacggtggtcactggaactcagtgtgactcctcagggttgaggtccagccctggctgaaggactgtgacaggcagcagagacttgggacattgccttttctagcccgaatacaaacacctggactt

SEQ ID NO: 149 - DNA, 3433 bp, Homo sapiens
gtcctcctcctagccggactggagggagacaaagcagcgcccgtctgcttcgggcctctggaatttagcgctcgcccagctagccgcagaaatgactgctgtccatgcaggcaacataaacttcaagtgggatcctaaaagtctagagatcaggactctggcagttgagagactgttggagcctcttgttacacaggttacaacccttgtaaacaccaatagtaaagggccctctaataagaagagaggtcgttctaagaaggcccatgttttggctgcatctgttgaacaagcaactgagaatttcttggagaagggggataaaattgcgaaggagagccagtttctcaaggaggagcttgtggctgctgtagaagatgttcgaaaacaaggtgatttgatgaaggctgctgcaggagagttcgcagatgatccctgctcttctgtgaagcgaggcaacatggttcgggcagctcgagctttgctctctgctgttacccggttgctgattttggctgacatggcagatgtctacaaattacttgttcagctgaaagttgtggaagatggtatcttgaagttgaggaatgctggcaatgaacaagacttaggaatccagtataaagccctaaaacctgaagtggataagctgaacattatggcagccaaaagacaacaggaattgaaagatgttggccatcgtgatcagatggctgcagctagaggaatcctgcagaagaacgttccgatcctctatactgcatcccaggcatgcctacagcaccctgatgtcgcagcctataaggccaaccgggacctgatatacaagcagctgcagcaggcggtcacaggcatttccaatgcagcccaggccactgcctcagacgatgcctcacagcaccagggtggaggaggaggagaactggcatatgcactcaataactttgacaaacaaatcattgtggaccccttgagcttcagcgaggagcgctttaggccttccctggaggagcgtctggaaagcatcattagtggggctgccttgatggccgactcctcctgcacgcgtgatgaccgtcgtgagcgaattgtggcagagtgtaatgctgtccgcaaggccctgcaggacctgctttcggagtacatgggcaatgctggacgtaaagaaagaagtgatgcactcaattctgcaatagataaaatgaccaagaagaccagggacttgcgtagacagctccgcaaagctgtcatggaccacgtttcagattctttcctggaaaccaatgttccacttttggtattgattgaagctgcaaagaatggaaatgagaaagaagttaaggagtatgcccaagttttccgtgaacatgccaacaaattgattgaggttgccaacttggcctgttccatctcaaataatgaagaaggtgtaaagcttgttcgaatgtctgcaagccagttagaagccctctgtcctcaggttattaatgctgcactggctttagcagcaaaaccacagagtaaactggcccaagagaacatggatctttttaaagaacaatgggaaaaacaagtccgtgttctcacagatgctgtcgatgacattacttccattgatgacttcttggctgtctcagagaatcacattttggaagatgtgaacaaatgtgtcattgctctccaagagaaggatgtggatggcctggaccgcacagctggtgcaattcgaggccgggcagcccgggtcattcacgtagtcacctcagagatggacaactatgagccaggagtctacacagagaaggttctggaagccactaagctgctctccaacacagtcatgccacgttttactgagcaagtagaagcagccgtggaagccctcagctcggaccctgcccagcccatggatgagaatgagtttatcgatgcttcccgcctggtatatgatggcatccgggacatcaggaaagcagtgctgatgataaggacccctgaggagttggatgactctgactttgagacagaagattttgatgtcagaagcaggacgagcgtccagacagaagacgatcagctgatagctggccagagtgcccgggcgatcatggctcagcttccccaggagcaaaaagcgaagattgcggaacaggtggccagcttccaggaagaaaagagcaagctggatgctgaagtgtccaaatgggacgacagtggcaatgacatcattgtgctggccaagcagatgtgcatgattatgatggagatgacagactttacccgaggtaaaggaccactcaaaaatacatcggatgtcatcagtgctgccaagaaaattgctgaggcaggatccaggatggacaagcttggccgcaccattgcagaccattgccccgactcggcttgcaagcaggacctgctggcctacctgcaacgcatcgccctctactgccaccatctgaacatctgcagcaaggtcaaggccgaggtgcagaatctcggcggggagcttgttgtctctggggtggacagcgccatgtccctgatccaggcagccaagaacttgatgaatgctgtggtgcagacagtgaaggcatcctacgtcgcctctaccaaataccaaaagtcacagggtatggcttccctcaaccttcctgctgtgtcatggaagatgaaggcaccagagaaaaagccattggtgaagagagagaaacaggatgagacacagaccaagattaaacgggcatctcagaagaagcacgtgaacccggtgcaggccctcagcgagttcaaagctatggacagcatctaagtctgcccaggccggccgcccccacccctcggggctcctgaatatcagtcactgttcgtcactcaaatgaatttgctaaatacaacactgatactagattccacagggaaatgggcagactgaaccagtccaggtggtgaattttccaagaacatagtttaagttgattaaaaatgcttttagaatgcaggagcctacttctagctgtattttttgtatgcttaaataaaaataaaattcataaccaaagagaatcccacattagcttgttagtaagctctgaccaagccgagatgcccattctcttagtgatggcggcgttagggtttgagagaagggaatttggctcaacttcagttgagagggtgcagtccagacagcttgactgcttttaaatgaccaaagatgacctgtggtaagcaacctgggcatcttaggaagcagtccctggagaaggcatgttccccagaaaggtctctggagggacaaactcactcagtaaaacataatgtatcatgaagaaaactgattctctatgacatgaaatgaaaattttaatgcattgttataattactaatgtaccgctgctgcaggacattaataaagttgcttttttaggc

SEQ ID NO: 150 - DNA, 528 bp, Homo sapiens
taactgtagcgtgaacgtgaactgtgtgaacatcagatgcccgctgcgggggctggacagcaaggcgtctcttattttgcgctcgaggttatggaacagcacatttctagaggaatattccaaactgaactacttggacattctcatgcgagccttcattgatgtgactgctgctgccgaaaatatcaggctgccaaatgcaggcactcaggttcgagtgactgtgtttccctcaaagactgtagctcagtattcgggagtaccttggtggatcatcctagtggctattctcgctgggatcttgatgcttgctttattagtgtttatactatggaagtgtggattctttaaacgctctaggtacgatgacagtgttccccgataccatgctgtaaggatccggaaagaagagcgagagatcaaagatgaaaagtatattgataaccttgaaaaaaaacagtggatcacaaagtggaacagaaatgaaagctactcatagcgggggcctaaaaaaaaaaaagcttcaca

SEQ ID NO: 151 - DNA, 594 bp, Homo sapiens
  misc_feature (434)..(434): n is a, c, g, or t
ccgtgccatgggtgacattgatgacgagtacgatcgaaggcgctgggacaatttcagaagagagcgcagcgactacgaccgttcccgcgagagagatgaaagacgtcgaggggacgattggaatgacagagagtgggaccgtggccgtgagcgccgtagtcggggtgaatatcgggactatgaccggaatcggcgagagcgcttctcgccacctcgccacgaactcagcccgccacagaagcgcatgaggagagactgggatgagcacagctctgacccataccacagtggctatgagatgccctatgctggggggggtgggggcccaacttatggcccccctcagccctggggccaccctgacgtccacatcatgcagcaccatgtcctgcctatccaggccaggctgggcagcattgcagagattgacctgngtgtgccgccgcccgtgatgaagaccttcaaggagtttctcctctccctggatgactcggtggatgagacggaggccgtcaagcgctataatgactacaagctggatttccggaggcaacagatgcaggatttcttcctggcgcacaaagatgaggagtg

SEQ ID NO: 152 - DNA, 4085 bp, Homo sapiens
ccgggcctcgagccgaggcagcagtgggaacgactcatcctttttccagccctggggcgtggctggggtcggggtcggggtcggggccggtgggggccccgcccccgtctcctggcctgcccccttcatgggccgcgatgatggcggccctgtacccgagcacggacctctcgggcgcctcctcctcctccctgccttcctctccatcctcttcctcgccgaacgaggtgatggcgctgaaggatgtgcgggaggtgaaggaggagaatacgctgaatgagaagcttttcttgctggcgtgcgacaagggtgactattatatggttaaaaagattttggaggaaaacagttcaggtgacttgaacataaattgcgtagatgtgcttgggagaaatgctgttaccataactattgaaaacgaaaacttggatatactgcagcttcttttggactacggttgtcagaaactaatggaacgaattcagaatcctgagtattcaacaactatggatgttgcacctgtcattttagctgctcatcgtaacaactatgaaattcttacaatgctcttaaaacaggatgtatctctacccaagccccatgcagttggctgtgaatgcacattgtgttctgcaaaaaacaaaaaggatagcctccggcattccaggtttcgtcttgatatatatcgatgtttggccagtccagctctaataatgttaacagaggaggatccaattctgagagcatttgaacttagtgctgatttaaaagaactaagtcttgtggaggtggaattcaggaatgattatgaggaactagcccggcaatgtaaaatgtttgctaaggatttacttgcacaagcccggaattctcgtgaattggaagttattctaaaccatacgtctagtgacgagcctcttgacaaacggggattattagaagaaagaatgaatttaagtcgtctaaaacttgctatcaaatataaccagaaagagtttgtctcccagtctaactgccagcagttcctgaacactgtttggtttggacagatgtcrggttaccgacgcaagcccacctgtaagaagataatgactgttttgacagtaggcatcttttggccagttttgtcactttgttatttgatagctcccaaatctcagtttggcagaatcattcacacaccttttatgaaatttatcattcatggagcatcatatttcacatttctgctgttgcttaatctatactctcttgtctacaatgaggataagaaaaacacaatggggccagcccttgaaagaatagactatcttcttattctgtggattattgggatgatttggtcagacattaaaagactctggtatgaagggttggaagactttttagaagaatctcgtaatcaactcagttttgtcatgaattctctttatttggcaacctttgccctcaaagtggttgctcacaacaagtttcatgattttgctgatcggaaggattgggatgcattccatcctacactggtggcagaagggctttttgcatttgcaaatgttctaagttatcttcgtctcttttttatgtatacaaccagctctatcttgggtccattacagatttcaatgggacagatgttacaagattttggaaaatttcttgggatgtttcttcttgttttgttttctttcacaattggactgacacaactgtatgataaaggatatacttcaaaggagcagaaggactgtgtaggcatcttctgtgaacagcaaagcaatgataccttccattcgttcattggcacctgctttgctttgttctggtatattttctccttagcgcatgtggcaatctttgtcacaagatttagctatggagaagaactgcagtcctttgtgggagctgtcattgttggtacatacaatgtcgtggttgtgattgtgcttaccaaactgctggtggcaatgcttcataaaagctttcagttgatagcaaatcatgaagacaaagaatggaagtttgctcgagcaaaattatggcttagctactttgatgacaaatgtacgttacctccacctttcaacatcattccctcaccaaagactatctgctatatgattagtagcctcagtaagtggatttgctctcatacatcaaaaggcaaggtcaaacggcaaaacagtttaaaggaatggagaaatttgaaacagaagagagatgaaaactatcaaaaagtgatgtgctgcctagtgcatcgttacttgacttccatgagacagaagatgcaaagtacagatcaggcaactgtggaaaatctaaacgaactgcgccaagatctgtcaaaattccgaaatgaaataagggatttacttggctttcggacttctaaatatgctatgttttatccaagaaattaaccattttctaaatcatggagcgaataattttcaataacagatccaaaagactatattgcataacttgcaatgaaattaatgagatatatattgaaataaagaattatgtaaaagccattctttaaaatatttatagcataaatatatgttatgtaaagtgtgtatatagaattagttttttaaaccttctgttagtggctttttgcagaagcaaaacagattaagtagatagattttgttagcatgctgcttggttttcttacttagtgctttaaaatgtttttttttatgtttaagaggggcagttataaatggacacattgcccagaatgttttgtaaaatgaagaccagcaaatgtaggctgatctccttcacaggatacacttgaaatatagaagttatgttttaaatatctctgttttaggagttcacatatagttcagcatttattgtttaggagtataattttattttatctaaaataatagtctattttttcttttgtattttgttataatcttaagcaacaaagaaaaaaccctaatatttgaatctatttatgtctttcaatttaaattcacttcagtttttgttattgtaatatatttacttttacatggttataatcactttatatttttaatgtttttttcacttaatattttatatatacatttccatgtattgatgtagttagtccacatttaaatttttatagaattatatagtttttgaaaaatacagtcagtagatgttttattttttagctattcagttatgtttataagtttgcatagctacttctcgacatttggtttgttttaatttttttgtatcataatagtcctatttttttttcaagttggagtgaatgtttttagttttaagatagataggagacacttttttatcacatgtagtcacaacctgttttgtttttgtaaaacataggaagtctctttaatgcaatgatttgttttatatttggactaaggttcttgagcttatctcccaaggtactttccataatttaacacagcttctataaaagtgacttcatgcttacttgtggatcattcttgctgcttaagatgaaaagcattggttttttaaaattagagaataaaatatgtatttaaatttttggtgtgttcacataaagggatgtagctaaaatgttttcataggctattatatattctcgcagcatttccagttaagaggatattaggtatataattctcttcttaaccgaatgtcagatggtcttacgccacagggtgcaggtaacccttggtctgtaagcaccaccgatccagggatcattgtctaaataggttactattgtttgtttcatcttgcttttgcatttttattttttaatttccaaattttaagtgttccctctttggggcaaattcttataaaaatgtttattgtaaagttatatattttgtctacgatgggattatgcacttcccaattgggattttacatctggatttttagtcattctaaaaaacacctaattattaaaacatttatagagtgcctactgtatgcatgagttgagttgcttctgaggtacattttgaatgacagcatattgtaagaaaaaaaaaggtgaataaaatttgacattagattataaaaaaaaaaaggaattc

SEQ ID NO: 153 - DNA, 2149 bp, Homo sapiens
ccgcgggaacccggaaacgcctgggctgcaccgagctggcggtggctacggcgacgggagccggcggcgctgcgggtcagcggtcgcgtaggacccagcggactcggcagcctggggcgcccggcggagctgaaccgcggcccccggtggtgggctcagccggtcgagctgcgcgggaggcaaatgaagataaaacaatgttcgccaacctaaaatacgtttccctgggaattttggtctttcagactaccagtttggttctaacaatgcgttattccagaactttaaaagaagaaggacctcgttatctatcttctacagcagtggttgttgctgaacttttgaagataatggcctgcattttattggtctacaaagacagcaaatgtagtctaagagcactgaatcgagtactacatgatgaaattcttaataaacctatggaaacacttaaacttgctattccatcagggatctatactcttcagaataatttactgtatgtggcactatcaaatctagatgcagctacttatcaggtcacgtatcagttaaaaattcttacaacagcattattttctgtgtctatgcttagtaaaaaattgggtgtataccagtggctgtccctagtaattttgatgacaggagttgcttttgtacagtggccctcagattctcagcttgattctaaggaactttcagctggttctcaatttgtaggactcatggcagttctcacagcatgtttttcaagtggctttgctggggtttactttgagaaaatcttaaaagaaacaaaacaatcagtgtggataagaaatattcagcttggtttctttggaagtatatttggattaatgggtgtatacatttatgatggagaactggtatcaaagaatggattttttcagggatataaccgactgacctggatagtagttgttcttcaggcacttggaggccttgtaatagctgctgttattaagtatgcagataatattttaaaaggatttgcaacctctttatcgataatattatcaacattgatctcctatttttggcttcaagattttgtgccaaccagtgtctttttccttggagccatccttgtaataacagctacttttttgtatggttatgatcccaaacctgcaggaaatcccactaaagcatagttgtatactatctttaactggtttttcacgatggggcactaggaatctcgacattaatcttgcacagaggacttctacagagtctgagaagatatcatcatgctgaatctgatcatactgttttttaaaagtttaaggataagacatgtgtatatgtaacaaaacacattgcatctagaaatcaaaacttgaaagtatttccagggattaggattagaaggaatattagaggaaacttgaaatctgagtttaaaaagattttacctttttgattgctgcagaaatgtcctatgcactctttgcaagagcacacaacaaatgtcagataccaatttttgcaaattagatttaatcttattaaatgtttttatcttactctttctgtacagatatatcaaatcacatgaaatatttaaagtttgaaaattataattacctataaagctgtgaaaaatagaagtataatttgaaaaaacatttcacttatcagagatttttatatttatacaaaagattactaaatgaaggattgctaaatgtttttggttcaattacataaaaattaatattctgggtctgatctgtcagagaataaatatcaaatctaaatttaatgtagagatacatactatttctccatatgaattttaagatattttagtgcttcaagactgctgaaagcaatccagttgctcctgtgctagatggtagccagagaattttatagtaatggaggttagcccttaatctcttcattgcatttcatttctgtaaatcagattaagtccttaatattattttaaattaaaatttgtgtgtaattgccattaaattttcaaaatgtaatttaaaaggattaaatactcatttaataatttaaaataattattgtataatatctacatttggagaattttgaactatcaagcatatactgtatacagttagaaagttattaaatgaacattttactc

SEQ ID NO: 154 - DNA, 1747 bp, Homo sapiens
cctctagccctccctgcgtttagattcagttgcaccttttattattttaactcttctccttaggacacgcagcccccaatttgtccctccgcctgggcggcccctggtcccgcgcgccagcatgggagagcgagggacctgcccgcggcccgccggcgtgtgcaaggaggtccagccgccgcgcccgctacccggagtctgaggacgggtgtccagggacggagaggcaggtgagagggaggtggctaagctggctatggtgacaggacgatgttggccagaaagagtatcatcccggaggagtatgtgctggcgcgcatcgccgcagagaacctgcgcaagccgcgcatccgagaccgcctccccaaagcccgcttcatcgccaagagcggggcctgcaacctggcgcataagaacatccgtgagcaaggacgctttctacaggacatcttcaccaccttggtggacctgaaatggcgccacacgctggtcatctttaccatgtccttcctctgcagctggctgctcttcgctatcatgtggtggctggtggcctttgcccatggggacatctatgcttacatggagaaaagtggaatggagaaaagtggtttggagtccactgtgtgtgtgactaatgtcaggtctttcacttctgcttttctcttctccattgaagttcaagttaccattgggtttggagggaggatgatgacagaggaatgccctttggccatcacggttttgattctccagaatattgtgggtttgatcatcaatgcagtcatgttaggctgcattttcatgaaaacagctcaggctcacagaagggcagaaactttgattttcagccgccatgctgtgattgccgtccgaaatggcaagctgtgcttcatgttccgagtgggtgacctgaggaaaagcatgatcattagtgcctctgtgcgcatccaggtggtcaagaaaacaactacacctgaaggggaggtggttcctattcaccaactggacattcctgttgataacccaatcgagagcaataacatttttctggtggcccctttgatcatctgccacgtgattgacaagcgcagtcccctgtatgacatctcagcaactgacctggccaaccaagacttggaggtcatagttattctggaaggagtggttgaaactactggcatcaccacacaagcacgaacctcctacattgctgaggagatccaatggggccaccgctttgtgtccattgtgactgaggaagaaggagtgtattctgtggattactccaaatttggcaacactgttaaagtagctgctccacggtgcagtgcccgagagctggatgagaaaccttccatccttattcagaccctccaaaagagtgaactgtctcatcaaaattctctgaggaagcgcaactccatgagaagaaacaattccatgaggaggaacaattctatccgaaggaacaattcttccctcatggtaccaaaggtgcaatttatgactccagaaggaaatcaaaacacatcggaatcatgacagcaagataaccccaagacagtcttttatcaagttttgacggtttatgctgggcactgccagactgaaccagagctggaacacaataatgtgtccttctacattttattacactaaatgatattcatattcaagcaacagcactttctgtagtaataaaaagtaacacaccaagtggaggattcatggcttatgcttgttt

SEQ ID NO: 155 - DNA, 911 bp, Homo sapiens
cgggctagcctggctttcttgctctccctcatctcattgtttcagccggaggccaaatctgaagtcctttccagggagtggctctgttcatcttattcgccagccaaagtaggaacagcgtaagaggagagagacacattcagcagccaaaggactcggtggaaagagcagaacaccatagacaatatgtcgctcttgggacccaaggtgctgctgtttcttgctgcattcatcatcacctctgactggatacccctgggggtcaatagtcaacgaggagacgatgtgactcaagcgactccagaaacattcacagaagatcctaatctggtgaatgatcccgctacagatgaaacagttttggctgttttggctgatattgcaccttccacagatgacttggcctccctcagtgaaaaaaataccactgcagagtgctgggatgagaaatttacctgcacaaggctctactctgtgcatcggccggttaaacaatgcattcatcagttatgcttcaccagtttacgacgtatgtacatcgtcaacaaggagatctgctctcgtcttgtctgtaaggaacacgaagctatgaaagatgagctttgccgtcagatggctggtctgccccctaggagactccgtcgctccaattacttccgacttcctccctgtgaaaatgtggatttgcagagacccaatggtctgtgatcattgaaaaagaggaaagaagaaaaaatgtatgggtgagaggaaggaggatctccttcttctccaaccattgacagctaacccttagacagtatttcttaaaccaatccttttgcaatgtccagcttttacccctactctctactttttcacccaaactgataacatttatctcattttctagcacttaaaatacaaagtct

SEQ ID NO: 156 - DNA, 11580 bp, Homo sapiens
cacgcgtgggctcggcgggggcccgctcccaggcccgctcccgagcccgttccgctcccgtccgccttcttctcgccttctctccgcgtggctcctccgtcccggcgtctccaaaactgaatgagcgagcggcgcgtagggcgscggcggcggcggcggcggcggcggcggcggcatggagcgcagtggctgggcccggcagactttcctcctagcgctgttgctgggggcgacgctgagggcgcgcgcggcggctggctattacccccgcttttcgcccttctttttcctgtgcacccaccacggggagctggaaggggatggggagcagggcgaggtgctcatttccctgcatattgcgggcaaccccacctactacgttccgggacaagaataccatgtgacaatttcaacaagcaccttttttgacggcttgctggtgacaggactatacacatctacaagtgttcaggcatcacagagcattggaggttccagtgctttcggatttgggatcatgtctgaccaccagtttggtaaccagtttatgtgcagtgtggtagcctctcacgtgagtcacctgcccacaaccaacctcagtttcatctggattgctccacctgcgggcacaggctgtgtgaatttcatggctacagcaacacaccggggccaggttattttcaaagatgctttagcccagcagttgtgtgaacaaggagctccaacagatgtcactgtgcacccacatctagctgaaatacatagtgacagcattatcctgagagatgactttgactcctaccaccaactgcaattaaatccaaatatatgggttgaatgtaacaactgtgagactggagaacagtgtggcgcgattatgcatggcaatgccgtcaccttctgtgaaccatatggcccacgagaactgattaccacaggccttaatacaacaacagcttctgtcctccaattttccattgggtcaggttcatgtcgctttagttattcagaccccagcatcatcgtgttatatgccaagaataactctgcggactggattcagctagagaaaattagagccccttccaatgtcagcacaatcatccatatcctctaccttcctgaggacgccaaaggggagaatgtccaatttcagtggaagcaggaaaatcttcgtgtaggtgaagtgtatgaagcctgctgggccttagataacatcttgatcatcaattcagctcacagacaagtcgttttagaagatagtctcgacccagtggacacaggcaactggcttttcttcccaggagctacagttaagcatagctgtcagtcagatgggaactccatttatttccatggaaatgaaggcagcgagttcaattttgccaccaccagggatgtagatctttccacagaagatattcaagagcaatggtcagaagaatttgagagccagcctacaggatgggatgtcttgggagctgtcattggtacagaatgtggaacgatagaatcaggcttatcaatggtcttcctcaaagatggagagaggaaattatgcactccatccatggacactaccggttatgggaacctgaggttttactttgtgatgggaggaatttgtgaccctggaaattctcatgaaaatgacataatcctgtatgcaaaaattgaaggaagaaaagagcatataacactggataccctttcctattcctcatataaggttccgtctttggtttctgtggtcatcaatcctgaacttcagactcctgctaccaaattttgtctcaggcaaaagaaccatcaaggacataataggaatgtctgggctgtagactttttccatgtcttgcctgttctcccttctacaatgtctcacatgatacagttttccatcaatctgggatgtggaacgcatcagcctggtaacagtgtcagcttggaattttctaccaaccatgggcgctcctggtccctccttcacactgaatgcttacctgagatctgtgctggaccccacctcccccacagcactgtctactcctctgaaaactacagtgggtggaaccgaataacaattccccttcctaacgcagcactaacccggaacaccaggattcgctggagacaaacaggaccaatccttggaaacatgtgggcaattgataatgtttatattggcccgtcatgtctcaaattctgttctggcagaggacagtgcactagacatggttgcaagtgtgaccctggattttctggcccagcttgtgagatggcatcccagacattcccaatgtttatttctgaaagctttggcagttccaggctctcctcttaccataacttttactctatccgtggtgctgaagtcagctttggttgtggtgtcttggccagtggtaaggccctggttttcaacaaagaagggcggcgtcagctaattacatctttccttgacagctcacaatccaggtttctccagttcacactgagactggggagcaaatctgttctgagcacgtgcagagcccctgatcagcctggtgaaggagttttgctgcattattcttatgataatgggataacttggaaactcctggagcattattcatatctcagctatcatgagcccagaataatctccgtagaactaccaggtgatgcaaagcagtttggaattcagttcagatggtggcaaccgtatcattcttcccagagagaagatgtatgggctattgatgagattatcatgacatctgtgcttttcaacagcattagtcttgactttaccaatcttgtggaggtcactcagtctctgggattctaccttggaaatgttcagccatactgtggccacgactggaccctttgttttacaggagattctaaacttgcctcaagtatgcgctatgtggaaacacaatcaatgcagataggagcatcctatatgattcagttcagtttggtgatgggatgtggccagaaatacaccccacacatggacaaccaggtgaagctggagtactcaaccaaccacggccttacctggcacctcgtccaagaagaatgccttccaagtatgccaagttgtcaggaatttacatcagcaagtatttaccatgccagtgagtttacacagtggaggagagtcatagtgcttcttccccagaaaacttggtccagtgctacccgtttccgctggagccagagctattacacagctcaagacgagtgggctttggacagcatttacattgggcagcagtgccccaacatgtgcagtgggcatggctcatgcgatcatggcatatgcaggtgtgaccaggggtaccaaggcactgaatgccacccagaagctgcccttccgtccacaattatgtcagattttgagaaccagaatggctgggagtctgactggcaagaagttattgggggagaaattgtaaaaccagaacaagggtgtggtgtcatctcttctggatcatctctgtacttcagcaaggctgggaaaagacagctggtgagttgggacctggatacttcttgggtggactttgtccagttctacatccagataggcggagagagtgcttcatgcaacaagcctgacagcagagaggagggcgtcctccttcagtacagcaacaatgggggcatccagtggcacctgctagcagagatgtacttttcagacttcagcaaacccagatttgtctatctggagcttccagctgctgccaagaccccttgcaccaggttccgctggtggcagcccgtgttctcaggggaggactatgaccagtgggcagtcgatgacatcatcattctgtccgagaagcagaagcagatcatcccagttatcaatccaactttacctcagaacttttatgagaagccagcttttgattaccctatgaatcagatgagtgtgtggttgatgttggctaatgaaggaatggttaaaaatgaaaccttctgtgctgccacaccatcagcaatgatatttggaaaatcagatggagatcgatttgcagtaactcgagatttgaccctgaaacctggatatgtgctacagttcaagctaaacataggttgtgccaatcaattcagcagtactgctccagttcttcttcagtactctcatgatgctggtatgtcctggtttctggtgaaagaaggctgttacccggcttctgcaggcaaaggatgcgaaggaaactccagagaactaagtgagcccaccatgtatcacacaggggactttgaagaatggacaagaatcaccattgttattccaaggtctcttgcatccagcaagaccagattccgatggatccaggagagcagctcacagaaaaacgtgcctccatttggtttagatggagtgtacatatccgagccttgtcccagttactgcagtggccatggggactgcatttcaggagtgtgtttctgtgacctgggatatactgctgcacaaggaacctgtgtgtcaaatgtccccaatcacaatgagatgttcgataggtttgaggggaagctcagccctctgtggtacaagataacaggtgcccaggttggaactggctgtggaacacttaacgatggcaaatctctctacttcaatggccctgggaaaagggaagcccggacggtccctctggacaccaggaatatcagacttgttcaattttatatacaaattggaagcaaaacttcaggcattacctgcatcaaaccaagaactagaaatgaagggcttattgttcagtattcaaatgacaatgggatactctggcatttgcttcgagagttggacttcatgtccttcctggaaccacagatcatttccattgacctgccacaggacgcgaagacacctgcaacggcatttcgatggtggcaaccgcaacatgggaagcattcagcccagtgggctttggatgatgttcttataggaatgaatgacagctctcaaactggatttcaagacaaatttgatggctctatagatttgcaagccaactggtatcgaatccaaggaggtcaagttgatattgactgtctctctatggatactgctctgatattcactgaaaacataggaaaacctcgttatgctgagacctgggattttcatgtgtcagcatctacctttttgcagtttgaaatgagcatgggctgtagcaagcccttcagcaactcccacagtgtacagctccagtattctctgaacaatggcaaggactggcatcttgtcaccgaagagtgtgttcctccaaccattggctgtctgcattacacggaaagttcaatttacacctcggaaagattccagaattggaagcggatcactgtctaccttccactctccaccatttctcccaggacccggttcagatggattcaggccaactacactgtgggggctgattcctgggcgattgataatgttgtactggcctcagggtgcccttggatgtgctcaggacgagggatttgtgatgctggacgctgtgtgtgtgaccggggctttggtggaccctattgtgttcctgttgttcctctgccctcgattcttaaagacgatttcaatgggaatttacatcctgacctttggcctgaagtgtatggtgcagagagggggaatctgaatggtgaaaccatcaaatctggaacatctctaatttttaaaggggaaggactaaggatgcttatttcaagagatctagattgtacaaatacaatgtatgtccagttttcacttagatttatagcaaaaagtaccccagagagatctcactctattctgttacaattctccatcagtggaggaatcacttggcacctgatggatgaattttactttcctcaaacaacgaatatacttttcatcaatgttcccttgccatacactgcccaaaccaatgctacaagattcagactctggcaaccttataataacggtaagaaagaagaaatctggattgttgatgacttcattatcgatggaaataatgtaaacaaccctgtgatgctcttggatacatttgattttgggcccagagaagacaattggtttttctatcctggtggtaacatcggtctttattgtccatattcttcaaagggggcacctgaagaagattcagctatggtgtttgtttcaaatgaagttggtgagcattccattaccacccgtgacctaaatgtgaatgagaacaccatcatacaatttgagatcaacgttggctgttcgactgatagctcatccgcggatccagtgagactggaattttcaagggacttcggggcgacctggcaccttctgctgcccctctgctaccacagcagcagccacgtcagctctttatgctccaccgagcaccaccccagcagcacctactacgcaggaaccatgcagggctggaggagggaggtcgtgcactttgggaagctgcacctttgtggatctgtccgtttcagatggtaccagggattttaccctgccggctctcagccagtgacatgggccattgataatgtctacatcggtccccagtgtgaggagatgtgtaatggacaggggagctgtatcaatggaaccaaatgtatatgtgaccctggctactcaggtccaacctgtaaaataagcaccaaaaatcctgattttctcaaagatgatttcgaaggtcagctagaatctgatagattcttattaatgagtggtgggaaaccatctcgaaagtgtggaatcctttctagtggaaacaacctctttttcaatgaagatggcttgcgcatgttgatgacacgagacctggatttatcacatgctagatttgtgcagttcttcatgagactgggatgtggtaaaggcgttcctgaccccaggagtcaacccgtgctcctacagtattctctcaacggtggcctctcgtggagtcttcttcaggagttccttttcagcaattccagcaatgtgggcaggtacattgccctggagatacccttgaaagcccgttctggttctactcgccttcgctggtggcaaccgtctgagaatgggcacttctacagcccctgggttatcgatcagattcttattggaggaaatatttctggtaatacggtcttggaagatgatttcacaacccttgatagtaggaaatggctgcttcacccaggaggcaccaagatgcccgtgtgtggctctactggtgatgccctggtcttcattgaaaaggccagcacccgttacgtggtcagcacagacgttgccgtgaatgaggattccttcctacagatagacttcgctgcctcctgctcagtcacagactcttgttatgcgattgaattggaatactcagtagatcttggattgtcatggcacccattggtaagggactgtctgcctaccaatgtggaatgcagtcgctatcatctgcaacggatcctggtgtcagacactttcaacaagtggactagaatcactctgcctctccctccttataccaggtcccaagccactcgtttccgttggcatcaaccagctccttttgacaagcagcagacatgggcaatagataatgtctatatcggggatggctgcatagacatgtgcagtggccatgggagatgcatccagggaaactgcgtctgtgatgaacagtggggtggcctgtactgtgatgaccccgagacctctcttccaacccaactcaaagacaacttcaatcgagctccatccagtcagaactggctgactgtgaacggagggaaattgagtacagtgtgtggagccgtggcgtcgggaatggctctccatttcagtgggggttgtagtcgattattagtcactgtggatctaaacctcactaatgctgagttcatccaattttacttcatgtatgggtgcctgattacaccaaacaaccgtaaccaaggtgttctcttggaatattctgtcaatggaggcattacctggaacctgctcatggagattttctatgaccagtacagtaagcccggatttgtgaatatccttctccctcctgatgctaaagagattgccactcgcttccgctggtggcagccaagacatgacggcctggatcagaacgactgggccattgacaatgtcctcatctcaggctctgctgaccaaaggaccgttatgctggacaccttcagcagcgccccagtaccccagcacgagcgctcccctgcagatgccggccctgtcgggaggatcgcctttgacatgtttatggaagacaaaacttcagtgaatgagcactggctattccatgatgattgtacagtagaaagattctgtgactcccctgatggtgtgatgctctgtggcagtcatgatggacgggaggtgtatgcagtgacccatgacctgactcccactgaaggctggattatgcaattcaagatctcagttggatgtaaggtgtctgaaaaaattgcccagaatcaaattcatgtgcagtattctactgacttcggtgtgagttggaattatctggtccctcagtgcttgcctgctgacccaaaatgctctggaagtgtttctcagccatctgtattctttccaactaaagggtggaaaaggatcacctacccacttcctgaaagcttagtgggaaatccggtaaggtttaggttctatcagaagtactcagacatgcagtgggcaatcgataatttctacctgggccctggatgcttggacaactgcaggggccatggagattgcttaagggaacagtgcatctgtgatccgggatactcagggccaaactgctacttgacccacactctgaagactttcctgaaggaacgctttgacagtgaagaaatcaaacctgacttatggatgtccttagaaggtggaagtacttgcactgagtgtggaattcttgccgaggacactgcactctattttgggggatccactgtgagacaagcggttacacaagatttggatcttcgaggtgcaaagttcctgcaatactgggggcgcatcggtagtgagaacaacatgacctcttgccatcgtcccatctgccggaaggaaggcgtgctgttggactactctaccgatggaggaattacctggactttgctccatgagatggattaccagaaatacatttctgttagacacgactacatacttcttcctgaagatgccctcaccaacacaactcgacttcgctggtggcagccttttgtgatcagcaatggaattgtggtctctggggtggagcgtgctcagtgggcactggacaacattttgattggtggagcagaaatcaatcccagccaattggtggacacttttgatgatgaaggcacttcccatgaagaaaactggagtttttaccctaatgctgtaaggacagcaggattttgtggcaatccatcctttcacctctattggccaaataaaaagaaggacaagactcacaatgctctctcctcccgagaactcattatacagccaggatacatgatgcagtttaaaattgtggtgggttgtgaagccacttcttgtggtgaccttcattccgtaatgctggaatacactaaggatgcaagatcggattcctggcagctcgtacagacccagtgccttccttcctcttctaacagcattggctgctcccctttccagttccatgaagccaccatctacaactctgtcaacagctcaagctggaaaagaatcaccatccagctgcctgaccatgtctcctctagtgcaacacagttccgctggatccagaagggagaagaaactgagaagcaaagctgggcaattgaccacgtgtacattggagaggcttgccccaagctctgcagcgggcacggatactgcacgaccggtgccatctgcatctgcgacgagagcttccaaggtgatgactgctctgttttcagtcacgaccttcccagttatattaaagataattttgagtccgcaagagtcaccgaggcaaactgggagaccattcaaggtggagtcataggaagtggctgtgggcagctggccccctacgcccatggagactcactgtactttaatggctgtcagatcaggcaagcagctaccaagcctctggatctcactcgagcaagcaaaatcatgtttgttttgcaaattgggagcatgtcgcagacggacagctgcaacagtgacctgagtggcccccacgctgtggacaaggcggtgctgctgcaatacagcgtcaacaacgggatcacctggcatgtcatcgcccagcaccagccaaaggacttcacacaagctcagagagtgtcttacaatgtccccctggaggcacggatgaaaggagtcttactgcgctggtggcaaccacgccacaatggaacaggtcatgatcaatgggctttggaccatgtggaggtcgtcctagtaagcactcgcaaacaaaattacatgatgaatttttcacgacaacatgggctcagacatttctacaacagaagacgaaggtcacttaggcgatacccatgaagaatcaaaaagtttattttttttcttccaacatgtgatgtgttgctctccattcttttaaatctcgcactacatctgatatcaggaaatatctgtgaaggacttggtgattacctgaaagcccttctcaagaccgagtgtacaccactttcccacactgtgaactaatgacaagtgacttatttgctcataagtaaatgtcttcatgttgatgtgtccgtgaaagttgtgatctgttgtaatatcagttacagtggcagtattgacaataagaaacagtttaacagaaaaatgaaatttaagcacaaaaaatttaagagattttatgtttaaaatggcatttagcacagtatttaacattcttggtcacaaagctatttaagtggactgtatttcagctatgtctcatgttttatatgattaaattatcattgtttgtcctttatgtattctcttctacaatacaacacattgaaactgtatttacttgttatgttgtaatattttgctgctgaatttggggctacttatattctgcagaaaattaattgaaatacctattcaagaagatagttgtaaagatattgtatctcctttaatatactccttaaaaatgtatgttggtttagcgttgttttgtggataagaaaaatgcttgaccctgaaatattttctactttaaattgtggatgaagaccctatctcccacaaataagttcccatttccttgtctaaagatctttttttaagtgttctgtggctgatttactaacagtaactgccattttttgtctgtgataacagagtgatttgtaaaacagtggttgttttttcattgtgttttcttcgtggattgttttttctgcgggtcatattcataccttctgatgaagttgtacaacaccagcaacattataatggccctgtagctctgaatgctatttgtgtaactgaaaggttgcactctagggtgaaccaagctataaaagcccatgcttaaataaaaattatgtccaaaagcc

SEQ ID NO: 157 - DNA, 1359 bp, Homo sapiens
tttccttcctcagcgtcccagatctttcaatctgactggctctccaaacgtcagcatccaggcaaaagagaggaggaggaggaagagggagttgaagaagaggaagaggaagaagggggggctgtgggaccccacaaacggcagcaccctggccgacgagaagatgaggcttcatggtcagtcgatgtaacccagcacaagcggcagcatcctggccggcgctccccctggcttgcatatgctgtcccgaagcggcagcacccaggcagaaggctggcagatcccaaggctcaaaggagctgggaagaagaggaggaggaggaagagagagaggaagacctgatgcctgaaaaacgccagcatccgggcaagagggccctgggaggcccctgtgggccccagggagcctatggtcaagcgggcctcctgctggggctcctggatgacctgagtaggagccagggagctgaggaaaagcggcagcaccctggtcggcgggcagcctgggtcagggagcccctggaggagtgaacccagttttccctgaagtcgagtttgtggtctaaggatgtcttgagccctgtgtgccccaccattcatgacctctgtattctctagttagatccctgaccataagcctgagcccctccctcccagccccatattcacacacatcccagcccctggccttgccctcttcctttaggcatgtgagaaaatcagcctagcagtttaaaccccactttcctccacttagcaccataggcaagggggcagatcccagagcccctctcaccccccccaccacaggcctgctccttccttagccttggctaagatggtccttctgtgtcttgcaaagactccccaagtggacagggagcccctgggagggcagccagtgagggtggggtgggactgaagcgttgtgtgcaaatccagcttccatcccctccccaacctggcaggattctccatgtgtaaacttcacccccaggacccaggatcttctcctttctgggcatccctttgtgggtgggcagagccctgacccacagctgtgttactgcttggagaagcatatgtaggggcataccctgtggtgttgtgctgtgtctggctgtgggataaatgtgtgtgggaatattgaaacatcgcctaggaattgtggtttgtatataaccctctaagcccctatcccttgtcgatgacagtcatcctaatgataataaaacctgcatccagataatcacggagctctgtggttgctgttctgtcgcagctggcatgggattcttctttcgcattgagagggatatttaaaaggggatgggactagagttctcagctctgctgcag

SEQ ID NO: 158 - DNA, 614 bp, Homo sapiens
gatcgttagcttctcctgataaactaattgcctcacattgtcactgcaaatcgacacctattaatgggtctcacctcccaactgcttccccctctgttcttcctgctagcatgtgccggcaactttgtccacggacacaagtgcgatatcaccttacaggagatcatcaaaactttgaacagcctcacagagcagaagactctgtgcaccgagttgaccgtaacagacatctttgctgcctccaagaacacaactgagaaggaaaccttctgcagggctgcgactgtgctccggcagttctacagccaccatgagaaggacactcgctgcctgggtgcgactgcacagcagttccacaggcacaagcagctgatccgattcctgaaacggctcgacaggaacctctggggcctggcgggcttgaattcctgtcctgtgaaggaagccaaccagagtacgttggaaaacttcttggaaaggctaaagacgatcatgagagagaaatattcaaagtgttcgagctgaatattttaatttatgagtttttgatagctttattttttaagtatttatatatttataactcatcataaaataaagtatatatagaatct

SEQ ID NO: 159 - DNA, 1047 bp, Homo sapiens
agagagcgctgggagccggaggggagcgcagcgagttttggccagtggtcgtgcagtccaaggggctggatggcatgctggacccaagctcagctcagcgtccggacccaataacagttttaccaagggagcagctttctatcctggccacactgaggtgcatagcgtaatgtccatgttgttctacactctgatcacagcttttctgatcggcatacaggcggaaccacactcagagagcaatgtccctgcaggacacaccatcccccaagtccactggactaaacttcagcattcccttgacactgcccttcgcagagcccgcagcgccccggcagcggcgatagctgcacgcgtggcggggcagacccgcaacattactgtggaccccaggctgtttaaaaagcggcgactccgttcaccccgtgtgctgtttagcacccagcctccccgtgaagctgcagacactcaggatctggacttcgaggtcggtggtgctgcccccttcaacaggactcacaggagcaagcggtcatcatcccatcccatcttccacaggggcgaattctcggtgtgtgacagtgtcagcgtgtgggttggggataagaccaccgccacagacatcaagggcaaggaggtgatggtgttgggagaggtgaacattaacaacagtgtattcaaacagtacttttttgagaccaagtgccgggacccaaatcccgttgacagcgggtgccggggcattgactcaaagcactggaactcatattgtaccacgactcacacctttgtcaaggcgctgaccatggatggcaagcaggctgcctggcggtttatccggatagatacggcctgtgtgtgtgtgctcagcaggaaggctgtgagaagagcctgacctgccgacacgctccctccccctgccccttctacactctcctgggcccctccctacctcaacctgtaaattattttaaattataaggactgcatggtaatttatagtttatacagttttaaagaatcattatttattaaatttttggaagc

SEQ ID NO: 160 - DNA, 1519 bp, Homo sapiens
gcagagtgttgctgtgtgtgcttgtgatttgtattttatttgatgtaaacgtgaaggcagagtattttctaacactgtaattcaactaggttttgtgtctcctggatctatttttttttcttgttgttctgaggagctgatatacttggaaatattaggtttaagatatgcagatgtccaacttatatacatagtcaagggtttagagtctggagacaggaggctggcaatttcaactagggggcaggtcaggcaagaagcgaaaccctggccttaaaattccaaaagaagcatttgaacaacctcagaccagttccacaccacctcgagatttagactccaaggcttgcatttctattggaaatcagaactttgaggtgaaggcagatgacctggagcctataatggaactgggacgaggtgcgtacggggtggtggagaagatgcggcacgtgcccagcgggcagatcatggcagtgaagcggatccgagccacagtaaatagccaggaacagaaacggctactgatggatttggatatttccatgaggacggtggactgtccattcactgtcaccttttatggcgcactgtttcgggagggtgatatgtggatctgcatggagctcatggatacatcactagataaattctacaaacaagttattgataaaggccagacaattccagaggacatcttagggaaaatagcagtttctattgtaaaagcattagaacatttacatagtaagctgtctgtcattcacagagacgtcaagccttctaatgtactcatcaatgctctcggtcaagtgaagatgtgcgattttggaatcagtggctacttggtggactctgttgctaaaacaattgatgcaggttgcaaaccatacatggcccctgaaagaataaacccagagctcaaccagaagggatacagtgtgaagtctgacatttggagtctgggcatcacgatgattgagttggccatccttcgatttccctatgattcatggggaactccatttcagcagctcaaacaggtggtagaggagccatcgccacaactcccagcagacaagttctctgcagagtttgttgactttacctcacagtgcttaaagaagaattccaaagaacggcctacatacccagagctaatgcaacatccatttttcaccctacatgaatccaaaggaacagatgtggcatcttttgtaaaactgattcttggagactaaaaagcagtggacttaatcggttgaccctactgtggattggtgggtttcggggtgaagcaagttcactacagcatcaatagaaagtcatctttgagataatttaaccctgcctctcagagggttttctctcccaattttctttttactccccctcttaagggggccttggaatctatagtatagaatgaactgtctagatggatgaattatgataaaggcttaggacttcaaaaggtgattaaatatttaatgatgtgtcatatgagaaaaaaaaaaaa

SEQ ID NO: 161 - DNA, 1764 bp, Homo sapiens
atggcctcggaagacattgccaagctggcagagacacttgccaagactcaggtggccgggggacagctgagtttcaaaggcaagagcctcaaactcaacactgcagaagatgctaaagatgtgattaaagagattgaagactttgacagcttggaggctctgcgtctggaaggcaacacagtgggcgtggaagcagccagggtcatcgccaaggccttagagaagaagtcggagttgaagcgctgccactggagtgacatgttcacgggaaggctgcggaccgagatcccaccagccctgatctcactaggggaaggactcatcacagctggggctcagctggtggagctggacttaagcgacaacgcattcgggcccgacggtgtgcaaggcttcgaggccctgctcaagagctcagcctgcttcaccctgcaggaactcaagctcaacaactgtggcatgggcattggcggcggcaagatcctggctgcagctctgaccgaatgtcaccggaaatccagtgcccaaggcaagcctctggccctgaaggtctttgtggctggcagaaaccgtctggagaatgatggcgccactgccttggcagaagcttttagggtcatcgggaccctggaggaggtccacatgccacagaatgggatcaaccaccctggcatcactgccctggcccaggctttcgctgtcaaccccctgctgcgggtcatcaacctgaatgacaacaccttcactgagaagggcgccgtggccatggccgagaccttgaagaccttgcggcaggtggaggtgattaattttggggactgcctggtgcgctccaagggtgcagttgccattgcagatgccatccgcggcggcctgcccaagctaaaggagctgaacttgtcattctgtgaaatcaagagggatgctgccctggctgttgctgaggccatggcagacaaagctgagctggagaagctggacctgaatggcaacaccctgggagaagaaggctgtgaacagcttcaggaggtgctggagggcttcaacatggccaaggtgctggcgtccctcagtgatgacgaggacgaggaggaggaggaggaaggagaagaggaagaagaggaagcagaagaagaggaggaggaagatgaggaagaggaggaagaagaggaggaggaggaggaagaagagcctcagcagcgagggcagggagagaagtcagccacgccctcacggaagattctggaccctaacactggggagccagctcccgtgctgtcctccccacctcctgcagacgtctccaccttcctggcttttccctctccagagaagctcctgcgcctagggcccaagagctccgtgctgatagcccagcagactgacacgtctgaccccgagaaggtggtctctgccttcctaaaggtgtcatctgtgttcaaggacgaagctactgtgaggatggcagtgcaggatgcagtagatgccctgatgcagaaggctttcaactcctcgtccttcaactccaacaccttcctcaccaggctcctcgtgcacatgggtctgctcaagagtgaagacaaggtcaaggccattgccaacctgtacggccccctgatggcgctgaaccacatggtgcagcaggactatttccccaaggcccttgcacccctgctgctggcgttcgtgaccaagcccaacagcgccctggaatcctgctccttcgcccgccacagtctgctgcagacgctgtacaaggtctag

SEQ ID NO: 162 - DNA, 2146 bp, Homo sapiens
cccaagatggaagggagcggcggccgcgtccgcctcaaggcgcattacgggggggacatcttcatcaccagcgtggacgccgccacgaccttcgaggagctctgtgaggaagtgagagacatgtgtcgtctgcaccagcagcacccgctcaccctcaagtgggtggacagcgaaggtgacccttgcacggtgtcctcccagatggagctggaagaggctttccgcctggcccgtcagtgcagggatgaaggcctcatcattcatgttttcccgagcacccctgagcagcctggcctgccatgtccgggagaagacaaatctatctaccgccggggagccagaagatggaggaagctgtaccgtgccaacggccacctcttccaagccaagcgctttaacaggagagcgtactgcggtcagtgcagcgagaggatatggggcctcgcgaggcaaggctacaggtgcatcaactgcaaactgctggtccataagcgctgccacggcctcgtcccgctgacctgcaggaagcatatggattctgtcatgccttcccaagagcctccagtagacgacaagaacgaggacgccgaccttccttccgaggagacagatggaattgcttacatttcctcatcccggaagcatgacagcattaaagacgactcggaggaccttaagccagttatcgatgggatggatggaatcaaaatctctcaggggcttgggctgcaggactttgacctaatcagagtcatcgggcgcgggagctacgccaaggttctcctggtgcggttgaagaagaatgaccaaatttacgccatgaaagtggtgaagaaagagctggtgcatgatgacgaggatattgactgggtacagacagagaagcacgtgtttgagcaggcatccagcaaccccttcctggtcggattacactcctgcttccagacgacaagtcggttgttcctggtcattgagtacgtcaacggcggggacctgatgttccacatgcagaggcagaggaagctccctgaggagcacgccaggttctacgcggccgagatctgcatcgccctcaacttcctgcacgagagggggatcatctacagggacctgaagctggacaacgtcctcctggatgcggacgggcacatcaagctcacagactacggcatgtgcaaggaaggcctgggccctggtgacacaacgagcactttctgcggaaccccgaattacatcgcccccgaaatcctgcggggagaggagtacgggttcagcgtggactggtgggcgctgggagtcctcatgtttgagatgatggccgggcgctccccgttcgacatcatcaccgacaacccggacatgaacacagaggactaccttttccaagtgatcctggagaagcccatccggatcccccggttcctgtccgtcaaagcctcccatgttttaaaaggatttttaaataaggaccccaaagagaggctcggctgccggccacagactggattttctgacatcaagtcccacgcgttcttccgcagcatagactgggacttgctggagaagaagcaggcgctccctccattccagccacagatcacagacgactacggtctggacaactttgacacacagttcaccagcgagcccgtgcagctgaccccagacgatgaggatgccataaagaggatcgaccagtcagagttcgaaggctttgagtatatcaacccattattgctgtccaccgaggagtcggtgtgaggccgcgtgcgtctctgtcgtggacacgcgtgattgaccctttaactgtatccttaaccaccgcatatgcatgccaggctgggcacggctccgagggcggccagggacagacgcttgcgccgagaccgcagagggaagcgtcagcgggcgctgctgggagcagaacagtccctcacacctggcccggcaggcagcttcgtgctggaggaacttgctgctgtgcctgcgtcgcggcggatccgcggggaccctgccgagggggctgtcatgcggtttccaaggtgcacattttccacggaaacagaactcgatgcactgacctgctccgccaggaaagtgagcgtgtagcgtcctgaggaataaaatgttccgatgaaaaaaaaaa

SEQ ID NO: 163 - DNA, 515 bp, Homo sapiens
  misc_feature (75)..(75): n is a, c, g, or t
  misc_feature (147)..(147): n is a, c, g, or t
  misc_feature (251)..(251): n is a, c, g, or t
  misc_feature (253)..(253): n is a, c, g, or t
  misc_feature (269)..(269): n is a, c, g, or t
  misc_feature (369)..(369): n is a, c, g, or t
  misc_feature (421)..(421): n is a, c, g, or t
  misc_feature (438)..(438): n is a, c, g, or t
  misc_feature (448)..(448): n is a, c, g, or t
  misc_feature (467)..(467): n is a, c, g, or t
  misc_feature (502)..(502): n is a, c, g, or t
tttttttttttttttggtgggagctggttgaattgtctttattaacaaacaggatatccaaggccactacattgnggaggggggaggggggagggaggagaagggttacttgctgctcacactatatacagatgcaagcaaggggcntggagagtgagggctccctgctccctccctccaccggggaagggcatgggctagaagaggagaggggggtcgggaatggggggaattttttggctggcggggtncncctccattccctggantttgggggaaggggaatcattaaagtgctttcagaaaatgaagaaatggtccctgcccctgggagtggctggtgaccccccaaaaattttaggggcccantgaccccccccagggtttggtacatttcaaggggggagccggtttcccttgnacttgcaattaaagggntccagggccntgccagttcagcagcattngggtaagggtttcaagccccaagcattttcctttnaattggagaaaag

SEQ ID NO: 164 - DNA, 1236 bp, Homo sapiens
tagttcaagacaacagagacaaagctaagatgaggaagttctgtacagtttaggaaatagaggctttcaaagataattcgcagtgatgtgaaactggcctcccaagccctgataacaacatggccaacgccctggccagcgccacttgcgagcgctgcaagggcggctttgcgcccgctgagaagatcgtgaacagtaatggggagctgtaccatgagcagtgtttcgtgtgcgctcagtgcttccagcagttcccagaaggactcttctatgagtttgaaggaagaaagtactgtgaacatgactttcagatgctctttgccccttgctgtcatcagtgtggtgaattcatcattggccgagttatcaaagccatgaataacagctggcatccggagtgcttccgctgtgacctctgccaggaagttctggcagatatcgggtttgtcaagaatgctgggagacacctgtgtcgcccctgtcataatcgtgagaaagccagaggccttgggaaatacatctgccagaaatgccatgctatcatcgatgagcagcctctgatattcaagaacgacccctaccatccagaccatttcaactgcgccaactgcgggaaggagctgactgccgatgcacgggagctgaaaggggagctatactgcctcccatgccatgataaaatgggggtccccatctgtggtgcttgccgacggcccatcgaagggcgcgtggtgaacgctatgggcaagcagtggcatgtggagcattttgtttgtgccaagtgtgagaaaccctttcttggacatcgccattatgagaggaaaggcctggcatattgtgaaactcactataaccagctatttggtgatgtttgcttccactgcaatcgtgttatagaaggtgatgtggtctctgctcttaataaggcctggtgcgtgaactgctttgcctgttctacctgcaacactaaattaacactcaagaataagtttgtggagtttgacatgaagccagtctgtaagaagtgctatgagaaatttccattggagctgaagaaaagacttaagaaactagctgagaccttaggaaggaaataagttcctttattttttcttttctatgcaagataagagattaccaacattacttgtcttgatctacccatatttaaagctatatctcaaagcagttgagagaagaggacctatatgaatggttttatgtcatttttttaaa

SEQ ID NO: 165 - DNA, 2258 bp, Homo sapiens
gatatcacagcaacattgaaatgctaaaaagtttttaaacactctcaatttctaattcaccatgtcacagactggtgaaaaaaaaaaaaaaagcggccgcttccccccggccgggcccccgccgccccgcggtccccagagcgccaggcccccggggggagggagggagggcgccgggccggtgggagccagcggcgcgcggtgggacccacggagccccgcgacccgccgagcctggagccgggccggctcggggaagccggctccagcccggagcgaacttcgcagcccgtcggggggcggcggggagggggcccggagccggaggagggggcggccgcgggcacccccgcctgtgccccggcgtccccgggcaccatgctgtccaactcccagggccagagcccgccggtgccgttccccgccccggccccgccgccgcagccccccacccctgccctgccgcaccccccggcgcagccgccgccgccgcccccgcagcagttcccgcagttccacgtcaagtccggcctgcagatcaagaagaacgccatcatcgatgactacaaggtcaccagccaggtcctggggctgggcatcaacggcaaagttttgcagatcttcaacaagaggacccaggagaaattcgccctcaaaatgcttcaggactgccccaaggcccgcagggaggtggagctgcactggcgggcctcccagtgcccgcacatcgtacggatcgtggatgtgtacgagaatctgtacgcagggaggaagtgcctgctgattgtcatggaatgtttggacggtggagaactctttagccgaatccaggatcgaggagaccaggcattcacagaaagagaagcatccgaaatcatgaagagcatcggtgaggccatccagtatctgcattcaatcaacattgcccatcgggatgtcaagcctgagaatctcttatacacctccaaaaggcccaacgccatcctgaaactcactgactttggctttgccaaggaaaccaccagccacaactctttgaccactccttgttatacaccgtactatgtggctccagaagtgctgggtccagagaagtatgacaagtcctgtgacatgtggtccctgggtgtcatcatgtacatcctgctgtgtgggtatccccccttctactccaaccacggccttgccatctctccgggcatgaagactcgcatccgaatgggccagtatgaatttcccaacccagaatggtcagaagtatcagaggaagtgaagatgctcattcggaatctgctgaaaacagagcccacccagagaatgaccatcaccgagtttatgaaccacccttggatcatgcaatcaacaaaggtccctcaaaccccactgcacaccagccgggtcctgaaggaggacaaggagcggtgggaggatgtcaaggggtgtcttcatgacaagaacagcgaccaggccacttggctgaccaggttgtgagcagaggattctgtgttcctgtccaaactcagtgctgtttcttagaatccttttattccctgggtctctaatgggaccttaaagaccatctggtatcatcttctcattttgcagaagagaaactgaggcccagaggcggagggcagtctgctcaaggtcacgcagctggtgactggttggggcagaccggacccaggtttcctgactcctggcccaagtctcttcctcctatcctgcgggatcactggggggctctcagggaacagcagcagtgccatagccaggctctctgctgcccagcgctggggtgaggctgccgttgtcagcgtggaccactaaccagcccgtcttctctctctgctcccacccctgccgcctcacctgcccttgttgtctctgtctctcactgtctcttctgctgtctctctactgtcttctggctctctctgtacccttcctggtgctgccgtgcccccaggaggagatgaccagtgccttggccacaatgcgcgttgactacgagcagatcaagataaaaaagattgaagatgcatccaaccctctgctgctgaagaggcggaagaaagctcgggccctggaggctgcggctctggcccactgagccaccgcgccctcctgcccacgggaggacaagcaataactctctacaggaatatattttttaaacgaagagacagaactgtccacatctgcctcctctcctcctcagctgcatggagcctggaactgcatcagtgactgaattc

SEQ ID NO: 166 - DNA, 1590 bp, Homo sapiens
cccgtccgagccccggccccaagtaacgccgccgccccggagccgccttggaggtccccctccccactaagtgcctctttgcatagcaccagtccccacccgcacgctctctggaccactacagctggacgggcaatggcgggtcggggaggcgcacgacgacccaatggaccagctgctgggaacaagatctgtcaatttaagctggttctgctgggggagtctgcggtaggcaaatccagcctcgtcctccgctttgtcaagggacagtttcacgagtaccaggagagcacaattggagcggccttcctcacacagactgtctgcctggatgacacaacagtcaagtttgagatctgggacacagctggacaggagcggtatcacagcctggcccccatgtactatcggggggcccaggctgccatcgtggtctatgacatcaccaacacagatacatttgcacgggccaagaactgggtgaaggagctacagaggcaggccagccccaacatcgtcattgcactcgcgggtaacaaggcagacctggccagcaagagagccgtggaattccaggaagcacaagcctatgcagacgacaacagtttgctgttcatggagacatcagcaaagactgcaatgaacgtgaacgaaatcttcatggcaatagctaagaagcttcccaagaacgagccccagaatgcaactggtgctccaggccgaaaccgaggtgtggacctccaggagaacaacccagccagccggagccagtgctgcagcaactgagccccccttgcctgcccgctgcccccgcctcctccgcctgaatgacccgactggaatccactctaaccaatcgcacttaacgactcgggccaccactgggggggcagggggaggggtccaccatgatttctccatataattttgatcataggccggagtgagtcattccacctgcacctttctgtacaaatactaattcaattttaagtcttaagtcacttttttaatatatatgatcttctgctcttcccacttcctcccctttctactgctctcccattttcccttgctgggagtagccacatgctcttgccccccaacccttgtatatggggacagtggggtcagtgcagctaccctttctttcctctcggacagcgaccagaagagcatcacatctcactttgttcggagtggtctttggtttgggcggtggggtagaccttgggaaggggttaggaagggagaggcagctcttccttcagctggctctcatcaggctgcagccccctccccgctcccacctccctgctgggaaaccacagcattatcacagcattattgtgacagccacgaacccattgcccacaacccctccaccctcggtcaccccaacctctggctctgagccctgttctgaccaaatcatgatgatgagtatttgggggtgggtgggtaagggggggagtgggaggggacggaaccaactttttctgtattttgtattgtatgttttcttcaacatgtaaccaatcagtatcttgtcaatatagtcagccgatcgatcgacctcaaaaaaaaaaa

SEQ ID NO: 167 - DNA, 1208 bp, Homo sapiens
gggggggtggaagcgatagctgagtggcggcggctgctgattgtgttctaggggacggagtaggggaagacgtttgctctcccggaacagcctatctcattcctttctttcgattacccgtggcgcggagagtcagggcggcggctgcggcagcaagggcggcggtggcggcggcggcagctgcagtgacatgtccagcatgaatcccgaatatgattatttattcaagttacttctgattggcgactcaggggttggaaagtcttgccttcttcttaggtttgcagatgatacatatacagaaagctacatcagcacaattggtgtggatttcaaaataagaactatagagttagacgggaaaacaatcaagcttcaaatagaatttgctgattcccttggaattccgtttttggaaaccagtgctaagaatgcaacgaatgtagaacagtctttcatgacgatggcagctgagattaaaaagcgaatgggtcccggagcaacagctggtggtgctgagaagtccaatgttaaaattcagagcactccagtcaagcagtcaggtggaggttgctgctaaaatttgcctccatccttttctcacagcaatgaatttgcaatctgaacccaagtgaaaaaacaaaattgcctgaattgtactgtatgtagctgcactacaacagattcttaccgtctccacaaaggtcagagattgtaaatggtcaatactgactttttttttattcccttgactcaagacagctaacttcattttcagaactgttttaaacctttgtgtgctggtttataaaataatgtgtgtaatccttgttgctttcctgataccagactgtttcccgtggttggttagaatatattttgttttgatgtttatattggcatgtttagatgtcaggtttagtcttctgaagatgaagttcagccattttgtatcaaacagcacaagcagtgtctgtcactttccatgcataaagtttagtgagatgttatatgtaagatctgatttgctagttcttccttgtagagttataaatggaaagattacactatctgattaatagtttcttcatactctgcatataatttgtggctgcagaatattgtaatttgttgcacactatgtaacaaaacaactgaagatatgtttaataaatattgtacttattggaagtaaaaaaaaaaaaaaa

SEQ ID NO: 168 - DNA, 2570 bp, Homo sapiens
tcggaggagccagccgaaatcctgccgcctgcccgggacgaggaggaggaggaggaagaggggatggagcaggggctggaggaggaagaagaggtggatccccggatccagggagaactggagaagttaaatcagtccacggatgatatcaacagacgggagactgaacttgaggatgctcgtcagaagttccgctctgttctggttgaagcaacggtgaaactggatgaactggtgaagaaaattggcaaagctgtggaagactccaagccctactgggaggcacggagggtggcgaggcaggctcagctggaagctcagaaagccacgcaggacttccagagggccacagaggtgctccgtgccgccaaggagaccatctccctggccgagcagcggctgctggaggatgacaagcggcagttcgactccgcctggcaggagatgctgaatcacgccactcagagggtcatggaggcggagcagaccaagaccaggagcgagctggtgcataaggagacggcagccaggtacaatgccgccatgggccgcatgcgacagctggagaagaaactcaagagagccatcaacaagtccaagccttattttgaactcaaggcaaagtactatgtgcagctcgagcaactgaaaaagactgtggatgacctgcaggccaaactgaccctggcaaaaggcgagtacaagatggccctgaagaacctggagatgatctcagatgagatccacgagcggcggcgctccagtgccatggggcctcggggatgcggtgttggtgctgagggcagcagcacatctgtggaggatctgccagggagcaaacctgagcctgatgccatttctgtggcctcggaggcctttgaagatgacagctgtagcaactttgtgtctgaagatgactcggaaacccagtccgtgtccagctttagttcaggaccaacaagcccgtctgagatgcctgaccagttccctgcggttgtgaggcctggcagcctggatctgcccagccctgtgtccctgtcagagtttgggatgatgttcccagtgttgggccctcgaagtgaatgcagcggggcctcctcccctgaatgtgaagtagaacgaggagacagggcagaaggggcagagaataaaacaagtgacaaagccaacaacaaccggggcctcagcagtagcagtggcagtggtggcagcagtaagagccaaagcagcacctcccctgagggccaggccttggagaaccggatgaagcagctctccctacagtgctcaaagggaagagatggaattattgctgacataaaaatggtgcagattggctgattcatcctgggccctggccgatgtgcatatcaacatttatacatggaactggagaacattgtgccaataatcatttaatatatgccaaatcttacacgtctactctaaactgctctaatgaagtttcagtgaccttgagggctaaagattgttcttctgggtaagagctcttgggctggtttttcagagcagagttcttgttgtgggtagactgtgactaggttcacagcctttgtggaacattccgtataacggcattgtggaagcaataactagttcctatgaaagaaccagagctgggaagatggctgggaagccaggccaaagtgggggcaacagcttgcttctctttctcttctcaccctcagtttgtatgggaaaatggagatgtcctctccactttatcccacgatatctaaatgaaaaagaaagaaaacccacacacaaagcaaaaactcaagtattaagagcacatatttttgacccagtggaggcttaaaaaaaaaaaaatccaagaacacaattcattttcaccacctctggtgttcagagggggcttttaaaaaagcgtgtatgctgggatacccattaaaaccattttctagaaggctaccatgagctgcactttttggggtgggaaaggtgaatgccagtggggatgcggggggatgagggtaggagggacttatagaaggggatttgtggctgtgggggagaaggttctacagcataagccttatcctgccagccaaggggatttattctaagagaagtgcatgtgaagaatggttgccactgttattagattgacaagatgttaatttctctgtaggttgtaactttaaaaataaatgaaattatttaagggttatgctgcactagtattccttagaggaaacagttctttaaagttaggaaagggagtaggcaggcatgtgttggcaaaggctgttaatagtagttaagtgttaagactgcttttctttaacgttttcatggtaatgcatatttagagcactgtatttttgtcttgttaagaaaatttagcatttctaaaagaaaaaagcaaccctctttcaaactgttaattctgtcacagcctgtatattttagtcatttgtaaatctcttcatacaatagtgacttcttttttgactgatacagtatcttaattacaaggttattttgtacttgtcttaatacactaagtgtaataaaaacggcttgag

SEQ ID NO: 169 - DNA, 1680 bp, Homo sapiens
ggctacagggggggcgacgcttcagagactgacaacctctgggctgatggggaagatggagtatccttcatacaccccagcagcgagctcttcctgcagcctctggcagtcaccgagaaccacggagaggtagagatccgaaggcacctcaactgcagtcactgccctttgagagactgccaatggcaggcagagctccagctggctgaatgcctgtgcccagaaggcatggagctagctgtggataacgtcacctgcatggacctgcacaagcccccaggccctctggttctgatggtggctgtggtggcaacctcaacactgagcctccttatggtgtgtggggtcctgattctgggtacgaagcgtctagcaggcacagttgattcaaggctgctcctctccatgaagcagaagaagtggcagggcctgcaggagatgaggctgccgagccctgagcttgagctgagcaagcttcgaacctctgccatcaggacagcccccaatccctattattgccaggtggggcttggcccggcccagtcctggcctctgccaccaggtgtcaccgaggtttccccagccaatgttactctgctcagagccctgggccatggtgcctttggggaggtgtatgagggactggtaattggccttcctggggactccagtcccctgcaggtagctatcaagaccctgccagaactctgctcgcctcaggatgagctggatttcctcatggaggccctcatcatcagcaagtttcgccatcagaacattgtgcggtgtgtggggctcagcctcagggccacccctcgcctcattctgctggaactgatgtctggaggggacatgaagagtttcctgaggcacagtcggccacacctgggccagccatcacctctggtcatgcgggacctgctgcaactggcccaggacatagcccagggctgccactacctggaggaaaatcacttcatccacagggatattgccgcccggaactgcctgctgatgcgtggacccagccgagtggccaagattggggactttgggatggcacgagatatctaccgggccagttattaccgcaggggggaccgggccttgctcccagtcaagtggatgcccccagaggccttcctggagggcatcttcacatccaagacagattcctggtcttttggggtgctgctctgggagatcttctcactgggctacatgccctatcctgggcgcaccaaccaggaggtgctggacttcgtcgttggaggaggccggatggaccctcctaggggctgcccagggcctgtgtaccgcatcatgacccagtgttggcagcacgagcctgagctccgccctagctttgccagcatcttggagcgtctgcagtactgcactcaggacccggatgtgctgaattcactcctgccaatggagctggggcccaccccagaggaggaagggacttctgggctggggaacagatctttggagtgcctaagacccccacagccccaggaactgagtccagagaagttgaaaagctggggaggtagccctcttggcccctggctgtcctctggcctcaagcccctcaaatccaggggcctccaacctcagaacctttggaatcccacttatcgctcctgagccccaaggggccctgagggtaaggac

SEQ ID NO: 170 - DNA, 797 bp, Homo sapiens
ggcacgaggttgtagttaagctcgtgtaacggcggcggtgtcggtagctgctgtagcgaagagagtttggcgcgatgtctcacaccattttgctggtacagcctaccaagaggccagaaggcagaacttatgctgactacgaatctgtgaatgaatgcatggaaggtgtttgtaaaatgtatgaagaacatctgaaaagaatgaatcccaacagtccctctatcacatatgacatcagtcagttgtttgatttcatcgatgatctggcagacctcagctgcctggtttaccgagctgatacccagacataccagccttataacaaagactggattaaagagaagatctacgtgctccttcgtcggcaggcccaacaggctgggaaataattgtgttggaagcactgggggggttggggtgggcttggaacacaggtgtgtacagcgtgctgtagtggaagttttgtatcatagtaatcctgtttccactttgttatactctagccaagattgactgtattagatgaaatgtgaggatcttgttcaatcggaaacccccgttacctcctctttttctttctctttctttttttttttttacttaaacatttttatgatgatttagatggaagttgttcttcgtcacttaatgttggttccagtccttcaactgttcatatctactttataacattcacatactaacccttctggggttcaagatggggggtggcaaatgcagtttagccatgtcctcaagataaagtcttggtaaaaataaataaatgtcctttagtt

SEQ ID NO: 171 - DNA, 1548 bp, Homo sapiens
gctgggctgggctcggcacggggcggggcggagggtggggagcggaaagcaggacgcgcggctcccgcggcccgctggctgcccttcccgccagcgcaggtgtgggacgggcggcggactaggcacagagctgcgggagcaggcacagggagtgtggagcctggcggcgggacggcgggatccggtgggagccggagtcccgccgaggggggctggaggtggaggggcccggcgaggccgcgatgaagccgagcggcgaggaccaggcggcgctggcggccggcccctgggaggagtgcttccaggcggccgtgcagctggcgctgcgggcaggacagatcatcagaaaagcccttactgaggaaaaacgtgtctcaacaaaaacatcagctgcagatcttgtgacagaaacagatcaccttgtggaagatttaattatttctgagttgcgagagaggtttccttcacacaggttcattgcagaagaggccgcggcttctggggccaagtgtgtgctcacccacagcccgacgtggatcatcgaccccatcgacggcacctgcaattttgtgcacagattcccgactgtggcggttagcattggatttgctgttcgacaagagcttgaattcggagtgatttaccactgcacagaggagcggctgtacacgggccggcggggtcggggcgccttctgcaatggccagcggctccgggtctccggggagacagatctctcaaaggccttggttctgacagaaattggccccaaacgtgaccctgcgaccctgaagctgttcctgagtaacatggagcggctgctgcatgccaaggcgcatggggtccgagtgattggaagctccacattggcactctgccacctggcctcaggggccgcggatgcctattaccagtttggcctgcactgctgggatctggcggctgccacagtcatcatcagagaagcaggcggcatcgtgatagacacttcgggtggacccctcgacctcatggcttgcagagtggttgcggccagcacccgggagatggcgatgctcatagctcaggccttacagaccattaactatgggcgggatgatgagaagtgactgcggctgaggcaaagctgctcccaaggcctccctgggctgctgtgggctcctggggaggtggccctcgtggcccacgctccatgccagtggctcacgctctgctcctggctaccccagagggagttgtcacgctacagtgagtggctggccttttaaatcgacgtctctctcaccaggatttggtgtttagctgtttctctctttaatctcacgtagcctttttcaggttagtacgtgttcttctgtcagggccaaaactcaaatctcctgtgaaatacgtattgataatccaatcttgatttttccccccagaatataaatctcaggtaataaggctttagaactgctgataaagcggatcgttctcaggccctccccccggagtacttcagaatgcaataaatcaaaataatgggcaaaaaaaaaaaaaaaaaaa

SEQ ID NO: 172 - DNA, 1303 bp, Homo sapiens
aggaggcacagttaatggatctgtaaacttgcaccctctttcagagtggtacatggaagacagcacaaagtggatccatactctgaaatgcagtaactctgatgcttgaatttgttctcccttcttgccagaaaggattctaataactcggtgtcaaagccaagacataaactcaatctcttctcttccaaaagcttcacgttacagcatggaagctgttgccaagtttgatttcactgcttcaggtgaggatgaactgagctttcacactggagatgttttgaagattttaagtaaccaagaggagtggtttaaggcggagcttgggagccaggaaggatatgtgcccaagaatttcatagacatccagtttcccaaatggtttcacgaaggcctctctcgacaccaggcagagaacttactcatgggcaaggaggttggcttcttcatcatccgggccagccagagctccccaggggacttctccatctctgtcaggcatgaggatgacgttcaacacttcaaggtcatgcgagacaacaagggtaattactttctgtggactgagaagtttccatccctaaataagctggtagactactacaggacaaattccatctccagacagaagcagatcttccttagagacagaacccgagaagaccagggtcaccggggcaacagcctggaccggaggtcccagggaggcccacacctcagtggggctgtgggagaagaaatccgaccttcgatgaaccggaagctgtcggatcaccccccgacccttcccctgcagcagcaccagcaccagccacagcctccgcaatatgccccagcgccccagcagctgcagcagcccccacagcagcgatatctgcagcaccaccatttccaccaggaacgccgaggaggcagccttgacataaatgatgggcattgtggcaccggcttgggcagtgaaatgaatgcggccctcatgcatcggagacacacagacccagtgcagctccaggcggcagggcgagtgcggtgggcccgggcgctgtatgactttgaggccctggaggatgacgagctggggttccacagcggggaggtggtggaggtcctggatagctccaacccatcctggtggaccggccgcctgcacaacaagctgggcctcttccctgccaactacgtggcacccatgacccgataaactcttcaggggacagaagctttttgtctggagctgcccacaagaaagagggcaaggaaaaaaggctggactccatgactatatatacatacatctatctac

SEQ ID NO: 173 - DNA, 2205 bp, Homo sapiens
actcactatagggctcgagcggccgcctgggcaggtgcttaggacctgtgtatgacgtttcacctgtgatctgttctttcggtagccactgactttgagttacaggaaggtctccgaagatttgtgtcaaatgacgtcaatggccagcttgttttcttttactagtccagcagtaaagcgattgttgggctggaaacaaggtgatgaggaggagaaatgggcagaaaaggcagttgatgctttggtgaagaaactaaaaaagaaaaagggtgccatggaggaactggagaaagccttgagcagtccaggacagccgagtaaatgtgtcactattcccagatctttagatggacgcctgcaggtttctcacagaaaaggcttaccccatgttatatattgtcgtgtttggcgctggccggatttgcagagtcatcatgagctaaagccgttggatatttgtgaatttccttttggatctaagcaaaaagaagtttgtatcaacccataccactataagagagtggagagtccagtcttacctccagtattagtgcctcgtcataatgaattcaatccacaacacagccttctggttcagtttaggaacctgagccacaatgaaccacacatgccacaaaatgccacgtttccacattctttccaccagcccaacaacactccttttcccttatctccaaacagcccttatcccccttctcctgctagcagcacatatcccaactccccagcaagttctggaccaggaagtccatttcagctcccagctgatacgcctcctcctgcctatatgccacctgatgatcagatgggtcaagatccttcccagcctatggatacaagcaataatatgattcctcagattatgcccagtatatccagcagggatgttcagcctgttgcctatgaagagcctaaacattggtgttcaatagtctactatgaattaaacaatcgtgttggagaagcttttcatgcatcttctactcgtgtgttagtagatggattcacagatccttcaaataacaaaagtagattctgcttgggtttgttgtcaaatgttaatcgtaattcgacaattgaaaacactaggcgacatattggaaaaggtgttcatctgtactatgttggtggagaggtgtatgcggaatgcctcagtgacagcagcatatttgtacagagtaggaactgcaactttcatcatggctttcatcccaccactgtctgtaagattcccagcagctgcagcctcaaaatttttaacaatcaggagtttgctcagcttctggctcaatctgtcaaccatgggtttgaggcagtatatgagctcaccaaaatgtgtaccattcggatgagttttgtcaagggttggggagcagaatatcaccggcaggatgtaaccagcaccccatgttggattgagattcatcttcatgggcctcttcagtggctggataaagtccttactcagatgggctcccctctgaaccccatatcttctgtttcataatgcagaagtattcttttcaattatattgttagtggacttgttttaattttagagaaactttgagtacagatactgtgagcttacattgaaaacagatattacagcttatttttttctacataattgtgaccaatacatttgtattttgtgatgaatctacatttgtttgtattcatgttcatgtgattaactcttagaagtgttgtaaaagatgcagagtaagtattatgccccagttcagaaatttggcattgatcttaaactggaacatgcttttactttattgccctaacaattttttattaaatttatttgaaaatgcatcacatgatgaaaaattatagcttataagagggcatatacagtgaagagtaagttttccctcctactctcgatcttccagaagctgtacttttaccagtttctttgtcccaccaacttaaaaaaaaaaagtacaattcattgttttgcaaaagtgtatggtaggggcttaaaagaaactataaagttttatttgaatgaacactatgcactgctgtaactggtagtgttcagtaaaagcaaaatgatagttttctagatgacataaaatttacatttaatacagataagtgttcttcagtgtaatgtgacttcatgctatatatcttttgtaagacatttccttttttaaaaaa

SEQ ID NO: 174 - DNA, 1414 bp, Homo sapiens
ggaattccggaattccgcggagcaggcctcgtgccgttacggccatcacggccgccgcagtggcgtcctggagccctcctcagtgctgaagctgctgaaagatggcagaagaagtggtggtagtagccaaatttgattatgtggcccaacaagaacaagagttggacatcaagaagaatgagagattatggcttctggatgattctaagtcctggtggcgagttcgaaattccatgaataaaacaggttttgtgccttctaactatgtggaaaggaaaaacagtgctcggaaagcatctattgtgaaaaacctaaaggataccttaggcattggaaaagtgaaaagaaaacctagtgtgccagattctgcatctcctgctgatgatagttttgttgacccaggggaacgtctctatgacctcaacatgcccgcttatgtgaaatttaactacatggctgagagagaggatgaattatcattgataaaggggacaaaggtgatcgtcatggagaaatgcagtgatgggtggtggcgtggtagctacaatggacaagttggatggttcccttcaaactatgtaactgaagaaggtgacagtcctttgggtgaccatgtgggttctctgtcagagaaattagcagcagtcgtcaataacctaaatactgggcaagtgttgcatgtggtacaggctctttacccattcagctcatctaatgatgaagaacttaatttcgagaaaggagatgtaatggatgttattgaaaaacctgaaaatgacccagagtggtggaaatgcaggaagatcaatggtatggttggtctagtaccaaaaaactatgttaccgttatgcagaataatccattaacttcaggtttggaaccatcacctccacagtgtgattacattaggccttcactcactggaaagtttgctggcaatccttggtattatggcaaagtcaccaggcatcaagcagaaatggcattaaatgaaagaggacatgaaggggatttcctcattcgtgatagtgaatcttcgccaaatgatttctcagtatcactaaaagcacaagggaaaaacaagcattttaaagtccaactaaaagagactgtctactgcattgggcagcgtaaattcagcaccatggaagaacttgtagaacattacaaaaaggcaccaatttttacaagtgaacaaggagaaaaattatatcttgtcaagcatttatcatgatactgctgaccagaagtgactgctgtgtagctgtaatttgtcatgtaattgaattgaagactgagaaaatgttgggtccagtcgtgcttgattggaaattgttgtttctaaatctatatgagatttgacatagtattttattatactcagccatacatatatactatgtatgagcagtg

SEQ ID NO: 175 - DNA, 2716 bp, Homo sapiens
ccgggtaaaccatggctgtgtggatacaagctcagcagctccaaggagaagcccttcatcagatgcaggcgttatatggccagcattttcccattgaggtgcggcattatttatcccagtggattgaaagccaagcatgggactcagtagatcttgataatccacaggagaacattaaggccacccagctcctggagggcctggtgcaggagctgcagaagaaggcagagcaccaggtgggggaagatgggtttttactgaagatcaagctggggcactatgccacacagctccagaacacgtatgaccgctgccccatggagctggtccgctgcatccgccatatattgtacaatgaacagaggttggtccgagaagccaacaatggtagctctccagctggaagccttgctgatgccatgtcccagaaacacctccagatcaaccagacgtttgaggagctgcgactggtcacgcaggacacagagaatgagttaaaaaagctgcagcagactcaggagtacttcatcatccagtaccaggagagcctgaggatccaagctcagtttggcccgctggcccagctgagcccccaggagcgtctgagccgggagacggccctccagcagaagcaggtgtctctggaggcctggttgcagcgtgaggcacagacactgcagcagtaccgcgtggagctggccgagaagcaccagaagaccctgcagctgctgcggaagcagcagaccatcatcctggatgacgagctgatccagtggaagcggcggcagcagctggccgggaacggcgggccccccgagggcagcctggacgtgctacagtcctggtgtgagaagttggccgagatcatctggcagaaccggcagcagatccgcagggctgagcacctctgccagcagctgcccatccccggcccagtggaggagatgctggccgaggtcaacgccaccatcacggacattatctcagccctggtgaccagcacgttcatcattgagaagcagcctcctcaggtcctgaagacccagaccaagtttgcagccactgtgcgcctgctggtgggcgggaagctgaacgtgcacatgaaccccccccaggtgaaggccaccatcatcagtgagcagcaggccaagtctctgctcaagaacgagaacacccgcaatgattacagtggcgagatcttgaacaactgctgcgtcatggagtaccaccaagccacaggcacccttagtgcccacttcaggaatatgtccctgaaacgaattaagaggtcagaccgtcgtggggcagagtcggtgacagaagaaaaatttacaatcctgtttgaatcccagttcagtgttggtggaaatgagctggtttttcaagtcaagaccctgtccctgccagtggtggtgatcgttcatggcagccaggacaacaatgcgacggccactgttctctgggacaatgcttttgcagagcctggcagggtgccatttgccgtgcctgacaaagtgctgtggccacagctgtgtgaggcgctcaacatgaaattcaaggccgaagtgcagagcaaccggggcctgaccaaggagaacctcgtgttcctggcgcagaaactgttcaacaacagcagcagccacctggaggactacagtggcctgtctgtgtcctggtcccagttcaacagggagaatttaccaggacggaattacactttctggcaatggtttgacggtgtgatggaagtgttaaaaaaacatctcaagcctcattggaatgatggggccattttggggtttgtaaacaagcaacaggcccatgacctactcattaacaagccagatgggaccttcctcctgagattcagtgactcagaaattggcggcatcaccattgcttggaagtttgattctcaggaaagaatgttttggaatctgatgccttttaccaccagagacttctccatccggtccctagccgaccgcttgggagacttgaattaccttatctacgtgtttcctgatcggccaaaagatgaagtatactccaaatactacacaccagttccctgcgagtctgctactgctaaagctgttgatggatacgtgaagccacagatcaagcaagtggtccctgagtttgtgaacgcatctgcagatgccgggggcggcagcgccacgtacatggaccaggccccctccccagctgtgtgtccccaggctcactataacatgtacccacagaaccctgactcagtccttgacaccgatggggacttcgatctggaggacacaatggacgtagcgcggcgtgtggaggagctcctgggccggccaatggacagtcagtggatcccgcacgcacaatcgtgaccccgcgacctctccatcttcagcttcttcatcttcaccagaggaatcactcttgtggatgttttaattccatcaatcgcttctcttttgaaaacaatactcataatgtgaagtgttaatactagttgtgaccttagtgtttctgtgcatggtggcaccagcgaaggggagtgcgagtatgtgtttgtgtgtgtgtgtgtgtgtgtgtgtgtgtgcgtgtttgcacgttatggtgtttctccctctcactgtctgagagtttagttgtagcagaggggccacagacagaagctgtggtggtttttactttgtgcaaaaaggcagtgagtttcgtgaagcct

SEQ ID NO: 176 - DNA, 1310 bp, Homo sapiens
tgggctcttcactcccaacaatggcggctccgagcccgagcggcggcggcggctccgggggcggcagcggcagcggcacccccggccccgtagggtccccggcgccaggccacccggccgtcagcagcatgcagggtaaacgcaaagcactgaagttgaattttgcaaatccacctttcaaatctacagcaaggtttactctgaatcccaatcctacaggagttcaaaacccacacatagagagactgagaacacacagcattgagtcatcaggaaaactgaagatctcccctgaacaacactgggatttcactgcagaggacttgaaagaccttggagaaattggacgaggagcttatggttctgtcaacaaaatggtccacaaaccaagtgggcaaataatggcagttaaaagaattcggtcaacagtggatgaaaaagaacaaaaacaacttcttatggatttggatgtagtaatgcggagtagtgattgcccatacattgttcagttttatggtgcactcttcagagagggtgactgttggatctgtatggaactcatgtctacctcgtttgataagttttacaaatatgtatatagtgtattagatgatgttattccagaagaaattttaggcaaaatcactttagcaactgtgaaagcactaaaccacttaaaagaaaacttgaaaattattcacagagatatcaaaccttccaatattcttctggacagaagtggaaatattaagctctgtgacttcggcatcagtggacagcttgtggactctattgccaagacaagagatgctggctgtaggccatacatggcacctgaaagaatagacccaagcgcatcacgacaaggatatgatgtccgctctgatgtctggagtttggggatcacattgtatgagttggccacaggccgatttccttatccaaagtggaatagtgtatttgatcaactaacacaagtcgtgaaaggagatcctccgcagctgagtaattctgaggaaagggaattctccccgagtttcatcaactttgtcaacttgtgccttacgaaggatgaatccaaaaggccaaagtataaagagcttctgaaacatccctttattttgatgtatgaagaacgtgccgttgaggtcgcatgctatgtttgtaaaatcctggatcaaatgccagctactcccagctctcccatgtatgtcgattgatatcgctgctacatcagactctagaaaaaagggctgagaggaagcaagacgtaaagaattttcatcccgtatcacagtgtttttattgct

SEQ ID NO: 177 - DNA, 2467 bp, Homo sapiens
acctctggtggtggctggctactcggatacgaattcggcacgagggcaggcgtcggctagtgtcgggagtcgcgcccgccgcccctcagctgcccggcccggagcccgagacgcgcgcaccatgagcggtggtgaagtggtctgctccggatggctccgcaagtcccccccggagaaaaagttgaagcgttatgcatggaagaggagatggttcgtgttacgcagtggccgtttaactggagatccagatgttttggaatattacaaaaatgatcatgccaagaagcctattcgtattattgatttaaatttatgtcaacaagtagatgctggattgacatttaacaaaaaagagtttgaaaacagctacatttttgatatcaacactattgaccggattttctacttggtagcagacagcgaggaggagatgaataagtgggttcgttgtatttgtgacatctgtgggtttaatccaacagaagaagatcctgtgaagccacctggcagctctttacaagcaccagctgatttacctttagctataaatacagcaccaccatccacccaggcagattcatcctctgctactctacctcctccatatcagctaatcaatgttccaccacacctggaaactcttggcattcaggaggatcctcaagactacctgttgctcatcaactgtcaaagcaagaagcccgaacccaccagaacgcatgctgattctggaaaatccacctcttctgaaacagactccaatgataacgtcccttctcataaaaatcctgcttcctcccagagcaaacatggaatgaatggcttttttcagcagcaaatgatatacgactctccaccttcacgtgccccatctgcttcagttgactccagcctttataacctgcccaggagttattcccatgatgttttaccaaaggtgtctccatcaagtactgaagcagatggagaactctatgtttttaataccccatctgggacatcgagtgtagagactcaaatgaggcatgtatctattagttatgacattcctccaacacctggtaatacttatcagattccacgaacatttccagaaggaaccttgggacagacatcaaagctagacactattccagatattcctccacctcggccaccgaaaccacatccagctcatgaccgatctcctgtggaaacgtgtagtatcccacgcaccgcctcagacactgacagtagttactgtatccctacagcagggatgtcgccttcacgtagtaataccatttccactgtggatttaaacaaattgcgaaaagatgctagttctcaagactgctatgatattccacgagcatttccaagtgatagatctagttcacttgaaggcttccataaccactttaaagtcaaaaatgtgttgacagtgggaagtgtttcaagtgaagaactggatgaaaattacgtcccaatgaatcccaattcaccaccacgacaacattccagcagttttacagaaccaattcaggaagcaaattatgtgccaatgactccaggaacatttgatttttcctcatttggaatgcaagttcctcctcctgctcatatgggcttcaggtccagcccaaaaacccctcccagaaggccagttcctgttgcagactgtgaaccaccccccgtggataggaacctcaagccagacagaaaagtcaagccagcgcctttagaaataaaacctttgccagaatgggaagaattacaagccccagttagatctcccatcactaggagttttgctcgagactcttccaggtttcccatgtccccccgaccagattcagtgcatagcacaacttcaagcagtgactcacacgacagtgaagagaattatgttcccatgaacccaaacctgtccagtgaagacccaaatctctttggcagtaacagtcttgatggaggaagcagccctatgatcaagcccaaaggagacaaacaggtggaatacttagatctcgacttagattctgggaaatccacaccaccacgtaagcaaaagagcagtggctcaggcagcagtgtagcagatgagagagtggattatgttgttgttgaccaacagaagaccttggctctaaagagtacccgggaagcctggacagatgggagacagtccacagaatcagaaacgccagcgaagagtgtgaaatgaaaatattgccttgccatttctgaacaaaagaaaactgaattgtaaagataaatcccttttgaagaatgacttgacacttccactctaggtagatcctcaaatgagtagagttgaagtcaaaggacctttctgacataatcaagcaatttagacttaagtggtgctttgtggtatctgaacaattcataacatgtaaataatgtgggaaaatagtattgtttagctcccagagaaacatttgttccacagttaacacactcg

SEQ ID NO: 178 - DNA, 3008 bp, Homo sapiens
cctgaatccttggagactgacatttttcccccctaaaggcatagacaacaaaagaaattttattgagaggaaaacacaagtccttaaactgcaaagatgtttgccaggatgtctgatctccatgttctgctgttaatggctctggtgggaaagacagcctgtgggttctccctgatgtctttattggaaagcctggacccagactggacccctgaccagtatgattacagctacgaggattataatcaggaagagaacaccagtagcacacttacccatgctgagaatcctgactggtactacactgaggaccaagctgatccatgccagcccaacccctgtgaacacggtggggactgcctcgtccatgggagcaccttcacatgcagctgcctggctcctttctctgggaataagtgtcagaaagtgcaaaatacgtgcaaggacaacccatgtggccggggccaatgtctcattacccagagtcctccctactaccgctgtgtctgtaaacacccttacacaggtcccagctgctcccaagtggttcctgtatgcaggccaaacccctgccagaatggggctacctgctcccggcataagcggagatccaagttcacctgtgcctgtcccgaccagttcaaggggaaattctgtgaaataggttctgatgactgctatgttggcgatggctactcttaccgagggaaaatgaataggacagtcaaccagcatgcgtgcctttactggaactcccacctcctcttgcaggagaattacaacatgtttatggaggatgctgaaacccatgggattggggaacacaatttctgcagaaacccagatgcggacgaaaagccctggtgctttattaaagttaccaatgacaaggtgaaatgggaatactgtgatgtctcagcctgctcagcccaggacgttgcctacccagaggaaagccccactgagccatcaaccaagcttccggggtttgactcctgtggaaagactgagatagcagagaggaagatcaagagaatctatggaggctttaagagcacggcgggcaagcacccatggcaggcgtccctccagtcctcgctgcctctgaccatctccatgccccagggccacttctgtggtggggcgctgatccacccctgctgggtgctcactgctgcccactgcaccgacataaaaaccagacatctaaaggtggtgctaggggaccaggacctgaagaaagaagaatttcatgagcagagctttagggtggagaagatattcaagtacagccactacaatgaaagagatgagattccccacaatgatattgcattgctcaagttaaagccagtggatggtcactgtgctctagaatccaaatacgtgaagactgtgtgcttgcctgatgggtcctttccctctgggagtgagtgccacatctctggctggggtgttacagaaacaggaaaagggtcccgccagctcctggatgccaaagtcaagctgattgccaacactttgtgcaactcccgccaactctatgaccacatgattgatgacagtatgatctgtgcaggaaatcttcagaaacctgggcaagacacctgccagggtgactctggaggccccctgacctgtgagaaggacggcacctactacgtctatgggatagtgagctggggcctggagtgtgggaagaggccaggggtctacacccaagttaccaaattcctgaattggatcaaagccaccatcaaaagtgaaagtggcttctaaggtactgtcttctggacctcagagcccactctccttggcaccctgacaccgggaggcctcatggccaacaatggacacctccagagcctccaggggaccacacagtagactatccctactctaagcagagacaactgccacccagcctgggccttcccagaccagcatttgcacaatatcaccaggcttcttctgcctcccttggtaacccaaggaatgatggaatcaacacaacatagtatgtttgctttccttacccaattgtaccttctagaaaatcagtgttcacagagactgcctccaccacaggcatcctgcaaatgcagactccagaatccccagcatcagcgggaaccaccatcacatctttattcctcagcccagacactcgaggcactcaacagaatcagccatccacgtctaggtatcagagaggaccacaaatacaacattctccatctgctttcagagttattattttaataaaggaagatctgggatgggctggtgggccattccagcttgccgaaatcaaagccatctgaagcctgtctctggtgaacaaacttcctctctggcctctcaggaatcagggtggcatggctcacaacagcagggccttcttctttttgacgtgcagaatctcagtggcatctgggttcacctccccactctgatgatctccagcctccactgcttctgccccccgctgctgaaatcaaacataccccaagttaaaatgaagctcccccacccccactcccggccccggttcccacaggacacgctaagaagcacagggagcatttaacaggctcaccctccctttccttttcccctcttctaccctccccaagaaaaagggccttcaaggcaggaatgagaaagcaaagccaatctctcatttagacctggcttctttcttctgaacaaagtagggttcaaaatgcagactgtcatatccagcgagtccctgaccctttctgcgaatgtaacgagcaagcagtcagcacagcctgggctgccctggcccgggattgatgtagccccggtaggtttgcctctgcagaactaatggctgtgacttcagagaagccctgcaggaagtttaacctacgtgtcatctgcctggtcatctcagacccatgaaattaggcgccttgtttgagctgcgtttcacacttctttagacgctagctgacctttggccaaaaataaactttgaaaag

SEQ ID NO: 179 - DNA, 2392 bp, Homo sapiens
gcggagcgcgcgctcccagcgaaagcagcagggcagggatctgcgttggaggaagggactgctctggtgctagaatgctgtgcgtcggaaggctgggcggcttgggagccagagcagcagctctgccgccccgccgggcgggccggggaagcctcgaagccgggatccgggcccgaagggtcagcaccagctggtctcccgtgggcgccgccttcaatgtcaagccccagggcagccgcttggacctgttcggcgagcgggcgcgtctttttggagttcctgagctgagtgccccagaaggatttcatattgcacaagaaaaagccttgagaaagacagaattgcttgtggaccgtgcatgttccaccccacctgggccccagaccgtgctgatcttcgatgagctctcggattccttatgcagagtggccgacttggctgattttgtgaaaatcgctcaccctgagccagcattcagagaagctgcggaagaagcttgtagaagtattggcaccatggtagagaagttgaacacaaatgtggatttatatcaaagtttgcaaaaattactagctgataaaaaacttgtggattcccttgatccagaaacaaggcgagtggctgaactgtttatgtttgattttgaaattagtggaatccatctagacaaacaaaagcgtaaaagagcagtggacctcaatgttaaaatcttggatttgagtagtacatttcttatgggaaccaattttcccaacaagattgagaagcatctcttaccagaacacattcgtcgtaactttacatctgctggggatcatatcataattgatggtctccacgcagaatcaccagatgacttggtgcgagaagctgcttataaaatttttctttatcccaatgctggtcaattgaaatgtttagaagaattgctcagcagcagagatcttctggcaaagttggtggggtattccacgttttctcacagggctctccaaggaacgatagctaaaaatccagagactgtcatgcagttccttgaaaaactatctgacaaactttctgaaagaactctgaaagattttgagatgatacgagggatgaaaatgaaactgaatgctcaaaattccgaagtaatgccctgggaccccccttactacagtggtgtgattcgtgcagaaaggtataatattgagcccagcctatattgcccgtttttctctcttggagcatgcatggaaggcctgaatattttgcttaacagactgttggggatttcattatatgcagagcagcctgcaaaaggagaggtgtggagcgaagatgtccgaaaactggctgttgttcatgaatctgaaggattgttggggtacatttactgtgatttttttcagcgagcagacaaaccacatcaggattgccatttcactatccgtggaggcagactaaaggaagatggagactatcaactcccacttgtagttcttatgctgaatcttccccgttcctcaaggagttctccaactttgctaactcctggcatgatggaaaatcttttccatgaaatgggacatgccatgcattcaatgctaggacgtactcgttaccaacacgtcactgggaccaggtgccctactgattttgctgaggttccttctattctgatggagtactttgcaaatgattatcgagtagttaaccaatttgccagacattatcagactggacagccactgccaaaaaatatggtgtctcgtctttgtgaatctaaaaaggtttgtgctgcagctgatatgcaacttcaggtcttttatgccactctggatcaaatctaccatgggaagcatcccctgaggaattcaaccacagacattctcaaggaaacacaagagaaattctatggcctaccatatgttccaaatactgcctggcagctgcgattcagccacctcgtggggtatggtgctagatattactcttacctcatgtccagagcggtcgcctccatggtttggaaggagtgttttctacaggatcctttcaacagggctgccggggagcgctatcgcagggagatgctggcccacggtggaggcagggagcccatgctcatggttgaaggtatgcttcagaagtgtccttctgttgatgacttcgtaagtgccctcgtttccgacttggatctggacttcgaaactttcctcatggattctgaataaaagaaacactctacacctctaatcaaggtcatgtagtaatgactttgttataaatgctacagctgtgagagcttgtttctgattgtttcattgttcgcttctgtaattctgaaaaactttaaactggtagaacttggaataaataatttgttttaattaaaaaaaaaaaaaaaaaa

SEQ ID NO: 180 - DNA, 763 bp, Homo sapiens
  misc_feature (2)..(2): n is a, c, g, or t
  misc_feature (6)..(8): n is a, c, g, or t
  misc_feature (10)..(10): n is a, c, g, or t
  misc_feature (18)..(18): n is a, c, g, or t
  misc_feature (31)..(31): n is a, c, g, or t
  misc_feature (33)..(33): n is a, c, g, or t
  misc_feature (39)..(39): n is a, c, g, or t
  misc_feature (41)..(41): n is a, c, g, or t
  misc_feature (43)..(43): n is a, c, g, or t
  misc_feature (46)..(46): n is a, c, g, or t
  misc_feature (48)..(48): n is a, c, g, or t
  misc_feature (54)..(54): n is a, c, g, or t
  misc_feature (59)..(59): n is a, c, g, or t
  misc_feature (67)..(67): n is a, c, g, or t
  misc_feature (74)..(74): n is a, c, g, or t
  misc_feature (77)..(77): n is a, c, g, or t
  misc_feature (102)..(102): n is a, c, g, or t
  misc_feature (106)..(107): n is a, c, g, or t
  misc_feature (109)..(110): n is a, c, g, or t
  misc_feature (123)..(123): n is a, c, g, or t
  misc_feature (132)..(132): n is a, c, g, or t
  misc_feature (138)..(138): n is a, c, g, or t
  misc_feature (141)..(141): n is a, c, g, or t
  misc_feature (220)..(220): n is a, c, g, or t
  misc_feature (451)..(451): n is a, c, g, or t
  misc_feature (509)..(509): n is a, c, g, or t
  misc_feature (530)..(530): n is a, c, g, or t
  misc_feature (535)..(535): n is a, c, g, or t
  misc_feature (541)..(541): n is a, c, g, or t
  misc_feature (543)..(543): n is a, c, g, or t
  misc_feature (552)..(552): n is a, c, g, or t
  misc_feature (560)..(560): n is a, c, g, or t
  misc_feature (570)..(570): n is a, c, g, or t
  misc_feature (576)..(641): n is a, c, g, or t
  misc_feature (643)..(645): n is a, c, g, or t
  misc_feature (647)..(658): n is a, c, g, or t
  misc_feature (660)..(661): n is a, c, g, or t
  misc_feature (663)..(675): n is a, c, g, or t
  misc_feature (677)..(679): n is a, c, g, or t
  misc_feature (681)..(681): n is a, c, g, or t
  misc_feature (683)..(684): n is a, c, g, or t
  misc_feature (686)..(688): n is a, c, g, or t
  misc_feature (690)..(695): n is a, c, g, or t
  misc_feature (697)..(701): n is a, c, g, or t
  misc_feature (703)..(706): n is a, c, g, or t
  misc_feature (708)..(709): n is a, c, g, or t
  misc_feature (711)..(730): n is a, c, g, or t
  misc_feature (732)..(749): n is a, c, g, or t
  misc_feature (752)..(758): n is a, c, g, or t
  misc_feature (760)..(760): n is a, c, g, or t
gntttnnntngctttaantgccctaaccagnanggcccnananagngnttgtgncgttngattttgntgatggngancagggtgcggaggaagcaactgttncagnncnngggggggttctgnctcagagtnttatgngtngagcagcccgacctcagatgtgggtggttattactatgagaagatagagagaaccacaaaatctccaagtgacagtggntactcctatgagaccattgggaaaactaccaagacccctgaagatggtgactattcctatgaaattattgagaagaccacacggacccctgaagagggcgggtactcatatgacataagtgaaaagaccaccagcccccccgaagtgagtggttacagctatgaaaagactgagaggtctagaaggcttctggatgacatcagcaatggctatgatgactctgaggatggngggcacacacttgggggaccccagcttctcttatgaaaccactgagaaaattaccagnttccctgagtcttgagggttntcctntgagananttcaaaganaaaaggancccccgatantccccnnnnnnnnnnnnnnnnnnnnnnnnnnnnnnnnnnnnnnnnnnnnnnnnnnnnnnnnnnnnnnnnnntnnntnnnnnnnnnnnntnntnnnnnnnnnnnnntnnntntnntnnntnnnnnncnnnnntnnnntnntnnnnnnnnnnnnnnnnnnnntnnnnnnnnnnnnnnnnnntcnnnnnnntntct

SEQ ID NO: 181 - DNA, 1953 bp, Homo sapiens
gggaagatggcagcggccgtgggctctgtggcgactctggcgactgagcccggggaggacgcctttcggaaacttttccgcttctaccgtcagagccgggcccgggaccgcagacctggaaggggtcatcgacttctcggcggcccacgcagcccgtgcaagggtcctggtgcccaaaaggtgatcaaatctcagctaaatgtgtcttctgtcagtgagcagaatgcatatagagcaggtcttcagcccgtcagcaagtggcaagcctatggactcaaaggctatcctgggtttatttttatcccaaaccccttcctcccaggttaccagtggacactgggtgaaacagtgccttaagttatattcccagaaacctaatgtatgtaacctggacacacacatgtctaaagaagagacccaagatctgtgggaacagagcaaagagttcctgaggtataaagaagcgactaaacggagaccccgaagtttactggagaaactgcgttgggtgaccgtaggctaccattataactgggacagtaagaaatactcagcagatcattacacacctttcccttctgacctgggtttcctctcagagcaagtagccgctgcctgtggatttgaggatttccgagctgaagcagggatcctgaattactaccgcctggactccacactgggaatccacgtagacagatctgagctagatcactccaaacccttgctgtcattcagctttggacagtccgccatctttctcctgggtggtcttcaaagggatgaggcccccccgcccatgtttatgcacagtggtgacatcatgataatgtcgggtttcagccgcctcttgaaccacgcagtccctcgtgtccttccaaatccagaaggggaaggcctgcctcactgcctagaggcacctctccctgctgtcctcccgagagattcaatggtagagccttgttctatggaggactggcaggtgtgtgccagctacttgaagaccgctcgtgttaacatgactgtccgacaggtcctggccacagaccagaatttccctctagaacccatcgaggatgaaaaaaagagacatcagtacagaaggtttctgccatctggatgaccagaatagcgaagtaaaacgggccaggataaaccctgacagctgagacttggagatcccatcctttttactcaggcacctgcttaccgtaaatgatcatgttattgtgtattgccgtggacttcagcacccagacaagccaaaaacagagacagggaagaactcattgttgatcacactgttgccttggaacccacgcagaagtaaactcatccactttgctcagagaagtgtttgacatggtctgttcctagttacatgttggctgtaatgtatgttgagaagtcagtccaaggaggtatgttcttccacaacagccttctcagcctctgctatttcctttgaggaaggtagaagtgagtttccatgtttgcagagtatttaaatacctcagattttattaatgagaaatacagtacccctccctccactccatctggtaatttatggtaaaattgtggttctgtgaaccagctattagtctcatcttcttaactccctcaggcatcatcaaattctttgatcttctcttccacctctctggctctcatggaagaatcctttacacatgaaaacaatggaactggaaaatcttgtcttttagaaaagaaattaatcacaactatctctcttgcctaaaagataaatataggtaaacccaaggaaaggggaatttagtttctctacatgtcatttcggtctccaaactccctgttggctttttaatgcaattttaattgttggaataaaaaagtcccaagggtgttttgttactgttttctccatgaataaactcacttgattttaaaaaaaaaaaaaaaaaaaaaaaa

SEQ ID NO: 182 - DNA, 1712 bp, Homo sapiens
ggcacgaggcgcctgtgtcctctctaggaaggggtaggggaggggcgtctggagaggaccccccgcgaatgcccacgtgacgtgcagtccccctggggctgttccggcctgcggggaacatgggcgtgctcagggtcggactgtgccctggccttaccgaggagatgatccagcttctcaggagccacaggatcaagacagtggtggacctggtttctgcagacctggaagaggtagctcagaaatgtggcttgtcttacaaggccctggttgccctgaggcgggtgctgctggctcagttctcggctttccccgtgaatggcgctgatctctacgaggaactgaagacctctactgccatcctgtccactggcattggcagtcttgataaactgcttgatgctggtctctatactggagaagtgactgaaattgtaggaggcccaggtagcggcaaaactcaggtatgtctctgtatggcagcaaatgtggcccatggcctgcagcaaaacgtcctatatgtagattccaatggagggctgacagcttcccgcctcctccagctgcttcaggctaaaacccaggatgaggaggaacaggcagaagctctccggaggatccaggtggtgcatgcatttgacatcttccagatgctggatgtgctgcaggagctccgaggcactgtggcccagcaggtgactggttcttcaggaactgtgaaggtggtggttgtggactcggtcactgcggtggtttccccacttctgggaggtcagcagagggaaggcttggccttgatgatgcagctggcccgagagctgaagaccctggcccgggaccttggcatggcagtggtggtgaccaaccacataactcgagacagggacagcgggaggctcaaacctgccctcggacgctcctggagctttgtgcccagcactcggattctcctggacaccatcgagggagcaggagcatcaggcggccggcgcatggcgtgtctggccaaatcttcccgacagccaacaggtttccaggagatggtagacattgggacctgggggacctcagagcagagtgccacattacagggtgatcagacatgacctgtgctgttgtttgggaaacagggaagcattggggacccctcccaacttttcttcccagtaacgcctgctgtttactgccacctggcactggtgactacagacgttctcaggctggccagaagagacatcttgggttccttggcctcactctctgtaagcatataaaccacaggcgaaagaggatgctgcattgcgaggacccagaaattcatactggtgccacgtttccttcccttatttctaacgtgtatgtttctggtggaaaccaagttcaccctggctgggagcatctctgatgaggcatgctggcgactggatggataatcctgtgcatcaccattgtgtcctgtgctccctcctagcgcagtggccaagccgggaaagcctctaacttgcctttgctgctgctgccttttttttcttttgtctctgcctttccatttgttagatgggggcccactcttccttagctctgtctctgagttactgggtggaaataagcttataaatgaaatactcttcttcatctctgttttgctcttaaaaatataaaaaggcaattccccgaaaaaaaaaaaaaaaaaaaaaaaaaaaaaaaaaaaa

SEQ ID NO: 183 - DNA, 2072 bp, Homo sapiens
cgcggtcggcgcgagaacaagcagggtggcgcgggtccgggcatgaagctgggccgggccgtgctgggcctgctgctgctggcgccgtccgtggtgcaggcggtggagcccatcagcctgggactggccctggccggcgtcctcaccggctacatctacccgcgtctctactgcctcttcgccgagtgctgcgggcagaagcggagccttagccgggaggcactgcagaaggatctggacgacaacctctttggacagcatcttgcaaagaaaatcatcttaaatgccgtgtttggtttcataaacaacccaaagcccaagaaacctctcacgctctccctgcacgggtggacaggcaccggcaaaaatttcgtcagcaagatcatcgcagagaatatttacgagggtggtctgaacagtgactatgtccacctgtttgtggccacattgcactttccacatgcttcaaacatcaccttgtacaaggatcagttacagttgtggattcgaggcaacgtgagtgcctgtgcgaggtccatcttcatatttgatgaaatggataagatgcatgcaggcctcatagatgccatcaagcctttcctcgactattatgacctggtggatggggtctcctaccagaaagccatgttcatatttctcagcaatgctggagcagaaaggatcacagatgtggctttggatttctggaggagtggaaagcagagggaagacatcaagctcaaagacattgaacacgcgttgtctgtgtcggttttcaataacaagaacagtggcttctggcacagcagcttaattgaccggaacctcattgattattttgttcccttcctccccctggaatacaaacacctaaaaatgtgtatccgagtggaaatgcagtcccgaggctatgaaattgatgaagacattgtaagcagagtggctgaggagatgacatttttccccaaagaggagagagttttctcagataaaggctgcaaaacggtgttcaccaagttagattattactacgatgattgacagtcatgattggcagccggagtcactgcctggagttggaaaagaaacaacactcagtccttccacacttccacccccagctcctttccctggaagaggaatccagtgaatgttcctgtttgatgtgacaggaattctccctggcattgtttccaccccctggtgcctgcaggccacccagggaccacgggcgaggacgtgaagcctcccgaacacgcacagaaggaaggagccagctcccagcccactcatcgcagggctcatgattttttacaaattatgttttaattccaagtgtttctgtttcaaggaaggatgaataagttttattgaaaatgtggtaactttatttaaaatgatttttaacattatgagagactgctcagattctaagttgttggccttgtgtgtgtgtttttttttaagttctcatcattattacatagactgtgaagtatctttactggaaatgagcccaagcacacatgcatggcatttgttcctgaacaggagggcatccctggggatgtggctggagcatgagccagctctgtcccaggatggtcccagcggatgctgccaggggcagtgaagtgtttaggtgaaggacaagtaggtaagaggacgccttcaggcaccacagataagcctgaaacagcctctccaagggttttcaccttagcaacaatgggagctgtgggagtgattttggccacactgtcaacatttgttagaaccagtcttttgaaagaaaagtatttccaacttgtcacttgccagtcactccgttttgcaaaaggtggcccttcactgtccattccaaatagcccacacgtgctctctgctggattctaaattatgtgaattttgccatattaaatcttcctcatttatactattatttgttacgttcaatcagaatccccgaaacctcctataaagcttagctgccccttctgaggatgctgagaacggtgtctttctttataaatgcaaatggctaccgttttacaataaaattttgcatgtgc

SEQ ID NO: 184 - DNA, 4406 bp, Homo sapiens
ttcggcacgaggcgcggttgcacgtcggccccagccctgaggagccggaccgatgtggaaactgctgcccgccgcgggcccggcaggaggagaaccatacagacttttgactggcgttgagtacgttgttggaaggaaaaactgtgccattctaattgaaaatgatcagtcgatcagccgaaatcatgctgtgttaactgctaacttttctgtaaccaacctgagtcaaacagatgaaatccctgtattgacattaaaagataattctaagtatggtacctttgttaatgaggaaaaaatgcagaatggcttttcccgaactttgaagtcgggggatggtattacttttggagtgtttggaagtaaattcagaatagagtatgagcctttggttgcatgctcttcttgtttagatgtctctgggaaaactgctttaaatcaagctatattgcaacttggaggatttactgtaaacaattggacagaagaatgcactcaccttgtcatggtatcagtgaaagttaccattaaaacaatatgtgcactcatttgtggacgtccaattgtaaagccagaatattttactgaattcctgaaagcagttcagtccaagaagcagcctccacaaattgaaagtttttacccacctcttgatgaaccatctattggaagtaaaaatgttgatctgtcaggacggcaggaaagaaaacaaatcttcaaagggaaaacatttatatttttgaatgccaaacagcataagaaattgagttccgcagttgtctttggaggtggggaagctaggttgataacagaagagaatgaagaagaacataatttctttttggctccgggaacgtgtgttgttgatacaggaataacaaactcacagaccttaattcctgactgtcagaagaaatggattcagtcaataatggatatgctccaaaggcaaggtcttagacctattcctgaagcagaaattggattggcggtgattttcatgactacaaagaattactgtgatcctcagggccatcccagtacaggattaaagacaacaactccaggaccaagcctttcacaaggcgtgtcagttgatgaaaaactaatgccaagcgccccagtgaacactacaacatacgtagctgacacagaatcagagcaagcagatacatgggatttgagtgaaaggccaaaagaaatcaaagtctccaaaatggaacaaaaattcagaatgctttcacaagacgcacccactgtaaaggagtcctgcaaaacaagctctaataataatagtatggtatcaaatactttggctaagatgagaatcccaaactatcagctttcaccaactaaattgccaagtataaataaaagtaaagatagggcttctcagcagcagcagaccaactccatcagaaactactttcagccgtctaccaaaaaaagggaaagggatgaagaaaatcaagaaatgtcttcatgcaaatcagcaagaatagaaacgtcttgttctcttttagaacaaacacaacctgctacaccctcattgtggaaaaataaggagcagcatctatctgagaatgagcctgtggacacaaactcagacaataacttatttacagatacagatttaaaatctattgtgaaaaattctgccagtaaatctcatgctgcagaaaagctaagatcaaataaaaaaagggaaatggatgatgtggccatagaagatgaagtattggaacagttattcaaggacacaaaaccagagttagaaattgatgtgaaagttcaaaaacaggaggaagatgtcaatgttagaaaaaggccaaggatggatatagaaacaaatgacactttcagtgatgaagcagtaccagaaagtagcaaaatatctcaagaaaatgaaattgggaagaaacgtgaactcaaggaagactcactatggtcagctaaagaaatatctaacaatgacaaacttcaggatgatagtgagatgcttccaaaaaagctgttattgactgaatttagatcactggtgattaaaaactctacttccagaaatccgtctggcataaatgatgattatggtcaactaaaaaatttcaagaaattcaaaaaggtcacatatcctggagcaggaaaacttccacacatcattggaggatcagatctaatagctcatcatgctcgaaagaatacagaactagaagagtggctaaggcaggaaatggaggtacaaaatcaacatgcaaaagaagagtctcttgctgatgatctttttagatacaatccttatttaaaaaggagaagataactgaggattttaaaaagaagccatggaaaaacttcctagtaagcatctacttcaggccaacaaggttatatgaatatatagtgtatagaagcgatttaagttacaatgttttatggcctaaatttattaaataaaatgcacaaaactttgattcttttgtatgtaacaattgtttgttctgttttcaggctttgtcattgcatctttttttcatttttaaatgtgttttgtttattaaatagttaatatagtcacagttcaaaattctaaatgtacgtaaggtaaagactaaagtcacccttccaccattgtcctagctacttggttcccctcagaaaaaaattcatgatactcatttcttatgaatctttccagggatttttgagtcctattcaaattcctatttttaaataatttcctacacaaatgatagcataacatatgcagtgttctacaccttgcttttttacttagtagattaaaaattataggaatatcaatataatgtttttaatattttttcttttccattatgctgtagtcttacctaaactctggtgatccaaacaaaatggcttcagtggtgcagatgtcacctacatgttattctagtactagaaactgaagaccatgtggagacttcatcaaacatgggtttagttttcaccagaatggaaagacctgtacccctttttggtggtcttactgagctgggtgggtgtctgttttgagcttatttagagtcctagttttcctacttataaagtagaaatggtgagattgttttctttttctaccttaaagggagatggtaagaaacaatgaatgtcttttttcaaactttattgacaagtgattttcaagtctgtgttcaaaaatatattcatgtacctgtgatccagcaagaagggagttccagtcaagagtcactacaactgattagttgtttagagaatgagaaatggaacagtgaggaatggaggccatatttccatgacttcccttgtaaacagaagcaacagaagggacaagaggctggcctctacatcactctcaccttccaaatcttgtggaagtgcatctacttgccagaaccaaattaacttacttccaagttctggctgcttgcaggtggaactccagctgcaagggagttagggaaatgaaggtctttttttaaaagcttctcagccttcctagggaacagaaattgggtgagccaatctgcaatttctactacaggcattgagaccagttagattattgaaatattatagagagttatgaacacttaaattatgatagtggtatgacattggatagaacatgggatactttagaagtagaattgacagggcatattagttgatgaaatggagtcatttgagtctcttaatagccatgtatcataattaccaagtgaagctggtggaacatatggtctccattttacagttaaggaatataatggacagattaatattgttctctgtcatgcccacaatccctttctaaggaagactgccctactatagcagtttttatatttgtcaatttatgaatataatgaatgaggagttctggtacctcctgtctttacaaatattgggtgttgtccagtatttttccctttttaaccattccaatcggtgtgtagtgatgtttcattttggttttaatttgtatatccctgatagctataattgggtcatagaaattctttatacattctagatgcaagtctcttgtcggatatatgtattgagatattacacctagtctgtggcttgactgttttctttatgtcttttgatgaatagaagttttaaattttgacaaggtcaaatttatttttttcttttgtttgatattttttctctccaatttaaccccaagatttcagatattctgctctattatataaactttatatttttatatttgtgatctaccttgaattgatatgtatgttgtgaattatggatcagggttctttttttcccccatacaagtatccagtcattgtaacactgtttattgaaagaattatcctttcctcattaaattaccttgccaattagtctcgtgc

SEQ ID NO: 185 - DNA, 685 bp, Homo sapiens
  misc_feature (589)..(589): n is a, c, g, or t
acaattgacagcaaattattttagatcctaatgtcatttcagtgttaaaaatgagctgggagacagctcctgtgacatttggtatgaaagctttagattgcaattttcatgtagaagtagcttcatatcacatctcgtgagtttcgtatcgcacagcagaggaccatgctgaatatcatgccaaagatcttgtgtcctagaagctcctttgggcatgtaggttggacctgttcggagctttcttttccacagcactgaaatgttgagtggaaggtgatgagtgtcccattgccttttcccctgtctttaaggtaatcattgtaagcctcttcatacatggtctgaacatgtcggatagctacccccttgcctataaaagcaaatactccagtggttacttcagcagcaaatatcaccaggaggcaggtaaaaaatgatccaagcacacattgcgactcccgcatggctccgcagcacccgaagaaccccacggccatcatcagggccccggctccaaccagaacatacagccccacatagaaatactctggggacttgtcctctgatgataactcccttatggcacctncgaaccggaaccatagtccaaaagcaatgacggccgatccagccagccagaagagcaggttgagccaagcagcaagtacttgatgcaccgcaggcc

SEQ ID NO: 186 - DNA, 1202 bp, Homo sapiens
cggcgatgtttcctagagtctcgacgttcctacctcttcgccccctttcccgccaccctttgtcctctggaagcccggagacatcagcggctgcgattatgctactcactgttcggcacggaacagtcaggtaccgcagttcagcgctgttggcccggacaaaaaataacatccaaagatattttggcactaacagtgtgatctgtagcaagaaagataagcagtctgttcgaactgaggagacttccaaggagacttcagagagccaagacagtgaaaaggaaaatacgaaaaaagacttgttaggcattattaagggcatgaaagttgaattaagcacagtaaatgtacgaacaacaaagccccccaaaagaagaccacttaaaagtttggaagctacacttggcaggcttcgaagagctacagaatatgctccaaagaagagaattgagcccctgagtcctgagttggtggcagctgcatctgctgtggcagattctctcccttttgataagcaaacaaccaagtcagagctgctgagccagctccagcagcatgaggaagagtcaagggcacagagagatgcaaagcgacctaaaattagtttcagtaacataatatcagatatgaaagttgccagatctgctacagctagagttcgttcaagaccagagcttcggattcagtttgatgaaggctatgacaattatcctggccaggagaagacggatgatcttaaaaaaaggaaaaatatattcacagggaaaagacttaatatttttgacatgatggcagttactaaagaagcacctgaaacagacacatcaccttcactttggaatgtggaatttgctaagcagttagccacagtaaatgaacaaccccttcagaatggatttgaagagctgatccagtggacaaaagaggggaaactatgggagttcccaattaacaatgaagcaggttttgatgatgatggttcagaatttcatgaacatatatttctggagaaacacctggagagctttccaaaacaaggaccaattcgccacttcatggagctggtgacttgtggcctttccaaaaacccatatcttagtgttaaacagaaggttgaacacatagagtggtttagaaattattttaatgaaaaaaaggatattctaaaagaaagtaacatacagttcaattaagaccatgga

SEQ ID NO: 187 - DNA, 4652 bp, Homo sapiens
gtcggctaggcggctggaaacggcggctgccgccggtgactcagggaggcgggaggcgggggaggagctcttcctgcaggcgtggaaaccatggtgctcacgctcggagaaagttggccggtattggtggggaggaggtttctcagtctgtccgcagccgacggcagcgatggcagccacgacagctgggacgtggagcgcgtcgccgagtggccctggctctccgggaccattcgagctgtttcccacaccgacgttaccaagaaggatctgaaggtgtgtgtggaatttgatggggaatcttggaggaaaagaagatggatagaagtctacagccttctaaggagagcatttttagtagaacataatttggttttagctgaacgaaagtcacctgaaatttctgaacgaattgtacagtggcctgcaataacgtacaaacctctgttggacaaagctggtttgggatccataacttctgttcgctttctgggagatcaacaaagagtatttctttctaaagaccttttgaagcctatacaggatgtaaacagtcttcgactttctcttacggataatcagattgtcagtaaagaatttcaagctttgattgtgaagcatttagatgaaagccatcttttaaaaggtgacaaaaacttagttggttcagaagtaaaaatttatagcttggacccatctactcagtggttttcagcaaccgttgtaaatggaaacccagcatcaaaaactcttcaagtcaactgtgaggagattccagcactgaaaattgttgatccgtcactgattcatgttgaagttgtacacgataaccttgtgacatgtggtaattctgcaagaattggagctgtaaaacgcaagtcttctgagaataatggaaccctggtttccaaacaagcaaaatcttgctctgaggcctctcccagtatgtgtcctgtgcagtctgtacctacaacagtttttaaggagatactgcttggctgtactgcagcaactccacctagtaaggacccaagacagcaaagtactccccaggctgccaactctccacctaaccttggagcaaaaattcctcaaggatgtcataaacaaagtttaccagaggaaatttcttcctgtctaaatacaaagtctgaagctctgagaacaaaaccagatgtctgcaaagcagggttgctctcaaagtcctctcagattggaactggagacttgaaaattctgactgagccaaaaggcagctgtactcagcctaagacaaacactgatcaggaaaacagattggagtctgttccacaagcattgactggccttcctaaggagtgcttacctacaaaggcttcttctaaggcagaattggaaattgccaatcctcctgaactgcagaagcacctagaacatgcaccttccccatcggatgtttcaaatgcaccagaagtgaaagcaggtgtcaatagtgatagccctaataactgttcaggaaaaaaggtagaaccttcagctttagcttgccgatcacagaatttaaaggaatcttcagtaaaagtagataatgaaagctgttgttcaagaagcaacaataaaatccagaatgccccatccaggaagtcggttttgacagacccagctaaactcaaaaagctgcaacagagtggcgaggccttcgtacaggatgattcttgtgtgaacatcgtggcacagttgcctaaatgccgagagtgtcgcttggacagtctccgcaaggataaggagcaacagaaggactcacctgtgttttgccgcttctttcacttcaggaggttacaattcaacaaacatggtgtgttgcgggtagaaggcttcttaacaccaaacaagtatgacaatgaagcaattggcttgtggttacctttaaccaaaaacgttgtggggattgatttggacacagcaaagtacatcttggccaacattggagaccacttctgtcaaatggtgatttctgaaaaggaagctatgtcaactattgagccacacagacaggttgcttggaagcgagctgtcaaaggtgttcgagaaatgtgtgatgtgtgcgacaccaccatcttcaacctgcactgggtgtgtcctcggtgtgggtttggagtatgtgtggactgctaccggatgaagagaaagaattgccaacagggtgctgcttacaagactttctcttggctaaaatgtgtgaagagtcagatacatgaaccagagaacttaatgcccacacagatcattcctggaaaagcactctatgatgttggagacattgttcattctgtaagagcgaaatggggaataaaggcaaactgcccttgttcaaacaggcaattcaaactcttttcaaagccagcctcaaaggaagacctaaaacagacttctttagctggagaaaaaccgactcttggtgcagtgctccagcagaatccctcagtgttggagccagcagctgtgggtggggaagcagcctccaagccagccggcagcatgaagcctgcctgtccagccagcacatctcctctaaactggctggccgacctaaccagcgggaatgtcaacaaggaaaacaaggaaaaacaaccaacaatgccaattttaaagaatgaaatcaaatgccttccacccctcccacctttaagcaaatccagcacagtcctccatacgtttaacagcacaattttgacacccgtaagcaacaacaattctggtttcctccggaatctcttgaattcttctacaggaaagacagaaaatggactcaagaatacaccaaaaatccttgatgacatctttgcctctttggtgcaaaataagacgacttctgatttatctaagaggcctcaaggactaaccatcaagcccagcattctgggctttgacactcctcactattggctttgtgataatcgcttgctgtgcttgcaagaccccaacaataagagcaactggaatgtgtttagggagtgctggaaacaagggcagccagtgatggtgtctggagtgcatcataaattgaactctgaactttggaaacctgaatccttcaggaaagagtttggtgagcaggaagtagacctagttaattgtaggaccaatgaaatcatcacaggagccacagtaggagacttctgggatggatttgaagatgttccaaatcgtttgaaaaatgaaaaagaaccaatggtgttgaaacttaaggactggccaccaggagaagattttagagatatgatgccttccaggtttgatgatctgatggccaacattccactgcccgagtacacaaggcgagatggcaaactgaatttggcctctaggctgccaaactactttgttcggccagatctgggccccaagatgtataatgcttatggattaatcactcctgaagatcggaaatatggaacaacaaatcttcacttagatgtatctgatgcagctaatgtcatggtctatgtgggaattcccaaaggacagtgtgagcaagaagaagaagtccttaagaccatccaagatggagattctgacgaactcacaataaagcgatttattgaaggaaaagagaagccaggagcactgtggcacatatatgctgcaaaggacacggagaagataagggaatttcttaaaaaggtatcagaagagcaaggtcaagaaaacccagcagaccacgatcctattcatgatcaaagctggtatttagaccgatcattaagaaaacgtcttcatcaagagtatggagttcaaggctgggctattgtacagtttcttggggatgtggtgtttatcccggcaggagctccacatcaggttcataacttatatagctgcatcaaagtggctgaagattttgtttctccagagcatgttaaacactgcttctggcttactcaggaattccgatatctgtcacagactcataccaatcacgaagataaattacaggtgaagaatgttatctaccatgcagtgaaagatgcagttgctatgctgaaagccagtgaatccagttttggcaaaccttaatctccctgcacattggaaatgaattacaggcagctgttcaaactcttcaggcaggattcctgtggactttgagattcatgttacctcatcttcttttttaaactgtacccaacttgtgagggtactctgtctaatgtatatttctagtgtttacagacagtaaatgtgtatatgtagtaactatttacagaacatgcatccttaaactgtgacttctcacctagtgcagaacttttaccaggctgtaaaagcaaaacctcgtatcagctctggaacaatacctgcagttattcttcagctgtttggacaacttagattgggtttataactattaggaatcactgcacagtttatttgggttgtgttttgtgtctgagtcccctccctcatcccttagggtccagaagagcaatggaggaagtgacagctaatgttgcagttcttattgtatggcataggactggcattatatagcagaaatcaactactgtacaatttcttggggttaaccatctttagttaaatggaattttaatttaaatgacgctttgctaattttaagtgttaagcattttgcattaaaatattcatataat

SEQ ID NO: 188 - DNA, 4950 bp, Homo sapiens
ccaagcctgagtgttaatttaactctatgttgtccgccgtgtaaacatccgaggtcatttgttgcgttgaattatctgaccatccttttttactgtgactcttcccattctctttggcaagaagtccccttctcgcccccaaaccagcaagggactcccccacctgggtctgtgccctgccccgcgctgggggccgagtccttgaatgtggcttcaggggctcctgtcctgacggttgcgtccgggggaggggaaggaagggccgctgtcgccaaggttttctctcccagaacccacagtgggccgccgcgatggccctcaagatggtgaagggcagcatcgaccgcatgttcgacaagaatctgcaggacttggtccgcggcatccgtaaccacaaggaggacgaggcaaaatacatatctcagtgcattgatgagatcaagcaggagctgaagcaggacaacatagcggtgaaggcgaacgcggtctgcaagctgacgtatttacagatgttgggatacgacatcagctgggccgccttcaacatcatagaagtgatgagtgcctccaagttcaccttcaagcgaattggctacctcgctgcttcccagagctttcacgaaggcaccgacgtcatcatgctgaccaccaatcagatccgtaaggacttgagcagccccagccagtacgacacaggtgttgcactgacgggtctgtcctgcttcgtcaccccagaccttgccagagacctggcaaatgacatcatgacactgatgtcacacaccaagccctacatcaggaagaaggctgtgctgatcatgtacaaggtgttcctgaagtaccccgagtcgctgcgccctgcctttccccggctgaaggagaagctggaggaccccgaccccggggttcagtcggctgccgtcaatgtcatctgcgagctggccagacgcaaccctaagaactacctgtccctggccccgctctttttcaagctgatgacgtcctccaccaacaactgggtcctcatcaagatcatcaagctgttcggtgctcttactcctttggaaccgcggctgggcaagaagctgatcgagcccctcaccaatctcatccacagcacgtctgccatgtctctcctctatgaatgtgtgaacaccgtgattgcagtgctcatctcgctgtcctccggcatgcccaaccacagcgccagcatccagctttgtgttcagaaattaaggatattgatcgaggactccgatcagaacttgaagtacctggggctgctggcaatgtccaagatcctgaagacccaccccaagtccgtgcagtcccacaaggacctcatcctgcagtgcctggacgacaaggacgagtccatccggctgcgggccctggacctgctctatgggatggtgtccaagaagaacctgatggagatcgtgaagaagctgatgacccacgtagacaaggcagagggtaccacctaccgtgacgagctgctcaccaagatcattgacatctgcagccagtccaactaccagtacatcaccaacttcgagtggtacatcagcatcctggtggagctgacccggctggagggcacacggcacggccacctcatcgccgcccaaatgctggacgtggccatccgcgtgaaggccatccgcaagttcgccgtgtcccagatgtctgcgctgcttgacagtgcacacctgctggccagcagcacccagcggaacgggatctgtgaggtgctgtacgctgccgcctggatctgcggggagttctcagagcatctgcaggaaccacaccacactttggaggccatgctgcggcccagagtcaccacgctgccaggccacatccaggccgtgtatgtgcagaacgtggtcaagctctacgcctccatcctgcagcagaaggagcaggccggggaggcagagggcgctcaggccgtcacccagctcatggtggaccggctgccccagtttgtgcagagcgcagacctggaggtgcaggagcgggcgtcctgcatcctgcagctggtcaagcacatccagaagcttcaggccaaggacgtgcctgtggcagaggaggtcagcgctctctttgctggggagctgaacccagtggcccccaaggcccagaagaaggttccagtccccgaaggcctggacctggacgcctggatcaatgagccactctcggacagcgagtcagaggacgagaggcccagggccgtcttccacgaggaggagcagcggcgtcccaagcaccggccgtcggaggcggacgaggaggagctggctcggcgccgagaggcccggaagcaggagcaggccaacaaccccttctacatcaagagctcgccatcgccacagaagcggtaccaggacaccccgggcgtggagcacattcccgtggtgcagattgacctctccgtccccttgaaggttccagggctgcctatgtcagatcagtatgtgaagctggaggaggagcggcggcaccggcagaagctggagaaggacaagaggaggaaaaagaggaaggagaaggagaagaagggcaagcgccgccacagctcgctgcccacggagagcgacgaggacatcgcccctgcccagcaggtggacatcgtcacagaggagatgcctgagaatgctctgcccagcgacgaggatgacaaagaccccaacgacccctacagggctctggatattgacctggataagcccttagccgacagcgagaaactgcctattcagaaacacagaaacaccgagacctcaaaatcccctgagaaggacgttcccatggtagaaaagaagagcaagaaacccaagaagaaagagaaaaaacacaaagagaaagagagagacaaggagaagaagaaggagaaggagaagaagaaatctcccaagcctaagaagaagaaacacaggaaggagaaggaggagcggaccaaaggcaagaagaagtccaagaagcagcctccaggcagcgaggaggcagcgggggagccggtgcagaatggcgcgccagaggaggagcagctcccgcctgagtccagctactccctcctcgctgaaaattcctatgttaaaatgacctgtgacatccggggcagtctgcaggaggacagccaggtcactgtggccatcgtgctggagaacaggagcagcagcatcctcaagggcatggagctcagcgtgctggactcactcaatgccaggatggcccggccgcagggctcctccgtccacgatggcgtccccgtgcctttccagctgcccccaggcgtctccaacgaagcccagtatgtgttcaccatccagagcatcgtcatggcgcagaagctcaaggggaccctgtccttcattgccaagaatgacgagggtgcgacccacgagaagctggacttcaggctgcacttcagctgcagctcctacttgatcaccactccctgctacagtgacgcctttgctaagttgctggagtctggggacttgagcatgagctcaatcaaagtcgatggcattcggatgtccttccagaatcttctggcgaagatctgttttcaccaccatttttccgttgtggagcgagtggactcctgcgcctccatgtacagccgctccatccagggccaccatgtctgcctcctggtgaaaaagggtgagaactctgtctcagtcgacgggaagtgcagtgactccacgctactgagcaacttgttagaagagatgaaggcgacgctggccaagtgttgagagctgcctgcgagccccgcaccaccccgcggagcacgtacccagggaccgcagccctgacgtgtctcgcctctcctcagtcgtgtgtactgtacccaagcctgagtgttaatttaactctatgttgtccgccgtgtagacatccgaggtcatttgttgcgttgaattatctgaccatccttttttactgtgactcttcccattctctttggcaagaagtccccttctcgcccccaaaccagcaagggactcccccacctgggtctgtgccctgccccgcgctgggggccgagtccttgaatgtggcttcaggggctcctgtcctgggccagggcctgatgggcaccacgtgaggggcacttggtggacagggcggggctgacgtggcctcctctggggtcgcctgcttttgacccaaaggtcctgacggttgcgtccgggggaggggaaggaagggccgctgtcgccaaggttttctctcccagaacccacagtgggaaagcggtcttgccaggcgttgtccattgtcagtgtgctcgtgggctggtgactgggtcttgggatcccaggccacgcgccagccaggctgtgggcagggcggggccagggacgccaaagagaggttgcagtcagaaccgtggacggggtgggttgaggcctctctgccacccgtcttcctggtcagcagaagtgcatctcggcttgggtttggggtggtccgcatcccctgcttgccactatgcgcaccaaggtttccccacatccttcccagcacccttaggaaggcccaggcagggcctggaagcagcggacctgggctgttctgtgttgaaggagtgtgcccagtgcccttgggcaggacctgtgagagccacctcacaggcagagcccccaccaggcagggcaaggagactccgctcactccccacggccagcgtgggcacaggactgacccttcttcagagataatgacattttatcttctccttttgatgaaaactgtcactttagcatgtaatccattacagaatcccatgcagtgattccaggatttgaaattgtatgatgtgttacataagaatttatttgctatcgacattcccgtataaagagagagacatatcacgctgctgtcatgattttgtgtcaagatgatccaataaagttgtaaaacagg

SEQ ID NO: 189 - DNA, 6471 bp, Homo sapiens
ggcccaggcaccggtgggccccggagcgagcctgccccgccgggactccgcgtctgtgcgtcagccccgcccgttgtcctggcaacaacccgttgcccgggcaaccagctttgctcttaccccgcttgagaggagcccggctgttgctctgggcaacgcggtctgctggttcccacgtctgccttcgcccgcttccggttcagaccctgcggaggggcgaggacgaggcagaagtcagcgggatgcctgtggggccgtggaggaagagggtatccctttaggatggaactaggtcctggacaccccctctcaagtgcggggaggctgatactacaactcccagcatgactcgcggtggctgtccggtttctgcgcggctgttcgcgcaaaggcctcatgggagttggagttctttgttgtgcgtggggctcaaaggacgtctggggtgggaatgggggactagggtgcttgagtgtctctgcagaaaagactccaggaccccgccaccatgttcccggagcccccaaccccggggcctccatcgcccgacacgcctcccgactccagtcgcatcagccacggcccaggtgagcaagacccgggggtggggggccgagcagagagaaagcctggccaggattccgaggggcgggattcggacgggtgtactcgggcaggcgggctggaaaatccggctgggatcccgggtcgtcatcctggactggaatgcgaacgaaatggggtaaaaggaaggaacagatttgcaaaaaaaaaaaaaaaaaaaaaaaaaaaaatcgaaaccggatcaaggggtgttgcatggaatgggatcttagaattggaaggtccacctagctcttcttttacagataaggaaacaggcccgatgaggagcagggcttcttgtaaaagcatcaggagttgagcagaaatggggggcggggtcgggtaaggaaaggcagaactaacaagcaagcaaayccagatggtgtcagcctgggttggggcatcgaatctctctataggccacattaggtggaagaaaaacacaggaagaaatgcaatgaaaatggctggagggaaaaggaggccagcattccagcttccacgtgtaatcaggactgaatcagcctgcgtgctgcccaggcctcaatgtgtgttgtctccacccctctgcagtgcccccctgggccctggccaccatcgtrctggtctcaggcctcctcatcttcagctgctgtttctgtctctaccggaagagctgtcggaggcggacaggcaagaagagccaggcccaagcccaggtccaccttcaggaagtgaaggggctgggccagagttacatagacaaggtgtggcccagcccagcccctccacctggccccttcccgcaccctgctcctctcaatggcccagctggtcccagtccctgctcccttctgtcctataggaacccaccttactggctcatcctccctgtgtgtctagccctcaactggactctggggacccagagatggaacagaactagttgctattcccaagaacttcccagtctggtgggagagtcaggcactgacacagacactcaccacacagggtaatatgtgccatactacagggtctcataggagcacagaaaaggcatcccactgtatagaaacctacagaaacatataaatatttggctctgggccgggtgcggtggctcacgcctgtaatcctagcacttgggaggctgaggtggacagattgcctgaggtcatgaattcaagactagcctgggcaacatgatgaaaccctgtctctactaaaaatacaaaagccarccatggtggtgtggtataatcccagctactcgagaggctgaggcactgaaaccgggaggtggaggctgcagtgagctgtgatcgcgccactgcactccagcctgggtgacagagcgagactctgtctccaataaatagataaataaataaatggctctgaaagctgaaaaccagctttgtgccagaatactttaaaatatgctgatttttytcagaaaatgggacatatttacagtaggaaaargtttaaaacagagggtcagacagaggaggcttcgtggtggaggtgacttctgcactgagacctgagggacagagttaactgagaccagagagaaggacattctagtccaagttggagcatgtgtwgaggccccatatccagattcaggccccatatccagattcygaggcttatttggggaacaaagagtcatttctcacaatagctgcactctggagtgaagtgtctggagaactcagcagtatccatgtcatgaaggtgatgaaggctacaaatatgttttgagcatgagagggacagggtcagatggtgttaggatgactcctctggaaccctgtgtaggacagatctgcggcgagggatccagggacgaggccagtgcagcagcagcctggagaggataaaagacatttgcattggatgaggccgttggaatggaaagtggtcactgcagggtctgaaaattaagtctctcagtgcagagtgcagtggttgcctgggagccagacagccctaggtttccaaccaagaaggaccatttcctggttgtgtgaccttggagaactcactgtccctctctgagcctcaagtctgtggtcactaacttggtatttcccctccttccttctcaataaggagctgttcaattagcatccgtaaaggatgctatttagggtcctggtgtccagccccatccctgtcccttaaaccagtgatgttcaaagaccgtctgcagcagaatcacactgggtacttgttgaaatgcaaattctggcactagcacctgacctatcaagtcagaatccctgaagaggtgacctcagacattttgccacaggattcaggggaattcaggttcacattgaattttaagaattgctggcctaggttaaggagacaccttctgctttttcattcaactttagaatggcaagtacacagtaaatatgccatttctcctccatgttttgctgtgctaagatcacaagtaaacatggcagtttggactagcaccccagtacatccattagcatgtgaaataaaacctgcattattcctgtgggcaatgggacactatcagcacttgttttaatctaagcatgacaagcacatgtctagttcctgcccatagcagacaccactaatcaaaccttcacaaacatactgcatctgtgttaccacgtctatttcctgcctgtggcagacagcactagtcaaatactgaatctgcttagcctgtgagagctcaggtatagcccaagggacctgtgagcctcccttggcttctgagcctgatggatactgctatcaggggaagacttcacccacccttacccctggctccttaaggtgcagccagaagtagaggagctggagccagcaccatccgggccagggcagcaggtgscagacaagcatgagctaggacgactgcagtactccctggattatgacttccagagtggccaggtgggtgtggaggaaggggaagctttggagggaggatcccgggggttccaaccccttctgaaaggagccatggaagggaggctaagactagtgttccccacctcccccactgtgcctgggccctgcagctgctggtgggcattctgcaagcaatgggattggcagccttggatcttggtggctcctcggacccctatgtgcgggtctacctgctgmcggacaaacggaggcggtacgagaccaaggtgcatcggcagacgctgaaccctcactttggggagaccttcgccttcaaggtgagctctgcttcaggccccgtgttccatagcctgtgcccagtccctggaacactagggaccgaccccttccgcttttcctggaggcagccacagctcaggtggcagctaccagctctggggctattccactggaccctgggcactactgactcctgggctgtagcctggtccttgggcggtacgatttgggttccactgacccgtgatttttttccgcatggatccctggactttcccatttgagttcccccaactgttcgcttcgaccctcgctgcctcactccacgccttccttctggttgtgctgtgcctcaccctatctctgacttcctgctctctactgcggattctctgtgcactccaggtmccctacgtggagctggggggcagggtgctggtcatggcggtgtacgacttcgaccgcttctctcgcaatgacgccatcggggaggtgcgggtccctatgagctccgtggacctggggcggccagtgcaggcctggcgggagctgcaggcggctccgcgggaggaggtgagcatgcgcggtcgcgccccgagccacgcccccaggcccagtcccgcccacaacatcctgagccaatcagatcataggctttccagaccctcagggcggcgtggattgtacccctgaggaggcatggatgtggagccggggctctggtgatgggcccctctcctttcagcaggagaagcttggggacatctgcttctccctccgctatgtccccacggccgggaagctcaccgtcatcgtcctggaggctaaaaacctgaagaagatggacgtaggaggactgtcaggtgtgtgggaagcaagggagtggggtgtgaggggatggcgtggggtgggttctcgttctgacagtttctgagcctcgagggtttcttcggggacagggaggacctggctgctgtggaaggcatggattttggcatagagctagggagacccgaagggtgtaggcagtgtttctatgttggtccaacaacccagcagtggggagctataagactcctccttcctctccccagatccatacgtcaaggtccacctgctgcagggcggcaaaaaggtgcggaagaagaaaaccaccatcaagaagaacactctgaacccctattacaacgaagctttcagcttcgaggtgccctgtgaccaagtccaggtgagctcaaacctgcccttctccaagagcccagacctttagtaatcgccattgctaggcggagggagactttttagcatctccctagaaaccaggtgagggggtctgaggttatgctctcagtctgtttcctcctatgaggaccaggaagcctcttccactccaggaagagactccttaaaattgggtgtgggtgtcctatctgctctaagcgggaccgggatgctccacccctaagcggaaccaggatgtcccacccctaagcagtaccagatgctccaccctaagcaggatcagtatgccccgccccaccaagcggaaccaggatgctccgcccccaagcaggaccaggatgccccgcccccaagcaggaccaggatgccccgcccccaagcgggaccaggatgccccactcctaagcgggaccagattccccaccctaagcaggaccaggatgccccgccctcctcaggaacgtggttctaagaaaaagagacctcccctcacttctttagggacggcgcctaccctagcccggcccctgttaaagttctgcagctttgcggctcttaggaggctgctcccccaggaggcgccgaacacacccgctccgcaaccgagtcctgagggttcatttccttagaaacctggctgcgcaggaagaaaggcgccagagcctcctcctcgccgcaggctccgtccctctcgtctcccaccccctcccccgtcccgagctccggggccccgagccctcgggtggcagcgagaggtaccctcagccgtgaaaacggacaccgccccttccggggcctcctcccctcacgctcctctctcctcttcctcccgcgcccaccccagaaggtgcaggtggagctgaccgtgctggactacgacaagctgggcaagaacgaggccatcgggagggtggccgtgggggcggccgccggcggggctggcctgcggcactgggcggacatgctggccaacccgcggcggcccattgcccagtggcactcgctgcggcccccggaccgagtgaggctgctgcctgcgccctgactcccaccccaagcccccggccaagcctggactctagcccctgaccccagactcccgagaccggccaaagccaagccagccccacccttaagcttcctctgacggttaccctccccccaccttccaccccaaccatctgaaccattcctgtcttctcacccccaacgatgccaatcacgacaactttccagcacactcccccgaccctcgcggacacacccagatgccccagggaccccgggaagggaaggcagcctggtttctcctgcccccgggtcctgccccctgctttgacaatcagccatcctcgtctgctctcctctctcttccaacacagcccatccctgcactgctcctgaggccaaataaatattcagcagctc

SEQ ID NO: 190 - DNA, 4260 bp, Homo sapiens
ccccacgccaccccaagcatcccaggactcttctgaaacagggcagtgacccgggaggaagtcaccaggtgcagaggaccgtgccctgtggggacctgcctgcaggctgctgacagactccgggctaccagatcggccgtccagctggaatcaaccgatggaggctccgctgcaaactggaatggtgcttggcgtgatgatcggggccggagtggcggtggtggtcacggccgtgctcatcctcctggtggtgcggaggctgcgagtgccaaaaaccccagccccggatggcccccggtatcggttccggaagagggacaaagtgctcttctatggccggaagattatgcggaaggtgtcacaatccacctcctccctcgtggatacctctgtctccgccacctcccggccacgcatgaggaagaaactgaagatgctcaacattgccaagaagatcctgcgcatccagaaagagacgcccacgctgcagcggaaggagcccccgcccgcagtgctagaagctgacctgaccgagggcgacctggctaactcccatctgccctctgaagtgctttatatgctcaagaacgtccgggtgctgggccacttcgagaagccactcttcctggagctctgccgccacatggtcttccagcggctgggccagggtgactacgtcttccggccgggccagccagatgccagcatctacgtggtgcaggacgggctgctggagctctgtctgccagggcctgacgggaaggagtgtgtggtgaaggaagtggttcctggggacagcgtcaacagccttctcagcatcctggatgtcatcaccggtcaccagcatccccagcggaccgtgtctgcccgggcggcccgggactccacggtgctgcgcctgccggtggaagcattctccgcggtcttcaccaagtacccggagagcttggtgcgggtcgtgcagatcatcatggtgcggctgcagcgagtcaccttcctggcactgcacaactacctgggtctgaccaatgagctcttcagccacgagatccagcccctgcgtctgttccccagccccggcctcccaactcgcaccagccctgtgcggggctccaagagaatggtcagcacctcagctacagacgagcccagggagaccccagggcggccacccgatcccaccggggccccgctgcctggacctacaggggaccctgtgaagcccacatccctggaaaccccctcggcccctctgctgagccgctgcgtctccatgccaggggacatctcaggcttgcagggtggcccccgctccgacttcgacatggcctatgagcgtggccggatctccgtgtccctgcaggaagaggcctccggggggtccctggcagcccccgctcggacccccactcaggagcctcgtgagcagccggcaggcgcctgtgaatacagctactgtgaggatgagtcggccactggtggctgccctttcgggccctaccagggccgccagaccagcagcatcttcgaggcagcaaagcaggagctggccaagctgatgcggattgaggacccctccctcctgaacagcagagtcttgctgcaccacgccaaagctggcaccatcattgcccgccagggagaccaggacgtgagcctgcacttcgtgctctggggctgcctgcacgtgtaccagcgcatgatcgacaaggcggaggacgtgtgcctgttcgtagcgcagcccggggaactggtggggcagctggcggtgctcactggcgaacctctcatcttcacactgcgagcccaacgcgactgcaccttcctgcggatctccaagtccgacttctatgagatcatgcgcgcacagcccagtgtggtgctgagtgcggcgcacacggtggcagccaggatgtcgcccttcgtgcgccagatggacttcgccatcgactggactgcagtggaggcgggacgcgcgctgtacaggcagggcgaccgctccgactgcacttacatcgtgctcaatgggcggctgcgtagcgtgatccagcgaggcagtggcaagaaggagctggtgggcgagtacggccgcggcgacctcatcggcgtggtggaggcactgacccggcagccgcgagccacgacggtgcacgcggtgcgcgacacggagctagccaagcttcccgagggcaccttgggtcacatcaaacgccggtacccgcaggtcgtgacccgccttatccacctactgagccagaaaattctagggaatttgcagcagctgcaaggacccttcccagcaggctctgggttgggtgtgcccccacactcggaactcaccaacccagccagcaacctggcaactgtggcaatcctgcctgtgtgtgctgaggtccccatggtggccttcacgctggagctgcagcacgccctgcaggccatcggtccgacgctactccttaacagtgacatcatccgggcacgcctgggggcctccgcactggatagcatccaagagttccggctgtcagggtggctggcccagcaggaggatgcacaccgtatcgtactctaccagacggacgcctcgctgacgccctggaccgtgcgctgcctgcgacaggccgactgcatcctcattgtgggcctgggggaccaggagcctaccctcggccagctggagcagatgctggagaacacggctgtgcgcgcccttaagcagctagtcctgctccaccgagaggagggtgcgggccccacgcgcaccgtggagtggctaaatatgcgcagctggtgctcggggcacctgcacctgcgctgtccgcgccgcctcttttcgcgccgcagccctgccaagctgcatgagctctacgagaaggttttctccaggcgcgcggaccggcacagcgacttctcccgcttggcgagggtgctcacggggaacaccattgcccttgtgctaggcgggggcggggccaggggctgctcgcacatcggagtactaaaggcattagaggaggcgggggtccccgtggacctggtgggcggcacgtccattggctctttcatcggagcgttgtacgcggaggagcgcagcgccagccgcacgaagcagcgggcccgggagtgggccaagagcatgacttcggtgctggaacctgtgttggacctcacgtacccagtcacctccatgttcactgggtctgcctttaaccgcagcatccatcgggtcttccaggataagcagattgaggacctgtggctgccttacttcaacgtgaccacagatatcaccgcctcagccatgcgagtccacaaagatggctccctgtggcggtacgtgcgcgccagcatgacgctgtcgggctacctgcccccgctgtgcgaccccaaggacgggcacctactcatggatggcggctacatcaacaatctgccagcggacatcgcccgcagcatgggtgccaaaacggtcatcgccattgacgtggggagccaggatgagacggacctcagcacctacggggacagcctgtccggctggtggctgctgtggaagcggctgaatccctgggctgacaaggtaaaggttccagacatggctgaaatccagtcccgcctggcctacgtgtcctgtgtgcggcagctagaggttgtcaagtccagctcctactgcgagtacctgcgcccgcccatcgactgcttcaagaccatggactttgggaagttcgaccagatctatgatgtgggctaccagtacgggaaggcggtgtttggaggctggagccgtggcaacgtcattgagaaaatgctcacagaccggcggtctacagaccttaatgagagccgccgtgcagacgtgcttgccttcccaagctctggcttcactgacttggcagagattgtgtcccggattgagccccccacgagctatgtctctgatggctgtgctgacggagaggagtcagattgtctgacagagtatgaggaggacgccggacccgactgctcgagggatgaaggggggtcccccgagggcgcaagtcccagcactgcctccgagatggaggaggagaagtcgattctccggcaacgacgctgtctgccccaggagccgcccggctcagccacagatgcctgaggacctcgacaggggtcaccccctccctcccacccctggactgggctgggggtggccccgtgggggtagctcactccccctcctgctgctatgcctgtgacccccgcggcccacacact

SEQ ID NO: 191 - DNA, 1222 bp, Homo sapiens
ggcgggccagcggcggagccgtgtagcggagaagctccccctccctgcttcccttggccgagccgggggcgcgcgcgcacgcggccgtccagagcgggctccccacccctcgactcctgcgacccgcaccgcacccccacccgggcccggaggatgatgaagctcaagtcgaaccagacccgcacctacgacggcgacggctacaagaagcgggccgcatgcctgtgtttccgcagcgagagcgaggaggaggtgctactcgtgagcagtagtcgccatccagacagatggattgtccctggaggaggcatggagcccgaggaggagccaagtgtggcagcagttcgtgaagtctgtgaggaggctggagtaaaagggacattgggaagattagttggaatttttgagaaccaggagaggaagcacaggacgtatgtctatgtgctcattgtcactgaagtgctggaagactgggaagattcagttaacattggaaggaagagggaatggtttaaaatagaagacgccataaaagtgctgcagtatcacaaacccgtgcaggcatcatattttgaaacattgaggcaaggctactcagccaacaatggcaccccagtcgtggccaccacatactcggtttctgctcagagctcgatgtcaggcatcagatgactgaagacttcctgtaagagaaatggaaattggaaactagactgaagtgcaaatcttccctctcaccctggctctttccacttctcacaggcctcctctttcaaataaggcatggtgggcagcaaagaaagggtgtattgataatgttgctgtttggtgttaagtgatggggctttttcttctgtttttattgagggtgggggttgggtgtgtaatttgtaagtacttttgtgcatgatctgtccctccctcttcccacccctgcagtcctctgaagagaggccaacagccttcccctgccttggattctgaagtgttcctgtttgtcttatcctggccctggccagacgttttctttgatttttaattttttttttttattaaaagataccagtatgagatgaaaacttccaataatttgtcctataatgtgctgtacagttcagtagagtggtcactttcactgcagtatacatttatctacacattatatatcggacatataatatgtaaataaatgacttctagaaagaaaaaaaaaaaaaaaaaa

SEQ ID NO: 192 - DNA, 1767 bp, Homo sapiens
gaattcggggggagaacagagtggacggagagtaggagagaccgaaaaggctgggggtgggagtagcggatttgaagcacttgttggcctacagaggtgtggcaagcagagcacctcagaactcaggcgtactgcccgccgcccgagccctgcgagggccgatagcgagggtgtggcccttatctgcacccagcagagcgccggcggggtacggtcttaggacctcgatctccttctccctcattttctctcatccctacctattgtgggtttccgcatgggccggaccgtggtcgtgctgggcggaggcatcagcggcttggccgccagttaccacctgagccgggccccctgcccccctaaggtggtcctagtggagagcagtgagcgtctgggaggctggattcgctccgttcgaggccctaatggtgctatctttgagcttggacctcggggaattaggccagcgggagccctaggggcccggaccttgctcctggtttctgagcttggcttggattcagaagtgctgcctgtccggggagaccacccagctgcccagaacaggttcctctacgtgggcggtgccctgcatgccctacccactggcctcagggggctactccgcccttcaccccccttctccaaacctctgttttgggctgggctgagggagctgaccaagccccggggcaaagagcctgatgagactgtgcacagttttgcccagcgccgccttggacctgaggtggcgtctctagccatggacagtctctgccgtggagtgtttgcaggcaacagccgtgagctcagcatcaggtcctgctttcccagtctcttccaagctgagcaaacccatcgttccatattactgggcctgttgctgggggcagggcggaccccacagccagactcagcactcattcgccaggccttggctgagcgctggagccagtggtcacttcgtggaggtctagagatgttgcctcaggcccttgaaacccacctgactagtaggggggtcagtgttctcagaggccagccggtctgtgggctcagcctccaggcagaagggcgctggaaggtatctctaagggacagcagtctggaggctgaccacgttattagtgccattccagcttcagtgctcagtgagctgctccctgctgaggctgcccctctggctcgtgccctgagtgccatcactgcagtgtctgtagctgtggtgaatctgcagtaccaaggagcccatctgcctgtccagggatttggacatttggtgccatcttcagaagatccaggagtcctgggaatcgtgtatgactcagttgctttccctgagcaggacgggagcccccctggcctcagagtgactgtgatgctgggaggttcctggttacagacactggaggctagtggctgtgtcttatctcaggagctgtttcaacagcgggcccaggaagcagctgctacacaattaggactgaaggagatgccgagccactgcttggtccatctacacaagaactgcattccccagtatacactaggtcactggcaaaaactagagtcagctaggcaattcctgactgctcacaggttgcccctgactctggctggagcctcctatgagggagttgctgttaatgactgtatagagagtgggcgccaggcagcagtcagtgtcctgggcacagaacctaacagctgatccccaactctcattcatgaaaataaaaattgctggagctcccgaatcccgaattc

SEQ ID NO: 193 - DNA, 591 bp, Homo sapiens
cagattcttcatgtttttatttctctcagaactttaaaatgtgaacattcgataatctagccagtctttacttccaggtaacttcttcactgggttgcaattcccttttaaataacatactcttgttccggaaggcagttagccgttcatcactctttctgtctaaataacatccaatgacaaatcccatagggacaagaacatgaacccagtggtcccgcacaatctgaagtaagttcaccatgatagctaaaagaaaaaaaaattatcagaaatacaactgctttgttttttttttgaaatagcttttaaattgcatctgggccaggtgcggtggttcatgcctgtaatcctagcactttgggatgctgaggtgggccaataactttgaaattaggaatttcggaccagcctgcccaacatggcaaaaccccatttctactaaaagcacaaaaattagccgggtgtggtggtgcgcgtctgttatcccagctactggagaggctgagaccacaggcatacaccactgcacctggctctcatttaggacttttacttgtgtaaaacatatttagaacctctcacaatgca

SEQ ID NO: 194 - DNA, 682 bp, Homo sapiens
ttttaaaaaaaaaaaaacaaaccttataatttattaacaaaattcacattgtacaaaagtacaaccataactgtacacctgtttctctgcaaatgtcacttggtaaattactatcatcttttatagacaggcaaaactggacacactttataatctttctgataaatatatcgccactctgcatccggcctggataatgctcttcaggacggcataggctggagccaattctgcatcatggtcgaggccctatgtcatggtgctcaagctcttcatcccgaaatttctttatcagctgaagaagttcctcgtatttttcagggtcctcctccatcagcgtcctgatctggttgttgtagtgatgtgctatgctctcttccaccgccacggtgcaggccatggcaccttccttcccgagcaaggcggtccccgcccccagtgcaaaccccagcacgttccacaagggcatcagaactgttggccggaccctgaacgtaaccatcaactcattgaactttttcaaatggtccttttcttgatcccacattttctgaatgactggcccgacgctggtccgacccaggacagccatctgccccgcatagatgcggtttgctccatattcgcctgcatgatccacccggattattcgatccacagctgcccgactgatattgtctaa

SEQ ID NO: 195 - DNA, 1857 bp, Homo sapiens
ttttgtcccagtcagtccggaggctgcggctgcagaagtaccgcctgcggagtaactgcaaagatgctgtccgtgcgcgttgctgcggccgtggtccgcgcccttcctcggcgggccggactggtctccagaaatgctttgggttcatctttcattgctgcaaggaacttccatgcctctaacactcatcttcaaaagactgggactgctgagatgtcctctattcttgaagagcgtattcttggagctgatacctctgttgatcttgaagaaactgggcgtgtcttaagtattggtgatggtattgcccgcgtacatgggctgaggaatgttcaagcagaagaaatggtagagttttcttcaggcttaaagggtatgtccttgaacttggaacctgacaatgttggtgttgtcgtgtttggaaatgataaactaattaaggaaggagatatagtgaagaggacaggagccattgtggacgttccagttggtgaggagctgttgggtcgtgtagttgatgcccttggtaatgctattgatggaaagggtccaattggttccaagacgcgtaggcgagttggtctgaaagcccccggtatcattcctcgaatttcagtgcgggaaccaatgcagactggcattaaggctgtggatagcttggtgccaattggtcgtggtcagcgtgaactgattattggtgaccgacagactgggaaaacctcaattgctattgacacaatcattaaccagaaacgtttcaatgatggatctgatgaaaagaagaagctgtactgtatttatgttgctattggtcaaaagagatccactgttgcccagttggtgaagagacttacagatgcagatgccatgaagtacaccattgtggtgtcggctacggcctcggatgctgccccacttcagtacctggctccttactctggctgttccatgggagagtattttagagacaatggcaaacatgctttgatcatctatgacgacttatccaaacaggctgttgcttaccgtcagatgtctctgttgctccgccgaccccctggtcgtgaggcctatcctggtgatgtgttctacctacactcccggttgctggagagagcagccaaaatgaacgatgcttttggtggtggctccttgactgctttgccagtcatagaaacacaggctggtgatgtgtctgcttacattccaacaaatgtcatttccatcactgacggacagatcttcttggaaacagaattgttctacaaaggtatccgccctgcaattaacgttggtctgtctgtatctcgtgtcggatccgctgcccaaaccagggctatgaagcaggtagcaggtaccatgaagctggaattggctcagtatcgtgaggttgctgcttttgcccagttcggttctgacctcgatgctgccactcaacaacttttgagtcgtggcgtgcgtctaactgagttgctgaagcaaggacagtattctcccatggctattgaagaacaagtggctgttatctatgcgggtgtaaggggatatcttgataaactggagcccagcaagattacaaagtttgagaatgctttcttgtctcatgtcgtcagccagcaccaagccttgttgggcactatcagggctgatggaaagatctcagaacaatcagatgcaaagctgaaagagattgtaacaaatttcttggctggatttgaagcttaaactcctgtggattcacatcaaataccagttcagttttgtcattgttctagtaaattagttccatttgtaaaagggttactctcatactccttatgtacagaaatcacatgaaaaataaaggttccataatgc

SEQ ID NO: 196 - DNA, 1827 bp, Homo sapiens
cctccacaacccacactgcccccacatccccgccgtgcctcctcgctggccgcgctccctcccggtgccggcttctctgagtcaccaacctgaggctgccccggccgcctgcgcacccggcagcaccatgacagatcaggcctttgtgacactaaccacaaacgatgcctacgccaaaggtgccctggtcctgggatcatctctgaaacagcacaggaccaccaggaggctggtcgtgctcgccacccctcaggtctcagactccatgagaaaagttttagagacagtctttgatgaagtcatcatggtagatgtcttggacagtggcgattctgctcatctaaccttaatgaagaggccagagttgggtgtcacgctgacaaagctccactgctggtcgcttacacagtattcaaaatgtgtattcatggatgcagatactctggtcctagcaaatattgatgatctttttgacagagaagaattgtcagcagcaccagacccagggtggcctgactgcttcaattccggagtcttcgtttatcagccttcagttgaaacatacaatcagctgttgcatcttgcttctgagcaaggtagttttgatggtggggaccaaggcatactgaacacattttttagcagctgggcaacaacagatatcagaaaacacctgccatttatttataacctaagcagcatctctatatactcctacctcccggcatttaaagtgtttggtgcaagtgccaaagttgtgcatttcctgggacgagtcaaaccatggaattatacttatgatcccaaaacaaaaagtgtcaaaagtgaggcccatgatcccaacatgactcatccagagtttctcatcctgtggtggaacatctttaccaccaacgttttacctctgcttcaacaatttggccttgtcaaagacacctgctcatatgtaaatgtggaagatgtctcaggagccatatcacatctgtcccttggggagatcccagctatggcacagccgtttgtatcctcggaagaacggaaggaacgatgggaacagggccaggctgattatatgggagcagattcctttgacaacatcaagaggaaacttgacacttacctccagtagaaacactgcatttttctgtgaacacatccacttcacaagccttgtttctgatacttagtatctagagctgggttgagaaaagtctgttacagttgctagaggttttcattaaaacttatcagatgagaggcttttttaggataagaggtgagaactgggcaaaagttgtgaagcagcaattctgttatatggacagtgttctgctttttaatcctatttagcttgtttcagaaattctcacttttgttgactgccaacatacaaagtaagggaaactcaagatattaagatggctgtatcagttcttaaaatctgcagagcctggttcaaaatcagtcactcccttcagaagcagacatggcatctgttccttgcttgcttgttggttgtgtacctttcacgagacctgaattttagaattgcccagtgctgccagagtgagtgagtgtaattctcctttcaggtaaagataggctatctcaacactgctgagtgattcataaacatatcaaccagtagcattaacccattttatttcctgtccttagtgtctgaagatgctcaccagttttctgtgtacagtaaggcagcatgctaaaatgcttttgttcagttctgtatatttgaaaatagcagtgtgttctctgatggttacctgcagtggcaccctgtacaaaaaataaaagacttattgctgt

SEQ ID NO: 197 - DNA, 1743 bp, Homo sapiens
ctgaaggcggaaccacgacgggcagagagcacggagccgggaagcccctgggcgcccgtcggagggctatggagcagcggccgcggggctgcgcggcggtggcggcggcgctcctcctggtgctgctgggggcccgggcccagggcggcactcgtagccccaggtgtgactgtgccggtgacttccacaagaagattggtctgttttgttgcagaggctgcccagcggggcactacctgaaggccccttgcacggagccctgcggcaactccacctgccttgtgtgtccccaagacaccttcttggcctgggagaaccaccataattctgaatgtgcccgctgccaggcctgtgatgagcaggcctcccaggtggcgctggagaactgttcagcagtggccgacacccgctgtggctgtaagccaggctggtttgtggagtgccaggtcagccaatgtgtcagcagttcacccttctactgccaaccatgcctagactgcggggccctgcaccgccacacacggctactctgttcccgcagagatactgactgtgggacctgcctgcctggcttctatgaacatggcgatggctgcgtgtcctgccccacgagcaccctggggagctgtccagagcgctgtgccgctgtctgtggctggaggcagagtaggtggtgtgctgggaatgcgcgtgggagaactgggatggaccgaggggaggcgggtgaggaggggggcaaccacccaacacccaccagctgctttcagtgttctgggtccaggtgctcctggctggccttgtggtccccctcctgcttggggccaccctgacctacacataccgccactgctggcctcacaagcccctggttactgcagatgaagctgggatggaggctctgaccccaccaccggccacccatctgtcacccttggacagcgcccacacccttctagcacctcctgacagcagtgagaagatctgcaccgtccagttggtgggtaacagctggacccctggctaccccgagacccaggaggcgctctgcccgcaggtgacatggtcctgggaccagttgcccagcagagctcttggccccgctcgtgcgcccacactctcgccagagtccccagccggctcgccagccatgatgctgcagccgggcccgcagctctacgacgtgatggacgcggtcccagcgcggcgctggaaggagttcgtgcgcacgctggggctgcgcgaggcagagatcgaagccgtggaggtggagatcggtctcttccgagaccagcagtacgagatgctcaagcactggcgccagcagcagcccgcgggcctcggagccgtttacgcggccctggagcgcatggggctggacggctgcgtggaagacttgcgcagccgcctgcagcgtggcccgtgacacgcagcccacttgccacctaggcgctctggtggcccttgcagaagccctaagtacggttacttatgcgtgtagacattttatgtcacttattaagccgctggcacggccctgcgtaggcacaccagccggccccacccctgctcgcccctatcgctccagccaaggcgaagaagcacgaacgaatgtcgagagggggtgaagacatttctcaacttctcggccggagtttggctgagatcgcggtattaaatctgtgaaagaaataaagaaaaaaacaaaacaaaacaaaaaaaaaaaaaaaaaaaaaaaaaaaaaaa

SEQ ID NO: 198 - DNA, 1387 bp, Homo sapiens
atgtctgctgaagtcatccatcaggttgaagaagcacttgatacagatgagaaggagatgctgctctttttgtgccgggatgttgctatagatgtggttccacctaatgtcagggaccttctggatattttacgggaaagaggtaagctgtctgtcggggacttggctgaactgctctacagagtgaggcgatttgacctgctcaaacgtatcttgaagatggacagaaaagctgtggagacccacctgctcaggaaccctcaccttgtttcggactatagagtgctgatggcagagattggtgaggatttggataaatctgatgtgtcctcattaattttcctcatgaaggattacatgggccgaggcaagataagcaaggagaagagtttcttggaccttgtggttgagttggagaaactaaatctggttgccccagatcaactggatttattagaaaaatgcctaaagaacatccacagaatagacctgaagacaaaaatccagaagtacaagcagtctgttcaaggagcagggacaagttacaggaatgttctccaagcagcaatccaaaagagtctcaaggatccttcaaataacttcaggctccataatgggagaagtaaagaacaaagacttaaggaacagcttggcgctcaacaagaaccagtgaagaaatccattcaggaatcagaagcttttttgcctcagagcatacctgaagagagatacaagatgaagagcaagcccctaggaatctgcctgataatcgattgcattggcaatgagacagagcttcttcgagacaccttcacttccctgggctatgaagtccagaaattcttgcatctcagtatgcatggtatatcccagattcttggccaatttgcctgtatgcccgagcaccgagactacgacagctttgtgtgtgtcctggtgagccgaggaggctcccagagtgtgtatggtgtggatcagactcactcagggctccccctgcatcacatcaggaggatgttcatgggagattcatgcccttatctagcagggaagccaaagatgttttttattcagaactatgtggtgtcagagggccagctggaggacagcagcctcttggaggtggatgggccagcgatgaagaatgtggaattcaaggctcagaagcgagggctgtgcacagttcaccgagaagctgacttcttctggagcctgtgtactgcggacatgtccctgctggagcagtctcacagctcaccgtccctgtacctgcagtgcctctcccagaaactgagacaagaaagggggacaattcccggaagtggaattacagagtcaaaggacatgcatttttcaagcctcggatgcatcttactagatgtcctat

SEQ ID NO: 199 - DNA, 7112 bp, Homo sapiens
gaattctcgaaacttcctttgtagaaaactttggaaggtgtctgccacattgatcctggaatgtgtgtttatttggggttatataaatctgttctgtggaagccacctgaagtcaggaagagatggagggcatccttcaggagtgagatgagacctcatcatacttgactgtccagcatcatctctgagtgaggggaccaaaaaatttatcttccaaactaggacactttcaagagtggaagggggatccattaatattttcacctggacaagaggcaaacaccagaatgtccccgatgaaggggatatataatggaccttcttgatgtgaaacctgccagatgggctggaaagtccgtatactgggacaagtatgatttgagttgtttgggacaaggacaggggtacaagagaaggaaatgggcaaagagagaagcctgtactcagccaagggtgcagagatgttatatatgattgctcttcagggaaccgggcctccagctcacaccccagctgctcaaccacctcctctctgaattgactgtcccttctttggaactctaggcctgaccccactccctggccctcccagcccacgattcccctgacccgactccctttcccagaactcagtcgcctgaacccccagcctgtggttctctcctaggcctcagcctttcctgcctttgactgaaacagcagtatcttctaagccctgggggcttccccgggccccagccccgacctagaacccgcccgctgcctgccacgctgccactgccgcttcctctataaagggacctgagcgtccgggcccaggggctccgcacagcaggtgaggctctcctgccccatctccttgggctgcccgtgcttcgtgctttggactaccgcccagcagtgtcctgccctctgcctgggcctcggtccctcctgcacctgctgcctggatccccggcctgcctgggcctgggccttggtgggtttggttttggtttccttctctgtctctgactctccatctgtcagtctcattgtctctgtcacacattctctgtttctgccatgattcctctctgttcccttcctgtctctctctgtctccctctgctcaccttggggtttctctgactgcatcttgtccccttctctgtcgatctctctctcgggggtcggggggtgctgtctcccagggcgggaggtctgtcttccgccgcgtgccccgccccgctcactgtctctctctctctctctctttctctgcaggttctccccatgacaccacctgaacgtctcttcctcccaagggtgtgtggcaccaccctacacctcctccttctggggctgctgctggttctgctgcctggggcccaggtgaggcagcaggagaatgggggctgctggggtggctcagccaaaccttgagccctagagcccccctcaactctgttctcccctaggggctccctggtgttggcctcacaccttcagctgcccagactgcccgtcagcaccccaagatgcatcttgcccacagcaccctcaaacctgctgctcacctcattggtaaacatccacctgacctcccagacatgtccccaccagctctcctcctacccctgcctcaggaacccaagcatccacccctctcccccaacttcccccacgctaaaaaaaacagagggagcccactcctatgcctccccctgccatcccccaggaactcagttgttcagtgcccacttcctcagggattgagacctctgatccagacccctgatctcccacccccatcccctatggctcttcctaggagaccccagcaagcagaactcactgctctggagagcaaacacggaccgtgccttcctccaggatggtttctccttgagcaacaattctctcctggtccccaccagtggcatctacttcgtctactcccaggtggtcttctctgggaaagcctactctcccaaggccacctcctccccactctacctggcccatgaggtccagctcttctcctcccagtaccccttccatgtgcctctcctcagctcccagaagatggtgtatccagggctgcaggaaccctggctgcactcgatgtaccacggggctgcgttccagctcacccagggagaccagctatccacccacacagatggcatcccccacctagtcctcagccctagtactgtcttctttggagccttcgctctgtagaacttggaaaaatccagaaagaaaaaataattgatttcaagaccttctccccattctgcctccattctgaccatttcaggggtcgtcaccacctctcctttggccattccaacagctcaagtcttccctgatcaagtcaccggagctttcaaagaaggaattctaggcatcccaggggaccacacctccctgaaccatccctgatgtctgtctggctgaggatttcaagcctgcctaggaattcccagcccaaagctgttggtcttgtccaccagctaggtggggcctagatccacacacagaggaagagcaggcacatggaggagcttgggggatgactagaggcagggaggggactatttatgaaggcaaaaaaattaaattatttatttatggaggatggagagaggggaataatagaagaacatccaaggagaaacagagacaggcccaagagatgaagagtgagagggcatgcgcacaaggctgaccaagagagaaagaagtaggcatgagggatcacagggccccagaaggcagggaaaggctctgaaagccagctgccgaccagagccccacacggaggcatctgcaccctcgatgaagcccaataaacctcttttctctgaaatgctgtctgcttgtgtgtgtgtgtctgggagtgagaacttcccagtctatctaaggaatggagggagggacagagggctcaaagggagcaagagctgtggggagaacaaaaggataagggctcagagagcttcagggatatgtgatggactcaccaggtgaggccgccagactgctgcaggggaagcaaaggagaagctgagaagatgaaggaaaagtcagggtctggaggggcgggggtcagggagctcctgggagatatggccacatgtagcggctctgaggaatgggttacaggagacctctggggagatgtgaccacagcaatgggtaggagaatgtccagggctatgaaagtcgagtatggggacccccccttaacgaagacagggccatgtagagggccccagggagtgaaagagcctccaggacctccaggtatggaatacaggggacgtttaagaagatatggccacacactggggccctgagaagtgagagcttcatgaaaaaaatcagggaccccagagttccttggaagccaagactgaaaccagcattatgagtctccgggtcagaatgaaagaagagggcctgccccagtggggtctgtgaattcccgggggtgatttcactccccggggctgtcccaggcttgtccctgctacccgcacccagcctttcctgaggcctcaagcctgccaccaagcccccagctccttctccccgcagggcccaaacacaggcctcaggactcaacacagcttttccctccaaccccgttttctctccctcaacggactcagctttctgaagcccctcccagttctagttctatctttttcctgcatcctgtctggaagttagaaggaaacagaccacagacctggtccccaaaagaaatggaggcaataggttttgaggggcatggggacggggttcagcctccagggtcctacacacaaatcagtcagtggcccagaagacccccctcggaatcggagcagggaggatggggagtgtgaggggtatccttgatgcttgtgtgtccccaactttccaaatccccgcccccgcgatggagaagaaaccgagacagaaggtgcagggcccactaccgcttcctccagatgagctcatgggtttctccaccaaggaagttttccgctggttgaatgattctttccccgccctcctctcgccccagggacatataaaggcagttgttggcacacccagccagcagacgctccctcagcaaggacagcagaggaccagctaagagggagagaagcaactacagaccccccctgaaaacaaccctcagacgccacatcccctgacaagctgccaggcaggttctcttcctctcacatactgacccacggcttcaccctctctcccctggaaaggacaccatgagcactgaaagcatgatccgggacgtggagctggccgaggaggcgctccccaagaagacaggggggccccagggctccaggcggtgcttgttcctcagcctcttctccttcctgatcgtggcaggcgccaccacgctcttctgcctgctgcactttggagtgatcggcccccagagggaagaggtgagtgcctggccagccttcatccactctcccacccaaggggaaatggagacgcaagagagggagagagatgggatgggtgaaagatgtgcgctgatagggagggatggagagaaaaaaacgtggagaaagacggggatgcagaaagagatgtggcaagagatggggaagagagagagagaaagatggagagacaggatgtctggcacatggaaggtgctcactaagtgtgtatggagtgaatgaatgaatgaatgaatgaacaagcagatatataaataagatatggagacagatgtggggtgtgagaagagagatgggggaagaaacaagtgatatgaataaagatggtgagacagaaagagcgggaaatatgacagctaaggagagagatgggggagataaggagagaagaagatagggtgtctggcacacagaagacactcagggaaagagctgttgaatgcctggaaggtgaatacacagatgaatggagagagaaaaccagacacctcagggctaagagcgcaggccagacaggcagccagctgttcctcctttaagggtgactccctcgatgttaaccattctccttctccccaacagttccccagggacctctctctaatcagccctctggcccaggcagtcagtaagtgtctccaaacctctttcctaattctgggtttgggtttgggggtagggttagtaccggtatggaagcagtgggggaaatttaaagttttggtcttgggggaggatggatggaggtgaaagtaggggggtattttctaggaagtttaagggtctcagctttttcttttctctctcctcttcaggatcatcttctcgaaccccgagtgacaagcctgtagcccatgttgtaggtaagagctctgaggatgtgtcttggaacttggagggctaggatttggggattgaagcccggctgatggtaggcagaacttggagacaatgtgagaaggactcgctgagctcaagggaagggtggaggaacagcacaggccttagtgggatactcagaacgtcatggccaggtgggatgtgggatgacagacagagaggacaggaaccggatgtggggtgggcagagctcgagggccaggatgtggagagtgaaccgacatggccacactgactctcctctccctctctccctccctccagcaaaccctcaagctgaggggcagctccagtggctgaaccgccgggccaatgccctcctggccaatggcgtggagctgagagataaccagctggtggtgccatcagagggcctgtacctcatctactcccaggtcctcttcaagggccaaggctgcccctccacccatgtgctcctcacccacaccatcagccgcatcgccgtctcctaccagaccaaggtcaacctcctctctgccatcaagagcccctgccagagggagaccccagagggggctgaggccaagccctggtatgagcccatctatctgggaggggtcttccagctggagaagggtgaccgactcagcgctgagatcaatcggcccgactatctcgactttgccgagtctgggcaggtctactttgggatcattgccctgtgaggaggacgaacatccaaccttcccaaacgcctcccctgccccaatccctttattaccccctccttcagacaccctcaacctcttctggctcaaaaagagaattgggggcttagggtcggaacccaagcttagaactttaagcaacaagaccaccacttcgaaacctgggattcaggaatgtgtggcctgcacagtgaagtgctggcaaccactaagaattcaaactggggcctccagaactcactggggcctacagctttgatccctgacatctggaatctggagaccagggagcctttggttctggccagaatgctgcaggacttgagaagacctcacctagaaattgacacaagtggaccttaggccttcctctctccagatgtttccagacttccttgagacacggagcccagccctccccatggagccagctccctctatttatgtttgcacttgtgattatttattatttatttattatttatttatttacagatgaatgtatttatttgggagaccggggtatcctgggggacccaatgtaggagctgccttggctcagacatgttttccgtgaaaacggagctgaacaataggctgttcccatgtagccccctggcctctgtgccttcttttgattatgttttttaaaatatttatctgattaagttgtctaaacaatgctgatttggtgaccaactgtcactcattgctgagcctctgctccccaggggagttgtgtctgtaatcgccctactattcagtggcgagaaataaagtttgcttagaaaagaaacatggtctccttcttggaattaattctgcatctgcctcttcttgtgggtgggaagaagctccctaagtcctctctccacaggctttaagatccctcggacccagtcccatccttagactcctagggccctggagaccctacataaacaaagcccaacagaatattccccatcccccaggaaacaagagcctgaacctaattacctctccctcagggcatgggaatttccaactctgggaattc

SEQ ID NO: 200 - DNA, 1275 bp, Homo sapiens
atggctgccgggccgatctccgagcggaatcaggatgccactgtgtacgtggggggcctggatgagaaggttagtgaaccgctgctgtgggaactgtttctccaggctggaccagtagtcaacacccacatgccaaaggatagagtcactggccagcaccaaggctatggctttgtggaattcttgagtgaggaagatgctgactatgccattaagatcatgaacatgatcaaactctatgggaagccaatacgggtgaacaaagcatcagctcacaacaaaaacctggatgtaggggccaacattttcattgggaacctggaccctgagattgatgagaagttgctttatgatactttcagcgcctttggggtcatcttacaaacccccaaaattatgcgggaccctgacacaggcaactccaaaggttatgcctttattaattttgcttcatttgatgcttcggatgcagcaattgaagccatgaatgggcagtacctctgtaaccgtcctatcaccgtatcttatgccttcaagaaggactccaagggtgagcgccatggctcagcagccgaacgacttctggcagctcagaacccgctctcccaggctgatcgccctcatcagctgtttgcagatgcacctcctccaccctctgctcccaatcctgtggtatcatcattggggtctgggcttcctccaccaggcatgcctcctcctggctccttcccacccccagtgccacctcctggagccctcccacctgggatacccccagccatgcccccaccacctatgcctcctggggctgcaggacatggccccccatcggcaggaaccccaggggcaggacatcctggtcatggacactcacatcctcacccattcccaccgggtgggatgccccatccagggatgtctcagatgcagcttgcacaccatggccctcatggcttaggacatccccacgctggacccccaggctctgggggccagccaccgccccgaccaccacctggaatgcctcatcctggacctcctccaatgggcatgcccccccgagggcctccattcggatctcccatgggtcacccaggtcctatgcctccgcatggtatgcgtggacctcctccactgatgcccccccatggatacactggccctccacgacccccaccctatggctaccagcgggggcctctccctccacccagacccactccccggccaccagttccccctcgaggcccacttcgaggccctctccctcagtaa

SEQ ID NO: 201 - DNA, 3513 bp, Homo sapiens
  misc_feature (3414)..(3414): n is a, c, g, or t
  misc_feature (3435)..(3435): n is a, c, g, or t
  misc_feature (3469)..(3469): n is a, c, g, or t
  misc_feature (3501)..(3501): n is a, c, g, or t
cggacgaggcacgagtgaggggggaggcggtggcggcggccattttgagccgctgccgccattggagtgggccccccccctttcccccttcgcctcctgacaggaaaggtttaagggggacagagccctgggaggccgggccgggctcgggggccaccccgggggcccgggccatggatgtgcgccgtctgaaggtgaacgaacttcgcgaggagctgcagcgccgcggcctggacactcgaggcctcaagaccgagcttgctgagcggctgcaggcggcgttggaggccgaggagcctgacgacgagcgggagctcgacgccgacgacgaaccggggcgacccgggcacatcaacgaggaggtcgagaccgaggggggctccgagctggaggggaccgcgcagccaccgccgcccgggctgcagccgcacgcggagcccggcggctactcggggccggacggacattatgccatggacaatattaccaggcagaaccaattctacgatacccaagtcatcaaacaagaaaacgagtcaggctacgagaggagaccactggaaatggagcagcagcaggcctatcgtccagaaatgaagacagagatgaagcaaggagcacccaccagcttcctcccgcctgaagcttctcaactcaagccagacaggcagcaattccagagtcgaaagaggccttatgaagaaaaccggggacgggggtactttgagcaccgagaggataggaggggccgctctcctcagcctcctgctgaagaggatgaagatgactttgatgatacccttgttgctattgacacctataactgcgacctccacttcaaggtggcccgagatcggagtagtggctatccgctcacaattgagggctttgcatacctgtggtcaggagcccgtgccagctatggggtcagaaggggccgtgtatgcttcgagatgaagatcaatgaggaaatctccgtgaagcaccttccgtctacagagcctgacccccacgtggtccgtatcggctggtccctggactcctgcagcacccagctaggcgaagagcctttctcctatggctatggaggcactgggaagaagtccaccaatagccggtttgaaaactacggagacaagtttgcagagaacgatgtgattggctgctttgcggattttgaatgtggaaatgacgtggaactgtcttttaccaagaatggaaagtggatgggcattgctttccgaatccagaaggaagccttggggggtcaggccctctatcctcatgtcctggtgaagaattgcgcagtggagttcaacttcggacagagagcagagccctactgttctgtcctcccggggtttaccttcatccagcaccttccccttagtgagcgtatccggggcaccgttggaccaaagagcaaggcagaatgtgagattctgatgatggtgggcctgcctgctgctggcaagaccacatgggccatcaaacatgcagcctccaacccttccaagaagtacaacatcctgggtaccaatgccatcatggataagatgcgggtgatgggcctacgccggcagcggaactatgctggccgctgggatgtcctgatccagcaggccacccagtgcctcaaccgcctcatccagattgctgcccgcaagaaacgcaactatatcctagatcagacaaatgtttatgggtcagcccagagacgaaaaatgagaccatttgaaggcttccagcgcaaagctattgtaatttgtcccactgacgaggacctaaaagaccgaacaataaagcgaaccgacgaggaagggaaggatgtcccagatcatgcggtcttagaaatgaaagccaacttcacgttgccagatgttggggacttcctggatgaggttctgttcattgagctgcagcgggaggaagcggacaagctagtgaggcagtacaacgaggaaggccgcaaggctgggccaccccctgaaaagcgctttgacaaccgaggtggtggtggcttccgggcccgcgggggtggtggtgccttccagcgctatgaaaaccgaggaccccctggaggcaaccgtggcggcttccagaaccgagggggaggcagcggtggaggaggcaactaccgaggaggtttcaaccgcaacggaggtggtggctatagccagaaccgctggggtaacaacaaccgggataacaacaactccaacaacagaggcagctacaaccgggctccccagcaacagccgccaccacagcagcctccgccaccacagccaccaccccagcagccaccgccaccacccagctacagccctgctcggaaccccccaggggccagcacctacaataagaacagcaacatccctggctcaagcgccaataccagcacccccaccgtcagcagctacagccctccacagccgagttacagccagccaccctacaaccagggaggttacagccagggttacacaggcccaccgcctccacctccaccaccacctgcctacaactatgggagctacggcggttacaacccggccccctataccccaccgccaccccccaccgcacagacctaccctcagcccagctataaccagtatcagcagtatgcccagcagtggaaccagtactatcagaaccagggccagtggccgccatactacgggaactacgactacgggagctactccgggaacacacagggtggcacaagtacacagtagccagtgtgacccagaggctcccggaggcccctgccggcttcctccaccagcgcctgcctcggcccctcctctgcccccgccagatcccgtggtgctggggatggggtcatcccagggctgcctccctccagcccactgcctcccctctgagggggttccttcccctccatagggccaggcatttttttctggattcaaacaggcaacaatgaccttttattttctgtttgtccccacctccccaggcttccacctcctgttcttcctaccttcttcctttttgactaaataatccccacctcccttgatcatacagtgaggctacagtgactgaggggagaatcccctcctgttcactctcccaaccctgctccagcccctcagcttcccagaccctcatgcagttggttgtaaattctcccaggagctgttttactgtctacttttcagggttaaaaaaaaaatcaaaacttaaaaaaaaaaaagtttaaaaagcaaaatggggagggggaggaagcagtgacttttttttggtaattatgcgcttttttttaatttttagaatttgtctttttactgtggggtggggctgttgatatttcatcaagataaggcatttctttcccggagttcaggtgactgagggaagggcccccaaaacaaaacacanccaaaacccaaacccccaggnttcctctttttaaccccaacttttttttaccggntggcccccagtttcccccttaacttttggcancacaagggtttt

SEQ ID NO: 202 - DNA, 2187 bp, Homo sapiens
tggacggtctgaaagggagtgttcgggtttcgctggggcctcgcggctccagagcccagcatggcttcctcgcgagcctcttccacgcaggcaaccaaaactaaagcacccgacgacttagttgctccggtcgtgaagaaaccacacatctattatggaagtttggaagagaaggagagggagcgtctggccaaaggagagtctgggattttggggaaagacggacttaaagcagggatcgaagctggaaatattaatataacctctggagaagtgtttgaaattgaagagcgtatcagcgagcgacaggcagaagtattggctgagtttgagagaaggaagcgagcccggcagatcaatgtttccacagatgactcagaggtcaaagcttgccttagagccttgggggaacccatcacactttttggagagggtcctgctgaaagaagagaaaggttaagaaatatcctctcagttgtcggtactgatgccttgaaaaagaccaaaaaggatgatgagaagtctaaaaagtccaaagaagagtatcagcaaacctggtatcatgaaggaccaaatagcttgaaggtggcaagactatggattgctaattattcgttgcccagggcaatgaaacgcttggaagaggcccgactccataaggagattcctgagacaacaaggacctcccagatgcaagagctgcacaagtctctccggtctttgaataatttttgcagtcagattggggatgatcggcctatctcctactgtcactttagtcccaattccaagatgctggccacagcttgttggagtgggctttgcaagctctggtctgttcctgattgcaacctccttcacactcttcgagggcataacacaaatgtaggagcaattgtattccatcccaaatccactgtctccttggacccaaaagatgtcaacctggcctcttgtgcggctgatggctctgtgaagctttggagtctcgacagtgatgaaccagtggcagatattgaaggccatacagtgcgtgtggcgcgggtaatgtggcatccttcaggacgtttcctgggcaccacctgctatgaccgttcatggcgcttatgggatttggaggctcaagaggagatcctgcatcaggaaggccatagcatgggtgtgtatgacattgccttccatcaagatggctctttggctggcactgggggactggatgcatttggtcgagtttgggacctacgcacaggacgttgtatcatgttcttagaaggccacctgaaagaaatctatggaataaatttctcccccaatggctatcacattgcaaccggcagtggtgacaacacctgcaaagtgtgggacctccgacagcggcgttgcgtctacaccatccctgctcatcagaacttagtgactggtgtcaagtttgagcctatccatgggaacttcttgcttactggtgcctatgataacacagccaagatctggacgcacccaggctggtccccgctgaagactctggctggccacgaaggcaaagtgatgggcctagatatttcttccgatgggcagctcatagccacttgctcatatgacaggaccttcaagctgtggatggctgaatagatgacaatgggaaaaggacttgaacctcaagctctctctaaggagctgttttcctcaaacgagaagaattgaagtgtttagttctatcatgttttctgccaattaccatgcatagaccctcagtagaattggatttccatgtcagcccccactccaggaaggcagcccaatccctaggtgatggggaacccctctcacggttgaaaatttattacctttttacgccctgccacgaactgtgtagacattgtttttattaatcttttgtttggccgggcgtggtggctcacgcctgtaatcctagcactttgggaggccgaggtgggtagatcgcttgagctcaggagttcaagacgagcctgggcaacatggcaaatgccgtctctgcaaaaaaatactaaaattagctggtcgcggtggcttctgcctgtgattccggctacttgggaggctgaggtgggagggattgcttaagcctgggaggcagaggttgcagtgagccgagattgcgccattgcactctagcctgtgtgacagagcaagaccctgtctcaaaaa

SEQ ID NO: 203 - DNA, 1401 bp, Homo sapiens
accctgccctcggccttgtcccgggatcgctccgtcgcacccaccatgatggaagacgacgggcagccccggactctatacgtaggtaacctttccagagatgtgacagaagtccttatacttcagttgttcagtcagattggaccctgtaaaagctgtaaaatgataacagagcatacaagcaatgacccatattgctttgtggaattttatgaacacagagatgcagctgctgcattagctgctatgaatgggagaaaaattttgggaaaggaggtcaaagtaaactgggcaaccacaccaagtagccagaaaaaagatacttccaatcacttccatgtgtttgttggggatttgagtccagaaattacaacagaagatatcaaatcagcatttgccccctttggtaaaatatcggatgcccgggtagttaaagacatggcaactggaaaatccaaaggctatggttttgtatctttttataacaaactggatgcagaaaatgcgattgtgcatatgggcggtcagtggttgggtggtcgtcaaatccgaaccaattgggccactcgtaaaccacctgcacctaaaagtacacaagaaaacaacactaagcagttgagatttgaagatgtagtaaaccagtcaagtccaaaaaattgtactgtgtactgtggaggaattgcgtctgggttaacagatcagcttatgagacagacattctcaccatttggacaaattatggaaataagagttttcccagaaaagggctattcatttgtcagattttcaacccatgaaagtgcagcccatgccattgtttcggtgaacggtactacgattgaaggacatgtggttaaatgctattggggtaaagaatctcctgatatgactaaaaacttccaacaggttgactatagtcaatggggccaatggagccaagtgtatggaaacccacaacagtatggacagtatatggcaaatgggtggcaagtaccgccttatggagtatacgggcaaccatggaatcaacaaggatttggagtagatcaatcaccttctgctgcttggatgggtggatttggtgctcagcctccccaaggacaagctcctccccctgtaatacctcctcctaaccaagccggatatggtatggcaagttaccaaacacagtgagccgggactctaaaaaaaaattgtaattcatgataggcttcgatttcctgtgacactctgaagacatgaaagtagacatcggaaaatgaaaatatttattttaaaaattgaaatgtttggaacctttagcacagatttgctttggtgaaggacacgtgtcttctagttctgcctttttaagtttttgttcatgatggatatgaacatgatttttctttatgtacaaaa

SEQ ID NO: 204 - DNA, 2146 bp, Homo sapiens
tgctcgcgctggaagaagcggaagaagatggcgctcaccagctttttacctgcacctactcagctatctcaggaccagcttgaggctgaagaaaaggcaagatcccagagatcacggcagacctcactggtctcctcccgaagagaacctcccccgtacggataccggaaaggctggatacctcggttattagaggattttggagatggaggtgcttttccagagatccatgtggcccagtatccactggatatgggacgaaagaaaaaaatgtcgaatgcgctggccattcaggtggattctgaaggaaaaattaaatatgatgcaattgctcgacaaggacagtcaaaagacaaggtcatttatagcaaatacactgacctggttccaaaggaggttatgaatgcagatgatccagacctgcaaaggcccgatgaagaagctattaaagagataacagaaaagacaagagtagccttagaaaaatctgtatcacagaaggtcgccgcagccatgccagttcgagcagctgacaaattggctcctgctcagtatatccgatacacaccatctcagcaaggagtggcattcaactctggagctaaacagagggttattcggatggtagaaatgcagaaagatccaatggagcctccaaggttcaagattaataagaaaattccccggggaccaccttctcctcctgcgcctgtcatgcattctcctagccgaaagatgactgtaaaggaacaacaagagtggaagattcctccttgtatttctaactggaaaaatgcaaagggttatacaattccattagacaaacgtctggctgctgatggaagaggactacagacagtacacataaatgaaaatttcgccaaattggcagaagccctctacattgctgatcggaaggctcgtgaagctgtggaaatgcgtgcccaagtagagagaaaaatggctcagaaagaaaaggaaaaacatgaagagaaacttagagaaatggcccagaaagccagggagagaagagctgggatcaaaactcatgtggaaaaagaggatggggaggcacgtgagagggatgaaatccggcatgacaggcgaaaagagagacagcatgaccggaatctttccagggcagctcctgataagaggtcgaaacttcagagaaatgaaaatcgggatatcagtgaagttattgctctcggtgttcctaatcctcggacttccaatgaagttcagtatgaccaaaggctcttcaaccaatccaagggtatggacagtggatttgcaggtggagaagatgaaatttataatgtttatgatcaagcctggagaggtggtaaagatatggcccagagtatttataggcccagtaaaaatctggacaaggacatgtatggtgatgacctagaagccagaataaagaccaacagatttgttcccgacaaggagttttctggttcagaccgtagacagagaggccgagaaggaccagtgcagtttgaggaagatccttttggtttggacaagtttttggaagaagccaaacagcatggtggctctaaaagaccctcagatagcagccgccccaaggaacacgagcatgaaggcaagaagaggaggaaggaataggcacaggtctctccaaagtgaatgaactcttacccataaccctaatgatgcaagtcatatgggggaacactttgtaaatggtcaggataaaaaccaaatctgggtgccagatcccagcactactttttattactggagaaatgggggggatagaaaattctactttgaattatttagttttttttaaagagtgggttgtgtttgtgcttctcccacctttcagcatttatagaacatgctgccccacatacaaagtcaagaccacttacttttatgtgacactagtagtttggggttaatgttttgtgtaagaacagctgcatatgagtaaagttaccccaaccacagtgaggaggaagatgttcacatactggaactgtcctgccaaataaattttgcccctattgtgctctgttttaatttggagtgggcaaagtaacctcttgcttggtgcaactatttgtttcaaataaaaacatttagacaaaaaaaaaaaaaaaaaaaaaaa

SEQ ID NO: 205 - DNA, 2907 bp, Homo sapiens
gccatctgggcccaggccccatgccccgaggaggggtggtctgaagcccaccagagccccctgccagactgtctgcctcccttctgactgtggccgcttggcatggccagcaacagcagctcctgcccgacacctgggggcgggcacctcaatgggtacccggtgcctccctacgccttcttcttcccccctatgctgggtggactctccccgccaggcgctctgaccactctccagcaccagcttccagttagtggatatagcacaccatccccagccaccattgagacccagagcagcagttctgaagagatagtgcccagccctccctcgccaccccctctaccccgcatctacaagccttgctttgtctgtcaggacaagtcctcaggctaccactatggggtcagcgcctgtgagggctgcaagggcttcttccgccgcagcatccagaagaacatggtgtacacgtgtcaccgggacaagaactgcatcatcaacaaggtgacccggaaccgctgccagtactgccgactgcagaagtgctttgaagtgggcatgtccaaggagtctgtgagaaacgaccgaaacaagaagaagaaggaggtgcccaagcccgagtgctctgagagctacacgctgacgccggaggtgggggagctcattgagaaggtgcgcaaagcgcaccaggaaaccttccctgccctctgccagctgggcaaatacactacgaacaacagctcagaacaacgtgtctctctggacattgacctctgggacaagttcagtgaactctccaccaagtgcatcattaagactgtggagttcgccaagcagctgcccggcttcaccaccctcaccatcgccgaccagatcaccctcctcaaggctgcctgcctggacatcctgatcctgcggatctgcacgcggtacacgcccgagcaggacaccatgaccttctcggacgggctgaccctgaaccggacccagatgcacaacgctggcttcggccccctcaccgacctggtctttgccttcgccaaccagctgctgcccctggagatggatgatgcggagacggggctgctcagcgccatctgcctcatctgcggagaccgccaggacctggagcagccggaccgggtggacatgctgcaggagccgctgctggaggcgctaaaggtctacgtgcggaagcggaggcccagccgcccccacatgttccccaagatgctaatgaagattactgacctgcgaagcatcagcgccaagggggctgagcgggtgatcacgctgaagatggagatcccgggctccatgccgcctctcatccaggaaatgttggagaactcagagggcctggacactctgagcggacagccggggggtggggggcgggacgggggtggcctggcccccccgccaggcagctgtagccccagcctcagccccagctccaacagaagcagcccggccacccactccccgtgaccgcccacgccacatggacacagccctcgccctccgccccggcttttctctgcctttctaccgaccatgtgaccccgcaccagccctgcccccacctgccctcccgggcagtactggggaccttccctgggggacggggagggaggaggcagcgactccttggacagaggcctgggccctcagtggactgcctgctcccacagcctgggctgacgtcagaggccgaggccaggaactgagtgaggcccctggtcctgggtctcaggatgggtcctgggggcctcgtgttcatcaagacacccctctgcccagctcaccacatcttcatcaccagcaaacgccaggacttggctcccccatcctcagaactcacaagccattgctccccagctggggaacctcaacctcccccctgcctcggttggtgacagagggggtgggacaggggcggggggttccccctgtacataccctgccataccaaccccaggtattaattctcgctggttttgtttttattttaatttttttgttttgatttttttaataagaattttcattttaagcacatttatactgaaggaatttgtgctgtgtattggggggagctggatccagagctggagggggtgggtccgggggagggagtggctcggaaggggcccccactctcctttcatgtccctgtgccccccagttctcctcctcagccttttcctcctcagttttctctttaaaactgtgaagtactaactttccaaggcctgccttcccctccctcccactggagaagccgccagcccctttctccctctgcctgaccactgggtgtggacggtgtggggcagccctgaaaggacaggctcctggccttggcacttgcctgcacccaccatgaggcatggagcagggcagagcaagggccccgggacagagttttcccagacctggctcctcggcagagctgcctcccgtcagggcccacatcatctaggctccccagcccccactgtgaaggggctggccaggggcccgagctgcccccacccccggcctcagccaccagcacccccatagggcccccagacaccacacacatgcgcgtgcgcacacacacaaacacacacacactggacagtagatgggccgacacacacttggcccgagttcctccatttccctggcctgccccccacccccaacctgtcccacccccgtgccccctccttaccccgcaggacgggcctacaggggggtctcccctcacccctgcacccccagctgggggagctggctctgccccgacctccttcaccaggggttggggccccttcccctggagcccgtgggtgcacctgttactgttgggctttccactgagatctactggataaagaataaagttctatttattct

SEQ ID NO: 206 - DNA, 2423 bp, Homo sapiens
ccggcccggtcgacccgccgccgccgagcatggacgaccccgactgcgactccacctgggaggaggacgaggaggatgcggaggacgcggaggacgaggactgcgaggaggccgaggccgccggcgcgagggacgcggacgcaggggacgaggacgaggagtcggaggagccgcgggggccgtgcccagctcgttccagtccagaatgacagggtccagaaactggcgagccacgagggacatgtgtaggtatcggcacaactatccggatctggtggaacgagactgcaatggggacacgccaaacctgagtttctacagaaatgagatccgcttcctgcccaacggctgtttcattgaggacattcttcagaactggacagacaactatgacctccttgaggacaatcactcctacatccagtggctgtttcctctgcgagaaccaggagtgaactggcatgccaagcccctcacgctcagggaggtcgaggtgtttaaaagctcccaggagatccaggagcggcttgtccgggcctacgcagctcatgctgggcttctacgggatccggctggaggaccgaggcacgggcacggtgggccgagcacagaactaccagaagcgcttccagaacctgaactgcgcagccacaacaacctccgcatcacacgcatcctcaagtcgctgggtgagctgggcctcgagcacttccaggcgccgctggtccgcttcttcctggaggagagcctggtgcggcgggagctgccgggggtgcggcagagtgccctggactacttcatgttcgccgtcggctgccgacaccagcgccgccagctggtgcacttcgcctgggagcacttccggccccgctgcaagttcgtctgggggccccaagacaagctgcggaggttcaagcccagctctctgccgcatccgctcgagggctccaggaaggtggaggaggaaggaagccccggggaccccgaccacgaggccagcacccagggtcggacctgtgggccagagcatagcaagggtgggggcagggtggacgaggggccccagccacggagcgtggagccccaggatgcgggacccctggagaggagccagggggatgaggcagggggccacggggaagataggccggagcccttaagccccaaagagagcaagaagaggaagctggagctgagccggcgggagcagccgcccacagagccaggccctcagagtgcctcagaggtggagaagatcgctctgaatttggaggggtgtgccctcagccagggcagcctcaggacggggacccaggaagtgggcggtcaggaccctggggaggcagtgcagccctgccgccaacccctgggagccagggtggccgacaaggtgaggaagcggaggaaggtggatgagggtgctggggacagtgctgcggtggccagtggtggtgcccagaccttggcccttgccgggtcccctgccccatcggggcaccccaaggctggacacagtgagaacggggttgaggaggacacagaaggtcgaacggggcccaaagaaggtacccctgggagcccatcggagaccccaggccccagcccagcaggacctgcaggggacgagccggccgagagcccatcggagaccccaggcccccgcccagcaggacctgcaggggacgagccagccgagagcccatcggagaccccaggcccccgcccggcaggacctgcaggggacgagccagccaagaccccatcggagaccccaggccccagcccggcaggacctacaagggatgagccagccgagagcccatcggagaccccaggcccccgcccggcaggacctgcaggggacgagccagccgagagcccatcggagaccccaggcccccgcccggcaggacctgcaggggacgagccagccgagagcccatcggagaccccaggccccagcccggcaggacctacaagggatgagccagccaaggcgggggaggcagcagagttgcaggacgcagaggtggagtcttctgccaagtctgggaagccttaaggaaaggagtgcccgtcggcgtcttggtcctcctgtccctgctgcaggggctggggcctccggagctgctgcgggctcccctcaggctctgcttcgtgacccgtgacccatgacccacagtgctggcctcctgtggggccactatagcagccaccagaagccgcgaggccctcagggaagcccaaggcctgcagaagcctcctggcctggctgtgtcttccccacccagctctcccctgcgcccctgtctttgtaaattgacccttctggagtggggggcggcgggcagggctgcttttcttagtctgatgccaagcaaggccttttctgaataaattcatttgactttgaaaaaaaaaaa

SEQ ID NO: 207 - DNA, 1245 bp, Homo sapiens
cgtcctcccttcttctcttgcagagcctgacgcaccccagggctgccgccatggagcccctgttcccagcctccacgcccagctggaacgcctcctccccgggggctgcctctggaggcggtgacaacaggacgctggtggggccggcgccctcggcaggggcccgggcggtgctggtgcccgtgctgtacctgctggtgtgtgcggccgggctgggcgggaacacgctggtcatctacgtggtgctgcgcttcgccaagatgaagaccgtcaccaacatctacattctcaacctggcagtggccgacgtcctgtacatgctggggctgcctttcctggccacgcagaacgccgcgtccttctggcccttcggccccgtcctgtgccgcctggtcatgacgctggacggcgtcaaccagttcaccagtgtcttctgcctgacagtcatgagcgtggaccgctacctggcagtggtgcacccgctgagctcggcccgctggcgccgcccgcgtgtggccaagctggcgagcgccgcggcctgggtcctgtctctgtgcatgtcgctgccgctcctggtgttcgcggacgtgcaggagggcggtacctgcaacgccagctggccggagcccgtggggctgtggggcgccgtcttcatcatctacacggccgtgctgggcttcttcgcgccgctgctggtcatctgcctgtgctacctgctcatcgtggtgaaggtgagggcggcgggcgtgcgcgtgggctgcgtgcggcggcgctcggagcggaaggtgacgcgcatggtgttggtggtggtgctggtgtttgcgggatgttggctgcccttcttcaccgtcaacatcgtcaacctggccgtggcgctgccccaggagcccgcctccgccggcctctacttcttcgtggtcatcctctcctacgccaacagctgtgccaaccccgtcctctacggcttcctctctgacaacttccgccagagcttccagaaggttctgtgcctccgcaagggctctggtgccaaggacgctgacgccacggagccgcgtccagacaggatccggcagcagcaggaggccacgccgcccgcgcaccgcgccgcagccaacgggcttatgcagaccagcaagctgtgagagtgcaggcggggggtgggcggccccgtgtcacccccaggagcggaggttgcactgcggtgacccccacccatgacctgccagtcaggatgctccccgg

SEQ ID NO: 208 - DNA, 3591 bp, Homo sapiens
agatcttggaacgagacgacctgctctctctcccagaacgtgtctctgctgcaaggcaccgggccctttcgctctgcagaactgcacttgcaagaccattatcaactcctaatcccagctcagaaagggagcctctgcgactcattcatcgccctccaggactgactgcattgcacagatgatggatatttacgtatgtttgaaacgaccatcctggatggtggacaataaaagaatgaggactgcttcaaatttccagtggctgttatcaacatttattcttctatatctaatgaatcaagtaaatagccagaaaaagggggctcctcatgatttgaagtgtgtaactaacaatttgcaagtgtggaactgttcttggaaagcaccctctggaacaggccgtggtactgattatgaagtttgcattgaaaacaggtcccgttcttgttatcagttggagaaaaccagtattaaaattccagctctttcacatggtgattatgaaataacaataaattctctacatgattttggaagttctacaagtaaattcacactaaatgaacaaaacgtttccttaattccagatactccagagatcttgaatttgtctgctgatttctcaacctctacattatacctaaagtggaacgacaggggttcagtttttccacaccgctcaaatgttatctgggaaattaaagttctacgtaaagagagtatggagctcgtaaaattagtgacccacaacacaactctgaatggcaaagatacacttcatcactggagttgggcctcagatatgcccttggaatgtgccattcattttgtggaaattagatgctacattgacaatcttcatttttctggtctcgaagagtggagtgactggagccctgtgaagaacatttcttggatacctgattctcagactaaggtttttcctcaagataaagtgatacttgtaggctcagacataacattttgttgtgtgagtcaagaaaaagtgttatcagcactgattggccatacaaactgccccttgatccatcttgatggggaaaatgttgcaatcaagattcgtaatatttctgtttctgcaagtagtggaacaaatgtagtttttacaaccgaagataacatatttggaaccgttatttttgctggatatccaccagatactcctcaacaactgaattgtgagacacatgatttaaaagaaattatatgtagttggaatccaggaagggtgacagcgttggtgggcccacgtgctacaagctacactttagttgaaagtttttcaggaaaatatgttagacttaaaagagctgaagcacctacaaacgaaagctatcaattattatttcaaatgcttccaaatcaagaaatatataattttactttgaatgctcacaatccgctgggtcgatcacaatcaacaattttagttaatataactgaaaaagtttatccccatactcctacttcattcaaagtgaaggatattaattcaacagctgttaaactttcttggcatttaccaggcaactttgcaaagattaattttttatgtgaaattgaaattaagaaatctaattcagtacaagagcagcggaatgtcacaatcaaaggagtagaaaattcaagttatcttgttgctctggacaagttaaatccatacactctatatacttttcggattcgttgttctactgaaactttctggaaatggagcaaatggagcaataaaaaacaacatttaacaacagaagccagtccttcaaaggggcctgatacttggagagagtggagttctgatggaaaaaatttaataatctattggaagcctttacccattaatgaagctaatggaaaaatactttcctacaatgtatcgtgttcatcagatgaggaaacacagtccctttctgaaatccctgatcctcagcacaaagcagagatacgacttgataagaatgactacatcatcagcgtagtggctaaaaattctgtgggctcatcaccaccttccaaaatagcgagtatggaaattccaaatgatgatctcaaaatagaacaagttgttgggatgggaaaggggattctcctcacctggcattacgaccccaacatgacttgcgactacgtcattaagtggtgtaactcgtctcggtcggaaccatgccttatggactggagaaaagttccctcaaacagcactgaaactgtaatagaatctgatgagtttcgaccaggtataagatataattttttcctgtatggatgcagaaatcaaggatatcaattattacgctccatgattggatatatagaagaattggctcccattgttgcaccaaattttactgttgaggatacttctgcagattcgatattagtaaaatgggaagacattcctgtggaagaacttagaggctttttaagaggatatttgttttactttggaaaaggagaaagagacacatctaagatgagggttttagaatcaggtcgttctgacataaaagttaagaatattactgacatatcccagaagacactgagaattgctgatcttcaaggtaaaacaagttaccacctggtcttgcgagcctatacagatggtggagtgggcccggagaagagtatgtatgtggtgacaaaggaaaattctgtgggattaattattgccattctcatcccagtggcagtggctgtcattgttggagtggtgacaagtatcctttgctatcggaaacgagaatggattaaagaaaccttctaccctgatattccaaatccagaaaactgtaaagcattacagtttcaaaagagtgtctgtgagggaagcagtgctcttaaaacattggaaatgaatccttgtaccccaaataatgttgaggttctggaaactcgatcagcatttcctaaaatagaagatacagaaataatttccccagtagctgagcgtcctgaagatcgctctgatgcagagcctgaaaaccatgtggttgtgtcctattgtccacccatcattgaggaagaaataccaaacccagccgcagatgaagctggagggactgcacaggttatttacattgatgttcagtcgatgtatcagcctcaagcaaaaccagaagaagaacaagaaaatgaccctgtaggaggggcaggctataagccacagatgcacctccccattaattctactgtggaagatatagctgcagaagaggacttagataaaactgcgggttacagacctcaggccaatgtaaatacatggaatttagtgtctccagactctcctagatccatagacagcaacagtgagattgtctcatttggaagtccatgctccattaattcccgacaatttttgattcctcctaaagatgaagactctcctaaatctaatggaggagggtggtcctttacaaacttttttcagaacaaaccaaacgattaacagtgtcaccgtgtcacttcagtcagccatctcaataagctcttactgctagtgttgctacatcagcactgggcattcttggagggatcctgtgaagtattgttaggaggtgaacttca

SEQ ID NO: 209 - DNA, 3829 bp, Homo sapiens
aaggatggcacagggctggtgccctcggagcgtgtcctggtggggccccagcggctgcaggtgctgaatgcctcccacgaggactccggggcctacagctgccggcagcggctcacgcagcgcgtactgtgccacttcagtgtgcgggtgacagacgctccatcctcgggagatgacgaagacggggaggacgaggctgaggacacaggtgtggacacaggggccccttactggacacggcccgagcggatggacaagaagctgctggccgtgccggccgccaacaccgtccgcttccgctgcccagccgctggcaaccccactccctccatctcctggctgaagaacggcagggagttccgcggcgagcaccgcattggaggcatcaagctgcggcatcagcagtggagcctggtcatggaaagcgtggtgccctcggaccgcggcaactacacctgcgtcgtggagaacaagtttggcagcatccggcagacgtacacgctggacgtgctggagcgctccccgcaccggcccatcctgcaggcggggctgccggccaaccagacggcggtgctgggcagcgacgtggagttccactgcaaggtgtacagtgacgcacagccccacatccagtggctcaagcacgtggaggtgaatggcagcaaggtgggcccggacggcacaccctacgttaccgtgctcaagacggcgggcgctaacaccaccgacaaggagctagaggttctctccttgcacaacgtcacctttgaggacgccggggagtacacctgcctggcgggcaattctattgggttttctcatcactctgcgtggctggtggtgctgccagccgaggaggagctggtggaggctgacgaggcgggcagtgtgtatgcaggcatcctcagctacggggtgggcttcttcctgttcatcctggtggtggcggctgtgaccgtctgccgcctgcgcagcccccccaagaaaggcctgggctcccccaccgtgcacaagatctcccgcttcccgctcaagcgacaggtgtccctggagtccaacgcgtccatgagctccaacacaccactggtgcgcatcgcaaggctgtcctcaggggagggccccacgctggccaatgtctccgagctcgagctgcctgccgaccccaaatgggagctgtctcgggcccggctgaccctgggcaagccccttggggagggctgcttcggccaggtggtcatggcggaggccatcggcattgacaaggaccgggccgccaagcctgtcaccgtagccgtgaagatgctgaaagacgatgccactgacaaggacctgtcggacctggtgtctgagatggagatgatgaagatgatcgggaaacacaaaaacatcatcaacctgctgggcgcctgcacgcagggcgggcccctgtacgtgctggtggagtacgcggccaagggtaacctgcgggagtttctgcgggcgcggcggcccccgggcctggactactccttcgacacctgcaagccgcccgaggagcagctcaccttcaaggacctggtgtcctgtgcctaccaggtggcccggggcatggagtacttggcctcccagaagtgcatccacagggacctggctgcccgcaatgtgctggtgaccgaggacaacgtgatgaagatcgcagacttcgggctggcccgggacgtgcacaacctcgactactacaagaagacaaccaacggccggctccccgtgaagtggatggcgcctgaggccttgtttgaccgagtctacactcaccagagtgacgtctggtcctttggggtcctgctctgggagatcttcacgctggggggctccccgtaccccggcatccctgtggaggagctcttcaagctgctgaaggagggccaccgcatggacaagcccgccaactgcacacacgacctgtacatgatcatgcgggagtgctggcatgccgcgccctcccagaggcccaccttcaagcagctggtggaggacctggaccgtgtccttaccgtgacgtccaccgacgagtacctggacctgtcggcgcctttcgagcagtactccccgggtggccaggacacccccagctccagctcctcaggggacgactccgtgtttgcccacgacctgctgcccccggccccacccagcagtgggggctcgcggacgtgaagggccactggtccccaacaatgtgaggggtccctagcagcccaccctgctgctggtgcacagccactccccggcatgagactcagtgcagatggagagacagctacacagagctttggtctgtgtgtgtgtgtgtgcgtgtgtgtgtgtgtgtgcacatccgcgtgtgcctgtgtgcgtgcgcatcttgcctccaggtgcagaggtaccctgggtgtccccgctgctgtgcaacggtctcctgactggtgctgcagcaccgaggggcctttgttctggggggacccagtgcagaatgtaagtgggcccacccggtgggaccccgtggggcagggagctgggcccgacatggctcggcctctgcctttgcaccacgggacatcacagggtgcgctcggcccctcccacacccaaagctgagcctgcagggaagccccacatgtccagcaccttgtgcctggggtgttagtggcaccgcctccccacctccaggctttcccacttcccaccctgcccctcagagactgaaattacgggtacctgaagatgggagcctttaccttttatgcaaaaggtttattccggaaactagtgtacatttctataaatagatgctgtgtatatggtatatatacatatatatatataacatatatggaagaggaaaaggctggtacaacggaggcctgcgaccctgggggcacaggaggcaggcatggccctgggcggggcgtgggggggcgtggagggaggccccaggggtctcacccatgcaagcagaggaccagggctttttctggcaccgcagttttgttttaaaactggacctgtatatttgtaaagctatttatgggcccctggcactcttgttcccacaccccaacacttccagcatttagctggccacatggcggagagttttaatttttaacttattgacaaccgagaaggtttatcccgccgatagagggacggccaagaatgtacgtccagcctgccccggagctggaggatcccctccaagcctaaaaggttgttaatagttggaggtgattccagtgaagatattttatttgctttgtcctttttcaggagaattagatttctataggatttttctttaggagatttattttttggacttcaaagcaagctggtattttcatacaaattcttctaattgctgtgtgtcccaggcagggagacggtttccagggaggggccggccctgtgtgcaggttccgatgttattagatgttacaagtttatatatatctatatatataatttattgagtttttacaagatgtatttgttgtagacttaacacttcttacgcaatgcttctagagttttatagcctggactgctacctttcaaagcttggagggaagccgtgaattcagttggttcgttctgtactgttactgggccctgagtctgggcagctgtcccttgcttgcctgcagggccatggctcagggtggtctcttcttggggcccagtgcatggtggccagaggtgtcacccaaaccggcaggtgcgattttgttaacccagcgacgaactttccgaaaaataaagacacctggttgctaacctgaaaaaaaaaaaaaaaaaaaaaaaaaaaaaa

SEQ ID NO: 210 - DNA, 3451 bp, Homo sapiens
cccgggttcaagagattctcctgtctcagcctcccgagtagctgggactacaggtacgtgccaccacacctggctaatttttgtatttttagtagagacaagagttacaccatattggccaggatcttttgctttctatagcttcaaaatgttcttaatgttaagacattcttaatactctgaaccatatgaatttgccattttggtaagtcacagacgccagatggtggcaatttcacatggcacaacccgaaagattaacaaactatccagcagatgaaaggattttttttagtttcattgggtttactgaagaaattgtttgaattctcattgcatctccagttcaacagataatgagtgagtgatgccacactctcaagagttaaaaacaaaacaacaaaaaaattaaaacaaaagcacacaactttctctctctgtcccaaaatacatacttgcatacccccgctccagataaaatccaaagggtaaaactgtcttcatgcctgcaaattcctaaggagggcacctaaagtacttgacagcgagtgtgctgaggaaatcggcagctgttgaagtcacctcctgtgctcttgccaaatgtttgaaagggaatacactgggttaccgggtgtatgttgggaggggagcattatcagtgctcgggtgaggcaagttcggagtacccagatggagacatccgtgtctgtgtcgctctggatgcctccaagccagcgtgtgtttactttctgtgtgtgtcaccatgtctttgtgcttctgggtgcttctgtgtttgtttctggccgcgtttctgtgttggacaggggtgactttgtgccggatggcttctgtgtgagagcgcgcgcgagtgtgcatgtcggtgagctgggagggtgtgtctcagtgtctatggctgtggttcggtataagtctgagcatgtctgccagggtgtatttgtgcctgtatgtgcgtgcctcggtgggcactctcgtttccttccgaatgtggggcagtgccggtgtgctgccctctgccttgagacctcaagccgcgcaggcgcccagggcaggcaggtagcggccacagaagagccaaaagctcccgggttggctggtaaggacaccacctccagctttagccctctggggccagccagggtagccgggaagcagtggtggcccgccctccagggagcagttgggccccgcccgggccagccccaggagaaggagggcgaggggaggggagggaaaggggaggagtgcctcgccccttcgcggctgccggcgtgccattggccgaaagttcccgtacgtcacggcgagggcagttcccctaaagtcctgtgcacataacgggcagaacgcactgcgaagcggcttcttcagagcacgggctggaactggcaggcaccgcgagcccctagcacccgacaagctgagtgtgcaggacgagtccccaccacacccacaccacagccgctgaatgaggcttccaggcgtccgctcgcggcccgcagagccccgccgtgggtccgcccgctgaggcgcccccagccagtgcgcttacctgccagactgcgcgccatggggcaacccgggaacggcagcgccttcttgctggcacccaatagaagccatgcgccggaccacgacgtcacgcagcaaagggacgaggtgtgggtggtgggcatgggcatcgtcatgtctctcatcgtcctggccatcgtgtttggcaatgtgctggtcatcacagccattgccaagttcgagcgtctgcagacggtcaccaactacttcatcacttcactggcctgtgctgatctggtcatgggcctggcagtggtgccctttggggccgcccatattcttatgaaaatgtggacttttggcaacttctggtgcgagttttggacttccattgatgtgctgtgcgtcacggccagcattgagaccctgtgcgtgatcgcagtggatcgctactttgccattacttcacctttcaagtaccagagcctgctgaccaagaataaggcccgggtgatcattctgatggtgtggattgtgtcaggccttacctccttcttgcccattcagatgcactggtaccgggccacccaccaggaagccatcaactgctatgccaatgagacctgctgtgacttcttcacgaaccaagcctatgccattgcctcttccatcgtgtccttctacgttcccctggtgatcatggtcttcgtctactccagggtctttcaggaggccaaaaggcagctccagaagattgacaaatctgagggccgcttccatgtccagaaccttagccaggtggagcaggatgggcggacggggcatggactccgcagatcttccaagttctgcttgaaggagcacaaagccctcaagacgttaggcatcatcatgggcactttcaccctctgctggctgcccttcttcatcgttaacattgtgcatgtgatccaggataacctcatccgtaaggaagtttacatcctcctaaattggataggctatgtcaattctggtttcaatccccttatctactgccggagcccagatttcaggattgccttccaggagcttctgtgcctgcgcaggtcttctttgaaggcctatgggaatggctactccagcaacggcaacacaggggagcagagtggatatcacgtggaacaggagaaagaaaataaactgctgtgtgaagacctcccaggcacggaagactttgtgggccatcaaggtactgtgcctagcgataacattgattcacaagggaggaattgtagtacaaatgactcactgctgtaaagcagtttttctacttttaaagacccccccccccccaacagaacactaaacagactatttaacttgagggtaataaacttagaataaaattgtaaaaattgtatagagatatgcagaaggaagggcatccttctgccttttttatttttttaagctgtaaaaagagagaaaacttatttgagtgattatttgttatttgtacagttcagttcctctttgcatggaatttgtaagtttatgtctaaagagctttagtcctagaggacctgagtctgctatattttcatgacttttccatgtatctacctcactattcaagtattaggggtaatatattgctgctggtaatttgtatctgaaggagattttccttcctacacccttggacttgaggattttgagtatctcggacctttcagctgtgaacatggactcttcccccactcctcttatttgctcacacggggtattttaggcagggatttgaggagcagcttcagttgttttcccgagcaaaggtctaaagtttacagtaaataaaatgtttgaccatgccttcattgcacctgtttgtccaaaaccccttgactggagtgctgttgcctcccccactggaaaccgc

SEQ ID NO: 211 - DNA, 8789 bp, Homo sapiens
atgtctgacaaaatgtcgagtttcctacatattggagacatttgttctctgtacgcggagggatcgacaaatggatttattagcaccttgggcctggttgatgatcgttgtgttgtacagccagaaaccggggaccttaacaatccacctaagaaattcagagactgcctctttaagctatgtcccatgaaccgctactctgcccaaaagcagttctggaaagccgctaagcctggggccaacagcaccacagacgcagtgctactcaacaaactgcaccacgctgcagacttggaaaagaagcagaatgagacagaaaacaggaaattgctggggaccgtaatccagtatggcaatgtgatccagctcctgcatttgaaaagtaataaatacctaacagtgaataagaggcttcctgctctgttggagaagaatgccatgagagtcacattggacgaggctggaaatgaagggtcctggttttatattcagccattctacaagctgcgatccattggagacagcgtggtcataggtgacaaggtggttctgaaccccgtcaatgctggtcagcccctacatgctagcagccatcaactggtagataacccaggctgcaatgaggtcaattccgtcaactgcaatacaagctggaaaatagtccttttcatgaaatggagtgataacaaagacgacatattaaaggggggtgacgtggtgaggctgtttcatgctgagcaggagaagtttctcacctgtgacgaacacaggaagaagcagcacgtcttcctgagaaccacgggccggcagtcggccacatctgccaccagttcaaaagccctgtgggaggtggaggtggtccagcatgacccatgtcggggcggagcagggtattggaacagccttttccgtttcaagcatctggccacggggcattacttggcagcagaggtggaccctgatcaggacgcctctcgaagtaggttgcggaatgcccaagaaaagatggtatactccctggtctctgtgcctgaaggcaatgacatctcctccattttcgagctagatcccaccactctgcgtggaggtgacagccttgtcccaaggaactcttatgttcggctcagacacctatgtactaatacctgggttcacagcacaaatattcctattgacaaggaagaagaaaagcccgtgatgctgaaaattggcacctctcctgtgaaggaggataaggaagcatttgccatagttccggtttctcctgctgaagttcgggacctggacttcgccaatgatgccagcaaggtgctgggctccattgctgggaagctagagaagggcaccatcacccagaatgaaaggaggtctgtaaccaagctgctagaagatttggtttacttcgtcactggtggaactaattctggtcaagatgttctcgaagttgtcttctccaagcccaacagagaacggcagaaactgatgagagaacagaatattctcaagcagatcttcaagttgttacaagccccattcacagactgcggtgatggcccaatgcttcggctggaagagctcggggaccagcggcacgctcctttcagacacatctgccggctctgctacagggtgctgagacactcgcagcaagactacaggaagaaccaggagtatatagccaagcagtttggcttcatgcagaagcagattggctatgatgtgttggctgaagacactatcactgccctgctccacaataatcggaaactcctggaaaaacacattaccgcggcagagattgacacatttgtcagcctggtgcgaaagaacagggagcccagattcttagattacctctccgacctctgtgtctccatgaacaaatcaattccagtgacccaggaactgatatgtaaagctgtgctgaaccccaccaacgctgacatcctgattgagaccaaattggttctttctcgttttgaatttgaaggtgtctcttccactggagagaatgctctggaggcaggagaagacgaggaagaggtgtggctgttttggagggacagcaacaaagagattcgcagcaagagtgtgagggaattggctcaggatgctaaagaagggcagaaggaggaccgagacgttctcagctactacagatatcagctgaacctctttgcgaggatgtgtctggaccgccaatacctggccatcaacgaaatctcaggccagctggatgtcgatctcattctccgctgcatgtctgacgagaacctgccctatgacctcagggcgtccttctgccgcctcatgcttcacatgcatgtggaccgagatccccaggaacaagtcacccccgtgaaatatgcccgcctctggtcggagattccctcggagatcgccattgacgactatgatagtagtggagcttccaaagatgaaattaaggagagatttgctcagaccatggagtttgtggaggagtatttaagagatgtggtttgtcagaggttccctttctctgataaagagaagaataagcttacgtttgaggttgtaaatttagctaggaatctcatatactttggtttctacaacttctctgaccttctacgattaactaagatccttctggccatattggactgtgtacatgtgacaacaatcttccccattagcaagatggcgaaaggagaagagaataaaggtaacaatgatgtggagaagctgaagagcagtaacgtgatgagatctattcatggcgtgggagagctgatgacccaggtggtgctccggggaggaggctttttgcccatgactcccatggctgctgcccctgaaggcaatgtgaagcaggcagagcctgagaaggaggacatcatggtcatggacaccaagctgaagatcattgagatactccagtttattttgaatgtgaggttggattataggatctcctgcctcctgtgtatatttaagcgagagtttgatgaaagcaattcccagacttcagaaacatcctccggaaacagcagccaagaagggccaagtaatgtaccaggtgctcttgactttgaacacattgaagaacaagcagaaggcatctttggaggaagtgaggagaacaccccactggacttggatgaccacggcggcagaacctttctccgtgtcctgctccacttgacgatgcatgactacccacccctggtgtcaggggccctgcagctcctcttccggcacttcagccagaggcaggaggtgctccaggccttcaaacaggttcaactgctggttaccagccaagatgtggacaactacaaacagatcaaacaagacttggatcaactgaggtccatcgtggaaaagtcagagctttgggtgtacaaagggcagggccccgatgagactatggatggtgcatctggagaaaatgaacataagaaaacggaggagggaaataacaagccacaaaagcatgaaagcaccagcagctacaactacagagtggtcaaagagattttgattcggcttagcaaactctgtgttcaagagagtgcctcagtgagaaagagcaggaagcagcaacagcgtctgctccggaacatgggcgcgcacgccgtggtgctggagctgctgcagattccctatgagaaggccgaagataccaagatgcaagagataatgaggttggctcatgaatttttgcagaatttctgcgcaggcaaccagcagaatcaagctttgctacataaacacataaacctgtttctcaacccagggatcctggaggcagtaaccatgcagcacatcttcatgaacaatttccagctttgcagtgagatcaacgagagagttgttcagcacttcgttcactgcatagagactcacggtcggaatgtccagtatataaagttcttacagacaattgtcaaggcagaagggaaatttattaaaaaatgccaagacatggttatggccgagctggtcaattcgggagaggatgtcctcgtgttctacaacgacagagcctctttccagactctgatccagatgatgcggtcagaacgggatcggatggatgagaacagccctctcatgtaccacatccacttggtcgagctcctggctgtgtgcacggagggtaagaatgtctacacagagatcaagtgcaactccctgctcccgctggatgacatcgttcgcgtggtgacccacgaggactgcatccctgaggttaaaattgcatacattaacttcctgaatcactgctatgtggatacagaggtggaaatgaaggagatttataccagcaatcacatgtggaaattgtttgagaatttccttgtagacatctgcagggcctgtaacaacactagtgacaggaaacatgcagactcgattttggagaagtatgtcaccgaaatcgtcatgagtattgttactactttcttcagctctcccttctcagaccagagtacgactttgcagactcgccagcctgtctttgtgcaactgctgcaaggcgtgttcagggtttaccactgcaactggttaatgccaagccaaaaagcctccgtggagagctgtattcgggtgctgtctgatgtagccaagagccgggccattgccattcccgtggacctggacagccaagtcaacaacctctttctcaagtcccacagcattgtgcagaaaacagccatgaactggcggctctcagcccgcaatgccgcacgcagggactctgttctggcagcttccagagactaccggaatatcattgagagattgcaggacatcgtctccgcgctggaggaccgtctcaggcccctggtgcaggcagagttatctgtgctcgtggatgttctccacagacccgagctgcttttcccagagaacacagacgccagaaggaaatgtgaaagtggcggtttcatttgcaagttaataaagcatacaaaacagctgctagaagaaaatgaagagaagctctgcattaaggtcctacagaccctgagggaaatgatgaccaaagatagaggctatggagaaaagctaatttccattgatgaattggataatgctgagcttcctccagctccggattctgagaacgccactgaggagcttgaaccaagtccacccctgcggcagctggaagaccataaaaggggtgaggcgctcaggcaagttctggtcaaccgttactatggaaacgtcagaccttcgggacgaagagagagccttaccagctttggcaatggcccactgtcagcaggaggacccggcaagcccgggggaggagggggaggttccggatccagctctatgagcaggggtgagatgagtctggccgaggttcagtgtcaccttgacaaggagggggcttccaatctagttatcgacctcatcatgaacgcatccagtgaccgagtgttccatgaaagcattctcctggccattgcccttctggaaggaggcaacaccaccatccagcactcctttttctgtcgcttgacagaagataagaagtcagagaaattctttaaggtgttttatgaccggatgaaggtggcccagcaagaaatcaaagcaacagtgacagtgaacaccagtgacttgggaaataaaaagaaagacgatgaggtagacagggatgccccatcacggaaaaaagctaaagagcccacaacacagataacagaagaggtccgggatcagctcctggaggcctccgctgccaccaggaaagccttcaccactttcaggagggaggctgatcccgacgaccactaccagcctggagagggcacccaggccactgccgacaaggccaaggacgacctggagatgagcgcggtcatcaccatcatgcagcccatcctccgcttccttcagctcctgtgtgaaaaccacaaccgagacctgcagaacttcctccgttgccaaaataacaagaccaactacaatttggtatgtgagaccctgcagtttctggactgtatttgtggaagcacaactggaggccttggtcttctgggcttgtatataaatgaaaagaacgtagcgcttatcaaccaaaccctggaaagtctgaccgaatactgtcaaggaccttgccatgagaaccagaactgcatagccacccatgaatccaatggcattgacatcatcacagccctgatcctcaatgatatcaatcctttgggaaagaagaggatggaccttgtgttagaactgaagaacaatgcctcgaagttgctcctggccatcatggaaagcaggcacgacagtgaaaacgcagagaggatactttataacatgaggcccaaggaactggtggaagtgatcaagaaagcctacatgcaaggtgaagtggaatttgaggatggagaaaacggtgaggatggggcggcgtcccccaggaacgtggggcacaacatctacatattagcccatcagttggctcggcataacaaagaacttcagagcatgctgaaacctggtggccaagtggacggagatgaagccctggagttttatgccaagcacacggcgcagatagagattgtcagattagaccgaacaatggaacagatagtctttcccgtgcccagcatatgtgaattcctaaccaaggagtcaaaactacgaatttactatactacggagagagacgaacaaggcagcaaaatcaatgatttctttctgcggtctgaagacctcttcaatgaaatgaattggcagaagaaactgagagcccagcccgtgttgtactggtgtgcccgcaacatgtctttctggagcagcatttcgtttaacctggccgtcctgatgaacctgctggtggcgtttttctacccgtttaagggagtccgaggaggaaccctggagccccactggtcgggactcctgtggacagccatgctcatctctctggccatcgtcattgccctccccaagccccatggcatccgggccttaattgcctccacaattctacgattgatattttcagtcgggttacaacccacgttgtttcttctgggcgctttcaatgtatgcaataaaatcatctttctaatgagctttgtgggcaactgtgggacattcacaagaggctaccgagccatggttctggatgttgagttcctctatcacttgttgtatctggtgatctgtgccatggggctctttgtccatgaattcttctacagtctgctgctttttgatttagtgtacagagaagagactttgcttaatgtcattaaaagtgtcactcgcaatggacgggccatcatcctgacagcagttctggctctgatcctcgtttacctgttctcaatagtgggctatcttttcttcaaggatgactttatcttggaagtagataggctgcccaatgaaacagctgttccagaaaccggcgagagtttggcaagcgagttcctgttctccgatgtgtgtagggtggagagtggggagaactgctcctctcctgcacccagagaagagctggtccctgcagaagagacggaacaggataaagagcacacatgtgagacgctgctgatgtgcattgtcactgtgctgagtcacgggctgcggagcgggggtggagtaggagatgtactcaggaagccgtccaaagaggaacccctgtttgctgctagagttatttatgacctcttgttcttcttcatggtcatcatcattgttcttaacctgatttttggggttatcattgacacttttgctgacctgaggagtgagaagcagaagaaggaagagatcttgaagaccacgtgctttatctgtggcttggaaagagacaagtttgacaacaagactgtcacctttgaagagcacatcaaggaagaacacaacatgtggcactatctgtgcttcatcgtcctggtgaaagtaaaggactccaccgaatatactgggcctgagagttacgtggcagaaatgatcaaggaaagaaaccttgactggttccccaggatgagagccatgtcattggtcagcagtgattctgaaggagaacagaatgagctgagaaacctgcaggagaagctggagtccaccatgaaacttgtcacgaacctttctggccagctgtcggaattaaaggatcagatgacagaacaaaggaagcagaaacaaagaattggtcttctaggacatcctcctcacatgaatgtcaacccacaacaaccagcataagcaaatgaaagaaaggaattgtatttaccttttataattattattagtgtgggaatggctaatgagttctgattcacccacgaaggttacatttatgctgaatacatttgtaaatactcagttttatactgtatgtatatgattgctactctaaaggtttggatatatgtattgtaattagaattgttggcatgatgacatttcatttgtgccaaaaatattaaaaatgccttttttggaaggactaacagaaagcacctgatttgcacttgaaccagattatagatttaaaagtatatgacatgtattttgtatttaaaactagaatagccagtatttatgttttttataaaactgtgcaatacgaattatgcaatcacaatacatttgtagctcccgagtgtcctaaagggagtgcacttctttgaagctggtgtgttaatactatgtaataaatggttaactttcaaatgatgctgctgccaaaattatattaatagagagtttcaggcccctgggaattcctgcagcccgggggatccccgggtaccgagctc

SEQ ID NO: 212 - DNA, 2681 bp, Homo sapiens
cggccgcgtcctcaagccggcacctgagcggcggagacggctgtagcacaaggatctgcatctccaatggatactgaggggtttggtgagctccttcagcaagctgaacagcttgctgctgagactgagggcatctcagagcttccccatgtggaacggaacttacaggagatccagcaggcgggagagcgcctgcgttcccgtaccctaacacgcacgtcccaggagacggcagatgtcaaggcgtcagttctcctcgggtctcggggacttgacatatcccacatctcccagcgattggagagtctgagtgcagccaccacctttgagcctcttgagcctgtgaaggacactgacattcagggcttcctgaagaatgagaaggacaatgccctgctgtctgccatcgaagagtcccggaagaggaccttcggcatggctgaggagtaccatcgggagtcaatgttggttgagtgggagcaagtgaaacagcgaattctgcacacactgctggcatcaggagaagacgcccttgactttactcaagaaagcgagccaagctacatcagtgatgtgggaccccctggtcgaagctctctggataacatcgagatggcctatgcgcggcaaatttatatctataatgagaaaattgtaaatggacacctgcagcctaacctggtggacctttgtgcttccgtcgcagagctggatgataagagcatttccgacatgtggaccatggtaaaacaaatgacagacgtgttgttgacaccggcaacggatgccctgaagaaccgcagcagcgtggaagtgcgcatggagtttgtcaggcaggccttggcgtaccttgagcagagttataagaattacacccttgtgactgtctttggaaatttgcatcaggcccagctgggcggggtgcctgggacttaccaattggttcgaagtttcctgaacattaaactgccagctcccttgcctggactacaggatggagaggtggaaggccatcctgtgtgggcgctaatttactactgcatgcgctgtggagacctgcttgccgcttcacaggtagttaatcgagcccagcaccagctgggagagtttaaaacctggttccaggagtacatgaacagcaaggacagaagattgtccccagctacggaaaacaagctccggctgcattaccgtagggccctcaggaacaatacagatccctacaagcgggccgtgtactgtatcattggcagatgtgacgtcaccgacaaccagagtgaagtggcggacaaaactgaggattacctgtggctgaagttgaaccaagtgtgttttgacgacgatggcaccagctccccacaagacaggctcactctctcacagttccagaagcagttgttggaagactatggcgagtcccactttacggtgaaccagcaacccttcctctacttccaagtcctgttcctgacagcgcagtttgaagcagcagttgcctttcttttccgcatggagcggctgcgctgccatgctgtccatgtagcactggtgctgtttgagctgaagctgcttttaaagtcctctggacagagtgctcagctcctcagccacgagcctggtgaccctccttgcttgcggcggctgaacttcgtgcggctcctcatgctgtacacccggaagtttgagtccacggacccaagggaggccctccagtacttctatttcctcagggatgagaaagatagtcaaggagaaaacatgtttctgcgctgtgtgagtgagcttgtgattgaaagccgagagttcgatatgattcttgggaaactagagaatgacggaagtagaaagcctggagtcatagataagtttactagtgacacaaagcctattatcaacaaagttgcttctgtggcagaaaataaaggactgtttgaagaggcagcaaagctgtatgaccttgccaagaatgctgacaaggtactggagctgatgaacaaactgctgagccctgtcgtcccccagatcagtgccccgcaatccaacaaggagaggctgaagaacatggcactctccattgccgaacggtatagggctcaaggaataagcgcaaataaatttgtggactccacgttctatcttcttttggacttgatcaccttttttgacgagtatcatagtggtcatattgatagagcttttgatatcattgagcgcttgaagctggtgcccctgaatcaggaaagtgtggaagagagagtggctgctttcagaaatttcagtgatgaaatcaggcacaacctctcagaagtgcttcttgccaccatgaacatcttgttcacacagtttaagaggctcaaggggacaagtccatcctcgtcatccaggccccagcgagtcatcgaggaccgcgactctcaactccgaagtcaagcccgcactctgattacctttgctggaatgataccataccgaacgtctggggacaccaatgcgaggctggtgcagatggaggtcctcatgaattaagtgccatgctttgtgggagtctgggtcggcacactgtcagtacatcaggcacatgggcccactaggctggggtttctggttttgtttctgttgtgttttgttttggtttctgtattatgtatttttgtcaacgccaataaatttctttgatttgt

SEQ ID NO: 213 - DNA, 5623 bp, Homo sapiens
cggccgccagcacccgcggtgccgcggggccgctccgaggagcctgagagacccacggaggcttcgcgggaagacgcggcggcggcggcggaggatgagcctgcagagcgcgcagtacctccggcaggcagaagtcctgaaggctgacatgacagattctaagctgggtccagctgaagtctggacatccaggcaggctctgcaggacctgtaccagaaaatgctagttaccgatttggaatacgctttagacaagaaagtagaacaggatctctggaatcacgcctttaagaatcagatcacaacactacaaggccaggcaaagaatcgagcaaatccgaatcggagtgaagttcaggcaaacctttctctgttcctagaggcagctagtggcttctatactcagttattacaagaactgtgtacagtatttaatgtagatttaccatgccgtgtgaagtcttcccaattgggaattatcagcaataaacagacgcataccagcgccatagtgaagccacagtctagctcctgttcctatatctgccagcactgcctcgtccaccttggagacattgctcgatacagaaaccagaccagccaggcagagtcctactataggcatgcagctcagcttgtcccctccaatggtcagccttataatcagttggctatcttagcttcttccaaaggagaccatctgaccacaattttctactactgcagaagcattgctgtgaagttccctttcccagctgcctccactaatctgcaaaaagcactttctaaagcactggaaagccgagatgaggtgaaaaccaagtggggtgtttctgacttcatcaaggcctttattaaattccacggtcatgtgtacctgagtaagagcttggaaaagttgagccctcttcgagagaaattggaagaacagtttaagaggctgctattccaaaaagctttcaactctcagcagttagttcatgtcactgtcattaacctgtttcaacttcatcaccttcgtgactttagcaatgaaaccgagcagcacacttatagccaagatgagcagctatgttggacacagttgctggccctctttatgtcttttcttggcatcctgtgcaagtgtcctctacagaatgagtctcaggaggagtcctacaatgcctatcctcttccagcagtcaaggtctccatggactggctaagactcagacccagggtctttcaggaggcagtggtggatgaaagacagtacatttggccctggttgatttctcttctgaatagtttccatccccatgaagaggacctctcaagtattagtgcgacaccacttccagaggagtttgaattacaaggatttttggcattgagaccttctttcaggaacttggatttttccaaaggtcaccagggtattacaggggacaaagaaggccagcaacgacgaatacgacagcaacgcttgatctctataggcaaatggattgctgataatcagccaaggctgattcagtgtgaaaatgaggtagggaaattgttgtttatcacagaaatcccagaattaatactggaagaccccagtgaagccaaagagaacctcattctgcaagaaacatctgtgatagagtcgctggctgcagatgggagcccagggctaaaatcagtgctatctacaagccgaaatttaagcaacaactgtgacacaggagagaagccagtggttaccttcaaagaaaacattaagacacgagaagtgaacagagaccaaggaagaagttttcctcccaaagaggtaaaatcccagacagaactaagaaagactccagtgtctgaagccagaaaaacacctgtaactcaaaccccaactcaagcaagtaactcccagttcatccccattcatcaccctggagccttccctcctcttcccagcaggccagggtttccgcccccaacatatgttatccccccgcctgtggcattttctatgggctcaggttacaccttcccagctggtgtttctgtcccaggaacctttcttcagcctacagctcactctccagcaggaaaccaggtgcaagctgggaaacagtcccacattccttacagccagcaacggccctctggaccagggccaatgaaccagggacctcaacaatcacagccaccttcccagcaaccccttacatctttaccagctcagccaacagcacagtctacaagccagctgcaggttcaagctctaactcagcaacaacaatcccctacaaaagctgtgccggctttggggaaaagcccgcctcaccactctggattccagcagtatcaacaggcagatgcctccaaacagctgtggaatccccctcaggttcaaggcccattagggaaaattatgcctgtgaaacagccctactaccttcagacccaagaccccataaaactgtttgagccgtcattgcaacctcctgtaatgcagcagcagcctctagaaaaaaaaatgaagccttttcccatggagccatataaccataatccctcagaagtcaaggtcccagaattctactgggattcttcctacagcatggctgataacagatctgtaatggcacagcaagcaaacatagaccgcaggggcaaacggtcaccaggaatcttccgtccagagcaggatcctgtacccagaatgccgtttgagaaatccttattggagaagccctcagagctcatgtcacattcatcctctttcctgtccctcaccggattctctctcaatcaggaaagatacccaaataatagtatgttcaatgaggtatatgggaaaaacctgacatccagctccaaagcagaactcagtccctcaatggccccccaggaaacatctctgtattccctttttgaagggactccgtggtctccatcacttcctgccagttcagatcattcaacaccagccagccagtctcctcattcctctaacccaagcagcctacccagctctcctccaacacacaaccataattctgttccattctccaattttggacccattgggactccagataacagggatagaaggactgcagatcggtggaaaactgataagccagccatgggtgggtttggcattgattatctctcagcaacgtcatcctctgagagcagttggcatcaggccagcactccgagtggcacctggacaggccatggcccttccatggaggattcctctgctgtcctcatggaaagcctaaagtctatctggtccagttccatgatgcatcctggaccttctgctctggagcagctgttaatgcagcagaagcagaaacagcaacggggacaaggcaccatgaaccctccacactgaggccaaagtggcaacctgggaatgaaggctccataaaccatggcatgttgggtttgcaggactggcccacacagtcccctgcaggtggcagccctcttttctgtttctcgctgtcaagagggtgtaagtattccaccagcccgctgagtgtgcacgaaatgttcgcagtgcaacaaaaagaaaaatccatcaggaactctccgtccccccggggccttccggagggagagagagaggaactgctgtttatctcactcagttacttggtatcaccgcctctcaccttctccatcgtgcatgtccccagccacatgggaagtgaaagctgagaagggaaggcagatgggagaagccaatgggaacttctcagtccttttttcctctttggggaataaaataggaatccattaatgattgctttgctgactgagaatgtagttgaaattaaacatcttttattattattactctcagtagtaaaatatcacactgaattcttccatacacaggtgtgcttctagtcagtgtgtagcaaggaaagccccgttcactgctcctgtgagaggttggtggtgacaggatggggaaccgacctcttcagccagtggaaatgttccataagggagagttcaaggcctgtcagaaggctctggtaggccttcctctggccaggagactccagcagggaatgcccttcactctgtaggtgctcgagccccaatcgaggatacagtgtgggtggtggtgctgggctggactagcaggtagactgctgtaggatttcaaattacgtttttgattcctgtacattttacagtcgcacagcaagcagtctcacagaaggcaggctagtccattcacagcctgacacgttctaataggtagaagctttcagtgtggttattttttctttggttggtttttgtgcccccattctacttcccaccctcctgccccatctccatcccttcttttacccaatgctgtatgctagtaattgtttttattcctaatgtgtgcaacatcacatctccccaagaagcaacagcatggggtccagcagttggggcccaaaagacagtctgaagaggaaggaagcagcagtatctgcgtagcccacagagggcccaggcccctgcccagctgcagtctcccagcctccactttcagagtgaaattcaaggcagcacggacatgtgcccatcaggcacagaagaaaacacgacgtcgtccattttggaagagacgaaagaaaggaaaataaactctttgtatgatatttattaggaggaaagaggactgaaaatgttcttgtgtagaaacagaaggacagcatttctgttagtcatttcctggaaaagtaatattttaaggggaaattatggaaacaatctaattgttcaattgctgtgctagtggtagggtttattttctgggaggtctctcctttgtgtgtctgtatgtttgtgtacacacacgtgcccatctgctgtcccagaggggaggggttgtgtgtgcgagtgtatggagttagtgtggaacttaagagctggaagacagctgtagagcaaagcacatccaggagccccagttgtcactgcagtctgggcaaccccagcaatgaaaaggggtgagataacgctcattgctcttcagagagagtggttggagccccccccgccccgtatgcttacattattgctcttttagtttgacatggtgtttgggttttgtttttttgaaaggtctgaaaaggtgaagccccctacccaatggcaatatgaaaccttttgtgcttctcttcagccccttccctgtgtccacctttctctcctcttcccaagcctttttcctactacctttacccagtttgtgtgtttgagctctgcattcaggcagctgcaacattccagtgtttgaactgtcactgattcttgcgccctagacaagctaaccaggtttaccatctcactcccagtaatacccagctcctatctaaagccccattctgcatgagaatttggtgtttggaatgttttctgactcttggggcgggattcctcgccttatcatcctcactgtggagtaatgagggggaggagaatctttatcagaaactggttttgtgtagtaaactttcttttgtggttttttgttttgttttctgggttttgttttttgtttttgtctgtgcaagacctgcagctgctgaaaatcagctttgcctttaattaaaccatgttctctccaacc

SEQ ID NO: 214 - DNA, 3436 bp, Homo sapiens
caatcgcgaccctcagtccacccaaggtctcctcggatcgcctggagaggcactcggacctggagcagtgaggagaatgaataccttccaagaccagagtggcagctccagtaatagagaaccccttttgaggtgtagtgatgcacggagggacttggagcttgctattggtggagttctccgggctgaacagcaaattaaagataacttgcgagaggtcaaagctcagattcacagttgcataagccgtcacctggaatgtcttagaagccgtgaggtatggctgtatgaacaggtggaccttatttatcagcttaaagaggagacacttcaacagcaggctcagcagctctactcgttattgggccagttcaattgtcttactcatcaactggagtgtacccaaaacaaagatctagccaatcaagtctctgtgtgcctggagagactgggcagtttgacccttaagcctgaagattcaactgtcctgctctttgaagctgacacaattactctgcgccagaccatcaccacatttgggtctctcaaaaccattcaaattcctgagcacttgatggctcatgctagttcagcaaatattgggcccttcctggagaagagaggctgtatctccatgccagagcagaagtcagcatccggtattgtagctgtccctttcagcgaatggctccttggaagcaaacctgccagtggttatcaagctccttacatacccagcaccgacccccaggactggcttacccaaaagcagaccttggagaacagtcagacttcttccagagcctgcaatttcttcaataatgtcgggggaaacctaaagggcttagaaaactggctcctcaagagtgaaaaatcaagttatcaaaagtgtaacagccattccactactagttctttctccattgaaatggaaaaggttggagatcaagagcttcctgatcaagatgagatggacctatcagattggctagtgactccccaggaatcccataagctgcggaacgctgagaatggcagtcgtgaaaccagtgagaagtttaagctcttattccagtcctataatgtgaatgattggcttgtcaagactgactcctgtaccaactgtcagggaaaccagcccaaaggtgtggagattgaaaacctggccaatctgaagtgcctgaatgaccacttggaggccaagaaaccattgtccacccccagcatggttacagaggattggcttgtccagaaccatcaggacccatgtaaggtagaggaggtgtgcagagccaatgagccctgcacaagctttgcagagtgtgtgtgtgatgagaattgtgagaaggaggctctgtataagtggcttctgaagaaagaaggaaaggataaaaatgggatgcctgtggaacccaaacctgagcctgagaagcataaagattccctgaatatgtggctctgtcctagaaaagaagtaatagaacaaactaaagcaccaaaggcaatgactccttctagaattgctgattccttccaagtcataaagaacagccccttgtcggagtggcttatcaggcccccatacaaagaaggaagtcccaaggaagtgcctggtactgaagacagagctggcaaacagaagtttaaaagccccatgaatacttcctggtgttcctttaacacagctgactgggtcctgccaggaaagaagatgggcaacctcagccagttatcttctggagaagacaagtggctgcttcgaaagaaggcccaggaagtattacttaattcacctctacaggaggaacataacttccccccagaccattatggcctccctgcagtttgtgatctctttgcctgtatgcagcttaaagttgataaagagaagtggttatatcgaactcctctacagatgtgaaggaatggacaagagttgagcagcctttctgctgattatcacacatcatgagctgagtgactgcagcttgccaaatctttgtgtttctgggtctgaccaattagcttagttcttctcctgcctaattttgaactagtaaagcaaagtgagtcatcagattatgagttactgtttaaaagaaaaatgctgtttattcatgctgaggtgattcagttccctccttcttacagaagtattttaattcaccccacactagaaatgcagcatctttgtggacgtctttttcacaagcctccaaggctccttagattgggtcgttactaaaagtacattaaaacactcttgtttatcgaagtatattgatgtattctaaagctagtaaacttccctaacgtttaattgccctacagatgcttctcttgctgtgggttttcttttgttagtggtctgaaataattattttcctgttctattaatacatagtgtattttgcacaaaaaaattaacctggtcaatagtgattaccaaaatatatattaataatcttggcaatttttgacattaattatgaaacattttagcccacgttagttctacattattcttcacttaaactcagctactgcaaattttgtctttctgtaaatgttattaaaatatccagtgagctctttagaaggactcagtattatttcaagactatttttgaggtaattctagccttttaaaatattctacagacctacggggcttaaaagaaccccagtaccgactaagcaaataggcaaaagacatgttggaaatgtagtatagtacttgaaacagtcactatcatagggataattggtgcatcctgtgtaaatggaagctgagcttgacacctggtgcttttaagtagggataaagtcatcctctcactgcaagcacagcatacctgtacctccaaaagtgacgttttagtgaacaggccgttttcaacacttgtgccttggggtgttcattgaagctttgtgaaaactactgatgttttctcagtctccttaaagttacgtccatgctttaaaatgtctgtgtaggagagaagtggggtttataatgttttctctaagatatctttgctgctttccagactttgaaactattaagctttccaactgcctcttaccggaaatacttctgggggaacttcatggtcccaaaatgtcattgccatacagcttcaccagagttctttgaaccacagctgaaaagagctttgtattattttttaattccctccccagatatcatttaggagtattatataaaggtggtgggcaaaaacaatgtaaggagcctttccagttatcttgagttgcagctctgtagtttcttgaggccaaacacactgtatttgtcaaaatataatttcccttaatcactatgttaatgagtatgtaaaacattcttttgcattgatgaattttgtatctgcttcccttaaagcataacagccataaaaaaaaaaaaaaaaaa

SEQ ID NO: 215 - DNA, 5426 bp, Homo sapiens
ggggaggaagaaaggcgaaggcaaggcgaaggggtggagagtgatatgaagagcgagagaaaagagaggacagcggacgagcagatccggtatctggaatcccggcgcctagaacgtgtttttcgggagagcaaaggctgtgtctacggcaggctggggatatagcctctccttccgatgaaaagagaaaggaagaatggactacagccaccaaacgtccctagtcccatgtggacaagataaatacatttccaaaaatgaacttctcttgcatctgaagacctacaacttgtactatgaaggccagaatttacagctccggcaccgggaggaagaagacgagttcattgtggaggggctcctgaacatctcctggggcctgcgccggcccattcgcctgcagatgcaggatgacaacgaacgcattcgaccccctccatcctcctcctcctggcactctggctgtaacctgggggctcagggaaccactctgaagcccctgactgtgcccaaagttcagatctcagaggtggatgccccgccggagggtgaccagatgccaagctccacagactccaggggcctgaagcccctgcaggaggacaccccacagctgatgcgcacacgcagtgatgttggggtgcgtcgccgtggcaatgtgaggacgcctagtgaccagcggcgaatcagacgccaccgcttctccatcaacggccatttctacaaccataagacatccgtgttcacaccagcctatggctctgtcaccaacgtccgcatcaacagcaccatgaccaccccacaggtcctgaagctgctgctcaacaaatttaagattgagaattcagcagaggagtttgccttgtacgtggtccatacgagtggtgagaaacagaagctgaaggccaccgattacccgctgattgcccgaatcctccagggcccatgtgagcagatctccaaagtgttcctaatggagaaggaccaggtggaggaagtcacctacgacgtggcccagtatataaagttcgagatgccggtacttaaaagcttcattcagaagctccaggaggaagaagatcgggaagtaaagaagctgatgcgcaagtacaccgtgctccggctaatgattcgacagaggctggaggagatagccgagaccccagcaacaatctgagccatgagaacgaggggatctgggcaccccaggaaccgccattgcccataagacccccaggaagctaggcactttctttccatggaaacatttagacacaaacctccccagctccggccaagccatcatttgctacctggagctggatgtagaagtcagcagacagctccctatccctggacccctgccctccttttttctgctcacaaggacttttgattttagttataaggaggacccaaaatgtgtgtgtgtacatgtgtgtgcacacatggtacgtgtccatgtgcctacctgatactttcacatgtaattaaattccaggcaaccagcacaagagccgtgagcttggcacatgtgctgctcgtgagcaggaaaatcagaggagccactgatctgagtggtatttaggttgaaggaaagatttctcctctcaagtgccagggagcagccacacgtctgtctgtgtttagagagggaagagggttctccaggttcaccatttgggttgtttatatgttggtagaaattctccctgtatgcctagaaggatcagtgaatgtaagagccttggaaattaacaaaataacagccacataaccttgcggcaagtctgatggaaagaaaaagataaaccatccgtggggtagatgcaataagcccacgtatttttacactggaaacgttgattgttttaaatgacaaagacatatgtgatgttctatgtggaaacctgtgaagagtggattctgcctccatctctgcctccatggctacctttaggagacagagaagatcctgtgtgtttctctgtacccagctgacagcctgtctctatggcgcttccttgagtggaaggaaatgtctcaagaaacaaagatctcgctggtgcgtacacagtgctgaccagctagtgtggccagggcctggtggcctggtggccaggaagtttcaggttgaagggaaatgtcgaggctacctgcagatatgacaggtgccttgaacgcagcccatcttcatgtcatcaaaggtcttcctgcacttgaagctggggcgatgtttgcagtcaagaccattctttccaacctctgggttcttgcaagttgccctcaccttgtgtgtggagatgcattccaagaatgaagcctcatcttgctactgagtgtggggttcagggaagctctttaggccacctggtgaaggtgcatggggaggatggagcttctcctcagctcctctgagcagccacctatgtgatctttaaatccaaccccaatgggagaaaagggcaagaacagtctgtgccctgggactcctatcaggaagcttgacaggcagctgggcatcagtgcagctgatatcgtttgaggagggagacagatgcttggacctgggtgcctggctatggagattgaccaagcaagatcaggagctcctgatagcaggcgtctttgagcctagctggggtagaggcactgcccatctcttctccaccttctctccacagaatgtttgcagagctgggcagttgaggaaaggacagcccctggttggtgcctccaaaggaaggtggacttttttggtggagacgtttctgccctgggcaccctcctgcccccgattcatacctatggcttcttgagaaggctcacagctgtggtcttaacgtagactgcagaaagatggcatgcggcccctggcatttcgccaagggttttatagcaagtctccttcctccatagggacagcagcaccagccctgtggggcatggagtggaagcccagaagggcttctgcaagctgcacagaactggggtaagaagacaaagagtagccaccgggagaggcttcctttgttacagctgggaaagaacagttctgtgaatgcaaacacctcctgagttttgcaattgagaaaatgatttggagaacttctcttctggtaatttttattttgaatgttcagggccttagttggccccagtaattctccttggaggacttgggagaagaatttccacaaagcaaactactaaccactagctcttactggacagcgatttctggcttataagagttctctttgatttgcactagcactacgatagtgttagatggggaaatactgcaacatgtccagttggccagatcactttccaagggagcgatactaaggcagactcagctttttaaagatgggaggtcaggaggtggaagtgagaggagatcccatctcacacaacacacttccacgtaatgcagaccacacttttccattttgtcctgccctcttgagaggtcatttctcacgtcctaagaacctgatcagaaattttggaagggttctttgaaatagcagcagttgaaacagagacactttgccacagtgtggagcagattttctcactggtatcacatggtcttgcagttttgaactcttcgaccgatttgtgggagtttatgtaattgcgtgcaatgaacctgaaattgtgtaaaggacaaaagaccagtttatagggttgggttttttttccaacttgtgaaaagcagtttagctgcatctgtctccccaccacccccaccccgggaggggcttatgttacaaggtgatcaagtgaaggaaaaacctgagcctatctggctgggatggtggaattaagcacaaggtcacattctctgtgatcacatgagagggaaggtgatgacttaaatggcagggggtggggattatcttggggagaggctgaaaagcacaaaagatagtcttccctgtacgtattggtgaagaacgtgcacaaggctggatggacttcaacttggagttgagttgaggcaagaggatttctggatattagtcacccatctgcaagaaaaatgctgaggcctcgggtcaagattttgatctgagacatgctgatgcttcaaggagaaatattttcacaatcctctcttccctcaccagaagagaacagtactctctcctagaaacctctaggtaaacacattttatcctaatatcggtagcatataatgccccccccaaaatatctgttttccatgcaaaaaagtctcaacaagaagtctgtggagttgagtggttacttcaaagtgtcaggagagtgaagaaattggccacagaagagcaagaagctctcttaagaaaagggaattctctttaaagaaaccaccaccaacaacaaaacaaccaaaaaccatgttttatgtcaaagctctgtagcacagagaatgtggtgtcacagatacatcgccgagagaggtttctttctttcttttttttttttttgagacagagtctggttctgtttcccaggctggagtgcagtggtgggatctcagctcactgcaacatccgcctctggggttcaagtgattctcctgtctcagcctcccaagtagctggaattacagggacccgccaccacgcccggctaatttttttgtgtggttttagtagaggtggggtttcaccatcttggccaggctggtcttgaactcctgacctcgtgatccacccgcctaggcctcccaaagtgttgggattacaggcgtgagccactgtgcccagccaaaagagaaatttctacatgaacaaggcaatttcagtgtcttacagcggccaaaccatgacgtgaagaatgagataggagacaggagatcaccataagcgtccctgatatagcagcacacattttcacgtttccacttaaatcgttttgcacaaagtcttgcttcgctcagatgagatgagatatgatttcctagagatgtaaaaataagaatgaatgtggcgcccccttcttccagatgtaatagaaagctctgccctatcacaaggggggtgttgaagcgccccttgtgttttaactgtatttaactgagcacaagatgcacaagctgtggtgggaaaccctcagtttacctttggagtcttccctgcagatcgcagacctgtttccaggctgatgtttctggtgtgtaattgctagcgtttctgaagggttttcccaattgttttagccttgtgaagtattcttaattataacttgcctttcagcgatggtacatgacttgattcaacgtttggttctgaacttacacactgatgcgtttactcatctaacataatctgacagggcctcagcaagggagccatacatttttgtaacattttgatatgttttaatgcatctgacttagatcttactgaaataaagcacttttcaaagag

SEQ ID NO: 216 - DNA, 541 bp, Homo sapiens
tagagcagtcagaaaatgaacttcttaacatctacactagcggcagcttcctagaaatcactgcactacccgctagtaacggagtcattgccattcagagtgtgcatttttttttctctttccagttttgctggcccccctaattatccattttctgatgaatattaacatggagggcattgcatgaggtctgccagaaggccctgcgtgtggatggtgacacagaggatggctctatgctggtgactggacacatcgcctctggttaaatctctcctgcttggtgatttcagcaagctacagcaaagcccattggccagaaaggaaagacaataattttgttttttcattttgaaaaaattaaatgctctctcctaaagattcttcacctactttcgtctccataacttctatgttttctttccttctgacacactagtgcccctaaattgtgatttgcctatacgtttagggccggggttggaagatgttaacaaccatttaagattcatttctgcagtgggagtgggtggagtttcag

SEQ ID NO: 217 - DNA, 1116 bp, Homo sapiens
gttatgtgttcccgtccgtactggaggctagctcttgtcgcggccgcggcgagttaacatcgtttttccaatctgtccgcggctgccgccacccaagacagagccagaatgttcaggatgctgaacagcagttttgaggatgaccccttcttctctgagtccattcttgcacaccgagaaaatatgcgacagatgataagaagtttttctgaaccctttggaagagacttgctcagtatctctgatggtagagggagagctcataatcgtagaggacataatgatggtgaagattctttgactcatacagatgtcagctctttccagaccatggaccaaatggtgtcaaatatgagaaactatatgcagaaattagaaagaaacttcggtcaactttcagtggatccaaatggacattcattttgttcttcctcagttatgacttattccaaaataggagatgaaccgccaaaggtttttcaggcctcaactcaaactcgtcgagctccaggaggaataaaggaaaccaggaaagcaatgagagattctgacagtggactagaaaaaatggctattggtcatcatatccatgaccgagctcatgtcattaaaaagtcaaagaacaagaagactggagatgaagaggtcaaccaggagttcatcaatatgaatgaaagcgatgctcatgcttttgatgaggagtggcaaagtgaggttttgaagtacaaaccaggacgacacaatctaggaaacactagaatgagaagtgttggccatgagaatcctggctcccgagaacttaaaagaagggagaaacctcaacaaagtccagccattgaacatggaaggagatcaaatgttttgggggacaaactccacatcaaaggctcatctgtgaaaagcaacaaaaaataaatagccatgcatttgatttgtttagttttgattgttttaacagttagtaatggtgctgggtaataagcataagaccaatctcttgctgttaaatcagttctgtccttggcaactttcttctgatatctgaatgttcatgaaggtcctagctttatattgtccctcttttaggaataaaattttgattttcaacaaaaaaaa

SEQ ID NO: 218 - DNA, 5413 bp, Homo sapiens
gaagagggatagggccagcaaggcagggatcgaacgagtgtctggcagccgggagcccagcgaagagagcgagcaagcttaggaaaacgagcgaagtaaagggagtaggggagactgagactgaccggtagccaggcaggcggacggacgcacgcccggacagactgagcaggcgccggagaaccactcacaggttccccccgcctttccctttgaaagctaggattttgcctttcccgtggcgcccgagagagaatgctggactctgccgacttcagcgcaagctaagatttctcagctagggacaaacgatcagcccaatcctgagaaggggggaaccaagcaccccgtccccatccccctcccctcccccgactaaactcgggcgccaaacccagcccttctctaaccaccctacttcctcctctcctttctagcatggtggctgtatggacagtctgacagaacagagactgacatctcccaatctgccggccccccacctggaacactacagtgttctgcattgcaccatgaccctggatgtgcaaactgtagtcgtttttgccgtgattgtagtcctcctgcttgtcaatgtcatactcatgtttttcctgggaacgcgctgaatggagtccagccacctgagctgtcgcgaactctcgctttgatttcatcccgagagccaccgagaaaaaaaaaaaatcacagacagagacagggaaagagagagaaagaacaagctttcttactcaggggggaaaacgttttgagcttcaacatggcctcgctgtgatatgtatgacgttgctgatcactggagattccatcgttagtgctgaggcagtatgggatcacgtcaccatggccaaccgggagttggcatttaaagctggcgacgtcatcaaagtcttggatgcttccaacaaggattggtggtggggccagatcgacgatgaggagggatggtttcctgccagctttgtgaggctctgggtgaaccaggaggatgaggtggaggaggggcccagcgatgtgcagaacggacacctggaccccaattcagactgcctctgtctggggcggccactacagaaccgggaccagatgcgggccaatgtcatcaatgagataatgagcactgagcgtcactacatcaagcacctcaaggatatttgtgagggctatctgaagcagtgccggaagagaagggacatgttcagtgacgagcaactgaaggtaatctttgggaacattgaagatatctacagatttcagatgggctttgtgagagacctggagaaacagtataacaatgatgacccccacctcagcgagataggaccctgcttcctagagcaccaagatggattctggatatactctgagtattgtaacaaccacctggatgcttgcatggagctctccaaactgatgaaggacagccgctaccagcacttctttgaggcctgtcgcctcttgcagcagatgattgacattgctatcgatggtttccttttgactccagtgcagaagatctgcaagtatcccttacagttggctgagctcctaaagtatactgcccaagaccacagtgactacaggtatgtggcagctgctttggctgtcatgagaaatgtgactcagcagatcaacgaacgcaagcgacgtttagagaatattgacaagattgctcagtggcaggcttctgtcctagactgggagggcgaggacatcctagacaggagctcggagctgatctacactggggagatggcctggatctaccagccctacggccgcaaccagcagcgggtcttcttcctgtttgaccaccagatggtcctctgcaagaaggacctaatccggagagacatcctgtactacaaaggccgcattgacatggataaatatgaggtagttgacattgaggatggcagagatgatgacttcaatgtcagcatgaagaatgcctttaagcttcacaacaaggagactgaggagatacatctgttctttgccaagaagctggaggaaaaaatacgctggctcagggctttcagagaagagaggaaaatggtacaggaagatgaaaaaattggctttgaaatttctgaaaaccagaagaggcaggctgcaatgactgtgagaaaagtccctaagcaaaaaggtgtcaactctgcccgctcagttcctccttcctacccaccaccgcaggacccgttaaaccacggccagtacctggtccccgacggcatcgctcagtcgcaggtctttgagttcaccgaacccaagcgcagccagtcaccattctggcaaaacttcagcaggttaacccccttcaaaaaatgatacctacagggaggcagataattttaaaataaagtaaataaaattatatttatagatggaccttttttcggagaagcactgttgaaatttatacacacacacacacacagagacccttgagtacacatacacacacacacacacagacacacacacacacacacacacacacacacacacagagagataaggaacaaaagtgttttctgttgttttggggaagtgaaatatgtggttggtaggaagaggtaccaatgacttccaaacatgtgattccgtcttaaaagttttccatttttaccctgtcccccttccctttgctttcagaagttgacatttctattcattgcttttcttgttaagataatctctttactcccctgtgagtgattcactgccttgtcattattacgatagatgtgtttgtattgttttttttctgatgatactgatgttgatgaatttttaattttatttgatgtggtagagttgggaggtttcagggttttttcccctcttttactttccattgaggaagggaatgagctcctttctcctctccttcagccaatcattatcaaatgttccttcagccctgcagttgccccaaataaccttttttcagcatcctctgtcctcagtcatgccagtctggacatgctctgttgtgccctgtgacaaaactgctcagtattcctattgcttttactgtgttttaggtactgtgaagggatcaaaaaaccaaacagaagcaagggagtatcagactatgatgatgctggagtggacttctgttcagggaacattttgcattcaggctgtttcttctatcactggggtttcccatgttgcagcacttctgggtcgttgcaattttgcatctaggagttagtttgatcgagttattctcttttttcaagtcacttttgttataggtctccccctaggcctgtctctcccttagcccaaaagatctgaactggaagcagaggttgagattctgcctcccaggagagggatttacctgccccctagtaccagataggtttagggcagtgatctctacagcaatcagttcagtgtcctggttgtccctgctcccatttacagatgtttgggcagcattgatagaagtatggaggggttcaagacagagcccacctgatcaagatcatcagctaccttcaaattattgacctggacagggtccaagtctgatagtaaccttttacaagaaagaacagggatgggaatggaaagagatagccttgatccacagtattgtacctgcattttctaccaccctaaaattgtgtgagacttctcccattgttaacagattgcatggacaatcttccctggcttctttctttccctctctctttcttctttctcctgccatcctagcacaggaggatttttggtattgatatagttaaagctgttctggcactcaaagaaggccgtgtttccaacatcctctcatcccaggacatttggggcaagtgagttaggggcccaggggcaattttccctctgaataacgtgtctgaggcagggatgctaccctcaggctcgcttttggccagctttttgcttgggaaaatctaacttctttcacaaggaggcaggcttcctatggatgttggagtacctgtttttcctccacacatagcccttttcatggatagaccttgaacaacaaaaagggtataagggaataaggatgaactctgctgtgaagagcaagccactgtagtgaggaatgtggagactgggagtctgtcctaaaccccatgggagaagacttcatcatgacaggacttcagcttaccaagcagcagccatagctgtgtggaggcttcagcatagctagcatgtttactgctctatgcctcctgatccagaccaggcattgcccagcctgggaatcttttctttgtgggaatcaaattacaagctatttaagtttatattccatcacaaccaagtcagacttgtattataagtcaaggatgagcctgatctggggagagggccggggctcgggactggccaccactgttcagcacatgacctaactacgtaagcctctttggcaagggtcctggtgcccagcacccaggctaaaatatcctgtctggcagagtgttttggtagctatgcaggcctcccttcagtgtacctctttttccaacttctcactcctccttactaggcttggccttgacatgcttcttcgagggttggcagcacaccgggaggggatgcttggacaagtttctgggcctacatttcttgactaggccctctcatttcctccctccttggggcttctgcccagggctccaggatcagggatattacttctcaacccgcacttctcctctactgaacccactggcatcacctgatgccactaatttgtgaacaacaagaaatcatttccccattggttggagtattccctcagcctatagcatcaaagcagaccagtggccaacagccccaaggggagcccaattaaatacctgggttcagtatcctaacctgttatgtcctgacagcaatggtaaccccagtaattctgtaatgttgtaatttccgcatggccctgagctcccttttcctcaactcagtgaggccaggatttgctctccaaaaggctttgctagtgtgttcaatgggacctgctgtggggagtcctaagacagacatctaattattctctctttttccccccctctctatgtgtatatttctaatggatctataagaacagcaacaagagagttctaacaattctagtgtgaagccaaatagtgatcttttagtgctttggggatggggtgggctggggtggatggatgggcaacagtgactttgattacccttgctgctctgcatttgccagtttattcttttgtttcttttatctgactgactctgtcaaacaagtgtcaaagttgtgtgttaaaaaatgtttaacaaaaaaaaatgttgtaatgacacaaagccttatgaaaatatttatggagttcaataaaagaagtaaaaagac

SEQ ID NO: 219 - DNA, 2366 bp, Homo sapiens
gaccacgcgtatcgatgtcgacccacaggattgtcacagagggcagggtggtgactgaggaccagctcctcatgcttgaggctgtggtgatgcacctcgggatccgctctgcccgctgtgtcctgggcatggagggtcagcaggtcatcctgcacctgcccctatcccagaaggggcccttctggacatgggagcctagtgcccctcgaactctgctccaggtcctacaggatccagccctgaaagacctcgtcctcacctgccccaccctgccctggcattccctgatcctgcggccccagtatgagatccaagccatcatgcacatgcgcaggaccattgtcaagatcccttctaccctggaggtcgacgtggaggacgtcaccgcctcctcccggcacgtccactttatcaaaccgctgctgctgagcgaggtcctggcctgggaaggccctttccccctgtccatggagatcctggaggttcctgagggccgccccatcttcctcagcccgtgggtgggctccttgcaaaaaggccagaggctttgcgtctatggcctagcctcaccaccctggcgggtcctggcctcaagcaagggccgcaaggtgcccaggcacttcctggtgtcagggggctaccaaggcaagctgcggcggcggccaagggagttccccacggcctatgacctcctaggtgctttccagccaggccggccactccgggtggtggccacaaaggactgtgagggcgagagggaggagaatcccgagttcacgtccctggctgtgggtgaccggctggaggtgctggggcctggccaggcccatggggcccagggcagtgacgtggatgtcttggtttgtcagcggctgagtgaccaggctggggaagatgaggaggaagagtgcaaagaggaggcagagacccagagcgggtcctgctgcccttccacttccctggcagtttcgtggaggagatgagtgacagccggcgctacagcctggcagatctgactgcccagttttcaatgccttgtgaggtcaaggtggtggccaaggacaccagccaccccaatgaccctcagaacctccttcctgggcctgcggctggaggagaagatcacagagccattcttggtggtgagcctggactctgagctgggatgtgctttgagatccctccccggaggctggacctgactgtcgtggaggccaaggggcagccagacttgccagaggggtctctccccatagccacagtggaggaagctggaacagacaccttttattattgtcttcggaagttaccagcctgtgagatccaagcccccccacccaggccccctaaaaatcagggcctcagcaagcagaggagacacagcagtgagggaggcgtcaagtcttctcaagtcttaggattgcagcaacacgttcggctgcccaaacccaaggcgaagaccttgccagagttcatcaaggatggctccagtacgtacagcaagattcctgcccacaggaagggccacaggcccgctaagccccaaaggcaggatctagatgatgatgaacatgattatgaagaaatacttgagcaatttcagaaaaccatctaagtgctggaggaaccacgcttcctaactgctgcttctcagggaatccgacaccagccaaccattttaagcctctaaaagacctcgggcaagtctcacagaaactgagctgcagacggggagtagctttgtggaaactgatttgatggacactgcaccagcttccttcaggttctagattcttgctacttagggcgggctggtttggacctaacatctcgcacgtgactccctcagcctcagagccttgggatgcagagcagctggcagggttcctctcaatcctgcaaccccagctgtcccaccggtggatgcagaggggaatccgaggccatcaaccttggtgacagcagcgcagtgccaatgctgatcacactgcatgggagattttgttaacgtctgccacccccactctcacccccaagctctaagcccccgggaggcctggactgtcttcctcatctctgtagcaccaagcctgatagatctgtatatggtaaacaggggtttaaccacatgtggttaacatggattaatgtgggaatttggcttcaagaacacaaccttaggaccttgggccccaaaagctggtggtgaaatgagaggagccaatttaagaagacccttatggagacctgaggctgcagaaactggtaggtttcatcaggtggttaaagtcgtcaaagttgtaagtgactaaccaagattatttcattttaaaaccacagaataaaaatgacacctgagcttctcc

SEQ ID NO: 220 - DNA, 829 bp, Homo sapiens
gcggttcgccttcaacatgccggaaccagcgaagtccgctcccgcgcccaagaagggctcgaagaaagccgtgactaaggcgcagaagaaggacggtaagaagcgcaagcgcagccgcaaggagagctactccgtatacgtgtacaaggtgctgaagcaggtccaccccgacaccggcatctcctctaaggccatgggaatcatgaactccttcgtcaacgacatcttcgaacgcatcgcgggtgaggcttcccgcctggcgcattacaacaagcgctcgaccatcacctccagggagatccagacggccgtgcgcctgctgctgcccggggagttggccaagcacgccgtgtccgagggcaccaaggccgtcaccaagtacaccagcgctaagtaaacttgccaaggagggactttctctggaatttcctgatatgaccaagaaagcttcttatcaaaagaagcacaattgccttcggttacctcattatctactgcagaaaagaagacgagaatgcaaccatacctagatggacttttccacaagctaaagctggcctcttgatctcattcagattccaaagagaatcatttacaagttaatttctgtctccttggtccattccttctctttaataatcatttactgttcctcaaagaattgtttacattacccatctcctcttttgctctgagaaagagtatataagcttctgtaccccactggggggttggggtaatattctgtggtcctcagccctgtaccttaataaatttgtatgcctttttttttaaaaaaaaaaaaaaaaaaaaaaaaaaaaaaaaaaaa

SEQ ID NO: 221 - DNA, 627 bp, Homo sapiens
  misc_feature (546)..(546): n is a, c, g, or t
  misc_feature (587)..(587): n is a, c, g, or t
  misc_feature (602)..(602): n is a, c, g, or t
  misc_feature (621)..(621): n is a, c, g, or t
aagaagaaatggccattacggtctgggccagttgtaaagggttggcttaatcctgcagccagcacttttaaaatagctactggcttcacagcaggccagctggaactcttgaagcatgacaggtagagaacagaggatgtgctaagaacctggccttgttgtggtgcctcgaggcctccatgcatgcttacacaccaacataagtatactttccccttcctcctcctaagcaattgttctccattgcactttagagcctgtaacactcaaactttaatgttatctagagatggacaaacgcttaattctaactatgcaagatagcatcttatttctaacaacataggccaaaagtaacagagaggcactctgttatacagaatatcaatttttacaaagattcaaaacattaccaacaagccctgtaacagtttcttaaagcaggtaccaactctggcctcaaacacaggcttcccttggagtttccaaaatgcctcactcctgtcaacactgccccaaaaagcagtcagaggaatgtttggtatnctgacattggcacacagttaagatgaggtgtgttataacancaggaccacacttcnttacactaattcagctcancgtcaa

SEQ ID NO: 222 - DNA, 145616 bp, Homo sapiens
gatcaagcctacagtcatcatacaatcacaggattgttgccctatatccatattttcttgacaccctaatagtgcatttggctaaaccttggtgaaataggcatgacagcatgtgactgtgccgcctctgacactgaccacccaggcctttctcttcactccttccctgaggccttggagggtctgcctgtggcctttagtctggtgtttgagctcacagaactgggtgtggttgaccctccctttgtcctcaccccctccacacacacacagggatgctcttgcaggctcctggtttgatgaggcagcccaggatgtgtccccacctttcctctttgagcccagggccagtgtatttcaggccgagtgatttcacccagggtcttgtttccattccattttatttttagtcctcaggtgcagtgggatgagtccctcctattccccaggtgatggctggctgtcatcattggtcctgactagtcacctcttgcttcatgtattcccccctcactccattgtcatttccatgcccccaccccacaggcagccattctactatatcctttatttgtatgtgttcttgtgcagtgctttgtaggcatggattttggtactgcaaagtgctgcattgtacacatagtattgcatagtgttgccttattaccatttctgtaacaaactgaatgtgttactttatgttggagcgtggtggagccttaagaatttattgagaatctctgcattaatgattatgaaagtgactgcaagttttcgctgagtcttatttcctgaacataaactcaggatcctggaccatggtcatgtgggaatagcaagagaactgaaagtggagcctgtcacatctccagactccagttttagttctcttgctatttccaccacatctttcatcacttcctccactaaagtcttgaactcctcaaagccatccacgtgggctggaatcaacttcttgatgatggatgaagccacttccttgtggctggaaccaacttctgtgtttcctaaaatggggacagcaatagtacctactctctaaaatttgttgtgggctaggtgcggtggctcacgcctgtaatcccagcactttgggaggccgaggcaggcagatcatgaaatcaggagatcgagaccatcctagctaacatggtgagaccctgtctctactaaaaatacaaaaaattagccgggtgtggtggcgggcgcctgtaatcccagctactcgggaggcggaggcaggagaatcacttgaacctgggaggtggaggctgcagtgagccaaaatcacgccactgcactccagcctgggcgacagagggagactccgtctcaaacaaaaaagaaaatattttttgtgaagatcaaatgggttaatacaagtgaagagtgcctggcactactagtgctcagtaaacattgtttatggatgctttcttttttttttttattaggccttataatagccctatgaggtaatataattagttccatttcactgatgaagagaccaaggtccagggaacaaaacaacttgcccaggtttgcatcatgatactgccagaagctaaatctagatcttcagaccccaagacggccacaggacctcgatccccatgtgttccctagaggtgttgtgcagaaccttcctgatgctgatctggatgacgagcggtcacccacaggctgctggagatgattcctggtcgggtggccctcagtcctccttgatctttctcccacactgtgatcttcacacccactggccattcctgagaaagaacctgccttctccagggcttttgtgggtgcccatgttcaccaagcagcctctaaagtgatgtgaatcctagcgccaggcctggtagtagcacatatgcatggtagatgcgtgctggaaaagcaggagccctaggagcctgccttgggttctagtcctagccatccattgcctcaccctagggtctaactttctatctctaaccttcagtttccacatctgcacaatggggataggaacttttctgtgaggatcaagtaggttttaggagactattccaatcttgatcaaatactaacagtcgcctgaaccctgcagaacaatccctgcttgttgtacagtctgatgccacctcagatgaaccattacccactgtatgcactgaacattttcccctcccctccaggaagatcatcctctggatctgccctcctcacaacggccttattgcttttctggagtcaccgaatcttagaatatcggtgctggaaaagaacttgaggaccatcagtcccagtgtggcaaacttatctccttatcaaggacccccgctgcctaaagcagtggttgactcagtcattgctcccctcactgcagggtgcagtgtgaagaggggacagatcatcctgtgagttacaggccaccttcagcccaaataccccctttctacagataggcaaactgagtaaatgatgatcccaacttccttcacctgaccctcgcctcagggctaccaggagatagggacgccatgttggcacaggagatgggtgggtatgccaccttccccatgggcaggcccctattgcggtcacatctcaagtgactacttacaaccatcaaacaattagggtttactggtggatgtctttatctttttgacattctgtagaattatgctaacagattttggaaaacaatttgcccaaaatctacgtgacttcatcctttgatttttgtttgtttgtttgagacagggtcttgcccttcactcaggctggagtgcagtggcgccatcacagctcactgcagccttgaccttccaggctcaagtgattcttgtgcctcagccttccaagcggctgggattacaagcgtgcaccaccacgcagcttttttgtttttttggttttttttttgagatggagtcttgctctgtcacccaggctggagcgcattggcgtgatctcggctcactgcaacctctgcctcccgggttcaagcgattctcctgcctcagcctcccaagtagctgggacgacaggtgcgtgccaccacacccagctaatttttgtatttttagtagagacggggtttcaccatattggtcaggctggtcttgaactcctgacctcatgatctgtcctcctcagcctcccaaagtgctgggattacaggcatgagccaccgcacccagccatgcctggctaatttttgtatttttagcagagacagggtttcgccatgttggccaggctggtctcgaatgtctggcctcaagtgatctgcctgcctcggcctcccaaagtgctgggattacagacgtgagccaccacacctggccttaatttttgtattttttgtaaaaatgcagttttgccatgttgccagggtgacttcacccattttcaatgcagaattttaacacaagagtgtactttagccagtgaaatgtgcacgcttacttcttttaggaaaaaactgaaatatttgctgggaaccccacaacagttgccacaggaaagaccagaagaaagcaaaaacaggtaaggagcatcctttaaagtgaggggaggccgggctcatgcctataatcccagcactttgggaggccaaggcgggcagatcacttgaggctaggagttcgagaccagcctttagcaacatagccaaaccctgtctctaataaaaatacaaaaattagccgagcatggtggcacgcacctgtaatctcagcttattgggaagctgaggcaggagaatcacttgaactcaggaggcagaggttgcagtgagccaagatcgcaccactgcactccagcctgggtgacagagcaagaccttgtctcaaaaaaaaaaaaaaaaatgtgaagggaaagcccacaatgatagcactttcatgctggcaagcccacggatggtgcatactcagtgtctctgggggagcaaaactcaggagccgacagccctcacctagtcaggtggtttattcacaaactgtccactcccaggacttcaggatggggcaagtcacaaagcaggatgttttcagtggggaatgtttaagtccttcaaggaaaataccgtatcatgagcttttcagggacaggtatctgtgacccacctgtgtgcaatgcctctgtggtcctgatattctggtgctgggcttggactcaagctgtgggtttcaacccagcttaaccttatctgcatgaccttggggaaggcacttcctctttctggaattcaattgtctcgtttgcaaagtgggaccatgatatcatctctacaaaaccctctaaacacaaatgaagaaacttcccataccaagcacccagaataaagaaaaaggctagaaaaaccagaagctattgaatcacttttttccctttttttgcttatatgtgctaatttttctaccatggtcatgggttacctttgaattattataaaagtgagtaattaaagggggtggagcagagctgatgtgaaggaaaacgctgagcttggcaactttcagggcctcctctgtgccaggcacagttgctgatgcttcacctatgtgacctcatctctttgtcccaacaagcctgaaagggaggcattatggctcctacttccagctggggagactgaggttcccgaaggagtcaagccctcactatcatgagagcctgtggtgatggtgatgtaccaggaaggcgcatacagatgtgtggcagcagcagcaaggtgagcactgcaactctgagaaagcggagcctcccccctttcttgagacactgcctcagagcctctgagaaaagccttccccactggtgatacgccacgaacctgctcctgggggacctgctctggattcttttaagatcaaaaaagtttattattaaatagcagcatcgtgtccagtcagaaaagcttaagtgtatgaacgtccttttttattttattttttttgagacagagtctccgtctgtctcccaggctggagtgcagtggcgtgatcttagttaactgcaagctccgcctcccgggttcacgccattatcctgcctcagcctcccgagtactgggactacaggcgcccaccaccacgcccggctaattttttgtatttttagtagaggcaggttttcaccatgttagccaagatggtctcgatctcctgacctctcgtgatccgcccaccttggcctcccaaagtgctgggattacaggcatgagccaccacgcccagcctgaatgtacttttaaaacatgtttctgctgctgggcgcggtggttcacgcctgtaatctcagcactttgggaggccaaggtgggtggatcacttgaagtcaggagttcgagaccagcccgggcaacatgtcaaaaccctctctactaaaaatacaaaaattgggcgtggtggcacatgcctgtagtcccagctacttgagagactaaggcaggaggatcacttgaacccaggaggcagaggtgagccgagattgcgccactgcactccagcctgggcaacagagcaagactctgtctcaaaaacaaaaacacatgtttctgcataaaagcattgtttgtatgccatattctccttctattgagtagcaacacaattcatcctctaaacaaaaaatgctaattatactttgctaaaacatatctccaaatatggatttaataaaatgcttttctcaaaaaagaaaataaaaagggtcctgccatttataagtagattgcttctttcaaaaggcaaatgccaataaatgacacttcatcctggagatgtgtagtccacctgttctgtgcccctgagccaccacctgttgccaatgtgtctgcagccaacagggctagtcctagtaacacggtgccccaccccacaccactgccccaccctgatactgaaactgcagctgatggggtaatgctctgagctgcccagaggaatgaggcagacaagtcctgctgtggcctggaaaaccctcaaaagagtcagtgcaattctcaagatcacaggtatctgcctgttgctcaagagtcccaacctggccacagtgagggtagtgagtgatagaacaggggaaaggagacagcctgtggcgctggctcgggcacaaaccactggtgaatcagacctgaattgattcctggagccaagtactgtttgccatctgtctgaggctttatctgccagggagatgggcaagtggccagagccctctcagggtgaggggttgaacagccaggctccagcacactgccataccagatgtcatgactggtcactcagaaagggcaccggatggggtggcaggaggccgagcccctggagatggcccccctaggctccctgagtctcagccaccccctcctcctccctgggcctcaggctcttcatctgtagcatgaaggtgtgggcagtataaggacttttcccactatggctgcagagggctcacaggcacttggttgagttgaaaatatatacaggtctaacaatttttaagttttctgttttttcccccacataaaacctattcaaccaaatgcctataaacatgttggggtgatgttcttctgacgtctgtgcttctaggttgtttatgggatggaccttcctatcctgtcacctcggggattgcaaaataaagtgttaaaaaatgttaccatttgcacttctctattcaaccaaaataacagaaggaaattggatttctcttgtctttatgagccaatattattagaacctatactttttatagctataccatttttagctgttttctgtattctacataagatttcattccaaaaactttaactatgtttaaagtttgaaaatcaccatccctggctgggcatggtggctcacgcctgtaatcccaacactttaggaggccgagacaggcagatcacctgaggtcaggagttcccgaccagcctggccaacatggtgaaaccctgtctgtactaaaaaagcaaaaattggccgggcgcagtggctcacgcttgtaattccagcactttgggaggccaaggcaggcagatcataaggtcaaggagatcgagaccatcctggctaacacggtgaaaccccatctctactaaaaatacaaaaaattagccgggcgtggtggcggatgcctgtagtcccagctactcaggaggctgaagcaggagaatggcgtgaacccgggagacagagcttgcagtgagctgagatcgcgccactgcactccaacctgggcgacagagcaagactccgtctcaaaaaaaataaataaataaaaaataaaaattagccaggcgtggtggcaggcgcccataatcccagttattcaggaggctgaggcacgagaattgcttgaacccgggaggcggaggttgcagtgagccgagatcacatcactctacttcagcctgggaaataaagtgagactcagtctcaaaaaaaaaaaaaaaaaaagaaaaagaaaaaggaaatcaccatccctgataatctctaaggtccctgtagctctgacattctactagtctacctaccattctaaagctctgaacaaattcatagggttttaaacctgtcaacatggaaccttttagtttcctgcctttgtttttatgcacttggctcttcatatatccaacttcctatccaaatcccattctttcagcacttcagtaaaaccccttcctcacaaagcacttaacatgggtcttggatctaagccttggtttcaaaatagggtaacagagcctccctcaagtggttaggtttaagtgagtaggtagtatgtatatgtaaaatgtttagcaaaatgctgatacataaagctcaaggatcagtaattactgttatgattatctttgttaatgtgttattattgtcatggtggaaaagtcagtgcagactcaattccctgaagagatgtgcaacctcaggcaaaaagtctggcccattctcgatggtgcagtactgcctcctagtgggtagctgggcatttttttttctttttttttttttttagactcctgtcccccaggctggagcgcagtgatgcaatcacggctcactgcaacctcaatttctcagactcaagcgatcctctcacctcagcctccagagtagctgggacaacaggcacgtgctaccacacccggctaattttttatttttagtagagacaaggtcttgctatgttgcccagactgactcctgagctcaagcaatcctcccacctctgcctctcagcccaagtgctgagattacaggcatgagccagtgcgcccagccaattttttttttttttaatgactgtcacactggccagggaggttaactggctgtagggtgaagaggacagagatattaaatgtctggcacacaaagaattgcccatgcccacaggactgaatccattacaggtataaaatataaaaagtgctttaaatttttcgaaacctggctgggcacggtggctcacgcctgtaatcccagcactttgggaagctgaggcaggtgaaatcacctgaggtcaggagttcaagatcagcctggccaacatggtgaaaccccgtctctactaaaaatacaaaaaaaattagctaggcttggtggcaggtgcctgtaatctcagctactcgggaggctgaggctggagaatcactggaacccaggaggcagaggttgcagcgagccaagatcgcgccattgcactccagcccaggtgatggagattccatctaaaaaaaaaataaaaattcaaaagctggggaacttagcacaagaaaacattatgtgcacatttcacatatagacatacctcagatatatatgggttcagttccagaccatgtcaataaagcaggtcacacaatttgtttcccagtgtatataaaagttatgtttacattgtactgtaagtgtgcaaaagcattatgtatttaaaaatgtacaggggctgggcatggtggctcatgcctgtaatcccagcactttgagaggccgaaacaagtggatggcttgagcccaagagtttgagaccagtctgggcaacatggtaagatctcatctctaaaaaaatacaggccagacgcagtggctcacgcctgtaatcccaacactttggaaggccgaggcaggcggattacctgaggtcaggagttcgagaccagcctggccaacatggtgaaaccctatttctactaaaaatacaaaaattagcagggcatggtggtggctgcctataatcccagccactcgggaggctgaggcaggagaatcacttgaatccaggaggcagaggttgcagtgagccaagatcgcaccactgcactccagcctgggtgacagaatgagactctgtctcaaaaaaaaaaaaaaaaaaattagccaggcatagttgtgtgggcctgtagtcccagctattcaggaggctgaggcaggaggatcacttaagcccaggaatgcttacaatcatataagccttcagccacataaccttgctggtggagggtcttccctcagtgttgatggctgctgactgatcaggattgtggtcgctgaaggctggagtggctgtggcaatttcttaaaataagacaataatgaggtttgccgcattaactgactcttgttttcacaagatgtctctgtagtatctgatgctatatgatagcattttgcccacagtagaacttctttcaaagttggagtcaatgctctgaaactctgccattgctttttcaactaagtttatgcaatattccaaatcttttgttgtcatttcaacaatgtgtgcagcaccttcagcaatagattccatctcaagaaaccactctttgctcatccattgaaacaagtcttcattcgttcaagttttatcatgagattacagcaattccgtcacatctctacgctccgtttttagttctcttgctgttttttccaccacatctgtcattacttcctccactgcagtctcaaacccctcagtcatccatgtgggttggaatcaacttcttccaaactgctaatgttgatattttgaccacctcccatgaatcgcatgtgtcgttaatgacatgtaaagcagtgaatcctttccaaaagattttcaatttactttgcccagatccatcagaggaataaatatctatagcagtatagccttatgaaatgtatttcttaataagacgtgaaagctgaaatgactccttgatccaccggctgcagagtggatgttgtgtttgcaggtatgaaactactaatctccctgtacatctccagcagagctcttgggtaaccaggtgtattgtaaatgagcagtaatattttgaaagaaatcttttttgagcaggtctcaatagtaggcttaaaatattcagtaaacctggctgggcacggtggctgacacctgtaatcctagcactttggaaggctgaggcaggcgatcacttgaggtcaggagttcaagaccagcctggccaacacggtgaaacctcacctctactaaaaatacaaaaaattagtcgggcgtggtggcaagcgcctgtaatcccagctacttgggaggctgaggcaggagaatcgcttgaacctgggaggcagaggttgcagtgagccgagatagcaccaccgcactccagcctgggcgacagagcaagactcctgtctgaaaaaaaaagaaaaaaagaaaaaaaaacagtaaaccatcctataaacagatgggctgtcacccaggcttcgttccatttatagggcacaggcagagtaaattcagcacaattaagggtcttgggaatttcagaacaataaatgagcattggcttccaccagctgcctcagtcctcaacgagttagcctgggcggggcatagaagctccacgcctgcaatcccagcggagttcaggagtttgtaaagatggggtctcaccagactggtctcctgggcaacatggtgagacccaatctctacaaaaaaatttttacaaatcagctgagcatggtggcgcgtgcctgtggtcccagctacttgggaagctgaggcaggagaatcgcttgagcccaggaggttgagccgtgtttgtgccactacactccagcctgggccacagagcaagagcctgtaccaaaagcaaaacaaaaaatcaagagtaagactgtcctttgaagctttgaaaccaggcgttggcttcccctctctagctatgaaagtcccagatggcatcttgttccaatggaaggcttttttctacaatgaaaatgtttagtgtagtcaccttcatccattatcttaggtagatcttctggataacttgcagcttctacatcagcacttgctgcttcaccttgcactttttgtttttttgttgttgctgttggtctttgtttttgtttttgtttttgagacagagtcctgctctgtcacccagactggagtgtaatggtgtgatcttggttcactgcaacctgtgcctcctggcttcaagcaattctctcctgccttggcctcccaagtagctgggattacaggtgtccaccatcatgtccggctaatttttgtatttttagtagagacggtgttttgccatgttggctaggctgatctcaaactactgacctcagatgatccgcccacctcggcctcccaaagtgctaggattacaggcctgagccaccatgcccaacctgacttacatcttatagcacactcatatctgatatttacatacagaacgtttattttataaactgcttttcttgtatttttatattattgttaaggctttgcatttctataatccatatagaaaatggatctcacttcagaagagtcaagggtcattaccaatttttttttttttttttaacaaaaaaggggcccatgtctgataagtcaagaccacttgtcctctctgagcttcttgagtaatgggagataattccaacgtcacaaggttgatgaaaaaaagcaccattcatgtgcctggcatctatttattccacttcagttttcttcctatctggttgtctacttttgctctcctacaccttgctcaggggatatccccagtactggcaatatgagtgtgtttaataaaggagcaaaggaaagcattttctggtgacaagtctcatctggctgttcggtgacaccaaggcacatgcccaggaaactggtagtttccagtctggcaccacagcctctagagaaacagaaccagggcacctttcccagcaagtttatggagaaaaaacagggatgggcaggtatcatcaggaagcagggtcccaggctgagggcagagatgtggcttgtttccctatctagggatgcctggggggaattagggtaaaaaggcaaacagcaggtcaaggtagcttatttgggccaaggttgaagactgcagcctgagacacttccaggttgccttggagagtattccaaaggacaggctcaactttttacagaaaaaaggatgaatcagaagacgggtgattacaaaagttgttcgtcaggaattctcattggtttacagaaataacactggttagtgattggctatccactgttgaattacaggacaatggcattttatggctacttggcatcacagtctagaacccacatggcaagtgacttcaagaggtaattatttagctcaaggagggagtgaagacaggactgctgttaaatgcctctctggccctaataatttaaaaggaatcacattcctcagattaaaaggtgtttttcttccttaagacatactgggtcaaagtgacaaactgcacttctgtggtatcagaaacagactttaatcttgactgcccaggccgtagtgcagtggcgcgatctcagctcactgcaacctctgcctcccaggtttaagtaattctcctgccttagcctcccctccccagtagctgggattacaggcgcgctccaccacgcccggctttttttttttttttttttttttttagtagagatggggttttgccatgttggtaaagctggtctcgaactcctgacctcaaatgatccgtccacccgggcctcccaaagtgctgggattacaagcatgagccactgcgcccagcccaagttattggttttctaaagctccccgtgattccaatgtgcagcaaaggggagagaaaacaccatgaataccctgtgaagtatattgttatcccccaacttttcaaacaagggaactaagaaagtgacttgccctcagcacacagccaaaaaaaaaaaaaaaatttgaactcaagaaagcctaatttgaaaacctattttaaaacagctatctagcagttttaacccacaccatctttcctacctacctatcccttcagaatcccctttcttaacatatgcccatactcccttatccacaaatgtccctcttgaccttggaccattcaactcagtagtcccccttccgcactcttcgaaattggacagattcaaaagtggttgaggaggagcaaggtcagcggaagcacactcacagcaggcaaattagggtaatttctgcctgcccagcacccaaaggagcctttcttaagccattacctgagtgcttactgcatgccaacacaagcctgcacagaacacctattatttactgagcagtgtgctatgctctgtgctgagtgctttacttgcattacactatattcttgatattaacaataggggataggtgcttcctattatcaccattttaaagatgaaaaaaatgaaatcccagacattacacaattggcccaaagccacagagctgtaaggaagcaaggattcaaatctgggctgctatttccaagcctgacggccttaacgttacactgctccctataacaagccctggatttgctgttgaggcaccagagccctgctctgccactgtgtccctgtgtgaccttgaacaaatccactttcttatctctaaactaataagaatttggactatcgactctgaagccctttccagtttatctacacctggtcctgtaaccaagtttatagtttcagctccattaccactgggctgcgaagttagacaacttgccaagcccctccgaacttaaatctcttcctcaataaatggagatgatcacattaaccttactactaacacccttttgaatcattttattcctgtcaactgctgtcatacccaagagctggcagtggctcaggtaccagtcttggatgacagagtaagtaaaaacctttccttccacccacttctgttgagaattaatcaaaattacttgaggaaaggaatggagctttcttccaggtcaatagactgccagctgctgtagagagcttgtttttgttttttgttgttgtttttgagacagggcctcactctgtcacccaggctggagtgcagtggcacaatctcagctcactgcaacctctacctcctgggctcaaagcaatcctcccacctcagcctcctcagtagctgggactacaagcacataccaccatgcccagctaatttttgtactttttgtagagacggggttttgccatgttgcccaggctggtctcctgagctcaggcaatccacctgccttgggctcccaaaatgctgggaagaaaaagagctttaattaccaagtaagtgatcacttaaatttgtctacttaacttcgaccactattttttcaccagcaactcagaaataagacacaacagtctcctaacttgggctatcatttttaaacaagagctcatgaatctctggaagaaaaaaaaaagagacacacagagaaaaaaaaggtttgtatacttttctctgtaaaactgaaaagtcctccctgtttgatgttttgggtttgttttttttttttgagacagtttcactcttgttgcccaggctggagtgcaatggcacgatctcggctcactgcaacctctgcctcgcaggttcaagcgattctcctggctcagcctccccagttgctgggattacaggcatgtgccaacatgcccggcttttttaagtagagacaggatttctccacgttggtcaggctggtctcaaactcccgacctcacgtgatccacccaacttggcctcccaaagtgctcggattacaggtgtgacccacagcacctggcctaaggcagatactttcaatgattcagttcttagccctccttgtcagtgtgttcatactccaacttacaaagcacgtgacttcttccaacctcactctttgaggccaatttcatgtcaaatggattgctatatattgccaactgaaatctaaccaagactgccagctcagtaaacctgtcctcattaaactccaagcagctagaatgagcgagccagccattcatcaatgcactctaatactcccaacttcttggctttcctgtcagtgttaaagctggacaagttatcttatacacgcttgttcaaatacatggctaaaggaaagtaaaaaaaaaccaatcagatttggacccacttcaaacttaaataaacccttttatctctaaatcctagtgcagtttacattctcaactgtttctggctctaaacccctatttcatgattaaggcatttatttcttcctcttcacctcagattggttagtctctccttatcatttgaatgtgagctctggaactgggatggccagttgcagtggctcatgcctataatcccaacactttgggattacagccaaggctggaggggtccttgagtgcagcctgggcaacagtgaaataccatcttataaaaaacagcctggggcggggcgcagtggctcacgcctgtaatcctagtactttgagaggccaaggcgggcggatcatgaggtcaagacatcgagaccatccttgccaatatggtgaaacccgtctctactaaaaaataccaaaaaattagccaggcatggtggtgcgcacctgtagtcccagctgctcaggaggctgagacaggagaatcacttgaacctgggaggcagagattgcagtgagctgagatcacaccactgcactccagcctgagtgacagagtgagactccgtctcaaaaccaaccaaccaaaaagaaaactggggtgaaaatgaattgttaaaggtcaacagcctaaacttgcactccagtcaaacacaaatattatatagatttttctttctagatattgagctggtgttgtgatttatcactgtatcccagtcagtgtttgtatcatggacttttgacatgtaggaaaattatgaaacaattaaatgacaaatcaacattccaatttgtatttgtaaaatactttcattgaaaacatgggtagttttatctaaactaaaaataaatgtcattatgagattctggtggcagccagccagctggatgaggttttttaaagttaccagctgcctgagcttaagatttagaattgtttcccaaaggagttattctttcaaaaatgaaacttctaggccgggcacggtggctcacgcctgtaatcccagcactctgggaggccgaggcaggcggatcacttgaggtcaggagttcaagatcagcttggctaacatggtgaaaccctggctctactaaaaatacaaaaagcagctgggcgtggtgacacgcgcctgtagtcccagctactcgggaggctgaggcaggagaattgcttgaacccgggaggcgaaggtggcagtgagccgagatcgagccacagcactccagcctgggtgacaaagagagactccatctcaaaaaaaaaaaaaaatacataaataacattaaataaaaaataaacttctgtatctcaagacttacataacatttttttaaaatattcaaatatttccttctccaaatgaccaatataaacttcacatctccaccccaccccctccccgaccccccattgccactgcccagctccaggcagcattaggcaacaacttcaacaacattccccttagctctacattttggggctttgtgagcaaataaaaaaacagtgaacaacgctaacttggccagggaaaggtgactcaggcctgtaatcccagcgctttgggaggctgaggcagaaggatcgcttgaggagttccagaccagcctgagaaacataaccacgtctcttaaaaaaagtttttaattagctgggcatggtggtgtgtgactgtagtcctagctacttgggagactgaggtgggaggaacgcttgagcccaagaagccaaggctgcagtaagctatgtcaccactggtctcaaaaaacaaaacaaaaacaggaatgctaacttgccccagatgaaatctgaatgaagtatatactgaaataaaggtgcacaaccacaaatgaacaaggctttcaaaagaggaggactccttcaacctatagactacttttctggaaggtttaattttgccctggaaatagtatccatctcaggacattccaaatgattagggagaagcaaagtatcaatgttttgatatttccacttgctcaagacacatgtactaacttacagtgaggcactacatggccatattctacatcttttatagtagaacaactatacaatgccttacatcagaaatgaggaaaactaaagattaaaacagcaatgttttacacacgtatttcatgtgttagtttaggaatcattttgggtaccttcatcaaatcgacagagaaagcaggatactaaatgagaatctaaatactgtattattaagtacagagtccaacaaggggaaagttgcatggacaaaactaatcaattatactaggcttaccaaaacaaactttttttttttttttggagacgaagttttgctttcactcaggctggagtgaagtggctacatctcggctcatggcaacctccacccaccaggtttaagcacttctcctgcctcagcctcccaagtggctggcattataggcgcctgccaccacacccagctaatttttgtactgttagtagagacggggtttcaccatgttgaccaagctggtctccaactcctgaccacaagtgatccacctgcctcaacctcccaatgcaccgggattacaggcatgagccatcacacccagccaaaacaaatttcaatgaccttgtctcagaaccttaaggggtctacagctgaattatcttcaggtacccgatgaatccccctaataaaacaggatgaaaaaaattagagtggacataaaatcaaattcaacactactggattatttagagaaaaatgtacttccaacccagtttttcttcagtaactttaactagaaatctttctcgaaaagatggaaaaccagaaggcaacaatctggtagtacaaaaatatacaactaagaaattaccaccaactaggtatgacaactaaatctcattcagaactctgaaaaaaagcatacttggacaaaatactaaactagtggttctcacatcaccaagggtatttatcatgtagaactcctcaaaattacacagggttaggtcaccctgaaaaactaagtcaatgagcctggagtctggctgtatctattctgaaatacctcttcaacaaaatttctaattaggcagcactgtactaaaatgaatgtagtaataacctggattttccatccacatatgggtttgtgtgaaagccactgacagcagtctaacagggtgggagtgtcatggacgctgacgggatcacgtttgtaaggatctctaagatactcaaatggtagacacagggtacctgtgcttggtaaaactacaacttccctactttctgcttaagacatggaggtcagaagcaacccacaatgaactgtgaaccagagatcaaactaaatattccttttaatagaaatgtgaatcttgccatgttgggcagactggtctccaactcctggcttcaagagatcctcccacccgccctagcctcccaaagtgctaggaattacaagtgtgagccaccacatccagccagtgtctttgaaaacaatcaaatataatccttaatgtttctttacattgtcatcaagtattagtaacagtgacttctagtgaacaccttgatccttaaaccacaggtctaagttcagttttgtgattcctttcatttttacactcaaccctgaatatggacaagaccggttagtgtgacctgttattttaggaattacaactttaaaaattcctaatagccacaatctaaatgtgcaattcaaagcttttaacaatttccatgttctaaagtttctaagagtcttgaggttatgctagggctcctggttaaagtaactgccaactgggactgtatgtcacctaagtcaggataactccctggtgaagttacttttatttcaggttctgtattatttctcttagccatattatacccgtaactgtcctttttacagaaacccttccaacttaagagcctgcaaggaagtcatatactgcccaaaaatgcccacataagttgtccatttataaaaagcaatgtaattgacatattgcatggcttccgtaacttcttagctatcttggcttgttcctaacaggaacaggttgtaggctatgtgagaatactaaagacaaaatgcccaatgccagagctctcagtaaataaacaggctgtctgaaaagtgtctttcttgaacatgcttaactttaaggctgaaccttcctgacaccaattctcccaagatttgtgtaaaaggtggaaataaataatttgtttaggaactgtatcttaatgtatccatttagcttgaactcttaatgcaatgacttatctttcatatttaagacagtcaataccgcataatccaaaactatcttaagagcatatttaaggaaactaagccacaagactgttgcattatgatttaatctaattgcacaaaaatttgaaattacaacacctgccattttctaagaggaaggttatgcatgcctccatattcaattctgcactgttacatttgaaccatattgtgaacttttacatcatgatggatcagcttagaattcccatgcaacacctcaaattataaaatggaagcaatttttagacctgtggaaagttttcatgctaaagataaaagccatttgttaatgggcaacttactttgtgtttaagaaccaggttgctgctatactttaaaatgttggtcactaaatattatggaccctgaactggcttctatgcctaaaaaaaaaaaaaatgggttaactatcacttaggtgacatctatatttccttcacttcagaagactaatccatagtgcctctcagctgtttcttataaaataagaatcgtgtaaccaactgcttcccatgggataagaacaatggtaacagtgggttcaactgactatacacaattatgctaatattttattaattcaaaagcactttacaagaaaatataagtatggcttccaataggaatgttatacctggacttggtaccaagctcacagatttgagtttgcaaggaaaaacaggctttcaagttaaagaacaatttgtaaccaaaactttaatcccaaggattctcacaaaacatattacaaatgacagcatgaaaaaaaaatcttgcacagtaactcaaagttcggctctacaatgtacccttaaactggcaggacatttttgaaatcacaaatttgcacataaagaatgtcacgaacagccatgtatccatatacagcaatcaaataaggaacttatgacctaaagcaaaggtaaactttcttgaaacttaacattctataccaactaggcaacctctgcccaggatgagagttggatttttcaaaaacctctaatttaatagtgcagcatttcgttttccctgatggcctgtgtttcacagcagtttttaaagactgcttgttcaactatagctgcagcctatatcccagctatggaaaaaaaagtaaatcttagttcaatttttgccagttgtttctgtatttaaatttaaaaaaaaacacacttccgctgggcaggtttagaggtttattatcagtctgtgcataactaaaagttcaaagcaaattcaattttgcttaagggaacattgtaaagtaacaattcttggtattacatgcctcgtatgatccatttcaaaccatagagaattacacctttgtgtcactgtttcaagagacaaacagatttgaacagctaaaacatcttaaaaatgcaccaagcttatgaagtctcaaacaaaacttgaattttctgtacatactcctgtcaaatgaagtaatttcctgtacaccacttctcttgcaaactgtcttctatttcctttcatttgacctagatcgactaaaaaaaaaaaaaaaaaaagaaaacaaaacattacatctgtaacttggtgacactttagtgacatatcgaaatagaactttaaggtaaaaaatttatggcttagaagacaggccttagcatactatgtatgcaaagtcttaaatacaagttatcaaagatcttacctacgagacctagagaaggatcgggacggcttgtgatttctctcccgagacagcgatctctctcttctcctatctctagaaagggacctaaacaagcaaaaaaacattaggaccaatgaggtatgataaaattatacataaatattttcttgatctggcatggtgactcatgccaataattccaatattttgggaggcagaggcaggaggctcacttgaagccaagagtttgagaacagattggacaacaaagtgagatcccatctccacaaaaaataaattagccaggtatggcagtacttgcctgtagtccaagctactcaggaggctgaagagggaggatcactccaaggccaggagttaaaggctacagtgagctataatcacaccactgcactccagcctgggtgacagatccttttttaaaaaattaaatactttctaaaaagcctttgaaaactcaaagaaagctgactcatccttacaacttgattcactattaaagccaaggtttattcccattaactaagccacctggaaaagtttaggaatagcagaaacactgccatttctaagaacgtagccaaaaaaggtagtcatttacctgctccggctgcgagagaagcttctccttcttggagatctaaaagcagaaacaggaaaattaggctcatcatcaattagtatttatggcgtgaggcatttcccaacttttcaatctcactgttgggcccagtgaatgtgccgaagaactggcacccatcgtccaaaaaaaaaaaaaaaaaaaaaaaaagaaaaaaaagaaaagaaaaaaaaggcacagaaggattaagaaacaaaaagctcaagtgaaaagcaggtattccaaccatggattcactttaacaaagaatgcttcacagcagatctgtccaatgcaaaacttcatgtcaaactaacttcactacccaaacaccacaccaaaatatagtcccacaagtagttccaaaaacagtaccataaaccagtatttggaacccatgcaaacctgtaagtccatgacaagacttaggtaccaggtggatagtgtaattttgtgaaaacgcggtaggtgtaaatattgatgccattaagtgctacattagaactgcatttgtgatcgtcacatttaagagtgtgtttaggcttaccaaaattaccttagcttggcccacacttcaaccccaaaattttaaattttgaaactgttagtaaaaccatttaaaggtgataggattcaacaaatttttgccagaaaagctaatctgttagagatattaaaatttttagtttggcatcttgcacatgcaaataagtttcacttgaaggcctagttacattacgagttccctatcacccttaaaagtttttcaagcaatatatatgtacgttaccattcaattatgcacagccagcctttgatccagaaaaaagaattactttaagccgcttactccttattttaaccagcagtaaactgtataagcaggaaaaacttactagttttgggtttcaacaagctagaaatggtgaggtgaggctgccggactgacggccaggaagaatttgctgaaaaggttttgccagatgttgcgttggatttagttggttggcgaagggggtgttgtggatttttcctgcttttttgttagccgaaggctgctgctgtagttgttgtgaagacatttggtaaataaacagctgagctgattggccaggaatgtgtgggcggtcgaggtggctgctgccgatttggttaaggttggagagaaggctgagagaaaacagcatgctcgggaaccaaagggcggtgcaacctgacgactggccagcctgggtcatgtgaaacgacaccagccaagctgaatggggcgcgctggtcacatgacgctgaaagggctagttgactggctaatgcagattcagagggtggtgagaagagacatgatggtgactctgtaacggggttcatttttattaatagatggaccaaaaagcacaaaaaaaatgaaaaacaagccatcagtacaaccatctattagctaacaaatactctttattatgatgggcaacagtgtgctgttgtttttcaaaatagcaaaaggggcaagattttgaactcctgtctcctagaaggactccactcacctgtaagaggtaaatttagtcctatagaaactattttggaggtctgaggagatgtggagttagcacccagacaatactgcctggtccaagaatgatgccattttcaattataaaaaaactgaattttctcctatttgggattgaagaacagatgactgggattacttcttttttagccccctttattggtcagtgacttaagttagtctcagaatgatttctactttaccagttgtaacattaaaacagctgcctgtttgataaatattacaattgtgctaatagtagaaaacacaaatttgtgaagagctagagttgaatgtaatgtttgtcattatggagccaagaaatggaaaaaggcctaaactgaagtataagggaagatttggaaagatgcaactagaaagatgaactagaagacagatccaagatagaagttactgactaccaacatgaacagtgacctaaagacaaaagccaacactcagcacaactcacataccccaaattacacccaacaaatgtttcacagaaacctccgattcttccaaagtttaaaacccaccaacaaacttaagagaaatacctgctcctactagctactccattacaccaatacctcttaacaagctttctctcaagtacctgcgacgaggtggaggactcctcctacgataatcatctcgagggcgacgaccccaagagggaggtgggccacgatttctacttcttttttcaccattcgacagttccactcttacacggcagccacatagtgttctgagggggcaaagatattaaacttaaaacagcctgactttctgacatgcgtattaaagccaaaagtactctcagttggctattctgcaaagaacacacctaagtgtctgtgcaatttaacatcaaatttctagctcccttatttttactaatataaaatgagctttggccaggcacggtggtacacgcctgtaatcccaacactttatgaggccgaggcaggcggatcacaaggtcaagagttcgacactatcttggccaacgtggtgaaaccctcgctctactaaaaatacaaaaaatagccaggtgtggtggtacatgcctgtaatcccagctactcaggcggctgaggcaggagaatcacttgaacccagtaggcagaggttacaacgagccaagatcacaccattgcactccagcctgggggacagagcaagactctgtcttgaaaaataaaataagcttgtttcccagtttcaaattaaaatttcaattaatttcaaattaaacaaataggattttctaaagtaccaattcacaaggaagtcaaattctattttatcacctaattgttagagccagtctgattactgagctcaatgttaatttgttaacagttgcaatttaagtgtgaagatccatttatccttgaaaaacaagttctcctgtatcttcattatgatttcttcccttgaagtccctgcacttatttcagttatttaccaggctgtatttattggtctccccctgccccactccaagtaaaaaatcagttcaagacaagacagaaccattttggccattttacagcaccctctcccctcaacagtcagcacagaagaaattatagctgtggccaggtgaggtggctcatgcctgtaatcccagcactcagagaggctgaggcaggaggatggcttgagcccaggagcttgaggccagcctgggcaacacagactgtcgtctgtattattttttaaataataaatatacatttttttaaaaaaagaaattatagctcacagtagtaaaaaaaaaaaaaaaagaccattattcctcacccttaatacaaccagtcattaaatttagataagctatcatatttgaagagtgactgggaagaggtgggccctggaaaactttactacaacctgcttgaattgaccaacctttcatgcagctttacagtgaacactcagctcctttttcccattatacttccaaatatgaggaaaggggggtgggggcatggaggtcaatactcaggccttactcagccagctaacaggacactattaacacaaagggaaatagtaagtgattcactttctggagtatttcaaacacataaaagtaaaggtacaaccaacccatgtaaccattttgtaaacaattttttaaacaaggatcagttcacaactactcttaaaaatatttgatcctggctgggcacagtggctcccacctgtaattccagcactttgggaggtcaaggcggtcagatcacctggggtcaggagttcgagaccagcctggccaacatggtgaaaccccatctctgctagaaatacaaaaatcagccccgcatgatggcacacgcctgtagtcccagttactcagaaggctgaggcaggagaatcacttgaaccccggaggccgaggttgcggggagcgggagactgtaccactgcactccagcccagtgacagtgcaagactcgtctccccaccaaaaaaaaaaaaaaaaaaaaagatcccaattgtatctaaagatacaattggccagtgattgggaaagccatctaagagccacatatcctgtagattttaaatatgaaaaacacaagcaacacatttttatcagcgtaatcattaaatcaccttccatctagctctcggactgcatcagctgcatctcggggatcttcaaattcaacaaaagcaaagccgggtgggtttctagcaacccacacacttcggagtggtccatagtagccaaaagcccgttccaattccgtcttgttgccattgtttccaagattgcctacataaaccttacagtccaatggacaggaatcacgatgcatttctgtaatgaaaaataccaaaaatattcattcatctaaacatctacagttaaaaccacagatccttagaaagaactccattagagaggacaagagagtttaaggtagcacgtaaagaaaaaaaaattacaaaaatgctagaaaccaaacaagaaatgttactgctaagcacccatttccccccccccgccaccccgccccattatctttactcctaaccctcaggaagccagcaattagtgaagaaaaaaacagcttccttggaacgttgagaacaactggaggagcatttaccaccatctgggccgtgagttaagagacttaacctgttatttcatttaatccccaaaataaagcatttctagaaaaacagaagagaattctgttggggactcaaaactaaataaaacaatgatgaagaaagctagtccttaaggttatactaccaggcaagcgattcaaagtacctacataagccaaaacttaccagctttaataaaaataaggccaacgattttcacttttaaaaaaatgcccatggaccgggcgcggcggctcacacctgcaatcccagaacttttgggaagccgaggcgggcgaatcacgaggtcaggagttcgacccagcctggccaatatggtgaaaccccgtcacaactaaaaatacaaaaattagccgggcatggtggcgcacacctgtagtcccagctactcgggaggctgaggcagaacaatcgcttgaacccgcgaggcggaggtggcagtgagccgagatcgcgccactgcactccagcctcggcgacagagcgagattccatcgccaaaaaaaaaccacaaataaataaataaataaatgcctattttggtcatttggaactataggaacaaggctagtatcaaatgtcattagatagaccagagtcttacgcggtaaaaatttatcaagcaacgagaccaactttacagttttttaaaaaatgtaaactcatagtagcacttattcacagtagcccaaagatgttaacccaaatgtccatcaacagaaacggataagcaaaatgtggtatagacataaaatgagtattattcagaatgatgtactgacaaatcctccaacgttggaaaatcttgaaaacattacgctaagttaaagaagccagacataaaagtacacgattccataaatactaaatatctaaaatagctaagttcagagagacaggaagattagtggttgctagggactagaggaagggggacagggaatctgggagtaagtgctcaatgggtagtagtctcctgcggggggaggtgacggaaatgttttggaactacgtgtaagtgatgattacacaacactgaatatactaaataccacttaaagataatttcactttaataaaaaattacaaagagatatttgctactaaaaaatttactgcactttggggacttatttttttgttcttccttggcggacttgtatttgataaagctttattactgagtcacttcgacgatgaatctgataaacttgtagaccagtttcaattacataaaaaccatctactcaataattcagctgaagtgctttccataaacaccacgttcttcttactctgggcttgtctaattaaaatatccagtccagacacatcctatttgccgtgaccacaccctgtgcccaggagtaagttctaagaccaaaccactggtgaaaatttttaaaaacactgctggcacctgtcttaagcctccattttaatgggaagcgatgaaagaacgaatcttaagttcaaggaagatctttcggtcttagaaaaaggtgattagattcaggctgcaaaatctgaaactacatgaaagtaaggtgactacgggggccatttaatatgaactgaaaggtccggtcttggttagtgactttacaaaaacattctgagaagcttcccaattaaatgaggggccaaaaaaaaaaaaggcgccataaaaataaaaaggccgtgacctggaatacaactcggctatcggctcccctttgtggttcccaactcccaggtaacccccatcctggctcatgccccaatgaggaatataaagacttccactccaagactaggaaaccctccgatgggccgggagcccccgccaccgccccgtgctgaacgtcacaaaatggcggcggcgcctctttgtctcaatctggcgccgccattgggcctggctccttggtactgttaaattccatttccacctcattccctctttcgctggtctcttaccgagatctagggttaaaaaatgcggcggctcaaatccacacgctccgatgagtcttcccgctttcctccggcccaacaccaaccaactctctcactcacccggcgtccacgaaatggcggaccaccgccttctcctcgcctttatttatacgccatactggaatcacatgattggacgggctcccccaatgagaagcagaagaggccgtgacgtatggctacaaacgcagcgagagccgcggttgctgggagcgcgctctggcggttgcgccgggtgggtggagacgtgcgtcggcgcgcgctcgttgtaacaggcctggtgctccctcgagcgttcctcccggtctgtcgacctccaggttacccacagactcctcttcctcacctccaaataggctagggcttcataaacagcaccgtcgccgtcacgctcaaacactaataggagccgttggcccctaacaagattaagagatgaattaattaagtgcttcacccttgtgagcggttagtctggaactaagagcatcgcgtttacaaacaggtcacggagctgtttgtgacccagctggcaccagactgtggccgcctagattccacactgaaggaaaagcctggtttggaaagtttgcccaactcttgctggtttctcgtctctcaagcaaacttgcaggacttggcgccgacagcaaaggagaccggtcaggtgacctggaaactatcacctttagcaaacacccggaaagggaagtttctgaagaagattgaatgtaaattctggcccccaagcaaatgccaggaggggtatctcgagcctttctcctagcagccgttgcactgcctggcatgtattttgtccgggccacttcccttacgaagacagagccgcaagagtaattaaggggagagagactgtgattgggttagaaaaatcaccaagggccgggcgcggtggctcatgcctgtaatcccagcactttgggaggccgaggcaggcggatcacttgaggtcaggagttcaagaccagcctggccaacatggtgaaatcccgtctctattaaaaatacaaatggccgggcatggtggcaggcgcctgtaatcccagctacttgggaggctgagagcaggagaatcgcttgaacccaggaggcggaggttgccgtgagctgagatcctaccactgcacaaaaaaaaaaagagagaaaaagaacctgtctttttatttattccctcttagctgaaagatatgccaattattatgtttttttttttcttttttctttttttttttttcttgagatggagtctcgttctgttgcccaggctggagtgcaatggcgcgacctcggctcactgcaaactccgcctcccgggttcaagcgattcgcctacctcagcttcccgagtagctgggattacaggcacctgccaccacacccggctaatttttgtatttttaatagagacggggtttcaccatgctggtcaggctggtctcgaactcgccacctcaggcgattctcccgcctcggcctcccaaagtgctggtattacaggcgtgagccacagcacccggccagccaattaatatgttttaactttcccaggtatttttcttttgaagccttacctcttattgtggttctaaaaggtttatctgtagtggaggaaaaaaatacagatttattacatctcagcctagtttcctcacctgtaaaaggggagaaggggatcctagcaaaccttttcttatttctctctcgtctagatttttttttctggctcacttatatttgccttgatttgttcccctcctctatgtaagcttttctcctctttttcattttctttccttctatcaaatcaaaggctctggagtcaggcagtcctggatttggccccagcccccactgctagttactggctgaagcatcctgagaagaacgtttaacctctctatttcctctgtataaaataaccccaggcttgcagcgttacagatgttaggttttgtcactttggccaattgtggtcacacctgcatccccagggcttggaaacgatacagcagtcaagcaatacatatttgtttatttttagttagttatttatttttgagactctgggtctggctctgtcacccaggctggagtacagtggttcgatctcgcctcacggcaacgtccacctgccgggctcgagcaattctcctacctcagcctccccaacgactaggaccacaggcgcgagcacagatgcccagctaattttcgtattttttgtagagacaggatttcaccatgttgcccaggctggtctagaactcctgagctcaaagccatccaccctcctctgcctcccaaagtgctgggattacagccatgagtcacggcacctggccttttttttttttttttttttttgagacagggtcttgctctcttactcaggcgggagggcagtggagcaaacttcgctcaccacaacctggacctcgtgggctggacctcatgggttaaaattagccaccatgcctggctaattttttgatttttttgtagaggagtctcactttgctgcccagattggtcttgaactcctggcctcaaacgattctaccaccttgggagagttgtttgagttgttcgagaccaatccaactcctgagattggtcttaaactcctggcctcaaacaagtctctcaaagtgctgggattacaggcgtgaaccactgtgctgggctgttaaattatttaattaagagaaatgatgtatgtaaatcatctggcacaatcactgcttttaaaaatgctggccggctgggtgcagtggctcacgcctgtaatcgcagcattttgggaggcctaggctggtggaccactttagaccaagagtttgagaccagcctaggcaacatggggagaacctgtctctactaagaatacaaaaagttagtcgtggtgatgggaacctgtagtccagctactcagaaagctgaggtgggagaatcgcctgaacctgagaagttgaggctgcaatgagccaagatcgtgccactgcactccagtgcattccagtgtaatcgaatgagaccgtgtcttataaataaataaataaataaatgctggccttttaaaatttttcttttcccatctcattttcccattctttcccaccacttttcctgttttttgtttgtgtgtttgtttgtttttgtgtgtggtgctagtcaagtctagtcaagtgtgttgtctttcagtggaactctcttaatccctctacctctagtaacaaaaacattctgaacctcccctggccatccacaacttttcatcttctagcgacttcagacaaatgaattatccacttgctttagaggtgttttttgttgttgttgttgttgttgttgtctcactctgtcacccaggctggagtgcagtggcacagtctccatctcggctcactgcagcctccacctcccaggttcaagcgattctcctacctcaacctcccgagtagctgggactacaggcatgcgccaccacgccaggctgatatttgtatttttagtagagatggggtttcatcacgttggccaggctggtctcgaactcctggcttcaagtgatctgcccaccttggcctcccaaagtactgggattacagatgggagccaccacacctagtcctgtggagtattttaatattcctttaaacttatacgaccactactcttgtctggaccctcgactacctgaagcttcaaggagacatatcagggtttttggtacagacacagaatgggaatcatatgttgtaggaatatctcttgattttctttgggaaaccacctttctcacagtagtacatattattgatttgaatgtggttgggtcctacacccctctttttcaggggtagggaggtaaccattctggattaattaaatcatccaagttcttagtccttcccttgtgcctcccccaccattaggaatgaggatgagtaatccagtcagaccagtcagctgctgatccagcactgttcataggccaaccagagagaggtgtgctatttcccctgattagcacagtcctgagccggggcagccagcctgtttccaggagggaagaagcagcctgaggtagacccaacacagtgggaaggagaactgcaaggtgggaaataaggagccatggagagtcttgcttaagaaggcttttttttttttcttttttttgagatggagtcttgctctgttgcacaggctggagtgcatcggcgaggtctcggctcactgcaacctccacctcccaggttcaagcaattcttgtgcctcagcctcccaagtagctgggattacaggtgtgcaccaccacacccggctaatgtttgtatttttagtagagacggggtttcaccatgttggccaggctggtcttgaactcctgacttcaggtgatccgcccgcctcagcctcgcaaagtgctgggattacaggtgggagccacaaagcccagcctgaattcccagttacttgaacatacagtcagccctctgtatcttcaggttcctgcaaccaactgcagatcaaaaatattttttaaaagaataaaacataatacagcataacaaccatttacttatattgtgttaggtataattaatgtagagttgatttaaattataggggaggatgtgcatagattatatgcaaatactacattttatataagggacttgagcatccttggattttggtatcctcaggggtcctggaaccagaacacccaccacaaagagatcaccatacaagttcctacactttcctcaaagtggcttaagccactttgagttagattttttcctgtcattagacatcagaaagattctaaatacaaatattcttttttattttattttacagaggtgggggtcctgctatgttggccaggctggtctcgagctcctgggctcaagtgatcctcctgcctctgcctcccaaagtggccaccacaccaggccaagattccaagtacaaaaattattctgacacagacttctcactatctcaagttgagagcatggtactaagttacctttcaattctaaaattcacctgttaccaattcactatttttgtttgtttgtttgtttgtttttgagatggagtctcactctgtcgccccggctgggagttcagtgtgtgatcttggctcactgcaacctctggctcctgggttcaagcaattcttctgcctcagccacccaagtagctgggattacaggcgtttgccacaacgcccaacaaatttttttatttttagtagagacagggtttcgccatgatggccaggctggtctggaattcctgacctcaagtgatccgcccgcctcggactcccaaagtactgggattacaggtgtgacccactgcacctggccacgtatatatattttttaacttaaaatttaaaaaatgtttaatttaaaattaaaaacaaaaaatgctgggcacaatggttcatgcctgtaatcccagcactttgaaaggctgaggcgagaggaccacttcaggccaggagtttgagactggcctggacaacatagcaagacccccccgccccgtacaaaaaaatacaaaaattagctgggcatggtgttgtgcgcctatagtcccagctacttagggggctgagttgggaggatcacttgagcctgtgaggcagaggttgcagtgagctgagattgcaccacttcactccagcctggggcacatagtgagactctgctcagaaaaaaaaaattttcaaaaaagaaagaaattactgatggccaggtgctaagagttttgtataaggtttaatgtttttgttgttgttgttttgtttgtttgtttgagacagattcttgctgtgtcaccaggctggagttcagtggcatgatcttggctcattccaacctccacctcccagtttcaagtgattctcctgcctcagcctcctgagtaactgggacgacaggcatgcgccaccaagcccagctaatttttgtatttttagtagagacagggtttcaccatgttggctaggatagtctcaatctcttgatctcgtgatctacccgcctcagcctcccaaagtgctgcgattacaggcgtgagccactgcacccagcctggtttaatgttttatgttttggggggccaagatgggagaatcgcttaaggccaggtgttctgaaaccagcagttttactattgtctctacaaaaatttaaaaaaacaaattagcaaagtggtgctgcatgcctgtagttctagctactcaggaggctgagacggcaaggatctcttgagtacaggagttcgaggctgcagtgggctatgattatttcactgcactccaacttgggcaacatagcaagaccttgtctctaagaagaaaaaaaaattttttttggctataatccaagcactgtgggaggctgaggcaggcagatcatctgaggtcaggagtttgagaccagcctggccaacatgacgaaaccctgtctctactaaaaataccaaaattagccaggcataatggtgcgcgcctgtaattccagctacttgggaggctgaggcagcagaatcccttgaacccaggaggcagaggttgcagtgagccaagataccactgcactccagtctgggcaacagagtgagactccgtttcaaaacaaatagataaataaataaataataaaatatttaatgttttaaatattgtgattgacttcaagtatccgtgaaggaaaatcttaaacagtatgaaccttcacaggctgggcgtggtggctcatgcctgtaatcccagcactttgggaggccgaggcaggtggatcacctgaggtcaggagtttgagaccagcctggccaacatggtgaaactccatctccactaaaaaatacaaaaattggctgggcgcgatggctcacgcctgtaatcccagtactttgggaggccgaggtgggaggatcacaaggtcagaagatcgagaccatcctggctaacacagtgaaaccccgtctctactcaaaatacaaaaaattagctgggcatggtggcactcacctgtagtctcggctactagggaggctgaggcaggagaatcggttgaacccaggaggcagaggttcagtcagccgagatcacaccactgcactccagcctgggcaacagaacgagactccgtctcaaaaaagaaacacccaaaaattagccaggcatggtggctcacacctgtaatcacagctactctggaggctgaggcaggagaatctcttgaacccgggaggcagaggttgcagtgagccaaggttgtgccactgcactccagcctgggccacagagtgagactccgtctcaaaaaaaaagtaaaaattttttaaaaaagagcatgaaccatcacaatagttcattaactacatggttcagtcaagatcctggcagaaaccagatggcacacttaaagagttaaccacatagggaattatgtacaggggtgtgggcagagttaaggaaacccatagtgggtaagggcaatcccaaaggcagctcgtaggcccaatggggcaaggaagggagcagggttaccaaaaacagccagctgctgttgctgtgggagatgagctattatagctttagatagaggaactgtggcagcccagttttgggggtgtggggctagaaccactctctccattgtcccatcttttaatggtgacatcttttgctcaaaaccaactggaagcctgagggcaagagagctgggtgatacaagtctagaggttggttggccagggcacagagcagggctgagaaggctagagaactgatctagggttgtgctgtccaatatggtagccacaggtacctgtggcaagtttagtcctaattgagatgtgctgtaaatgaaaaatacatgctggattttaaagactttgtatgaaaaaataatacattatttcatttgatttcaagttcaaatagttttgatgtactgagttaaaaaactagattaagggctgagtacagtggctcacacctgtaatcccagcactttgggagaccgaggcaggcagatcgcttgagctcaggagtttgagaccagcctgggcaacatggtgaaaccccatctctatcaaaaatacaaaaattagctaggcatggtggcaaacgcttgtagtcccagctaccagggaggttgaggtgagaggatcactttaactcgggaggcagagattgcggtgagctgagatcatgtcactgcactccagccttgacaacagagcgataccctgtctcaaaaaaataaataaataaataaataaataaaataaactatattaaaattaatttcagtcaggcacagtggctcacacctgtaatcccaacactttgggaggctgaggagggcagatcacctgaggtcaggagttcgagaccaacctgaccaacacggtgaaaccctgactctactataaatacagaaattagctgggcatggtggcgggtacctgtaatcccagctactcgggaggctgaggcaggagaatcgcttgaacccgggaggcagaggttgctccagcctaagcgacagagcaagactctgtctctaaataaataaataaattttggccaggcgcagtggctcatgcctgtaattccagcaatgtaggaggccaaggcgggtgaatcacttgaggtcaggagtttgtggccaacatggtgaaatctcgtctctctaaaaacacaaaaatcagccaggcatggtggtgggtgcctgtagtcccaagcactcgggaggctgaggcaggagaatggcttgaacagaggtagtgggggttgcagtgagccaagatcccaccactgcactccaacctgggcaatagagcaagactctgtctgaaaccaaaaaaaaaattaattttatctgtttctttatactttttaactgtggctgccagaacatttcaaattagccagtcaaggtggcatgggcccatagtcccaactactctggaggctgaggcaagagtaatgcgctatcatggcactaccagtagctactgcactccagcctggacagcacagcaagaccccacctctaaaaaaattacatatgtagctctcattctatgtctactggactgtgttgatctacagggacaaatagaaaataagcacacacaattacaatagatagtcatttaaaaggtcattttagttctgtatcctggacaactatgtgaaaagagtgtttttacaaattacatagttttaagctttttaaaacttaattgctttggtggccgggcacggtggctcatgcctgtaatctcagcacttaggggaggcagaggcaggcagatcacctgcggtcaggagttcgagaccagcctggccaacatggtgaaaccccatctctattaaaaatacaaaaattagtccagcgtggtggcaggcacctataatcccagctactcaggaggctgaggcaggagacttgcttgaacaccagtactcgggaggcagaggttgcagtgagccaagatttcatcattgcactacagcctgggcgacagagcatgactttgtctctgccaggcatggaggctcatgcctgtaatcccagcactttgggaggccaaggcaggtgggtcacttaaggtcaggagtttgagactagcttagccaacaaggtgaaaccctgtctctacaaaaatacaaaaattagccaggcatgatggcggatgcctgtaatcccagctacttgggaggctgaggcaggagaatcgcttgaacccgggaggcagaggttgcagtgagccaagatcacgccattgcactccagcctgggcaacagagtgagactccgtctcaaaagaaaaaaaaaaaaagatgccatttccaaaaaaaacaccttaattgctttgatactttgagataccacccttctatgtactttttaccattataatatttattatacctaaaataatgaacaataattccttactaccaaatattcaatcagttttcaaatttcccttattgcttcataagtatttctacttttatttttatttttgagacggagtctcactctgtcacccaggctggagtgtggtggcataatctcggctcacagcaatctccgcctcccgaatagctggggtttaaatgattctcctgcctcaccttcccgagtagctgggattacaggtaagcgccaccatgcctggctaactttcgtatttttagtagagacggggtttcaccatgttggccagactggtcttgaactttacctccggtgatctgcccacctcagcctcccaaagtgctgggattacaggcgtgagccactcgcccagcccaatttttttaaaagttcattaaaaaatgagtaaatgggccgggcgcggtggctcatgcctgtaatcccagcactttggaaggccgaagccgggcggatcacggaggtcggaggattgagaccatcctggctaatatggtgaaaccccgtctctactaaaaatacaaaaaaactagctgggcgtggtggcgggcgtctgtagtcccagctactcgggatgccgaggcaggagaatggcgtgaacccgagaggcggagcttgcagtgcgcggagatcgcgccactacactctagcctgggcgacagagcgataccccgtctcaaaaaaaaaaaaaaaaaaaaaaaaaaaaatgagtagatgaaagttcttattcacagccttccccagagactttgccacaatcctctaagtcttggttttagaacagagactgacacaaggacccatagtgattgcacctctgctccctgtttctttctgttctatccaaacacatcttgatagcatctgattgcttgtcacatgttgttgttgtttttttttttttttttttgagacagattcttgctctgtcgcccaggctggagtgcagtggcgcgatctcagctcattgcaaactccaccttcctggttcatgccattctcctgcctcagcctcctgagtagctgggactacaggcacccgccacctcgcccgcctcattttttttttttttttttttttttttttgtatttttagtagagacgggggtttcaccgtgttagccaggatggtctccatctcctgacctcatgatctgcccgcctcggcctcccaaagtgctgggatttacaggcgtgagccaccgcgcctggctggttgtcacgtgttttaaaatttaaattacacatttacccagatctttattctgtagccagaaacctataacttgctttacaaagtgttcttgttgatatttgtttttgttttaacattttaaggatggggtcagcaaacgaaggctggtcatttcagattatagtttatgattctattcaagttatacttcctgtcatttaccatgttgtgtcctgggaaagtttagtcgtctcaaagtatgttatataatcaaaatattagaaaacattgaatcagcaaagaggatttacgtatgtaaggaaactggcaaggctagggggcattgagtgggtttgtttgtttgtttgttttgaggagaagggtctcactctgtcgcccaggctggagtgcgctggtgcagtttcagcttactgcaacctctgcctcctgggctcaagccatattcctgccttagcctcctaagtagctgggaatacaggctcgcgccaccacatccagataatttttggggtgtgtgtgtgtgttttattttttgtagagacggggtttcgtcatgttgcccaggctggtcttgaactcctgagctcagcgatccacctgctttggcctccgaaagtgctgggattacaggtgtgagccaccactcccagccttgagtaggttttaagaagattcagagctcttctttttttttgagacagagttttgctcttgttgcccaggctggaatgcaatggcatgatctcagctcactgcaaccttcgcctgttgggttcaagtgattctcctgcctcagcttcccaagtagctgggattacagacacccgccaccatgcccagctaattttttgtatttttagtagagatggggtttcaccatgttggccaggctggtcttgaactcctgacctcaggtgatccacctgcctcagcctcccaaagtgccagaattatagtcgtgagccactgcacctagcaattcagagctcttcttaccattgcccctcaaagcttgcagaacaacgcaggcatgatcaactttccaaatatacaagtatttatatgtgtatatgtatgtctgtatgtatatacatatagacacagaaaaaagtacgaaagtttaacacttagctctagatgataagacagttgaggaatttttttttcctgttttctgcttggtttaatttttgtttttcttttttctttttttcctttttggagacaggatcttgctctgtcacccaggctggaatgcagtggcataatcacggctcactgcagcctcgacctcctgggctcttgcaatcctcccacctcagccttcagagtagctgagactacaggcatgcaccaccacacccagctaatttttttactttttgtaaagacaaggtctcactatattgcccaaggtcgtcttgaactcctgggctcaagcaatcctcctgcctcagcctttctttttatttttctgagatggaatcttgcttcttcacccaggctggagtgcagtggtgctatcttcgctcaccgcaacctctgcctcctggattcaagcaattctcctgcctcggcctccccagtagctgagattacaggcaccaccaccgtgcccagctaatttttgtatttttagtaaagtcagggttttgccatgttggccaggctggtctcgaactcctgacctcaagtgatctgccgccttggcctcccaaagtgctgggattacaggcttgagccaccaggcccagccctgcctcagcctttcaaagtgctgggattacaggcgtgagccaccacatccagcctaattttctataattacattttggtgcaaaattaataaaagttctttctactgaagtagagagccaaaacacctaaaagaatggcttggctttacaactttcattttaaattggtccacagttagtttccaactgttgtcagttaattatcttatttctcccaatctgggaatgtctcacaaacaccgaaatgtgggagttttctgggcacatttgggtaattctactttcctgacacgccgcccccctcaacacatttctccacacgcaaccacaccccacccacccgacacacacatgcacacacactaattttcaccctgtcatttttcctggagtgtacctgacttataaaatgtaattgtagtacttgaaacaaatgaaaactaggacacagagaagttaagtaatttgtcaaaggtctcacagtttataaaggatgaaggtaggggccgggctcagtggctcacgcctgtaatcccagcactttgggaggccgagtcaggcggatcacctgaggtcgggagttcgagaccagcctgagaaacatggagaaaccccgtctctactaaaaatacaaaagtagccggtcgtggtggcacatgcctgtaatcccagctacttgggaggctgaggcaggagaatcgcttgaacttgggaggcggaggttgcggtgagccaagattgtgccactgcactccagcctggggaacaagagcgaaactccgtctcaaaaaaaaaaaaaatgggtgaaggtgggattcaaatcccaggtgagactctggagcctggtgtccacttgaggagcagaaagcagctatgattgggccacatgcagtggttcacacctgtaatcctagcactttgggaggccaaggtgggtggattgctcgaactcagaagtttgagaacagcctggctaacgtggcaaaaccttgtctctaccaaaaataaataaatatatatatatagctgggcgtggtggtgcgtgcctgtggtcccagctactcgggaggctaacgcaggagaattgcttgagcccagccataagggaggctgcagtgagctgagatcgcaccactgcactccagcctgggcaacagagggactttatctcagaaaaagaaaaagagagagaaaaaaagaaagcaacaatgcttggaaattgcctgcgtttggtgtctctgggggtgtgtgtttgctttttcagccccccctttcctccagagagccctaaggaacaccatgttacatggacagacgtccttcctcgcatgctgggccccctgaggcagcacagttcctgagctccaagactcttccccgttttgatttcagccccaccctcccttcccactcagtggtgcctggacttcaatgcctgcctcgtgtgtgttaccttatttggttctcagacctacagagaggtctggcaaaggatccaggctagaataaaaggattgcttgtgcagctggaagatgagaaacctttgtttcggtgaccctagcttgcactctggaactcacaaatacagggaagtaagtttagcctcaaaagcaacaacaagaagcaactgaagagggcagagtggagatgtcaggatgtcacaatctttagtgtgtgcttaattctgtgttttgaaagatatttgtctgtttagctccagtatggctttctttttttcctgagtttctagagtttacacactaatttagtttgtagccaagaaaactcaggcccagcaagtgatagctgtcataatttcgcataagcttgtgtgtagcatttaccactttttttttcttttctttttttttttttttttttgagatggagtctcactctgtcacccaggctggagtgcagtggcatagtctcagatcactgcaacctccacttcccagactcaagcgattctactgcctcagcctcccaagtagctgagtttacaggcgcctgccaccatgcctggctaatttttgtatttttagtagagctgaggtttcaccatgttagccaggctggtctccaactcctgacctcaagtgatacacccacactggactcccaaagtgctgggattataggtatgagccactgtgcctggcccatttactacttttttttttttttttttgtgacagagtctcactctgttaccccaggctggagtgcagtggtgcaatctcggctcactgcaacatctgcctcctgagttaaagagattctcctgcctcagcctcctgagtagctgggattacaggtgtgcaacacctggcccggctaattttttgtattttaagtagagacggagtctcaccatgttggccaggctggtctcaaactcctgacctcaggtgatccacccgcctcggcctcccaaagtgctgggattacaggtgtgagccactacgcctggctcatttactactttttaaacctggttcagagcatctctctctcaatctccctctctttctggctgtctttctgtctctatctttttttctctctctctcctctacacatgcacacactcatgcatacacacacacacacacactcatttaatccttgaaactcaggtaaatgttattatctccattttatagaggaaaacaactgaggcacaagagattaaaacacttgccaaaggtcacagagctcagaattaccagagccagattagacccctgcagtcaggctacctaaccatagacccatactgcctctggggcccagcagatgtctgagtccttatcttactggactcacagcatctcagcctgttaattctccctcccagtttccacattcccatctctctggctcctcttccttagtgccctccagagtgctcttcctcctctgcctgctaatgcagggggcccgcgggattccctcccgtgccccttcccagctccccgtgtgctctctccatgagggacttcatctgctttcaggacctctgttctctgctttatctttggaggagtgggggctctccccgacccctgagccatatatccaacacacatgcttctttctcatgtccccaacgtgcttcagacctccaattcactatctttccattctgtgtcccatatcagagtgtcactgcctcctggtcactctcgactgaccatgggcctcatggccttcatacctggcccccgcctacctccaaggcatctcgtatttcctctccagaaacaagctgtgtatccctgcattcagtcccctctacctggaatgctctaatctggatttttcaaacttttgatcacaacagtaggaaagacatatgatatcaccagtacctaaaagtctatgacccaagggtagacagagttgatgctgtctgaatgttcgcaaacagtggttggtgacactgtgttcaagttagaataccgttgccaggccgggcacggtggctcacacctgtaatcccagcactctgggaggccgaggcgggtggatcatgaggtcaggagtttgagaccagcttggccaatgtggtgaaaccccgtctctactgaaaatacaaaaaaaaaaaaagccgagttggtggcatgcacctgtagtcccaactacttgggaagctgaggcaggagaatcacttgaacccaggaggaggaggttgcagtgagccgagatcgcgccactgcactctagcctgggcaacagagggagactccatctcagaaagaaagaaaaaaaaaagaataccgttgccaggtcacactagttagaattccagtctggtttgtgtccacacccagggaagttattcaaaatatttaaccacagttcagcctggatcctaactaatcaaaacagtcatcagagggtggcaagagaagagactgggtgccgggggtgggtggaagataagcactggcttgaggtctcagagcagctgctgtctaccaatgaacacacaactatttaaatattttaataattgctacctctgttccagagccttcccatcaccctgtccaccctttagcttcttcttctttttttttttttttttcccatggacagccttctgagccagggcaggctcagaaactccctcccacttagattctgagtcccttgctgactccaccatctagtccctctctcagattccttgcttttctgccacttgctaattttttttttttttttagagatggagtcttgctctgtcgcccaagctggagtgtagtggcacgatctcagctcactgcaaactccgcctcctgggttctaccaattcttctgcctcagcctcccgagtagccaggattacaggcggactccaccacacccggctaattttttgtattttagtagagacggggtttcaccgtgttgcccaggctggttttgaattcctaagctcaggcaatccacccgcctcggcctcccaaagtgctaggattacaggcatcagccaccgcgcccagccactactttctacctctatttttgcttggaaaagagcccaggaggtctaattaattctaatttctgaaagaaaaacagaaatcaatgaacagggctttcatgagaaaggcctgttgggtaacagtgttcagtttctgccttataccagcaggtgctggaaaggggaacacaacagcctgtgagacacaggactgtagaggccttgccgagatgagggagttcacggcagggaggtgagacgtttctcactagcctctgaccatgttactaggaagcaggtgtccagtaacaggcatgcagctacaaatcttcaaaataccttggcaactgagagcttttattttatttattattattattattattatttgagacagagtcttgcagtgtcgcccaggctggagcatagtggcaggatcttggctcactgcaacctccgcctcctgggttcaagcaattctcgtgtctcagcctcccgagtagctgggattacaggcgtgtaccactacacccggctaatttttgtatttttagtagagacgaggtttcaccgtgttggccaggctagtcttgagctcctgatctcaagtgatcctgccttggtctcccaaagggctgggattacagatgtgagccaccgcacccaaccgagagcttttattttagaagcaaattcttatcaggattcttggttgttggctgggattaaaaccttgagaaactccttttttatttttatttttcgaggagtcttgctctgtcacccaggctggagtgtggtggtgcaatcttggctcactgcaacctccgcctcaccggttcaagcaattctcctgcctcagtctccctagtagctgggattacaggtgcgtgccactactcctggctaattttcgtatttttactagagatggggtttcaccatattggccaggctggtctcaaactcctgacctcgtgatctgcctgtcttggcctcccaaagtgctgggattacaggcgtgagccaccatgcctggccgagcaacttctttaaactcttttgagtctcattgtcatatattttgtatgcaaaaggagaaaacaagaatgacctaaagctgggctgatgcctgtaatctcaacactttgggaggccaaggcaggtaaattgcttgagctcaggagttaagaccaacctgggcaatgtggtgaaatcgcgtctctacaaataagacaaaaattagctgggtgtgctggtctcagtgagaggattgtttgagcccaggaggtcaaggctacagtgagccaagattgtgccattgcactgcagcctttgtgacagagcgagactctgtcttaaaaaagaataaaaataaaaaaataaaaattaagggccacacacagtggctcatgcctgtaatcccagcactttgggaggccgaggcgggtgaatcacttgaggccgggagttcgagaccatcctggccaacatggcaaaaccccatctctactaaaaatacaaaaaattagctggacatggtggggcacgcctgtaatcccagctacttgggtggctgaggcatgagaattgcctgaacccaggaggtcgaggttacagtgaaccaagatcacacaccactgtattccagcctgggtaacagagcaagattgtctcaaaaaaaaaaaaaaaaaaagagagagggagaaaaagaatgacccacctgaatcaaaaaggtgtgtgaagattaaaacaactctttattttgaaaactggtaattagaaaagaaagaattagacattttaccttcctttacagtgggaaatatatttagggtaactatatcatgtcagtggataagataaggctctattttatcaaagaatgccaggtaatcaatatagaaataatgttagaaatataatatcagcattttgtaagctttttgcaagcattttgcaaaccttcaagcaaggattgtccataggtttttaaatcatgaggtgacctacctattaggtcaaattaaaatttgaaagcctgaccatactaagtgttggtgaggatatggatgaaatgaaaccctcaagcattgctggtataaatgtaaaatggtacagccacattgggaaacagtttggcaatttcttaaaaagttaaacatacacttactttgtgacccaggcattctacttcttgatatttgctcaagagaaattaaagcatatgtccacacaaagacttgtacatgaatgttcatagcagctttacttgtaatagccaaaaaaaaaaaaaaaaaaaaagggaatcaactcaaatatcttttagtaggtaaatggataatatggcatatttgggatgctacttagcaataaaaggaatgaactactattatatgcaacaacattgattaatcttaaaatatgctgagtgaaagaagtcagacaaaaaaagtgcatgattccatttacataaaactctagaaatgcaaactaatatatagtgacaggaaacagattagtggctatttgaggatgtggagtgggaggaacagaagcaaggaattgttattattatttatttatttatttattttttgaggtagagtttcactcttgttgcccaggctggagtgcaatggcacaatcttggcacactgcaacctccgcctcctgggttcaagtgattcccctgcctcaacctcccaagtagctgggattacaggcgcctgccaccacacctggctactttttgtatttttagtagagacggggtttcaccatcttggccagactcagctgaagcaaagaattattaaggggcaagagaaaactattgggggagatggaatacacacacacacacacacacacacacacacacacagagtcatgcattgcttaaggacggaggtacattctgagaaatgcattgtcagatgatttcctcattgtgggaacatcatagaatgcacttacacaggccgggcgtggtggcttacacctgtaattccactactttgggaggccaaggcgggcagattatctgagatcaggagtttgagaccagcctggccaatatggcgaaaccccgtctctactaaaaatacaaaaattagccaggtatggtggcgagtgcctgtaattccagctacccaggaggctgaggcaggggaatcgctggaacctgggggacagaggctgcagtgagctgagattgtgccactgcactcagcctgggcgacagagcaagactctgtctcaaaaaaaaaaaaaaaaaaaagaatgtacttacacaaacctagatggtatagcctatcacatacctagactatatggtatagcctattcctcctaggctacaaacctatgcagcatgttacttactgaatactacaggaaattttaacacaatggtatttgtgtatctagacatattttaacacaggagaggtacacaaaaacacagtaaaaaagattttaaaattgcacacttctgtagggcatgtgtcaggaacggggcttgcaggactggaagttgctctgggtgagtcaatgagtgagtgtgaagacctaggacactactgcagactttataaacactgtacacttaggctacactagatttatttatttatttttctttcttcagtaataagttaaccttaccttactataactttttttttttttttttttactttttataccttttttttttctttttttaagagacagggtcttactctgttgcccaggctggaaagcagtggcgcaatcatagctcactgcagcctcgaacccttggggtcaagggatcctcccacctcagcttcctgagtagctgggactacagcatgtaccaacaggccaagctaatttttttttgttttgtttttgtagagatggggtctccctgtgttgcccaggctggtctcaaactcctagactcaagccattctcctgcctcggtctctcaaagtgctggaattacaggaatgagccatagcgccaggcatgctacttttataagtaggtttgtttacaccagcatcacacaaacacatgagtaaggcattgtgctacaacattgcaatgaccatgacatcactaggtgataggaatttttcaactcctttataacctcatgggagaaaccaccatcttttttttttttttttgagatggacctttgctcttttgctcaggcttaagtgaagtggcatgatctcagctcactgcaacctccccctcccaggttcaaatgattctcctgcctcagcctctgaagtagctgggattataggtgcctgctatcatgcccggctaatttttgcatttttagtagagacggggtttcgccatattggccaggctggtcttgaactcctgacctcaggtgacccaccggcctcggcctcccaaagggctgggattacaggcatgagccaccacgcccaaccatcttttgtgtgtttgtgtgtgtgtgtggtttttttttttttttttgagacagagtctcactgtgtcacctaggctacagtgcagtggtgcaatctcggctcactccaacctccgcctcctggattcaagtgattctcctgcctcaacctctggagtagctgggattacaggtatgtgccaccatgcccgtctaatttttttgtatttttagtggagatggagtttcaccatgttggccaggctggtcttgaattcctgacctcaggtaaatcatccgcctcggcctcccaaagtgctgggatcacaggcgtgggccatcacacccgtccagaccaccatcttatatgtggcctgtctttgactgaaatgttgtcacgcagtgcatgcctgtatgtcaaaacttatcaaattgtacctgtgatcgtccttttgaagtgtcaatttagctaggctatagtgccagttattcagccaaattaatctaggtgttgctgtgacagtcttttgtagctgtaaattccataatcagtcgactttcagtaagaaagattatccaattgtctgagtgggtctgattcaattagttgaaaggcttcaaaaacagagttgaaagccatttgtggtgactcatgcctataaccccatcactttgggaggctgaggctagtggatcacttgagctcagaagtttgagaccagtctgggcaacatggtgaagccccatttctacaaaaaatacaaaaattagccaggcatgatggcacacacctgtagtcccagctactcaggaagttgaggtgggaggattgcttgagcccaggaggtcaaggctgcagtgagctgtgattgtgctactgcattccagccagggcaacagtgagaccctgtctcaaaaaaaaaaaaaaaggaagagtcagagagatgcaacattgctgacttttaagatggaggaaggggccatgagccaaggaatgtgggcaacctctaagagcaagaaaaagcaagaaatacattctgcctcagagcctcagcatagaaatgcagccctgctgacaccttgatttgaacccaataagatccgtgttgaacttctaatcctatagaactgtaagataataaatttgtactgttttaaaccactgtttgtgataatttgttacatcagcaatataaaattatgaatacagtacccttttaaaatgtgccattctttatatgtcagttattattattattatagtattatttttaagacagggtcttgctgtcacccaggctggagtgcagtggcacgatcacagcttattgcagcctcaaactcctgggctcaggcgatcctccctcagcctcctgagtagctgggactacagccatgcaccatcacacctggctaatttagagatgggggtctcggccgggcgcagtggctcacacctgtaatcccagcactttgggaggctgaggcgggtggatcacctgaggtcgcgagttcgagactagcctgaccaacatggagaaaccctgtctgtacttaaaatacaaaattagccgggcgtggtggcgggtgcctgtaatcccagctactcgggaggctgaggcaggagaatcacttgaacctgggaggcagaggttgtggtgagccgagattgcgccattgcactccagcctgggcaacaagagcaaaactccatctcaaaaaaaaaaaaaagagagagatgggggtctcactatgttacccaggctggtgtgtgtcaattatactacaataaagctgctaaaaattaaatgaagctgggcaatgatacatgcctgtggttctagttactcaggaggatcacttgagcctgggagttcaagtcaagcctgggcaataaagcgagaactggtctgtcaaaaaaaataaaataaaacaaaataaaataaatgaatggttaatagagaactagacatacaaacagtgccagttaataccacattgtttcacttctactttcaaattgagggtgaagtggatgcaactgtatagtgggaaacacactattgttcccctaagtgcagttcaattgtagcatcagtaatggctctagaccaagtttatgcaacctgcccagaatggctttgaatgcgacccaaacttgaaaactttcttaaaacattatgagatatttttgtgtgtgatttttattttagctcatcagctatcattagggtattttttgtgtggcccaagacaattcttctaattccagtgtggcccagggaagccaaaagtttggacacccctgcgagtctagacattaggtatcttctgatgatatatatgaatagacaacaccactgagactacagtctagccataatgtttaaattgaatctcttttacctttagatataacctttaattttctttttttttttttttttgagacggagtctcgctctctcgcccaggctggagtgcagtggcaccatctcggctcactgcaacctccatctctcaggttcaagaaattctctgccttagcctcctgagtagctgggattacaggcacctgccaccatgcccggctaattttttttgtatttttagtagagacggggtttcaccatcttggccaggctggtcttgaactcctgaccttgtgatctgcccacctcggcctcccaaagtgctgggattacaggcgtgagccatcacgcatggcccataacgtttaattttcagtaaacatagggtataaaataaatatttgtcacaagtaagcagacagacaaatccagaaggtgaaacattattttgcagggcagctggcctggtcttttggaaagtcaatatcatgacaaaaggattggaagagactaaaggccatgacaatcagatcaacgagtagtcctgcatcaatactggtttcaggtcgggcgcagtagctcatgcctgtaattctggcactttaggaggctgaggtgaacggatcacctgaggtcaggagttccagaccagcctggccgacatggtgaaaccttgtctctactaaagataccaaaattagctgggcatggtggcgcaagcctgtagccccagctactcgggaggctgaggcaggagacttgcttgaacccgggcggcgatggttgcagtgagccaagattgtgccactgcactccagcctgggcaacagagagactccgtctcaacaacaacaacaaaaactgatttcaacagatttgatctaaaggacattttggggccgggcacggtggctcacgcctgtaatccccccaactttgggaggccaaggcgggctgatcacaagatcaggagatcgagatcatcctggctaacgtggtgagatgccgtctctactaaaaaagaaaaaaaaatagcctggtgtggtggcgggcgcctgtagtcccagctactcaggaggctgaggcaggagaatggcgtgaacctgggaggcagagcttgcagtgagccaacattgcgctactgcactccaaccagcctgagcgacagagcgagactccgtctcaaacaacaaaacaaaacaaaacaaaacaaaacaaaaaacaaacaaaatactactactactactaataaaggacattttgggggaaatttgaatatggtatagatattacacaaagtgaaagtttacaagagtgaaaagagagagtttgttgaccaaaaaagaaaggttacaaaatagtacaaagcttatgattttatttgggttaaaaaaatgtgcactgaaaaaggtccaggccaggagtggtggctcatatctgtaatccccacactttgggaggctgaggtaggtggatcacttgaagttaggagttcgagaccagcctggccaatattggtgaaaccccgtctctaccaaaaaatacaaaaattagccgggtgtggtggcaggcacctgtaatcctagaaactcgggaggctgaggtaggagaatcacttgaacctcgggaggcagaggttgcaatcagctgagatcatgccactgcactccagcctggtgacagagtgagattgcatctcaaaagaaagaaaagaggtccagagtgacatatgctaagctgttagcagtggaatctttggtaatgtgacaatgatattttcttatttttgcctgcttggttttttctaactttttatcctgaacatgcatgattttataataataaaacattattttggccaggcacagtggctcacgcctgtaatcccagcactttgggagtccgaggtggggtggatcacctgagctgaggagtttgagaccagcctgaccaacatggtgaaaccccatctctactaaaaacacaaaaattagccacacgtggtggcgcatgcttgtaatcgcagctactcgggaggttgaggcagggcaatcacttgaatccaggaggcagaggttgcagtgagccgagattgcgccactgcaccccagcctgggtgacagagtgagactctgtctcaaaaaaacaaaataaaacaaaacaaaaaaactccattatttttaaaagcatattagaattacatgagctaacagataacacaaatacagtattttgactacattaagcatacctatggctgctcccccgtgtctagcaggctagtaataactaacatttagtgagttcttacaaggtgtcccgcacacttctaattgctttaactgtattcattcagaggtgttcaaactttttgatggtgactcacaatcaaaaatacagtttacaggccgggtgcggtggctcacgcctgtaatcccagcactttcggaggctgaggcgggtggatcacgaggtcaggctaacatggtgaaaccccatctctactaaaaatacaaaaaattagccgggcaggcgcttgtagtcccagctactcaggagtctgaggcaggagaatggcatgaacccgggaggcggagcttgcagtgagccgagatggcgccactgcgctccagcctgggcgacagagcgaggctccgtctcaaaaaaaaaaaaaaagaacagtttacagagcaatgcagtacactcatgcatacacacatactcatatactttcttttcttttctttttttgagatagggtctggctctgtcacccaggccacggtgcagtggtgcaatcttggctcactgcagcctcaacttgccaggctcaagccatcctcccacctcaccctcctgagtagccaggactacaggtgcacaccaccacacctggctgattttcatatttttttgtagagatggggttttgctgtgttgcccaggagggtttcgaactcctgggatcaagcgatccgcccaccttggcctcccaagtgctgagattacagttgtgggctactgtgcccagcctgcacatactttcataccatacacaacagaaataaaagctttcagaaaataattacctgccctgactatgtaacacattctgaattcttgtattttattatattccatccaattctattttattttttaaaaattctggttaatctgttaaatcaatcttacgacccactaatgggttttgacctgcagtttggaaaactcttttaaaactaatttaatacatttacacacagacacatacaaacccctatgaggtaagaactattattgcaccaattttttacaagaggaagttctggcacgaagaggttaaataacttgcctaagcacacactgctaaggatgaggtaggagaaacggggttccaacccagagggccaggtccaaagtctgtcctttgaaccgttgtatcacaggggctctctcatcccatcaggcacatggtgataaataaatatctgcttgggccaggtgcggtggctcatgcctgtaatctcagcacattgggaggcctaggtgggtggatcacctgaggtcaggagttcgagaccagcctagccgacatagtgaaaccctgtctctattaaaaaatacaaaaaattagctgggtgtggtgacggacacctgtaaccccagctactcaggaggctgaggcaggagaatcacttgaacccgggaggcggaggttgcagtgagccgagatggcaccattgcactccagtctgggcaacaagagcgaaactccatctcaaaaataaacaaataaataaatatctgctgatacatatttgacccttcaaaggggtgatgcaagtaatattttaacagagagctctgttaaatttattggagtgttcaagttacagcagatttagggagcagaagtcgtattttctcactcttctatttcatgatgaacagtactactgtgcaaagagacttcaaagtcagataatactgggttcaaatactggctccacaccagggacagatccagattctgtggggactaaagcttatgcaattttgaaagctcctcttaagaagataggccaggcatggtggctcacgtctgtaattccaacactttgggagggtgaggcgggcggatcacttgagcttgggagtttgagaccagcctggtcaatatggtgaaacactgtctctactaaaaatacaaaaattagccgggtgtagtggcgcatgcctgtaatcctagctacttgggaagctgaggcaggataatcactttaacccaggaggcagaggttgcagtgagccgagatggcaccactgcactccagcctgggcagcagagcgagaccctgtctcaaaagacaaaaacaacaaaaaacaaaatgatggatacagaattaggtatagggccttgaatagagcctatctaaagaagagtgcctgaggcttgagcttcattcgctttctggttaatctgtgtctgtctgccattcatttctgacactcagcttctaatctctgaaataagggcaaaaattcctatttctcatggttgtcagaagatcaattgagacaacctaactgacgggcctagcacaatgttcatggagcaggcactcaatacatgattgttggtaataataataatgataataaataattaaacacttcaattagaagccagttttttttgtttgtttgtttgttttttgttttttttttgagatggagtatcgctctgttgcccaggctggagtgcagtggcgcgatctctgctcacttcaagctccacctcctgggttcacgccattctcctgcctcagcctcccgagtagctgggactgcaggtgcctgccaccatgcctggctaatttttttgtatttttagcagagacagggtttcaccatgttgggtaggatggtctcgaactcctgaccttgtgatctgtccgcctcggcctcccaaagtgctgggattacaggcgtgagccactgcacctggccctgtttatttgtttttgagacggagtttcagtcttgttgcccaggctggttgcagtgacacgatcttggctcactgcaacctccgcctcccaggatcaagcaattctcctggctcagcctcctgagtagctgggattacaggcacccatcaccatacccagctaatttttgtatttttagtagagatggggtttcatcatgttggccagtctggtcgggaactcctgccctcaggtcatccgcccacctcggcatcccaaagtgctgggattacagacatgagccaccacacccagccagaagccagtttttaatcatggttttgaaataagaacataatatggggaaaaattattttgtcagttcatttacacttcagctctgcaactagctctctctagaggctaattattttggtttatccaaagctgcctctccagaaagaagactaagtgagaacaagaaaatagagcatccaaaaacaaagacagccaggcgcagtgggtatggtggctcacgtctgtaatcccatcactttgggaggcggaggtgggaggatcacctgaggtcaggagttcgagaccagcctggccaacatggtgaaaccctgtctctactaaaaatataaaaattatgccgagctcggtggctcatgcctgtaatcccagcactttgggaggccgagacgggcagatcatgaggtcaggagatcgagaccagcctggccaacatggtgaaaccccatctctactaaaaatacaaaaattagccgggcatggtggtgggctcccataatcccagctactcgggaggctgaggcaggagaattgcttgaacccaagaggcagaggttgcagtgagccgagatcctgccactgtgctccagcctgggcaacagggagagattccgtctcaaaaaaaaaaaaaaaaagaaaaaggaaaaaagaaaaaaaccccacaaaaacaaaaattagtcgggcatggtggtgggcgcctacagtcccagctacttggctgaggcaggagaatcttttgaacccaggagccatggttgcaccactgctgtccagcctgggtgacaagagcaaaactgtctcaaaaaacaaaaaaacaaacaaaaaaacaaaggcagatagagtattatgggagagagtcatttgcaggagcctcagaaggccagatttctaccatgtggatgtcaataagaaaagatatttaaccatttcacacctttctagtctttctcagttagcctaaggaaggcagatttcaaggtgcattttggagagaaggcagctggatagacagtatcctgcagcttcaagttcttagtcacatgcaggccgactcttggcagttgttctgctgtgtcctgagggattatctaaaagcaagaggcccctggggtcggttccttccccctagagaaccaatagtatttgcagaaaagcttccacttacattctcttcccagggtttgagtttcttaaaaaggaggtatcttaacacaggtttcaaagaaaacatgataggagtccttccctaccttgtggcttctcttggttatctgtgggctttttgtttagagtgactgggttttgtttgggtaagaaacaataaatggggtatgtggtggagaaaggccgaaagatggtaggaggcaattagattaattaggtaattaaagggagacctgtgggtgattattaactttgttgctagctacatttaggcatcagtacatgtcttatttttgttaatatttacaaatgactcataccttttgctactcaacaatcacaaaatattcacatttctcttcagaaattcctctttgtaatactgaagatgaaacagaccttctttttctttttcttttcatttatttatttatttattttgagacagagtcttgctctgtcacccaggctggaatgcagtggcacaatctcggctcactgcaatgtctgcctctggggttcaagcaattctcctgcctcagcctcctgagtagttgggattacaggcacctgccaccacacctagctaatttttgtatttgtagtagagatgggttttcaccatgttggccaggctgttgtctaactcctggcctcatgatctgcccgcttcagcctcccaaagtgctgggattacaggcataagccaccatgcctggccaagacttcctgtttctaatttctggcaaaatgatcctttctcctcctgctatacctatttgtctacctcttaagaacatggggcagttctggatttgtctgttgtctcaaagcccattttccctagattctcaatatccacagtacatgcactgtgtcatgatgctattttagaatattaactatgggtttcatccccaggattttcttttctccacggctttcccccagtgaactaaattgtctcagcttaggacaacatgaacccaaagaggaaggagacttttgttggtttttgagccatgatcttgtgggaaagagaaaggactcatgcacaaagacaacatttgaggcttgcaggaatctacctccagatgagatcaggtcctcggactgaggggaacgtgactggagaattcagaagcttgtggctcccaggccctgtgctgtgcccccgcaataactgcaccagggaattaggaatggggatgagaggaattccctgaaaactgttttgcgtgttcagtggttgttaggttaaatcttgtacaaggagggtgtgtggccactatcaggccacctgggggattgctgctttaataatttacaattatgactttggacaatgtctggaaaaacacagggaaatttgcatgcaaatagtccattaacaaagaaacagggaaaaaatgaaaatttgtgagaatgagggggaacattcagatcactttaatctagtgtgtgtgaagattgttctcgttcagtacatttcagctcagccagtataacagatgatatgcaggagcagaaagcctccctcccctatgtcttgccatcagcgaagtccttggaaattaaatacaacccaggggaaaatctgggggtatagaatgaccctagcacatctaattgcaatctgtgataattgctgctctggcaaagcccaggaaaccacgcaaaccagtccagggggacagggaagggctccctgagcagagacctgaagggtgagttagagataactagatgtttgtgaaggtagaaagaaaatccagtccctgggctggcaattacctggtgagccactcagaaccattttaaaaacattgtcatgaggaagatgatgagtaaacagagaacttcaggaagggactggtccatggtggcaaatgctgcagagaggccaagcaaaataaagaccaagaagagtccattgaaataccatggaggacattggtgctgacgttgtcaagtacagctggagcaagttgtgggaagaaagcaaaaaaaatttttttttcccaagatggagtcttgctttgtcacccaggctggagtgcaggggtacaatctccgctcactacaacctccgcctcctgggttcgagcaattcacctggctcagcctcccgagtagctgggattacaggtgtgcaccaccatgcccagctaatttttgtacttttagtagagacaagatttcaccatgttggccaggctggtctcgaactcctgacctcgtgatctgcctcccttggcctcccaaagtgctgggattacaggtgtgagcaactgtgcctggccagaagtcaaaattgcaggaggtcgagacacatggaaggtgtagaaataagagatggtaaatggagaaaactcttcccagaaacttggctgtgaaagaagtggtgaatggcagtagtgaaagctggacttgaggtcgaaggaagaggcttttccgatagggagtctttgcacacgtacaaacatcaggaggaagcagcctgtccagagggaaggtaaaagacaggatggagactcctaaagagcgaggaagtgacacaagccatagaccaggtaggagtgtggcctaaaagggaggagaaaagaatgagagtggatgcagatgcctgtagacttggtggcagaagagggagctgtctacagcctctactttctctgtgacatggtaggatctgctaactggggaggggcatcaggagtgtggatgggttggaagggttggcaaaaccaaagaactgaagaaggcagaaaggatttgaactagtcattacagtggttacaaattccaggtgtataagaaaaatgtcatcttcctatacttttccagtgtttctatttgaagctctcattcctttcgatagtcagtttcatctcagtcaattcatgaagagaggacaggtaggcagctgggtacatgggtctggtagctcagaagaggagtatgggctgaaaatgtcaatttgggattcatcagaatagtttgtcttcttgagtcttgggaaatattgactcagctcagggagatggaagaggctgaagagccaaacttgggaaaaccccaacatttaaaggcccttggaagaagaagaatctgtgaagagtcagaaggtaggaggaaaagcaggagagtgccatgtcccagaactaagggaagtgagtattttaagtaagtggaaataaaacgtcaactaggattagaattataaaatatccactgggccaggtgtggtggcccatgcctgtaatcccagcactttgggaggcagaagtgggaggattgcttaaggtcaaaatttgagaccagcttgggcaacatagtgagaccctgtctttacaaaaaattaaaaaaaaaattaaccaggcacggtggtagtgcctgtagtcccagctactcaggaggctaaggcaggaagattacttgatcctcaggaggtcgaggctgcagtgagtgatgatagtgccactgctctccagcatgggtgacagagtgataccttgtctctaaaaaagtaataataataggtcaggagcgatggctcatgcctgtaatcccagcactttgggaggccaaggtgggtagatcacctgaggtcaggagttcgagacaagcttggccaacatggtaaaatcccatctctactaaaaatacaaaaattagccaggtgtggtggcacacggctgtaatcccagctactcgggaggctgaagcagaagaatcgcttgaacgtgggagacagtggttgcagtgagccagcatcgtgccactgcactccagcctgggcaacagagtgagactctgtctcaaataaatagacaaataatagtaatagtaattaattagtaaaatatctgttggatatcctgtattcttcttcctttgggttgaggcacaaagaacagcgagaagatatagtcatgacaatagtcataatatctactatttattgagtacgtaactcctgattatgtcattcaactagccaatcaatcaaccacatattaactgagaacacagcatgtgccaaacactaacgacagtgtttcctctcatggtgctcattagagcttctcaacttttttcacggtcacacatgaaaaatcataccctttgtacatccccagaggtaaatgaatgatgaggctactcaaggctgcctgagccccttggctgccctgagggctgggagatcaatatctcatcatccccggcctctgatcaaaattctttctttcaatatctattctgatattgaatgtgactgtggagaagttttgagggcagaggtgaggaccagcatagggtaaaagctgctagtagtcttcagtgagttaagtaagaaccttggagaatggggctggtttcaaaagcttggagccgaaaagaaaaacagaaaagcagcattagattgttccactttcagtaatgaggagagaaagagagacggaagctcattctaaaaatcaggaaatggaaaaagttactctaaaaattaggaagattaaactgaggatctttaactaatctgagattcaatcctaaggtttcagaggtgaaaacacttgtgagtttctgttggcacatctgtttgtagacactgatgcctgctcattgtgcactgtgcacagatggaagcaccctgagagtatcttgtttcctgcaatagagtgcaactgaaaataaggctgcaggaattaaatcagattgtcaatggaatagttgagttcactatgaaaaacagccccatttagataaaattcattttgatctatctgtcaatggaaaattatgaagcccttaaaaaaaaaaagaaggggactgggctcagtggctcacacctgtaatcccagcactttgggaggccgaggcaggcggatcacgaggtcaggagttcaagaccagcttggccaacatggtgaaaccctgtctctgctaaaactacaaaaattagctgagcattggccaggcgcggtggctcacgcctgtaatcccagcactttgggaggccaaggcgggcagattacgaggtcaggagatcgagaccatcctagataacacggtgaaaccctgtctctactaaaaatccaaaaaattagccgggcgtggtggcaggtgcctgtagtcccagctactcgggaggctgagacaggagaactgcttgaactgggacccaggaggcggaggttgcagtgagccaagatcacgccactgcactaggctacagagcaagactccgcctcaaaaaaaaaaaaaaaaaaggactgaggcatttctatttctcctgatgatctggaaggctttccaaagtatatttttcagcaaaggataataaggtgcaaaactgtatgtttagagtgttatttaaaaaaatatatatgtacagttatgtttgcatatgcaaagaatatggaaggatgcagaagaaactggtaagacgtgacccatggggaagggagctcagtggctggggatcaaggtggaaggttttcattgtatactcttttgaattttgtaccaggtattatttatttagtgaaaaaatatatgcaaatacaggaaaaaaaacttttgatgaatcatttttgcaaggttcatttttaacgcaaacagacactccctaatttgctttggaaatgttgacatttgtgtactggattttcttaaagcatgaaataccaatgtctgcaaaccacaccccgggtgcttaaatttgaggtcactgacaaaaccagccatacaagtgtgactttccaaaaagctaaacattgttgagagaagcagagtgagtgtcaggggcttgatgtatccccagcatctgagaatctcagagagaagggactgtggagagttggtgcaacctccttttttttttttttcgaaatggagtctccctctgtcacccagcctggagtgcagtggcgcgatctcggctcactgcaagctccgcctcctgggttcaagtgatactcctgcctcagcctcctgagtagctgggattacaggcacatgccaccatgcccggctaattttttgtatttttagtagagacggggtttcaccgtgttacccaggatggtcttgatctcctgacctcgtgatccgcccgccttggcctcctaaagtgctgggattataggcgtgggccacagctcaaggcctgcaatctcctttcttcagaaatcaggaaatgaggctccaaaggggaagagacttgcctaataaaaagattgtgccattttgtgtaaaaaaaatgagaaacataagtctctgtatctatatttgcttccaattgcatgaagaactccagaaggatacacaaaaacaaatgggaaactgtacagagagggaaggggaacaatgaaaggatgcgagacagaggtagaaatgagattttcacttttaatcttttataatccttgatctattctttaaaagaatatgaaaacattaaaaagagagatggaccatgacatctctatgacccacagtgcagttttcaaggatgacatcataagactgtgttcagagacaaattaagaatcctgtgttgggagcggtggctcacgtctgtaatcccaacactttgggaggctgaggcgggtggatcacctgacatcagaagttgatcagcctggccaacatggtgaaaccctgtctctactaaaaatacaaaaaattagccggctgtagtggcacacgcctgtaatcccagctacttaggaagctgaggcatgagacttgcttgaacccaggaggcagaggttgcagtgagctgagattgtgccattgcactccagcctgggcaacaagagggagactgtcacaaaaaaaaaaaaaaaaaaaaaatccagtgttgaaatcacagatcaaattctactgcttcaaataccaatgactatctagaatattttgtcatattgaagttttgtcttattgagatttgtttgagataatacaggccatcagctaggcttaaatctcatttttaattataggcaaatttgtcaaaattgtgcgataacagcccattgctagtctgtggatccagtcataccaggaggtaccacagggcaggagaaaaatcagtggacaggaagtcagggaacctgattctaaccaagttttgtaacttaattaacgttgtaattttgcgcaacttaattcctctccttagaccagtttcaacatctgtaaaataaaaggactacatgaggtgatctctaggttccctcttagctctgatatgattggattctgaaaccattattagcaatttagaatgaaaaggaaatttacgaggtcatttttgacatccaggagacggtaacaggcagttgggtctccttctgctcctttgacttgtaactacatgagaactagcaggtgatcttcttggcccttttctcttgagcccacaccctgatggtgattatctagatccaggttcctgaaagaatgagtttagggaaatgttaatcattctccacaaagcatctcaaatacatttgggaaatcctgtataataagtgttcctgatggaaggtcagaatgcaattaaaggtcctgagaagtcctgcaacaaagaaacatgtaacttttacctaacccagcactctgcacatttatggatataaaacactttggagagagagagagagagagagagagagagagatagagagagagagagagagagagagagagtgtgtgtgtgtgtgtgtgtgtgtgtgtgtgctgttacctctatttggaacaaatgggatccaaatgcttccatttttaggaaatttatgagatcagttatcagatggcagttaggacaattctggggcctctgcaaatatggaagatttagcacgttcctaagggagcctgagaatcttgtgattcgtgcagctttccaccccaccagtttttttcaacagtgggagcctcagaaactccgttttacagggaggttcccatctaagcacaattaggtcaatggacatcttatccctttcacttctggctttcagaatttttcagaactataatttttattcagaaattataattctctttccttcccccctaaggccttcagtctacatttgcatatatatatatgtgtgtgtgtatatatacttatatgtgtgtgtgtgtgtgtgtgtgtgtgtgtgtgtgtgtgtgtatatgcatatattccctccctcctaatatctgcaatccccagtgggtaggtgggaaaagttacgtgtcatttgggcactggacctgacacacttcacatcctttattagttttcgagatttttcaccctcaattcccaaagaaacattgactcatcacaacatacacacacagtcatttggaaaaaattaatttaaaatgtgtatctcttaagacttctcaattattttcgtcccatttttaagcattcagtttaaagaaagtaaaaaaatctctaagcaggcacaaacatatagtcaaagctctcattgttttctgggttgctatatctccaagtctgaaaccaaggaacaacatgaaatgctatttttgcatttagtgctttctttactcagaggtttccaggcttgtagttcaagcatcaggataaaaatggccagccagacagctgttgcaggcccagctaattatactagtgcttccctgaagggcttgagctgcaaataaattctttttctcctggtcaggcttggtcattggcagttactctggagtatatacactgcctgggctcagcgctctccctcctagaacagtgtttcctagaacagtgggaaataaatggaggtgaggaggcagctggcttggggtggaggatgtgcccactgactctcccatccaccctgtgggatttttttttttaattaatttagttttttcagacggaatctcgctccgtcgcccaggctggagtgctgtggcgcgatctcggttcactgcaacctccgcctcccgggttcaagcaattctcctgcctcagccttccgcacagctgggactacaggtgccagccaccacgcccagctaattttttttgtatttttagtagagacggagtttcaccgtgttagccaggatggtctcgatctcctgacctcgtgatccacccatctcggtcttccaaagtgctgggattacaggtgtgagccaccgcacctggccccagttggttttttttttttaatactttgtctaccctagcgcaattccctgatgggttgtctttttttttttttttcttttttttgagacagggtcttactttgtcacccagggtggagtgcactggtgcaatctcagctcactgcagccctgacctcccgggctcaagccatcctcccacctcagcccccaaagtagctgggagtacaggcgtgcaccaccacgcccagctaattttttttttttttttttgagatggagtctagctctgtcacccaggctggagtgcagtggcgcaatctcagctcattgcagcctctgcctcctgggttcaagcaattctcctgcctcagcctcccaagtagctgggattacagtcgtgtgtcaccatgcccggctaatttttgtatttttagtagaggcagggtttcactatgttggccaggctggtctcgaactcctaacgtcaagtgatctgcccgcctcagcctcctaaagtgctggaattacaggcttgagccaccaccctcatcctttttttttttttttttttggcatttttcatagagatgggctttcgccaggttgcccaggctggtctcgaactcctgagctctagcgatcctcccgccttggcctcccaaagtgctaggattacaggtgtaagccaccttgcccagatggtgggttgtcttaatttacttaggagtacctgctgaaagttatgtttgataaataaagggagggccatgaaattaagtaggaggtggggacactaaagagaaaacaaaacaaaacaaaacatgattggggagggattatttaggaggacaaagtgtggttaatttcatgtgtcaaatttgttaggctatggtgcccaattgttaggtcaaacgctagtgtagatgtgaaggtatattttatatgtgattaacatttataatcatttgactttatttaattttttttttgagacggagtcttgctctgtcgcccagcttagaatgatctctgctcactgcaacctccgcccctgggtttcaagcaattctcctacctcagcctcctgagtagctgggattacaggcatgcgccaccacatctggctaatttttgtatttttagtagagacagggttttgccatgttggccagggtgatctcgaactcctgacctcaagtgatctgcccacctcggcctcccaaaatgctgggattacaggcgtgagccaccgcacctgtcctcatttgaacttaaattaagcagattacccgccataatgtgggtgggcctcaccccatcagttgaaggccttaagagcaaaaactgaggtttcctgaggaagaagaaattctatctcaagatggcaacatagaaatcccagctgagtttctagactgctggcctaccctgtggatttcagacttaaaactgcaacatcgactcttttcagtttccagactgcccggcaaatttcagactttccaccccccacagttgcatgagccaattccttaaaacaaatctctgtatctctatatattctctacataatttctatatagccctgtgattctgtttctctggagaaccctgactaatacagagggctccagggaggatgaccctggagaaaaaaatggagctgataatgaattgtgagtttgaccataacctgagaacattttttcagttttgacaaagaggttgcagagaagtcagtgatagctatttaaaaatgaaattatgtaggagaaaaaactgaagctattgttaactccagggaaaacaaaaagtggtacatgaagataatctgacacaattgtaaacactgactattgatttaaaagggatggcagtggtagaagaagttgtggtataagtgagttaaatcctcatcttaattgaggaaattaaaaagattaaaaaataaaaacttaagaaatagcaatgttatttcaaaacaaggagataaatggcagaagaacaactaaaagcttgtaaagcatctgcttctgctgagtgaatctggtgggagtgggtggggcaaggaattgctgtttatcattatgagtcttgtagatcatttaatctttttcaagtctgtacatgtattactttgataaaaataaaaacttaattaaaaggttatggggtccagtgtagaaaatttggaaagtacagaaaagtataaagaagaaaatataaccactcacaattcctccactcagagaaagccactgggtatattttagaggaacaagattaaatgaatttgtgagattaaatagagcttgaagatttaaaacatcacaatttagatataaatgaacaaataacagtataataccgcatatgtgtagatataattacatacaatataagcatatatactatgattccatgcatttatatgtgtattagaaagtagtctcagctggacacagtggctcatgcctgtaatcccagcactttcagaggccaaggtgggaggattacttgaatccaggagcctagcatgggcatcatagggagaccccatctcttcaaaaaatttaaaaattagccaggtgcggcagtgcatgtctgtagaccagctacttggaaagctgaggcaggaggatcacttgagcctgggaggttgagcctgcagtgagccatgactgtgtcactgcactccagcctgggcaacccagtgagactcttttaaaatacacacacacggccgggcacggtggctcacgcctgtaatcccagcactttgggaggctgaggcgggtggatcatttgaggtcaggagtttgaaaccagcctggccaatatggcgaaatcccctctctactaaaactgcaaaaattagccaagcatagtggtgcacgcctgtaatcccagctactcgggaggctgaggtaggagaatctcttgaagccgggaggtggaggttgcagtgacccaagatcacatcagtgcactccagcctgggtgacagagcgagattccgtctcaaaaacaaaacaaaacaaaacaaaacacacacactcatgcacactagtctcaaggccaggtgcagtggctcacacctgtaatcccagcactttgggaagctgaggcaggcagattgcttgagctcaggaggtcaaggctgcagtgagctgttatcgcaccactgcactatagcctaggtgacagagcgagaccctgtctcagaaagaaaaaaaaaaagatagtctggaggaatacccaccaaaatattacttggtggttatgttaccagggtgggaccaggctaaggcaagcaaggttcctaggacactcaatgtaaggctgccttcactctcagggttctgcaaatgcaggagtagaacctgaaagtgagtgtcttcttaaatgttatgccctcacatgcttcaccctagtcttggccttggttgggacctacggctgctggattatgggcactttctccttcttactttttacttggatatatgttcaagttccttgctactctaagtgtagtacatggaccagcagtgatagcatcatctgggggcttgtttgaaatgcagtatctcagctctgccccagactttagccagatctgctctttaaccaaatcccaggagatttatgtgcatgttacagtttgagaagcactgggctagcaggcacccaagcatagttcctgtcttcttatgaaaggaatattcagaggcaattgatgccactgccccaataggtggggcacacactgctaaggggtaagatgcctgtttttaaaaagagttgtggttctttccaagtggctcagttttggctggtgaagcaatcataggtcagcttgataaaggagaggcaggtgattcccttggaacaaagaacgggtgagttgagcaagtgagcaagacactcaccttgggcacaaaaaactcagtaatcaagataaagaccattttaatgcaaggtttttcaaaaatcaaaattaatgcaaaaaatccacgatgaataaaacatcgaaatttaaaataaagctcgactcactgtgtaaggtggttcatgcctgtaatcccagcacattgggaggctgaggtaggaggatcacctgagaacaggagtttgagaccagcctgggcaacatagtgaggcctgactctacaaaaaactagccgatcaaggtcgtacgcacctttgttcccagctactcacaaggctgaggtaggaggattgcttgagcccaggagttcgaggctgcagtgagctatgattgtgccgctgctctccagcctgggtgaccccagcctgggtgaccccgtctcaaaaaacaaacaaacaaacaaacaaacacggggatgtgacaacatcaaaattatgcaggtcagatctttctaatttccaactcacagtctgggatgggtataagtgatttcagttttggtgataggaaagggattcagatgctcaagtggccaaaaagaatgacaaacgtccattatagttattggaatcttggtaaaatgtcaccttttgggttcctgcagaaagagcagcataatttggctgggctgttttgaggaaaactttagtgcttatttgagttgtggtacagataaattaatataggaggaaagggccgggtgcggtggctcacgcctgtaatcccagcactttgggaggcggaggtgggcagatcacgaggtcaagagatagacagcatcctggccaacatggtgaaaccccatctctagtaaaaatacaaaaaaaaaaggccgggcgcggtggctcacgccggtaatcccagcactttgggaggccgaggcgggcagatcacaaagtcaggagatcgagaccatcctggctaacatggtgaaaccccgtctctactaaaaatacaaaaaattagccgggcttggtggcgggcgcctgtagtcccagctactcgggaggctgaggcaggagaatggtgtgaacccgggaggcggagcgtgcagtgagcagagatcgcgccactgcacttcagcctgggcaacagagcaagactccgtctcaaaaaaaaaaaagaagaaggagaaggagaaggagaaggagaagaagaagaagaagaagaagaagaagaagaagaagaagaagaagaagaggaagaagaagaagaagaaaagattagctgggcatggtggcacgtgcctgtagtcctgtagtcccagctactaaggaggctgaggcaggagaatcacttgagcctgggaggtggaggttgcagtgagccgagatcgtgccactacactccagcctagtgatagagcgacactccgtctcaaaacaaaacaaaaacaacccccctccccccaccaaaaaaaacatatatataagagagaagagagagtgaaattcctcttctgaaactgggaaagttccaggaggaagataaggtttgagctgggctttggaaggaggaaagagaagaggagaaagaacattggatttgcagacagaaaatggggttcccctcttggctacttggcttactagccgtgggaattcagacaagtcacttagcttctctaagtatcaattacttcatctgcaaaacctcgtgtgtcactgccaaagtgaggaccaagtgagattaaataagtgaaagttgtttgtaaactgtaaagcattatgcagacatcttggactattattaaaagcttaagaatgggtaggactttgacaacaggcatttggggagaagggcctctgggcagagagaatgaaaggcgaagtgattgattgatatgtatgtagtgactgattgagacagggtctccctccgttgcccaggctggggtgcagtgtcatgatcatggctcatagcagccctgaactcctggactcaatcaatcctcctgcttcagcctccacagtaggtgggaccacaggcacttgccaccatgctggccaattacaaaaatttttttagaggtggattctccttatgttgcccagactggtctcaaactcctaggctcaagctatcctcccacctggacctcccaaagtgctggaattacaggcaggagccaccgcgcctggcgagaagtgatttttgttaagaggctagacaaaaggaaactgggctttgaagatgaaatgaatgaataactcgcagcacatgcttccttctctccctagatggcccctttgcaggcagtcagggaccatgtctcgttcatcttagtttccaggagcttgacactttgtagttgagggctttgtgctccattctcaagaaacgacaagtgcccaaaggctattaaacttgggacctctttacccccaaaagtagtacagaataagagttgggtggccttgaaaagcaccttcttctgtccacactgggtcgcccgctgggtaacctcccaaacctatgagagctcaccttatcccaggtaaggtccttactttaaggaagaggaggggggccaagggctccagcagacctgttctacacggggtaggggggtgggtgggaactatacaggtgacaacatttcatagaactacacacacactcacacacacgcacatgactgcatacccaacaggttaaatccgagtgtggtctgtaatgaagttaattgtattggtttagttaattgtattggtttagttaattgtattgtgcgaatgtcaatttcctggctttgagaatgttgtatcttaagaaaaatgttgaggtaagctgggtgggtgatggtatagggaacctgtatgtattaattttgcaacttcttgtgagtccataattatttcgaagtaaaaagtaaaacaaaagaaaacaatggaacttccccctcagcccagcctacttcgagaccgcctcacactcacacatctggcctcacccaggtccagccagccctaggcagggggtgaagggaggggcagggcggggccacgcaagcgcagttccgcaatcccggccgctccgggaagtcgcgcatgcgtagtctcggccccgggctgccgcgccagcccgtctccgcggcgggggaccgggctgccttggcccctcagcgctcgcgtcttttccggcagttggaacgcttcctgttgtcctcacccgtaaccgcctgttgccccctgtctcagagtccctcacgcgtcccctcccgtctttggctcgttggctgccgccgccggggcttcgccagccttcaagtcgagactactggccgaaggggcgtctgcggctctccgccgtccccagccctgcctctccctgggctctggtgagttgcttgctgccgccgtcttcactccatcccggggtttttcctttatctcctccttccccaacctccgactccttcttgggctttctcctgctcgccggcgccctctttcaagccctaacctctcagcctcttggcctctctccgcccctctccttaacccccttcttcccccgtctccagatgccccttgttggccctctccacatttttccagtcccagcctttccaccccatcctttatctttctccttttgcagttggagcgggagccaggctttcctttccatgttgccacctttgtctgctccctgccaccagtcagtccctcagggatctcggtcatcaccggtttttatctccttttccttcttctggggtctgtgaactgtggtctgaggcagagatgtcgaaagccccccttggggtgtggtatctttgagtcggctcctttctccgttagtcttaggatactgggcttcagataagcttcaaatcacaggaaaaggcagggaaaattcttaagaagagagtggaaaagcaacagccagaggaaaaagtcggtaagggcttagaggaaagtctgtgtcagaaagcgggcagaacggccggcagagagaccagatctctcagttcattctgaaacgactaaaagactcggagagaaacttgttctgtttgaaatgcaccgaggagggttggagtgaagtagaccctgagtgtctccaccctttgagctcaccctgcctctgaattagccaggcaatatatttggtttccctaaacataaaacaaccaccacctcgataacaggctctcctccccaccctaaacgttagataccagcttcctcctaagaggagagaacgctatagcaaaccatttcatgtcccagccctatcccccatcacacataaactcctaggaatggacatcaaaaatgagtatatttcctagttaatctttcttaaggtgctaagtgcatagcactgtgcatgaaatgggggaagaatattaaaacaagtataagacatggtgcttgctttctagtgtaggtagagattacagtttagtaggatttacagttcagtgggagagattagacatgcgacttaagcaataatcttagctccaatgttgaatcgtccaaatgaaagataatggattgtcagtcgcaaagaaataaagtccatattgttgagagagggttgtttatagtgatcacagagtaccattgtaaagtcagtcagttagccaggcataaccatatagattgaatcacataatggttttcatttgacttccttttgagtttgcaggccttacacctgacttttatgaggatcagttccttttgttaattttttaaaactttgaagaattcctcagccacctattatttcctaattcttcagagttgaagaatgaaacaaatggggcaaaggcctccaatggcttctaggtcagggcaggaaggcttgaattgtggaaagcctgatggatagtcctgtcttaagaaaagttggttgacccagtaaatctatgaattgctatagggcaatattaattacatcttttgattaaaggatattagaattaggctaaattttttatattacaatagaggaagtggaggagggtttaaagaaaggtcaaagggaaggagagtgcagtctttatcattatattagaaactctaaaagttgaaaaacactctgcttaagaatttgttggtctaatatttgagcatctttgagttcatttaatgtccttttgatctttttaaaagtttaggtagtaatgcaagccagctacttaaattagtcaaagcatttttgatatatccatcagtgtaaatgtagtctttattcttttttttttttttttttttttttttccagacggagtctcactcacccaggctagagtgcagtggtgtgatcttggctcactgcaacctgtgcctccagggttcaagcgattctcctgcctcagcctcccaagtagctgggattacaggtgcccaccaccacacccggctaattttttttgtatttttagtagagacaggctttcaccatgttggccaagctagtctccaactcctgacttcaggtgatccacctgcctcagcctcccaaagttctgggattacaggcatgagccaccgtgtccggccatctttattctttagctttgttgacaactaaaaatcattaacttactcaactgcctgttatatggaaggcactgtttgccttagggttaaatactagcagattgttgtgttgtgtttgttgttgttgttgttgtttttaagacagagtcttgctctgtcccaggctggcgtgcagtggcacaagccaaactcactgaaacctctgcctctccagctcaagcaatcctcccacctcagcctcctgagtagctgggactacaggtgtgtgctaccacacctggccaattttttgtatttttttgtagcaacgggggttttgccatgttgcacaggctggtttcaagcaatctcctacctctccctcccaaagtgctgagattacaggggtgcaccagtgccctggcaaattgttacatttttatgttgaagtaatttcagttgttaaaatgtaactacatatatgcaatttcttcaggaattttcagacaaggaagtacaaaactctcacttgcttttgacatgtttttacatctggtttttaaatttcttcaccaaacacacttagagtgcatgtggttttcattgtgggtggaggggggggtacaggctgacaaataaggaaccacacccaagcttcacaaaccaaacagaggttttttttttgttgtttttgttttttttaattcctttagtgatactctaaaacatttgagtttgctttggtattagtcgaaacttccccataaaaaataatgtgatattttatagtaaggtagctcttaatgcagtgtcttaaatttgtttttactgatctttttggcacatgatgaatcaaaatgtttgactctcaagtagagtcttagttttgaatctctgctctgaaggaattatttatgtgatttttgtctgcgtatctttttaaataattgctttttaaataattttaaggcttttttgaacaagtgttttataagccttagtttaatccacaaaacaatttaaaaagctactaaatattaagggggaaaacctgaaaacttttcttaaaatgcactatctttgaaaatggtccttggctgggtgcggtggcttatgcctctaatcccagcactttgggaggcccaggcagtcagatcatctgaggtcaggagttcaagactagcctggccaacatagtgaaaccccgtctctactaaaaactagctgggggtgatggcatgtccctgtagtcccaactacttgggaggctgaggcaggagaatcgcttgaacccaggaggcggaggttgcagtgcaccgagattgtgccattgcactccagcctgggcgacagagtgagactccatttccaaaaaaagaaaaatggccctttgactctcatgattcttttttgctgcagctgtggggggtagtagagacagggtcttgctatgttacccaggctggtcttgaattcctggactcatgaactcctgggctcaaatgatctctctacctcaccctcccaaagtgatgggattacaggcatgaaccacagtgttcagcctctcctaatttttactcagctttatattgggatgaagagacagagaagtagatcatatgagaggtaggaatggtaagaataaaatattgagcactattggccgggcatggtggctcacgcctgtaatcccagcactttgggaggctgagatgggcagatcatgaggtcaggagatcgagaccatcctggctaacacggtgaaaccctgtctctactaaaaaatagaaaaaattagccgggcgtggtggcgggtgcctgtagtcccagctactcgggaggctgaggcaggagaatggcacgaacctgggaggcggagcttggagtgagccgagatcgcgccactgcactccagcctgggcgacagagcgagacttcgtctcaaaaaaaaaaaaattgagcgctattgccaatgctggagcaagtcaatgttagtgaacaatttggccaagtgtgataatacaggttagctgaaatatctggaggaaaacaagattttattttatttatttattttttttgagacggaatcttgctctgtcacccaggtggagtgcagtggcatgatctcggctcactgcaacctctgcctcccgggttcaagcgattctcctgtctcagcctcccgagtagctgggattataggcgcctgccaccacgcacagctaatttttgtgtttttagtagagacggggtttcactctgttggtcaggctagtctcccaactcctgacctcagatgattcgcctgccttggcctcccaaagtgctgggattacaggcgtgagccaccgcgctcagccgattttattatttatttttgagactgagtctcgctgtgtagcccagtctggagtgcagtggcgctatctcggctcactgcaacctctgcttcccaattcaagcaattctgcctcagcctttggagtagctaggactactggtgtgtgccacactcctggttgaaaacaatattttaaatttaggaaaaaaatattctataacttatctaaacacattggtggtgtttttttcttgtgtaaaatgaggaaattaagatctcttgtttttaaggtattgctgcttctaccactagaatcgtgattcaggttttttgtcatattgttccctttattttaagacttaaaactttattttaacttgtaaattcaaataaacggcaaacatttatcaaataccttaaggctgtgtcagagcatatatgtatcagattaccatttttaatcatagatttttcttttaactgtggataaacttaaaaagttattggtaacagtatatgcttatggaagaaaatatagaaaaacatgggctgggtgcagtggctcatgcctgcaatcccagcactttgggaggccaagttgggtggatcacttgaggtcaagagtttgagaccagcctgaccagtgtggtgaaaccccgtctctactgaaaatacaaaaaaaaaaattagctgggcacagtggctggtgcctgtcatcttaactacttgggaggctgagacacgagaatcgcttgaacctgggaggcagaggttccagtgagctgagattgaatcattgtactccagcatgggcgacagagtgagactccatctcaaaaaaaaaaaaaaagaaaaagaaaaacatggaaaaagcacaagcaagaataacattttctattcccactacctacaggtaagccactaataacattttgatgatatgtttctaataattatgtgcatatacagtaaacacataaagaaaattgagatcgtgatatacattctgctttgtaatgtgttctgttgacttagagtggaaacatttcctctgacattaactatttggacatattttaattgtctgcacattattttattgaagggctttttcatactgaattaattctattgtgtatattcaagttatccctaatttccctttgtgattacaatgctgcattgcacctccttgtgatgaatttttatgggtctttgatttcttcaaggtagatttttagatggcaaagaattgtactgtatgcatactgtatatttttttttaggtctcactatgttgtccaggctagtcttaaacttggggactcaagcagacctctgtcttggcctcccaggaagccaggattacaggcgtgtggtttactatatattcttaatttatctatatggtattgtgatcttgttctctttttaaaaatgcaatatgcacttgcactaatatgttttaaagatatatttgtgggctgggcacggtggctcacgcctgttatcctcagcactttgggaggctgagatgggcggatcatgaggtcaggagttttgagaccatcctggttaacatggtgaaatcccgtctctactaaaaatacaaaaaattagcccggtgtattggtgggcgcctgtagtcccagctgcttgggaggctgaggcaggagaatggcgtgaacctgggaggtgtaggttgcaatgagcggagatcgcgccactgcactccagcctgggcgacagagcgagactccttctcaaaaacaaacaaataaataaataaataaagatatatttgtgtgggccaggcgcggtggctcacagttgtaatcccagcactttgggaggccgaggtggccccgtctctactaaaaatacaaaattagccaggtgtggtggcgcatgcctgtaatcccagctactcgggaaactgaggtgggagaatcgattgaacctggaaggtggaggttgcggtgagccaagatcatcctgtcgcactccagcctgggcaacaagagcgaaactccatctcaaaaagaaaaaaaaagatatatttgtgtgacttacaggtacaggtaaagttgcttctggttttctggttgttgcatggtatttcctatgcagccacagctctttattttcttacttaagtgcctccaacttcccataacacaaattaaggcatgatgaacatcctctctgtgctgaacatcctgtgtatgtcactttagaagcctgtgtgacggtttctttagtctttatacctaggggtgggatttctgggtcataggacagtaatttatatttattttcactaagtattctctttctctggcttttgttacatattacctgtttgtcctccagaaaacttgcaccaatttacattcctaccaatagggtaggagagtgcacactgggtggattctaactccaaatctaacacctcttcttttctttgtttctagcagccatggcaatgacaggctcaacaccttgctcatccatgagtaaccacacaaaggaaagggtgacaatgaccaaagtgacactggagaatttttatagcaaccttatcgctcaacatgaagaacgagaaatgaggtaaagaattttgtttgaaaaaattgtgtcatggttgtggcattcctttctcgtattgtaaaacacttataatgctgaaaggagacaagaatagtagcagccttattatagactatcataatggaatgacagtgaaagggcttttcaaagtccctgccattaacccacttatgcctacaagtcaataacacaaacttctattgaaatccaagaaaaaaaatgatacttgggaggttgagttgggaggattgctttagcccaggaatttgaggccagcctgagcaacactgagactctgtatcttaaaaaaaaaaaaaaaaaaaaaattaggcccaatccaaggagttgattgttaaggcagagtggtataatggaatagcagcccttttggagtcagacttgggtttagagtcctgccagtttcattgaatagctgtatgaagctctaataagttccttagtctttctgtgaattggttccctcatcaggaaaatggggataatactacttgccttgcaggattgtgttggggattagatataacatatgtgagtatgtaccatagtgtttcacacatagtagtcacttagttaatggtggtagtatcagctattgttattactgatctggtgtatactgtccacttagtaactcataatttatttattggtttttttttttttttgagatcgaatctcactctgttgcccaggctggagtgcaatggcatgatctcagctcactgcagcctctgcctcctgggttcaagcggttctcgtgcctcagcctcctcagtagctgggactacaggtgtgagccaccacgcctggctaatttttgtatttttagcagagacggggtttcaccatgttggccaggctggtcttgaactcctgacctcaggcattccacctgcctcggcctcccatagtgctgggattacaggcatgagccactgcttggctgtaactcataattaaaaaaaaatttttcccaatattttactatgaaagtattcagaagtacagaaaacttgtaataaacagtgaatatatacatatatatcatctagagtctataatggttatttattatatttgtttaactgcatatccatctatccattcttgtatctgtcattaatccatcttaatttcctttttttttttttttttttttgagacagagtcttgttctgtcacccaggctggagtgtagtggcgtggtcttggctcactgcatcatctgcctcctgggttcaagtgattctcctgcctcagcctcccgagtagctgggattacaggcatgcgccaccacgcccagctaatttttgtatttttagtagagacagggtttcactgtgttggccaggatggtcttgatctcttgacctcttggcctcccaaagtgctggggttataggcgtgagccactgtgcccggccaatccatcttaattttttgcctcacttcaaggtatgttgtagacatcagtatacttctgaatatttctgcttatataacattaactagaattcagtatttatactttttggggaagggtgtaaaatttatatacaatggaatgcacaagttcaagggtaccattttatgagttttgacaattgcatacacttgtataacttaaacctttatcaaaacagaacattacgtctcccagaaaaagttttcatgcctcttggttcttcaaccttagacaaagacaaccactgttgtgattttttttttttctttttttctttttttgagacggagtctcactctgttgcccaggctggagtgcagtggcgtgatctcggctcactgtaagctccgcctcccaggttcacgccattctcccaccttagcctcccgagtagctgggactacaggcgcttgccaccaagcccggctaattttgtttttgtatttttagtagagacggggtttcactgtattagccaggatggtctcagtctcctgacctcgtgatccacctgccacagcctcttgaagtgctgggattacaggcgtgagccaccgtgcctggttgtgattttgtttctatcatagttttgcctatttcatacaagtggaacacataaatggaaacatgtagtatgtactcatttgagcaaggcatctttcatttagcatatttttttttttgtcgagacggggtgttgttttgttgcccaggctggtgtgcagtggcactatcatagcttactgcatccttgacctcccaggctcaagcgatcctcctgcctcagcctcccaagtagctgggactacaggtgcatgccaccatgcttggctaatttttaaaattttctgtagagacagggtctcactttgttgtccaggctggtctcgaactccggggttcaagtgatcctcccaccttagcctcccaaagtgctaggattacaggtgtgagccaccacacctggccagcatatttttgaggttcctctgtgttgctatatgcatcaataatttgttcctttttattgttggtactattctgtcttctgactatatctttgtttgtccattctcctattgataaacacctgggttcttttcagtttttggctattttgaataaacttctatgaacatttttgtaccaatcttgtgaacatttgttttcagttctcagataaacatctagagagattcagtggaattgctgaatcatgtacatagctatatgtttagttttataagaaactgctagacctttttccaaaatattattaatatatgagagttctatttactttacatttttactaacatttgcgttgtcagtgttttagttattttggtggatatttaatgatctctcactgtgatttttattttgcatttccctgatgactaatgatgttgaacatttttatgtgctttttggccatttgtgcatcttcctttgtgaaatgtttgttgagatttttcgagcatttaaaaaaatggagttgtctttattattgagttgcaggagttctttgtttgtcctacatatcagacctttgtcatgtgtatgtttcgtaagtaatctctcccagtctgtggctttcttgctcatcttgttaacaaaatctttaggcaagcagaggttttaaatattgatgaaataaaatttggcattttttttttaatggttattgtattctgtgacctttctaaaaaacctttcttctttaaaaaaaaaaaattaactaatttgggccaggtgcggtggctcacacctgtaatcccagcactttgggaggccgaggtgggcggatcacctgaggtcaggagttcgagaccagcccgaccaacatggagaaaccccgtctctactaaaaatacagaattagctgggcatggtggtggcgcatgcctataatctcagctactcgggaggctgaggcaggagaatcgcttgaacccaggaggcggagtttgtggtgagctgagatcacaccactgaactccagcctgggcaacgagagcgaaactcagtctcaaaaaaaataaaattaaaattaaaattaaaaaaaattttttgtttttttagagtcaaggtcttgctatgttgaccaggctggtcttgaactcctgtcctcaagtagtcctcccacctcagcctcccagagtgctggacttacgttagctacggtgcctggccagaaacctttatttatccccaagtcataaggattttctcctatgttccattttggaagttttttagatttagtttttacatttagttctgtgatccatattgaattaatagatgtgtatgatatgaggtggggagttcagattgatttttatccttttggatatcagttattttagcaacatttgtggaaaagatcttcccccatgagattgctttggcacttttcttgaaaatcaagtgacatataggtgtgaattcatttctgggctttctttttctgtcccattgatttccttgtctgtccttagccagtctcaccttgttttgattactgtagctttgtagtaagttttgaagtcaggtaatgtgtaagtcctccagctttggtcattttattttaagattgctttgagtattctgtgttctttgcattttattataaattttagagtcaagttattaatttctacggaaaagcccaatggaattatgttgcttttttttttttttttttgagacggagtcttgctctgctgccaggctggggtgcagtggcgtgatcttggctctctgcaacctctgcctcctgggttcaagctattctcctgtctcagcctccctaacagctgggactacaggcacacgccaccacacccagctaattcttgtatttttagtagagatggggtttcaccatgttggccaggatggtctcgatctcctgacttcatgatccacccgccttggcctcccaaagttttgggattataggtatgagccactgcacccggcctggaattactattggaattatattgactctgtagatcagttcgtggagaatcgacatcttaacaatattgagtcttctgttacatggacattgcagatctctgtttttcttgttgtttgtttgcttgcttgtttgtttgtgtgtttgagacggagttttgctattgctgcccaggctggagtgcaacggtgtgatctcaggtcactacaacctccgcctcccatgttcaagcaattctcctgctccagcctcctaagtagctgggactacaggcacctgccaccaccgtggctaattttttgtatttttaatagagacggggtttcaccatgttgggcaggctggtctcgaactcctgacctcaggtgatccacccgcctcctcccaaagtgctgggattacaggcatgagctactgcacctggcccatgtctccatttttaaggtcttctttagtttttctcaacagtgttttcataatttttagtgtgtgcatcttacatgtcttgttaatctatttctaatatttgggggttttctggatgctatttagaatttcactgtccagttgtttgctgctaatatatagacatataactgaattttgtatattgatcttgtattctgtaactttctaattagtctagatttttttttaatttgcatatttaggattttctatgtaaacaatcttgtgatattcaggtagagacagttttacttccttttcaatctattcaccttttttttttttttccttgccttagtgcactagctgggaattccataaaatgttgaatagaagtagtgggagtggatatctttgttttcttcttgatttaagagcaaacgtgctcactgttttactaaagatgccctttataggttgaggcagtttccttatgttctaatttgggttaaaaaatttttttattgtttttttttagagacagggtcttgctttaacccaggttggagtgaggtggcacaatcatggctcactgcagccttgacctcctgggctcgagtgattttcccacctcagccttacgagtagctgggaatataggtatgtgccaccacacctggctaattttttttttacctttttgtagagacaggatatcactatgttgactaggcttatcttgaactcttggcctcaggcagtcctcctgcttcagcctcacaaagttttgggattacaagtgtgagccactgcactcagcctatgttccaatttggctgaggagctaagaatttttatcatgagtaggtgttgaattttttctttttattattattttttatttttgtcatttgttttgattttttttgtgggtgttgaatttttttcaaatgctttttcatcatctccataatggtcatattgtttttctcctttattcttttaatatggtgagttacatggactgatttttgaatgttagactaactttacgtttcaggggtaaaaccctcttgatgacattgtattatctcctttatgttgctgggttgatatgctaatattttgataaggatctttgcaatcctgttcttcatgagggtgtaagtgataatttacatgggatatataatttgaccttaaatatgcagttctgtatgtggaatagtcaaattttttatgcttggtggtggctagctgctgttcactggagtaaacaagtgtctgcacagtgtcccgtgttaggatcatggggaattcaaacgtaaatctgttcagaatatctttaggcaggtgaaacctgtggagacagttatttcaaatacagtcacttcttgaaatcatagctactggggttgtaattataaagcaaatggttatgagttttgatttagccacttgtttagtagtagtcctctgggttttatcctactggttctgccctagctatggtttattgttggtatgtatcacgttctgcaggaacaagatgatgtatggttttatttacattattaataaatgatacattgtgattaacactaagattataccccaaaatgagcagacagcagtgctttgcattctttggattcttaagatagaaaagccttctaaaagtttcagtggttccagaagcagtgagggttatataaaaataaacaaaattttaaaaatacagcattggtggttttgctttttttgaaagaccaaattaatcaaaagacagaagagaatgttagatatttaagagggttagaatgtttgtttttggttgcttatcaaattgccattatttttcattaaagaacagtaagccacgtgtggtggtgtgcacctgtagttctaactactcagaaggctgaggtgggaggatctcttgagctcaggagtttgaggctgcagtgagctatgattgtgccactgcactccagcttgggcaactgaacaagacgccatctctttaagaaaaacaacaatgcactagtactttcagcctttcagaattaatatatccttgtagatctttttttgttgtgtacccctttttttttttttttttgagatggagtctcactctgttgcacaggctggagggcagtggcgccatcttggctcactgcaacctcctgggttcaagcaattctcctgcctcagcctcccgagtagctgggattacaggagcacgccaccatgtcgggctaatttttgtattttcattttgtttttgagacggagttttgctcttttgcccaggctagagtgcaatggcataatctcggctcactgcagttgctgcctcccgggttcaagtgattctcctgccttagcctcccatgtagctgagattgcagacatggactaccatgcctggctaatttttgtatttttagtagaagcggggtttcaccatgttggccagtctggtcttgaattcctgacctgaggtgatctgcccgcctcagcttcccagagtgtgtgagccactgtgcttggcctaatttttgtatttttagtatagatggggtttcaccacgttggccaggctggtcttgagttcctgacctcaagtgatccacccgccttggcctcccaaagtgctgggattacaggtgtgagccatcacatccggctagtaccctcttttttgtatgagctgctagtaggttttggatttactgatacagctcaataagactttcaggctttattgttcctagaaaattttttaaaaagtgattgacaagagttacctcagaagtaaactaagttggattgtgagaaacaaggtttaaaacctttttttttttttttttttatgcagacaaggtctcactgtgtcacccaggctggagtgcagtgatgtgatcatggctcgctcactgccgcctcaaactcctgggctcaagccatccttagcctcccagagtgttgggattacaagcatgagccatgattgcctggcctgagtttgcaacctttttgatgttctggagggacacattgcaggaccttgataaataaacagttttgatgatatgagataattgataatgaagagataatatatgatggaggtttgaaataataagtattgggctagtaaattttgagaccaagttgtaatacaaattttcattttttttattttgtgtcttgtctaggtacctttaaaatatctgttattcctagcattgctatgcaactctttccctgttccatcataaagaacactagtttatagttgaaacaaagggcttactgcaaggccatacgtgtccaaagcccagagatagaagaaagaataaaattcatttgggaattgtttcctgtgtaaacataaaatatgataattttgagcagtttcatagaaacaatatagtagcttctacagattggtttaaaaataattaaaccccctgaatctagtgtccatcacacagtgctgcagaatgccacctgatggtctcctgttaataccactgttagatcataagcactcaatagggcaagtgcatctgctctattccttcagtctgtgttttgccttcaatggcagctttggttgtgaccttctctaggagcagcagctctctttgtattctctctgtatgtgatcctaggtacctagtaggtattgacagttgtctactttttcattaaaaaacaatgttttagataattcatagcagtttgaaatcaaatctgaagaaaccggcatttctttttacaaaacattttcagttgtttcttttcttcatgaatactagttaggtggattaattaaaaccataaacacctaatttaataggtaataatggtaagcttttttcttcccaaatcaaacaaagtctttcatacattttactgagaatttctatgttctgcaactcctcttagattttctcatctatgttttcttaactggagaaattcctcatttggtcttatctaatactaagtagaaatatgtgattattattagtgatccagtgtcagttttatttaagcctcaagaatgagtaagtccagacctcctgatgttcttcactgaccagatatcaaaccagagtgtagaactgaagtaatttgttgagattttaaagaatctgtgtagtgttaattttagggtatttctggctgggtacaggggctcacacatgtaatcccagcactttgggaggccgaggtgggtggatcacttgaggtcaggggctcaagaccagcctgtgcaacatgatgaaaccccgtgtctactaaaagtacaaaaattagccacacatggtggcatatgccggtaatcccagctactcgggaggttgaggcacaagaatcacctgaacccgggaagcagaggttgcagtgagccgagattgtgccatgcactccagcctgggtaacagagctagactcttgtctccaaaaaaaaaaaaaaagaaaagaaaagaaaaaaaggaaaaaggccgggtgtggtggctcacgcctgtaatccctgtactttttgagaggccaaggtgggtggatcacttgaggtcaggagttcgagaccagactggccaacatggtgaaaccccatctctcctaaaaatacaaaaattagctgggcgtggtggtgggcacctgtaatcccagctatccgggaggctgaggcagaagaatcacttgtacccgggaggcagaggttgcagtgagccgagatagtaccactgcacttcagcctgggtgacagagtaagactcttgtctcaaaaaaaaaagtatttattagacattttctgaattttaatcatggagatgtaatcacagccctttcccctccccctccgctcccctcttctcttcctgacagaatctcgatctgtcgctcctcttctcttctcttttctttctgacagaatctcgctctgtcacccaggctggagtgcagtggcacgatctcagctcactgcaacctctgcctcccaggttccagagattttcctgcctcagcctcctgagtagctgggattacaggcacgtgccaccacgcccggctaatttttgtatttttagtagagatggggtttcaccatgttggccaggctggtgtccaactcctggcctcaggcggtgtgcgagcctcagcctcccaaagtgctgggattacgggtgtgagccaccatgcctggccctatttctgttaaatacactatttttcctggttttcagtgtctcaccaaaatactgtctgttttcaattagggtggaatagccctattctctcatccctgctacctccaaatcaggctatgccaagaggggaccctaaattagattagaaaagggggctaattgtaagtagtagtcatgaatgtgtctgcacattgctatacattctgactttttaaaatttagcagcatacatttagaaagtagctgtgtacaaagcactattcttagtggacatagggaattcagatatagtccctgccttcagaaggacttaccactctctcatataagaaatgaacacacacgcaactaaatggaacacatggaaggcatcactggggtgaggctggatatggcctctaagtgtgaaagtggcttcgtctctctcctagggttctggttttgaacattggaattgaagggaagagtggctccaccaagggctggagtgttagttaacctggcactgctaccagagaacatgcctgtgtggagagtcctgctattctttttcattatgaacaattttaaacataggtggaataatatagtgaccccgtttcaatatattcatccctcagatttaataattttagggctttggtacattttcttcatctatcccattttgttttttcttgctattgtgttttaaggtaaattccaaacatctgtcattttaatcctacatactgtcaagtatgcatttccaaaaatatggccattttcttgcataatgcaaatgccaccatgaatctaaccaagttaacagtaattcctttgatgtcatctcacagaggatgtcatttttaagtctcatttcaggctgtccttgctgtttttggtgtcctcaaggtctttgtggacctggtcctaattgttatcatggataggctttttttttctggatactttctctaatgaaataatctgattgtgttcaaggagttaacttcactctcaggcaggtattctgcaaccaatttaattacacttcagtaaacctgtggaaaacctcttagtttgtatttaggtttaaaatataattagaaggagccacttttgtgacacagtggatagtgcattggactggtagcccattctgatgtagtcattcaaaaacgtgtagtcaggacgtatgatggtgtttagtactcaaggcacaaaaagagctgaccacagctgtgttcttagagcttttgcctagcatgttatgctttgacttttcttgttcttctctgcttcaactacctaaccacttgcaatggaattaatttacactcccgaaactactaagagtacagccttttctctctaatacatgtgcacgcatagatgcacatgtatcccaaaatattctgggaactgggagaactgttcgtgttcctctctctgtttcctgtcttgattagtggcatcatatccctctagacaggaaattctaaggtttttctcttgactcctattgccagttggtcatatttgcaatagctctattcacttcattctagttttcctgccctagttccagatctttactgtacatctgaatcattacaataactctcaactagcctctttctcagttgctttccctgccagtccatcagatcctcattactgctggttaccattctaaaatagaaatcttatcacatcactcctttgcacacaagcctcttttagcactcagttgtctacagaatgagatccaaccttcttggtgtggcatttgtagtgctgtgtgcgtcagccacaatggactacatgctatttctgcagcatactgtacactctttttttttttttgagatggagtctcgctctgttaccgaggctagagtgcagtggtgcgatctcggctcactgcaagctccgcctcctgggttcacaacattctcctgcctcagcctcccgagtagctgggactacaggcgccggccactacacctggctaattttttttttttttttgtatttttagtagagatggggtttctctgtgttagccaggatggtctcgatctcctgacctcgtgatctgcctgcctcagcctctcaaagtgctgggattacaggcgtgagccaccgcacctggccagcatactgtagtcttatccttctttgctctgtttgtacacattgcctgtttatctggaatgctgatgagtggtggaggagagattctagcccatgtgctttcatttattgtgctgaataaatgaaggttctgtggaattggttgtaaggaagttttacttgcttcttttagttttatgagactatagatcaaaaacattactgcatgtactttctaaagttcagtattccaaaagtttgatgtctgaaggttttttttttctttgaggcagagtctcactccgacatctgagctggagtgcactggtgtgctctcgcctcactgcaacctctgcctcccaggttcaagtgattcttgtgcctcagcccctcccaagtaactgggattacaggcacctgtcactatgcccagctaatttttatatacatatatgtgtgtgtgtgtgtgtgtactaatatatatacatatattacatatatgtgtgtgtatatatatgtgtgtatatatacgtatatacatatgtgtatatgtatatatgtatacatgtgtacatatatacatatgtatacatgtgtatatacatataaatatatatatatatacatatatttttttttttttttttgagacggagtcttgctctgtcacccaggctggcatgcagtggcgtgatcttgactcactgcaacctctgcctcccaggttcaggcaattcttctgcttcagcctcctgagtagctgggactacaggcgctcgccaccacgcctagctgatttttgtatttttagtagagacagggttttactatgttggccaggctggtttcgaactcctgaatttatgatccaccctcctcagcctcccaaagtgctgggattacaggcgtgagccaccacgcccggcctttttgttttttttgagacagggtctcactctgtcacccaggctggagtgcagtgagtggtgtgatctctgctcactgcagcctccacctcctgggttcaagtgattctcctgtctcagcttcccaagtagctgggattacagggtatgccaccatgcctggctaatttttgcatttttagtacagaccaggtttcaccatgttggccagtctggtctcgaactcctgacatcaagtgatccacccgcctcggcctcccaaagtgttggggttacaggcgtgagccactgcacctggcctaatttttatatttttagtagagatggggtttcaccatgttggccaggctggtcttggactcctgacctcaagtgacccatctgcctcacctcccaaagtgctgggatcacaggcgtgagctaccacacccagcctgatatatggagttttgatagtggtgccagtcacctttttgatcactttttccccttaaatttccaaattctgcttttaactttgttgtttgttaccctttcctcatggcagggaagaggaggaagatgcagaaataaaggaagtagacttcagtcagagagagggaaagaaacagcatgatataagagtttatcaaataccagctgttttgtggtttggtaaggaggaaataactggaaaaaaaaaaaaaaaaaaacacccaaaaccaagagaggacatttttttgaaacaagagtctttgttgcattaacatcttagacagtcttttaaaaaatgtagacctaagggcggggcatggtggctcacacctgtaatcgcaacactttggaaggtcaggctggagtttgagaccagcctgggcaatataatgagacctcatttctacaaaaaatttaaaaattagccaggtatggtggcacgcgcctgtagtcctagctacttgggaggctgaggtgggattgcttgagcctgtgaggtggagatttcagtgagctgagattgcgccactgcattctagcctgggtgacagaacaaaactctgtctcctctcctcgcaacctgcccccctccccccgccaaaaaaaagtaggcctaacaaaggatggaaatctttttacttgtcttagtaacttaattttttttgttttaatgagacattttgagatttacctgtttgtgtcatttttaaaaatctactacagtattaagttacagaattttcagaaagttatcattcagatgtgatttcatgtcttttgtttttgtttgttttagacaaaagaagttagaaaaggtgatggaagaagaaggcctaaaagatgaggaggtaattaatattggcaatgttttccttaaaacccagcgtggcaggttgtatcttgtccagtgagttgttagccttggtacacatgagaagggttttggctcaataacagaggaacttgaggggtagtgtgcttccggatttgggtgttaattcagagggacagattaattattaagtacctaggagaggaaggcttctctagatgcagttatagtaaactagatttagaattccaagagaaagcagggatgaaatcaaattaaattttaaaagagcaagttgtagcatttttatagaattcactgaaaagtctccgtaggagtagggcaaatttttgaaatatttatttattttactttttctgggatacatacgtgtgctgaacatgcaggtttattacataggtatatatgtgccatagtggtttgctgcacctatcaacctgtcatctaggttttaagctccgcatgcatgaggtatttgtcctaatgctctccctccctttccccccatgccccgacaggccccggtgtgtcatgttcctgaaatctttattaaggcaaaatatccatctcaaatcagcccttccacccagtgcccacagatacagtaggagaaaatatagttaacaagggactgtgcaaggaactgaaatggtagtggaaatgccttcaaaaataggactggcttgcagaacccaggacggtggtgaaaaatacccaatacttgtagaaataacagaaagttagagtatacagtgtttaagccagagggaaagataagaacacatttttaatttatattaaacaggataaaggaaaatattgttgattatttatccctcccttcaccaaaaatgttaggatagtggattgctgaagtaggttagtcagagttcccagaggaggcacccatctgttcagtgtggcttggatgttgtgtctaaatgccaggaaagggagaagtgacctcttaaggatccttctggggtgatttcatatgtgaaaagattatccttagtccacttggacctgttttctagctgggtaagtcacaaacatgacttgttacagagtttcagaatttcagttccttcccgtctcctcccttttttatttaaatattagaaacgactccggagatcagcacatgctcggaaggaaacagagtttcttcgtttgaagagaacaagacttggattggaagattttgagtccttaaaagtaataggcagaggagcatttggtgaggtaaaaatcacagctacttgtcaagtagaaaaatattgcaaaacttcaaagcttctaacataccattaagtcatgattgttgatataacaaatatatggaattaaatgagtcaggcatgccagccccacatcctaattgctttgtctgtctgctttctctttttcttctctccgcagtcccagatctctgttctctgttttgccagagatggtgttggtgtttaaatattgacttagggggagagttgaaaggtagaaggaaatcaacatttattatttacaggctgcttttttcccataatcaggacagtaacccattttatagatggtgaaattaagactctaaaggtatatataatgtctcttgttatcacacagccattgagtactgggaccaaaagttgggctctacttcctgaactcaaagagcttgcttttcccagtactgcactgcctctcgagaaggaaactaatagtgtatctccaccctttatttctccccaccagattgatacagctctaaaaagatgaccctaggagggaggatttacagaaaggagttatataggtagtggtggagagttgaaagcatttgcgactttgtccccgcaattcttggaaatgatcctgcttgggcacaagagcaatctgttggggagagcttgaaagagcccatgcaaggtcattcctgttaatgaaaaatgcccaaactggatgacctactgacgcaataattgcaagtataaaaggagcagtatattattaaaacctggtaccccggggccaggcacggtggctcactcctgtaatctcagcactttgggaggccaaggcgggcggatcacaaggtcaggagttcgagaccagcctgacaacatggtgaaaccttgtctctactaaaaatagaaaaattagccgggtgtggtggcacgtgcctgtaatcccagctactcaggaggctgaggcaggagaattgcttgaacccaggaggcagaggttgcagtgagccgagattgcaccattgcactccagcctgggtgacagagcaagactccatctcaaaaaaaaaaaaaaacaaaaaacctggtaccccggggaaatgtgaatagtattcagaggcacaggtgatagattgatccctcagtgttcagaattcctattggcttcttgaaagagggaaaagtatagtaccacctctgaaagagctttctgtttggcaaggaagggttgtggtactcaattaggaaaaacatgaagaaaggttcagggagaagaaaacctacttattttgggagaagaggggaggacatgcaggaacttgcagtgaaatttttcttttggttgtaaattttcttcataaaattatctgttttctttaagaacattggaaaacataaaagagaaggaaaactacataaaacacaatttccctaattacacattttgaattttcttcttcttctttttttttttttttttttttttgagacagagtcttgctctgttgcccaggctggagtgcaatggcttgatcttggctcactgcaacctccgcctctcgggttcaagtgattctactgccttagcctcccgaataactgggattacaggcacctgccaccacacccagctaattttcgtatttttagtagacggggtttcaccaggttggccaggctggtctcgaactcctggacctcaggtgatccacctgcttcggccttccaaagtgctgagattataggtgtgagctaccgcgcctggcctgaattttttgtttttctttccagacgtttttcctaagcatgaagttttactttgttattattattatgattaagtgacaaggtttcactgtgttgcccaggctggagtgcagtggctgtttacaggcacgatctcactactgattggcatgggagttttgacctgctccatttctgaactgggcctgtttgcccttccttaggcaacctggtgggccccccctctgccaccctgctcctgggaggtcaccatattatgctgaacttagttcagacacctgatcagcataatgcaccatagctcataactcctgagctcaagcgatcctcctacctcaacctcccaaatagctgggactacaggtatacaccaccatgcacagctacttttgttttaattaaacatcattgtaatcatttacttagattttctgagctgactggatgacatgtgtcagaggtgtaacgagtccttaaatttgaaattgaaggttttaaattagattggcttgttcaactaaggaaccaaagctgttcagatgtagaggtatttgaggatgtttccagcatcgactttactgtgtgtaatgtattcattttggaacactgaaaagcattttcttctgctttgttattactagttgctcatgttaaaattgtaatactttttcagttaattattgcatcctataacacatgaaagcattaggttggtagtacgagtttttgacttggcatttcttttataactttttaggtacggcttgttcagaagaaagatacgggacatgtgtatgcaatgaaaatactccgtaaagcagatatgcttgaaaaagagcaggtaaagcacagttgtagcagtgcttttagcttattaatttttgtctcctaaaacttttctttttgtttaattgaaatatatatttttattacagttttctttagctctgtcatgtatgactatatatataatactacctttttccccctacaaagaagcagttcatatttaaaatcacaaataatgcctgtaggttatatgcaatcttttaaaaattgaaaatctgttccaaaagcagctcttacttgtgtcttccaattgatcacaagatgtccttattgtgagagccttttttttttgaggtcgtacgtggtgtggtagtgtgtttcttaccaaatgctgagaaatagaaattgtatatatatctcataactaaggactaggaattagaatttggaatttataatctaaaatgtgtctttatatgcttcattctgtttacctaaaccaaagttgagtcttctaggtagctcatcggtacctgaaaaagaccagccttctaatttctgaatgaatttgaaaaatacaatgcaaatgacagaacaatgcaaattctcctttaatgataaaggatactttctaaaaccaaaacctggtttgcaaatcaatttataaagtgccttatgcaaaataaataaggttttaaatattggaaagtatattttaaaaagcaagaatagactttctataaatctagtttaatgtagctggttgcttaagaaaagattgcagtgggtgatgaccgcaaatgtcctgtaaaagatttgatgttataggaacatggagaccctgtgacaaggagaactcctaatttagggccaaagaggggggatggagattggccccacatccaatcctttctacctcttgagaggagatataatcactggtcttccctgtcttcatttaaatgccaccccaaaatttggaatttttattttctctcaaattttcatgtgttaccgagaagctttagactcccaggaatttcagttgggagtatcaaatacctgggcggtaagtcttgagacactatagtttatgctaacgccaacctttttcaaaattcatagtaggccggcctacttacatactatctacaaattagtgtgtggtatgggtgtgtaggcactgaaaaagtttcagttaatcttgagaaggaaaatataaagcttctgcattaattagtatgtttgcatctcatgagtaagttttgtttttgcaaggtatgtttcctacagttttaaccaaggcttaagacctctttttattaaatattaactgtcagagtaatactgcaaaacaaagtacatatgattttcagttagtaattttatgtataccaggtgccccgcatggtttctaacagaggatgatccagacataatgtgtaaaaagccttttcgcaaatattgtgccttcaaaatcactttctaaaactttcctaaatgaaagtaaagaaactattagaattaacattttaaatgatgcattaacttatggattaaatggtacattaacttaaattgtttagctcaccttagctgagaactcaactcctcaacttaacagatctcattatgagccagttaaagtctctggccacagactctacctggcttagccatcttgaagaagcatgcattggttttgtgctagataaaagatggaagtagaccagtgcaaattcatcaccattttggggtagggctgacaaagtagaggtacagaggcaaaattgtttttttgtttgcttttactaaataaactgggtaggaattaaagctacccactgagagttcaggttatttttctgctccacgtggtggaaatttttgctacctggaaaaatttaaagggtaagacatgacatctaactagcttctgatgtttctcttccagtgcaaaaggaaaaccttcagttgtgatgccagtatacagttattgatgggacaaaaaactggcttttatttctgctttcttagggcacaggatagcaactagcaccccccaccttattaaatatttatggaataggggaaagagaacctttttgtataaattgcacctcagactcttccctcccttaatctatattcagccaactccactttcaaaccatgaggtttcttgctactgtttcagcctcaagagaaaggcaaggtgtgctcatggtagctttccccttgacaaacaggaaatgttatgggcaccattgtgtcctccagggtgagtgacaagtggtaattgtagtgcctctccttttctctggctccctgcagtaggtagggagcttaatgggagccaggggagacaggcagatgaaggctgccttctactgtattaatgtcttgtagtgactgggtcctagccatggctgtggggcagcaagcaatgttactgtttcccaaaagctttgcttctgtattaaggtcaagtaaaggcagatgctttacttggtttcattgtgtttcatagcactgtttcttttcacccttattgtccattttttcccaccccaataccataagtacagatgtaaagatgtaggttttctgtacagttgcagcttttaaaaaaattccccaaagaatgattttagtagatactgaaaactcaaatacataaagtcaaatgcctctgggcctccaagagttagcatagaagcctgaagcaagttagatataagaccaggggagagggtgttgaaatggaagagtaatggaagagtgccttgtctccctaaagacatgtcaataaaacaagcatcatatcaaacattgtattaaaccaaacaacagccatggactaaatttgccaacagccatggactaaatttgccaatttgtgaaccttggtacatgttttacttcagaacatgttgtaaaaagtcaagacctgtagcatatgttaagaccaaaaccactattcagggattggactgagtcttaataaatttagatctgaatcaacccaatttagaccttgtgacacttaaaaaagaggggaggggccaggcatggtggcacacacctataatcctagctacttaggaggctgaggcaggaggatcactttagaccaggagtttgaggcttcagtgagctatgatcacgccactgcactctagccggagtgacagagcgagaccccatcttgttttaaaaaaagtgtgtgtgggggggatttgataatatgcagtgatgtttgattactgttctgcatttaaagtaaataaggtaaatttgataataaagcattgctttaacaaaataattccggttctctgaaactttctacaacttggtcctttataggtatttcagtaaaagtataaaattggaaatgtcattaatttgaatctacaacttttcataggtgttcttgtatttcaattcagtaaggattgattgagcacatagcagtgaactaaatgctgtggtatcatagcattctagaatttgtcagtgagctcactgttgttgcagatactagtgcagacccgaggaagaacttggaagagagtctcactttggggacttatttttatcataaaagattattagacaaaactctatgcaaaagagtagtaattttaactaatcagagattcagtttatagcagtgttaaagttgctatttgcattaaagccattcattttgccattttttaaagcctttcatcactcaagttttcatcactgaataccttgaagtcaaatgttgtcaattttgagttagtaggtttgcctaagcagaaattggatcttttatatcatcacgattaaatactcaaaacagtatttaagcacagtatttaaattgtttaagcaaatatacaatctaataaagcagagcaagctttgtcattaatcaaatgcatatacctccaggttggccacattcgtgcggagcgtgacattctagtggaggcagacagtttgtgggttgtgaaaatgttctatagttttcaggataagctaaacctctacctaatcatggagttcctgcctggaggtaattacttgacgatgaaaggtcattttttctttttgttctgtggtttctttctctcacatcacgattaaccctcctttctacttttaaatgtgctcacaaagttgctttctatatccttttttaggtctataaaggaagtcagtaacctgtcttgtgctggggtgcctttctacaatcttagtaccataaaagtaacctgttaattcatttacatgatttcagatggacatttctttcttttcttcttctttttaaaatatataggaataaattagggtgctctgcctgctctcctgtcaatgggaatcatatatgatcaataacccaagtgacaacattgaagctataacatcctttgctccaaatttttgtttctttttgtataacatattaataaggagtgaattttttgttacccatattagtagccagaaaaaatttctcatttctgaaattttaagttttatgtaactcagcatgagcatctcctaagacagctccaaagtaaacccagaacagaacatgccatctgttctgaggaaagcagtctgtttgtcagtgagcagatgaactctgagcaaactctggtgggaaaaaaaaagagagagaacttttttcttttttgttcctataattgtggcataatattttgattttgtgacaacccttagatttagggtcatcaatactttttaataaagaaacacatttaataaaaaataaacagttgattaatgttagaaaagagtctggtagaatgaggagaaacttttttaacatttagatgctagttcttaaataagagtaagagccaacttggttaccagctcctaacgtgtcctcaagcctcaacctgtaccatcttccgtagcttctcatgtctcctggaccctgccctttgcacttggtggagctggcctgcagagccatagagcatctggcctgagctctccaatcatctgggcaaacttgcacaggcgaggccccattgactgctctcctgagccacagaactaaggccgtatagctaccttactggggtagcagcccaagtgcactgtctccatgtgtctggtgggtctccagattgaagggctgccaggagtgattaggaaatcatattttttaagtattggactgaaaaagagcactttaataaatggtttaatttttgcctgagggaaaaatagctacttttctccaataatacaaaacataatgttctaaatgaaatgaaactgaaaaagcagcatgatgctctgttaaaatcagaggtttctttctcttttccttgttttctaacataagtgactttatgtgaggtctaaactgaatctttactgtttctcttagttttaaactccttatacatattttctttgcatttctcactgttgagttaggacctgaatctttttctgccattttatgttgctggtattagaaatgatgaaattttgactttgcagaaaactaacgaggttaccttttaactgctagaatactgatactgtgttttaaaagttacataaagggtactagtgtccatttaaatacctataataacgcactagagaaaaaaaagcactgaccttgagaggtgttcattgtactcttccaggaggcagttattgcacattctagtgtatagcattttcagttcatttttagcttttgttgactaatgctttgctacccaagtccttcctttttatttgtttgtgttctgtgaatagaagttggaaagcttgttttcagcctgcccgagtgtttacatttttatttggcatttcagcctctctataacaatacatagattgtatgtggaagtgccatttagttacagatgcagaaaagcttgcagatacttgttcaggcaaagtgaaaagtaaagtagcattttaccccgagtccaaaaaattatcctaagcaaatacagttgttttttaaagtgtgggagaaattttctttttctctcaaaagtaaaatagaaatcacagcttagtggtcaaccttagctagcttaggtgtgaaaatcccatttcttcccatgttggccatgtgggtctatctctggcacacagaagaggtctgtttagccgccttattttggcagatagggaagacatatctgaaaattggtactcactcgtatgttgtgtgtgtgtgtgtgtgtgtgtgtgtgtgtgtgtgtggtggctttgtatcttcttgtttccaggggacatgatgaccttgttgatgaaaaaagacactctgacagaagaggagactcagttttatatagcagaaacagtattagccatagactctattcaccaacttggattcatccacagagacatcaaaccagacaaccttcttttggacagcaaggtattgggggggcattggcatgaactatgcacgtttactgatctgagcagcctctgctttaacacctgcacccctgtggtcatcccagtgggcgagctgtgacctgccttgtcatgattttccttttttttttaaacaggtaagtttgctgtcacttcctttctctgaaaggctatggttctgtaatttggttgaacatttctcttaaaaataaaggaaacttgaaaataagagcaaaattgatgtagagggcaattttgtaataaagccaaagatagtcaccttctcttagcatataattaactgtgttactaatacatcacctatctagagcccttctgttgggcaacctcatcagttaatgaggaacccagccaagaagcaggaaatgcagtaacaacaagaacctgtaacaaagtccaggttccaaatcatgctctctgcttaaagaagagtcctgcccagcctcttttttttttttttttttttgagatgaagtctcaccctgtttgcccaggctggagtgcagtggcgcgatcttagctcactgcaacctccgcctcctgggttcaagcgattctcattgcctcagcctcccaagtagctgggattacaggcatgcaccaccacgcccctgcccagcctcttaaatggcctgtttatttttatttttagacatgcagataagcgtagttgcctagttcctaaacttacagcaaattagaagataatccctgtgctgccaactaacttgctagataacccttggcaaatctctttaccacctggatctcactgttcttatccgtaaagtgaaaatactgatctaggaaacccctaaaatcccgttcacctctaaaactctagaatgttgttttctgttaagcagacttgttgtcttgactgaatttttcttgtaaggtgaaaagtaaatttattttctagggtatttttcttctttgaagtcttttggtgacttttttgctttgctgtccttgaaaaacctgaagttgtttttttttttttgagacggtctcattctgtcatccaggttgaagtgcagtggcacagttatagctcactgcaatctaattcttgggttcaagggatcctcttgcctcagcctcctgagtagttgggactataggtgcataccactgtacctttttttttttttttttttgagacggagtctcgctctgtcgcccaggctggagtgcactagggcagtctcggctcactgcaagctctgcctcccgggttcacaccattctcctgcctcagcctctcgagtagctgggactacaggcgcccgccaccacacccagctaattttttgtatttttagtagagacggggtttcacggtgttagccatgatggtctcgatctcctgaccttgtgatctgcccgccttggcctcccaaagtgctgggattacaggcgtgagccaccaagcctggcctttttttttttttttttttttttttaatttttagtagagatgaggtctcgctttgctgcccaggctggtctcaaactgcctggtttaagtgatcctcccacctcagcctctcaaagtcctgggattacaagtgtgagccaccacctgcttttttcttcattataatgtgcagaagtggagtagaatagtggacatcaaaggctagagagtgtagcagagacggggatatgggaagagcctggttaaaaaaaaggccggggccgggcatggtggcttacgcctgtaataatcccagcactttgggaggccgaggcaggcggatcacgaggtcaggagatcgagaccatcctggccaacatggtgaaaccccatctctactaaaaatacaaaaatcagctgggcgtggtggagtgtgcctgtagtcccacctacttgagaggctgaggcaggagaatcacttgaacccgggaggtggaggttgcagtgagctgagatcatgccactgtgctctagcctggtgacagagcgagactccttctcaaaaaaaaaaaaaaaaggccagacgcagtggctcacacctgtaatcccagcactttgggaggccaaggtgggtggatcacgaggtcaggagctcaagaccagcctggccaacatgataaaaccttgtctctactaaaaatacaaaaattagctgggtgtagtgatgggcacctgtaatcccagctacctgggaggtggaggcaggagaatcacttgaacccaggaggcggaggttgcagtgagctgagatcgtaccactgcactttagcctgggggacagagcaagactccatctaaaaaataataataataatgcataaacatggtagaaaatttgaacattacagacagtattaaagaagaaaaattacgctggccaggcgcggtggcccacgtctgtaatcccagctctttggtaggccaaggcaggtggattacctgaggtcaagagttggagaccagcttggacaacatggtgaaaccccatttctactaaaaataaaaaattagctgggtgtggtggcacgtgcctgtaatcccagctactcgggaggctgaggcaggagaatcagcttgaacctgggaggcggaggttgcagtgagccaagatcgtgccactgcactccagcctggccaacagagcgagactccatctcaaaaaaaaaagaagaaagattacctataatctaatcactgaaagataaccattttgttgtaatcactttgatgcctttctgtttgtgtcaatcatttatataaagttggcatcctaaaagtaaatagctttgtattctgtgtaaacattaaaatattaatgctagatattttcctgtgtcattaatgtcagatatatgtttaataaagcactggccctaccttgtgtgattcaaagttcagatgccctggttggtgccccaggtagcttagtgctggcttctttgtcccctgtagtctatgttcagatccagcaaccatattaaagaacttgaggattcggtctaactgaagaggaatgggggatcctgttaggtgcaggtttgccctttatattatgctagctcacacttgtagcaaaatgttctcataagcaggttgatttgtgttcagccacatagattatagtcctaaaaatgtaggagttttgagttcctgttgcatattcagaatagctatagaattccctgaaaggctaggcttgaatagcatttgctccaggaactgcttttaaaaagttttactttctttctttcttgctttttttgtttgtttgtttttgaggtggagtctcactctgtcacccaggctggagtgcagtgatgtgatcttggctcactgtgacttctgcctcccagtttcaagcaattctcctgcctcagcctcccaagtaggtgggattacaggcgtgcaccaccatgtccagctaatttttgtatttttagtagagatggggtttcaccctgttggccagactggtcttgaactcctgacctcaggtgatccacctgcctcggcctcccaaagtgttgggattacaggcgtgagccactgtgcccagccaaaaacagtttttcttagtcctttcttagagttgtccaggtaagatatgtaatcatgagaactataaacttccttggcttgtagagtaagttacttgcaaatctgcaaaaaaagatactgaggccaggcgtggtggctcacgcctgtaatcccagctttttgggaggccgaggtgggtggatcatgaggtcaggagttcaagaccagcctggccaaggtggtaaaaccctgtctctactaaaaacacaaaaaaattagccagatgtggtggcgggcacctgtaatcccagctactcaggtggctgaggcagagaatttcttgaacccgggaggcagaggttgcagtgagccaagatggcgccactgcacttcagcctgggtaacagagcgagactctgtctcagaaagaaaaagaagaaaaaaaaaaaagatactgagtttaataggctcaaagctgtccctgtttggcagtttaccttgctgtgtacatatgtacatacacacatccaaacctaattggatttcttttaaaacaaaacataataaaatttgacccatctgagcagggctcctgtagccttgtattttggaaaatttgtatgtttaagcctgatgatgtccttgagaaaggtggtattctggaaagaccacagacattgaagtcatttgggctcaaattttggccacaccacttctgattgtgtaaccctgagcaaggtagatctctgagcatcaggattccctcttacatttttgatttcaactctccatcttaaaattttgccaccctaagacacctactttttccttagggctagttatatgccagatactgtgttgggagtcttacatgcattaatgcccattcctgccagaaagatatctgtactctcattttccagatgagataagatggcagggtaaagtaatcctggtctgggaggaagagcatgggctgatttctgcttttggttccgccattttaacggcaagccatttaacagctctgagtctgtgatgtgtggtttaggagttttaaatgagacaacacaaagcattgatcaaggtgcctgactcatagaaggtgtgtgttttcctttatgaaaattataaagttaagagatttatgattggaatacagcatggtcataatggcagcggtggcctgtctggagcctctgctgggaagatgccagctgcagtgggggaggtgcggtcagggctgtgtgctccatggagctggcaggagctgggaacaagcgggagccctgccctcccaggcacagttgcagttgcccaaccacagctgcagacctgggcatcccagaagcccatgagcttggaagtacctgctcctgctgcctgacttctctgtgctcctggtgtccactccaatttcagagcaaagttgaggccgagcctgggttctactgagacctggtcaggtgtgcgcacacttggggcggtgctgacacactagccccctgcagcctcagctccctctggactttgggtgccaagaagcatgagagggaggccaagcaggggaggagagcacctgggtgcaggtctgtagatgcccctttgcaccaacagcctgggtgctgtggacaaaatgattgatggctataagaggcagagaggctcctgggtggaaaggggtgggtccctggcgaagccccaccttcaagccagggatggcctgaagcctgagggccaagctgtcagttcgggctggagtctgtggcccagagtaagaacttgcggtggtttttccgggcctgcctgtggccacctgtggaccaatcagcacgtactttctctcttttgaaacccatacaaaccctggactcacactctggcagatggtcagacgacctgctgcagaaaggagctatctactccgggtctcctaagggctacagacttgatgggtgccaggtccaaactgcagactgcgaccgagcgatagatgaaaaaaatggactccgacacagatatccagtgaaagagcgggctaggggagtggactgcctacagaaagagttgtagcagcctcggccctgacaagctggtgctgcgggcaactatttagtacagatttaatgacaaaggccttgagtcattgtgggtaattaacatggtcatcacccccccacccccacctcatctccggagagagcagtcctgcgcctcgatttattaaagtccaggttccgaggcctaagtaaactaacttatctacatcagtttctttacatccccttgttatctaacctaagctttcaggcaccggataagagaatctggctgctttcggccaaatccttttctgaagcttttgtaaaacttcccagccttctaagaaggtttgcttctttctacaatttttctcaccacccttaccgaaccccggcagatgggatgacctgcctgcgtctgggaggtacccactctgggtcttttctgcactgagggctgcacagatgtcaggatgacctgcttgcggaaaggagcaacccactttgggtctcctgagagctgtactgtcgctcagtaaagctcctcttcaccttgttcatgctccagttgtccgtatacctcattgttcctgaatgcaggacaagaacctgggacctgtcaaatggtggggctgaaagagcggtaacacaaacagggctgaaatatgtctcccttgctcgccgtgttgcaggcaacaagaaggagagaagagcggcggcccttccaggagcccagacttaggggcttcctgagccagtgctgtgacaccccctttagggctctgcggtttctggcatctccaagcttccaggtgccactgcattcccctcgtccagatgcaggtgcccacagcagaagccgcttgcagtgcatctcatccagctgcaggcttgcatggagccagcaactatgctggcacctggagctacctgctctgcctggctgtgtgcagtggccaccggtgtgcctggctgtgtgcagtggctggaccccgcactcactcacacacgccttgccactctgtgcttttcttgcccttggcaggcttgggatccgcgctggtagcacaagcctgccaggctgagtgggcggaatgagcccagcggacctgagcaaaactcgggtaaaggcatcaatgaccacagaggcttctggctagaagcccaaggatctcatggcaatagcatttatcaaggactatccaataatatttattccctttgtctttgaaacagtttactcctggaatttattccaatgttataagaggaggaaaagctatatgaacaattttgaaaagatttactcttcatttaacaaccatttattaaggtcatcctgaatcatgcccggttaggtctgggaatacagactctgtcagaggggacctgataatccatgttatatgagagctaagaattgaaaatggaatgcacatccagtattagggggatggtaaggtaaacaatgaagtcccaagtaaactgaatattatgtagacttttaaagtggtaattttggccaggtgtggtggcgcatgcctataatctcagaactttgggaggctgggatgggaggatcacttgacctcaggagtttgagaccagcctgggaaacacagggaaaccttgtatctccaaaaaataaaaaaaaattagtcggacgtggtggcacacaactgaggtcccagctactcaggaagctgagttgggaggattgcttgaacctgggaggtcgaggctgcagtgagccatgatcacgccattgtactccagtttgggtgacacagcaagaccatgtctcaaaaaaaaaaaaaaaaaaaaattctgaataccatatagaaacagaggaatatttgagtacaagaagtagtaaaattgtctctagatgctatggaggggtcagctatgtttaaaaatcagtatttggataaaaccaaagatgatatgcagaaatgaaaatagttttattagtataataggatttgggattaaaaaatttatctgcaattacatgatttttcctatcataaaagaaggagcagtgtactttggctgtagagctataatggatgctggaaggagcagaacgtaatgttctgttctacctccaagaatactcatccatctatcaccttgtttcttccccatagggccatgtgaaactttctgactttggtctttgcacaggactgaaaaaagcacataggacagaattttataggaatctgaaccacagcctccccagtgatttcagtaagtggtaacaattacgttagccttttcgttctaactgggcctagaagagctgtttcccttgtaaccaaattagaacagataggagattctcacactttgagtatgtagagaataaaaataccttcccaggtttgcctgtgatttgtgttgtctggtgaggcaagatgaatgagtgggtaccaagtgtgtgaaggcagaggttgaaaggggtctttagaggtctactgggaaggtcactggggatgagtatgggacaagcaagcagaagtagtagaggaaaaactcctgggaacagttctgggctagatttgtcctgggctagatttgtccttcatgacagaaagaagtttatctttatgacagtcacttccatttgagcactatgaaatcgttgacaactatgtagtaaaatttcagttcatcctagaaaagcatatgtcaaatcatgtatcataaattcagatgtccctgatcatataagttactactacttggaaaattgatggtaattttgagaaattgtgactgttttaggtccacgttaggacctcaattctagttgagactgaattccctgtaattctgattaagtcctgtactgtatcctctgccacttgatccacatgggagtgccttttacaactctgtgtgagtcttttaagttaatgctttacagcctctgatttgggtttactgtaaacgtactaggatatgtatcatctggagcttttgatgtatgagtagaagaaaagcaagactttagggtctcatgtgacttgaaagagcctactaaaaaaagtagtaaacattttggtctgaactttgactgcagcttgtattctttactttcagctttccagaacatgaattccaaaaggaaagcagaaacctggaaaagaaatagacgtcagctagtaagtaatatctgtggcttctgaaatgctacaaaccaagtatgaataagttcaaaagattttcacataaatttgcatttgacaaatatttgcaacatatcccttgcttttaagattacctaaagagagtgctgttgttaggttggtaggaccgaaaggaatcttttgaaggaggacaggtaatattaggttgttttgattgtgacattttccgtgggcgacctcattctgaccttttagcttggtaacaatacctttccttcctgccccaccttttctccattttcatagtggtaaaggggttatatttaagctggagatctgtcagaactaagtacaaatacctacttagagttttcaggcatcaattctcaaactttttaaaaattttgatccactcgggcaagggcaagtcaagactcctcaattcatttgcctcacactttctgactttgtgatgtaaaaaagaacttacttataaagattggagagaaatataaagggaatgcttattactttatatgcatttgactttgtgcctatataaaattatgtcctacaggctgaaaaataagaaacatcgtgtttaccttgatagtatgttggaagtacaaatttaccagtgaaatattgctgtctaagcagaatttattttttgccaatagctgataaattggttcatgtttgaagttcagtgtacatgttccagtgtccagttactggaaagttattggccagataatagaaatgcgtatcactacattcttaagctttgcaagaaacccatagcaaatgaaattgatgatggtaaagccaaactaacatttggtcattagaaagcagagtagcagcaatgggaaactgactaacttggaatgatggtcatgcaaatgtattgtctggaaatggtagcacttccgtttgcccacatatatggtagtaacttggcaagtttaccaaatactgtgtttcagtcagaattcctagtaaaatactgatttacagttctctagagtacctttaataacactcttagtaggtcactaataggtggatgtcagttacatgtgaaaatggaagcctatgggatggtttaaggaagagtcaaaggaaagccttgcattcgttttgatttatttgaagcccacctatcagtggggcctcagacaatatttacttgggaaatcttcagtttagtacagttagttacaaaatagtctcccttccttgggaactctgcgactctttaaacttctgaattctgtatgtggttgaaaaatggtttatcttgttgaggattagggagtgtcaggaacaaatttggtcagatgcttctattatgtctctccacagaggagtagtttttaaccttggttgcacaacaaaatcacttggggaacttcagaacatgttgatgtccaggttccacccacagaaattatgattcagttggtctgggatatagtctgggtatctggtttttaaaagactgagtgattctactgtgcagtgaatgtggagaacctccactgaagaggttatgtcttaaataatagctcctgcgttgttgggaaactaatatttatctattttttggaaacagaaggtaaggaatctgtgatttcttttctttctttctttcctttcttttctttctttcttttttttttttttttttttttttggaggccaggatttaacctttggctactgtgctgacaagtattttggggataaagcttaagtgttttgaattgttccttatattccaagacaagctttgtgctctttgatgtgtacccaagggtcatgtcatgattagaggaaccatttctatagttctataaggaaagcaatttcacaattttcgtatttgcagttaaatgtcatttaatagttaaaaacatttttgaaaatctgaataaacttaaggccctgatgctatggttaaggttcttgcctttttatactatatacagtagaaatgggaaagtgtaaattaaggtcatcttcatattatctcttttcataacttgaagaaaatgaagccacctctcagtcttccaaatgttaattaactgtgttactttgaccttttgttagtgatcccattcagctagtaccaagctgaagattgatattcgttaatggttaatataaatttactgctctaggttaagcctaacatatgtaattgctactcagcctattactttttagtccattgggaatcactaaaaaaagtagaggctttagcttcattcctcggctgcttaaatcatattgtaatgttttaaattgttatgtcgtcctgtataaccttaggccccagtaactgattaatatgagtcagctttaagttaattacagatataaaaggtaatagacacataggcatccaatcttggtcagtttaattttttagggttgaatttacagaagtgagtaggaaattaaattgctttatttcttctaaaaccctgacacaaaatcataaggttagaacacattcagttgaaatgactgttaacaaccaacagagctattccagatagcaattttcattgacacttgaaatacccagacagaaaaaaggagaaactggagtacagatttacgaggttggagttggaggacaccctggtgtggaaaacaacaaaggtttgggaagggggcagtccttagattggaaagggcacacctggtacagatggtgtggtaaaaagtgtggtaaaatgcgagcgagctccagtggcagactctagtttctggaataagagcaatacttttaccttcacaggtttgagcctgttgtttgctatattttataactcgttaagagttttttttaatgcactggtatcttgaaggagttcttttcctctggcagtagacctctggttttataatggaaatctttgaacaagtaagatctgcttagatttacattcatctttggtagagtaaacctcatctctaaattaaagagtttgtaatttcttacctttatgattagaatgaaaattcttggagagggcctaatccacatgtcagtttttaaagcttaaagacaaaagacaacactggcatttgtgttaatatctgcatttaaatatatatcatacacacacaaacacacacacacacacacacttagctatatggaaaaaatggatccctaccttacagtatatgcaaaagtcaattctagatgggaaattaaactttaaaaatttttaaagaaaatacagggcaatatctttatgacctcagagtaaagagggatttcttaaacaagaactacagctcataaaggaaaaagttggtttattttattactttaaggaaaaaaaaccttctatatatcaaaagacgtaaagaaatgaaaagacaagccacacagtacagctactttggaattatctttcagaattcatgtgtacaccctacagcgctgcaattctacccctagtcataggccctggagaaactgcacatgtgaaccaggagacattcagaagaatgtttattgcattttcataatagcaaaagactgggaataatccagtgtccatccacaggaaaacagttacattctggaatagaatattttgcagcagtaaaaataattgaacgaacagctacttgtgacagtgtgaatcaattttagaaacaaagttgagaggaagaatctaatagcagaagactgtatatagaatggtaccattttaataaagctcaaaaataaaactaagatctcatttagagagatagatggcaaaattctttttaaaagcagaggagtgacaaaacacgaaattcagcatagtggttaagagaagcaggagagacgaggaggagtacatgtttagctttaataatattggtattccttggttcttcagttgaactcgtggctattcattttcatgattatgcattataatttgataatgtatgtaattaacagatgtatgtatgtgacatatttacttttggtaacaaatactacttcattaaaaaaatcacaataaaaataacaagcgtcaatctgggagaagatacttgcagtatacaaatatcttaaacagattaatgtcctgaattcataaagaattcctatgaatcaataagaaaaaggacaacacaacttaaaaaatactaatggacaaaggatctgaataggaattcataataaaaacctggatggctaattaaaatatgaatatgtgctcaaccctacttgaaataaagtaaatgcaaattaaaacaagatcccagccatgctggcacatccctacagtcccagctactcaggaggctgaggcaggagaatcccttgaggccaggatttcaaggctgcagtgagctatgatcataccactgcactccagcccgggtgacagagcaagaccccatctcttaaaaagaaaaaaaaagagatcccatttcatattcatcagattggtaaaaataaaaaaaaatctgacaaagccaagtcttgatgagatatggagtaccagaagctaatccccaccggggttggtttaaatagggactaactactttggaggacatggaagatacctcaagtttaaatgcttataacccaaggctcagcaatattctagttaatactctagaggaatgcttgcacagtgcccaagaaggtattaaaagaatgtttattcaggtgttatttgtcatagtgaaatactggaagcactgtaactgtccattacagaagaacggataaaaactattgtgactaatttatataacagtatagcatacggcagagaaatgagtgaactagagctacatgaataaatctcaaaacgaatgttaagacaaacaaggccggttgcggtggctcactcctgtaatcccagtactttgggaggctgaggtgggtggatcacttgaggtcaggagtttgtgaccagcctggccaatgtggtgaaaccctgtctctactaaaaatacaaaaaattagccaggtgtggttcatctcaaaaaaaaaaaaaaagacaaatgatctgagacaaatatggcaaattattaatctttttaatgtgggtaatgggtctgtattgtattgtctgttccttttttctgtatgtttgtaatatttcataatacatgttttaaaaacaatacaactgtaatttaaaaaattatataatatttaaagcacctagatcagagccttacacatggaagccctcaaatgttaagtacattaggaggctttgattgtactttctcctcttattttgcagtcctggtatgttagagtagaatactggaatgcagaaaatgtttctcttggtcaggtgcggtggctcacacctgtaatcccagcactttgggaggctgaggtgggaggatcacttgagccaggagttaaagaccagtctgggcaagatggcaaaaccccatctctacaaaaaaattaaaaaattagccaggtgtggtggcatgcacctgtggtcctagctactatggtggctgaggtgggaggatctcttgagcctaggagtttgaggtgagccatcatcgtgccactgcactccagcctgggcccacaaagggagacccccatttcttagaaaaagaaaacattcctccaagaactatatacaaaaacaattaagtttggtaaataggtatttataaatgtttaagttataggatataactttagcttttgatcatatagcttccctttatgattgtgtcaaatcaaagaatgtgtatcatagaaagagggatggtttggagtaagatactataattcctatttttttttttttttttttttgagacagagtctcactctgtcgccaggctggagtgcagtggcacgatctcggctcactgcaacctccgcctcccgggttcaagcgattctcctgcctcagcctcccgagaagctaggactacaggtgcacaccaccacgcccagctaatttttgtatttttagtagagacgggttttcaccatgttggccaggatggtctccatctcttgacctcgtgatccgcccacctcagcctctcaaagtgctgggattacaggcgtgaaccaccactcccggccagatatttaatttttaaactgggctctaccacctaactagttctgcggtctcaggcaaagccattttgagcatcaaattgtatctgcaaagttaagctaataaggtcctccttggaaaagttttgtcaggattaaatggactcatgtatatgaagttatatatatatataaaactcatgtaatatatatattaagtacagagcctagtacttaatgggtgctcagtaaattgtaataccagttattatgacacagatgccttcgccctagtgactcatagttaagggtctcctgcctcatgaacaaagctttattgttcattttggaaagtgctttgggaaatcgagcttgccattaagctactgggcagtcctgcttatttagcttgggggtagcttctgatgttactcatagcctttggtttctagaacagaactctgggcacctcctgcctggctgggcctcgctgatgtgtggtccatgtttcaggccttctccacagtaggcactcctgactacattgctcctgaggtgttcatgcagaccgggtacaacaagctctgtgattggtggtcgcttggggtgatcatgtatgagatgctcatcggtaagttgcatggtttcagaggactttttctgtgcatccatgacagacttttacattgataccagcctctgtttcaattggcagtgatctaagtgatttccctacttgtctttcaaagtgaattgttttagacagatgacacctctttcagtaagatgtatcccactccattcttgggcttactggcatcctgcaattgctttgctgatcattttttatgtttttctttctcttataccttcatcttctccatctagaagctcttttagtcactagcatttattaaatatccgttgtatgcagagcacttcaactgggcattgcctcactttcctaatttgccgcccccttcctctgtcaaagccttcaaatcatgggaccctctggcctctctccctcttattgtattggtgtgtctctgtatttatgggacgcatctgtgggggtggtcatatgccagtgagcactagattaagtatatccttggtggttccgggtgagtctatctggctgctttggcttcaggaacatgggaacgatgcctgtggaggtgggcgtacaccgtctggagggaagatggggtgatagggtgtgtgcgtgtttgtcttcttgcctgtagttctcaaaaagaggcatggtggtcatttttaaaatctatgcttttttcttattcaagttatttggtactttacccatataagggtatttctggaatgatattgtttcatcctttcatttcttctttgggcatggtgattcccacacctgcaactctatttatgtcctcctttcttttcccagctctacctattagctgacttcctagtggtaccagaggcatgatttcactttgggtctgggagtttgggggaaaatgaaaaataggtttaggtattttctgggataagtggaaatcctgtctgtgtcatggagggatggccatacagagtaatccagtagtcattaaagacatacagaatcaggccgggcacagtggcttatgcctgtaatcccagcactttgggaggtcgaggtggtagtatctcttaaacccaggagttcaaaataagcctgatcaacatagcaagactctgtctttacaaaagaaaaataaaaaatcagctgggtgtggtggtgctcttctgtagtcccacctactgggaaggctgaggcaggaagatcacttgagcccaggaattcaaggctgcagtgaaccatgattgtgccactgcaccccagcctaggtaacagagtgagaccctgtctcaaaaaaaaaaaaaaaagaaaaaagaaaaaaaaagacatagaattttattaaggagagtaatctcggtcagattcaaagttctggagtgtaaaagctccgaagttccttttttattacaggctacccacctttctgttctgagacccctcaagagacatataagaaggtgatgaactggaaagaaactttgacttttcctccagaagttcccatctctgagaaagccaaggatctaattttgaggtattagagaacatccctccaccttctttctcagctttttaatatgaatgattccatttttttaaaaacttttgttatctcctgaatctgctttctgtttcctcctattcctctctttaaacaaataaaaaggctgtgcatggtggcttacgcctataattccagcactttgggaggctgaggcagggggatcacttgagcccaggagtttgagaccagcctggacaacacagcaaaaccccacctctaaaaagaaaaaattggctgggtgtggtggaacctgtggtcccagccacttgggaggctgagatgggaggatcccttgagcccaggaagttgaggctgcagtgagccatgattgtgctactgcactccagcctgggtgacagagtgagatgctgtctcaaaaaaaaaaaaaaaaaaagaaagtttttctttttctgaggagactgcttgagatgtgctgaaaggcctctgtcttttccaggttctgctgtgaatgggaacatagaattggagctcctggagttgaggaaataaaaagtaactctttttttgaaggcgttgactgggaacatatcaggtatatccatataaacactttcagaattatttcagaaagtctctagtttacttaataataatttggaaggaccatcattggcaagccaagtaagggaagagagcttcttagagatttagggtcttttcctgattttcattcatggtgaagattgggcattagattttttgtcagccgtgtgtcatggaatatattgaatctagcagttatttacaaagtgaagtgaactttgttttttgaggtggagggagcatctaggaagcgtattaccctttacctagaactcagcaacctcttaggtcccgccagcgggactgttcctgcccacagggtggaaggtatcactggaacatagagaagggagaaaggagtggaggaaagattggaggggtggaagtggagagggaaagggagagtgaaaattgttatggtgggggtagtagactacggccaatagccgtgagagcctagaccacctgctgtagtccagaccttctcattcagcattcattggttattaaatagaaggtgaagttttcatttattttataattgtgtactgatttgctgcttgtgattttttacctttgccacttttctagccatcctacttggcacctccagtggaagaagggcagagccctacacaaggggacatttagaggttcagtttccctttttagtagacaggccaggccatggggggagttgcactaacttcacgttttagttattcttatctttctttctagctatgaatgattgagttatttttttaaaatcataatttactttgggtacagtcagttggcttggttggtcagtgtttataagtttttcagagaaaataaatgctgcctgccagtgaagagtcttctcatgtcagaccaggggtcttttttggagaaagacttgattggtatgatccatttgattactaacttagtaatttttggcatgtgtattcttggcagagagagacctgctgcaatatctattgaaatcaaaagcattgatgatacctcaaacttcgatgagtttccagaatctgatattcttaagccaacaggtaacaccaccagcattgtctcctgctgccttataagcacattatttacccccaattttgggatgatgtttacaaatcagggtagtgaacatggagaggaatttcatttcttcaggttctttgtaagtacttttctaattctaatgctgggtagtggtgaaaccttggtgaatggaaaatgagtatcagctcccatgtttagactgctcaactgggtgagtaagtcacaaaaatctgttcttttgttatttactaagtgttaggtaatctgaaatgacaggaatgggaaaataaaacattaaaaaatttgtgaagaaatatgagatttaaagaacatgagcaagaaaatgtggaaaattcatagagtgaggccaggcgcggtggctcatgcctgaaaccccagcactttgggaggccgaggtgggcagatcacaaggtcaagagatcgagaccatcctggccaacatggtgaaactccatctctactaaaaatacaaaaatcagctgggtatggtggcacacgcctgtagtcccagctactggggaggctgaggcagaaggattgtttgaacccgggaggcaaggttgcagtgagctgagatgacgccactgcactccagcctggcgacagagcaagactctgtctcaaaaaaaaaaaaaaaaaaaattcatagagtgaaaaataagctttcccaaatagaaactggtgtgttcttcatagtcctgtcttcagcaccgtgagcagtccattggaggcaaggcagtgaatcaactctcacatctatttctttcccagtggccacaagtaatcatcctgagactgactacaagaacaaagactgggtcttcatcaattacacgtacaagcgctttgagggcctgactgcaaggggggcaataccttcctacatgaaagcagcaaaatagtactcttgccacggaatcctatgtggagcagagttctttgtataacatcatgcttttcctctcacactcttgaagagcttccaagaagttgatggaacccaccaatatgtcatagtaaagtctcctgaaatgtggtagtaagaggattttcttccataatgcatctgaaaaactgtaaacaaagacaaccatttctactacgtcggccataaacagctatcctgctttggaagagaagcatcatgagccaatttgataggtgttttaaaaataacttgagttttcctaagttcatcagaatgaaggggaaaaacagccatcatccaacattattgagattgtcgtgtatagtcatcgaatatcagccagttcctgtaattttgtgacacgctctctgccaagcccaccaagtatttcctttatagctaaaagttccatagtactaaggaaataaagcaataaagacagtctcagcagccaggattctggctgaaggaaatgatccgccaccctgagggtggtgatggtagtttctacccatacctcagcctcaggcgagtggcttatagcctccattcatggtgcactttatttatggtactaagataaagactgtcaatccattgatttatctcctcctgtcccccatctaaaatacccatgctgcttttctgagtgttgatgggggttaccagcttgatccactgttgctcttagaaggcccagaaagtctttgggcattgccaagaaatcccggattatgtggaaaaccctcactttctcttcacggctgtaccagaaaatccctaagacagatcttgccgtggactagcaatacctgcaagtgctgccaatgggaactcaatttattcctgggaacctaacgaggagagcccaggcctaggcaggaggcctggaaccctcttggctaaggtgctgttcctgttcctgcaaggtctccagaacccctttggaaatggtgaaggaaccagcccaatagaagtacagagccagctgacaagtccttgtaaagctcactcctcagtccttggcacagccatgttttgtcttctctcttggtatttcttctctcccaactttagccattttgccttggaatcatgattacaattttttcctttgcagatgccttcctgggggatactcctccccaccctaaagggtcgcctgcaacttaggcggattgggtctctctgctgtggcgttctctcttgagagaccctctgaattttagcacaaagtgccttctgtttcacagctgccaccacctttagaggaatttcgtcagaaaaatgtggaggctccatattaatgcattattttttaaaaagttttgataactcttaaagcatcatttgcacctatgtgggaactttgcctgttgcaaagtattgtggccgagctgcagctgggagcctgctttctgccagtcttgaggttctgaagatcagctttgaaaggaaagtatgtcctagcttagccattcagaagagaaaaatggaatatcagagttacagttgtcagtgaaactactttggattttaacctcttagaggaagaaaaaaggttagggaagtgtcaactctggatgaaggtgatgtgtttgcctctcagtctttcattcatagcctgctagtgaaaaggaagtaaatgagattcttttgtgtgactttgtagtctctttgtattaccaaatagttggggtgttgactcctgtgtgttttgcaagaatgtgtggtaagcctgggtaaagagaaggaactgcggtgttgggagagtctttgtgttggggagtggcaggggatgatttgtttcaggggaaaatgcccacattttaacttttaaacttctgaataaactgtgtaaaaacagtagtggaaatacgtggtgtgatttattaaactgataagaacagatactgcatttgatcttagcaaaaaggctgagaggggattgtgatgtgatttaaagcagatagtggcatataacttagaggcagagtgctgatggctgcttttaacccctttgtccacaaaccattacaacgcctaatttcgagtgttaatttcaaaactgtatcaccatcttcatgcaaagtgcttttccatctcagggaagctgggactgacttttgttcttagggagctagtctcctgaatcactgtccatatgaagagacttctcttgccccgactgcatgtgcttcttccacccacctcagtgttgcagggcagtgggccctcccctcacagtaaggccaagggcacacacatcctgacaaaagtgctgtcatctggtggaccttttgtacagccttttacagcccagccccattttttcgcagcctgcagtcaacgaggaatctcatgagctcataagatggaattgttggctgggtgtggtgtctcacacctgtaatcctaggactttgggaggccgaggcagggggatcacaaggtcaggaaagattgagaccatcctggctaacatagtgaaaccccgtctttactaaaaatacaaaaattagctgggcatggtggcacgagcctgtagtctcagctactcagcaggctgaggcaggagaatcgcttgaacctgggaggcggaggttgcagtgagctgagatcgtgtcattgcactccagcctgggtgatagagcgagactccgtctcaaaaaaaaaaaaaaaaaaaaaaaagatggaattgttcagccctgtgtccatcagagcagggttctgtctctgagatgttgtatgctggaggagtcccatatgccccacttgttagcccctttctgggtagggaaaagcacctcaaggagtccagaagggaggggcaaagaccagctagagtagaaactgcaggcagaggaagctaaatgcagccagaatgggtaatgtctttctaaggcttatgaatcctaagaaacatgttgggcaacactggctcagtgtcgatcctgttgacagaaattctgtttcctactctcattggggtagttagaaaattgcatactaaaatgaaaccaaaatcatatcatttgatgtctcccagttcaggaatgcatcacaattttctttagtacctgtttctttgtagttggcttggttgattggcatttatttagtactcctctcccctgcatctaaattacccaggctgcttttctgactgttgatgggtggataccagcttgatccattgttgctcttagaattactttcaaagggctgggcatgatggctcacgctttaatcccagcactttgggaggctgaagtgagtggatcgcttgagcccagttagttcaagaccaacctgggcaacatggcgaaaccctgcctctaccaaaaatacaaaaaattagcatggtggcacgtgtctgtagtcccagatgctcgggagtctgaggtgggagaatcacttgagcctgggaggtggaggtggcaatgagccaagattgtgccactgcactccagcctgggtaacagagtgagactctgtctccaaaaagaaaaaaaaaaaaaagtcaaaactaagattcacatgagttccttcaggattaatactcaggttctgcaaaacagattgccaatttgaaaactcatctgtacagcctagtaagagtccccctctgccatcagttggtaatgctctttgtcagaattatttccttggaacttttttagatcgccttgtcctggttctcctgggcttctgtgtaacccaagtggtgtttttaattgaattcagaaggattcagtgaatgatattttcatttcctacagagcatatttctctggaatgatccatcaaagccaacactgacaaaaacggccttcgtgatgctttttcacgcacattttcagagaaaaaacaccttgcccaagcaacattcaagctcagttccaggcagtctggtgaggcaacaggttgctcaccgtggttctgaattgcagatcagtttgagagaattcccaacaacaagtggcttaatggaatgtagcatcaccttatttacattagtgttgatgtgaccttgacaagccaacccagagttgtgagtagcttagtgaagcatcccagagatgttaacctgttaacctttaaaacaaactcactctcctcccatctccctgacttccttcttattagttccacacttaaatgttggtgctggtgcctttgccctcttcagtcgtgtgatctcttggtgatctccatactgtggcttcacctaccaccttggtagtgaagtcttcaaagacccacctactttttttttttttaagacggagtcttgctctatcacccaggctggaatgcagtggcacaatctcggctcactgcagcctctgcctcacaggttcaagtgattcttctgcctcagcctccccagtacctgggactacaggcatgtgccaccacgcctggctaatttttgtatttttagtagagatagggttttgccacaccttggccaggctggtctcgaactcctgacctcaagtgatccacctgtttggcctcccaaagtactgggattacaggcgtgagccaccgcgcctggcccaacatctttatttctaattttactttctgctaaaaaaaaaacagacacacaaattataatattttattatagaaaaagcatcccaaatacaggatttcgtaaacactggtaggtgaacaagtgcaattttaaaagtaaatacaaagtagaggcaaaacctacaagcattttgccttcagaagaaaatgtaatgttctcctgcactagtgatcccacccagaacacaaatgtggctccatctcccatgaaagcatcatatttgctttctgagctcagtattcccatttcaataattgcaaagtgatggcaagaagtggcactgaatacattactacaaacccttgacttaaaatattgagacagggtcttgccctgtcatccaggctggagtgcagtagcgtcatcatggctcactgcagcctcatcctcctgggctcaagcaatcatcctgtctcagcctcttgagtggctgggaccacaggtatgcactaccatgtccatgcctggctatttttttaattttttacgttgcccaggccagtctgaaactcctgacctcaagtgatcctcccaccttggcctcccaaagtgctgggattaccggcatgagccactgcacccagccaaaacctttaatttttttttttcttttttgagatggagtcttgctctgttgcccaggctggagtgcagtggcatgatcgtggctcactgcaacctctacctcccgggttcaagcagttctcctgcctcagcctcccaagtagctgggactacaggcacttgccaccacaccgggctaatttttttgtatttttagtagagacggggtttcaccatgttggccaggctggtctcgaactcctgaccttaggtgatttgccggcctcggcctcccaaagtgctgggattacaggcgtgagccaccacgcctggccaaaaacccttgctttttaacttcgattgacacttaacaaaaatcctccacatcccactttttgacagtttacattaaagcctgtggtctgaatatttgttttacttagagggggaccctttgggcaacttatttgcaaacacatctaaccttcctgggcttattccacagtattttcatagacctgtatatattagacatcacactgttctcttgggatttaaagtagtactgggtactgcatattgtgcagtaaatctggcttgctttcttaacctttttgctgccattctttcaaatatttttccagggcttaggggaaaccattaaatgatctgacttaacactgtcgtcttgccctccctccaactcctcagtggcaaatgtttcctcatcaaaacagcatgatatgatgcagatgcaaactcaagattctaaacttcagattcgggttaatcttggcttgccgatttctctggctaaaatatcaacagcctggcttgcttatttaggcacttagaagaaaacaccaaacccaagtttcacatttttaaaattacaaatgcctcttacccatctggccaggaaccaactctgaagggggtgacctcaacccagcccttgtttctgtgaggtcctgcttttgcagaatggcctgcccctgggactggagcaggcttgggtgagctctaggtggagggtggtgggaggggcatagaaataaaccttcctctccatcagaaggaacctgtgatcccagcttttccttcagtcaccaccacctcgtgacactagaaagcctaccgtcacagatttccagcttactcaaaccccacaggttggggtcaaatgcatgttaacctaatttgggggaaaaaagactcaatcttgaaagcctgagcaaagtaaagggttacacaggacagtgtcaagtatatgccatacttcatacctggcattttccctaagcaagaactaattagttttcatttttaagtgttagctgtggcatggtttacacttaaatgttaacaatacataagctgtgtaacagaagttatacatagttatcatggaatatacaaacactaggtaattcaaatttcctttgtaatggcatggaagtctactgagaagcagaaaagaagcaccatttaacaattatctgggctagtcaactggtagtgggtataaatgtactggtaaggtcaaggccacacctaacctcaaatatgagccaattagtttcacagaaataaaattaccttctagctacaaataatcctaacccttaatccaggccattggccttgcaaatggatgccaatagtcatcaggtgggggatagctcagtttaaccacttactacattctagtgaagaacagagcattaatttccacagtgatgctagtcacatgcagagaacgtaagaacactttttcagccctggaaagagctttcaacatctacctggcttttatctttggatgattatgactaggacagtcattaaatggaatcgagtagcctctcctacacaggatgagcatcccaaatccaaaaatccgaaatttgaagtgctccaaaatccacttttttgagtgctgacatgacgttcagaagcctttcagatttggggtgctcaactgttaagtattccaaaatctgaaaaaatctgaaacctttctggtccctagcattttggataagagatactcaacctgtattccagtcagcttctaccacaaactgggagataattccaaaatacttatatctggctctgcactctaaatttagctatactattaatagccatggagaacaggagggaagatggttcagcactgtgtgggctgaggagggtgatctgggtgatcatgcactgataacagagctaatagatcaaataaaatgactgggcttaatttccattcagctcacccttcctttggggatgacattggtataatattcctacccaatgtgtgagcagctattaggctatttcaagaaccaaaatacactgatatccaaaaatcccatggtatgaaaacatacagagaaaagtcctgcactaggacagggactgtgcagatgatgcttcccacccagcttcactccatgtaccccatgctggcactcttatgagtctttctgttgagaaactgagcaattgtaagcaatttctgtcctcatcttgaaagcctttaagccatatctaaggtctcctggacatatccacagcaatgtgctgctccagagtgttaagacctatggtttcacaccagattccaagccaggataacccaactggcctgatttggagaggtccttctacttgcattgtgagtttcattccaaatgaatcatccatttgtttagactccgaaaccttgaagctaaaaaggtctcatcaacactgttattccattatccttcctgccaaggaatctgtgtggttttgaattgttcactgcattaatgagacacaaatctgaatttaagctcttaagaatttccttttggacattctgaatgagaccctagttctttccagatgcaatttgggtgcagaggccaccaagaatggcatcttcattaacctctaatgagcatccgattggtgtctgcttttagaagttagagattgtcaccttttcagtttggtccctttgctactaagcaatttgcctggtataaaacaagacaaaaacaaaacccaagaacagagtataaaggataaggactgctttgctaagcacgaggcaacaggagtcttgacttcctttcctgcttttgcagttacacaaagactcaatgaacagcaccagacccaaatttttcaagttaccagggctgctgcaaagatggtagctaattaccagtgagtacttcttcatcccctgccagaggcatggacttactgaaaaggacatatgttaattatggcagaaaggaaaaggttaggggagaagcatgtctcctactcaaggtgagacaaatcacgagggagggctggctgcaggcatcccaggtgagatgggctccaacaaggagtagacccacagctggccctaatcctgaaagtcgttagaagccatctgagaaagtggggcatttagccggtcaagttcatccacttggggtgggtgatgcattaatatctcctggtcctccaagacatcatctccagcagctaccagattcgtgagggatttgcttcgaacacactggaaatccacatggcgactcttcccttcttccttttcccatgacatctggatgaaggggcgttgtacataattatagatgacttcagaccggccgccaggccttctcttaattttttctttacaggtagggtaacctgcaatggaaaaaggccattctcatgactaacaaattgtgctcactctggtgtccatactttctccttcctaaccacatcagttttctcccaaaatcacagcatggaaaatatgtgcgaagtgaccagtccctgtcccatgctttcccagccccagtcacctacatgttcatttccttcctggtcagattagtaggtcttgtccctagaagggactaatctgagaagtaacaagaattctatcccttctaatggaaagaggagagaagcctcttaccagttcaggaacctgttgttgctggcaacaataccatagaagaaaagtcctgccaaagcatggctaccctagtcctcttaattctattgcttagagggcatactatatgagaaacagttaaggaaatgtggaatgtttagcctaaagaaaaaacagagatgctgcctaaaatatgtgaaaggttgtcacatggaaatgggaaaaatagtcaaagtagcttcagaggctattaactggaaggcaggcaggagagggaggccgttatctattaaatatgtatggcagaatgttctaatggtaaaacagtttgatgggttgttctgggaaatgcacctaacagacaagggaaagaccgagtaggaggagatttaatagataatctcaaaaatgtcttccaaggctggacactgtcgctcacacctgtaatcctagcactttgggaggccaaggcaggaggatcgcttgagtccaggagttcaaaaccagcctgggccagagggagacctcatctcttagaaaaaaggttaaaaaaaaatagtggagcatagtggtgcatgcctgtggtctctgctacttggaaggctgaggcaggaggaccacttgagcccaggaaggtaaggctgcagtgagccatgattgtgtcactgtactccagtgtaagcagaagagtgagaccctgtctcttaaaaaaaaaagtcctccaactttaaattcaacttaagtcagacacagtgaagctttgatgggttctgtgggcagaaatgaggcaacaagagtagcaaagcacaagagtcaaacaaagatccacatagggggccaggcgccgtggctcacatctgtaatcccagcacttagggaggccgaggcggcggatcacgaggtcaggagattgagaccatcctggctaacaaagtgaaacaccgtctctactaaaaatacaagaaattagccgggcatggttgcgggtgcctgtagtcccagctactcgagaggctgaggcagaagaatggcgtgaacccaggaggcggagctggcagtgagctgagatcgtgccaccgcactccacctgggcgacagagtgagactccatctcaaaaaaaaaaaaaaaaaaaaaaaagatccactccacgtaggagagaccaaatgactttagcactctccaggaatcagtctcttgagagccttccatggggaccacaggttgggagccactgctcaagatcattcaaagtagttctgttaatatattcagacattcctcaaaagtatggaataatctttttttttttttgagatgaagtttaactcttattgcccaggctggagtgcaattaccttggtatcccaaagtgctgggatcataggcacaacaaactgtgcccagccggaataatctttaattttgagtccccaagctattttttcagaaggacccttccagataccagaaacatcttcaccaagactggtggcagaacgacgctctcatctggtgagcccacaagccctgctgtatctccctaccactgtcctttgcccttgctgctctttatcctgaagtagtaaactcgaacttgtttctgtggctgctttgaaccattttcaactggagataaaatgaaaagaaaaatgaggaaaaaacaggaacattcaaacttgagtaagaatgtggttttcatgtatgcctattttctaggcctctggaggctaaattttgaggatgtaagctgtggcaatagacccaacctgaatgttgactgggattttttttttttttttaccttcaattccaatgcgaatgttttttaggccccgttcctttaacactgtttttgcaacatccctattctcaatatatttgaagaatctgtagagcttggagctataaagaactgaaaaagaaaaaatatagggttagccatggagtaaagacctaagaggaaagagagaagctaacaaaatcaaactaatgaaggatatacttgactcctaatcccaaataatccagatggatcaaagattaaatgttaaataatacataaaccgtaagagaaatttttatagtctcagggtggggactttctgggtacaacattaaacctagaagccataaaagaaaaactgatgattttagaaatacaacatctctgcatagcctaaaccgtttaccaaagctaaaaagacactgaataagaaaatatttgcaactcataaaaggttaatttccttaattagaaagagctgccacaaatagagctttcacaaatcactaagtaaaaaactaacaatctgattttgtaatgggcaaaaggcacaaacactattaacaaaaaaggaaattacaatggctcttgaaaactaaaaaggttttggctgggtgtggtggctcacacctgtaacccagcactttgggaggccgaggcaggcagatcagttgaggttgggagttggagaccagcctgactaacatggtgaaaccccgtctctactaaaaatagaaaaattaggcatagtggtgggtgcctgtaatcccagctactcgggaggctgaggcaggagaagcacttgaaccctggaggcagaagttgcagtgagccaagatcacgccattgcactccagcctggccaagagaagggagacaccatctcaaaaaaaaaaaaaaaaattcagcctcactcatgaaataagaaatgtaattaaaactcatgccaatcatgagattctgccgtttttttttacttactaagaaagtagcaaagataaaagttttaaaaacactgttttggggccaggcacagtggctcacgcctgtaatcacaacactttcgggggcagatgcaggaagatggcttgaggcctggagtttgagactagcctaggcaaggcaacatagaacccatttctacacaaaattaaaaaaaaaattagccaatcatggtggcacacacctgcagcccaggctacttggaggctgagatgggagaatcacttaagactaggagtttgaggctgcagtgagccatgattgcaccactgctctccagcctgggtgaaagagcaagattctatctgtaaaaaaattttttaagaagccactgttggccagccatggtgcctgcaatcccagcacttgggaggctgaggcgggtggatcatttgaggtcaggaatttgagaccagcctggccaacatggtgaaaccccgtttctattaataatacaaaaattagccggacgtggtggcacgcacctgtagtcccagcttcttgggaggttgaggcatgagaatcacttgaacccaggaggtgggactctgtctcaaaaaaaaaaaaaaaaaaaaaagaaaaagccactgttttggtgagggggtaggaaacaaacctgtcatgtattgttttctgagtgtaaattggtacaaattttatggaggataatttggcaacatctatcaaaattataaaggtataatttttttttttttttttttgaaacggagtctcgctctgttacccaggctgtagtgcaatggcatgatctcggctcactgcaacgtctgcctcctgggttcaaatgattctcctgcctctcagcctcctgagtagctgggattacaggcatgggccaccatgcccggttaatcttttttttttttttttttttgagacgtagtcttgctctgtcactcaggctgaagtgcagtggtgtgatcttgtctcactgcaacctccgcctcctgggttcaagtgattctcctgtttcagcctccagagtagctaggattacaggcatgagccacgacgcccagctaatttttgtatttttaatagagatggggtttcactatattggcaaggctggtctcgaactcttgacctcaagcaatcagcccaccttggcctcccaaagtgctgggattacaggcatgagccactgcgcctggccaatagtttaaacgtccaataatggctggttaagtcaattatggcacatttgtgcaaaggaacactatagagccacaaaaaagaatgttgaagatttttcttttgtttttttgagatggagtctcacactgtcgcccgggctggagcgcaatggcgtgatctcggctcactgcaaccgccgcctcccaggttcacctgattctcctgcctcagcctcctgagtagctgggactacaggcgcacgccaccatgcctggcttattttttgtatttttagtagagatgggctttcactatgttggccagactggtcttgaactcctgacctcatgattcgcctgcctcggcctcccaaagtgctgggattacaggcatgagctaccgcgcccggcccagaatgtcgaagatttttgttaacacatggcaccgaacagttgtataatatggtacatttgaaaaaggaggagaaaacaagtaattggttatatatgtacactgaatatacctggaagcctgtaaaagaaattgagaagcaaaactggatagatggggcaggagtgagaataagactttttagtgtatatccttttatgttttttgaattttgacttattaccaattcaaaaggatttaaaatgaattaagagaagaatgacaccatcatttaatgtgctgcctcagtatcttacacagtacgagacaccagagaaagagtgaatggtgaacaacattcactgtgttccccagcataaaggctagacctgcgtcactagggatttgtcatccaggtgagtgtgctcatcacaggctcaacattgatattcacattggttctaggatcaagctgctactccaggtagcaagtttcttgctgaaaacatctacgccatgccagaagctcctactttgggaatattcctcccccattggtggagggtggtcttcatcccagtccacagaatcctcatccgtcagcacaacaatgtggcactctcgttctcctttcttggcacagcccaccatgatgggcaagatgagctcttcgaggtagtgatcaaactgcttatgagcaccgtcattagacagttcatggagtaaagcacctgcagagagaaaatgtaggtgaacatgctttctgcctaaatgcacatattactggagtgaaaaagactatgagggaatggctgttatcattgatgaggttcagagaagtggcacatttaaaggcaaagagattgtttcctgctccagggtgataattaagctttgttaaggtatgtctcctattctaccactcttcaatttactcatgtttaataatccttgagcattctgatcgaggttttgttggacttacaaggtcagaccatgttaatcctataagagatgaaatcatcatttggggatgattctttgtagtacctcttctgaagatggtttggatcctgatttcatggagttagagtaccataatagaggaataatctgaattttggtgacaccaaaggacttactctaaatgtgtaatacactcagtaaagaaatcacatgtacaggggctttcatgcaacatgcagggaaatgtatcatgaaattcagagaatagttatttatataatttcaggaagcccaggtaataagagcatggagtttgcagtcagacaatctgagttctcatcctggccttaatgcctagagctctgaataagctaatttcttaaatgaggttatcacccatctttcaggactattataagatttaagcaagtccgtatctataaagcacttagcaaacactaagttaataataataggccgggtgcagtggctcatgcctgtaacctcggcactttgggaggccgaggtggcagatcacttgaggtcaggagttcgagaccaggctggccaacatggtgaaaccctatctctactaaaaatacaaaaattagccgggcatggtggcacgtgcccgtaatcccagctgctctggcaggagaattgcttgaatccaggaggcggaggctgcagtgagctgagattgtgccactgcactccagcctgggcgacagaacgagactcttgtctccaaaacaaaacaataataataagccaggcgtggtggcatgtacctgtagtcccagctactcaggaggctgaggtgggaggactgcttgaggccagaagtttgagaccagcctgagcaacatagtagcaagaccccatctcaaattaaaaaaaaaaaaaaaaaaaaaaaggcaatatcatgatcaggagaacctggccaatttgtgctgtttgactttattagtgaactgttcctcatgttggacaatcagtatccttgtttgttagagtcgagacaccaaagtcccaagagggaagcagtcagcttggtctcccactggtcaggctccatttagaaactactatctgttttcctttgtctactccagttcctcacagtgctttgaactaagagaggaaaagggttagttagtatcacatctctgcctctgcagaagattttcaacctaaacttgaaactccttctgtttagtaatagaaaatatcagctgggcttggtggctcacgcctgtaatcccagcacattgggaggctgagggcgggcggatcacctgaggtcaggagttcaaaaccagctcggccaacatggcaaaaccctatctctactaaaaatacaaaaattagccaggtgtggtggcaggtatgtgtaatcccagctacttgggaggctgaggcagggaaaatcccttgaacccaggaggcggaggttgcggtaagccgagatcgtgccactgcactccagcctcggcgacagagcgagactctgtctcaaaaaaaaaaaaaaaaaaaaaaaaaaaaaatcggtgacttccaagaaaactgaaagttcagctgcttaagtgcagctggcacctgctcctgtacttactcagatcttgacatcggatagtgttgaagtcaaaattaatgcagagataatcacaagtatctctaagatctgggatagagatgccatcaggacaattgatgataccggttttgtaataatcctgtaaatagattaggaagaaaaaatgtaggcagagaacaagatgaaaaattacttcttcatccctgtgcattcctggttttgttaaagcaatgagctactggaattatcaccaaattggatgattcattagatggcaaaacagctcctggctatcttgacttgtttaaccagaacttggtaactgatagagctcacatacaaacaagcaaggacttaaaagttacaggaatagaaaacaaagggagaaaggaaacaactggaaaccagagaccctaaagtcaataacatagttgatggaactctcaaggctattgatcacacatgcccctgaggaagagaatgtaacaaaaaaggctaccacacaccagcactgtgcgaaatacagttgcactgatgccttcagcaatctcatactctcccttctcattgggccgagtgaagttgtactctcttcctggtccaaacatcctgaaagatatccaggcaataatgttatcttctccatcatgattcttcacagatgagatttctcccttctccacctcattctggaagactccatcccactctctcatagtataaattaaaaacacagcactggaacccaatgcctacaagacacctcaagtcttaggaagctcccttcagacaggaaaaaaaggcaattgctttaagcatttgtgtacaaagaagaatgaaggatcaagtccacaaagttcatctgtagtgagtttctttggcagtaaatgcagtaaatagcaactgcagaggtggcccttggaaaatatctgtgttgagatggtggcctttcatgccctccccactgcccaagaacctgcttttctatactgacagctcagaaagacagcatctaggctcctttttattcctgtcccctcatctgtcaatactgacctatctaatatgccattcatcaatatttctgagctttacttttcaacatctcatcttctgttagatgcagctatgttaatgctttcttggtatgtcttaatagtcgagctctgggggaaaaatggccttactcaatacaaagaataattaatgatgggattttcagatcaagtagaaaaggagggtagtaggtattaggcttatcagcagtttactgcatttcagagagacaggcttgctgtcagcatgaactcagaagtcatgagggtacagggagaagagcttttcttatttgcctctccccatccttcctccctctatcagatcccttgcagtctaaatgaccccatgacttccactcctgctgcacttctgtgtatgagctgtggaatggttagataacacaaaggatagggcaggcagctgctatcttcaaccagcctaagatttgacttcccaatcaaatgggggttaactgccatttccttccttaaactgctgggaagtgttgcctgttcagctgttcacaactgttgtcctccagcctgaactggctgcttttcttttctttttttttttgagatggagtttcgctctgttgcccaggctggagtgcagtggcgcgatctcggctcactgcaacctccgcctcccaggttcacgccattctcctgccttagcctccccagcagttgggactacaggcgcccgccagggcacccggctaattttttttgtatttttagtagagacagggtttcatcgtggtctcgatctcctgacctcgtgatctgcccgcctcggcctcccaaagtgctgggattacaggcgtgagccaccgcgcccggcgaactggctgcttttcaaaggtctgaaaatgattccatttcggccgggtgtggtggctcacgcctgtaatcccagcactttgggagccgagatgggcggatc

SEQ ID NO: 223 - DNA, 746 bp, Homo sapiens
  misc_feature (2)..(6): n is a, c, g, or t
  misc_feature (9)..(14): n is a, c, g, or t
  misc_feature (17)..(18): n is a, c, g, or t
  misc_feature (35)..(35): n is a, c, g, or t
  misc_feature (37)..(37): n is a, c, g, or t
  misc_feature (68)..(68): n is a, c, g, or t
  misc_feature (131)..(131): n is a, c, g, or t
  misc_feature (140)..(140): n is a, c, g, or t
  misc_feature (166)..(166): n is a, c, g, or t
  misc_feature (191)..(191): n is a, c, g, or t
  misc_feature (297)..(297): n is a, c, g, or t
  misc_feature (330)..(330): n is a, c, g, or t
  misc_feature (374)..(374): n is a, c, g, or t
  misc_feature (400)..(400): n is a, c, g, or t
  misc_feature (437)..(437): n is a, c, g, or t
  misc_feature (443)..(443): n is a, c, g, or t
  misc_feature (445)..(445): n is a, c, g, or t
  misc_feature (448)..(448): n is a, c, g, or t
  misc_feature (460)..(460): n is a, c, g, or t
  misc_feature (462)..(462): n is a, c, g, or t
  misc_feature (492)..(492): n is a, c, g, or t
  misc_feature (495)..(495): n is a, c, g, or t
  misc_feature (505)..(505): n is a, c, g, or t
  misc_feature (511)..(511): n is a, c, g, or t
  misc_feature (523)..(523): n is a, c, g, or t
  misc_feature (529)..(529): n is a, c, g, or t
  misc_feature (544)..(544): n is a, c, g, or t
  misc_feature (560)..(562): n is a, c, g, or t
  misc_feature (565)..(565): n is a, c, g, or t
  misc_feature (567)..(568): n is a, c, g, or t
  misc_feature (579)..(581): n is a, c, g, or t
  misc_feature (584)..(584): n is a, c, g, or t
  misc_feature (590)..(602): n is a, c, g, or t
  misc_feature (604)..(604): n is a, c, g, or t
  misc_feature (606)..(609): n is a, c, g, or t
  misc_feature (611)..(612): n is a, c, g, or t
  misc_feature (615)..(615): n is a, c, g, or t
  misc_feature (623)..(623): n is a, c, g, or t
  misc_feature (625)..(625): n is a, c, g, or t
  misc_feature (627)..(627): n is a, c, g, or t
  misc_feature (629)..(630): n is a, c, g, or t
  misc_feature (632)..(642): n is a, c, g, or t
  misc_feature (644)..(646): n is a, c, g, or t
  misc_feature (650)..(650): n is a, c, g, or t
  misc_feature (652)..(652): n is a, c, g, or t
  misc_feature (654)..(654): n is a, c, g, or t
  misc_feature (657)..(658): n is a, c, g, or t
  misc_feature (663)..(663): n is a, c, g, or t
  misc_feature (666)..(668): n is a, c, g, or t
  misc_feature (670)..(676): n is a, c, g, or t
  misc_feature (678)..(680): n is a, c, g, or t
  misc_feature (682)..(686): n is a, c, g, or t
  misc_feature (688)..(688): n is a, c, g, or t
  misc_feature (690)..(690): n is a, c, g, or t
  misc_feature (692)..(693): n is a, c, g, or t
  misc_feature (696)..(696): n is a, c, g, or t
  misc_feature (698)..(698): n is a, c, g, or t
  misc_feature (700)..(704): n is a, c, g, or t
  misc_feature (706)..(707): n is a, c, g, or t
  misc_feature (709)..(712): n is a, c, g, or t
  misc_feature (715)..(716): n is a, c, g, or t
  misc_feature (718)..(720): n is a, c, g, or t
  misc_feature (722)..(726): n is a, c, g, or t
  misc_feature (729)..(733): n is a, c, g, or t
  misc_feature (735)..(737): n is a, c, g, or t
  misc_feature (739)..(746): n is a, c, g, or t
tnnnnnttnnnnnnttnnccttgctcagcattggntntgatgtgctggtggagaaccacgaagaatgnattgctgaggggagacctggtccagggtcttctcccctgtaatccagggccacactgatgagntctgggggntctgcacacacccctcccagaaccgnttcctcacctgcggccacgaccggnagttctgcctgtgggatggggagagccatgcactggcctggagcatcgacctcaaggagactggtctctgtgctgacttccacccgagtggggcagttgtggccgnaggactgaacacggggaggtggttggttttggncacagagaccagagagatcgtgtctgatgtcattgatggcaatnagcagctctcagtggtccggtacagnccagatgggttggtcctggcccaattggttccccatnacaacntnatnttcaatcttttngnggtttccaggggatggtgcccaattccagnccnttttgggccntttgtntttgggtcaacncccagnttcaaccactcaatnttggagtaggttcaannnttngnnttaccagttgnnnttntccaannnnnnnnnnnnntntnnnntnnttnttcttttncntnanncnnnnnnnnnnncnnntctncntnttnntcaanccnnntnnnnnnncnnncnnnnncntntnnctncntnnnnncnntnnnnctnntnnncnnnnnctnnnnntnnncnnnnnnnn

SEQ ID NO: 224 - DNA, 5887 bp, Homo sapiens
ggacgagtcgagcctcctgcggcgccgcgggctccagaaggagctgagcctgccacgccgaggacgtggctgccgcagcgggaaccgcaagagcttggtggtaggaacgccctccccgaccctctcccggcccctgtcgccattgtcggtcccaacggcaggcagcagccccttggatagtcctcggaatttctcggctgcctctgccctaaatttcccctttgcccggagggcagacggcagaagatggtccctcgcgtctctcccatcttccggctatggaaccaacacacccagctccaccctctcgtcaagctcatcctcccgggaacgtctccaccagcttcccttccagccgacgccggacgagctgcacttcctgtccaagcacttccgcagctcagagaatgtgcttgatgaggaaggcggccggtcaccccgcctccgaccccgctctcgcagtctcagcccgggccgtgcaacggggaccttcgacaatgagattgtcatgatgaatcacgtgtaccgggagaggttccccaaggccacagcacagatggagggccgtctgcaggagttcctgacggcctacgcgcccggcgcccggctggcgctggctgatggcgtcttgggcttcatccaccaccagatcgtcgagctggcccgagactgcttggccaagtctggcgagaacctcgtcacctcccgctacttcctagagatgcaggagaagctggagcggcttctgcaggatgcccatgagcgttcggacagtgaggaggtcagcttcatcgtccagcttgtccggaaactgctgatcatcatctcacggccagctcggctgctggagtgtctggagtttgaccctgaggaattttaccacctgctggaggcggctgagggccatgcgcgggagggccaaggcattaagactgaccttccacagtacatcattgggcagctgggcctggccaaggaccccctggaggagatggtgccactgagtcacctcgaagaagaacagcccccagcacctgagtccccagagagccgcgccctggtcggccagtcacggaggaagccatgcgaaagcgactttgagaccatcaaactcattagcaacggagcctatggggccgtctacctggtgcggcaccgtgacacacggcagcgctttgccatcaagaagatcaacaaacagaacttgatcctgcgtaaccagatccagcaggtctttgtggagcgtgacattctcacctttgccgagaacccctttgtggtcagcatgttctgctcctttgagacccggcgccacctatgtatggtcatggaatacgtggaaggcggcgactgcgccacgctcctgaagaacatgggcccgctgcccgtggacatggcccgcctgtacttcgccgagacggtgttggcgctggagtacctgcataactatggcatcgtgcaccgtgacctcaaaccagacaatctgctcatcacctcgcttggccacatcaagctcacggacttcggcctgtccaagatcggcctcatgagcatggccaccaacctctatgagggccacatcgagaaggacgcccgagagttcatcgacaagcaggtgtgtgggacgccggagtacatagcccccgaggtgatcttccgccagggctatgggaagccagtggactggtgggccatgggcgtcgtcctctatgagtttctggtgggctgcgtgcctttctttggagatacccccgaggaactcttcggtcaggtggtcagcgatgagatcatgtggccagagggagatgaggcccttccagcagacgcccaggacctcatcaccaggttgctccggcagagcccgctggaccgtctgggcactggtggcacccacgaagtgaagcagcacccctttttcctggccctggactgggcagggcttctccgacacaaagccgagttcgtgccccagctcgaagccgaggatgataccagctactttgacacacgttcggaacgttaccgccatctgggctccgaggacgacgagaccaatgatgaagaatcgtccacagagatcccccagttctcctcctgctcccaccggttcagcaaggtctacagcagctctgagttcctggccgtccagcccactcctaccttcgctgaaaggagcttcagtgaagaccgggaggaggggtgggagcgcagcgaagtggactatggccgccggctgagtgctgacatccggctgaggtcctggacatcctctggatcctcctgtcagtcatcttcgtcccagcccgagcggggtcccagcccatctctcctgaataccatcagcctggacacaatgcccaagtttgccttctcatcagaggatgagggggtaggcccaggccctgcaggccccaagaggcccgtcttcattctaggggagcctgaccccccaccagcggccaccccagtgatgcccaagccctcgagcctttctgccgacacagctgctctcagccacgcccgcctacggagcaatagcatcggcgcccgacactccacaccaaggcctctggatgccggccggggccgccgccttgggggcccaagagacccagcccctgagaagtccagagcctcctccagcggtggcagtggtggcggcagtgggggccgcgtgcccaagtcagcctctgtctctgccctgtccctcatcatcacggcagatgatggcagcggcggccccctcatgagccccctttccccgcgctctctgtcctcgaacccgtcgtcccgtgactcttcgccgagccgagacccgtcccccgtgtgtggcagcctgcggccccccatcgttatccacagctctggcaagaagtacggcttcagcctgcgggcgatccgcgtctacatgggtgatagcgacgtctacactgtgcaccacgtcgtctggagtgtggaggacggaagccccgcccaggaggcgggcctgcgggctggggacctcatcacccacatcaacggggagtcagtgctggggctggtgcacatggacgtcgtggagctgctgctgaagagcggcaacaagatatccctgcggaccacagccctggagaacacctccatcaaggtgggccccgcccggaagaatgtggccaagggccgcatggcacgcaggagcaagaggagccgtcggcgggagacccaggatcggcggaagtcacttttcaagaagatctccaagcagacctccgtgctgcacaccagccgcagcttctcctccggactccaccactcactgtcatccagtgagagcctccccggctcgcccacccacagcctctcccccagccccaccactccctgccgaagcccagcccctgatgtcccagcagataccactgcatccccacccagcgcatccccgagctccagcagccccgcctccccagctgctgctggccacacccgccccagctccctgcacggcctggctgccaagcttgggccaccccgccccaagactggccgccgcaagtccaccagcagcatcccgccctccccgctggcctgcccgcccatctccgcgcccccaccccgctcgccctcgcccctgcccgggcacccgcccgcacctgcccgatccccgcggctgcgccggggccagtcagctgacaagctgggcacaggggagcggctggatggggaggcggggcggcgcactcgtgggccagaggccgagctcgtggtcatgcggcggctgcacctgtccgagcgccgagactccttcaagaagcaggaggccgtgcaggaggttagcttcgatgagccgcaggaggaggccactgggctgcccacctcagtgccacagatcgccgtggagggcgaggaagccgtgccagtagctctcgggcccaccggaagagactgatcccctgccaggtctctccctggcatcaaagttacgcgttttcttgtgcaatgttttttccgtaaagtcatgcctggatggggactgagccaccagcctgacacccagaaggcgagaagccatctcggtccttgctggaaggtggagacatcgcttgtgttctggtgtcaatcagggggctggatggggcaagaatgggggacaagggtggctttgtaaatagcagcaaatccctgcaactaatttattactttttttttcttttttttttttttttttgagacagagtctcactctgttgccccggctggagtgcagcggcgtgatctcagctcactgcaacctccgcctcccaagttcaagcgattgtcctgcctcagcttcccaagtggctgggattacaggcgcccaccactatgcccagctaattttttgtatttttagtacagacggggtttcaccatgttggtcaggctggtctcgaactcctgacctcatgatttgcctgcctttgcctcccaaagtgctgggattacaggcgtgagccactgggcccagcctaatttattactttttataagcgatagccgtactgagccgccccctgaaggcggctgccaggtcttgccccaggcacctgggactctgtttgcaggccctgccctctgggctgagaaggatgcactttggacaagtcatctgtgtttgtgttttccagtttttctgtactttttaagtgttttgtgttacctggtctcattcccctccccacacctacccatttgaggggatggagttgaagtcacctggtcacctgtaccggcccagttcggctacaacctggagtgtccgtaaacaattcctctcacccacaaaacaatgtaatcccagcgatggactggattctgaaggccacttcccaccatcatagctgccatgcccaggcagtgcctgctctatatatagagtctgcctccaatcctgctggcttcagcctggagaagggatatgggagctggagctttgatggatgaataggtgttcaccggatctgggcagaggggtcatccgctccccaggtgggcactgataaaggaaggtacaggcctcacctggaactgccaaggcagcctccagaaatgctcggctgtctcggggcacgctccagtatgccagtcctgcgggattacgtccagctacttccagaaacactcagtgtcccctcccctcaggctctgccttggcctggccttgtccagtctaccctggacaagatgccgtgtgtttgaggcccagcagagtaagcccttggccgtgatgtgtctgaaacacctgttaggggttccctccatatgtcagagcctctctgggatgaagttcaagccagaaaacccagtcgaggctcaagtttgaatttcagcttcactgtgtggctctgggaaaatggctttcccactctgtgcctcagtttccttgtgtttacaagactaatcccattgactgtttattaagcacctactgtgtgccaagcgcttttacgtggcttctccctcagccagccttgagaaggctggaggtggtgtcatcacctccattttacagacaaagcagctgagaccccagcgaggggcggagacctgtcccacgatcacccagcaggagtcgtggcagaacggagcatcagccagaccctgttgtgggcgttgtcatcaagggagcttgaatggagggtctggtgtcagatacagccgactccagccccagctcatcccccatgatgctgtgtgacccactgggcactctggtgagggagctttccagacatcaacagcccactctgcttccctttctgagtcccctgtccagcactgcctagtgttggagggtagaccaaggctgtgcatgattcaccccctccttccatcctggagctggcagtgaataaaagcccgtatttac

SEQ ID NO: 225 - DNA, 4095 bp, Homo sapiens
gccgcggatcgcgtggtctgcttggctcgccgcgcctctcccccgtccgtccatattgctgcagcccccgagccgggaagcccgggccgccccgggggcgggggggagggagggacgggactagaagcctgccgggctcggggtgggggcgtcttgcgaggaacgggcggggggggacgcacgcctaggaggcctggactgcagagtggggggccttcctccccccccgccccgctagtgggcctcggatttacggcggctgcatctaactgggagggggccgcacctcgcgtgaaccccgacccttctctgcagggactggggcccagcgccccggaggaaggcgtcgcgggcgctctgctagccaaggtgaacccgtggactaagaacgcattgccgccggtcctgaccaccgtgaacggacagtcccccccagaacactctgctccagccaaggtggtgagggcagctgttcctaaacagcgcaaaggcagcaaggttggtgactttggagatgcaatcaattggcccacacctggagagatagcccacaagagtgttcagccacagtcccacaagcctcagcctacccgtaaactgccacccaagaaggacatgaaggaacaggagaaaggagaagggagtgatagtaaggagagtccaaaaaccaaatcagatgaatcaggggaggaaaagaatggagatgaggattgccagcgaggcgggcagaagaagaaaggaaacaaacacaagtgggttccattacaaatagacatgaagcctgaagtgcccagagagaaactggcttcacgccccactcgcccaccggagcctagacacatacctgccaatcgcggagagatcaaagggtctgagtctgccacctacgtgcccgtggccccccccaccccagcctggcaaccagagatcaaaccggagcctgcctggcacgaccaggatgagacatcgagtgtgaagagtgatggggctggtggggcgcgggcttccttccgtggccgtggacgggggcgtggtcgcggccggggacgcggccggggtggcactcgaacccattttgactaccagtttggctaccgaaagtttgatggtgtggaggggcctcgtacgcccaagtacatgaacaacatcacctactactttgacaatgtcagcagcaccgagctttacagtgtggatcaggaactgctcaaagactacatcaagcgccagattgaatactacttcagcgtggacaatttagagcgagacttcttcctgcgaaggaaaatggatgctgatggtttcctacccatcacccttattgcttccttccaccgagtgcaggcccttaccactgacatttcactcatctttgcggccctaaaggacagcaaggtggtggagatcgttgatgagaaagttcgtaggagggaggaaccagaaaagtggcctcttcccccaatagtggattattcacagactgatttctcccagcttctcaactgccctgaatttgttccccgtcagcactaccaaaaggagacagagtcggcacctggctctcctcgtgcagtcaccccagtgccaaccaaaacagaggaggtcagcaacctaaagacactacccaagggcctgtctgccagcctgcctgacctggattctgagaactggattgaagtgaagaagaggcctcggccatccccagcacggcccaagaagtcagaggagtccagattttcccacctgacctctctgcctcagcagctgccttcccagcagctgatgtccaaggatcaggatgagcaagaggaactggattttctgtttgacgaggagatggagcagatggatgggcggaagaacaccttcactgcctggtctgatgaggaatctgactatgagattgatgacagggatgtcaacaagatcctcattgtcacccagacaccacattacatgcgccggcacccagggggggaccgcacaggcaaccacacctcgcgtgccaagatgagcgccgaactggccaaggtcattaatgatggcctcttctactatgagcaggacctgtgggctgaaaagtttgaacctgagtattcccagatcaagcaagaagtcgagaacttcaaaaaggtcaatatgatcagccgggagcagtttgacacactgacccctgagccccctgtggatcccaaccaggaagttcctcctgggccacctcggttccagcaagttcctacggatgccctggccaacaagttgtttggtgctcctgagccctccaccatcgcccgctctctaccaaccactgtcccagagtcaccaaactaccgcaacaccaggacccctcgcactccccggacaccacagctcaaagactcaagccagacatcacggttttacccagtggtgaaagaaggacggacactggatgccaagatgcctcgaaaaagaaagacaagacacagttcaaacccacccttggagagccatgtgggctgggtgatggattcccgtgagcacaggccccgtactgcttccatcagctccagcccctcagaagggacgcctacagttggcagctatggctgtacccctcagtcattgcccaagttccagcatccttcccatgaactgctcaaggaaaatggcttcacacaacacgtctaccataagtatcgtaggcgctgccttaatgagcggaaacgcttgggcattggccagtctcaggagatgaacacactcttccgcttctggtccttcttcctccgagatcacttcaacaaaaagatgtatgaggagttcaagcagctggctctggaggacgccaaagaaggctacagatatggtttggagtgcctttttcgatactacagttatggcctggaaaagaagttccggctggacatattcaaggattttcaggaggaaacggtgaaggactatgaagctggccaactgtatgggctggagaagttctgggccttcttgaaatattccaaagccaaaaatttggacattgaccccaaactgcaagaatacctcggcaaattccgacgtcttgaagacttccgagtagatccccccatgggtgaggagggcaaccacaagcgacactcagtggtagcaggaggtggcggcggtgagggcaggaagcggtgcccctcccagtcttccagcaggcctgctgccatgatcagccaaccccctacaccacccaccggccagcctgtccgggaagatgccaaatggacaagccagcactcgaacacacagactttgggaaagtgaaaagctccttagccctggggcttgaggggggaaaggggtagggtgggtaagagtccatgggggtgcccagtcccaggagaggggacaatgaagggacaggcctggagttactaggacaggcctttgtgctgagtagcaatgtatacaccatttgggctatcagaggtacccctgggcaggagcctctacatccccttccccctcctctctccatgactcttgacatcctagcttcttctaaggggggagggaaaggggggagatttttatatatatatacatatatatatatcaagttttaaattattgatagttcatctggattaccaaaatcactctgcagccctgcccgaggctagtaggctgcaaccctggtccccacccctaacctcctgctccccctcaagccaactatgcagcccacaagaaggccctgcgggcccccccattgcccagcactgtctcatagaaggctctggtggtacctctgggccccaggagcatcagccccttgatcatctggggtttgtcatcaccatattttctccctgctgttcccaccatgcccttctgccatcttctgggagaaggaaaccaaaggatctaaaactggggtttgggggaaggtttcagcctctccccactccccttgccccacaccctttactccccagcccagagagacgctgcttttaccaggaaagactattgaaagatgttttattttatttttctctgacctttccatccttgaaaaaatggggaaaaaaagaagaaaaaagacaaaatcgaccataaaagacc

SEQ ID NO: 226 - DNA, 1069 bp, Homo sapiens
gagcgtgctgtctctgccacccgcagacgagaccctgtacgaggctcctgagcccatcttcaccagcaataactcgtgtagcagcccgggcggctgccgcctcttcctcagcaccatccccgtgctctggaccctcctgggttcctagtcccagccccgcaggacgccgaccctgcctggacggccccgcctggaccgcctgacctcggccctccggacccggctgcggcccccgcctccgagaccaaatagagacgctgcttctccctcgcctggtgccgcccccgccgggcaggggccatccacccgccccaggaccagccctcagggaggggaaacggccgagagcccccccccggaggcccgaggggccggggtgtggatgcggaccgtggccaggccatctcctctggggcgtcggagaacccgggaacctcttggcgattttttttttttttttttttttttttttttttttagtgtatttttcgtggttggatcaaaaagacttgagtttttaatttaatttattccctgccgttgtagcggggcggggtccctgtgccctggcctgggggaggggaacgcggaacatggggtcgggaacacagccgctcccctctgctctgcaccccactcgtgggggaacacagccgctcccctctgctctgcaccccactcgtgggggaacacagccgctcccctctgctctgcaccccactcgtgggggaacacagccgctcccctctgctctgcaccccactcgtgggggaacacagctgcagcccaccgcggacccccctggtgctccaggttgggtgagtctgaaccggaaggggtctttgtgggcgcccctcattgtggctggggagacctcataccccatcgcccacccccgtcctcctggtcatttcctcccaaacactgttttgccccagcgcccttcggaatcacagtcccgccgtgtcttaaaaactgctttggccgatgcaaacagccccctacccgtccccctcgcctcacacggtccctctccgaagccgagaagacttctgttcctgtaaataca

SEQ ID NO: 227 - DNA, 2505 bp, Homo sapiens
gaaacccagagacctcctggggagccgccgccgccgccctctcggccatcgctgcctccgccgcctgctccacctcgagggacgcgagcgggcggcggggctggccgtgagagagacaggagaggaaggagggcaggggcggagttgcccgccttagcccccgcccccggccgcggccccgggccctgccccgcgcggccctgcccggcccaccgagccctggtgtggcagcggctcatggcggccgtggggcccccgcagcagcaggtgcggatggcccatcagcagatctgggcggcgctcgaagtggcgctccgggtgccctgcctttacatcatcgacgccatcttcaactcctacccggattccagccaaagccggttctgcatcgtgctccagatcttcctccggctctttggtgtatttgcatccagtattgttctgatcttgtcacaacgatcacttttcaagttttacacgtacagctcagcctttctgttagctgcaacttcagtgttggtgaattattatgcttctttgcacattgacttctatggtgcctacaacacgtcagcttttggaattgagctgcttcctcgaaaaggtccctcgctgtggatggcacttatcgttctacagctaacatttggaattggatacgttacactactccagattcattccatctattcacaattaattattttggatctcttggttcctgtaataggcttaatcacagagctaccattacacatcagagagactttactgtttacttcttccttgattctcacattaaatacagtgtttgtcctggcagtgaaactgaagtggttttattattccacacgatatgtttatcttttggtgaggcacatgtatcgaatttatggattacagttattgatggaggacacatggaagaggattcgtttcccagacatactacgagtcttttggctaacaagagttacagctcaggctacagtgttaatgtacatcttaaggatggcaaatgaaactgattccttctttatttcttgggatgatttttgggacctcatttgcaatcttataattagtgggtgcgattctacactaactgtactgggcatgagtgctgtaatttcctcagtagcccattatttggggcttggaatattggcctttattggatcaactgaggaagatgacaggcgtcttggctttgttgcacctgttttattttttattttggctcttcagactgggttaagtgggctaagaccagaagagagacttattcgcttaagtagaaacatgtgccttttattaactgcagtcctgcattttatccatggaatgacagaccctgtattaatgtctctcagtgcctctcatgtgtcatcttttcgtagacattttcctgtgctgtttgtctctgcttgcctgtttattcttcctgtcttactcagttatgttctttggcatcactatgcactaaatacatggttgtttgcagttacagcattttgtgtggaactgtgcttaaaagtaattgtttctctcactgtttatacgttattcatgattgatggctactataatgtcctctgggaaaagcttgacgattatgtctactacgttcgttcaacaggcagtattattgaatttatatttggagttgtaatgtttggaaatggggcttacactatgatgtttgagtcgggaagtaaaattcgggcttttatgatgtgcctacatgcatattttaacatctacttacaagccaaaaatggctggaagacatttatgaatcgtaggactgctgtgaagaaaattaattcacttcctgaaataaaagggagccgcttacaagaaataaatgatgtatgtgcaatctgctatcatgagtttacaacatctgctcgtattacaccgtgtaatcattatttccatgcactttgccttcggaaatggctgtacattcaagatacttgtccaatgtgccatcagaaagtatacatcgaagatgatatcaaggataattcaaatgtatctaacaacaatggatttattccacccaatgaaactccagaggaagctgtaagagaagctgctgctgaatctgacagggaattgaacgaagatgacagtacagattgtgatgatgatgttcaaagagaaagaaatggagtgattcagcacacaggcgcagcagctgaagaatttaatgatgatactgactgatgaaaatagcatttattaatgattgaggtatttgtttaaaattcagttcatccaaaatggagtaatatccttcaccttcagtgtgtaaccaagcacaaaaacagtatcaatgttgaatctgtgaatggttttccgtttactgtgatgtgctactgtaaatatacctctttaattacttctggtctctttggtgacctgtttaaatttgtgtacattattgtacatagaataaaatgttttcacatttttatgacaaaaaaaaaaaaaaaaaaa

SEQ ID NO: 228 - DNA, 222930 bp, Homo sapiens
  misc_feature (13314)..(13314): n is a, c, g, or t
  misc_feature (13550)..(13550): n is a, c, g, or t
tgtagccccagctacttgggaggctgaggcaggagaattgcttgaacccgggaggcagaggttgcagtgagccaagatcacgccactgcactctagcctgggcaacagagtgagactccctctcaaaaaaaaaaaaaaaaaaaaaaaatatatatatagaatgcctttaatgagcagtaaatctaattttattaaatctcaacccttgggtacggtgtgtcatgaaatgggaagtagcacacagtactatatgctacagatgaagtacaatgctgtcaaataggggtacttgtgttaattgttggagtcgcaagctgaactagcgttttcttttcttttcctttcttttcttttcttttcttttcttttcttttcttcttttcaagacaggttctcactctgtcactcaggctagagtgcagtggtgcaatcacggttcactgcagcctcaacttcctgggctcaagcgatcctcccacctcggcctcctaaaatgctgggattataggcatgagccaccactcccagccccacttttttcagactggaaaacgcacactcacatgtgcatctttaaatgatcacttgggctgtggtatggagaatggcgaccagtgaggaggcaggagctgttgtccgagcaagggatgatattggcatcttggattggcatggtggcagtagtggtagtgcagagtgacttgggtagattttggagccatttagaaggtaacatccacaggaactggtaaataaatacgtgggagaagttgggtgaagggggtgtcaaagattacacccaatttattttgcttgggcaagttggtggatggtgagcccctcactgagtgagaagcctggagaagcaggtttggagggtggtagtatgcaggtggtatgcatagttggggatgtgtgttgagtttgctatgtccggtgagcttcccagtggagatgtccaatgggcagacggatactcacatagagagttcatggtagattcgggctagaggaaagcacctgaggcctggccagagacgcctagaggaacagagcctggttaacagtcactcctggtgtctcagatattctctgctcagcccacgccctctcttccacactgggccacctataaagcctccacagatacccctggggcacccactggacacatgccctcagggccccagagcaaggagctgtttgtgggcttaccactgctgttcccatatgcccccaactgcctcccacttctttccccacagcctggtcagacatggcactaccactaatggaatctttcttgccatctttttcttgccgcttaacagtggcagtgacactttgactcctgatttaagcctgattctgcttaactttttcccttgactttggcattttcactttgacatgttccctgagagcctggggggtggggaacccagctccagctggtgacgtttggggccggcccaggcctagggtgtggaggagccttgccatcgggcttcctgtctctcttcatttaagcacgactctgcagaaggaacaaagcaccctccccactgggctcctggttgcagagctccaagtcctcacacagatacgcctgtttgagaagcagcgggcaagaaagacgcaagcccagaggtaaggtggtcagactcggcttccttccccggagctgagagggaggggaacgtggggcagatgcacaggaatgtgctctgcccagttgtctgcccacagctctggccaccttctcttgcatttctcttggaactggtcatgagcagcgatttcccactggaactgtgagcttccagaggtcagagactgtgctagactcctctctgcagccccagcgtgcacagctcagtgtccagagcaatgggtgctccttagaggagtagtgacctaaatagcaagatcagagagggagtgaagactggagactatcccaggctgggaaaggcgtggaaggcaactagtcgtgggcagtggaggggagaagactggaagaggggaaaagaggagaaaaagagtgaagaaggggagggaaaaaattagaaagaataaataaatataaggtgggaggaaacctataaaaaagaaatgatgaggaaaaacgataaaaacaagaaaaagagcaaaagaagtggaatctagtctagagaaaattcttgcaaaaccaattttcctaacgggacaatctccaaaaattgacaccaaatatcatacttgcagcatttcataagtcgcatgatctatgtaatagtctcttttaactaccttttgtgtttctgtgtgtatttttaaatttttgtctacttctttgctcttttaagacttttgaacaatgtctaaaggcacttctactctagttagctttaaaatgattcatgaaataggaaagctaaaattctcagaaagtgttgaaactgagcttttgcgtatgaattgccctaaaagttgcagatacatatctttagataaatatgtcatttaagaaacggattcgaaaagaattggtggtaggggtctcatgaggccgggagagttacagaaggatgtgcagcccctcctgggcctggcagggtgtgagggagagtgaggactcactgtccctcctgaagggaagccctgtgccatctcagcctttccgccctcagacctttccagcccctgagacctcatggccttgaagccgtgctatccccagtgtcctctgctttcccctcataggcttcttctgggagagaggtttcctggggtacgttctgatccctcaaaacggaaaggccctgttctcaataattcaaagatttcactctgagtgggatagtgcttcctgaatgccctgctcttgtggtggacatttttatcggggcaaggctaagagcagggcctgatgggggaagtcactgctacttcacattttgaccaataattccttgtgctgtatcagatgctgtaggctgatacaaaatggccgccgcccttaaagtcagatgaaagagcccctgaggacagcgttagagacactcgggagatgatttccctctttcaatgtgggaggacttacataggagaggtctatatctagataaaaactcctcccaccactggtgctagacagagcttgggggcagccctaggctctgaccctggccgtaatggcggggtggtgctgagggcaattggctagaccaattgtcttgcacgttttattttttattattatttttgagacggagtctcgctctcttgcccaggctggagtgcaatgacgtgatctccactcactgcagcctccacctcctgggttcaagcgattctcctgcctcagcctcttgagtagctgggattacaggagcccaacaccacgcccggctactttttgtatttttagtagagaccaggtttcactatgtcgggcaggctggcctcaaactcctggcctcaaatgatccgcccgccttggcctcccaaagtgctggcattacagacgtgagccaccatactgggccagtcttgcacattttagacactcaataaatgtttgttgaatgaaatacctgtgatgggccgggcgtggtggcccacaccagtaatcccagccctttgagaggccgaggcaggaggatggcttgaacctgggagtttgagaccagcctgggcaacatggtgaaacccccatctctacaaaccccacaaaagttagctgggcatggtagtgtgtgcctgtggttccagctacttgggaagctgaggtgggaggattgcttgagcctgggagacggaggctgcagtgaggcctgactgtgccactgcactccagcctgggcgagagtgaggccctgtctcaaaataactttgatgaaggtggggaatcagaggtagatgggcaggggtctgggtttgcaaggctctgagtttgagctctgttctgtacttttgaggggatgagggaaggagggtgggcacggttcccccgatgtgggtgtctgaggcgaagaagaggatggcggaggttgcagccaccaaccacaagagttccttagaggggtcacagtctctaggaagtttataggaagctagtcagcagtagagagggtgaacgcggtggggcacatcccgcggctgggcttgagtgggctgcttgggggttatggggagaagataaaagtgcctgtgggaccacagactctcgctgtggtggagctgggccctcttaccctcccaagcctcgcccctcatcccatccctgggggccaggggtgagggcggcaggaacctcaaggctctgagaaagtgcgtggtgtgtgttgccattttggtctcttctctttctcagtctctctttgcctcactttggatctatgctctgtgcatctgtcttgcttctcagaatttcttcttttcctctttttttgtactaccctgcgctttgtgtgtgattgtggattgtgtgtgcatagctgttgctttaacaagctgctccaggtctctctctcccacatctttccctcccctcctcccttgaggctctgtgcattctggggaactctgtccatttccctttgtccatgtgtccctcccaccctgcagccggctccctcacatccaccctgggctgcaggcatgctcggcaggctccccacagatcaaagcttgtccagggtctgcattgctgccaaaggccaggaggactgtgtacagaccggaaggagctagagcttagtggcagcctgagaggggaagctgaaaaaggagaagaggcaaggggcattccaggggagcccgggagagccagcacggcctcctggtatatgaggcaaagaggaagacagacacagacacagggagctgcaggctgggggcataagctgggggctgggaagcatagatacagaaatgcacagatgtgagctgagaagcaaggagggagagagagagacagaaagagagagagagacgtgccagggcttgagggaccagagagccctcccagcctctctcggagtgctggtatacaggatgctaccgtactagggtaagacacctctggggacgctgagtatgggaatcaaaggccagatctctggggtggcagcggaagcccaaagcaccaaagcaagcatgctggaaacccacagcctcctccacttagcagagccttggggtgagatgaggcagaacagggagctggaggcagggaggtggctgtctgcacatacctcaggaccatggagctgggggagtcaaaacagccaccatatggggaagggtcaagaatgcctctagtcttccccaggcatcttatcagggtaagctgaatttggaccccagagaagggatatcgtttatggagacttcccctctttcatcccctgctcaccaaggacccagtcagtctgggatgggggacagtgggaaccactctttggtatgaggctactcctattctactcttctcactgcagccttcccctagatgcctcccatctgcatgctaacctgtaaacacttcaccatcactggtggctagtctcccttcctcctttttcagaaacctccttcctgacctcttttcttcctacttccccggtttaaacaaaattgtatctatctatcatctatctatctatctatctatctatctatctatctatctatctatctatcttttttttttttttgagacaaaatctcactctgtcgcccaggctgtagtgcagtggcactacaagtaatcccaagtagctgagattacaggcgcccgccaccatccccagctaatttttttgtatttttagtagacacgggggtttcatgatgttggccaggctggtctcaaactcctggcctcaagtgatctgcctgcctcggcctcccaaggtgctggattataggtatgagccaccacacacgacacccggttctatctatctatatctatctatctatctatctatctatctatctatctatctatctatcacctatctatctaatctatctatatctgtctatctatctttatgtatctatcttatctattgatctatctatctttttttttttttgagacagagtcactctgtcacccaggctggagtgcagtggcacgatctcggctcactgcaacctccgcctcccgggttcaagcgattctcctacctcagcctcctcagtagctgggactacccaccaccactcctggctaatttttgtattttcagtagagatagggtttcactatgttggccaggctggtctccaactcctgacctaaagtgatccacccaccttggtttcccaaagtgctgggattacaggcgtgagccaccgtgcctggacatatatctatcttttttttttttgagatggagtctcgctctgttgcccaggctggagtgcagtggcgtgatttcggctcactgcaacctccgcctcccgggttcaagtgattctcctgcctcagcctcccaagtagctgagattacagacgtgcgtcaccatgcccagctaatttttgtatttttagtagagatgggatttcactatgttggccaggctggtctcgtactcccgacctcaggtgatccacttgccttggcctcccaaagtgctggaattacaggtgtgagccactgcatccggccttatatatctatcttgtctgtctgactgtctaatctaattcatctattttatctgtttatcttatctatcatctatttatctaatctatctgtctgtatgtctgttttttttttttttttttttttttttttttttttttttgagatagagtcttgctctgttgccgaggctggagtgcggtggcgcgatctcagctcactgctgaacctccgcctcctgggttctaagcgattctcctgcctcaatctttggagtagctgggattacaggcccgtaccactgtgcccggctaattttgtatttttagtagagaagggtttcaccatgttggtcaggcttgtattgaactcctgacctcaggtgatctacccgcctaagcctcccaaagtgctgggagtacaggtgtgagccactgtgtctgtccctaaatgtctgtctctatctatctatctatctatctatctatctatctatctatctatctaatctatctttctgtctaacctaatctattttatctatcttattcatcatctatctaatctgtctgtatgtttatctaatctatttacctaatctatcaatctatcatctaatctatctaatctgtctatctaatctattttatctatctatctatctgtccatccatctatctacctacctatctcaagcacctaccacgtattaagccctggctacctcctcttccaggcagatggagtaactggaggcagctaacaaagatggagtcacttttcttatcttctcctaaaccaccgtaagaggaccaagcccccacaccttctgagtgccccattcctctccacagattgtgtcttagtgcccagcaggaaacacagtccacctcccatggttcaagagattgtagaaagggggttattcacataggttaagggaatcaatcaatttgaagcacagacactattaacagcaggaagagtcctgaagaagtgaaaatggtgtttctggaacccagagagtgcttgcactctggataaggggccaccccacagaagctgtggaggggcagggctgcaggtgaggatgaacacacagctattgacagaaaatatgcccagggcagggatagagtaggaaaaatatcccagcttctttcccccacccttccatctcatctctgaaaggcacttcccactggccagccccgactggtgctggagggcaagagagcctatgagccatgtgtggctgtcagccccttggtggagagccacagacaggatggagagtggctggcagggccccgtggggatgaacagcttggattggggcgactgggcttcatccaggctgggctggatgtgtgcatacacttcagtgacccgttttagaaacagaattaatatggtgaatagagaaagaagaaatcagtgactttcgctcctccatacaatttaatttggcttaagttagccaaagccataccaagtcctctctctatgtctcagctgctgccaggcttgtggtggccacacagctggctagactgtcatctctgtcctcaaggggctcaagctagaggaggagagttgagaaaccaaatcactacacacaaagtagaaggtggaacacacccaggagcatgtcaacggggtgctgtgggacttcagagtaggcagatcgtcaccaagcttcaacggcaaagatgccactgggggaaagaaggaccaagcttggaagagagagtaagtctggaggcaagatcttgtctcaccagcaggggccaggtccatggtgaccccttccccaggcagtcacctctctgagcccactttatatcctaggcctggattcaaagacacttgagccctgctccagccttcctttgaggtgctatcttggtgcccttcctataatcactgctccagtcccatgtcatctggtccccagttaccacatcaagcttcccgaagctccacacagaccatgccacatctttaccaaaaaatcagcagtgggtcccctcacctccaggacaaagctccagctcttcgacctgcctgtcaatatttgcaatcactgcctgcacaaattagctgggtgttgtcatgaaaggatcacttgagcccaggagttccaggctgcaatgacctatgattgaaccactgcactctggcctgggtgacagagtggatctaaactaaaaataaaaagatttacagtcaagcctcaaaggcttttcccataccttcttccaccatcacctccctgagccctctctttcctccgaagcctcctcgcacatccctaccacctttgcacacctcagaatggggacacctctcccctttcctctccatctaacttatggttttcaaacttgagcgtgatcagttacctggagatttgtgaaaacccagatgactagacccacccccagtttctgattcagcaggtctggggtggggccgaggatctgcatttctaacaagttcccaggtcatgttgccactgctactgatccaggactttgggaatcgctcctctaatctacagctgtccattccccatggtccattcagagcctctctgccctgcccccaccacccccagtctcgcctgtctgccaagcgcacaggaaactctccttcatccaaaccctggaccaacgccttctgcttggcccactcagaggccttgtagggttggtctgatattggacagagaaatggccctctgctctttctcccctgacctctctgaagggggcctgcccctccacacctgtgggtatttctcgcaaggtggagacaagagactgagaaaagaaataagacacagagaaagtatagaggaataaaagtgggcccaggggaccggcgctcagcaagtgaggacctgcaccggtgctggtctctgagttccctcagtatttattgatcactatctttactatctccgcgaggggaatgtggtggggctatagggtgaaggtgaggagagggtcagcagaaaaacacgtgagcaaagactctgtgtcataaataagtttaaggaaaggtgctgtgcctggatgtgctagatttatgtttaactttacacaaacatctcagtgtagtaaagagtaacagagcagtattgccgccatgatgtctcgcctccagacataaggcagttttctcctctctcaaaatagaatgtatgatcggttttacaccgggtcattccattcccagggacgagcaggagacagatgccttcctcttatctcaaccgaatagaggccttcctccttcactaatcctcctcagcacagaccctttacgggtgtcgggctggggggctgtaaggtctttcccttcccatgaggccatatctcaggctgtctcagtggggggaaacctggacaatacctaggctttctcgggcaggggttcctgcggccttccacagtgtattgtgtctctggttaatagagaacggagaatggtgatgactttcaccaagcacactgcctgcaagaacttttctttttttttttttttgagacagagtcttgctctgtcgcccaggctggagtgcagtggcgcgatctcggctcactgccacctctgcctcccgggttcacgccattctcctgcctcagcctcccgagtagctgggactacaggcgcccgccaccacgcccggctaatttttttgtatttttttagtagagatggggtttcaccgtgttcaccaggatggtctcgatctcctgacctcatgatccgcccgccttggcctcccaaaatgctgggattacacgtgtgaggcaagaactttttaaaagtgcatcttgcgcagccctagatccattaaaccttgattcaatacaggacatgtttttgtgagcacagggttgggacaaaagttacagattaacagcatctcaaagcagaacaatttttcttagtacagatcaaaatggagtttcttatgtcttcctttttctacatagacacagtaacaatctgatctctctttcttttccccatacctctcacgctgtatcaggccccaattcttgggaacgtcaccttagaactgtcccacacatttctacagccacttggctcaggccctttgctgaccaggatggttgcagttctgcctttggtgcctcgcctcctccagttctttcactcagcagctgcaggggtccacgtggcaaatctaataatcttcttctctatagaaaatcctctgctggctctctagtgcccaggatccagtcccagcatctcagcacggccttcaagcatttccacgtcctggcctggctccatggtctccccgccaatttgccaccttctccatgcatccttttctgatcccctcctcactcatcccagcaaagaaccccctcctggcctgagcatagcatttcgtggtgtgtatctcagagcatccagttaggggtgtgcaagtttactttgttactggctgatgttgtgaagtcccaagttgttggtgccgcaaacaaaaaattggacatgacacacacaaatagcaaagcagcaaaagtttattaagcacagtacgatccactatggatcaaggatgacctgcgaatggtatcagcatcactttgctatatttcatggccttttctatgtgttttttttctctttttcctcaagctgcctaagctttagccagcatgtgccttttggttgacaggtgggttgcttagtttcttggcctctgtgtgtttacgtgtcatttccttcccatagttttaagtacatgcatgatatgcactctgtaggcatgaaccttaagtagctaattactatacggggtcattttgaggatatcttttctctgtagtacatgtgcatctttttttgcagtggtgcaatcttggctcactgcaacctcctcctccctggttcaagtgattctcctgcctcagcttcctaagcacctgagactacaggtgcatgccaccacgcccggctaatttttgtatttttagtagagatggggtttcaccatgttggccaggctgatctcgaactcctgaccgcaagtgatccacccacctcggcctcccaaagcactgggattacaggcatgagccaccgcacccagcctagtatatgcccatctcttaggagctgctcctaactggtttggtttggatctagccagccatggggctccttattcacttatttatcttctgtttttgctcacctgcctctttctcttgcttctgctcctactcattccttccttaatccaacctccaattccctctgctattctcctgcctcaagttcactaggctggctgcaagggtcctgagggagaggttgtgtatcgcccctgtatactccaggtccagtaaatgtttgctgactaatgattggcatttccctcaggccctgccatttctgtgggctcaggtccctactggctcaggcccctgcctccctcggcaaggccacaatgaaccggggagtcccttttaggcacttgcttctggtgctgcaactgggtaagttctcagacctggggtctcaatgcagatgacgtgggaggaaaggcaaaggtggaggatggggtagagggggacagcggcgacattgagacctgactcctttcttttccacttagcgctcctcccagcagccactcagggaaagaaagtggtgctgggcaaaaaaggggatacagtggaactgacctgtacagcttcccagaagaagagcatacaattccactggaaaaactccaaccagataaagattctgggaaatcagggctccttcttaactaaaggtagggttgcctggctccccatccagggaggaaaacacactatggagtgaaagcctttggtgtctgagatctggtcttagttaaactctgggatcccagagggcttgggttgacagaaactcagtggcattcttatccagagtttctctacaccaactgctggtggcccagggaaaggtggtatgtgaatttcaatattttaatatttaatattcatgaacttattttagtgagttttagaacaatcactatcacttaaaacccgtgatttcttgagtattgttgctacagacctatgtagataatactttgcacagtgactcatatgtataatcctagcactgtgggaggctgaggccggaggattgcttgagtccaggagttcaagaccagcctgaacaacatagtgagactctgtctctatgaaaaaaaatatatatatattttttttggagacaaggtctagttctatcacccaggctccagtgcagtggtgtgatctcggctcactgcaatctccacctcccaggctcaagtcatcatcccacctcagcctcccaagtagctgggactacaggcatgcaccaccatgccaggctaatttttgtattttttatagagacagggtttcaccatgttggccaggctggtctcgaactcatgagctcaagtgatccactcaccttggcctctcagagtgctggaattacaggtgtgtgtcactatgcctagccaaaaaaaatttttttaattaaaaaaaaaaaggccggctgtagtggctcacacctgtaatccagaactttgggagtttgaggtgggcagatcaccggnggtcaggagttcaagaccagtctggccaacatggtgaaacccggtctctactaaaaatacaaaaattagccaggtgtgggggtgcagtcctgtacttccagctactcaggaggctgaggcaggagactcgcttgaacctgggaggcaaaggctgcagtgagctgagattgcaccactgcactccagcctgggtgacagagcaagacttcatctcaaaaaaaaaaaaaaagctgcanatttattattattattattagtttatttatttatttttttgagacagagtctcgttctgtcgcccaggctggagtgcggtggcgtgatcttggctcattgcaacctccacctcccgggttcaagtgattctcctgcctcagcctcccgagtagctgggactacaggcgtatgccaccatgcctggctaattttttgtacttttagtagagacagagtttcacggtgttagccaggctggtcttgatctcctgacctcgtgatttaccctccttggcctcccaaagtgctgggattacaggcgtgagtcactgtgcccggcccagaatcatttttttctacttttttttttttgaggcaaactctcgatctgttgcccaggctggagtgcagtgggcatgatcttggctcactgcaagctctgcctcccaggttcaagcaattctcctgcctcagcctcctgagtagctgggactacaggcgtgtgccaccatgcccggctaatttgcgtatttttagtagagaccggttttcatcatattggccaggctggtcttgaactcctgacctcaagtgattctcccaccttagcctcccaaagtgctgggattacaggcatgagctactgcacttggccttttctcctggttttaaaactattatatgctcattacaaaatatttggtcaatgaagaaaagaatatggaagaaaatcaaatgcatgcatacttctatcactcagagatatcctctgctaacattttgattgattttcttccaatctttttttttttttttctttttgagacagggtctcactctgctgcccaggctggagtacagtggcatgaccacaacacatcacagcctcaagtgatcttcccacttcagccttcccagtagctgggactacaggtgcacgccaccatgttcacctaattttttactttttgtagagatgagacttcaccatgttgctcaggctggtcttgaattcctaggctcaagtgatcttcccgctttggcctcccaaagtgctgggattataggtatgagccactgcatgtggcctattttcttccactgttgttcggcgtggagaatattatatacataattacgtaaatgatatcatactgtatataccttttttcctactccttccttaagttatatcataatgagactaccaattattagactttttttcttttttttgagacggagtctcggtctgtcacctaggctggagtgcaatggcgcgatctcagctcgctgcaacctctgcctcccaggttcaagcaattctgcctcagcctcccgagtagctgggactacagacacgtgccaccatgcccagctaacttttttatttttttattagagacagggttccaccatgctagcaggatggtctcaatctctcgacttcgtgatcagcccggcttggcctcccaaagtgctgggagtacaggtgtgagccaccgcactcggcctagactaactatttaaagtaatctggcaatgtttaacgaatacaaaactctaaaacccttggacctaataatagctattttggaaagtctacttgacagaaataaaattgtgaatattcttttttgttgtttttttgagacagagtctcatttggacgcctaggctggagtgcagtggcatgatctcggctaactgcaacctccacctcctgggttcaagtgattctcctgcctcagcctcctgagcagctgggattacaggtgtgcaccaccatgtctggctaatttttgcatttttagtagatggggtttcaccatgttgaccagggtggtctggaacttctaccctcaagtgatctacccaccttggcctcccaaagtgctgggattacaggtgtgagccaccacgcctgaccagtgaacacttaataatatctatggaaaggtgttattataagaattgcttgtggggccgggcgtggtggctcacgcctgtaatcccagcactttgggaggctgtggcaggcggatcacgaggtcaggagatcaagatcatcctggctaacacggtgaaaccccgtctctactaaaaataccaaaaaattagccaggcgtggtggcgggcacttgtaatcccagctatccaggaggctgaggcaggagaattgcgtgaacccaggaggcggaggtcgcagtgagctgagaccgtgccattgcactccagcctgagtgacagagtgagactccatcacaaaaaataaataaataaataaataaaatataaataagtaaataaaggtcaggagtggtggctcacgcctgtaatcccagcactttgggaggccgaggtggacagatcatgaggtcatgagatcaagaccatcctggctaacacagtgaaaccctgcctctactaaaaatacaaaaagtcatccaggtgtggtggcacacacctatagtcccagctacttgggaggctgaggcaggagaatcacttgaacccaggaggcagaggttgcagtgagctgagatcgcgccactacactccagcctaggcgacagagcaagactctgtctcaaaataaataaataaataaataaataaataaataaataaataaaataaaaagcacacacacacacacacacacacacacacaatgcaaaagacccaccctactacaactaacattatatttaatggtgaaaaactgaattctttctccctaagtgcaggaataagacaaagatgtctgctcttactactcttattcaacataatactgcaatcccttgccagtgcaataaggcaagaaaaatgaaataaaaggaaaactgatcagaaagaaagaaataaaactgttcctatttgtggatgacatgattacatagaaaatctcaaagaatctgtaagaaacttcttagaattaataaatgaattcatcaaggttgcagaatataagataaacataaaaaatctattgtatttctatatattagcaaggaacatgtgtacacagaaattaaaactacaataccatttataattgctcaaaaaggccaggcatggtggctcacacctgtaattcctgcactttgggaggccaaggtgggaagattgcttaagcccaggagttcaagaccagcccgggcaacatagtgagaccttgtctctacaaaaagtaaaaaattagctgagcatggccgggtgcagtggctcactcctgtaaccccaacactttgggaggctgaggcgggcggatcatgaggtcaggagatcgagaccatcctggctaacacggtgaaaccctgtctctactaaaaacacaaaaaattagctggatgtggtggcaggcgcctgtagacccagctactcgggaagctgaggcaggagaatggcgtgaacctgggaggcggagcttgcagtgagctgagattgtgccactgcactccagcctgggtgacacagtgagactacgtctcaaaaaaaaaaaaaaaaaaattagctgagcattatggtgtatgcctgtagtcccagctactggggaggctgaggtgggaggattgcttgagccctaggagggcaaggctgcagtgagccatgatcacaccactgctttccagcctcggtaggagagcaagaccctatctcaaaaaaaaaaaaaaaaaaaaaagaaaagaaaagaaaagaaaagaaaaagaaagagagaaagaaatacttaggtgtaaatctaaaaaacatgcgtagggccaggtgcagtggctcatgcctgtaatcccagcactttgggaagttgaggctggcggatcacttgaagtcgggagtttgagaccagcctggccaacatggtgaaaccccgtctctactaaaaatgcaaaaattaggcaggtgttgtggcgcatgcctgatcccagctactttggaggctgaggcaggagaattgcttcaacccgggaggcagaggttgcagtgagccaagactgttccactgcactccagcctgggcaacagagtaagagtctgtctcccgaaaaaaaaaaaaagaaaaaagaaagcattgaattgtatgctaaaaactacacgatgctgattaaagaagtcaaagaagatctaaatatatggagagacatgctgtactcatggattgatggattggaagactcaacataagacagatatcaattttccccaaattaatatacaagtttaatccaattcctataaaaataccagcaagattttttgtagatataaacaagttggccaggtgtagtggcttacacctgtaatcctagcactttgggaggctgaggtgggaagatcgcttgagcccaggtgttcacgactgcagtgagctatgattgtgtcactgcattccagctggcactccagcctaagtgacaaagggagaccctgtctcaaaaacaaaaacaaaaccaaaataattttgctctgcaaaatccctattaagaagaagaaaagaggctgggcacagtggctcaccgctgtaatcccagcacgttgggaggctgaggcaggctgatcacttcagcccagaagtttgagatcagcctgggcaacatgaggaaaccccgtctctaccaaaaaaaaaaaaaggtacatacacacacacacacacacacacacacatacacaagtatatacacatatatatacacatacaggtgaatagatgtatatacatctatttattgtgaatatacatctatacacacacgtgtgtgtacacatatatttaaaatttatttttatttatttatttatttttgagacagagtcttgctctgtcacccaggctgggtgcacctgtattcccaacgacacaggaggctgaggtgggagaatcactgagccagggaggcagaggttgcagtgagccaagatgttgcctggttgcctgggcaacagagcgagaccctatatcaaaaaagaagaataataagaaaagacagtttacagaatataagaaaatatattcacaatccacatacttagcaaaggactggtatctagaatatgataaacaactctcaaaactcaaaaccaaaaaaatgaacaattcaattagaaaacaggccgaaaaggacatacagttggcaaataagcacatgaaaagttgttcaacatcattaatcattagggatatgtacattaaaaccacaataggctatcactaaacctatcagaatggctaaatacaaaattggaacaccaccaaatgctgatgaggatgtggagaaactgggtcattcttccaatattggtgggaggctaaaatggcaaagccactctggaaaacagtttgatagtttcttataaaacaaaacatgcggccgggcgcggtagctcacgcctgtaatcccagcactttgggaggccgaggcgggtggatcacgaggtcaggagatcgagaccatcctggctaacacggtgaaaccctgtctctactaaaaatacaaaaaattagccgggcgtggtggcgggcgcctgtagtcccagctactcgggaggctgaggcaggagaatggtgtgaacccgggaggcggagcttgcagtgagccgagatcgcgccattgcactccaacctgggagacggagggagactccgtctcaaaaaaacaaaaacaaacaaacaaaaaacatgcaacaatccagcaatattgcacccctaggcatttatcctagagcaatgaagacttatgcccacacaaaaagctgcacacaaatgttcatagcagctttattcatggtagccaacaattagaaacaatctagatgtccttcaactggtgaatgattacatccataccacgaaatacttttcagcaataaaaaggatgaatcatagtacacaccacaacctggatgaatctccagggaattatgctgagtgaaaaaaagccaatctcaaaaggtaatatactgtattaatccatttatataacattcttaaaataactaattatagaaatggagaacagatgagtgattgccaggggttaaggggctcagggatggggaggggaaggggtatggctacaaaaagcaacaaccttatggcgccggaaatgttctgtattctgattgtgtcaatgtgagcatactggttgagatatagtgctacagttttgcaagttattaccatcagagtaaactggatagagggcacataggatttctctgtattacttcttacaactgcaagtgaatctacaattatctcaaaataataagtttagtttaatgctaggcgtggtggctcacatctgtaatctcagctctttgggaggctgagacgggtggatggcttgagtccaggagttcgagaccagcctggccaacatggcaaaaccggtctctactaaaaatacaaaaattagctgggcgtggtggcaagtgcctgtagtcccagctactcgggaggctgaggcaggagaattgcttgaacccgggaggtggaggttgcagtgagccgagatcacgccactacactgtagcttgggcgacagagtgaggctctttctcaaaaaaaaaaaaaaaaaaaaaaaagcaggcaggcagggccaggaaagcgtataatttttgtagttcaaatgactaacctaaaaagtgaagattggccaggcgcagtggctcacgcctgtaatcccagcactttgggaggccaaggcgggtggatcacgaggtcaggagattgagccactctggctaacacagtgaaaccccgtctctactaaaatacaaaaaattagctgggcgtggtggcacccgcctgtagttgcagctacttgggaggctgaggcaggagaatcacttgaacccaggaggcgaagttgcagcgagccgagatcacactactgcactccagcctgggtgacaaagtgagattctgtctcaaaaaaaaaaaaaaaaaaaaaaaaaaaaaaaagtgaagtttacctttttttttaaatttttcttcttttccttccctactttgtgagataattttcttctttttaaaaagccaagagcttacttctgtaagtaaagattatcttaagacaacttagaaatgtatattattagtattttctatttcattgtaagttatttgtaaatattggttttggtgctaacctagaattccatcaaattaattgtcccctaatatatggccattatcattttgtctaacattgtatcctattaacaatgctgtaagtattatttttgtagctaaattatggtttgcattttaaaattattgttttaaggataaagttccagaaatgaaattaaggatatgaactttttgagcacatcttgtcagcactgagtagtattatttaaaacttttggggggggcaattttataattgaaaaatatatcattgttttaatttgcatttctttcactgcctatgagattaaaacaatgcactactttccaaaaattcttaagtcttttgtgttgatgcttttgttctgtttctatggatctcatcttccttcagaacagctccccttcccaacttcctgatttctaacaataacagtatcaccctccttgttctcccaatttctgaaacacagagtcatgtttttttctctgcttcaatccctggtttcctatcgtcatcaattatgacctttccttgctttgaaagtgttttgggccgggcatgatgtctgccacctattgtaatcctagcactttgggaggctgaggcggctggatgacttgacctgaggatttcgagaccagcctgggcaacagggcgaaacctcgtctctacaaaaaatacaaaagttagtcgggagtggtggcacatgcttgtagtcccagttacttggggggctgaggtggcaggatctcttgagcccacgaggtagatgttgcagtgagccgtgattgcgccactgcaccccagcctaggtgacagagtgagaccctgtctcaaaaaaaaaaaaatgttctagtttcttcctcttctttgttcccatgggaatgccaccatcaccagccaaggctcacatacctcccacctggattacagtgagcttccaggtaatttggtctgctactagtctcgcctacttggatttcccttccccctgctgcagcattgccttccaaagccatgctttgcacatgccacatcctagcccattagactaagcctagaagcctctgcaggacgttcaccctctcagcgccactgctcagtttcccagtggaaacctctgcacccaggaggtttccccacagcttgcctgtgctgcctctctggagcttttctcccttcctgtaatgtccttgctgctccccgtctctagtccattgcctatacctctttttttttttttttttgagatggagtctctctctctcatccaggctggagtgcagtggcgcgatctcggctcactgcaacctttgtctcctgggttcaagggattctcctgcctcagcctcccgagtaactgggattacaggcgtgcaccaccattcctggctaatttttgtatttttagtaaagactgggtttcaccatgttggccaggctggtcttgaactcctgccctcaggtgatccacctgcctcggcctcccagagtgctgggattacaggcgtgagccaccgcacctgccacaggcccatacctcttttaagtcttcattcaataccagttgtcccatgaatttgtcccagactcactcatatgcttagacctttcatattatcttgccatagctttttcaaagtatgggacagcatggacaagcaggccatggttttcttttgaagagaagcaaggaggcagagttattttaggaggagggttatacatttcattttgaaccaattgcgtttggggtgatggcaggatattaacataaacttatttcttggaccattggaaatgtgtgcctagaactgaggagagaggtcagggctggcagtaacaacttggccacaatctgcagagctgactggggatgaggtggaatttagaatgtctgtagaaacggggaagagaaccaaagacagagtctgggacaacacctaaatgtagatgtcagagcaagagttcaagacgaagaaaaacgaatcatacttagaaatggaggggaggaacaaaagaggcggagcaaagtggggcagaaccagagtaggccacgcttttaagaagtttggtaaaggaactgtgaaaggaatgtagttgaatttcagggtaagctggggaattaaagcagtgtgtagatccagggcaaacagcaagtagggcaggaaccactgaaggaacaaataaagggggaggttgggtccaggttgtcttgagtagggaagtttttttaaaaagtgtgaaactgaaggtgtggggtggattgggtgcctgccgtgctctgaggaagcttggggcaactgtgtgctgaggctgtgaggttgtctggaaggggctcctggacagtaagagctgagcagtggggaagaggactgtgtggtctggaagaggagagaaaggagagtgagtgactgaactggtatccaggctcccacaccaaggcagaaagagggagaggacctgggcatctcagggaggcagaggcagtaccaagcagggtgagaggctttagtcttagccacctttgccccattcctccaaatatacattctaagtaaaaacaaaacaaaacagaactgtttgctatgtaaatttagcttctaaagccctgttctacagagattttggagcttccactgcacccagaaaatgcacagctaaagagaaaacttcccttggtgatggttattagattttacaagaagaggccaaaggagacacatacttatgccagaagaactttccagagatagcattgcatagcgaaatagcctgaattatttttattttttaaaacattttttcttttcttttttcttttctttttctttttttttttttttttttgagacagagtctcactctgtcacccaggctggagtgcagtggcgtgatcttggctcactgcaatctccacctcccgggttcaagccattctcctccctcagcctcccaagtagctgggattacaggcatgcgtcactatgctctggctaattttttttttctttttttttttggtatttttagtagagatggggtttcaccatgttggccaggctggtcttgaactcctgacctcaagtgatccaccgccttggcctcccaaagtgctgggatttcaggcgtgagccaccgcacccggccaaaaatttcttttctttaagatgaggcctcactctgttgcccaggctggagtgcagtgttacaatcatagctcactgtaactttgaactcctgggctcaagtgatcctcctgcttcagcctctcaagtagctgggattacaggcatgtgccaccacacccagctaattttttttaaaataattttttttagagacgagggtctcgattggctgcctaggttggtcccagactcctgacgggctgcattttaatcctagctccaccacttacgggagtcaaaattcaaaagatagaaaagggcatataggctgggtgcagtggctcacacctgcaatcccagcaatttgggaggctgaggtgggcgggttgcttgaggtcaggagttcgagatcagcctgggcaacatggcaaaacttgtatctactaaaaatacaaaaattagccagatgtggtggtgtacacctgtaatcccagctactccgaaggctgaggcaagagaatcccttgaactcaggaggcagaggttacaatgagcagagatcgaacactcgactccataaaaacaaacaaacaaaaaaagaaagcaggctgggtgtggtggctcacgcctgtaaccccagcacttcgggaggccaaggcgagcggatcacctgaggttgggcattcgagaccagcctgaccaacaaggagaaaccctgtctctactgaaaatacaaaattagccgggcttggttgcgcatgcctgtaatctcagctactcgggaggcagaggcaagataattgcttgaacccgggaggcggaggttgcggtgagccaagatcatgccattgcactccaacctgggcaacaatagcgaaactccatctcaaaaaaaaaaaagcaaagggcatatagtgaaaagctttcttcctacacatgagtattcacttcctcttcctagaggcaaccaaggttatttttgtgtgtgtgtgtgtgtgtgtgtgtgtgtgtgtgtgttttgggacagtctcactctctcaccaaggctggaatgcagtggtgcgatctcactgcaaactctgcctcccagtctcaagcgatcttgtgcctcagcctcccagtttttttttcttttaaatggggtctcattctgtcgcccagggtggagtgcagtggcatgatcatagctcactgcagcctcgacctcctgggtcaggttatcctcccacctcagcctccggcatagctggggctactggcatgcaccaccacactcagttaattttttttcttttttgagacagagtctcactctgtcacctagactggagtgcagtggtgccatctcatttgtttcactgcaacctttgacttctgggctcaagtgattctcccacctcagcctcccaaggcggctaattaaaaaaaatttttttttttttttttttagagatggggtttcgccatgttgcccaggctgatctcgaactcctgggcacaaacaatctttccacctcgatctttcaaagagctgggatgagagatttccaccatgcctggcctcattttcttttttaatttttttttagacattatagctctttttaatggcctcattttcttatgtttaattcgagaattattcttttcatatacaaagaatatattttctccacctttaaaaacaaatagtagactgtttaacatctcgctttattcagttagtgatgtttcttagatacgggtccaaattagtacacaaagcacttcctcattcctctcttacggctgcatagcagtccactgaatgggtgagctatgatctatttaacctattctttattgatggacatttggttttgtatatacatttgtaattctgtatagattacaaatcaccatccaaagaaattgtactggtttattctcctacaatgtgtgagagttgggtaattacttaatctcaatatgtgagagtttaggcagttacctaatctctctgagtctcagtttctctatctgcaaaataaacaaaacagtgttgacagtatctatttctcggaattattgtggagattactgagatgatgcctgtaaagtatttggcatgtaggagttggtgctctccaaataaggatatgattttatttgtatttgtgagctactgtcccagccaggtaaatggatatgatgagacctccttgccagaccgggtttctctgattagaacgaggagcagatgttgcaggaaattagcaactgatatcagaagagccgtgggcattctcttgccagaggtgccctgtctccagggcgcctcagtccccccccatatgtcttctgctcccaggtccatccaagctgaatgatcgcgctgactcaagaagaagcctttgggaccaaggaaactttcccctgatcatcaagaatcttaagatagaagactcagatacttacatctgtgaagtggaggaccagaaggaggaggtgcaattgctagtgttcggatgtgagtggggcaggtggggatgaggatacctcctgcctggttcccttccccactactcccacccctgcaccaaatccagcctgagctggtgataccgcagcagccccaagaggaccaggctgtcaaactggcctccaaatgtcttaaaacccttcttgatcaggtgagggatgctggtgggcggaggagggaagaggccttgggaaaaggaaagaaaagggaaggaggcaagggaaggagggagagagactggggaagagaggatgaggggagaggaggaaagaagagagagaggaggggagagggaaaccctatcttggctgggggtgcgcagctgggtgctgggaggaaggagatgttgggacggcgataatggagagatgttgttggtttcctgttgtctgcccttctccttggggatggtatgtgtgtgacacagctggcctttccctccacagtgactgccaactctgacacccacctgcttcaggggcagagcctgaccctgaccttggagagcccccctggtagtagcccctcagtgcaatgtaggagtccaaggggtaaaaacatacagggggggaagaccctctccgtgtctcagctggagctccaggatagtggcacctggacatgcactgtcttgcagaaccagaagaaggtggagttcaaaatagacatcgtggtgctaggtaagggaagcccctcttcgcgcagtctcctccctgccccaggggctgacagcccctccctctgctctgactgccctgtttctggttctggtgctgggaggtcaggagtggagaagactaggtcccctagagctgaggcctgtcttgaaggactcactggggccctcatcctcagggggctgattggcagccacccctcagtgtggtggacatggagaaaggaaaggctggggaaggtaaggatgctagaggcccgagtctcctttggaggccccaaaggaggaatgtcagggagcttactttctttgttgcctcagctccacacccctaccaagttggcaaatccacttactcagggacactaacaccagtaagccaaccctgatgatgttctatgttgtacctctggacctctaagccaggccactgtggggagaccaaggtcctaccccagatcctgtcccctgggtgcttatgtgacttaaggtagacataaggtagtgtgccagtttagtgcatgtacgctgattgaaatcctggttctgccacaaccatgtgaccttgggtgagttactaaacctctctgcaccttggtttcagcctctgtgaaatggggatgatgttaactgccatagtgactacctcgtattaagttgaggactgatatacgtaaggcactgaaaatggtgcctggcacagagtaagccctagttaagtgttcgctgttattttgtgaagggtgatgaatacgcctctaaggagtggaggccaaatggcttctgtggtccaggaatcctaaggacagcaaggatcccctgtggctgggctgctctgtgatggcttccgggaggagggaggtggcctgctgtaggaaaatgctgggtggaagaagggagagaaggctggagaggtaggaaggaactgaagtatctgaagtgacaaggtgggtgtctggactcgtcgggtccccttccatctccctgctgcctccacatgccaaccccactcgtgcaccctcatcttcctatctcctcacccagggtctctcccttcccacctccagctttccagaaggcctccagcatagtctataagaaagagggggaacaggtggagttctccttcccactcgcctttacagttgaaaagctgacgggcagtggcgagctgtggtggcaggcggagagggcttcctcctccaagtcttggatcacctttgacctgaagaacaaggaagtgtctgtaaaacgggttacccaggaccctaagctccagatgggcaagaagctcccgctccacctcaccctgccccaggccttgcctcagtatgctggctctggaaacctcaccctggcccttgaagcgaaaacaggaaagttgcatcaggaagtgaacctggtggtgatgagaggtgaggggccaggccagggaggggtgggcaggggaaggagttggaggggcctggcccagggctccctctgaggcaagccaggccccaagaggggatgcctaggccctggtcacctggatgaagtgagggagggccctctgggtttggggctggttttgaactgagacatccatgagccagcctggggctggcttcactgaagatccccaaagcacttgggctaagaaccagggttccagttcttcctataaccaaccctctgtgaccctggctaagccccctcccactgcaggcctgcttcctgacctgtctaataaggataatgaaatctgctctctgtgtgatagtaatgatgataatgtcaagctccaaattgagtttctggcttccttatctccttatcatcataacgactctgcaaatagtaatggctaacacttgatgctcagcacgtgtcgggccccatccaaacactttacatgtatgcctgcctttagtactatctgggtgcaggttgttaagtcacttgcccagagacacacagctgctaagcagtggagctgggattcaaatccaataccactggaccccaaacgctgtttttcctcgtaggactgcatgaaaacctgctctaaaaggctaaaagaaggtcacccatatagagtatcattttaattgttctactgaatctcaggcctttgatctcagcctctcgttcctctgcagccactcagctccagaaaaatttgacctgtgaggtgtggggacccacctcccctaagctgatgctgagtttgaaactggagaacaaggaggcaaaggtctcgaagcgggagaaggcggtgtgggtgctgaaccctgaggcggggatgtggcagtgtctgctgagtgactcgggacaggtcctgctggaatccaacatcaagggtaaggacccaggttccaaggcctctgcctcctgggctgcgggaccttcctgtggttggcagagaccacccagagtcccggcctcccaatgcctgagttggggggttatgggtatggtgtcctctgtggtcccagggtgctttggaggccccaaaaggaggcatagaagtgatgaagtgaggtgggttgtggtcctgggctctaggctgccagttgtaattctacaagttcccactccctcaggtctacagcctagggatggggtccacctgaccgagagcccccctccctggctcctggcttttctccaaatccagacgcacttacacacacactcacacacatacactctcacacacatgcacacactcccatacactctcacacacgcacacacatcactcacacactcgcacacactcatacacacactacacacacatccacactcacacccacactctcaccccatgtactcacacccatgcactcacacactgtcacacactcatacacacacatgtactcacacatgcatgcacacacacacttacacattcacgcacatactctcacccacacactgtcgtacacgtacactcacacacttatacactcacatccgcacacgcattattcacacatgtgcacacacgcgcgcgcacatgcatgcagtcacgcacacacattcatacacgcacacaggcacacattcacacacatgcacacacgcacacacattcacacatggactcacacgcgcacacgcgcgcacacacacacattcacaccattcacacacgcacacacatgcacacactcacacatgcacacacacatgcactcacacacacagcccaggagccagaccacagcttctctctctccagagtgccctggatatggatatgcccaaacataaaaccgattccccagcactggcggcctttgagagcccccaggcacccctcccctctcccccaaccccagggtcaaaccagagactggccaggagggattgcagggcagtcctcagtcccctggcccgtggaggagggcggtgcattgagcacatttctctcccttgcagttctgcccacatggtccaccccggtgcagccaatggccctgattgtgctggggggcgtcgccggcctcctgcttttcattgggctaggcatcttcttctgtgtcaggtgccggcaccgaagggtgagtaaccccacacctggtccccacaaggccctcaaacccctgagtcctctaccaggagatcctgtatatgggaactgattttggcccagctccctctgcccactcgtaagttcccttgctgccctgtcccagatcccactcaagggagagacaggaaggagcagagagttaattccaggatagatggcctgggccatgtaactgcttctcctgtcgcagcttcccccactccccccaccaaggggcacctcccttctggaggcctgggaccctcgtgactccctttcttgtccctggacagcgccaagcagagcggatgtctcagatcaagagactcctcagtgagaagaagacctgccagtgtcctcagtaaggatctgggaggaggggttgagagaggggaaagggggagggggagggagttagagaggagggggaggaaggggagcaaaggggggcaggaagggaggatggagaggaggaaggagttgaggaggaagagctgggaggggtggaggtgaggagatgggggctaaaggggtgtggtggagaggatagaggggtgggaaaagatggccaggagctagaaggaggcagaagtgggaggatggagctgaaggagcagcaggccaggaaaggccctgctggaaagccactggagctgtgctgcgctggaaaggccattggaggtgctagaacgcaaaggggttgcagtggggacagacctgctccccttcttctttgttcctgcagccggtttcagaagacatgtagccccatttgaggcacgaggccaggcagatcccacttgcagcctccccaggtgtctgccccgcgtttcctgcctgcggaccagatgaatgtagcagatccccagcctctggcctcctgttcgcctcctctacaatttgccattgtttctcctgggttaggccccggcttcactggttgagtgttgctctctagtttccagaggcttaatcacaccgtcctccacgccatttccttttccttcaagcctagcccttctctcattatttctctctgaccctctccccactgctcatttggatcccaggggagtgttcagggccagccctggctggcatggagggtgaggctgggtgtctggaagcatggagcatgggactgttcttttacaagacaggaccctgggaccacagagggcaggaacttgcacaaaatcacacagccaagccagtcaaggatggatgcagatccagaggtttctggcagccagtacctcctgccccatgctgcccgcttctcaccctatgtgggtgggaccacagactcacatcctgaccttgcacaaacagcccctctggacacagccccatgtacacggcctcaagggatgtctcacatcctctgtctatttgagacttagaaaaatcctacaaggctggcagtgacagaactaagatgatcatctccagtttatagaccagaaccagagctcagagaggctagatgattgattaccaagtgccggactagcaagtgctggagtcgggactaacccaggtcccttgtcccaagttccactgctgcctcttgaatgcagggacaaatgccacacggctctcaccagtggctagtggtgggtactcaatgtgtacttttgggttcacagaagcacagcacccatgggaagggtccatctcagagaatttacgagcagggatgaaggcctccctgtctaaaatccctccttcatcccccgctggtggcagaatctgttaccagaggacaaagcctttggctcttctaatcagagcgcaagctgggagcacaggcactgcaggagagaatgcccagtgaccagtcactgaccctgtgcagaacctcctggaagcgagctttgctgggagagggggtagctagcctgagagggaaccctctaagggacctcaaaggtgattgtgccaggctctgcgcctgccccacaccctcccttaccctcctccagaccattcaggacacagggaaatcagggttacaaatcttcttgatccacttctctcaggatcccctctcttcctacccttcctcaccacttccctcagtcccaactccttttccctatttccttctcctcctgtctttaaagcctgcctcttccaggaagacccccctattgctgctggggctccccatttgcttactttgcatttgtgcccactctccacccctgctcccctgagctgaaataaaaatacaataaacttactataaagatgctcttcgtgtgtgtgtgtgtgtgtgtgtgtgtgtgtgtgtgtgtgtgagagagagagagagagagagaccccttctctggggaccaggaatcttctggtctttggggtcggacccagaggagaggttgctgggcgtgccccaggaaggagatgaagtttccctggagagggaaaaattctgtggaggctggctacccacctccacaacccacagggctctgtgtgggcctgtgtgtgtgtgaggctgagactctgtaattacatgtgtgtgatataccgtgggggagagactcagggttgtgtgagctctcctggtgtatgtgtgtggcagagaaaaaggactatgagaaactgtaacatgtgtgtgcaaattgtatccccaacatatgtgtttgtgttccaggaggaggaggcagagtgtgtgtgtctgtgtgcatgcatgcgcccacatccttttagcttgtgcacaaccacccccaactccacaagcagccccagtgtgcaccacaagccccctcactcccaaacccaaggcccagccctcacacagatacacacagtgacacacgcttcctcctccccgaacagctagctcctcagtccccaacaacaccagctgcctcttggagcttgtgttcgtgttgaaaacgggaaggggtgggggcaggacatgaaccatttcaccaatgaagccggttcccagccatcctcctcaccgccctccctctcagcgccttccttgcccctcctccccgagtcaccaccgtccagttccccaccctgcactcgtttcccgcccccccccgccccccacaaagctgtcctgccttccctctggcctgggctcactggcaggacgaccccgggagagagggtcctggagagtgagaggggcagagaccgagtgagccgtgggctgagcctgggaggccgggactgagggggaggagggaggcccgggggaagggagggagggagagagggaaggagggaggagggcgggcgagctggagccggcaggcagcgggagcccgagagagccgcgtcgggagtgcggtctccatggcagtgctgggcgcagccggagagaggtaagacgacccctgcctgccccgtcccctgtgttgcctccctttccccctcaagctgcctcctctcccctaggccggcccctcctccccagccacctgctgtttctgccctggagaacctggagggggacaggagggaggagccgcctgaccttaccccttcaccccaaagggcgagggaccccgtcggccagggaacctcccagatcccccttcccaccttcctctgatctctccctgtccttcacctccctctctctgtccttcacatctttcctgcctccttccctctctgactccctatctctttcatcctgagcccaccagctgggcctgggtggaggtgggtgggaaggggtccagggctgtaggagaggacactgggggctgctcttggccaagtccctccacctccctctggctggccattgccatggcaactagggtgtactgggctccggagggaagccaagggtgggggtggaccaggacctcttggggaaagcaagggtctgagctgcttccatgggaaacagaccctttcactgctgtgccccatttttaccccacttaccctaaagccattatgtgcttccttacagccccactctgttcagggtttcacccgattcccttaccccccttcccagggctcactgaagctcagcatcacgcactaaaactgggaccatccttcctcccatgagagggaaactgaggctctgggccagggaggaagagtcaaggtctccccacggggagtcagcaccttattgaacatttggcttttcttctcagcctcctattccctgctccctccctccctccctcctccagtccctcctccctccaaagcctcctctccagggggtttgagcttttcctgctattttcagatactaccactttgccccctctttctcttctgctcaaactctcctccttctccctagttccccctctttccatttctggatgcttctgatgtcagcggtttccccgccttcaggttccctagcacccccttcggtcccagactcctttctcccattttcccagatatgggtagctggagggtgatcacccaggtttggggaagtaggggctaagcaccaagacccctgcatccaggagaccggcaggtaggggaggaaggctgtgatgccatatcccagttcactgtgaaccctcaagaggaaaccagtcttgtgtctcccatcagtagttctgaagagacatttagggacttgaagataggggtggagtagtgctgagcaggggatgttctaagaaggaacctgggagttccagcgggaggaggaagggctaaaggagacagggaggtgggaataccttcttccctagaggtctggaagagtgcggctctcatctgtgtggggtgtttagctgtcagagttaaggcaaaggaatgttctgaatgaccctcagggccttagtaatcagtcatgcctatagtttcaagaaagggggcacaggaggctgattggagaccagcccaggccctacctttgccctctccctcccacatctcatctttcccttgcagcctgtccagggggctgagccccacccccaaatccctggggcatccagaagattcctgactggtcaagaaccagaggcaaaagagacctggaagtcccagcatggggaccagaaccccccagccagcctcatagttgggaaagtagccagcttgcctgccccatcaattgcagggatgcttaaggaaggccccgcccagtatgaaagctgaggattgcctctgctgaccctcagtctcctcccctgccctctacatctgccctcagctgggtccatcatgcaatgctgagcactggggtgagcctgggggcagcctgcctgctgacagggcgaggattgtggggatcatgggagtgtttgtgagtggggctcctgggtgagacctagcccccacccccacagagctcaagggggtggggggctgaggataggatggctcggggcggggcgggggcagaggaggcctccctgcgctccaacgcattgtcctggctggcctgtgggctcctggcgctgctggccaatgcctggatcatcctcagcatctcggccaagcagcagaagcacaagccactggagctgctgctctgcttcctagcgggcacacacatactcatggcagctgtgcccctcaccacctttgccgtggtgcagctgcgtcgtcaggcttcctccgactatgactggaacgagagtatctgcaaggtcttcgtgtccacctactacaccctggcgctggccacctgcttcacggtcgcctccctctcctaccatcgcatgtggatggtgcgctggcccgtcaactaccgcctcagcaacgccaagaagcaggcactgcatgccgtcatgggcatctggatggtcagcttcatcctctccacactgccctccattggctggcacaacaacggcgagcgctactatgcccgcggctgccagttcatagtctccaagatcggcctcggctttggcgtttgcttcagcctcttgctacttgggggaattgtcatgggtctggtctgtgtggccatcaccttctaccagacactgtgggcccggccccggagggctcggcaggcccggagagtggggggtggtggggggaccaaagcgggtgggccaggggccttgggtacccggccagcttttgaggtaccagccattgtggtggaggatgcccgagggaagcggcggtcctcgctggatggctcggagtctgccaagacatccctgcaggtcaccaacttggtcagcgccatcgtctttctctatgactcactcacaggggtgcccatcttggtgagatcggggtcctccccacctgttctccccaatatccaggccccagcatcatcacctgacctccaacttcatcagccatacagcagctccgtcatctctcctccagttccatcatccatcttcctctcctctgtccatcccccactccatttgtggcccccatcttgatcatctgtcttttagttcccactaccctgtttaccccagctccagcatctgcttcagttcccactcctcagctccatcaccgtccttcagttccacgacctgtcctccagctccgtcatccatcctgcagctccacggttcagccgcagacctctcatccagccgctgggctccactctccattccctccttccctcgggctgccacatggtctctgagcactcttggctggaaatcccacagggctcaccccaccaccccatctagtcactgttcctgggttcctgtctgtctctacggttcctggtccacctctgttcctctccctcctgaccgcagggctttgtctccagcactctccccgaccttcctctgagtcagtcccttccctctgttcactccatctccacctccgcttcgcctctgttggagcacagggatcaggcattacttctgacgtcttgcccaccagctgcactaggatatggggttcaggtgggctcctcagctctggccctgacccagcccgctcccacccttccccaggtggtgagcttcttctccctcaagtcggactcggcgcccccctggatggtgctggctgtgctgtggtgctccatggcacagacgctgctgctgccctccttcatctggtcctgcgagcgctaccgcgccgacgtgcgcacagtgtgggagcaatgcgtggccatcatgtctgaggaggatggagatgacggtcagaggaggggctgggctttggctttcctggacatctgtctattcccttttctgccgctccttctcagccagaggatgggctgccctggagtgccccctactggacagaatctgcaccaccctgggctcccctttccctaagcaggcaccctgctgtccactcactgcttcccgcagcactcagggctcccttcactgggcctaggctcccctccagaaacccacactgcccagctctggcactatggggaacctgagcttcccgagagaggccccccagctatagggacggctcttgggggagtgcaggcaattgtttcaataacttcatctatatgtatgaagcactccactcaggatttagcactgaacgcagcaaatgctagccactctcactgtcctcttggaacatacatgctaatgggaactaaaggggtctctgggagcttataaaggcagtggtgggaggccgcggtaggcattccctacctgtaaccactctgcccattttctctcctagatgggggctgtgacgactatgcagagggccgagtttgcaaagttcgctttgatgctaacggagccacaggaccagggagccgggaccccgcccaggtgaagctgctgcctggaaggcacatgctcttccctcctcttgagagagtccactacttacaggtatggaactgggggatacatctcctacccttggtgccgctcatcacttttctccagtgtctgttaggcaccccaatcccctcttccctagccctggctttcagggcaccatagagctgggtgaaagaaagctatagcaagagaggcatcccttcagacctcgtggggccaggtttgcccaccggagcaaacgttttgaaggttaagaaggtggcaccatcttccggagtccccacttggttcctgcctctgcctctgtccctgcagcaccttcaggtcttacccgctcctcttcccaggtccccctatcccggcgtctgtcccatgatgagacaaacatcttctctacccctcgggaaccaggctccttcctgcacaagtggtcatcctctgatgacatccgggtcctcccagcccagagccgggccctcgggggtcctcctgagtacctgggacaaagacacaggttggaggacgaggaggacgaggaagaggctgaaggtggggggctggccagccttcgccaattcttggagagtggggttctggggtcaggtgggggacccccacggggtcctggcttcttccgggaggagatcaccaccttcatcgatgagacacctctgccttctccgactgcctcaccagggcactctcctcgtcggccccggccactgggcctctcaccccgccgactctcccttgggtcccctgagagcagagccgttggacttcctttgggactaagcgcagggagacgctgctccctgacggggggtgaagaaagtgcaagggcttggggaggatcctggggcccaggcaaccccatctttccccagctgaccctgtgagcccaagcaggcctgctgaactcagaggagaaagcctgagtgagtaacacctcattctggccgagagtagggcagctgcctccagactctggggagacgggcgctagatttggggctcagaaggccctgctctctcccatccaagtgaccagatgccctactcagcttccatcacccctagcaatatgtattaaagtctgaagtgttgccatggaaacctcagtgtccagtgtactgcggtggaaaggggcttggagggtggagtggctcacaggggacacgacagagcaggggcagcagacagaggcacagaaggacacatggagaaatgatcacatgctccaccaggcagcctcgcacagggaaggctgggaggagcatatcctgctgggggcggggcttgaggacacacatcttcgttggttggggtatgaaggatctctgttcagatttgttgaggtggttttagagcgtggctccagccccagtgcccaactctccttctaacctcaaatccatgcaggggctcactttatgggcaggaaaggttttggggctgatgcagtgtcccgggcctggacacctcctccttgctgcattttaaagctctttctccaaaggagtgcaggggtggatgagtgtgtgtgtgggcgggggtgggagtgcaggggtggatgagtgtgtgtgtgggggagtgcaggggtggatgagtgtgtggggggggtgggagtgcaggggtggatgagtgtgggggggtgggagtgcaggggtggatgagtgtgggggggtgggggggggcgagggggggatcggcgtccacactcctttttctggacccagaagcgtgtgtgtggagggaacacagccccagtagttacccccagacctcaggggctgaagtcaccgctggggctgaagtcatccttcatggatgcccaggcctgctccagttcccgccttttgccctcctcctcccagtttctccctcttattccacactagaccagctttgtccactcagcactcttctctctccatcttttcacatgggcctctcccaccatcgggtctcagccccatcttctctctctctctctctctcggcctccctcattatttctccctctccctccgcctctccatctctccttcctccccctccctccccttcccccctttcctctccctccctctcggctcccgcatttcccctcggctgccggcggctccgacatcatgctccggctcctccggccgctgctgctactgctgctgctgcctcccccggggtcccctgagccccccggcctgacccagctgtccccgggggcgcccccgcaggcccccgacttgctctacgctgacgggctgcgcgcctacgcggccggggcttgggcgccggccgtggcgctgctgcgggaggcgctgcggagccaggcggcgctgggccgggtgcggctggattgcggggcgagctgcgcggccgatccgggcgccgcgctccccgccgtgcttctcggggccccggagcccgactccgggccgggacccacgcaggggtcctgggagcgacagcttctccgtgcagcgctccgccgcgcagactgcctgacccagtgcgcagcacggaggctgggccccgggggcgcggcgcgcttcgcgtggggagcgcgctccgggacgccttccgccgtcgggagccctacaactacctgcagagggcctattaccaggtggggagcgggccgggcagctccgagggtcccagccctcaccacgacgctgtcctactttgcgttgcccaggagtaggcggaatgctgttgcccgggccccgcacggggctggggagcgtaccgcgggcctctgcgtaggagctggctaagcgaccgcgaggacctcttgagatcgcagaggagcagccgagggggagtgcgagcagaatgggaatggggcggggaggtcgtgaggtgggacgggagcagatcgaagatggagggacagggccgcctcttcctaggaatgaagcggaggcggtgggggcgaaaccggctctcggacgggaagtgtgcgtgggtgtgtgtgtgtgtcgggggtggtggtgagtgtgaaccttcgcttggggcaggaggtagcttcggaaaggaaggagcagacggaggcaaggttggggtcctccgaggccagacctctgcgggcggggaggggacagcacgccgcagccgccggtaccgcagcagttgcctacgtggctggggaagcggggcgccggttgtactcacctcagctcagggtcctagagacctgcgggttttgctggtcgctgaggtctcccccacttccccacctcacttaagccatcacttccacctggtctcccaaattgaggtcctgaagtcctgagacccatgtcccacccaactccgacgtctttagatcccctttccctcggtgccagccttctgagagtcccaacgttctggcctctaggggatctgcagttcgggcggtgggcggttctgattggccagtcttccatgaggctctggggcacccagagtgtgtgtctggggtagggtggggaggctggccagggggcagaggtctgccccccgtcccagggctctgatgccctcctcccttcgcctcctcagttgaagaagctggatctggcagctgcggcagcacacaccttctttgtagcaaaccccatgcacctgcagatgcgggaggacatggctaagtacagacgaatgtcgggagttcggccccagagcttccgggacctggagacgcccccacactgggtgagaatcccagcaccacccctgtcttgccaccagccttttcctggctggatacacaggcctcactaaactgtgcgttgtgctgcttgagcatacagatggggtaatgatcctcagcgaccctggctgggagtccttctctaggacttcgtttccttcctggatgatcactgaaatctgatgttctaacattatgattctgaggcccacccttattcttctccacggtgaagagggacatggagtccttgccccaaatgagaccaacacccctctcctctctacctcccagtttggcaacccctggatcttaggtgactgactgctcccttccccaacaggcagcctatgacactggcctggagctactggggcgccaggaggcaggactggcactgcccaggctagaggaggctcttcaggggagcctggcccagatggagagctgccgtgctgactgtgaggggcctgaggagcagcagggggctgaagaagaggaggatggggctgcgagccaggggggcctctatgaggccattgcaggtaagggtcccgtgtgtgagggggtgggtcggtgcccagggaggggcatgaacaagctgaatggcttatgggtttcctctgcaggacactggattcaggtcctgcagtgccggcaacgctgtgtgggggaaacagccacacgccctggtcgcagcttccctgtcccagacttccttcccaaccagctgaggcggctacatgaggcccatgctcagggtcagttggggaagggtggaaacggggagtgaagatttgcctctgctgctatcctgagctccatctctctatccctcccatctgtctctggatttgtagtttcactgtcagggctgcatgggaaccatcacttcacaaggactctaatttgccctcctttggcgcctgtgacaagctcaggagatgggcttccttctgccttgctgcttctcaccttcctttattttcccccctcttgctcttctttgaactctccagctaaggtatgtttgcaccagtgtttgaaagaaccggcagctgaacttgtctgccagtgggaagggggctcttggagttagctgtctggcctctggagaccaccttctccagcactgcctctgccccaaggatcaatgtgctctaagtattcatcccccaacccctgaccttgtcgctccctctccagtgggcaatctgtcccaggctatagaaaatgtcctgagtgtcctgctcttctacccggaggatgaggctgccaagagggctctgaaccagtaccaggcccagctgggagagccgagacctggcctcggacccagagaggtaatcccctctccacgctcacctgggaggtagccccaaatcaaacaaatagacctgagaagtaacctggacccccaccccccgctggcctcttacccgagcactctagtcacccaaaggactccaagtccagcatctgacttccgtctccactccctgctccccacggcagcctggagttccgattccagccctcagccccgtctctcttgcctttacttcactcctgcctgccaccagcccccaaactcatgcatacacacacccacacactcacacacactcccaccccctacaccctttccagtttaagtccagatgctctgaagctgctgagggggaacgttgaacagaggaaccggggggcatggtgccaggttcaaggagcatggagcacccaggcagtgccctagagccggcgcttccctgccttcctccagctacccctcactgctcatcatctcaccctcaggacatccagcgcttcatcctccgatccctgggggagaagaggcagctctactatgccatggagcacctggggaccagcttcaaggatcctgtgagtcactccacttctgcccatctcacccctccgcactcccaggagggatggcactttggtttgcaacagagttttccatttttccaccatgaggcttggagaagagtctgccatcccagttttacagggacggagacagtgtgcctgtagttagggcggctttggggtcacgcaggcctaaatgtcagtcctcctctgccccaaacatctctgaacttcaacttgcctctgcctcaatttccttacctgtaagttggaataatcacatctgtttcacagggctgttgaaaccacatcatttgataacaaaatatagaaagctctgttactgctgcttttatttctcttcttgtagttatgagaggaaactgcggggcggaggttatctatggctaggactagggcatcaagcaggcgttctcagtcttcctggcgctactgatattttggatctgacattttggataattctttgttggggcagagggcagggcctgtcctatgccttggagggtgttcagcagcttccctggtctctacccagtagagatcaatagcacattgacagcccctgagtcatggcaatcaatgtttccacactttgcctaatgacccctgggggcagaagtgtcctgcttgagaacgactggctaaatgtgtgaactctgaagctagttttttttatttttatttttatttttggagacagagtctcactctgtcacccaggctggagggcaatggtgcgatcttggctcactgcaacctccacctcccaggttcaagcgattcttctgcctcagcctcctgagtagctgggattacaggtgcccgccatcttgcctggctaatttttgtatttttagtagagatggggtttcaccatgttggccaggctggtcttgaactcctgacttcaggtgatccacccgcctcggacccccaaagatgctgggattacaggcgtgagccaccggaacccggcctgcagctagtttaaaacctaacgctgctttgggaggccgaggcaggtggatcaccagatcaggagttcaagaccagcctggccaacatagtgaaaccctgtctctactaaaaatacaaaaaattagctgggcgtggtggcgggcgcctataatcccagctacctgggatgctgaggcaggagaatcgcttgaacccaggaggcggaggttgcagtgagctgagatcgcgccatagcactccagcctgggcgacagtgtgagactccgtctcaaaaaaacaaaaaacaaaaaacaacaacaaaaaacaactaaccctgtcatttgtagctgtgtgatcttgagcatgttactttacttctctgtgtctcagggctctcaattacaaaatgagcactttaatattctgtttcatgagactgttgtgaactttaaaggataaattccatttccatgaataaagctcttagaatagcccctagcagatagtaagtgctatatgagttatagttgtacttgttgttacagtttgatccactgcccagggctcctgacattgagtcccgggcttttcctacctccgtcttcctctctggaaacagaagaaacttaatgagatatttcagctctaatgtcagggattccaggggctgaccttggtgggtgatgatgcttttctggactgtcgcaggacccctggacccctgcagctctcatccctgaggcacttagagaaaagctcaggtaggatatgccccatggtgggaggggcttggcccgagctgggaggctgggtctggactgtcctgggcacccactgagcgcatctctcacccctgagagaggatcaagagaagaggccttgggaccatgagcccgtgaagccaaagcccttgacctactggaagggtgagttcctgggagggagaaggcaggagcctggagggtctgggggctgccagctactgctctgcctgcccttaggggatgctcagccccctctgctctgtcttttccctggcagatgtccttctcctggagggtgtgaccttgacccaggattccaggcagctgaatgggtcggagcgggcggtgttggatgggctgctcaccccagccgagtgtggggtgctgctgcagctggctaaggtaggaagacctgcaagctcatcagctcgttcaagactcttggatacaatcacctgttcccttgctcttggcctgcccccttcattctgcctgtcctgattatccaaccgggactgtgcttaccactgcctctcagctgtggataagttccgtctcgtcttaatttagctgacataggtggatgttctttacaaatgaattttgctagaaattgataggaagaacaaaacaaaaaacatgaaggcataaaaatggatgagtgtgcaggtaaggattgcttggttagccaagagtttagttactggcttggctgatggctcagcagacacgcaggcctttctttccctcctagtttaggttgaatgactcatactcaccaggttgaggctaccattttatgaagcttcaacccttatcttaggttagtgctcattcagtaatatactcactgagtagctgctatacactagaaactgctaggttctagggagaggaagatgattatagactctgccctttgggagctcaagtgtagaggtggaaacagacaaggaaatacataatataagcaggtggtaagtttggtaaaagaagtatgtttttgggctgggtatggtggctcatgcctgtaatcccagcaatttgggaggccgaggtgggtggatcacctgaggctgggagttcgagaccagcctgaccaacatggagaaaccctgtctctaataaaaatacaaaaaagttagccaggcgtggtggcacatgcctgtaatcccaggtactcgggaggctgaggcaggagaagcgcctgaacccgggaggcggaggttgtggtgagctgatctcgtgccattgcactccagcgtgggcaacaagagcgaaactccatctcaaaaaaaaaaaaaaaaagtatgtcaaatagaagcactgaaatgcagttatagaaggcttgctggagaggtggtatttgagctcagtcttaaggatgagttagtcaggcgattgggggtggaatcagtctaagagggagaagagcatggtgcattctgggaactgcagtcaagcacaggggtgagagcagggccagctccatagtcattacctgtgtgatcttgggcaatttattttaacatctctgagcctaatttgctcatctataaaatgaggataataatagtgtttttgtcatagtgtcgttgtgaggattaaatgagttagcacatgataaagctcttagaacacagaatcatcactggctgggtgtggtggctcatgcctgtaatcccagcactttaggaggtcaaggcaggtggatcacttgaggtcaggagttcaagaccagcctggccaacatggtgaaacccggtctttactaaaaatacaaaaaaattagtgggcattgtggcaggtgccagtaatcccaactactggggaggctgaggcaggagaatcgcttggacccaggaggcggaggtcgcagtgagccgagatcgcaccattgcagtccagcctgggcaacaagatcaaaactccgcctcgaaaaataaatttttttaaataattaattaattaattaattaattaaaaaagaacatagaatcatcagggtgtatgttaccaagagacagtatagggaaagagggagagagcccacacatgaaggccgagggacagtgagtgtcttctgtggcctcccaaggagtttgggctttatctgtgtatggtagacagctgttgcaggattttaggacggttgacttttgcattcctgtagtacctggaatcaggtgcagggtctggagtcacctgtaggagtggtagagccctctagtggcagtctgtagaatgcagtgggagaaagacccggaaaaggggagtaattgacgaatgccaccgttggctggcgaggtggctcacacctgtaatcccagcactttgggaggctgaggcaggcgaatggcttgagcccaggagttccaggccagcctgagcaacgtggtaaaaccccgtctctacaaaaatacaaaaaattagctgggcctatgcgcctatatgttcccacctacttgggaggctgaggtgggaggacctctggagcctgggaggtggagattgcagtgagctatgatggcgccactgcactccagcctgggcgatagagcaagaccccgtctcaaaaacaaaaaatgaaaaaaaaaaaaaaccccaggttagacggcttgggtgactaggtgtctctcagaagtgagatttgtatgcaggcgtaactagatagtggtgcttaaacaaattcaaaaagtagacaaaaaacgggtgtcagaaaagcgaataattccagtgtagacatccagatattaggagacccccaggtagtgagagtggtcgcggaggtggctgggtagttgtgactcagtatcaaggagtgggggagccacggagtccacagtttctccgagagcatgtcaggtgggaagaggtcagagagggatagcccgctgatgctgtctccctaccgccagtctggcctaactgtggaacttcctcttagggtcctgtttccagagggactcctctattcttggctcatcggggattaatgatcaagcccttcctgcctagttcccagctctgccccacttttccagctgtccctaccctctcagaggcccccttactgctgtaggaagctctcccgagttctctccacagtccccttagtaagcgggattccagcccgtaccagagagggacaatcggacagccgtggcggtgggcactctctgggaaagagcagcagctcaggaagacgagccacaacagaactgtgggagcatctagcttcttctggagagcgggagggccggagggagggtcttgcagccctgcagacagtgaggggctgggggagtgactccacggtaaactccttcctatttaggatgcagctggggctggagccaggtctggctatcgtggtcgccgctcccctcacaccccccatgaacgcttcgaggggctcacggtgcttaaggctgcgcaggtgagcacaggaggcacccgggcccgtctgatgcccagacctggaggagaggctgtgcaggaagccgggccccagggcctgggcttttgtgaaggagctttcttgggaccgagactacctgataggacccagcgtggagaaaagggatgttctgagagctggggccggggttgttgtcatggagagagaaggagcagtttgggctgatggacagagctggatgctgacagactccaaacccatgggtggagagcggcagagttgggcaggggctagggccgagaccaccctccccttgccttcctccttttctgccctgcctttcactgcctgcagctggcccgggctgggacagtgggcagtcagggtgctaagctgcttctggaggtgagcgagcgggtgcggaccttgacccaggcctacttctccccggaacggcccctgcatctgtccttcacccacctggtgtgccgcagcgccatagaaggtacgacagggaccccccactgctcttctccaacctcaggccctgcccccaggacactgcccccaagagccccggggtggacgtgcacggcctgagcccacagggtggcagatgggcacaggggcacagaggtacccccagacccctttgtgtcctaggagagcaagagcagcgcatggacctgagtcacccagtgcacgcagacaactgcgtcctggaccctgacacgggagagtgctggcgggagcccccagcctacacctatcgggactacaggtgggcagcccctctagtggtcaggcaggtgggcagacaaaggtcatcccactgccggcctgggcctgggttggggtctcactgcctcttgcttttttccctccccagcggactcctctacctcaacgatgacttccagggtggggacctgttcttcacggagcccaacgccctcactgtcacggtgcgtggagtggggggtgtgacggtgtgacaaagggcccagctgtggggtcaggattcaaaacagaaggctccagaggcaaatgcagggaaatggccagggcttttaaccctttcacttccccgcctccgcagccctcccgctgcttcctccgtagcaaggtctctaagtggccgaatcaaccctaccatcagtatttgtctcgcctcctaaagaagggtgaatgaagcacagcttgcaggtgcctccaggactccatggccctattctagggatttggggaacttgaaatagtccttcctctttgcagcgaggtgagcacagtggctggcgcacagataccagggccgccttgactggggctcggattctgaacctttctgaggtttagtttcctagactggggtgataataatagtacgtattttaaagggtcattgtaggaagtaatttaggtaatgtacctaaaagaatgaggcagcgcctggtaatgataagcaattaatgaatgttaggtgggaaatttccggacaccaggggctaggattgggtaggaggagaggggcagtgattgttcatctgggtgtggggtgtgaaaatggttccaatatctgtatccccttctgcatagagtctggtactgcatgcacagccccagattgcttcaagccctggattcaaagggctgagtgggaaaaatcagggtaccaggggtcaggaaccaacaggagaccatccgtggagacccctttttcctttggttcccaactcctcttgcatttttgctctgcaagttgaagctgatttctcatttgccccaagctagtccctgaattaaggagtaggaagtggtagcgagagagctgatcctctctgtgcccctgtccccatcctgctctagggagtgagggccaagttctctgagagagccaatccctggagctgaacctgccctcatccctccaggctcgggtgcgtcctcgctgtgggcgccttgtggccttcagctccggtgtcgagaatccccatggggtgtgggccgtgactcggggacggcgctgtgccctggcactgtggcacacgtgggcacctgagcacagggagcaggtaaggagcggggtaggaagggatgtggttctcctggtgcgtgaagggtgggcaaggagcccccgagaaggctcacagtcggtgagggtcaggggctgagctgacccagggaaggtgggtgcagggaatgggccacactctcctccccaaccccaggagtggatagaagccaaagaactgctgcaggagtcacaggaggaggaggaagaggaagaggaagaaatgcccagcaaagacccttccccagagccccctagccgcaggcaccagagggtccaagacaagactggaagggcacctcgggttcgggaggagctgtgagtggctgagccagctccttgaggatgtggccacttgacttgtggaaggccatcttgatgccaggacacacaggaagcccctgtgtgacatcaggagcagaacagcaagctctctgtccctgcacccccaccatcttggggacctacaagggcctggactcagaggacagtgcacaggctagcctggagctcaccaggcctggggagctgggacggggccccgctgccggacctgcagccctggacagatggggaacactgtgcctccctgaacagaaatggcaggggaggaggctgatgctttaaatgaagaggatggtggggttgggaggtataaccctgctcctctctcccagtctgtgcaataaaggtcgtgaagatctctcagccaggggccagtcaagtgtatcacagattctgtgatggctggaggtgggggtggctctggctggcctgggaggagacaggtgtctttgggcctcccagaggcggggcgcctggagcctgtgatttgtcagggaaatctcagccacctgctcccctcatgcaaatgacccaagcccctggcagctgctccttaggcctccaagtgtaagccctgtcttccctctctgagctttgctgagacttagggccgcctgctttctctctgacccctgctttcacagcctcgagagggcaaggagggggccagaccccagcctgggagcagcgtgcgggccttccctccacttgaaatccgttgcccgcccacaataggggcagacctgtccatccttctctgtgggtcccctgtacctttctcccccaacaggatcagacccagaggcagctggttggggtttgtcgagaagaaggattatccagatcagtcctttctaatctcagctcctgcctgtaccctcccatactcaccaaaccctcttccccaccaccctgagctgaggagcacagtttgaggtactgacaatggggccatctatcacccttatatcccacctcctggcctggttgctaagtggccctgactgccaagatcatcaccatggatgggggccgggaccaggggggccactggagctgtagttgtctgctcctttgcacccctcccaaaccccaacccttaatcctcacagctttgctctaatcctgtggggcctgatgctcttatctctgcctgcagagactgaccagggaagcaccccttcaccccctcctctctcagggcttgtggtgggggctgcccctctctatggccccacactcctgcccccaaccctcctcccggctgggcccaagtctctctggaatccgtacacctccctccctccccccaccccttccccccacccctgccagctgatttcatttgcctgacgttgtggttggctctacccttccctgtcaggcccccccaaccccccgccggtcggggccaggccaggccaggccagctcctctggcagcagagcctgggcaggtgacgggcgggcgcgggcgtcgcagctgagggagtaaggaggctcccaggaaccggagctggaaacccggccgaggtccagccagagcccaagtaagagggagctggcctgggctctgctctcctgggctggggcgcaggcagggctcaggcaggctggggctggacgcaaaggacctcaaacttggagggcctagctggggagagggtgcagccacccagtcgtttccctgtgtcttggagtctggtgtgggcacgaagggcagaagcacagcctggtggggggttcctcaacaccgaccccatgttcctggcaggagccagagtgacccctcgacctgtcagccatgggggagatggagcaactgcgtcaggaagcggagcagctcaagaagcagattgcagtaactccagagccctacccctggggccccagaaaacagctggggacatgaggagcgtggcccagggggagggggctgggtttgctcttgagtgactagaagtgaccagggactttctaaacttggttcgcatatttgagacccccaagccccagagccccaagaccaacctgccctgaaggcccatgcacctgccacccccacctcgcccttgctcccctgatgtctgctttccctgcaggatgccaggaaagcctgtgctgacgttactctggcagaggtaagaccccctgtcccccggaaggcagggcatggggggaggggaagggagctccccgacccgcaatagcgcgttgctccgagcattagtacagcacgtccttggagtgaggaaacccattaattaattcattcgaccaacattttagcgggacctgctctgagccaggcaccatattggatgcgaaagatgcggacacggttcctattctcatccgtagaacaagagtgaccacagccccctcccagggccttgaagatgaagaagcgatagtactttgtaaattataaagcccttgtagactctagctgctagttttctatgctgtattttgtcaattctaagatgcacatttcttcacattttgacatctctgaaatcaaggtgcattcagcaatggatcattgtttcaattagaattgacagcatcttttctttcttagtgatgcatcttagattggattaaatatgttaatagtgaacactttttatgagccagatactgggctaagctgcataaatacctgatttcattgaattttcatgatatctctgtaaggtaggtgctatgataagcctcattttacaccttgagtaaacagactcagggaggtgaagcaacttgcccaagataacaaagcaggccgggcgcagtggttcacgcctgtaatcccagccctttgggagactgacgtgaaaggatcacttgagctcaggagtttgagaccagcctgggcaacatagtgagatctcttcttaatataaaaaaaattgcttttaactttttaaaaaaagatagcaatgcaagtgatggcaaatcaagtctgttcactctggacccccagcctaagtctaaaatgtggttagagctcaaggggcatagtaccacagatttcaggaggtacagttcagggtcatggtgatgccccaggcacccagttaaaaagctagccgtgctgcagcggtgggtgcaagcaggctcctctcggcttgggagagccagctctgtgcatctcttcccaaatctgtttccaatgacctcacattggcagctggaaactggtcaaagtgcaagtattcgtatcgtggaaatcaccttcccaccttcctcaccaacactggagaggtgcttgttaaacacttacaagcaacacacctctggccatgcatgcatctctttcccacatcagtctaagacactccagggcagagacttatttctctaaggctgggggcctgacctagagcctggcacagagcgggaacttgtatagatcagtggcagtgacagacatctgggcacgtaacctgctcaccctgatattcagtgcccctctctctgcagctggtgtctggcctagaggtggtgggacgagtccagatgcggacgcggcggacgttaaggggacacctggccaagatttacgccatgcactgggccactgattctaagtgaggcttgggggggaaccgagaatgggagggtgagagcgggagtgaggaaggcgggaaggggaggcttgcatgatatgggatgccctctccccaggctgctggtaagtgcctcgcaagatgggaagctgatcgtgtgggacagctacaccaccaacaaggtaccagccctgcctccctgagcctccaccactgcatccttcctaagggcgccatgcctaccctcctgtgcccagctgggagcttggctccggtcccatctctgctcaaaccaccctccctgcaggtgcacgccatcccactgcgctcctcctgggtcatgacctgtgcctatgccccatcagggaactttgtggcatgtggggggctggacaacatgtgttccatctacaacctcaaatcccgtgagggcaatgtcaaggtcagccgggagctttctgctcacacaggtgagggagagaccctctcctcccctcctgaggggttcagggaaccctgggcttccagtgggctgtggctctgcagccagggcactgtccttctaaccgcctccaggttatctctcctgctgccgcttcctggatgacaacaatattgtgaccagctcgggggacaccacgtggtgaggctgaacattgctggtgctggggcttgggagtgggcccggcctttctctaacagtctccctccattttggcagtgccttgtgggacattgagactgggcagcagaagactgtatttgtgggacacacgggtgactgcatgagcctggctgtgtctcctgacttcaatctcttcatttcgggggcctgtgatgccagtgccaagctctgggatgtgcgagaggggacctgccgtcagactttcactggccacgagtcggacatcaacgccatctgtgtgagtgcaccccccaccccagcttcactccaactccttccccgacactccccacaacacatacaatacacatcctctgcccctcccatagcttccctagccctttcttactgtattttttttttttttttttttttttttgagacagagtctcactttgtcgcccaggctggagtgcagtggtgcaatcttggctcactgcaacctctgcctcctgggttggagcaattctcctgcttcagcctcctgagtagctgggattacaggtgtgcgccaccatgcccggctaatttttgtatttttagtagagatggggttttgccatgttggccaggctggtcttgaactcttgacctgaggtgatcctcccacctcagcttcccagagtgcagtgctgggattacagatgtgagccactgtgcccagtcttccctagccctttctttctttcctttttttggagacagagtctcacactgttgcccagtctggatgcagtggtgctatcatagctcaccgcagtctcaacctccagggttcaaccaatcctcccaccacagcctcctgagtagctgggactacagatgcgtgtgaccacgcttggctaatgttttgatttttgtgtagagatgggttcccactatgttgcccaggctgagctggaacttctgagctcaagcgatcctcctgcctcagtctcccaaaatattgggattacaggcatgagccaccacgcctagcccattttatcacgtttgctttatcattttttctctgtagagaaatagccatagatacacacacacatacacacttagatgtagatatacattttctttctgtgtcttttgaaagtaggttgcagacatcatgtttctttaccccttaagtacttcccgaaacaaagcccttctgtagcataatcactgtatgattcttaagatcaggaaactcaacattgacacaatactacagtctacagtctatattcaaatttcaccaatagcctcaaaaatgtccataatagctcatgtttttttctgtccaggatccaatccagaaacgtgcattacctttcctcgccatatctttttcgtcaccacctttaaactggaactgttttcccacctttgtcttttatgtcattgacgtttttgaagagtacaaaccagttttctgtagactctccctccgtttgagcttatctgacatttgctcgccgtgagatccaggccttgcatttgtactggaccctgttcttacacaccctgatccagcccacttgtgtagtctgggagtctgggacaacctccgtccgcccttctagccgggtcactgcaggcaagccttggtgctcttgcctgcgacgtggaaatgatgcctgcctgcagcgctgtatagtgcagagcgggcgaggggcatagggaagtcactggcacgtggtatgtgttggcagggctgcttctcaccccaaaccaagggagggacaggcagggaggctgagagcagcggcttgccctggagctgtcaggtgggaggcagagggcgggagaggctgtgggctgcccaggtctgatccctgacccacttgccacccgtgccctcagttcttccccaatggagaggccatctgcacgggctcggatgacgcttcctgccgcttgtttgacctgcgggcagaccaggagctgatctgcttctcccacgagagcatcatctgcggcatcacgtccgtggccttctccctcagtggccgcctactattcgctggctacgacgacttcaactgcaatgtctgggactccatgaagtctgagcgtgtgggtaagggccagccctggctgctgcttcctcagctggaaggaccctccccagccctccctccccattctgtaccccccatcagctcccatttcggactctcttactgctgtcccttgtcactgggtgactccacccctggaatccagtaccccttggttcccaactaggactgttttccctcagtgttgctctaagcagcctctctccactgcccaatgccatgactgctccctgccctaggagatctgtggaccatgactgtccagtcagttctgggttcctggcatttcaggggcacccactgagaggcaagacagcctcagggaaacatggaatcaaggcagaatcaaggagatctggagtggcccgagggccctgactgcagcctagggctcatctaagactagcctgaagttggtcagataggatggcttcttctctatcaagaggccaggtgctgatgaaaataacactggccaggggcagaatccaaatcctaattctgttgctcactttctgagtgtccttgcacaagtcactcctccatgggcctcagtttcttcatctggaagcaaagaaataggatgaacggttgccttctcttttccagcacctgtcaaggtgccctcgggttttttcatagtacacagatgcttccagcctttctctgtctgatcccagccctcccccaaccaaagctcttgacagagaaccccctgccctacagctaatcctctttcagtctcttagccttcttcaggggttgagcccagtctaccgagtctaggatccctgcatgcatgtgctcaagcacacatgcacacacacacgtacacacacccacacatgcatacacatgcacacatatccccccacacacccacatacacacacacacccacacacccacacatacacttacacgcatgcacacactgctttccaaatcagcttggagagacaggctgactcctttccctcttcctcaggcatcctctctggccacgataacagggtgagctgcctgggagtcacagctgacgggatggctgtggccacaggttcctgggacagcttcctcaaaatctggaactgaggaggctggagaaagggaagtggaaggcagtgaacacactcagcagccccctgcccgaccccatctcattcaggtgttctcttctatattccgggtgccattcccactaagctttctcctttgagggcagtggggagcatgggactgtgcctttgggaggcagcatcagggacacaggggcaaagaactgccccatctcctcccatggccttccctccccacagtcctcacagcctctcccttaatgagcaaggacaacctgcccctccccagccctttgcaggcccagcagacttgagtctgaggccccaggccctaggattcctcccccagagccactacctttgtccaggcctgggtggtatagggcgtttggccctgtgactatggctctggcaccactagggtcctggccctcttcttattcatgctttctcctttttctacctttttttctctcctaagacacctgcaataaagtgtagcaccctggtacatctgtgatgtttgccttctactctcttctgttccaaaaagacccaggtcccatttaagggcagtaatgtgttacaggtgctgtgataaaggctgggtactggatagcttgtgggcttatgggaggaggcctgagatgggtcagggggagaaggtattcagcaggtggctgggggactgtgtgcagcagttcgctatggcctgcctgtggtgcccatgtgtttgtacgggagggttagcttgagaaggaatcagattataaaaggtcttgaatgtcaagccagagagtccagactttttcctaagggcaatgagaagccattgaggagttctgagcagagtagtaacatgatcagttatgcttctcagaaagattgctccagatctttcagaaagaagcagtgtaggttgatgaaagggagggactggcactggggaaacaaggtaggaggcaggtggcaagaaatgcaagagcgacaggacagaggggttagggagagggattaggaagagattaaagatgtggaatcagctggaacagtggctcatgcctgtaatcgcagagccttggaaggctgaggcagaaggttctcttgaggtctggagtttgagacaagcctgagcaacatagtaagaccctgtatctacaaaaaaaattaaaaattacctgggcaggctgggcatggtggctcatgcctgtaatcccagcacttcaggaggctgaggcaggcagatcacttgagcctaggagtttgaaaccagcctgggcaatatggcaagacctcatctctataaaaaaaatacaaaaattagccaggcgtggtggctcatgcctataatcccagctactggagaggctgagacaggagaatcgcttgagctcaggaagttgaggctgcagtgagctgtgatcgtgccactgcactccagcctgggtgacaagagcaagaccctgcctctaaaaaacaagcaaacaaacaaaatgtggaatcaccaggatttagtgaccaaatgctaggatataggacattgggagggaaggattcgagataatggccaaggtttgggtttggtggctgggtagataatgctgtcattcacaaggatagggaagagggaatgaggaatagcttttgggggaagatcataaattcagttttagacaaactgactttgaagtacttataaagcagctggataaaggtcagggttagagagagagacctgaaagttaccagaatatagggaagtgatagctaaagccctagaagtaaacacccagggagagcagggccaaggacagagccatagggacaccatggttaaagggagatgtgcaaagaaggctcagagcatcagtgggctcaggccagggaacgcaagctctctaggccgccattctacacacagaaaactcggtgcaaggtttacatatacctttttaaagtaacatttaaaattacttcctttaatataaaagaaacacacaagacacaaagaaagcccaataaagctgtgagtcccagtttggtagctgaggaggagtctaagaaaacaagccattcctcagtatccctgggaaagaaggggtgagaggacacagatatcaccaggccctgggtgactgcattgctggggccatgcagggcctagctctccaccaagggaaagtgctgattttccttgtcatggtcctggccttgctcccatgctcgtcctccagttttcagaagtcgtccagttccaagaatggctccttcctttagttcactaacattttcacttaggggtgaaggccgcttaccctgaaaacggcagtgtatgagttggggggagttgctgttcagaagagggaagatctgggtaaaagggtctcccaccctctacgttggatatcctagtaacagcttgcactttctcttcctttacctgtcgtagtgtcagggtgccaggggagttgtcatcctgcaggatggtgaggggggatctccctagtaccttgctgctgtttggtttccatctattgcgcatagaacctggggtgggtaaggcgttaaagcaaggacccaaaactaggacttacagtttattcctcccacactcacccatggaccttatcccaaaacattatcctagtttatcttccctgcatcttgccttagattctgtacctgaagatctgggagtctcagggtcccttgagggcttgtcggagctctggctggccacaggggtttctgtgggctgtcttgcttcctccttggaaaacacctgtttggaggggaactcagtctggttccaaggtggcatctgttcctcaacagataactgggtacccagaggcaagtccaattcagaagataaaggtgcctctgggggcagaacaggctctgggggaagatttgatttagagtcttcagtttcaaatacttcactcagctgtttcaccagtgggcttggggggtctagaggaagaaagtgaagtgaacagtgaccttctgatacacaacattcagcaaggagcaaaacatacagaaacccaggactcatgcccaggagggtgagcaagtgggaagagagaaatcaaggaaatcaaggtgaaagggagcaattttttttttttttgagatggggcttgctctgtcccccaggctggagtgcagtggcgtgatcacagttcactgcagccttgaccttgtgggctcaagcaatcctcccacttcagcctcctgagtagctgggatcacaggcccatgccaccgtgcttttgtgtgtgtgtgtgtgtgttatgtgtgtgtattttttctagagatggggttttgccatgttgcctaggctggtcttgaactcctgggctcaagcgatctgaccaccccggccttccaacgtgctgggattacaggcatgagccaccgcacccaggctgggaacaaaatattgagataagagtgagatgggtccgaagcaggaggatagaggcccctttaaggaaccctgagagaatggcttcatggaccctacccaagaataatagatgacagcttcatcagcattccctgggcccaacgcttacctccactgctggtcttcataggtgtccgtgcaataccaagagtaggagagcggggatctgagtcctgggcatgtttaagaccctccagttgctcccctgctggtaggcctggctgtggagagctctccacctgtcaagaccataggctagaacaagtctgggccctgactcttctctcctctcctccccatattccaggaaggaattgccaaggccctcagatatccagcctaccccacacagattgagattgcagaaaataaggctaggataagggtggggtcatgacggctctctcaaaatcaggttaggaagagacccaagaattcagacattctctgcctttcccacgctggcccagagtacctggatgggagtgcgcaggatgccagcactaggtgaacgggggtccgccactcgagccagatgcttgttgtgcggcggaggccgcgctggtgtgactgggacgctcttggctgagcccatctcaaccaggagttgcagggtgggggcaagggccagcccgggacgaggagggaatgcctgtgagaagtgactcaggtctcagcccttatctcttccacgtcggaccttcaaccctaaaccaccctgtcttcccagtttccagtgaagaaacttcctggcgagggaccagaggcctctgcggagttaatgactgctgcagctgacaaaatggctcgttctgggcctgctgagccctctaacttatttattaaattattcaaatcacttaccgggccccaattccacctctggatgcacaacagctcgtggctcaactcccgaagttaccagtttcaaacttcccgccacgccccctgccctgaccctattggctgagccgacgtagttcccataggccctccacgtaagacccgcctcgagccaaaggaagctgttggtctgggagaacgtctatcatggtgactgtaggtgtcaatggactgatgctaggcttgcccaggggtgacgcctccttgataagggtacttctgttcagtatcggcctgcgagccgtccgtggcaggctgaggagtgccagtcttcgctttcgagacgtctagtctcaagaacgaattattaaacaaaatagaatcatgagtgattacactattatgcgcacatccagctggagttgtgatggttttcctgaggcgagcgatagtagctttattggttgacagctgtatcagtcactcgacacaaccccctcaagctccgcctcactggataccccctttacaaataccaagacaactgtccctcgactttccgaccggacaggtccccaggaaactttctggaattgagaggcctaaaacaaccgtcagttcctgctcttcaatagaaggcacgcgaatggactctaagggtcccggagccggagcagctgcggagccgcagcagctgcaaccccgaagcccacctagctgctctacgtgcgctcccgccctggaggagtgggattggttctttcaaccatcaattgccttaggagcgcttctcattggcgtcagtcaagcgcggggcaggggcggagcaccggcaggcaggctccgtccaactgccattctcgcgcgtcgtctccgcggcgcatgcccctaacgagtggcgctcattggacgggaggggcaggggaggggactgggaacggtgggagccgccgtgtgtggagaagctgctgccggtgtcatggcggagctgagtgaggaggcgctgctgtcagtattaccgacgatccgggtccctaaggctggagaccgggtccacaaagacgagtgcgccttctccttcgacacgccggtaagcccattccccacgcccgcaacgagcacgacttccttccatcgccctggtcattccgctggggcctgcaaggcttgggctaccgcctccctgcgatgcaccatgggacttgtagtctcccacgctccactctgccgttgcctttcattaactgcggctgtcgtgtgactaccgtccccggaagccgccgcgctcacctctccggctccccgcttcgtggagcactgtgggcattgtagtcactcactgccttcgttgccgttctaagctaggggcgcagcccgaccgtcggactacatcccccaagtggacccttgagaaaacctggcagtcggccttgtctgccgcgcacggctctccgggttttgtagtctcgtgtaggagtgatggggacgactccccactgttctcggccggggttggagttggggggtggggaccgcagttcctaggcggttaatagtctgggagtggactctcaagaagtccgattctgagaaaggcagagagcctccaccccgtggttaaaacagacagggggcggggaggggaggaaagaggagaggaaagctctagtcgtttctcctttgaagtgagcaatggccgcagcccccacccttccccccgccccccagcctatcacagacagctgagataaccccttttaaagtattcctagagaggtggtttctttctcggaggatgctaaggcctctttcccatcccgctcccactcttggctagttacacaaagccacctcccacaccatgcttcacgttttgcaggctccacctggtacctcccttcctgcagttctgccttccctatgtcaccctcaagcggaggccctttggggcctgaactgagaaggcagcagcttggttgggatccgcccccctcaccacccctcccctcaagctgctgtgccctgcccagtgtattctgccagaaccagctcatggcctgaaaactgcaagtcagagtggaaagccttcattactgcatcaccagtactgagtagaacagcatgatgtgaggcccagttcaggatcatcactgtgatttgtggtttgcttggtttgctaggctttgatctgggcctcagacaatgtgctgcttctctgaagtctggctttggcagaggtaaaagagcactgcgcggagcagagctccggggttcccaatccttggtgaaatcagcatctttaatttccaacagaggagtttaatcacttcagagctcccacattcttcccaggagggaaaggtttttcttaaattaccagcaggtggtagaagtcagtgggtccctctttacacttttattcactcctgtctctctccttagtaactgctttgaataatccaaaaagggtttttgtaatcttctgaaactttccctttttcaccccaagtcaagagattttcagtgtgccctagttctttgctaaccaacttccagcatatttggttaccttcaaattgggctcatggtagaaagagcttagttgacctccccggtgagaaatgctctatttgttcatgaacttgcagtacacactgttcctaggaagtggtacagagcaatctatgggaccaagaactaccttagacagtgcactatttttcatatcacagcagagaaatgttcaaggccactgagacttttattcctggaagaggatgtctgttgttgctcaaagccttggatctgagggaagacccttattgtctccaatttcctcctccaccttctccatcactctttacaaaggcactggaaaacttggtcagctttgggggaagcccatcctcccttctcagctgtgtttctgggtggacacccgtctgtccctgttttcacgggttatgtgtgttctagctatctcagcaagtgttgcgagattgttgtcagaacgggatggctttgagattggtgatttgttgggacttcagcagggatcttattggtcggaggggaggcagaggagagagggtggtggctatggaatgctggacttcatgaccctgccagactgggtgcatgtttagctgtgagtccctaacaagtcattgttcccctggaagccacacttcagcaggagaggagggagaagactcacagtgtggaccagggttcgactacctggtagaatgtggtaaaagaaaggtctttttcgctggatgtttagtctcaccgctgtaatcccagcactttgggaggccaaggtggaaggattgtttgaggccacacaagttaaagaccagcctaagcaacatagcgagaccccacctctaaaaaaaaaaaaaaaaaaaatctaggcatggtggcatgtgcctgtagtcccagctcctttggagactgaggcagaaggatcacttgagccggggaggttgaggctgcagtgagctatgatcgtgccactgcactccagcctgggtgacagagtgcagtgtctctaaaataaaattttttttttttttaaaggaaaggtaattttgcttgctggcacactcgggtcagatatactgttcaagtgctggaatctctgctcctctggtctggaaggttttctgaatcatggagatgagatagggtttgtcttaggtgtcccctggtttgggttcagtgtctcacatgaaagtctttcctctcccatgaagggaccctttttccctttgaatgtaatctccagcactggaagtccacagtatttgatccccatttactttctggatctgttagccccaggatagaggtgaaggaagtcctctgtgattgattaaagagctccaaagcccaagaaggagcaggtggaaagataaatggtgactggtgttgctgttgaatggcgacgatgagctggtgttcctcagccccctgatgtccttgttggttgttatcaaagtcatgggaggaaatggggagaatcttagctatgtcccaggtcctaaaaggctaaataacttgccaagggccacacagtgttagagaacagaacatttcttctggaacccagcagtttctgactccaggttttggtttcctcacctgaccaggcttcataacatcctcgtgttttcacccttacctcttgtcccacaggagtctgaggggggcctctacatctgtatgaacacgtttctgggctttgggaaacagtatgtggagagacatttcaataagaccggccagcgagtctacttgcacctccggcggacccggcgcccggtaggagcagggctggggcaaggcctgggtacattgtctgttccattctgacctcctattggactcagtttctttttttcacctacttttgtgtcattaaagcttggcacagatgttttttagctttattccgttctgagatgaagcactacctccttccgtccctcctcccgacttgttccttcgctcgtgctcattgctgatccagcccttcctgcttctttacagaaagaggaggaccctgctacaggcactggagacccaccccggaagaagcccacgcggctggctattggtgagcaccgctgcagtcctattcttctccctgagctggtctttctggctctcagcagcaccaggaaagccccaaagagtgggcctgattgatggccctagaactctggatggggcaagtgaggtgctggctcggaggagggacattgacctgttgtcattgctctactctccctcttcttccctatccttccaggtgttgaaggcggatttgaccttagcgaggagaagtttgaattagacgaggatgtgaagattgtcattttgccagattacctggagattgcccgggatggactggggggactgcctgacattgtcagagatcgggtatgactgccccctatgctacccaagattctagagcaagatgggccagggtagtggtgtcttaggcaagcactgacaaagctgaaggccaaggggaagaggggcatgtggggcagggggttgggtattgcctctgaccctctgcttcccccaggtgaccagtgcagtggaggccctactgtcggccgactcagcctcccgcaagcaggaggtgcaggcatgggatggggaagtacggcaggtgtctaagcatgccttcagcctcaagcagttggacaaccctgctcgaatccctccctggtgaggcctggcccctctgcctcgggcaccacccccagagcaaggacaaggagcccacttttctgggggatctggtgggagagagggtagggagcaggacaggaagggaagcttggaaatgaacacgacatggggatggccagaggagaagagagagagaccttggattggcggggggcctgcagagccctctctctctgccactccctcaaatccccgacccacatttctgctgattctcttctctgtgggttagtggctggaagtgctccaagtgtgacatgagagagaacctgtggctcaacctgactgatggctccatcctctgtgggcgacgctacttcgatggcagtgggggcaacaaccacgctgtggagcactaccgagagacaggctacccgttagctgtcaagctgggcaccatcacccctgatggagctggtacagcctcccctcctccagccactctcatgcttaaatatatttcatttgttagtaatttcgtgtgacatgtataatacatgaatgcattatcttgataagaaaggaaagtagtcaggtgcggtggctcatgtttgcaatcccaacactttgggaggccaaggcaggagaattgcttgagcctaggagttcgagaccagcctgggcaacatagtgagacctcatctctccaaaaaagaaaaaaaaagaaaaattggctgggtgtggtagctcctgcctgtagtctcacctactcaggaggctgaggcaggaggattgtttgagcacccgggaggttgaggctgcagtgagctatgattgcaccactggactccagcctgggctacagagaccctgtctcaaaaaaggaaaatactgcagatgagactaaatttttgattactccccactcaaatcctcatccctttcctaccaagcctgtcttaccttatcctatacaggtagaatcagaatcacaagtaattccaaccctcacccggtttcatctgtcttccctgaccgtcagccccagaagggccatgaccgcactcatattactcatattcaagggaaccaagagggtggaccttactggctctccttctgtcccctcaagtcccttctgtgcaagggatgggatggtggcctggctagtcctgagccacttcccctgattctcttcctgcctcctgctctagacgtgtactcatatgatgaggatgacatggtcctggaccccagcctggctgagcacctgtcccacttcggcatcgacatgctgaagatgcagaaggtgagacccccttcaacttcagattcttctacttcctgcccctgtgagggcccttcctctttgcctgaggctgaggtagggttttggagaaatcttctagttaaccccatccccaagatacacaggcttcttttaaatatctaaaatcatttattcagtgaatagtactgagtacctactatgtgctagaggctgtgtgaataagacagatgtggtttttgcttacaagagttctactctagaagaaaaggcagacattagtcacattcccagataaataagtgaatagttgcaaactggtgggcactgtgaaagagaggcggagggtactacagtaattgacagcagggtggcctggcctagtttagggatcagggacatttccctgaggaagcgatgcttaactgacaatgtgaaggaggttaggggtaacttaaggatgggaaaaacatttcaggtagaaggaaattttattcctcattcaagcagaggccctgatgactaacgggcctctgggacaattatgtgtggccttccagaacttgaactggacgatactcaacatacctcccatgtttgagcctgtaattccacaaattctaggccacagttgagtatcatcctagactcagtgagagatcgaggtaaaaactacagggttgagtttctcactcagtctgaagtgccccttctcacacagacagacaagacgatgactgagttggagatagacatgaaccagcggattggtgaatgggagctgatccaggagtcaggtgtgccactcaagcccctgtttgggcctggctacacaggcatccggaacctgggtaacagctgctacctcaactctgtggtccaggtgctcttcagcatccctgacttccagaggaagtgagtagtgccctctccttccccaggccccctcctggtcagcaccctctgggcatactcctccttcagcttccctcagcacctctgtgtttgattctagtcttagagtagttcctatcggctgggtgtgttggcccacacccgtaatcccagtacttcgggaggccaagatgggagaattgcttgagcccaggaggttgagaccagcctgggcaacatagcgagaccctgtcttctcttaaaaaaaaaaaagaataattcctgtcacactctggctgacatgctgtgaggggagcaagttagggagctgcaccaccagcaccccaacacacaaaccccactgatagtgcagagtgccaagtcccagggctctgtggccttctgacagactcaagggttagcaggtggtctttattttagggcagtgacatcagatgagcacctaacatggacatgtagcacttggggaggaggggggcttggcacactaagaataaaggcaggttctcagcagaaatgagtttactttcgaatttggggaacaattagaatgtgaatgctcagaacatgtcaacaggttctgtccaatagaacgtgaactgcacttatcctaatcccaggctaccttccccctccccggctcctctgccgccgagcgtgcttgcacattggacatagctgagaaggggagaacaggcaggttgctggagagaagcgactccaaggttcacccacagcaactccccactcttgaggggagcccgttcacagagttagtaaatgtttgcttccttcccttttcctcggcgctcaggccagagcccctccaactgtccttcccttgacttttaggtatgtggataagctggagaagatcttccagaatgccccgacggaccctacccaggatttcagcacccaggtgtatgtaaccaggtcctatgtaggaaagctgttgacagtcatggccgtataccttcctcctccctgaccgcctggggggcacagcactttaacccctggcctttttttgttttgttttgttttgttttttgagacggagtcttgttctgttgccaggctggagtgcagtggcgcgatctcggctcactacaacctctgcctcctgggttcaagtgattctcctgcctcagtctcctgagtagctaggactacaggcacatgccaccacgcccagctaaattttttttgtatttttagtagagacggggtttcatcatgttggccaggatggtctcgatctcctgacctcgtggtctgcccacctcggcctcccaaagtgctgggattacaggcgtgagccaccgtgcacggccaccactggcctattaggagcattcgggtgactgtcttctggacgtgttgtctgtcttgagctgggttcctgtagaatctaaggtttttcacgttgttgagagttagctagggagagccacgagcagggggttgagctggggacacacagggtcgttagttgactgaagtgaaatgttttcttggatattaatgcagggccaagctgggccatggccttctctccggggagtattccaagccagtaccggagtcgggcgatggggagcgggtgccagaacagaaggtgcgtctaggaccctgtccctttcaggccctgggattgtggggaagctgaggtctgggagatgtctaaagaaggcccctggatggccactgagccccagctgagtccctgccctgactcttcccaggaagttcaagatggcattgcccctcggatgttcaaggccctcatcggcaagggccaccctgaattctccaccaaccggcagcaggatgcccaggagttcttccttcaccttatcaacatggtggaggtaagggctggcaagatggcacacccccatcttcctgcaatttactcgctctccttcctgcccatttctccctctatcagccccaacccagtcccatccctgaaccccaacagtctgtgtccctgtgaacagtgcttgcacctgaggaggacagtgaaggtgatgatccctacccttgatgggcttgaagcccaattcagattatgcccaaagacaatgataagagaatacttgctgcttataaagaaaaatacaagcgtgttctaacacagtccctcagtgcagggatggggccagaaatggggaggggttggtgaattagggaaggtttctgctctgctcttgtgtccctgagttccgagtggtagtctgccttctctccctgactctcccatgaacctttcaggccccattctgttccctggctgcccagacctccctaccctgcctctttcccatagaggaattgccggagctctgaaaatcctaatgaagtgttccgcttcttggtggaggaaaagatcaagtgcctggccacagagaaggtgaagtacacccagcgagttgactacatcatgcagctgcctgtgcccatggatgcagcccttaacaaaggtaggctgctccatcagcaaggccgtggcacggtgggaggctaaggtctaggaggaatgcttgggcacctcatgggagcacagcccagggaatgccctgcttcaccagccaaggttccagtctgggccaccaggagtaggtagattaacctcgtccagtggacactcagcttgttagcagagctgcatggaaacaggcgagatatattggacatgtgtcaggggtgctttggaagggtagaggaactgaaatacggacacagagccagtagggagaggctaaggaggcaaagaagcagcaccctccgaaggatccaccaacccattctgtcaccagaggagcttctggagtacgaggagaagaagcggcaagccgaagaggagaagatggcactgccagaactggttcgggcccaggtgcccttcagctcttgcctggaggcctacggggcccctgagcaggtcgatgacttctggagcacggccctgcaggccaagtcagtagctgtcaagtaagtcctctggtcggggcctgaggctgtgggtctatggcagagctatcccagaggatacttctgtctcttccctgttctttcatccctttgtggttggaacctcagggttgaatcagttgggctggtaatctggccctgatggaaccaaggggccctggtaggggggacacgggtactgactctatctgtcaccttgtcctgccccaaccactccctcttctgtggcacagggtctctttgtagtgtagcctctcttcattgcccctcagtcatggctgagcacaggcacttaggatcagctgtgggcagaatttggatttccagcaaatagccacactttgagcctagccattggcacctggcatgggtgtgagacctgaaaaagggctttggtctcggggagtcagctacccagccctttgctgctcctgccagtgaaacagctcttcctctctgtgtgggttttttttttttttctatgtgtgggtcttgctatgtttttttccctacgtgtgggtcttgctatgttgcccaggttggtctcttaactcctgggctcaagcagtcgtcctgccttggcctcccaaagtgctggaattacagatatgagccaccatgcctgggcttttttctttttcttttttttgttgacagccttccttctggcctctactgctcctcgttggccgaggacaggcatcagacacctgcccaggggaagagaagaatatggaggatcttctgggttattgggacttctacccatgaggggctgaaccccaggtgggagtttcaggagaggaaaaccctggggattgtctgggtaccagcacagtctctcttccctaggaccacacgatttgcctcattccctgactacctggtcatccagatcaagaagttcaccttcggcttagactgggtgcccaagaaactgggtatggctgctggaatgagggaggttacacagaaaatgctagaaaaagaaggggctttaacacatataaactagtgtttctcaaagtttcctctgaaagaggaaaaaaaatcaccttcaatgtttcaaaatttatctagtttgaaagcactaactaaaaatattaaaagacttctttgattgttataggtatgatttacaaccaaaagtgatttttgtagttttttaaaataattggtaaaatgttttcattttgataatcttgaaacaattaattctcgtgagtcttacaggtccctgactgtcatttgagaactcgtgatgtaccttcattttctagataaggaagttgagactcacaggaatataaaatcattctgtctcacaagttctaggccccctgccctgtccatagattatttatggtagatctaggaccagcatcctggcctcccaactcccaggcttagtattatttgtcttatactgggacccctaagatgggtgccgtgcttttagcagctcctctttacagagcagttctgacatagggggcaggggattgaggttcccgaatcactttccaggtaggcctccgggagctgctgaggtgacccttttcccacagatgtgtccatcgagatgccagaggagctcgacatctcccagttgaggggcacagggctgcagcccggagaggaggagctgccagacattgccccacccctggtcactccggatgagcccaaaggtagccttggtttctatggcaacgaagacgaagactccttctgctcccctcacttctcctctccgacatgttagtgactcttcttcctgcctgtctctctcccgtgctgatgggggcctctctgccttgcatcccctgcccctgtcctttgtgtttctcctgtcctccctttcaaatttcctctgccctctttgattgacatggggcctccccagcgcactcctagccaccttctgggtgtggatggcagcagtgccagctagtggcctctctgcccttgttacctccctggtttgggtagggtgggggtatcatgctccagaaacagggcccattctgtgagaatgggcagggacccacattacaattgtgtggtcattttggttttgggataaggtgccaatccatgggagaaaaatgcatggaatgggtgattggaagagggctgggtcctgggggagggaggaggagcaaacagtggcccaatcagtcggtccgtgtacccacaattcccattacagcgcccatgctggatgaatcagtcatcatccagctggtggagatgggattccctatggacgcctgccgcaaagctgtctactacacgggcaacagcggggctgaggccgccatgaactgggtcatgtcacacatggatgatccaggtaggctggggtggggagcagggtggggcagggcctccatcctcccccaaacacatcaaccccttcacatccacagattttgcaaaccccctcatcctgcctggctctagtgggccgggctccacaagcgcagcagccgacccccctcctgaggactgtgtgaccaccattgtctccatgggcttctcccgggaccaggccttgaaagcgctgcgggccacggtatgggctgccccagctaaggacatggggccagtggggaagaagggggtgggaatgaggggccatccttcttgagcaagaccaaagacaacaggtgtggtctggccgaggttgggcaccactcttttgtggctgcgatgaaggagctgaagcctgcgttcactgctgggttttttgccccagaacttgttaaaaatgtaatgcttctgtttggccgggcgcggtggctcacgcctgtaatcccagcactttgggagggtgaggtgggcggatcacgcggtcagcagatcaagaccatcctggctaacacggtgaaaccccgtctctacgaaaaatacaaaaaattaaccaagcgtggtggtgggcgtctgtagtcccagctacttgggaggctgaggcaggagaaaggcgtgaacccgggaggcggagcttgcagtgagccgagatcgcgccactgcactccagcctgggcgacagagcaagactccgtctcaagaaaaaaagtaatgcttccttcctctccaagaacaatagtttagaacgggctgtggactggatcttcagtcacattgacgacctggatgctgaagctgccatggacatctcagagggccgctcagctgccgactccatctctgagtctgtgccagtgggacctaaagtccgggatggtcctggaagtgagtatccccaggaagcaggacaggcctggtggaatctggtcagtctactacaccagatccctcattcaggcagctctgccctcctcaggagtcaggggcttctttccacctcaacgtggcatctgagggtggggttctctgacatggagacaggctctggcccagtacctgcctcacattccctgaaactcctgtcctgagtctgagctgttgtctggatctttgggccatcactcaagcattcctcttctgtttccttctctgaccccctctctcctttcctagagtatcagctctttgccttcattagtcacatgggcacctctaccatgtgtggtcactacgtctgccacatcaagaaagaaggcaggtgagtgctggccacatgcgttttgaatggagaatggtggtgggaatgaggagggccatttggaagtccttgggatagctatgggagaaggtgaagggactgcctgatggggacataaagtgccagagagtgacagaaggtcttgcagcagtgattggcccaagggttggatctggccaccagctttttttttaaatagagatgggatctcactatgttgcccaggctggtcttgaactcctgagctcaagtgatccttctgcctcggcctcccaaagtgctaggattacaggcatgagctaccgtgcctggccaggccccctgcctttgtaaataaattttcactggaacctggacacacttgtttatgtgttgtttgtgcctgttttcacgctgcggcaggaaagttgagtcgttgtgtcagagaccagagagagagcctgcagaacctcaaatactatctggcccttgccagaaaaagtttaccaaccccctgcctccctggaatgggtggagggtggttgtaaaggtactggaggatctgaagacataatagggtccgtgacccttgtgaggttgtgaagctcccttaaggcacatggtggctgggctgtggatttggggtatgggcagagagtgtggagagcacttccaggggccatgtctgagagactacatgatgccactttgaatgcccagtttgttcatccttttctgttttccccacttccccagatgggtgatctacaatgaccagaaagtgtgtgcctccgagaagccgcccaaggacctgggctacatctacttctaccagagagtggccagctaagagcctgcctcaccccttaccaatgagggcaggggaagaccacctggcatgagggagaggggctgagggatggacttcagcccctctgctctgtaccctttttccttttgtccccggcagcagggaagaagctggaggccgtgggagaatggctgggcagagcagaggggcagcgatagactctggggatggagcaggacggggacgggaggggccggccacctgtctgtaaggagactttgttgcttcccctgcccccggaatccacagtgctctgcttctctgtgtcgccccgcccagccccctggtgtggagggaggggtctcgtttgtgcgcgtgggtgtagctttgtgcatcctctcccagtggagcgatcacctgtgcctcccctccccctttgtttgcccctgtgtggttggtcaaggagggatgtgagggaaatagggaccccccgacttgccctcctgcctcagtctttcccccaccctgtctcttccttgtccttctctggaaaatgccaaaatacacgatgtgaataaaagtacaacggctaaattgtgtcctgtttgataccttgggggagaggcttaccttcctggggttagcaggagggcgcttaagaaaactcctaactctggccgcctccctgccaaagtcaagtctccacttttcactggttctagagctctaggaaaattggggttgggtggggaggtggagtagagtgactaaatgccgacacaaagccaaggaaagatggagtgaagaacccttccctctctttattcacacaggagtggaggatttcccaaatgtccctaactggctagctggcttcaggctgggactcagtccctgcagttcctgccaggccttgccagccggggcgagggttgggatgatcctggcggcctatgcctgtgtgggctgcccctcccgctgtgaaccctgcatttgtcccgcaagttttcactcaggtagactccctgggtacaagggtgcctgctcagcagtcgggcatgagctgctccgatgggcgaaggaggttgtctatcccacagttggagaggggccctctctgccccagtgggcgatctgggctacggccaagttgccaccagctagttccgcttgaaaaccacttctggccccgtgggggactcaagtcgccaagcgagggttcccctgagcgccggagctcacaggtctcgccttgtcccgaaagccccgcaatcgaggcggaggcgaccgagcccccgactctcctagaacgttgccacaagaagggggaacgtcggaacagtgcatcatcgggcggcggccggggcggcggcaggagggcgggcggggggcagggctccgggggactgggcgggccatggcggaggacggcgaggaggcggagttccacttcgcggcgctctatataagtgggcagtggccgcgactgcgcgcagacactgaccttcagcgcctcggctccagcgccatggcgccctccaggaagttcttcgttgggggaaactggaagatgaacgggcggaagcagagtctgggggagctcatcggcactctgaacgcggccaaggtgccggccgacaccggtaagccctcgccgaggaggggtctggccgggccggggccggggccggggcaggagtggcagcgccctctcccgaggccccgaggccccgaggccggtatccgcgcggacctgatgcagggctgtgggacgagggccgctggggtccgggcaggggcctcgcagccgcagccccgtcggtgcgtcgagggggcagggcggagcacatgatgccccttggactatggggcaggtaaggacgttttgggtctcctggaggaaggtggccccggggcgcgcactggggctgtgcccgccaggcgacggggttaggagcggagcccgaggctctgcgggagaccgggggaggctgggccgcgtgggcttcccgctccctgcgccctggcctcccgcgccgtgcgccgccgcacgtagccccagactcctccccttcctcgccggcgtccgcgtccccgcgccgagctgctcgggctccctgagccccagatctgaccccttcccttcggcaacctgaacgactcccgccttccacggaagggaccgagcccgtgccaaacaggctgagcgatttgggagtgaggagccatcctaccgctttccccaacctggaaacagcaaagcgcaaggcctctgagtcagttaggtctctgccacccacgggcaaaggatgctctcctccatcctccttcctccctccaccgaaatcggagagccgcgggcctgatccaaagaggcatccccttctcgttcattccccagaggcctcaatacaaaccccaggagttggcccctctccttttgctacaaatccttgccttgcaaaggggaggtgaggatgggctattttagaagggaagcagggttgctccctggagaatgctgagtctgtgaggtgcctatgccgagaatagctcgaggaaattggagccccagctgttaaaagagcagagggcagggtgagggccgtggcctctcaggggtatctggaaggctcttcgagttgagtgcagacccagcctgggctggaaaatggacaaaggtcatcttgctggggtgaaaagggggagagcagaaccaagaagaagagggtgagggctggggggctccagggcactggttaggaattgtggggaatgaaggctttctttagtctcatccccctgtggtaccatcttgtcctcagaggtggtttgtgctccccctactgcctatatcgacttcgcccggcagaagctagatcccaagattgctgtggctgcgcagaactgctacaaagtgactaatggggcttttactggggagatcaggtgagatcgaggtggagaggggtgtgtgggacccttccctcactttcctcgttgaggggaaagccacagggtgggctccctgctgaaccttggcttcatctcttcctttagccctggcatgatcaaagactgcggagccacgtgggtggtcctggggcactcagagagaaggcatgtctttggggagtcagatgaggttagtagccaagagagaagataagggatgtctttttccaagaaggatgtctcaccaagtctgtttctcaacagctgattgggcagaaagtggcccatgctctggcagagggactcggagtaatcgcctgcattggggagaagctagatgaaagggaagctggcatcactgagaaggttgttttcgagcagacaaaggtcatcgcaggtatctctggagaaagggacctttgagcctatccagggccacagagactcagagggtagggtcaggccctggagcctgtcttggtccccatgctgatccagaaaaggaaaaaggggagggggagtgacaatctttgcttggggcctatgacttctccagccccaaggtagatgccacctggaaatcccccaatgtccactagggggcagtaggccaccgttcttcgtactccggagaacctggctggagagctctttcttgttcacccttccctccatctgtatctctgccctgcagataacgtgaaggactggagcaaggtcgtcctggcctatgagcctgtgtgggccattggtactggcaagactgcaacaccccaacaggtaaccgggcccaggagccctgccctcatcccagcctgcctcaataggtttggacagacacagcccacatggggcaaccccttatttcaaagacacagagaccttgaacccagagacagtgacttgtccaagggcatccagtccagggcctggcttggatcagagccctggtactctgactcagtcagaaaccacactaagtgtccactggtgccagtgatttttcctcttagagaggcagaaaaggtcttacttaggccagcttcttgttctaggcccaggaagtacacgagaagctccgaggatggctgaagtccaacgtctctgatgcggtggctcagagcacccgtatcatttatggaggtgagtggctttggttcccggctgaggtggagtgggctgaggactagactgagccctcggacatggaggtggggatggggcagactcatcccattcttgaccaagcccttgttctgctcccttcccaggctctgtgactggggcaacctgcaaggagctggccagccagcctgatgtggatggcttccttgtgggtggtgcttccctcaagcccgaattcgtggacatcatcaatgccaaacaatgagccccatccatcttccctacccttcctgccaagccagggactaagcagcccagaagcccagtaactgccctttccctgcatatgcttctgatggtgtcatctgctccttcctgtggcctcatccaaactgtatcttcctttactgtttatatcttcaccctgtaatggttgggaccaggccaatcccttctccacttactataatggttggaactaaacgtcaccaaggtggcttctccttggctgagagatggaaggcgtggtgggatttgctcctgggttccctaggccctagtgagggcagaagagaaaccatcctctcccttcttacaccgtgaggccaagatcccctcagaaggcaggagtgctgccctctcccatggtgcccgtgcctctgtgctgtgtatgtgaaccacccatgtgagggaataaacctggcactaggtcttgtggtttgtctgccttcactggacttgcccagataatcttcctttttgaggcagctatataaatgatcatttgtgcaagaaaaaaaaaaaaacaagaacaggtttctataacaacatctcttactatttttacttgaaaaaatgttttgcgtagcagactgtcatagccttgaacgccggctccctttcttcctccctccaagtggctctggggctgttgatttccgcagagcttgggttggggtaggggctcagcctcaccagctttcagcagctggtctaggccagcagtgcctccccacctccccaaggggaggggtggtggcaagacctcagcacagtctgtggtatcacagggctcactggtagagcaggtagcgcttcatggcagggggcaagggcagggcagacacctggccgagccgggtatcccccaggttgtggcgcacacacaggcggctcaggtgcagaagggagtgtggctccgctgggagagagaaggaggggaatgtaagtatgggtgcagccaccagccagatgtcctcaaactacggggtcctactcagatgcctttctgctttcctgcttcgagtgtgcccacctggctgaaaggggaatttgagatacccggaagttctgcctcccagataagatttcacacatccctagtcagagctgggggtgaagagctggctaaggccctctaaacaacaggccaaggtggctctgacagtggtggagctggcccaggctttgactccagaggcttgggagctggggctgaggtgaggagggatggccctccactctacagcccacacaactgcagagagcagctccaagccctggacccagtcagttcctggggaggctcctcccctgctgccccaccctaaggccctgcctcctccactgctctcctccctggtgcccagggccccagtgtctccatccagaggtgtggctgaggaaggaagtaggtatgtggcacagagacaggttagagcccagggaatccggtatacagcctgggtacctggctctgcccatccttcttttggacctgtacatcaaacccagtacctaacgctttgcacctcttgctcaggggttgatatctcctgaattctctcatccctgcagttcctccctccattctgaaggttcaccatttactggccaagagaacttgagaaagttgctttctcaagcctgtttcacctctattgctgttgggttaaattaaataacagctgtgaagacccctagcctttcccagcactgaacagaggttgaggcaggctggatgaaggtccatcccctctgctcttgtcagaagagtttccatcccaaaccactgccaccagggacagaaagttctccccacgtctgccccaggcctcacctctcctttcgcccaggtagcggatgcggacctggcactggccccagacagcgcttactgccggatagagggtcctgcccttcagtccgcggaatgctggccccaggtaggtgcccccaatagcgtagcccagagttccctcctccatgtccagaaccaccagcagtctctctggcacctccagctgctcaccctgagttcccgctggatactggggggctccgggccccttgctctgatggtacagcttcccccgcccgatgtcccagccccacgactcgctgttgctgcccagcagcgccgcgtagtggtcagtctgcagcggggcgagggccgtggccacgcccaccacggcatgcgtgcccctctgctctaggggccagctgatctcccaggcgtgcaggccccttgaatagcccctcttaccccgggccccatcagtgctctgggccacgggccgccgctcaaagtacaaccctccttccttgacctcgatgttctctgaacagtctttggggttccaaccgtggcgccgctgggcccccaggtcaggagggggtgcagacagcagctcttccaagccctcgggacaggagaggtcagggtacagggcctgtggcgtgggggtgctgctgctgccccctgccagagctgtctggcccatggaggtgaggagctagaggactccccgaaagaggcttgctggggcgtctttctcttctgaaagttgagctccagtttggattgacctggaagggagctgggagaaaaggggcgtgaagagcagaatcctggcgggggctcgtcacccaggtaccccatcctttcacccaagtttgccaacgggcccgctcctccctcctcgctgccccaaagctcctgggcccttcatctgccctcgccccatctgatccaggtcgccagagactctcgcgagttcgccccatttgggcctcagcatggaccatcccccttactcgcccggagccctcgccgctgcccccgaacctcggttgacttcccagccctggaggtcgccgggcctctgaaggagccgggcggaaagaagccgaggcgcgcagggcgcagaccgccggccgcttccgcccccagctcctcccttgggccgagcccgtcccgcggccccgcccctccagggccctctggggcttaaccctctcatcgccgcccacggccgtgcagctccgaggccacgcccctgtggggccccgccccctcctgggcagttaccgctctataccggcagcagccgcggagagcatgccccgcccccgtggagcccaccccgggcggttaacctcgggtctcagtcccgggctgtgaccctccccgaggccccgcccccacggcgaaggcccggggcagttaacccttctcttgctgcggcagagtccgcacccgggcaggcccatctcagaattaacgctttgatggcatcaccgcgtcgggaatccctggggatggtgttctccaccgtcaagacctttgagccgcctgagcgactaactcctgcgcccctgagggtaaggagcatggggtcaaggaggggcttcattgtgccgaatcccatttctacttccctgtgattctgggtcactgtttctgggctggtccctttctgccccgggttgtgagtcagcctgtgccacctctgaggctgtgaaatctgcttcaggctctaggctgtacgcatcatagttctccctgctggtccagtcttcatactggatgccaatccattactgagccgttgatctcatttggtagagtgtcctgattaagacttcgagtttgagtgaagctatgccactagttaactgcgcgatcttggggaagttgcccgatttctcttttttttttttttgagacagggtcttgctgtcaccaaggctagagtgcagtggcgccatcacagcccactgcagccttgacctcctgggctcaagtgatcctcctacctcagcctcccaagtagctgggactacaggcatgtgctaccacacccagctaatttttaaaaaaatatttttatttttatttttatttttttcgagacagagtcttgctcttgttgcccaggctggagtgcagcggcacgatctcggctctctgtaacctccatctcccaggttcaggggattctcctgcctcagcctcctgagtagctgggattacaggcacctgccaccacgcctagctattttttgtatttttagtagacacagggttttgccatgttggccaggctggtctagaactcctgaccttgtgatctgcctgccttagcctcccaaagtgctgagattacaggtgtgagccaccacgtccggccaaaaaaaaattttttttagagacagggtctcccaaagtgctgggatttcaggcatgagccactacgcccagccccagatttctgtagttttctgttatgtaaaataggagcaatgatggtagttacctcacagggttgttgtgcagttgaaataatccaggtaaagcatgtagcacagagctgggtacatagtagtcactcaccaagcatagctgtcaatgtgcttaatgagtgccgacactataaggaggcaatataatataatggcaaacatgccagctgtgggaccagactccccgggcatgaatacctgaaggccagtgtgtgtatgaccttgggcaaattactgaacctccctgtgcctgtttcttcctctgtaagacagagatcacattagtatctattgcatggggttggtagtgagaatccaatgaggttatagatgtaacacatttggaagagtttctggttcgcatttaatgatttgtgctaagcactggagattaagcagtgaatccttaaggaggttacaaagacttttataaaataatgtatcatgtagtaatagtaaataaaattatggagatataaagaaagtactataggagtaaaaagaataggactcctatccggggttcaagcagttaggaaaggagcatctccaaaagaggttcacacctgggctgaatcttttcatgtcctagaagaggttcacaccttcacactgggctgaatctttctctttttttttttgagacggagtctaagctctgatgcctaggctggagtgcagtggcgtgatctcagctcacctctgcctcctggggtcaagtgattctcctgcctcagcctcccaagtagctgggactacaagcgtgcaccaccatgcctggctaatttttgtatttttagtagagacagggtttcactatgttgcccaggctggcctcgaactcctgacctcgtgatctgcccgcctcggcctcccaaagtgctggggttaccggcatgagccaccgcgcccagcctgggctgaatctaaaaggatgaccaggaattggcctgagacgagccacttctctgcagtatggaggttgggttacggttgctgcatgtagaagatattccagacagaagagtccgcatgaaaaaaagcaagaagcagcaggtgggtttggggaagtacgatatcttcaaggttgctacagccagaaaggaagcatgagaagggccagataagtagacagcaagtcacagaggccttctaggctgagttaaggaatgcaaatgttttcccataggacaggccagtgatggggagccactgtaggatagaagaagagaggaacatggtcagataggcatttgatttatttatatattttgagccagggtctcactttgtcacccaggctggagtggagtagcgtgatcacgactcatggcagccacaacctcctgagctccgctgatcctcctacctcagcctcctgagtagctgggactacaggtgcataccgccatgccgagctaatttatttttatttttttaatttacaaattattatttcttaatttttaaaatagagacagagtctcagtctgttgcccaggctggtctcgaactcctgagtcaagcgatcctcctgcctcagcatcccaaagtactgggattacaggcgtgagccactgtgcctggccagatctgcattttagaaaaaccaccctggcagcaacatagaggagcttcaagggaaatagaactggaagttggctgggcgcgatggctcacacctgtaatcccagcactttggaaggctgagatgggcgaatcacctgaggtttggagttcgagaccagcctggccaacatggagaaaccctgtctctactaaaaatacaaaattagccgggcatggtggagcatgcctgtaatcccagctactcaggaggttgaggcaggagaattgcttgaacctgggaggtggaggttgcggtgagccgagatcacgccattgcactccagcctgggcaacaagagtgaaactctgtctcaaaaaaaaaaaaaaaaaaggactggaagcaaagacaccatttccagcagcccaggtgacaagtgtcaacagcctgaaataggacagtagaaataaggatgaaaataattcaagaaacactgatgaaacggcaagatttggtgactgattagatatggagttgaggctgggcacagtggctcacgcctgtaatcccagcactttgggaggccgaggcaggcggatcacctgaggttgggagtttgagaccagcctggccaacatggtgaaaccctgtctctactaaaaatacaaaaattagctgtgtgtggtggtgggcacctgtaatcccagctacttcggagggtgaagcaggagaattgcttgaaccagggaggtggaggctgcagtgagccgagatggcgctaccgcactccagcctgggcgacagagcaagactccatctcaaaaaaaaaaaaaaaaaaaaaagagaaagggaagtttctagcctggaaaaattgattggaaggtggtgccaccaatcaagatggagatgacagaaagaggagtaattgagggcaggggcaggagggtgggagagggagatggtgagttcagtttaggatatgtttttgaggtgtctgagccacaagcaaatggaaccatccagaacacacaagaaaatggcaggtctggaggcagaatgagaggcctgggctggagacagggatttgggaggtgtgtcagtctttagtcaggagttgaactatgagaatgagtgagtgaaatatgggcgatggggacaaagagagtgtggagcaacagaagggtcaaggagaatagaacaaggtagaaaattcagttttgattacttacaagattgttttggtcagaggtcactggcaaccttggtgagagacagcacatgtggggactggtaggtggaactccaggctgaaggggctggactgtcacaagctttacattttgaaggaatagaaaatgaggagaagtaaattacaattatgtcacatagttaaagttacccttggaaatcccttagtaggctgggtgcagtggctcattcctgtaatcccaccactttgagaggctgaagcaggagcttgagcccaggagtttgagaccagcctggaagactagtgagaccccatctctaccaaataataataataaaataggccggacgcggtggctgacgcctgtaatcccagcactttgggaggccgaggcgtgtggatcacctgaggtcaggagttcaagaccagcctggccaacatggtgaaatcccgtctctactaaatatacaaaaaaaaaaaaattagccaggcgtggtggtgtgcacctgtaatccctcagcaggagaattgtttgaacccaggaggcggaggttgcagtgagtcaggatggcgccactgcactccaacatgggcgacagagtgatactccatctcagaaaacaaaacaaaaaaataaaataggctgggcatggtggctcatgcctgtaatctcagcactttgggaggccgaggcaggtggatcacttgaggtcaggagttcgagaccagcctggccaacatggtgaaaccccgtctctactaaaaatacaaaaattagctgggcgtggtggcatgtgcctataatcccagctacgcaggaggctgaggaaggagaatcgtgcctgtaatcccagctactcaggaggctgaggcagaagaacccgcaaggcagaggttgcagtgagccaagatcctgccactgcactccagcctggcgacagagcaagactccgtctcaaaaaataaagtaaaataaaataaaaataattgaggaccacaagaactaggaaaaaaagaaaaaagaaaaaagaaaggccgaggcaggcagatcacctgaggtcgggagtttgaggccagcctgaccaacatggagaaacctcgtctctactaaaaatacaaaaatcagctaggcatggtggcacatgcctgtaatcccagctactcgggaggctgaggcaggagaatcgcttgaacctgggaggcagaggttgtggtgagctgagattgagccattgcactccagcctggacaacaagagcgaaactccatctcaaaaaaaaaaaaaaaaagaaaaagaaaatccctcagttactgcatctgttaggtgagcatatattcgtttgtgtaaaaatcactatgtggctgtatatatatatatatatatatatatatatatatatatatatatatatatatatataaaatgatgtacaaaatattttataatgttttaaagaggaagaagaaagcagcacactaagaagtaactcaggaatggaaaaccaaacatcatatgttctcataagtgggagctaagccatgagaatgcagaggcataagaatgacacaatggaccttgggtactcagggggaaagggtgggaagaggtggagggataaaagactataaatagcgttcagtgtatactgcttgggtgatgggtgcaccaaaatctcacaaatcaccacgaaagaacttactcatataaccaaacaccacctgttccccaataacctatgaaaataaaataataataaaaagaagaagaaagcatactaaaataaagatatgaacctgaaacttgtcatccacccaacctggatatgcttgccagtatgtgacatcaataataacatcatgactgtaagaccaggcacagtggctcacacctgtaatcccagcactttgggaggccaaggtgggccgatttgagatcagaagttgaagaccagcctgggcagcatgatgaaaccccgcctctacaaaaaatacaaaaaattagccaggctttggtggcttgcgcctgccatcccagctactcaagaggctgaggcaagagaatcccttgagtctagaattggaggttgcggtgagccaagatcaggccactgcactccagcctgggtgacagagcgagaccccgtctcaaaaaataaataacatcatgactgtgggtggcagcctatgatgaatagtagtgaaggacccatgtgataaccaaggcctggggacagagaacagtgcctgccccatggctagctctagctcagcttgagaatttaatcacgcctgtgctgctgatgctgctgctgctgctgctactggttgtttaaaacatggttgttggccgggcacagtggctcacgcctgtaatcccaccactttgggaggctgaggcaggcagatcatctgagataaggagttcgagaccagcctggcctacatggtgaaaccccgtctctactaaaaaatacataaaaattagccaggcctactggcacgtgcctgtagtcccagctactcaggaagccgaggcagaagaaccacttgaacccaggaggcggaggttgcagtgagccgagattgcgccactgcactccagtctgggcgacagagggagactttgtctcaaaaaaaaaaaaaaaaggttgttttaaacaattcatcagttgatgccactgaatctggagctggtcaaacatttgttgctaaaaggtaaaaaatttcgtaatgctacaagtaatttaaattttttacttaaaaattaaaaaaaaaaaaaaattggccgggcatggtggctcacacctgtaatcccagcactttgggaggccgaggcgggtggatcacaaggtcaagagatcgagaccatcctggctttagtagagacagtgaaaccccgtctctactaaaaatacaaaaaaaattagccaggcgtggtggtgggcgcctgtagtcccagctactcgggaggctgaggcaagagaatggcgtgaaccctggaggcagagcttgcagtgagccaagatcacgccactgcactccagcctgggtgacagagcgacattccatctcaaaaaaaaaaaaaaaattatagatgaggtcttgctattttgcccaggctggactcaaattcctgggttcaagtaatccccccaacctcagcctcccaagtagctgagactacaggcatgtgccacaatgcctttttacttattttattattttgttgagacagggtctcagtgtactccaggctggagtgcagtggcacgaccatgactcactgcagcctcaccccagcctcctgagtagctaggactacaggcacatgccaccaggcctggctaatatttaacttttcgtagagacagggactctctctatgttgcccaggttgatctcaaactcctgtactcaagcaattctcctgcctcgtcctcccaaagtgctgggattacaggcatgagccaccatgcctggctgtttttaaatttttatatatatatattttgagacaaggtctggctctgttgcccaggctggagtgcagtgcacgatctcggctcactgcaacctctgccttctgggttcaagcaactttcccgcctcagcctctggagtagctgggacaacaggcgccccgccagcatgcctggataatttttttgtatgcttttataaagacagggtttcaccatgttgcccaggttggtctcgaactcctgggctcaagcaatccacccatcttggtctctcaaaatattgtgattacaggggtgagccactgcgatcggtccttttaaaaaaaaagtcccctcccaccactgccgtttttactttttgattgagatgtagcatatataaagcacactaatcttaaattgcccagtgaacttttacatacatatacacttgggtgacaaccaccaaaaagatcaagataaagaatccagctggctgggcacggtggctcacacctataatcccagtactttgggaggctaaggcaggggatcacttgagctcaagagttctgagatgagcctgggcaacatagggagacctcgtctctactaaaaattcaaaaaagttagctgggtgtggtggtgcacgcctctagtcccagttactctggtgggctgaggtcggaggactgcttgaggctgcagtgagccctgaccatgcccactgcactccagcctgagtgacagagctggatgctgtcttaaaaaaacaaaaacaaggccgggcgcggtggctcacgcctgtaatcccagcactttgggaggccgaggcgggtggatcacgaggtcaggagatcgagaccatcctggctaacacggtgaaaccccgtctctactaaaaatacaaaaaattagccgggcgtggtggcgggcgcctgtagtcccagctactctggaggctgaggcaggagaatggcgtgaacccgggaggcggagcttgcagtgagccgagatcgcgccattgcactccagcctgggtgacagagcaagactccatctcaaaaaacaaacaaacaaacaaacaaacaaaaacacaaaaaaagaattcagcatctgtcttgctctttccctgatgatacattcccaagggtagctcctattagaccccctatcagtatagattagtgttgtctgttcttcaatttcatataaatggaatcataatgtcaaatgcagtgtcacttgcctctagtcacagctacttggaaggctgagatgtgaagactacttgagctcagaagttccactgcactccagcctgggttacagagggaaaccttgtctctaaaaaaaagaaaaaagaaagaaagaaaaagaaaacatagtatgtattctttgtgtctttccagcattgtatctgtaagtcatccatgttcttgcatgaaatagctcataattttcattgtcatatagtattccatcatctaaatataccacaatatatctattgtactgttgatggattttttttttaagacagtcttgctctctcgcccagacaggagtgcagtcgtgcgatctcgactcactgcaacctccacctcccaggttcaagcaattctcgtgcttcaacctcctaagtagctgggacttcaggcatgtactacaacgcctggataatttttgtatttttagtagagatggggtttcaccatgttggccaggctggtctcaaactcctgacctcaggtgatccacctgccccagcctcccaaagtgctgggattacagatgtgagccactgtactgggcctgttaatggatatttaaattgtttccagttttccaccattataaagttgccatgtacattactgtacaagtctgttaacaaaagaccatgaggcctgcagaagaaaaacaaaggagagctttattttttggaaaaaaaaaaaaaattccaaattggggaatgctgctggtttacacactgttcactggaataaagtctcttccctctgaattcctttacagcctgtgatcccagtattttgggaagctgagatgggaagatcagttgaggccaggagttggggactagcctaggtagtatatcgagacctccttagccaataattttttttttctgttgcccaggctggagtgcaatggcactatctcggctcactgcaacctctgcctcccgggttcaagtgattctcctgcctcagcctcccgagtagctgggattacaggcatgcgccaccatgcccagctaattttgtatttttagtacagacagggtttctccatgttggtcagactggtctcgaactcccgatctcaggtgattcacccgccttggcctcccaaagtgctgggattataggcatgagccactgggcccggccaataaaaaaattttttaattagttgggtgatggtgcacacctgtagtcctagtactcaggatgccaaagtgggaggattgcttgagtccaggagttcaaggctgcaggggctgcgaatgtgccactgcactacaaactgggcaacagagtaagaccctgtcttttaaaacaaacaaactaataaacaaaacaaaaccaaattccttttcagagaacttttttcacaagtctttggtggagctaggcatgcatttttcttgggtgcaaaactatgtgcagaattgctgggtaataagggattacaacatatagatttaaccacatgcaattttctgatttctttccatagggacattttattcagaaattaaatcattcagagttccagcactgtcgggggtcatcgggctctgtccaccgccataggcctagcattgtcaccaacggagccatagagggacctcggcccaagctggggcctcttcattgtcgaagaaggcctcttgccagaccaggatctgtgggcgcggccaggctggaggactagggcggtggcagtggccaggtgagtgcacatggctgtgggtggtccctcaattgctccctcctctctttcgctaccccctgggctggagggaggcagggcacccagccggaatggcatgatcctgaagcccaacttccacaaggactggcagtggtgtggccatgtggctcagccagcccatggggcagacctgcagaagcaaggtggccagcaaaagcaggctgcatggcccactgatatgggcccatccacccatagtaaggtgccccatgctgaggcatcactacaaagcacaagctggcaggggcctcagcttggaggagttaagggtggctggcatttacaagaaggtggcccagaccattggcatctctgaggatgcaaggaggaggaaccagtccacccaggccctgcaggccaaggtgcagaggctgaaggaggaccgctcctcactcatcctcttccccaggaagcccttggcccccaagaagggagacagttctgctgaagaactcgaactggatactcagctgacaggaccagaaatgcccatcggcaatgtctacaaggagaaagccagagtcatcgctgactaggaggaaaacttccaggccttgttagtctctgtatggcccatgcaaatgcccagctcttcggcatataggcacaaagagccaaggaagctgtagaagaggacgcttaaaaaaaaaaaaaacgggtaggctcgagccgctgcatcagcttcgcgctgggtctctcggtcccgcagccatgaggaggacgctgcccagactcactacccgccctctcagtcccgcagccacgaggaggacgctgcccagactcactacccgccggctccctcccccgcgtccctgtggtggtgggcgaagatgacctgttgtgcatcagatgcctttgagacatacaactggagatgtgagataggaaattgaatgtaaagactggaagctcggcagagcagaactctgaacaacgtgcctcaggagtgcaagttgctgatgaagtgtgtcgcattttttatgacatgagagttcgtaaatgctccacaccagaagaaatcaagaaaagaacaaaggctgtcatttttttgtctcagtgcagacaaaaagtgcatcatgtagaaggcaaagagatcttggttggagatgttggtgtaactataagtgagcctttcaagcattttgtgggaatgcttcctgaaaaagattgttgctatgctttgtatgatgcaagctttgaaacaaaagaatccagaagaattgatgttttcttgtgggcatcagaactagcacctttgaaaagtaaaatgatctatacaagctccaaggatgcaatcaaaaagaaatttcaaggcataaaacatgaatggcaaacaaacggaccagaagatctcaatcgggcttgtactgctgaaaagttaggtggatcctttttttttttttttgagatggagtcttgatctgtcgcccaggctggagtgcagtgacaggatctcggctcactgcaacctctgcctcccgggttcaagtgattttcctgcccagcctcctgagtagctgggattatagcgtgcgccaccacacctggctaatttttgtattcttagtagagtcagggtttcaccatattggtcaggctggtctcgaactcctgacctcgtgatttgccctccttggcctcccaaagtgctgggattacaggcgtgagccagcatgcctggccagtggatccttaattgtagcctttgaaggatgccctgtgtagatcatcattcagtgccacaaattgaaagcttccacgtttaatgttatcctcttgctatataaataaagcaaatatatttaggccagggtctcactgaggggagctgtcttgtcatcttttagagtaaactaaatactctataaacatatgcaaacagccctaaatatatctgtaggggtgggttgcccctccacacctgtgggtgtttctcgtaaggtgggacgagagacttgggaaagaaaaagacacaaagtatagagaaagaaataaggggacccggggaagcagcgttcagcatatggaggatcctgccagcctctgagttcccttagtatttattaatcatttgtgggtgtttctcgaagagggggatgtgtcagggtcacaagacaattgtggggagagggtcagcagacaaacacgtgaacaaaggtctttgcatcatagacaatgtaaaggattaagtgctgtgcttttagatatgcatacacataaacatctcaatgctttacaaagcagtattgctgcccgcaggtcccacctccagccctaaggcggtttttccctatctcagtagatggagcatacaatcgggttttataccaagacattccattgcccagggacaggcaggtgacagatgccttcctcttgtctcaactgcaagaggcattccttcctcttttactaatcctcctcagcacagaacctttacgggtgtcgggatgggggatggtcaggtctttcccttcccacgaggccatatttcagactatcatatggggagaaaccttggacaatacctggctttcctaggcagaggtccctgcggacttccgcagtgtttgtgtccctgggtacttgagattagggagtggtgatgactcttaaggagcatgctgccttcaagcatctgtttaacaaagcacatcttgcaccgcccttaatccatttaactctgagttgacacagcacatgtttcagagagcacggggttgggggtaaggttatagattaacagaatctcaaggcagaagaatttttcttagtacagaacaaaatggagtctcctatgtctacttctttctacacagacacagtaacaatctgatctcttttgcttttccccacatatatctaaagtctaaagttgtttttttaaaaaaaaaaaagaaaagaaaagaaaagaaaaaagaaaatagccaggcgcggtgctcacgcctgtagttctagcactttgggaggcgaaagtgggtggattgtttgagctcaggagtccaagaccagcctgggcatcacggtgaaaccccatctctactttaaatatacaaaaaattagccaggcatggcggcgtgtgcctgtagtcctggctacgagggaggctgaggcaggagaattgcttgaccctgggaggcagaggttgcagtgagccgagattgtgccactgaactccagcctgggccacagagcaagactctgtctcaaaaaaaaaaaagaaaagaaaagaaaagaaaaaaaataaagccctgttgaggacttgtaatatatcaggaataatgcaaaaaaaaaattattcagacattttgcagcatgaaacacttcagtaaatttatgaagctttagtttggtcttttcctttttctcctgagggtgatttttatcagttcctcaagattttttattagtgtttctctgtggctctcaaaaacttctttatttttatgattatttccttatattttagagactgggtcttactctgtcacacaggctggagtgcagtggcgaagtagctcactgtcaccttgagccatgatcaagggatcctcggcttcagtccctcaaagtgctgggattactggcatgagccaccatacctggccaggccaagaagttctttactttcttcctcaatgatgtataaacaaagccatcacgatccacttgctaggcgacttgcacaatgagtttcacttctttgtcaatagaaacccttggccaggcgcggtgctcacgcctgtaatcccagcactttaggaggccgaggtgggtgtatcagttgaggtcaggagttcaagaccagccaggccaacatggtgaaataatactaataatgtaaaataatatctctactaataatacaaaaattagccaggcatggtggcacatgcctgtaatcccagctacttgggaaggtgaggcaggagaattgcttgaacatgggaggtggaggttgcagtgagctgagatcacaccactgcattcccgtctgggcaacagagcaagactctgtctcaaaacacaaaaaacaaaaaaaaaaaagagaaagaaacccttaaaattctgaacacattccacatgcattgactgtcaggcttcgttgcttccattacctgtttgtttgtttgtttgtttatttatttatttattgagacagggtcttgctgtatcacccaggctggagtgcagtagcatgagcatggctcactgcagcctcaactttcccaggcacaggtgatcctcctgcctgcacctcctgagtagctgggactacaggtgcacaccaccacgttcagctaattttctgcagagatgaggtcttgccatgttgcccaggctggtcttgaactcttggactcaagagatctgcagcctcccaaagtgctgggattacaggcgtgagacaccacacctggcctcccattgcctgtttaaatagaaatgatgcaactagcaatatggaaggacttccagatctttaccacattaagattagggtcagcatccatggctctgggagtcaagggagaatctcagcctaatgtatgtggctttgaaacagcaaataatgcttagatcagcagagtgaaggatggagtcatgttgggacaggaaaccttcattcagcgcctttatgagcacattcataaagtgtgtggtacatcagtgtggtattgttgtgtcctgcagcacaaagccagattttttctctttgaggtcctgcttgacttctagaatgaagatatttgaaactgaatcagggaaagtactacagtcacccaggactttgcatttgattgctagagcacaggcaggtttttgtttgtttgttttttttgacagtctcgctctgcagccgcggctggagtaaagtggctcaatctctgctcactgcaaactctccctcccaggttcaagcaattctgtctcagcctcccgagtagctgggattacaggggtgtgccaccatgcctggctaatttttgtatttttaatagagatggggtttcactgtgttggccaggctgtcttgaactcctgacctcaagtgctctgcccatctcagcctcccaaaggctgggattacaggtgtgagccaccgtaccgccgttttttgtttgtttgttttgtttttttttttaaagggcaccaggatttgtagaatgacagccctgtagaactacactgcccctgcacttgggggcaagggcaaagggtggaggggaatagcattcagaagatcatgagttgctttcaaaccagggccttgtgtttctagtttggaaatattaaatgcagttgggcatctttccccagaagatagcaaccactaacctcatggtattctggaagatggccttttcaccagtaatttttcttttttttgagatggagtcttgcgctgttgtccaggctgcagtgcagtggcacgatcttgactcactgcaacctttgcctcctgggttcaagcaattcttctgcctcagcctccgagtagccgggattatagtgcccatcaccatgcccggctaatttttgtattattagtagagacggcatttcaccatgttggccaggctggtctcgaactcctgacctcatgatccacctgccttggcctcccaaagtgctgggattacaggcgtgagccaccgtgcctggcctatgccaataaacctttctaatagctctgagtgggttgtgctgtctgttcctctacagacacatctcaccaatagtttgtgtgtttttgaggtttaaatgggcttctaaaatcattatgccatccttggctggttttgaaatctttccatccaaaggctgacttctctagtaggaggtttgaactatgacttgagatgaagagtttttttcttctctttttttgccacgtcttgccattgtaaggcacatatttctttttggttttctttctttttaatatatagaggcagggtcttgctctgttgtccaggctggagtgcagtggtgcaatcatatctcactgcagcctacaactcctggcctcaagaggattagcttctggtcttgccctcccaaagggctgggattataggcctgagccacttgcacctggcccagacacatatttctggtttttgtctttcggtaatgtttagtggcctttctattttcttttttctttttttttgagacggagtttcgctcttgttgcccaagctggagtgcaatggtgcaatctcggctcactgcaacctccgcctcctgggttcaagtgatactcttgcctcagcctcctgagtagctgggattacaggcgtccgtcaccacgcccggctaatttttgcatttttagtagagacgggttttcgctgttttagccaggatggtctcgaattcctgacctcaggtggaccacccacctcggcctcccaaagtgctgggattccaggcgtgagccaccgcgcccggcctgccattttcattaaccacatatcttcgttgtcactttagcagttgtaggagaatctgctgacctcgcttcacaaattttttgaatcttgattgaatgtacagattttttgaggccgtattttttttttttccactttggggatagacttgtatgctagcatggaagggaattgtttcttcggttgagtgcctaaagtgcttgatggcctttcagatggatcatgtcatacagaaaggaagtatcttaaaacactacaatctagtttaagacataaaacagtagaatcgctgtcagcgtcacaagatacaaacgaagggctcagaactgggaccaagagaacatagtctccccatcttacactcgctcggaatgggggctggccccactctgctctatttaatctgagcactgttgaatgaatctgcgatgaaactccacatttcctttaatcctcacaacaaagataaaccaatttttagattcgtaaactgaggcttagagaagttaaacgtattgtccgagactacagaactggaaaatggcaaagtcaagatccaactccgaagagcctccccctgcccactagcggggaggaaatggcaaatgacacagcaaaaaatgtttaaaaccaggattctcggtcgccgtcccgcccagcgccaacgctccgtcccgcctcgcatcaacgcctcgctcctccccgcccagcgccaatgccccgccccgcgcagccgcccaggtgccagttgcgtaaccacggcaaagctcgcggcagggggcggggcagacgctgactgtcgccgggcggcggtcacgtgagcgggagcgcagcaggccggcggtccgagtgcctcgcgcgcgccccacagcggccgcacgcgtctcgggctctcctcccagtagttcactccttagtggctacagaaactggagcccgccatcgggctttcccctgaactgcagcttccgtccccgccaatctcttctccggccccagcgctgactttcatgcgtggagcattctggcccggaacagagatcccagggcggaaactagggcccgaggctgaaagtccgttcttggcggcgagggccgccgctaaactggctgctgagggcgtctctagctcgggttccagaagagagtggaatggactgagtgcttgtgagaaacttcctaattgaggcttacctactaaagttctttacgttttaaagggttccattgcatcagccctcaaaatgtttccttccccagccctctttcttctatcatggtggttatgtctagggactctccactgggagacaatcattttgttctccccgaggagggaggtcagaagtgggagacacccaggttgtgttagaaactatggtagctggggcgatggctcatgcctgtggtcccagctactcaggaggctagggcaggaggattgcttgagccctggaggtcgaggctgcagtgagctatgatcacgcctgtgaatactctgggaggatgggtgacatagcaagaccctttcaaaaagaggagaaagaaactgcagcgtaaagtagcacacctgttacaaaggtaaatgctcttttgtctatccttgctatttttaaaaatactcaatttttcctagttttccttttttgttttttgagacagtctcattcggacgcccaggctggagtgcagtggcttgaacttggttcactgcaacttccacttcccaggttcaagcgattctgttgcctcagcctcccgagtagctgggcttacaggcatgcgccaccacgcccagctcattttgtatttttagtagagacgggatttcaccatgttggtcaggttggtctcgaactcctgacctcaggtgatccgcccgcctccgcctcccaaagcgctgggattaaatgcgtgagccaccgcgcctggccctagttttccttttgacatccttccgagcctctgtttcttgctagttaatcctaacagggtatcatggaggcttgtcacttgttcacgacttagcagtgattctcaacgtggagggaggtaaggggagtttatctgtaagggcaaatccaaattgagggagggtgctcttgattactttttttaaaaaagcacatttaggccaggcatagtggctcactcctgtaataccagctaccctggaggttgaggtgggaggattgcttgagcctgagaggtccaggctgcagtgagctgtgatctcgctattacagttgagcctgggtgacagagtgagaccctgtctcaaaaagaaaaaaagtatctattgaacatttactgtgtgctagacactgtgccaggcagtagggtgcagagtgaaactgaagaactcaagatctattggaggccaagtgcaagttgctcatgcctgtaatcctagcactttgggaggccaaggcagtcggatcccttgaggacaggagattgagaccagcctgggcaacatagggagacccccaccgctacaaaaaaactagccaggcgtgttggtgcatgcctgtagtcctagctacttgggaggctcaggcaggaggatcacttgagtctaggaagtcaaggctgcagtgagccatgattgtgccactgcactccagcctgagtaacagagtgagaccctgttgcaaaaaaaaaaaaaaaaagaaaaagaaaacaagaaaaagttctgtttggcagttctgcaaggatgacccaaagattttgatttgagcatccgaaagtgatataggtaacactaaagaaaagcaggctgggcgcagtggctcatgcctgtaatcccagcactttgggaggctgaggtgggcagatcacctgaggtcaggagttcaagaccagcctggccaacatagtgaaacccggtctctactaaaaatacaaaaattagctgggtatggtggcggtcacctgtaatctcagctacttgggaggctgaggcacgggaatcacttgaactgggaggcagaggttgcagtgagccaagatcatgccactgcactctagcctgggcatcaaagtgagactacatctcaataataataatttgaatgtgaaaaatgggacacacacacatgcacacacaaacaaacatacatctggttttgcaaactctatggctagtagatatacaaagaaagccttttgagtatcagtgatttgcaaggagcagtgtatcaagatactttgcattggccaggcatggtggctcacgcctgtaatcccagcactttgggaggccaaagcaggcagaccacctgaggccaggggttcaagaccagcctgaccaacatggtgaaaccctgtctctacaaaaaatacaaaaaattagctgggtgtggtggtgaacgcctgtaatcccagctacttggaaggttgaggcagaaaaatcgcttgaacccaggaggcagaggtttgcagtaagccgagattgctccactgtactctagcctaggtgacagagcaagactccctctcaaaaaaaaaaaaaaacaaaaaacacaaaaaacaaaaaacaaaaaaactttctactgagtcataaaaattctgaggaaatggtattaaagggcatttcatatggacatttattatctcacataaaaataaatcaggaggcttctggaaagtggatggttccttgctcttatgagacagcagtaagaaaggactgtcagtggtcccacttgagtctctgatagctatgtgcagccatcacatgacactgggaagactcagttacaggagaagtcatcactgtggattgcagtcctggaagacatggtagagctgaaggatcagccaactttgagactcagctctagctgcctgtctccagtggcctaatggacatctctatgaggatgtttgatagggtttggctctgtgtccctacccaaatttgatctcaaattgtagtccctgtaatcctcacatccagggagggacctggtgggaggtgactggatcttgggggcggtttcccccatgctgttgttgtgatagtgagtgagttctcatgagagctgatggttttctacgtgtttgacagttcctccttcacactctctcgcctgctaccatgtaagacatggctgcttctccttttgccatgattgcaaagttcctgaggcctccccagccatgcagaactgtgactcaattaaacctcttttctttataaattacccagtcttgggcagttctttatagggtatgaaaacagagtaatacagtgttccattaccactaactagttggatatattcatcttctccatgtcctatgtccattcagttgctgagtcttgttgagtcttcctctccatccctacctccttactccatacacttatcatcttcagcttcctaaactttcaagattcttctaccttcactgaatcatatgctagatatataccatatatatgcatttgctatctattttaagaatttaaagtaacattttagaatttattgagtttttctacttctttctatccaatagtctattctattattagaaacaataaggtgggctgggtgcggtggctcatgcctgtagtcccagcacttcaggaggctgaagcagacagatatcttgagcccaggaactcaagaccagcctgggcaacatggcaaaacctcgtctctacaaaacacacacagacacacacacacacaaattacccaggcatggtggtgtgtgcttgtagtcccagctgcttgggaggctgaggtaggaggattggttgagcttgggttgttgaggctgcagtgagctgtgatcacaccactgcactccagcttgagtgacagaccaagaccctgtttctaaaggaaaagaaggcctgggtcgggcgcagtggctcacggctataatcccagcactttggaaggctgaggcgggcgaatcacctgaggtcaggagttcgagaccagcctggccaacatggtgaaaccccgtttctactaaaaatacaaaaattagctgggtatggtgggagcacctgtaatcccagctactcgggaggctgaggcaggagaatcgcttgattctccgctgggaggcggaggttgcagtgagccgagatcgcgccattgcactccagcctgggggacaaaagcgagacttcgtctcaaaaaaaaaaaaaaaaaaaaaagaaggccgggcatggtggttcatgcctgtaatcccagcattttggaaggctgaggcaggaggatctcttgagcccaggaattggggagtagcccaaggaacatagtgagaccctatctctacaaaacaattttaaaaattaattatccaggcatggtggcatgcccggtaactaggtgattctagttacttgggaggccaaggcattacttgagcccaggagtttgaggctgcaatgagccatgttcccaaactgcactccagtttgagtgacaaagcaagaccctgtctcaggccaggggtggtggctaacgcctgtaatcccaacattttaagaggctgaggcaggtggattgcttgagcccaggagtttgagattagcctggccaacatggcaaaaccccaaatctactactactactactactactactactactactactactactactaaaaaactggccaaggtggtgtgcgcctgtaatcccaactactcaggaggctgaggcacgagaatcgcttgacgggagcagaggttgcagtgagccgagactgcaccactgcactccagcctgggtgacacagtgagactctgtcttaaaaaacaaaaaagaccctgtctcaaaaaaaaaaagaaataataaggtggcaggatatatgatatatagagaaaaatcaatactaaaatcaatagttatgacagtatgacattggagcagcagtagacatagagatcaatggaagataatagggtccaggaataaaacccatatatatgataaagatggcatttcaagtcagtagagaagaatgggattaatcaataaatgatgtagaaaaaaattggctccccttttggctcccctacctcacactatataccaacctattctagatgtaataaagaccgaaaaatatttaaataccatcaaaatagtcaagagaatattttcataaccttaggggtgaaaaaggcttttctgaaccagacccacagttcagaagccttatgcaagagactggcagttgggactacacacaaatgtcaaatttctgtaaggtgacactctataagcaaagtgaaatgacaaagtaggaaaatattttcaaaatgtataagagacaagaagttaatgtgtctgtgtggtggtttaaaaatatgtccatgaattctgtgatactcttccttttaagaggtgagccttattcccctccacttgagtgtgggctggacttagtgactggcgtctaaagaatagcataaagtggaagtgatggtgtgtgactttggagactcagttaaaggcagagtggctttcatcttggtctctttctctcttggatcacttgctctgggggaagccagctgccatgttatgagggcactcaggccctgtggagaagtccagatggtaaggaactgtcttgccaacaaccatgtgagtaagccatcttggaagcaaatccttcagccccagccaagccttcagataacggcagctccagccagccgtttgactggaacccacctgggccactcttggattcctgagaaactgagataatacattttgctgttttaagctgctacgttttgagatgatttgttatacagctataatcagttaacagttgcacttggctggctgggcatggtggctcatgcctgtaaccccagcactttgggaggccaaggcaggagaatcgcttgagcccaggagttccagaccagtctctgcaacatagtgagactccatctttacaaaaaaaaagttaaaaattagctgggcatggtggggcgcacctgcagtcccagctacttaggaggctgaagtgggagggtggcacgtgcttgtaattccagctactcgggaggctaaggcactagaatcgcttgaacccaggaagcagaggttgcagtgagccgagatcttgccatttcactccagcctgggtgacagagcaagactccatctcaaaaaaaaaaaaaaaaatcaccctgttaagtataagctctgacaaatgcatagtcctatcataatcaagacatagaacaatcgtagaatcactctaacagttccctcaagatcaagatcaagaagtcaaccccttcttgatcccaaggaactcattgacctgtttttctgtcaaaagggtcaaatttaatcactaaaatgatctacagtactatggaaaaatttgtaagcatagaaaacacacaaaccaactctttttaaaaagtaagatattttaaaagtttaccataccaacagaatgaagatagcttcacattttactacagatgtgcagatattcatcaaagtccaccattgtcatatatatggctcaacagtaatatttaagaatatactggccagggccgggagtggtggctcacgcctgtaatcccagcactttgggaggctgaggcgggcggatcatgaggtcaggagattgagaccatcctggccaacatggtgaaatcccatctctactaaaaatagaaaaattagctgggtgtggtggtgcgtgcctgtaatcccagctactcaggaggcggaggcaggagaatcacttgaaccagggagtcggaggttgtggtgagccgagatcactccactgcactccagcctggtgacagagcgagactctgtctcaaaaagaaaaagaaaaaatactggccaggcacggtggctcatgcctgtaatcccagcactttgggaggctgaggcgggtggatcacctgaggtcaggagttcgagaccagcctggccaacatggtgaaactccatctctactaaaaatacaaaaatcaaccaggtgtggcgtcacacacctctaatcccaactactcgggaggctgaggcaggagaatcatttgaacccaggaggcggaggttgcagtgagctgagattgtgccattgcactccagcctgggtgacaagagagaaactctgtctcaaaaaaaaaaaaaaaaaatactgtaaaataacaatctttagaagagttagaataatgttatttttgtttgtttttttcgagacagggtcttgctctgtcatccaggctggagtgcagtgacgtaatcttggctcactgcaacccctgtctctcaggttcaagagattcttgtacattagccacccaagtagctgggattacaggtgtgtgccaccatgccagctaatttatttgtatttatttatttatttatttatttattgagacagagtcttactctgtcacccaggctggagtgcagtggcgtgatctcagcttactgcaatctctgcctcctgggttcaagcgattatcctgcctcagcctcccagtagctggaattacaggcatgtgccaccaccacacccggctattttttttttttgggggggggggtagatatggggttttgccatgttggccaggctggtctcgaactcctgacctcgtgatctgcccgcctcagcctccccaagtgctgggattactgtgtgagtcactgtgcctggccaatttttgtattttagtagagaaggggcttcaccattttggccaggctggtctcaaactcctaaactcagatgatcagcccgcctcagccttacaaagtgctgggattacaggcgtgagccactgtacccagccctcaaaagctattttttgacatattaagattggcaaagtacgtaccatttgacccagaaattctaccttctaagaatgtacgccgggcacggtggctcctgcctgtctgtaatcccagcactttgggaagctgaggcgggcagatggcttcagtccaggagttcaagactagcctgggcaatatagagaaatacccgtgtctacaaaaattgcaaaaaattagctaggcatggtgacatgcgcctgtagtcccagctacctgggaggctgagttaggagaatcacctgagcttaggatgttggggctgcagtgagccatgatgattgcaccactgcactccagcctgggaaagaaaaaaaaaagtttcccacatagtcatattactcaatgcgtagtccatgaatcaagagcatcagcatcacttgagaggtctacatttcaatgagatcctcaagcaatttctatacacgttaacatttgaggaatactgctacagagtactcatgcagaagagcaaagatatatctatggggatttaaacagcgttatttgtaatatggacaatttttaaaaaaaagttaatatccatcaatagggaacagttaaaagtctagccaggcttggtggcacacagctgtagtcccagctacttgagatgctgaggcaggtcgatggcttgagcccaggagtttgaggctgtagtgcacaatgattgtgggcaggaaacaggacctcgactttggaccagattcaagactggctgaaacagggaagaggcacagaaagcacttctccgtaagacacgcccaccagcacgacagtttaccattgccatggcgacacccagaagttactgcctttttccataacaacctggaagttaccaccccttttctggaaatttctgaataacccactctttaatttgcatgtaattaaaagtcaatataaatgtgactgcagaagtttccctgagttgctgctctccacacactgcctagagggtggccttgctcggtaggagcagtcatggggctgtaaaactgcatcctcaataaagctgtatcttctaccacatgctcaggaaagaaccatgagccttattgggctaatcgccaatttgggtgttcacctgccctgcatcagttgtgcctgtgaaaaactactgcactccagctgtgaccggttgagggtaattgtccaggttcttggtgttttgcacaaagaattcgacaaaacacacaaacaaagcaaggcaatgaaagcagagattttttttgtttgtttttttaattaccgtgcccgcgagacggagtcttgctgtgtcgcccaggctggagtgcagtggcacgatctcggctcctgggttcaagcaattctcctgcctcagcctcctgagtagctgggattacaggcttgcaccaccacgccccgctaatttttgtattcttagtagagatggggtttcaccatgttggccaggctgatctccaactcttgacctcttgatccaccaaaagcagagatttattttaaaggaaagtacagtccacagagtgggagcaagctccagcaagtggctcaagagcattggtgacagaattttctggggtttaaatacaatctagaggtttcccattggttcaccctatgcaaatgaagtagtggccgactgccagtctaattgtgggaggggaccaatcaaaatgaagagagtaggcctgctatcagtctgactggttgtgagaggggaccaatcagacgtactttcatttttcaaatgccatacagagaaaggagggtttgaaaagggagtactctctgatattcagtcagcatgattcggccttagattccctgcctccggaccctattctcctgcctctcagcctggacaatgtagtgagactctgtctctagaaaaacacaagaaagttccgggcgcggtggctcacgcctgtaatcccagcactttgggaggccgaggagggcagatcacgaggtcaggagatcgagacgatcctggctaacacagtgaaaccccgtctctactaaaaatacaaaaaattagccaggtgtggtggtgggcgcctgtagtcccagctactctggaggctgaggcaggagaatggcgtgaacccgggaggtagagcttgcagtgagccgagatcacgccactgcactccagcctgggagagagagccagactccatctcaaaaaaaaaaaaaacaacaccaaaaaaaaaaaaaaaaaaaggaaaaacgcaagaaagaaaggaaagtggtagtatatccacataatggaagactagacaactatgagaaaaagaggtagatttatgcttagtgacatgaaagaagcccaagacatattagaattgaataattagaagaaaaaaaccctaaactaatctaaaaatctttttttctttttttttgagaccgagtctcactctgttgcccaggctggagtgcagtggtgcgatgtcagcacactgcaatctccgcctcccaggttcaagcgattctcctgcctccgcctccggagtagctgggataacaaacgcccgccaccacgcccggcgaatttttgtattttcagtagagacagggtttcgccatgttggccaggctggtgttaaactcctgacctcaggtgatccgcccaccttggcctcccagagtgctgagatgataggtgtgagccaaagcgcctggcttttttttttttttagacagagtctcgatctgttgcccaggctggagtgcagtagcgtgatctcggctcactgcaacctctgcctcccgggttcaagtgattctcgtgtctcagcctcccaagtagctgaaactacaggcacaagccacaacgcctggctaattttttttctttttttgagacggagtttcactcttgttgcccaggctggagtgcagtggcgcgatctcagctcactgcaacctaggcctcctgtattaaagcgattctgctgtctcagcctcccgagtagctgggattacaggtgcgagccaccaccccagctaattttttgtatgtagagacggggtttcaccatattggccagactggtctcaaactcctgacctcaggtgatccacccgcctaggcctcccaaaatgctgggattacaggcgtgagccaccacgcccagcctaaatattacttttataattgaaagagactctatctagaccagccgatgggggaaaaatatcaaggatgttgtggagtatctagctctcattacacagtgtaacttcagtccttgccaactaaacacgaaataaaaccttcaatagctccccacagctttcaggataaagtccagatccttcagtgtgatccaagtctgtttactgcttctaccatattccaacccccgactgcacctactgttccagccagcagaaccacctgctttctttgcacaggcattgagctctttcttctccaagcattaccacaggtgattcctgcctctgaaatctctgccccgaatatatgatatcatgtatatgcatatactatacaatgatccctagcacttagtaaaagctctataaatgttgggtatgattattataacatgtctcattatattgaattacttgtgtacttaatcttgtcactgaactgtacacctcttgaagataaaagataaggacttctgtgctttactgtcccggagcacagggacagattaagtgcttaacaaaagcatggcagggcgcagtggctcatgcctataatcccagcactttggaaggccgaggcgggcggattgcttgagcccaggagtttgagactagcctgggcaacatagcaaaaccttgtctctacaaaaaatacaaaaaaattaacttggcatggtggcgcacacctgtagtcccaggtacccaggaggctgagacggaaggactgcttgagcccaggaggtggacgttgcagtgagctatgattgctccaccgcactccatcctgggcgacagagggaaactctatttcaaaacaaaaataaaaacaaaataacaaaagtgtatgttcaaggacaccttcctaacccttacatcacaacttttcttcccatctaatgtgtcttcctctttcttcttggccaaggaaactcatatccatttcttttgactacatcaaaccacatggatttttcccttctccacactccaacaatacaataactttcatttgtatagcacatctcactcttcagagtgttcatatttattatttctttttcctcacagcaaccccagtaccaaggacacaggccaggggtggggaggagcaggaaaatgtttactaagggtcaactaagtgcaaggcgatttacccacattatctcttttaatcccttaacaatccttacaggtggacgttttaataatccccatttcacgactgtggaaattagacctcagtaagatttcataacctgctgaaggacacacaggtattaagtagtagagatgggttttgaagctggtgtctctgactttaaagtccctactggttccatgacaccaagtaaacagatttgcctattaaccacattcctccaagctgccctgggcaggaggtaatataatacttcctgatttcttgcccaccacatcttccaccagaccactttgccgttatataaagtctgtgggcacaatttaacaatgaatcacatgccatcttacctggttacctcattgtttcatttacattagattccacaacaagattggtaacatccccctttccccaggcaggaattgtgtcatcttaacctccctgagcctcagtatcctcttctttcaaatgtctatcttacaggactgttgcagagattaaatatcagttgtaaagatgtttgacataatgtctcgcacaaactctccagaaatatttattgcatctcaacatctttttcatctccttcaacatgtcagacaggcctgagtgcctgggtttggctatgccagttcctgttgattactgatataacaacgttggatcaggagtattttagtgggcagatgttgaattttctgccttccacccactaaaaggtttgcatcaaaccagtccaggataactcatactggatccctgtcagttgatatagttaagctaattctacagataacaaagagtcttgggtacgtttagctagcaaatgcagatctgccaagactccaacccagttcttaaggtatctgggtctggactccttccgctccaccaagccaccttccaaaggtctacctgaaaataactaatgagcagaaactatagggggaaggggaaaagaccccttatcttggtgtttcttgcttttcctcgcagccccgccctttttgcttcgaaggacgagtttttcctgaattcacaatacttttgcattgaagatgtccggtccctttaaggtcttgggtgacgtaatgactagccccgccccctctcttctcgcttctcagccctgcccacttctttttgtcctcagccaattagcggcccaacgccccttccgcgcctcatccgggttcccgggacgggaaagtggcgtggtaaccaggcaactactgatcaatcccctccccggctgatttgcgcatcaggtagtcgccgctctactctcaacggtggcgagctgcagttgccaagtgccccgtccccgttgccataacagcagtacacaacccctccttcccctcgcccgcttgctaaacagtccttccctctcgggaccaagggcctctccagaactgcttctgattgagcagaaacagggtctgagcccctttgctaaggcgaattgagtgggagggttggagactgcgctttaggctggtgtaccagagggcccaaggaaattggcccagtggggagggaaaagtagaagaaatgaatggagcagggattacggatggcgcaatgggagctgagaggagaggaggaggaattggtagggaagattggagagcatggcttaagggggaggtgggaagaatgggggagagggaagcccaggaaatagggacacccggctgctggaggagagctggagtcactgtgaaggacaggaaaggcctgggggtgtgggtgacatcctgaagggagggggtcctcagtggaaagtgtgaagtgggagttgagaatcaaaatgagatgttcacagggataaggaaagaagcctagagttggtgggtcagaagtcatgggggtgatgggagtggcacgtgtcaatgacgatgaaggagctgaaggctggcagaagctgatgagaccttctttttcaggaggaggactgagcttatctgactccagagctttcaggagggaagaaagatgtcagatgaagatgatctagaagactctgagccagaccaggatgattctgagaaagaagaggacgagaaggagacagaggagggggaggactacagaaaagagggggaagagttccctgaggaagtgagagcctggacaaggaggggtcctagggctgaaggagggggttgggcaggggagagacaccttactccacttctacctgcagtggctgcccacccccctcacggaggacatgatgaaggaagggctttctctgctctgtaagacaggcaatgggctggctcatgcttatgtcaagctggaggttaaagagaggtgcgttttggggggaccagatgaggactgtgagactgtagggcccctatctcctttcccactgtcattcctgggtgttctggttgagagtttgactcttctcatgcctagtggaaagggaaggacagaatttacttttcaggagctctgagacttctcctatcaaagctgacctggggaattggagattgagagtatatggggggattcctgctggattcccttatttgtctttcagagtatgggttctctgtccttcacagacacaggtctctctgcccactgttaagaacccacctaccttctcttacccttcttctcccctaccatctgttgcccattcttctccccattataagccatctccatattgccttctgctttagcaactctgccagtcctcactgggtgcttaaccctaaacctggtttcttctccctcttccatctcctagggacctgacagacatctacttgctgcgctcctacatccatctgcgctatgtggatatttctgagaaccacctgacagacctgtctccactcaactacctcacccacctgctctggctcaaggctgatggcaatcggctgcgaagtgcccagatgaatgaactgccctacctgcagattgctagttttgcttataaccagattactgacactgaaggcatctctcatcctcgtcttgaaaccctgaatctcaaaggtgggtctttaggatgggctacacaagattctttccttcctagcctgaggccaacagaagtgggcagtatggtccttggctagggcacatggcagtctgcattcattcattcattcagatacgcaatatgattcattatgacagttctacatgctaaccatataggatccaataagacaaggaacgtccctattctcatatagcttatattctaattgggagagacaaacaagtaacaacaaacacagtaagtacattcatgtagcatgttaaaaggagacaagtgccttggaaaaaatagatcagagtaagaggaatgggggacacaggtggcaatgtcaaatagattggttaggacaaccatcactgagaagatgacatttgagcaaagaattgaagaaggagagggaattagacatgtcagctgcttcattcactcttcaaaggcttaggtggatatgtccatcaggaccttggactacctaccacaccacttgcctcagggctccagaggtattaagtctggagctggccttcctcagtatctaccctgctttgcgaatggtaggatgatttagaggctccccaaattcaggctctaatgctgagcatttggagtggccctttgagctcttgaaaccctcctccccagggaacagcatccacatggtgacaggtctggaccccgagaagttgatcagcctgcacacagtggagcttcgggggaaccagctggaaagcaccctgggaatcaatcttcctaagctgaagaacctctacctggtagctcactgggtcagagggtggtgcagggaagagggcactgtcctgggggtcaggatgcctgctttctagtaggctcagctactaacttcatcattatgataataactggtattattatcaagaccatagttggttccagatgctgtggagatacacagccacctagcagggctgataatatataatgtgtggataatacagagataatttaccttgatacaggtagtagcaaaatggaccataattgaggtacaaacatcagtctgtggaaatgttttaggaaaaccctcctctcagactgggtttttcttcagctcttacactaccaccacaacaatcatcaacatacgacttccgggaccaaaggtgtgggggtttctccccatacaccaagtagtagacaccagctgggtgatctctaattcgattcactgtctacctggggatggcatcaaatcccacagattgagggctcggttcccaagagtgacccctacaccgcccacatacaccagttgcaagtccaagcctccagaacttctgacacaccagcttcaacatgaagctggttcccatgacctcttctctggatttaattaattttctagagtggtttttattagtttattgcaagggcaaaggatacagatgaagagatgcttagggcgaagtatggggatatgggtgcagtgctccatgcccttcccagatgcatcaccctccaaaagctttcacgtgttcagctacccagaagctctctggacccagtcctcttggcttttcatggaagcttcatgatcttagtattccttcccccaggaaactggggaggctgtcgctggggagggtcttaagaaccacaatcaggccgggcgcggtggctcatgtctgtaatcccagcactttgggaggctgaggcgggcggatcacctgaggtccggagttcgaaaccagcctggccaacatggcgaaactctgtctctactaaaaatacaaaaattagcccagtgtgctgacatgcgcctgtaatcccagctactagggaggctgaggcagcagaatggcttgaacccagaaggcagagtttgcagtgagctgagatcacgccactgcaatccagcctgggagacagagcaagactccatctcaaaaaaaaaaaaaaaaaaaaaaaaccaaagaaaaacacggtgaaaccccgtctctactaaaaatacaaaaaaaaaaaattagctgcgtgtggtggcaggcacctgtagtcccagctactcgggaggctgaggcaggagaatggcgtgaacccaggaggcggggcttgcagtgagccgagattgcgccactgcactccagcctgggcaacagagctagactctgtttcaaaaaaaaaaaaagaaagaatcacagtcagaaagagggagtggggggaaagattagcgctttctcttggagcaggtgaaaagacggctggagaagttcctgagacctgcccctgaggcccagcacacccaactttataacaaaagactgcaagaagggctattatgggggttataagctagggactgtggatgaaaaccgatatatatattatatattatataattatatattatatataaatatatattatatattatataattatatattatatataatatataattacatataatatataatatataattatatattatatattatatattatatataaaatatataatatataattatatattatatataatatataattatatataatatatataattagatataatatataattatatattatatataattatatataatatattatatataattatatataatacataaatatatataatagtatatattatatataatatatataatatataaatatatataatagtatattatatataatatattttatataatatataaatattatatataatagtatattatatataatatataaatattatatataatagtatataatatataatatataatatatattttatatattatataatatattatatattatatatataataactccacaggaagccactgaaatatttagtcttttagactcttaagcttcgttattctgggatggtgctgatgccaatcctcagtggtggcctgggggctcctgggccgggtaggggtgggttgaagcatctcctccatcccaagtggctttgatggggcgaatggtagagggttactgctgacctttctctgggatggcagcttctcctgaacttctttactttctatactgatctctactcacccccactcctttcttccactcctccctctctacctcttggatttcctcttttgctttatctcattctgacttctctttcttccctatccctgctccctctcaatcaatccactgtgccctgggggtctaggcccaaaacatgctgaagaaggtggaaggcttggaggatctgagcaatctcaccaccttgcatcttcgagacaaccagattgacaccctgagtggcttctccagagaaatgaaatcattgcagtacctcaacctgaggtatgcaccctctccaagccccaccttgcccctacccctgaccaggtgcagcttttgagtctgtgttcttccctggcccaatcccccagtcctagcccacagctggattctcaaggaaagcccggctttccttcctttcttctgcactgagttgcaacactaaatcccttatagcttgtgacccctgaatttttattcattcaatccacaattattgagaatgtgctatgtgccaggccttgtgctgtgttttggggacatttaaagcaatcagaggctgggcatggtggttcatgcctgtactcccagcactttaggaggaaggatcacttgaggccaggagttcaggaccagcctgggcaacctagtgagaccatgtttctacagaagtgaaaataatggcccggcatggtggctcacacctgtagttctagcactttgggaagccgaagtgggcagatcgttggagcctaggagttcaagaccagtctgggcaacatggcaaaatcccatctctaccaaaaatacaaaaattagccaggcatggtgacaggcacctgtaatcccagctactcaggagacttaggcgggaggatcgctggagcctcgaggtggagtttgcagtgagctgagataaagccgctgcactccagcctgggtgacagagccagaccctgcctcaaaaacaaaacaaaaataaaatattaaataaaaattaaaatattaaattaaaaataaaaattaactgagcctggtggtgcacacctgtggtttcagctactcaggaggctgaggttggaggatcacttgagcccaggagttcaaggttgcagtgagccatgattgtgccactgcactccagcctgggtgacagagtgagctgtctctaaaagaaagaaaggaatcagaggtgattcctgttcctaaggggctcacagtctggctccaactcttttttcctcaccctatcctatataagtttccactgcccttctccatttcctcggtcccaattcaccttcccatttcctgcctctcttctcctgagccccacctgtaagggatgacctttttactgattaaaaaaacacaagatgtgctcagatttgaggagagaaggacatttgtaagaaaatcttttggtagaaaggcactgaagatcagcaactcttgtcggatggaggactttatgtgtgtttatttcagcaaacatgtaaggaaactgcctctttccttagtcaacaagaccagattcttgagctggtaatggaaagagcatctccaagtagggagaggtggttgcatctggaagccccaactctcatcctgaccccctgggcattctcttattcatgaactctgccacacggatctggtggggtgtgtatctgtgccatcttcctgttaatgatctagacaggcatgatggacccttcctgagtggctattaaatggggatgttttgagagtaagtcgggtgtgtgtgtggaggggggtgagggtgtctcaatgattggcaggtgcctctggggccagagatgctaagcatccaacaatgtatggcagagtccagtacaaagttcctgtagccctcctggtgagaaacactgcatgaggctcagcacgaccatgagatcaggctgaaacacttaaatagatttcataaaagcttaaagccagaacatgaaaataaataaaattccaggcatggtggctcacgcctgtaatcccagcactttgggggggccaaggcaagaggactgcttgaggccaggcgttcaagacaaacctgggcaacatagtgagacccagtctctacaaaaaatttaaacattagccaggtgtggtggcacatgcctggaggtacttaggaagctaaggtgagaggatcacttgagcccaggaattcaaggctgcagtgagctatgatcatgccactgcacccccaaccggggtgacatagtgagaccctgtctcaataaaaataaaataaaaacagagtatcatataatgaggcacattaggagatgaagtttattcttcaggttgggaggctccaacccatccatagccttaggttctctttgtggagagcacgaaccgagcatccaccaccctaaactccagcttagatcccagttccttgtccactgacctaggtcctacagggtggagtgcagtggctcgatctcggctcactgtaatctcaaactcctggggtcaagcaatccctcctcctcagctaagtagcaaggactacaggtgtatgccatcacgcccagctaatttttttatttttagcttttgtacagatggggtctcgctatgttgcccaggctgggtcctaccttctaccctccatttaggtgtgatcacagaaaatgtctctccctgtgaggaaaatttgccctctcctccccagctacaagacagggttgtggcctagctttgctgcaccaaaagaacacatgaatgtattacagagtagaatatggcacttagggattccttgaagggcagaagcaggaccagagcggggtcacacagcacctctgcagtaaatctggcaaggcttggcaggccagtcctcacagtgtttctagggacactggaaccccgagagtcccccagaggccccattcctagcaactggcaaccaaagcccattattcctgcatgaacccctcctgaccacactggcaggggcaacatggtggccaacctgggggagctggccaagcttcgagacctgcccaagctgcgagcgttggtgctgcttgataacccatgcacggacgaaaccagctaccgccaggaggccctggtgcagatgccataccttgaacgcctggacaaggaattctatgaggaggaggaacgggctgaggctgatgtgattcgacagaggctgaaggaagaaaaggagcaggagcctgagccccagcgtgacctggaacccgaacagtcattgatctagcagcagttctagcctctaaagatagtaaggaagcctgcagggaggcagtgggaggaggccaagggctgggcaggtaggggaagaggcaagaggggaagctgctgcagaaggaggtgggagaggaaagcatcagacaagcaggacccttaaagagaggagggttaggagtcagggagaggaaaagggacccaaggggcctgggaccagctgagaaagacttaggaggccagaagagtaagtgaaaagaattggggtggcaggcagaggagttggtggggggtggggcagccatacctgacacagagtgaagtcggctaggaaaggacaggtgtgggtgcatggtaggggctgcaggggaaagttggtggtgtatgcagctggacctaggagagaagcaggagaggaagatccagcacaaaaaatctgaagctaaaaacaggacacagagatgggggaagaaaagagggcagagtgaggcaaaaagagactgaagagatgagggtggccgccaggcactttagataggggagaggctttatttacctctgtttgttttttttttttttttttttttttttttgcgaggtagtcttgcttagtctccaggctggagtgcagtggcacaatctcagctcactgcaacttccacctcctgggttcaagcaattctcctgcctcagcctcccgagtagctgggactacaggcgcatgcaaccgcgcctggctaatttttgtatttttagtagaaacggggtttcaccacgttagccaggatggtctggatctcctgacctcgtgatctgcccgcctccgccttccaaagtgctgggattacaggggtgagccacagcgcctggtccctatttacttctgtcttctacctccaggagatcaaagacgctggccttcagacctgatcagactcccaggggcagccaccacatgtatgacagagaacagaggatgcctgtttttgccccaaagctggaaattcatcacaacctgaggcccaggatctgctctgtgccggtcctctgggcagtgtggggtgcagaatggggtgcctaggcctgagcgttgcctggagcctaggccgggggccgccctcgggcaggcgtgggtgagagccaagaccgcgtgggccgcggggtgctggtaggagtggttggagagacttgcgaaggcggctggggtgttcggatttccaataaagaaacagagtgatgctcctgtgtctgaccgggtttgtgagacattgaggctgtcttgggcttcactggcagtgtgggccttcgtacccgggctacaggggtgcggctctgcctgttactgtcgagtgggtcgggccgtgggtatgagcgcttgtgtgcgctggggccaggtcgtgggtgcccccacccttcccccatcctcctcccttccccactccaccctcgtcggtcccccacccgcgctcgtacgtgcgcctccgccggcagctcctgactcatcgggggctccgggtcacatgcgcccgcgcggccctataggcgcctcctccgcccgccgcccgggagccgcagccgccgccgccactgccactcccgctctctcagcgccgccgtcgccaccgccaccgccaccgccactaccaccgtctgagtctgcagtcccgaggtgaagcccccgccaggcccagagcccctgtggccccctcccttcgccgcggcgcccctgcctcctttacccggtgccgctgcgcacctctccgcatctctggcccggtgcagctgcgcacctgctccgccgcccgcgcccagggcgccttccctccctggccttccccgcccgctgccttcgctttctggccctctgcgcgcctatctctaactgcgcctctccacccttgcctgcctctctcccggtgctcgccctcatctacggttctatttgtttctaagttgggagcctctccgggcggtgcatttttatcctagagcgtcccttttggtttgcatttggggaaatgtcttctctcaccgttcctcacctcccccagacttcccttggactcccctctctcctgctcttccccacggcgcccctctccgttcgcgcttcctcccctctgctgcacgggggagagatggaagaagtggggatctgtcgaggcgcagaggggaggacaggcccagctcgcctccactccccaccggctcttatcctcttcacttcccgctgcaacccccagggactgcagggcctttctcaggaccctcttccccgacacctgtattgcatgcgcctttcgcgggaagaggagggatacacgtttgggagagagtgggaccttggggaaggggcagtgttcaggcagctggggtgttaagttggggaggtatgggggctctggaagagaggcccaggcagcccatcctcttcttggctcccaggagaaatgcaagcctggcagccattccgctctgaggagatctgggggaaccccaccggctggccaagctgcaaagaggcgcgggaaccactgtcgtgcccctcccctcctcactgcagtgttctcccatctcatcatttgatcttaccccgccccccactgcagtgacctccccttcctcactgcattgaccttctcctcttcccaggggggagggggaatcccttctacagccctagactgcagccagcgcctccctacccaccccccacccactgcagtaacctctttcccatccctcccagcctcccgccccgcccattgatctcaggctccacccctctaagcctcttatctttctccttccttcccttccacccgaggagatcccagccatcatgtccatagagaagatctgggcccgggagatcctggactcccgcgggaaccccacagtggaggtggatctctatactgccaaaggtaatgggtgtggcatgggccttcctacagccctagcttttccacggccaggctgggttcggccaggggttcggaggccttttttgatacccaggggtatggggtgctgggccaggctcacaagcctgggttgtggcggttggatcctccttgtccggggagccagggtaggtgggtctgtgttcgagtttagcgtgtgaggcatgtcctgcctccgtgtgtctgcctgtgcacttgcatgtgtgcagacgtgtgctgcaagcaattttctttctgcgggctcccacttgtgcatgtggggcctcagatgggtggatgaggaggccacttcttgtgcatctgcctcagtgtgtgtgtggggtgggggtggggggatgttagggagcagtgtggggagagagctagatgtggtaggcaggcagtttagagccagaaggctgaaggactccctggcccctgtgtcctcttcactccctctcattccatgttcctcctttaggtcttttccgggctgcagtgcccagtggagcctctacgggcatctatgaggccctggagctgagggatggagacaaacagcgttacttaggcaaaggtgaggtcccttctcttttccagactctcccccacctcagccttatgcccctacctcacaccagtccccagtcctcctctagcatggcttcccctcctcccattgatcccttccggcccctcctggcccgacccagtccagcctcttcctttccccaggtgtcctgaaggcagtggaccacatcaactccaccatcgcgccagccctcatcagctcagtgaggcctgctctttgctggggatagcagggccagagttctggaaggaatcccggagcagggcaggaggaagggaagaaagaaggcccactcttaggaatcatggttacaagggggaagggtggggaacagcttccttaatgcaccctgctcccatgggagttcaggtcccctaatccaggtaggcccctgtcacagggacctggttggaccctggccaaatgtgagcttgggtgtgaatgaggggaccctctgccttagggctcagcctccagcctggccctgggtgatggaggctctgccctcagggtctctctgtggtggagcaagagaaactggacaacctgatgctggagttggatgggactgagaacaaatgtgagccggggccgggagaaagtggggaagcgtcagggtggggaggcgtggagcagatagagagctgaagggccagtgctgtagtggcttcctcaggaatgactgtcaggggcattctcctctcaaagccagagcaaggggagatgagtttagctgcagagggaaggaccgacagtaggcagaaggaagaccttctttgcagcatacagaggagggggatggcctgagagagtctgtggtctcagggatatttagaaagaggtgtggctctctgccgtttccaatctcctcctccccacccattcctctccctgctgttttcaagagagcatggatgaggtgttgctggggcaggggtggggagggaggagggggtctcctttactggctccttttggagactacagatggaggcaggagctagaaaggagaaggggacattgtgctcagcaccttcctctataatctcctagccaagtttggggccaatgccatcctgggtgtgtctctggccgtgtgtaaggcaggggcagctgagcgggaactgcccctgtatcgccacattgctcagctggccgggaactcagacctcatcctgcctgtgccggtgagcaataagccagcctgcggctctcccaggggcgggtgggggagggagcatgcaactcatgaggaatgatgggaggaaagtgaattgagggaggtaaagaggaaggatggggacgtgagacttagtccggaaagctgggggaagtttgggatcttgggttaacactcctggggcgggcagggaggggctctttgacccttctgtctttctgtggctccccaggccttcaacgtgatcaatggtggctctcatgctggcaacaagctggccatgcaggagttcatgatcctcccagtgggagctgagagctttcgggatgccatgcgactaggtgcagaggtctaccatacactcaagggagtcatcaaggacaaatacggcaaggatgccaccaatgtgggggatgaaggtggctttgcccccaatatcctggagaacagtgaaggtgaggccaggagccccactcccagctctaagtcttaccctattgtgggacatcagaaagggtgacacagttcaccaagtcctgagtaggcgtggagggtcctaggactctgcaaactccaaaaggtaccagttcttagagtggattgcagagagcctgccaaattcacatgcagacctagggggacagtatttttttttttttttgagacggagtcttgctctgtcacccaggctggagtgcagtggctcgatctcagctcactgcaagctccgcctcccgggttcacgccattctcctgcctcagcctcccgagtagctgggactacaggcgcccgccaccacgcccggctaattttttgtattttttagtagagacagggtttcactgtggtctcgaactcctgaccttgtgatcggcccgcctcggcctcccaaagtgctgggattacaagcgtgagccaccacgcctggccaggggacagtcttttacctgcctagccagatgtgttagcatctgttaagttgccactggaaggccgggcgcggtggctcacacctgtaatcccagcactttgggaggctgaggcgggtggatcacctgaggtcaggagtttgagaccagcctggccaacaaggtgaaaccccgtctctactaaaaatacaaaaattagccgggcatggtggcgtgtgcctgtaatcacagatactagcggggctgaggcaggaggatcgcttgtacccgggaggcggaggttgtggtgagccgagatcatgccactgcactccagcctgggcaacagagcgagactccgtctcaaaaaaaaaaaaaaaaaaaaaagttgtcactggagcccttgggaatactgggagatggtctggatgactgttggattcatcccatccattcgaaatctgtcctgtccccgtcccaacctcctaggcctctagaatccctaatttttctgtgccttgggggaaactgtatagggaatggaaagaatataggtagtggttaagagttaaggttctggggccaaataacctggatttatttgaaccttgacttgtggagttactgctggtgaactttcttacttctctctggaaataataacagaatctagctcatggtagtgtgaggcttaaatgaaatatatataaaatgcttagatgacatgataccaatgaaagtatagtaagtattattaagagaattccattcctctgtgttcctagaagatggcctctcctcccagacctggggataaccccaacagcatccccgccacacttccctcaggaacagccctccacctctgccctgaatgtcttttctttccctcctcctccttgcccatccctcctgcttgtactataatctcactgtattctgtccccagccttggagctggtgaaggaagccatcgacaaggctggctacacggaaaagatcgttattggcatggatgttgctgcctcagagttttatcgtgatggcaaatatgacttggacttcaagtctcccactgatccttcccgatacatcactggggaccagctgggggcactctaccaggactttgtcagggactatcctggtgagaggaagtggtgtgagggggaggtctgggggcaggcagggacgtgtcccagcaactctggaccttatggggtgctgactcaggcaccaggtgggggtgtcctaagaagaacctgagaaccagggagagggtgcaggagccacctgcaaagactgggctttgtatgtagtgtaaaaatgcaggtacccgtgaccaatctgttctgtctcagatcctgattaaagtcatgggttctgaaaactactgggtcatggggaaggctctggaaggaaccagggatgatatgagtgtgactggatctagcagagaactagaacatttcagtatctttgattgatgaaattgtggatgctgaatggagctgggactgatgtgtgagtagaaagaaggctgagggggactgaattagcttctgcaagtctgcccagggcctttatctcaggatggaggcagttggtcgccatcttcctgacacagagcgaaagaaaatcaacataattgcagaattaaggatttggattagcaatgaggaagggcttgctggcagtgagaacaggaaaatgcaaagctaggttgtgaacccttgttactggaagattttttttggggggggggtggggttgttttttttgttttgttttttttttttgagacagagtttgactcttcttgcccaggctggagtgcaatggcgccatctcggctcaccacaacctccacctcccggattcaagcgattcttctgcctcagcctcccgaatagctgggattacaggcatgtgccaccatgcctggctaattttgtatttttagtagagacaggggtttctccatgttggtcaggctggtctccaactcctgacctcaggtaatctatccaccttggtctcccaaagtgctgggattacaggcgtgagccaccacgcctggctggtttgcttttaattaactttttttttttttttttttttttgtagagacagggtttagccatgttgctcatggctggtctcaaactactgggctcaagtgatctgcatgcctcggcctcccaaagtgctgggattacaggcatgagccactgtgcccagcctatggaagtggcgtgagatctctgctcactgcacgattctcttagcctcccaagtagctgggattacaggcgtgcaccaccatgcctggctaatttttgtatttttagtagagatggggttttactatgttagccagggaactcctatcctcaagtgatccgttcacctcagtatcccaaagtgctgggattacaggcatgagccactgtgcctggcctctccatgtaaggttttatgaaataagaatcaggagccaggcgtggtggctcatgcctgtaatcccattactttgggaagccgaggcaggaggactgcttgaatccaggagttcgagactggcctggcaatacagtgagacctcatctctacaaaaattttaaaaattagctgagtgtggtgccacacacctaaagtccctgctactcaggaggctgaggtggcaggatcacttgattggggaggtggaggttgcagtgagctgagattgtgccactgcactccagcctggatgacagaatgaggctctgtcaaaaaaaaaaaaaaagttaagaatcagttagggcaggcttacactggggggatttgtcttagcaaggatgagcaggtgtagttaaccaagggcctgtccatttcagggaataaaggggcatgttcctgcctgatgtagagacccagggaagatgaacacctcccccctccccaccatgctctctctgcagtggtctccattgaggacccatttgaccaggatgattgggctgcctggtccaagttcacagccaatgtagggatccagattgtgggtgatgacctgacagtgaccaacccaaaacgtattgagcgggcagtggaagaaaaggcctgcaactgtctgctgctcaaggtcaaccagatcggctcggtcactgaagccatccaagcgtgagtgacttctggccctctcctgtgtggtcctcgtttctataagactccttttgcaagtgctccagcctaattctacccaggggtgccaaagagagcggggaacctggaatcatcctcacagttctctcacctctgcccctccacccctgattctctgctcccctcccagatagctttcccctagatgtttcctgacatagaccaaggttggggctgggaagagagtgcccagtgtgagagctggagaatcagtgctgtgtgtggatacaggtgcaagctggcccaggagaatggctggggggtcatggtgagtcatcgctcaggagagactgaggacacattcattgctgacctggtggtggggctgtgcacaggccaggtgagtgaggcagcctggtgagtgaagagaactctctgtgggattggtatttctagctcacccacctggtctctccttccaggtgtttgagggtgtcaggggagtttcaggagagcagaagtttcctttcaggggtgagagggcagtcactgagctgcaaatcctttgaaatgtttcagatcaagactggtgccccgtgccgttctgaacgtctggctaaatacaaccagctcatgaggtgagggtccctggggtgggagcccctggcccagatggctaaaggccccatttgcctgccagaccatctgtagcaccaagggcctggataacagtccatttcctggataacagtccaacagataatattggtttttgcttcctgggtttattgatggcctgattgacaaatcccagagatcacatgggaaagccagggaatgctaagccttggggcaggacacaaaagcaggtggtgtgggggtggttggagtctgggggacccctagagagagaagcaggatcctcctgcatccctgaccacttcctttgtggttcatctctctcagaattgaggaagagctgggggatgaagctcgctttgccggacataacttccgtaatcccagtgtgctgtgattcctctgcttgcctggagacgtggaacctctgtctcatcctcctggaaccttgctgtcctgatctgtgatagttcaccccctgagatcccctgagccccagggtgcccagaacttccctgattgacctgctccgctgctccttggcttacctgacctcttgctgtctctgctcgccctcctttctgtgccctactcattggggttccgcactttccacttcttcctttctctttctctcttccctcagaaactagaaatgtgaatgaggattattataaaagggggtccgtggaagaatgatcagcatctgtgatgggagcgtcagggttggtgtgctgaggtgttagagagggaccatgtgtcacttgtgctttgctcttgtcccacgtgtcttccactttgcatatgagccgtgaactgtgcatagtgctgggatggaggggagtgttgggcatgtgatcacgcctggctaataaggctttagtgtatttatttatttatttattttatttgtttttcattcatcccattaatcatttccccataactcaatggcctaaaactggcctgacttgggggaacgatgtgtctgtatttcatgtggctgtagatcccaagatgactggggtgggaggtcttgctagaatgggaagggtcatagaaagggccttgacatcagttcctttgtgtgtactcactgaagcctgcgttggtccagagcggaggctgtgtgcctgggggagttttcctctatacatctctccccaaccctaggttccctgttcttcctccagctgcaccagagcaacctctcactccccatgccacgttccacagttgccaccacctctgtggcattgaaatgagcacctccattaaagtctgaatcagtgcactgttgtgtctaaggagtcttactctagtccctatgaggggagagaagatggagcacctggaagctggtgaaactggatagcagagctgggggggcacaaaaagaggaagacaaactgaacaaatatggccgagatgatggcactgcctaccccattctggctaggtggggtgcatgtggcccctgctttcttagcagaaggcttggctcccagacgcaggtgaattaaggggttcaagagcccctaaaagcataaaatattttgtgtgtgtgtgtgtgtgcacgcgcattttgggggaaagggggtctaaggtgttttcatatccaaagggcttgtggactggagcagctcctgtactgggcctctgccaacaaaaccctggctggttctcgaatggaacaggacttcatggccatcacccactgcaagatggggaaatgggaaggaagaatggttccgggggtagtatacggaaggacctaaggaaacagagtcctcaataaactgaagattcaggaacaaaagtgcttaacagaaccctggctgggtcagactaacagtaggtttccaatatgtggctagagacgtactactccttagctataactcgttaactcttatggggcctcagcgttgagatgctcattctaggtacccccgagggggacaaatcccttcctagtggctcggatgcaaggttgcgtcccacagatagggtttgcacatgggagatctaaccactagagggagtcagagttttgcaggacgccatactggacgccaagtgggaggaacttcaaggctgtcccctgcgggcctcccgctctgcttctgcgaaggtctggtcctggctccctctgccatcctgcccagctccaaggctaaaataggttctagttctgtatgggtagggcccatttcttttcttgccctccttcccgggtccctgacacctcagccattttcagttcaaagagcctcatgccccctttccatttctgtgccttttagtttcagtgtgggcatctcatctttcccttttctcctggcgaccctttatgcctcccttggggtttcctgtactttcctctgtgcctctcagttttctctggggtccctgatacccatcttaccttagtaactcccagactgaccaggactatcctagtttgagcctagttcctagcctctgtcctttctttcatccctcctcaccaggtcgccttctctgacagtctggccccccaacccccaaagtatcggggttggattgggttacagctagctctgcctgggcctcccaggcccttctctccactttccctttgtgccgttgcctggagaccaatgggttgtggggggctgagccagagagggagctggggtgagggatggctggggctgtgtgtgtgcgtgtgcgtgtgtgtgtgtgtgtgtgtgtgtgagagagagagagagagatgtcccctgcagctggactataagcctggccctcaggtaggggaggaatgggagagggtagacaatggtttcttttgtgactctcaccatcccctatccccacatatgcctaaatttttcttttagtatccattgtagcccattccttagtgattaaaaaacaagggagaagagctcagcctggaagggatttggaaagggcttgagccaaggcccagtgggagactgaactgagtggtacagaaagagaggaaatgccatggggagagagggtgagagggaaagggggagccctggaacaaagtcaggggtggggaggagcagcagctaccctagagcaagaggaagggagtcggggtgcacagggagacagggagctggcctggtctcagggaggccctgggaggaaggtgtgcttggagtggtaaagtgagtgccaaccaattcaagggacttcagagtgatgactcattcccaggccaaggaagtgttcctgttcctgcgcccagttccccagtgctctggaatcttgtttagagcttttgagtattcccagaactttgttgaatctggcccaaggaattgtgagacaaaaatctactgagctgctccagagctaacctccttccttccctgaaggcaggtgggatcttgccaattcagggcccacccttagcctccagcaagactggccccacaagtacccgacccccaccccaaatctggagctctactgagggctcctaatccacactccagctccagctcttccggcttgccagcctgcctccctcccattctctggccttcccaatttctgctgccaaaaatcaccctgtgtcctttgtcctgggagatgttgccgcttggtggagggccaggagggagcccaggagaaggaactggtggtgggctggcggaggtgctggcttcacggccgggagcagactgactgccagaggctacctggagagcaggggagggagaggaagggttgggaggagcctgcagtctgtggtggggactgtctccaccttagaacaagtgggattgagcaacaaggatacccagggatttgggtccacattaagcccagtcttcacccgactgcttccctgtgacccaggggatctttagtgatgactttcaacagatttgagaaggaaaatggagatgccactagatggaaggcctgaggatggtgtctcactcctccaagctgtatcccttacctatctacccatgagcttgccagcaacctccccccgctcccacatctgtcatttcctttaactgccctcgtttcccatctccattttttctttttttttttgagacggcgtctcgctctgtctcccaggctggagtgcagtggcgcgatctctgcttgctgaaacctttgcctcccaggttcaaggattctcctgcctcagcctctgagtagctgggattacaggcatgcgccaccacacccggctaatttttgtatttttagtagagacggggtttcgccatgttggccaggctggtcttgaactcctgacaagtgacccacccgactcagcctccgaaagtgctgagattacaggcgtgagcccccgcaccggccccatctccattttcttttcccatccatgatctttcctcttccatactgccgccagccataggccttgttcagcttacatttccttccaatcttcttatccccctcttccccattctgcccgcccaagtaaaccctcctcggctctactgggagcccccacccccaggatccagccagcccggtgtctcccacccttctttcccatccagagccctcctttctcacccagaacctattttccctagaattggcacctgggcccacctcgttcatcccttcttaaggttcctcacgcgttccctcctctctctcctcactgacgtttcctctggacttctctctctccagcattccttcatccccccacccccaattcttatatttatgactcttttgtcaacactaatcacccccaaaagctttactttttccagaagccccatctttctatatatgtcatcttttcaatttttctctctccttatgaccccaaacttccatcccattctctctgataatagcccccaaacccgtctggctccatctctgccacagatccctcaccccaagcttctctcacttctcaccaggcacccacaaagcccccaggcagctccatctttccaatccaatcccattatcccaatctctaccccaggatcccccaaactcctcccacttcacctctgccacagacccgctcgcccccaaacttcagcctcccctcatctgccctcaccacccacagcccctcctacctagccctctcccgcgccgggcccgcgggctccccacattccgccacggctagccctccccgcgccccggccccctcggcctcggcctcggccaactcgcgctgcgcctccccctctccggctccccctctctcccccctcgcggcttgcctcgcgctccctccctcgcgtctccctcctggcccctctctcctccgttcctccgcgctccctccttctccctcttcctcccttctcccatccccctctcccaggctccctcccttcgccgtccgctttcctgtgcgagtcgccggacgcaccgcccagcccgtccgcagccccgcgccgggtcggggcctcgggccgggccatttcggagggaccgcggcttcggggaggggctaggaggggggagagggagccgactgccggggaaggggcgggggccgcgggcgaggcggccgaggggcccgggatcgcgcgggtgcgggctgcgctaggcgggcgcgggcggcggcgggtcggaaccgcgccgagggccgggcgggccgcggggccgggcggcgcggcgggggcgggcggcgcggcccggggcattccgggcggccagggggaggcggcgagcccggggaggtggggagcagagcggggatcggggtttgctccgggggccggcgggcgattggggccaggcggggaaaaggggggatgggggccgccctccgggggggtcggggccgccgccgccgtcgtcgcggcggcgactgaggccgagaagaggagaggggggcgggggagctgccgccgccgccccccagaggcgccggagcccggaatcccgctcggagccagccagccgtcccgagctaccagcaggtaaggtctgcggccgcctgggccccgggcccgcggggttctgtcccgcccgggctccggcctgcggctccccacccccacccctcccagttccccctcctgccgccgccgcctccatttgttattttcccaatcccgtccccccactgcgggctctgcctggcctgagggccgggggctcagggggtggggcccgccgaggagagtcgggggccagggtttcgggaggatcgggaaggtggggaaggagggagggtctccggaggaggcctgtggggccagagggtatccgggacccgcagactcaaaagaggaggaacatcgaggccggggttggcggaggaaaacgggggatgctgtgagtggggttccgggcgaaggcagaatggataggagagatggcagcgaggtggggcatgaagcctccaggaaaaagctccaaaggaccagaacacgggttccggagcctggggttgggggctttaggaatagacgggaagtgggaaacgggaaaggggtgtggtaggtggaaagagggattgtggctgatgaacctgggggagacggaggcttgggcaaagagaggtccatttttgagaagagccggaggttttccagcgtggaagagggaaggccatgtctttgtgacggttttcattcccctactgcaggtcacctctgaccctgttttccctatcccagacatagttatttcttggagagggcactggggcccagtagtgtgggttatcccaaaactagtgaggaggaaaacaggaacacagaagggggagttgggaagaaaggggttctgggaggatggaaatggagaattgagcaaccttacaggcactccaggcaagttgcgacctccaccctccaccctccaatttccggagcgtccgctgcccctggagctgtgatctatatagggaggccttagttactgctttgagctcaaagatctccctttgtgcatgggcttattttgactagggtaggtaccttcaagctcccttacctgaggtgctataggagggtaggagttgctttggcaactggggtagggggtagctgccagatggacacctgggatggtctcttgaggggcaccttttgccactgtgttgctatggtagtgatccagtgggatgtcagattggttgggggggcttcgaatgtttattggacctcagcctgtggctgtccttgggactctgggctgggttttggaggttgtttctggatctgttggtggttgggagtttccccacggtgtgcaccctttcatgttgaagtctgttggaacaggtagatacgttccttgcagatcataggtgtttctccaagtctctccacctgggcatgatgggaggatgaaaacgcttctgttcaggttacaccatcttttggcagttggttctgacctctacctcccttattatgttattttttgtagagttgtctttttgcttctttgcactttctttcattttctaaaacttgaattcctctttgagcctcccttcttgagtaacccttttcctctttccctcaactaacctttggccttcttccctgaccttgtagaaatggctgggctcccaggcccatcccaggtgagggtggcccaggacagagggctgtgaaacagcttcatgcaggggaaatactatagaacaggagccaggagacctgtgtctagacctggctgtgcctctgtgaccttgggcaagtcacttctctttgagcctgggcttcattgttaagatgaaggggctatagatgagatgatctctgaggcctctctgaaggtcccggattctcagaaggcttaggccagtgcatcgttatctgctggtctgggctgcattgttatctaggagtcactttggactggtttgttagtctggcaggtccagaatgatgttgggggctgggccaatgatcctgaaatttagcctgcgagcccctcccagagagcttgtgactccactgtattccttctgacatcccatatttctctcttaatttcttttcctgttcttacttaggggctctttttctagttctcactttcctcccaacccagtctggtcttaatcattttctttttaaagtaaggtaatggcagtgcgcagtggctcacgcctgtaatcccagcactttgggaggctgaggcgggcggatcacgaggtcaggcgattgagaccatcctggctaacacggtgaaaccccgtctctagtaaaaatacaaaaaaattagccgggcgtggtggcgggcgcctgtagtcccagctactcaggaggctgaggcaggagaatggcgtgaacccgggaggtggagcttgcagtgagccgagccgagatcgcggcacggcactccagcctgggtgacagagtgagactccgtctcaataaataaataaataaataaataaataaaataaagcaaggtaatgaaggtgaatgtgcttagtatgtggccagatacagagtaggtgctctgtaatattagttacagtgattgcctgctaggagtgtaggctggtgctaaaacatgacccaggtctagaaagacacacaatccacccctaactcctttcctcgtctgccactccttatccccaggattacttgttcttttatgactgcttttctccttcaaagcttctcattgctagtttttatcagatttcaggtgattaaaaaagaagggcatactatgattgctgtgttcctcaggtacattcctgtgtttctctgaccttttggatcccctaacctaactgacttggtgaacaggttctgtgatggggaagggagatggacacccttctctaggagggctggcaaaaatacaccaatcacaaatagtcatctttgttgtgctttttgtttaagattgttttcctcttttgctatggtgggtgttgttcttcggatttttttttttttttggttgatagtattttaaaaccagtctacataacaactaaaaaatgtgggaaaatagctgtagttgaaaaaaaaaaaaaaaaaaaaaaggccgggcatggtggctcacgcctgtaatcccaacactttaggaggctgaggcaggtggatcatctgaggtcaggagttcgagaccagcctggtcaacatggtgaaactccgtctctactaaaaatacaaaaattagccaggtgtggtggtgtgcgcttgtaatcccagctacttgggaggctgaggcaggagaatcgcttgaacctgggaggcggaggtggcagtgagctgagatcatgccatagcacctccagcctggggaacaagagcaaagatccatctcaaaaaaaaaaaaaaggaaaaaaaaagaaaactagttggccgggcacagtggctcacgcctgtaatcccagcacttgggaaggccgaggcaggcagatcacctgaggtcagtagttcgagaccaccctgactaacatggtgaaaccctgtctctactaaaaatacaaaaaattagccgggtgtggtggtgcatgcctgtaatcccagctattcaggaggctgaggcaggagaatcgcttgaacctgggaggcagaggttgcagtgagtgagatcacgccactgcactccagcctgggcaacaagagtgaaactctgtctcaaaaaaaaaaaaaaaaaaaaaaaaaaagacaagtctactgggcagagcatcagttgaaagttcagaagataggctctgtcccagcaattttgtgattctaagtaaattgtgaagtttcctggaaaggttagactcaccccttactgcctgcatcagtatggttccgtggaggtgagtgagaattactgtgtttcttgggaaaaaatacactacagaatatggacatgccgtttacctagcaggcctccaactcagaatagaatacatgggtaagcttagtctgttcccactggagctagcagcacttaattcaggaagaaagacctactgatgttagtgggtttaaaggtcaatcacaagaagagcgcacacacatcagtggaaaggaagaaaacagtaagaaaataccatttttgctctcaaaagatcttacaatcagtaatttggagggacttgacacttagcaagaaatacaaacaagtgcaaatgaatacagctggctatagggatttggataaagatagatacctgctgatagacagatacggatggattggctgtgagaaactgtgtaacccagtctacaccaagtaggaggataggcttaaaaactggtacatctgtgttgtttgctcacggatattttgagtctttaatcattcatgtgaaaaccctgacttttcctctagccttagggagctcaagtactagagaatgggtcctttatggggctctcaaaaatgaagttctacaatttggggctacctaggtttagtcttgggattggtagggctgtgttcctttgtattatagaatgggacattcttcttctacctactctgatgtgagaaaagattcttttcatatctctgtgactgatctaggccttctgagaattctccccagcaacttctgaggagaatacagcaaagtatagaagaaagagcatgggctttgaagtcaccgacatgggtttgattctggctctgtcactggttcctcactgtgtgaggttgggctagtcacaatcacaatctttgagcctcagttccctcacctatataatgagggtaataatgcttaccattcagggttggttgtaaatattaaatgaaatcatgtatgtgaagggcttgatataaagaaggtattcaataaattcatacttcaatgtcatttcttttttctttttttttttttgagacagagtcttactctgtcacccaggctggagtgcagtggcatgatctcggctcactgcaacctctgcctcccaggttcaagtgatttgcttgcctcagcctcctgagtagctgggattacaggcacgtgccaccacgcctggctgggtttcaccatgttggctaggctggtcttgaactcctgaccttgtggtccatccacctaggcctcccaaagtgctggaattatagacatgagccaccatgccccgctccatttctttatgttcctttgtaaggctccgtggaatgtgtgtgttcacaaatatcctttagggatcatgaagggtaaactgtgtgatctcctggattggggcttgtaggtacatccgaattttctgccctctacagagatgaaagagattatacttcgagcagaatctgcctcccttttagatagctaaggtagcccatggggcatgccagcaatgtcttgtggtatctgtacctcttggcccaaaggcttagggttgggccgcttgctcagttctctgacaagcagaatagtattcctttgtgactctgttctccaagttggagactctgatggtttccttctaacaggtttcattgaaaacagatcctgcaaaagttccaggtgcccacactggaaacttggagatcctgcttcccagaccacagctgtggggaacttggggtggagcagagaagtttctgtattcagctgcccaggcagaggagaatggggtctccacagcctgaagaatgaagacacgacagaataaagactcggtgagttaaaatgagagacatgaaagatgaggggcggggcaggcaagctaggaggaagggtctagagaagaagaacaaataatgtgcaccataaagttaggtgcaatgtaaagaacagtgttacctacctccttcctcctcctgtagatgtcaatgaggagtggacggaagaaagaggcccctgggccccgggaagaactgagatcgaggggccgggcctcccctggaggggtcagcacgtccagcagtgatggcaaagctgagaagtccaggcagacagccaaggtattctgtcctcaggtcctcccacaggatgcccaaggcactggggctgagggtgtgtgtgtgttgtgggggaacttcctgtttggcagagggtaacggtggagctcgggaggtagggaaaagacaggaattttctctttctctctaacagaaggcccgagtagaggaagcctccaccccaaaggtcaacaagcagggtcggagtgaggagatctcagagagtgaaagtgaggagaccaatgcaccaaaaaagaccaaaactgaggtgggaaacccttgtcgccatcctgacccatcttgtgaccattcttttctcagacttgcttatgctcactattcttagctggatctctcctgggacataagagaaaggccagatcatagtgcttatgagagcagttctgtctataatatgccagagagattcttagagctttgacagaccaccagatgaccaggcagggccaaaggggaccagaagagttgggggattctagtctctgggtgagaagtcttagtcggaggaacaaataaatcttaaggaaaatgcagaagtggtctttcttttttattgtttttttttgtttgtttgtttttgagacagtttcgctctgtcacccaggctggagtacagtggcacaatctcagctcattgcaacctccgcctcctgggttcaaacaattgtgcctcagcctcccgagtggctgggattataggcatgagccaccatgcccggctaatttttgtatttttggtagagacagtgtttcaccatgttggccaggctggtttggaactcctggcatcaagtgatccgcccgcttcagcttcccaaagtgctgggattacaggtgtaagcctctgtgcccggccagaagtggtataaaaaccaagggcttgggggatggaggatggttaaagtggtggttatgagatggtggaagacagggagttggagtcagctgtgggtagagacaaggtgcttgagatggatccttgaggaaggaatagggttttacaggcgggaaacaagactggctgctagggagcagccaagaatgtgaggaaagtgagaaatccccagatggtaagaggtgggcttgagcaagagtactcaccacatcacagtacaacagtgtgctgtgaggggaaatgattttatgcaagagagccccaaatctcagggaagcaggaaaggaaaagagaaaaaatgagtcttcccttttctacagcaggaactccctcggccacagtctccctccgatctggatagcttggacgggcggagccttaatgatgatggcagcagcgaccctagggatatcgaccaggacaaccgaagcacgtcccccagtatctacagccctggaagtgtggagaatgactctgactcatcttctggcctgtcccagggcccagcccgcccctaccacccacctccactctttcctccttcccctcaaccgccagacagcacccctcgacagccagaggctagctttgaaccccatccttctgtgacacccactggatatcatgctcccatggagccccccacatctcgaatgttccaggctcctcctggggcccctccccctcacccacagctctatcctgggggcactggtggagttttgtctggacccccaatgggtcccaaggggggaggggctgcctcatcagtggggggccctaatgggggtaagcagcaccccccacccactactcccatttcagtatcaagctctggggctagtggtgctcccccaacaaagccgcctaccactccagtgggtggtgggaacctaccttctgctccaccaccagccaacttcccccatgtgacaccgaacctgcctcccccacctgccctgagacccctcaacaatgcatcagcctctccccctggcctgggggcccaaccactacctggtcatctgccctctccccacgccatgggacagggtatgggtggacttcctcctggcccagagaagggcccaactctggctccttcaccccactctctgcctcctgcttcctcttctgctccagcgccccccatgaggtttccttattcatcctctagtagtagctctgcagcagcctcctcttccagttcttcctcctcttcctctgcctcccccttcccagcttcccaggcattgcccagctacccccactctttccctcccccaacaagcctctctgtctccaatcagccccccaagtatactcagccttctctcccatcccaggctgtgtggagccagggtcccccaccacctcctccctatggccgcctcttagccaacagcaatgcccatccaggccccttccctccctctactggggcccagtccaccgcccacccaccagtctcaacacatcaccatcaccaccagcaacagcaacagcagcagcagcagcagcagcagcagcagcagcagcagcagcagcatcacggaaactctgggccccctcctcctggagcatttccccacccactggagggcggtagctcccaccacgcacacccttacgccatgtctccctccctggggtctctgaggccctacccaccagggccagcacacctgcccccacctcacagccaggtgtcctacagccaagcaggccccaatggccctccagtctcttcctcttccaactcttcctcttccacttctcaagggtcctacccatgttcacacccctccccttcccagggccctcaaggggcgccctaccctttcccaccggtgcctacggtcaccacctcttcggctaccctttccacggtcattgccaccgtggcttcctcgccagcaggctacaaaacggcctccccacctgggcccccaccgtacggaaagagagccccgtccccgggggcctacaagacagccaccccacccggatacaaacccgggtcgcctccctccttccgaacggggaccccaccgggctatcgaggaacctcgccacctgcaggcccagggaccttcaagccgggctcgcccaccgtgggacctgggcccctgccacctgcggggccctcaggcctgccatcgctgccaccaccacctgcggcccctgcctcagggccgcccctgagcgccacgcagatcaaacaggagccggctgaggagtatgagacccccgagagcccggtgcccccagcccgcagcccctcgccccctcccaaggtggtagatgtacccagccatgccagtcagtctgccaggtgagcggccaggtggggcggaggtgggcctggaaaggggacgacgacaaggcggcgacgagagagggagtagcagggaggggccttgcgctggtgtagtgttttagaaaagcacgcccctctcctccgtccaggcctagtggccagtgaggcccgcagcagctcacagcctgcaggggtggttttgaggcgggggctacaagcactcgccggggccgcggcgctgcgggctccatcgggcagctcgcaccgcctgagcgcccgctgcttccacgcccggcaggttcaacaaacacctggatcgcggcttcaactcgtgcgcgcgcagcgacctgtacttcgtgccactggagggctccaagctggccaagaagcgggccgacctggtggagaaggtgcggcgcgaggccgagcagcgcgcgcgcgaagaaaaggagcgcgagcgcgagcgggaacgcgagaaagagcgcgagcgcgagaaggagcgcgagcttgaacgcagcgtggtgagtgcgtcactgcctgcgccaccgccttctttccctctttccttccttccctctgcgctgcgctgcgctacgctacgctgcggggctgtggctgggtgggcgggcgagtcacgtcgccacctgtcggaggggaggtaccactgcagcccaggaaatggagcccaaaaggttttcagcgagagccatctgcattcctgggttgggaaaaggcatgctcagatgggactacctgtggatcccaagaagggcaaatattcgggagcgggggccgcagttaagttccaggtgggcagagtttcaatgagttgaggcattttggcattcggctgtcgaaacaaatgggcagcttaaaaccagccacctcttttcataactgccgctttgactccacttttccctgtatcccacagaagttggctcaggagggccgtgctccggtggaatgcccatctctgggcccagtgccccatcgccctccatttgaaccgggcagtgcggtggctacagtgcccccctacctgggtcctgacactccagccttgcgcactctcagtgaatatgcccggcctcatgtcatgtctcctggcaatcgcaaccatccattctacgtgcccctgggggcagtggacccggggctcctgggttacaatgtcccggccctgtacagcagtgatccagctgcccgggagagggaacgggaagcccgtgaacgagacctccgtgaccgcctcaagcctggctttgaggtgaagcctagtgagctggaacccctacatggggtccctgggccgggcttggatccctttccccgacatgggggcctggctctgcagcctggcccacctggcctgcaccctttcccctttcatccgagcctggggcccctggagcgagaacgtctagcgctggcagctgggccagccctgcggcctgacatgtcctatgctgagcggctggcagctgagaggcagcacgcagaaagggtggcggccctgggcaatgacccactggcccggctgcagatgctcaatgtgactccccatcaccaccagcactcccacatccactcgcacctgcacctgcaccagcaagatgctatccatgcaggtgagacccctccttccttgccctggccctttggggccaccttccccctatcatgactgggctctttcattcctatggccaagactttcctcccctggcctggcatgaacctttcctgagattgctgccctgaactttgcctccctgacgttctctcagccttgtcttctcatggccttccctggccacaaagcctgtatgccccacagcccagttctctccatagtctagtatccttcccatgacagaggcccacacgggagcttttgaaggacacttttctattctcacagccccattctcccaagcccttcacaaacctgtcttcttatttatttttttgagacatggtctggctctgccacccaggctggagtgtagtggcgcaatcacagctcactgcagcctcgacttcccggtctcaagtgatcctcctacctcagcctctggagtagctgggattacaggcgtgtgtcaccatacctggctactttttgtatttttggtagagacggggtttcgccatgttggccatggctggtctcaaattcctgagctcaaagcgatccacccacctcggcctcccaaagtcctgagattacaggcgtgagccaccgtgcccaacccacaaacctatcttctgatttctctggattcaactcattttttgccattttctcctcttctccctctgcgaggtctttcatgtttttccccatctctagatctgtaactttctagaaagggccctgtagctttgggtttgggtgtcataggcgataatgagctttacttactatcctttcaccattttttggtttttgagacggagtctcgccctgtcaccaagctggagtgcagtggcgcgatctcggcttactgcaacctccgcctctggggttcaagtgattcttctgcctcagcaggcactgcctgcccgagtagctgggactgcaggcgtgtgccaccaagtacagctaatttttgtatttttagtagacacggggtttcaccatgttggccaggatagtcttgatctcttgaccttgtgatccacccgccttggcctcccaaagtgctggaattacaagcgtgagccaccgcacccggcttcctttttttcttttgcccagactggagtgcagtggcgcgatctcggctcactgcagcttccacctcccaggttcaagcgattctcctgcctcagcctcccgaggagctgggactataggcgtgtgccaccctgcctggctaatttttttgtattttttgtagaaacagggtttcaccatcttggccaggctggtcttgaactcctcacctcaggtgagctgcctgcctcagcctcccaaagtgctgagattataggcttgagccactgtgcccggcctcttcttgtcttattttctaaacttctatcatcttccaccttcttcacgcagtctacctctctctgtccttcccctcagacccttctgatgactgtaatctcctgtcctgtgtcatccatatgtccctcctccagtagggctcagcctgtccacccctgccaggcctctagttcttccactctgcctttgttccactttggacctccttgtgtttgtctgactcagttcccaggcttggatcccttcacccaaatgcatggtttgccccaaacctgccttctggtgacaccttcctcttctctgccctccagcctctgcctcggtgcaccctctcattgaccccctggcctcagggtctcaccttacccggatcccctacccagctggaactctccctaaccccctgcttcctcaccctctgcacgagaacgaagttcttcgtcaccagctctttggtaaggatggaagttggggtaggcagctccaatgagaaaagggcagaaaggaggtatttgggtggggggatgggcctagttgggcttggggagggatgaggaggtgcctagaggagctgggcatgggaataggagagctggagctctgcccaagagaagcacgagttttagtgtcagcctaagaggttcgaatcccaattccaccctaccactggcaacttacagaactgggtgtgttacctcactttttagttcattacctttgtatgtaaaggagctggctatcccctggtccagagcaggtacttgttatccgttggtcatatgccccttgcccttcctgctcacagctgccccttaccgggacctgccggcctccctttctgccccgatgtcagcagctcatcagctgcaggccatgcacgcacagtcagctgagctgcagcgcttggcgctggaacagcagcagtggctgcatgcccatcacccgctgcacagtgtgccgctgcctgcccaggaggactactacaggtaccctagggtgccccagcccaggggacatgggctcagcgagcctgggaggagctgtgggcatggtacggctgggcaccgtgctcctgggggagggaacccctcctctcccaaccccttcggtaagagggggcaaggtcagagttggtctcaagtctcttacctctctgctatgcactgccccttccctagtcacctgaagaaggaaagcgacaagccactgtagaacctgcgatcaagagagcaccatggctcctacattggaccttggagcacccccaccctccccccaccgtgcccttggcctgccacccagagccaagagggtgctgctcagttgcagggcctccgcagctggacagagagtgggggagggagggacagacagaaggccaaggcccgatgtggtgtgcagaggtggggaggtggcgaggatggggacagaaagcgcacagaatcttggaccaggtctctcttccttgtcccccctgcttttctcctcccccatgcccaacccctgtggccgccgcccctcccctgccccgttggtgtgattatttcatctgttagatgtggctgttttgcgtagcatcgtgtgccacccctgcccctccccgatccctgtgtgcgcgccccctctgcaatgtatgccccttgccccttccccacactaataatttatatatataaatatctatatgacgctcttaaaaaaacatcccaaccaaaaccaaccaaacaaaaacatcctcacaactccccaggaacatggctgtgactattctttgcgggatatgggggtgaggctgggtctcagtgcagcggtgcttagagagaactgcagccagggcctggcagggaagcgggaagagaccagaccttcttaaggaacggggtgtgggggctgggaagaattggagaggggatccctgaagagcccagagccttgactcagctggaggcggtaccatgggtgctggtgccccctcctgccccaaggctgggcaggaccgctgcgcgccagtggaggcctcggtctgggctctgtggcttatgcctgtgagacgcgggtggattgcttgagcccaggagttggaaaccagcttgggcaacatagagaaaccccatcttaagacaaaatcagctgggggttgtggtgcacttgtggtcccagctactcaggaggctgaggtgggaggatcacttgggggtcgaggctacagtgagtcatgatcgcaccactgcactctagcctgggtgacagagcaaggccctatctcaaaacaaacaaacaaaagacaccccaaccaaccaaacactagaggcctgggacaggcccacctctgacgtggtcagttctaggaatctattcagacgggtctcactgctaggagccaccagagtcctccggaacaagggcttcagagtcctgaaacctttccgtggaatactttaagaaacggttatgaggccaggcgcgacggctcacgctggtaatcccaggactttgggaggccgaggcgggcggatcacgaggtcaggagttccagaccagcttggccaacatggcaaaaccctgtctctactaaaaacaaaacattagctgggcatggtggcgcgcgcctgtcgtcccagcgacttgggaggttgaggcaggagaatcgcttgaacccgggaggtggaggttatggtgagccaagatcccccccagctgcactccagcttggcgacagagcaagactccgtctcaaaaacaaaaaacaaagccggttatgaagcgggggtggggtgggctagttttaataggtccaggcgattagtacctggcatccttaaccacctacagtttgagaagggagtgggtgataaaagcctggaagggaagggaaatcgggccgggcattaggctccatcgctcatcaatagacaaggcctttaggaaactgcgacaacggcttttgctctgggcctttactgccgaatccaggtctccgggcttaacaacaacgaaggggctgtgactggctgctttctcaaccaatcagcaccgaactcatttgcatgggctgagaacaaatgttcgcgaactctagaaatgaatgacttaagtaagttccttagaatattatttttcctactgaaagttaccacatgcgtcgttgtttatacagtaataggaacaagaaaaaagtcacctaagctcaccctcatcaattgtggagttcctttatatcccatcttctctccaaacacatacgcagcagtgttacagctcttttagaatttgtctagtaggctttctggctttttaccggaaagcccctcttatgatgtttgttgccaatgatagattgttttcactgtgcaaaaattatgggtagttttggtggtcttgatgcagttgtaagcttggggtatgaaggtttgggccacgcctgggcgcttccggctgcgccggatgctgtttcctttccgctcccaggggcgttgggaacggttgtaggacgtggctctttattcgtgagttttccatttacctccgctgaacctagagcttcagacgccctatggcgtccgcctcgacccaaccggcggccttgagcgctgagcaagcaaagggtgagaatcgtcctagtcaaggcataggctgctggcctggggtagtcaaggcatgggctgctggtctggggaggatgcgggcggaggatgtggggcgacaaacctggctacgtccgccgggaaaatggggtaggggacgccgggtaccgtccttctaagtggggcgcttgcccccaagacttgggatcttattgggttacctacagcctcaatccactaattccttgcgctctccgctgggcccgctgtctgttctccgacgcctacccgggacgcctccctgggatgcttctggcgcgcagtggtcctcgcggaggtgatccaggcgttctccgccccggagaatgcagtgcgcatggacgaggctcgggataacgcctgcaacgacatgggtaagatgctgcaattcgtgctgcccgtggccacgcagatccagcaggaggttatcaaagcctatggcttcagctgcgacggggaaggtgggtcagacgcgggaaggcgggtcagacgcgggaaggcgggagttgggtcgggagagggcgccggatctgtgggcccatgagcggttgtcccctttctcgccacacggcggcagccacaatctgactaacattcttggcactcagagcccagggtctaccctgagcttgtgcgtccgagttgcgttttgtacagtagaggttctgtatcccttacccgaaatggttgggaccggaagtgtttcgggttttttcagatttcggaatatttacatatacatggatatcttgggggatgggacctaaatctgaacacgaaattgttttgtttcatatacacgcaccttatgcacatagcctgagggtaattttatataatagtctgaataattttgtgcatgagacaaagttttgactgcgttttgactacagtctcccccaccccccactatgaagtcaggtgtggaattttccattttcggcctcacactggcactcataatttcagattttggattttctaattaaggatggtcaacctgtactgttaatcacattattattccattttgtgatgaggaagcaaactctaatggtgcagactctcgagtagcagagctggacttaaatgctgttgtgccaccttttagtgacatgtctgcatgacagcagtggctgcagtctctccagggtgtttcagctaatttttgtttggggggggttggtggttaaatttttggtgagatcctggtgttccccaaaggtgttgactgattcagctctgctgcctcatagccttcctgagttccagctacagacctggggtctcgtgttcattcttggggttccagtgactaaactgctaaaatggttcacctgagagcaagaagcacactgccttgggacattttcattcactgcatcccatctagttgtgcccagtgtagaccaaatgtcatcatccaaaccacacgggacagaggcctgcatgcgtcctgtttggcaaacagctgcccagccagtgggggagcagttcatgcttagactaccaccccctccaggtgtcttaggcacgctggtccttaggagaagggttgaccttccactccctcttgcaggtgtccttaagtttgctcgcttggtcaagtcctacgaagcccaggatcctgagatcgccagcctgtcaggcaagctgaaggcgctgtttctgccgcccatgaccctgccaccccatgggcctgctgctggtggcagcgtggccgcctcctgagagttggccctcccttgtgccactgccaggggaggaaaggccttgatgttccagacaataataaatgcgcctgtgacttagccttggtgtcagtctcttgcggacctgacaacccccatctctccttccctgattccctctgcctttccaggccccatccccctgaacagctcctccctatggtcctggctgggcctaaccctgccccagggcctaaccctacctgaggctcctccccttcccccggggcaggttgagaggctggagtgggtccctcagcgccctgggtgggtgggcctgcacagggggtacctccttctctgaggaactgggctgttagggattttccttaggccctttggtttccgcctacggagaggtttcccccattggttgctcttcctcagccagggttacttcctggtctgttcccctacccaataccccgccgctctgtcagcttgagctccaggtggagctccaggtggctcctcctctcccgggggaaggcggccctggaccagcaggcgggcctgctgtactcccgctttggggctgcagggaagctggccgctgtgggcggtctcgggccagccccgccccacctgtccttttcctggagactattagtccagggtttgtccctgcagtgccattggcctggcaggcaggatcgaggaggaagtggctgattactgagcggttcttcctcacctggcttgggccactgtgcacagctgtgccgctggctcagccccgccccctgcggccctctgccgtggcttccccctccctacagagagatgctgtcccgtgggtaagtcccgggcaccatcggggtcccagtctcctgttagttttggagggagggagggctttgttgatgctcactccgacgtgtgtgaacgtgagtgcgatctgccgctgccctgcgcctgtttccggtccctatgaacttccccttcccgcaaggtgtgaggacccccggctcactcatgctcctctgccccctctttaacattttcccctggacaagtgtgtatctgttctctccattgcatttctacttccagcctctgggctcctgcttctgcctcctgcttaggacctgtccccctgggtagctcacaacacctcaaacatagcagtcagaggccacccgcgaaggccctcccacgtccagccaacttctccgcacttcccaacatcagactttggtcccatcttctttgtttcctttcacttccctttcccctgcatcattcattcaacaggtacgtgttgagcatctattatgcaccaggtgctgtttaagatgctggtaatactggagtgaacaagacagacatggtctctgctctcacggagcttacattccagtgggaggttacagaccgaacaaataacccaataaattggatcattgcagattctcagaagtattacgcagaaaatagacagccttggccgggtgtagtggttcacacctgtgatcccagcactgtgggaggctgaggcgagaggattgcttgagcccaggagtttgagaccagcctggccaatatagtgagaccctgtctctacaaaaaataagaaattagctgggtgtggtggcacacgtcctgtggttccagctatggagaggctaaggtgagaggcttgcttgagcctgggaggtcaaggctgcagtcagcgatgattgcaccactgcacaccagcctgggcgacagagtgagaccttgtctcaaaaaaaaaaaaaaaaaaagaaaatgaaccagcttcatatgctagcaagtgactgggtgtgcaggtgacattactagctggagggatcagggaggccttcccgaggaggtgacatttgagctgagacccggatgaggaggaagaggagctggccatgtgacgtagtgatcaagagtcaagcatctctgggcagaggagatggtgagcacaaagccctaatgtgggaacaaacaaaaaaaggacagtgtgcccgtggcagaggaccctagtggagcggaggcagggccacagcaggttagaccatgttggagctaggatgttgaaagtgaaaacctgacgagatgaggtggcgcacgtctgtgatcccagcactttgggaggccgaagggggaagattgcttgagctcaggagtttaaaaccagcctgggcaacatagagagaccccatctctattaaaaaaaaatactgggtatgatggcccaagcatgtggtagtcctagcagtttgggaggctgaggtgggaggatcacttgagcccaagagttcaagaccaccctgggcaacatagggagagacctcatctctactacgactacgactactactactactaataaatagctggatgtagtggcatgcacctgtggtctcagttacttggaaggctgaggcaggaggatcacctgagccaaggaggtcgacgctgcagtgagttggattgtgacactgcacttcagcctgggtgataaagcaagattctgtgtcaaaaaaaaaaaaaaaagagagggaaggaaagaaggaagggaaggaagaaagaaaaagagaaagaaggaaaaaaaggaaagagcgagaaagaagaaagaaaaggaaggaaggaaagaaagaaaagaaaggaaagaaaaagaaaaagtgacacccagtcgaaagaagaaaggaaagaaaaagaaaaagtgacaaccggtcgaaagaaaaaagaaaaagtgacaaccggctgggcatggtggctcaagcctgtaatcccagcactttgggaggccgaggcaggtggatcacgaggtcaggagttcaagaccagcctggccaacatggtgaaaccctgtctcaactaaagatacaaaaaaaaaattaggctggcacagtggtgcgcacctgtgagtcccagctactagggaggctgaggcaggagaattgcttgaacccaggaggcggaggttgcagtgagccgagattgcgtcactgcactccagcctgagtgcagcgggagagactccatctcaaaaaaaaaaaaaaaagaaaagaaaaagtgacaacctgcttacagagtactggcgagtttgtgggtgggtggctccctagccctgctgattcttgcttctcacactcatgtctgcccctgccccagtgcacatcttgtcactgtcggccccaccgatggggttcctactgagtcttctggtccctgatcccgtctgtggtcattttcctgccaggtagcttggccaggcctcccctggtgcagatttcatccttggtttctcagcctggccttgaatgaccctctacagcagggtccccacctctcagaacaactttgctccagccacatggcttgctcacggccaggcactgcccatgtggactctgtgcgtgccacctctttgccctgacccatgttgcctctgggggagcacttcttcctccaccttccatcatgggctgtggcagtgcccatcccatctgcccccgacgctgtctgctgcagtatggttgttgggggaaagggcaccaggctccggcgtctgacagccgtgttttacccaccttcctactcactagcttgtgaccttgggcaattacttaacatctctgagtcttagtttctgtttctaaaattgggtgaataacacctactaagtagggttggcctgaggattaatagtataatgtaaaagctggcagcactgaaaccctgccacttaccagcttttcacatcagtatttgggaaatattgttaagctcatttgtcaggcggggattctgaggctcagagcagttccagaactttctacagattattttgccttgtttgcgcttccagactgcctatcttcttgtatcaccattgatcttgatctgtatggtttttaatttttttttttttgagacggagtttcactctgttgcccaggctggagtgcggtggcatgatctcggctcactgcaacctccacctcctgagaagctgggattacaggcatgtgccaccacacccggctaatctttgtatttttagtagagttggggtttcactatgttggccaggctggtctcgatctcctgacctcgtgatccgccagccttggcctcccaaagtgctgggattacaggcgtgagccactgcgcccggccaacttcacgtttatacacacccatgcaaacagcatccagatagagacaaagagccttccctgtaccctaaaagtttcccagaaattgttcccagttagcatatttatttttataaaggtaatgcatgcccatcatataacattcaaaaaggtatgtagagaaccaagtgtctcccccagccctgtcctccagccacccagtttccctccctaggggaagccaccaatatgtgtttcttatgtatcccctgttgagctgcttttcctcgttttggtttggcggtgttgatgtttgtatttggaattacaggtaggcagcatcatataccttagtgtttagggcctctaagatcaaccagccctgagaaaatcagccatggtgaggaccttgtcccccagccccccaggagataggccccctggtgggagtgctggggcagggcagaggcctagggacaagaattagaaaggacccatgttgacagggctgctcagggtcatgttgtccatccctctgccacagtggcatggacaaactgcatatgttggttagaggagggcacccttctctcttgcaagcattggcaaggtcttaactattagtctcctgctcccatggcagcccctttggacaaggaggctcttaatctctgttctttgaagccctgagggctggtgtataggagttcaaagcactggctttggaaccggactgtctgggtttgaatcctggcactgcagctgactcactgatggactcaggcaatgccttaaactccctgagcctcaggttccttgtctgtaaaatgataaagatagcccctgtttcatagggctgtggtgagaaaccaatcagacaaggcatgtgaacgccattatagcacagcgcccggcatccagcaggactcactcgatgacagttgtcaccgccatcattgttattagcgtgggccagggagggctgcgtaaaagcagctggtggaggagggagagatgccgtgggaccgtctgggttcgcatgcgtgaagtattatctgggcctggagtgtgcaaggcacacatgtgtccttactgcatgtgttgtcacatatgtgcaatgccatgctcctgagcctttgattgcagacgtgtgggaagtgggccccgtccccacccccagtgccaccctgctctgcttctcttcccttgctgtgctctaaaacgagaagtacaagtgagttcccccaaggggtcggccgcgcctcttcctgtccccgccctgccggctgccccaggccagtggagtggcagccccagaactgggaccaccgggggtggtgaggcggcccggcactgggagctgcatctgaggcttagtccctgagctctctgcctgcccagactagctgcacctcctcattccctgcgcccccttcctctccggaagcccccaggatggtgaggtaagggcctgccacccacggtagacaggaggcaagggtgcctggtgcccacgggacccctcctcactgccctgcctgggccgcccaggtggtttcaccgagacctcagtgggctggatgcagagaccctgctcaagggccgaggtgtccacggtagcttcctggctcggcccagtcgcaagaaccagggtgacttctcgctctccgtcaggtaggtgggccccccgcaaccccgggcattttggccactctcttgtgccatccaggccctgaaccactcattcctggttccccgtggcagtgctgactccccgtctgttcccttgcccccaacccccacactccccatccctgtctgtgcccacccatgcccatgtgtgcccccacccaggacctcagccgatccctgccctcctgcctctactcctgcaccgactggcctcaccgcctggtgccctgcagggtgggggatcaggtgacccatattcggatccagaactcaggggatttctatgacctgtatggaggggagaagtttgcgactctgacagagctggtggagtactacactcagcagcagggtgtcctgcaggaccgcgacggcaccatcatccacctcaagtacccgctgaactgctccgatcccactagtgagaggtgagggctccgcacccccgccattcccaagcagggatgagccggctcccaccctgaacagccagggaggcagggagactggcagccggcgctgcctaccctccatcccctcccctccctgcaccagctggggctctcaatgtccctcctccctgctgtcctgggacctggtgtctcagagcctaacctaccaccctttccacctaaccccgaggaagccacagaaagctgcctcgccctactccgggagccctggccgctgcaacccaggtcccactggagacagggaggccactgctggtggccagcatgtcgtgcaggccagctctgttgttagaaagctcttcttcctctggaatcgagcctgccttcctccgtctgcccctcaccccagcacatgttaggacagtgaggagctgacactggggtgaagatggggatgaatgcttgccaagacacttgatgccttgtcccagccgccccgtggggatgggtctgtcctgtggggtcaaataggtctccggcccaaacagagatcattgagagcacgatgtgaagtgttcacctgtgtaaagtgtctcacgctgtcccgggcacagagtaatactccaggcatttccttcctgtggcctccccgactcctcctgtggtctcccaaaggcatgggctgggggctgggggctctgaatgctcctcatgacaccatggctcctttcagcagccgcatctcaatgccagatccccttagagtaaagggcagcggaataacgctagggggttttcacatgcacccctgggccaagccgacttgcccttgccgtggatccctgcattcatggatcggttattgaaatgatcgggaaccttgctcctgccagcttgcagcctctctgagattcgggcctccaaactgcatcaatatttttggtcaaggcactgattgaaacttagagctggattcggtcacggtgcagccctgtggcccacctgggaggcctcctttcctggatcggcctccttcaaggccttccctctctctgtgagcctcacatggctggctccgtgtctgccccctgcccttcctcttccccaccgcaacactcagggggcttttggcaccgagaccctctaaagctcatgtcctctctttctccttgcctccagccaggagaggaggacgggctgaccagtgcctggaggtggaagagaggagcagggccccaggaggcccctgcagaggaggctgaggcctgggttcaaggagaagagagaagagagagaaggaagggagggcagtgccggggcgggaggttaagaccagggaagccgcactggaggcccttttgggtgacccgtcccaggagccagtgtcacccctgagcctgggagtgtgtgagaggctctttctcccaggttctgctgtgtcctctgccttgtctgtgcgcctcctcctctgcgagaatttgcatctgtccctcggtggctctgcgcttcctgtggtcagcctgacatttgcatggagacttcctcatcctggggcctgagggaaggggctcagccccctccccgctacctggggtcctagcctgtccccaggcggtgggctgaagtagcccagtggggttaggaggctctgggggtctctcggctggagtcacctccgggcaggggtgagatgggttgggacagactggtcctcccctccttccccccatccctgcggttggaaaatttgcccgccctcccctcgtccctgggctgaggaaacctcacaacctcacttctcactctctccccagaaggagttttgtgttttttccatcacgtggtttcctgtggggctgggctttgtggggctacagtttcctcctgggaaaggggtgtgcttcggggaaagggcttagttctgctttctgccctgacagccccttcaaatccgtttgaaccctgggctccccttcagtgacatcatccagggcaccccagaaccccctacaccactctttccccagtggggttgtcttccccgcctccctggcggagcgcaccccatccgccttccttgtgacttgagtctgtgtgtccatctcccaccactccctgtggtgtggcctcggtctgcgtttctctttgcctctggtctctgctggggcacagtcccatccttcacggagattcatccttagcttctctcctccaaatattttgaatattgccagcctttctgcctttcagaggtgggctctgggttcgaagcccggttagaactctggaggctaggatggcttgaacctgggaggtcgaggctgcagagagctgtaaccgcgccactgcactccagcctgggcaacagagctctggaagcttgccctagagtcagtcaagggccctaggccagtgagtaacagctcagcgtcagtttcctcatctataaaatgggggtaatatcatacctagctctcagcatgtttgtgagagacctaaatgaggtggtggatttggaagcatgtagcgcagtgcctggcacacagtaggtgcttgatttccggcccctctctgtgaatgtctctgctcagcgccttcccctgtggcctgggtcttaccttccctgacgctgccttctctaggtggtaccatggccacatgtctggcgggcaggcagagacgctgctgcaggccaagggcgagccctggacgtttcttgtgcgtgagagcctcagccagcctggagacttcgtgctttctgtgctcagtgaccagcccaaggctggcccaggctccccgctcagggtcacccacatcaaggtcatgtgcgaggtaaggcagccaggcggcgggggagcctctgctgaggctcctgtctgtgaccacagtgtgggtggcagggagggtctgcctgggcttgaattcaaggctggggacccagggagggagactcaagtcctgtgaatggcctaatttggctccccccagggtggacgctacacagtgggtggtttggagaccttcgacagcctcacggacctggtggagcatttcaagaagacggggattgaggaggcctcaggcgcctttgtctacctgcggcaggtcaggggtgggcccagctgcctccccacttcccctgagctgtcccccagatgtgagcttctgggatctctgagttgctgacttctcgctcttccccaccccagccgtactatgccacgagggtgaatgcggctgacattgagaaccgagtgttggaactgaacaagaagcaggagtccgaggatacagccaaggctggcttctgggaggagtttgaggtgcatggtggggaccggcagggctggggcagctgaggtggtggcagcggcctggggccccaggcggacaccttcccctccttgcccacctctgctcctgacccaccccacgtgagctcccccgatggatgccctctttgggagctgatgctcatttccccacccacatctcagagtttgcagaagcaggaggtgaagaacttgcaccagcgtctggaagggcagcggccagagaacaagggcaagaaccgctacaagaacattctcccctgtgagcacccaggctgccccattcacccaggataccgcccctgccccagctgcctcccctcatctcacaggtctccaccctccacgccaggaggggccatctccccacaccccccacagagcctcccccttctccaaaaggcctctactcctcccagaagtgcctccccaccaccagcaggcaggttgccccctgctcccaacctccttgtgaactccctcactccctccatacagatgatcccccacccctgctgcccacagtcccccgcaagcctcatggcttctgagaccagaatggcctgttagctcaggagggtctgacccaggtgtggtgagtccctggctaacccagaccatctcgcctcctctccgcccactcccagttgaccacagccgagtgatcctgcagggacgggacagtaacatccccgggtccgactacatcaatgccaactacatcaaggtcagcagtgtgggccacgtgggaggagaggctgggccctgggaattccctgtctggtggggggaccctagatccagagacagctgggcaaagccgaagctggcttcttgcatgggtgagggtggcagtggttcagggcctgtgctgggccaaggggctcactgtcttggggtgcgtctctccacgcttgcgtccagaaccagctgctaggccctgatgagaacgctaagacctacatcgccagccagggttgtctggaggccacggtcaatgacttctggcagatggcgtggcaggagaacagccgtgtcatcgtcatgaccacccgagaggtggagaaaggccgggtagggcgcccccccttccccgcatccgcccccgtgcttgtggtcatgccattaagtcgaagagcagtcagatgccagggcagaaagggatctcaggggtgagggtccggcccttgttgggaaactgagggctagtgacaaagtctcgactacacaacgtgacccccagatccctgcatgcatccctgggctcttctgagctccagacccaggttccaggctgtcctccttcctcctacccctgccccacctgtctgcatccaggcccctcctgtcctccctgccccatagatctctctggagtctgccccttaccctgcaggctccccctacacagcaccctctgtgctgccattgaagtgatcccatccgtgacacaaactgggtcaagttccttcctttctgaaatctcttccatggctcctggtcacctttgggataaagtcgcactctaaggcctggcattcaaggtctggtggcttccctctgacccgcacgcttctcttgaaggctcaccgcccccagcagccccagctctttcaggttcccagcctttctttgcacaagctcattttctgctaggaaatgactctctccacactatctctgcctggcagatgcctcgtttttgaagacacagccggagcgctgcctcctctgtgaatccaggtcttgtttcctccaggacctagagggagaattacgtctttcccagccacgctcctcagcgcggtgtctcccccggtcacctgtctctgtgagctcctcgaggcacaggggcacagactgggtgttatttgtgtctgtgaagctgtgtggtttgcacagcttcggggacaatgcctgccctggcaacgtttgttgaatgacaaacggatgtaccggtgaagtggctggccaggcctcaccacctgttggtggttgatctgagacgagagcccaggtctcctgcctctctgccagcccatccgtccatccaacaaatgtttgggccggtgccaggcactcagaacatagagcaggacctgggatgggccacagtgccctgctctgtgcctcatccccacccgaccctccctttccagaacaaatgcgtcccatactggcccgaggtgggcatgcagcgtgcttatgggccctactctgtgaccaactgcggggagcatgacacaaccgaatacaaactccgtaccttacaggtctccccgctggacaatgtgagtggcccccacgccctgccccattccgggagtccctccctggacttgttctcctctctggtcgggtagggtgagatggatgaggtgttccgagagaggagggggcactgaccctatgtcctcggcttagggagacctgattcgggagatctggcattaccagtacctgagctggcccgaccatggggtccccagtgagcctgggggtgtcctcagcttcctggaccagatcaaccagcggcaggaaagtctgcctcacgcagggcccatcatcgtgcactgcaggtgaggatgataatcctgatggtagtagtgacagctgagaagtaaatactgctaagtgccatgagctgttataagcaatataaacgttagctcgcacattgagtgccctccgctcacccccggcttctcctgggtcccctcatggctccagaaccctgggtggatcgtggctggaaccagccccactttggccctctgcctgtgggtatcttcctcagagccctctccggatgtaccatctcgcccaaccctgccaaatacagaggaggagcccgggacccagttgctggccaggcccaagctagtcagggcaaggccgggcaggcacccacagtaggcctgtgtcccggctgctccgctttctctcgaggtcccattctgttggtttcttctcccaggaacatctatgaggcatgtgctccccattcctcctctttttccatcggtagccgcagggcttcggcttcttcctgactctgccctctctcccagcttccccaggcagtgccccatcctggcccccagggctgtgtggggatgggtgatgcttctttggggctgcacataactcctctgtctatctacccgcatgtttgtgatcaggagacctctggtaaggtgcagaggtgggggctgcaaggaggagcaggggttccacaggtgagcccactgagctggcctggcctgggtggatgagaggcagtgggtgcagggcccctccgcttaccagctgtgtggtcttggacaaattacttaacttttctaaccctcagcttcctcatctgtaaaatcaggatctcagggttgtcgtgagaactcaatgagaccctatcgttgtggctggaattccgtcagccctcaaaaactgggcgctgttactagtttagtaactcacatcaggcagagaataggggaatgggaacctgccttgccccggtcccttcccactccctccgtggaccccaggcctgcgacggcctctggcttcctcctcttcccccagcagctgtttgtcctgggacagggcaagtcggctgaatctagaggtgcccccgatgggctgtccggggacgcggctctgtcctgtgctctctcagggacaggcccatccccgagagctaccctcctgctcacccgccacacacacattcacacacttcttgaaagccccatggcctttatttagacgttacaggaaggaagtgggtgtggggggttatttttgacaatctgggtttgaaattagacagcgcgactcagggcatcagcttgctgggctcagctgagggtgggcctggggtctccctgaggtctgtttgcccagggctgggaaaggagagaaacttcctactgcactgctcccctgagtcccctgaccctgtgcccccgcaccctgctgtctcagggctatcctttccctgacgtcagggtttgaaggaaaagggaagtgaagccatgctgagagacgctccataactccttcagggagaggcggggagggctcagggtacctgggagccggcaggacagtggtgggatttgggggtcccaggtcttccggggtgggggcagccactcactaggagtgaggagtcggcgcgaggagtggaggagggaaggatggtggcagctggggagccagcgtcagcaccgcagagcccgaggtggagcgtgtccatgcagagctgggcaaacctccatcatcacttgcccggtgaccctgggcacattccctcccatcactggaggctcaggctgctcctgtggtgcctggggctggagctgagcgctgggtaccccccttcccggggagggcttgactggcctctgatggcacccccgtctttccccagcgccggcatcggccgcacaggcaccatcattgtcatcgacatgctcatggagaacatctccaccaagggtgaggggcacctgggggtttgggggtggggggtgagcagcccctcggtgtccgcctatgcctggacctgaggtttgactgccccccacccaggcctggactgtgacattgacatccagaagaccatccagatggtgcgggcgcagcgctcgggcatggtgcagacggaggcgcagtacaagttcatctacgtggccatcgcccagttcattgaaaccactaagaagaagctggaggtcctgcaggtgcgtgcagagcagggcctggggggggggggggctgcagtgcaggatgggtgccacctggccctgctgggaccaccaccttcccactgtccctctgcccacagtcgcagaagggccaggagtcggagtacgggaacatcacctatcccccagccatgaagaatgcccatgccaaggcctcccgcacctcgtccaagtgagtggccctgactgccactgcccggcatccacccctttgtcctgcccagcccgatcctcactttctggagaggacaagtgttgcagctggggggacctggcttcaagttcaggcttggttctcaccccttctgttcataagcatttcctgagtgcccacacgtgtgggcctctgctaggtaccagcagcgcactcgtgtatgagatgtagcctctgtcctctaggagcttggagtctagtgcagggaccgtggctgcgtcacctgtgagacggggtggccagaggggactgccagtgccgggtccccctgtgctgtctcctgacctgcaccaactgcctgtacttgcccccctgcacccggctgcagacacaaggaggatgtgtatgagaacctgcacactaagaacaagagggaggagaaagtgaagaagcagcggtcagcagacaaggagaagagcaagggttccctcaagaggaagtgagcggtgctgtcctcaggtggccatggtacagctcttctgcctgggtgtcctccctgccctgccctgtgtccttggctccactgccttccctgggtggatggggtggccgcagcctcattctgtgcttcccagctgccccagaccctcttgttccacctccaggttccagctaccctctcactccctcactcccttctcttggcagcctcagccctgaccctgtggaagcatttcgcgatggacagactcacaacctgaacctaggagtgccccattcttttgtaatttaaatggctgcatcccccccacctctccctgaccctgtatatagcccagccaggccccaggcagggccaacccttctcctcttgtaaataaagccctgggatcactgtgtgtcgcctctgagccctttgcttgcccagtgagtgggcggccagagggcagggcaggatgggtaactgtgtgtgcctccgtgcgtgcctcgcgtgaaagctccgccttccgtcagacggacgtgggtcgggactccgcctcgcacgtgggagggtgaccgtgggtgaagctccccagtctccttctttaaaatggagggcgatcataacagggtggttgtgaaaagcaccgagatgacggctgacgataagacgggcacagtgactcatcacacgcttgccatgtgcccaggcactaaaagactacacacgttagttcagtctaggcacttctgtcattctcattttaccgtggcggaaactgagggacagaaaaactaagtaacttggtcacttgcccaaggtcacagggctatggaacagtgaggctgggattcgaacccaggctgtctgaccccagagcccacactccttaccctggagttgcagctggggccaccctcaggggggccctgatcacactcccctgatgctgagttccagatctgaactaagaagagtagttaacagccggaagcgcagacctgaggccagcccggctgcgtcccctctggcgggaacagggacaggctcctcagagcacccgggcacgcccagctcctcccctcatccaggccgctgctgcccttatcctcttgggcagagtttgaagagctggctgacgtgaagagtgctttgttttttgtcccctcttccttcccccatgtcaggagtggggtttcttctttatttgaaacactggtgtcctggggagtaaagccggtgggagtcatccctcaggaagtgctggcgcccactcctggaaaggctgagacagcacaggtcccaaagcccagaggctgggcgtgcattactcagcaaatccttacagagcccccggcgtcacaggcattcacagtcccccgacctcctggaacttaggaggctggtcagggagacagattcacaaaccgatcacaagcatcaaataattgcaggcgggtattaagaaggaagcaaacaaagcctgggagagagaacagcgagggattgagcaacccaatagctccctggggctgtggccctccagggcacgggtggggcaatcacctgtcgggcccaggtcccctctcccagcaacgccctttctatacaagccgcagctgcacaaaggcaagtcccacctcctctaaccgcccttgggctacctgcccttggggtgggacttggactccactgagggctgtgctgtgaggtgggtccgggagcagctcggtccggagagtggagcgcgatcgttccctctgcaggcctcaatcgaggggcaaggctgatgctccgggccagctggggtctctgggtagcggtgggtaacttcacactagcgacaccttgctgggacccgcctgcccttcacaggcctggcggggccttctccctcccctttccctcaggggatcccagcacaggctgggcactgcggggcggcacagcccaactcctgcccagctgacccctcgctgacctcagggatctctctggcctgcagctccgctgtgggcagggtctgaggccacagaggaatgggctagtcctgggggcagcatctgctgtggggaggggacccaaggacagcccccgctttttgtacctctggagacaggggtgagactaggcaggttggagaaaagaggcccctgggagagggtgggaggcctagaggagtggccaagccttagaggaggtgcccgtggctggcgctgggagggaaggggttaaggcagtgggggggcagcctatggcaggaggacacacctgtgcgcagggtggcaggcggggcccaggtaaggagcctgcgctggctgcccggcaggcggagaaggaaggaggaagagcggaggccagggcgggctctaggccgtggaatctggggccttaaagccccttcgtctccccagcacccactctctgggggcaggtgggcccggtgacaggtaaaggccaccaggggagaggtcctgggctgagcttgggactgcagaggggggatgagggtgggtaaatcggtgtgtgtcgcgggtcgggaaaggctgccgggggtaggggaaggtggctcagaggcggcgggccgacggtcgaggggcttcggagggcctgcttggactgcaacctgggcctcgtgatcagcgacccagggtgtggctggtggcgggcagcagggctcaccaggaagtgtccccagggactcgggtggtggggggatgggagccagggatctgcagcttttccgcagggatcctgggcctgaagctgcctgacccaaggtgggcgggctgggcgggggccctcgtcttacccagcagtgtttgggtgcggttgggagtctctaatactgccgggtaatgatggaggcccctgtccctgtgtcagcaacatccatcgcctcaggtccccagcccttagctggctgcagccccctccccacttcccacgcaccccggaagcccctcgtcttgagctgagagcgttgcacaaggggtggttcttgttggctggctgccactaagggacacaatgggccccagcccctcctcccacccagtgcgatttgtcacctggtggatccagaacccacagtcgaccttgagcttggggttggctcgccccctctcaagagacctcacctggcctgtggccagggtcccctgtagcaactggtgagcgcgcaccgtagttctctgtcggccggccctgggtccatcttccagtacagtgttggatggtctaattgtgaagctcctaacactgtctggtaaagatggctcccgggtgggttctctcggcagtaaccttcagggagccctgaagaccatggaggactactgaccaacaacctctgaccttcacccctctggatgggggacgaatcactaggcaaaggggaacaatgggaaggagacaaaatggctgcctttacagctgcagcaagatgtggaaacactggttccctaggcacctccattgtcttcccgccttgggagcatgaaataaataaagtgtgaaggggaacatgaggaagactgatccaagtcacttgacctgtcttttgtctagttgtttatctcatcttagcctcccagcaactcaggattggggctgcgacgtctgctttgtctttcatgatactcaaccccaagcagagaaaaatatcttaaaaatcgaagcagattaacccagtccctctgttcagatccacctgctgccctatctgcatttggcagttcctggacatactttgcacctatgttttgtctgagttccacatcttccttgtctccccgcagggatgggaaatgggcagtagtgggagattcaggtataaacggtggctctgtttctctggtgcctgagattcgggaaggcctgtcttgggaagataagtgtcagcttatctgtggactgaacagacaggcacctgttctgttggccccggaactgcgggcatgaaaagcccacctccccaggggaggcctgttagctagcagctcctcacgcctggtgactgagaaatggagtctggggggcctacagcaggccacgcgatccactgggcttctgggcacagaagtgcctcaacaggcacaggcaggctccccacagccacaaggaaccctgctgccaaggaagcagctcctgttggggtcatcagatttttaatctggctcagcaaagccatggctgtccagccttaaaaaaatgggtgatgtgggagaaatggagggtgtgtgaagagcacagctgggcctcgagaactcagggccagccttcccagcttgggtcctgtttcggagcccaggccttgcttccccttagccgccccagccagattcttttgcgccccctgctggcacacacaaagacagacccaggagcgcacatgtgaacgtgcgcatgcttgctgccagttacccagttcatgaacacgtgaagccttgacttcaggttaagtaataaaaatttattgagaattcctgggttggtgtttatctcctcccagccttgagggagggaacaacactgtaggaaatcactgagaaatcacgcactgtccccaacagccccagttaacacagggaggaggaaagtaattccccagaaaaggggctagtcttcagtcttccttaatccaagaggggttcagggaaccggtgtgggggaccatcgcatgatactggggcggggtagggctgtgctggacccctggctggctcctcaaaaactggagaagcagatccacttcctctgggggtggagttcttggtgactaggctcatttcttacccttgatgaggctgtcactgtaggaaaaaaaagatagataatgacattattaggggacataaatgtgagaggcaggacactctaggccattccctctacgaccctcctaccctgattgagggtttgtcttcggggaggtgggaaagggggtagggtaggaggcgggtactggagaaggtggcctgcaggaccccacagaagcaacaacagcttaccttcccctgtggtgccagatcgccagatgaacaagaaacagagaagagaaatgcacatgttaattgacagcttcaggccccactcagctttgaaccctcctttgctcccaagagaaaagataaacagggttgacagccaggaatctcaggctcatgaaaggaggaggcatgttctcatggccactgctatttctcatctcctttcctaacatccctccattcaccagaggagtttgagggctcttgagtaagaaaactgagtatcatctttcatcactttttggttagatgaaaactttataattaaagtgctttttatgtgaataatcctatttgatctcataaaatcaatcctatgagatgcaagatagaaactgtcaaccacccccttttctaattttggttcaatgtctctgagccatatgaatagctgtagcaggctccagagcccaaacaaccagactcaggtcccacgttcttggtgataccccacagtgtggccacatctctcacctggtgaaactttcatcctgtaggttcagcacaaggttgtcagctgtgagatagatacgattctgtgatgtggcgatctacagggcaggaaataagacagatgcttgcattaagcaaagacctcaattccgacccctgcaattcagcagctacttaacatggaacacatgcagattagggcaggggtgcagcaatgagtaacacatggtttctgctcgcacttagggatccagagcgctgagcagcagctatgattagaacaaaaggtcagggaacccagaggaatcattcttgacaggaggagtatcggagaagccaattttttatttatttatttttgagacggagtcttgctctgttgctcaggctggagtgcagtggcatgatctcagctcactgcaacttccgcctcctgggttcaagtgattctcctgcctcagcctcctgcgtagctgggaatatagctaaacgccaccacagcgggctcattatcttttgtatttttagtagagatggggtttcaccatgttggccaggctggtctcgaactcctgacctcaggtgatccacccaccttggcctcccaaagtgcggggattacatgcgtgagccaccgcgccggccagagaagccaatctgagtagaaaccggaacaagcaaggttcgaattccctcacctcaatgtgccttaactgaaagcactttctcaaggcagccccatcagagacgctgggctgacacactcaccgtcttggagatattctgggctgctcgaatcttgcgaagtttgatgtagccagggttcttgctcagtgcttctccaaggtgaggagggttaaggtacacgcaagggcaggtctcaatccctggccctgtccttaccacactcccttgctccagtcctcctctgggctgtcagatccaaggttgcgctcaggtggcttgtgcccagccctaccgtggaccccacctgtgggcctccctgcaggctgctgccaggaactaggggcagcaccagaaatgaaggcaaggccaccaatgctattgatctggccttacagtggggagtcatggctcaggtactaccactaagatttcagatctcatctgtagtccccacccccaacaaggagccaagggccagagagcacggagtcgcattcgccttagtctcatcagcctgcccatgaaggagaatggggaactcaggtgccctaggggctgggctgagatctctccagcagaaggatatcatcttggcagcctcggcctcaccctcggcctgcacaattttctgccgctgttcctgctttgctttttctaccaagaattgggcccgctgggcctcctgctgggctgtggtgggagagagtcagggagaccctgtcctgggtcaggagccccacccatggagtctttcctcctcctgcatctcagaagccctcaccccacggctcttgcgactcacccacttgtttggcttctacagcagctgtgtactctcggctaaagctcagctctgtgatggccacatcatccaggatgaggctgaagtccttggccctctctgtcagctcccggcggatcaacagggatacctgagggcaggggtgaagaggggaagggaggggtggtttgaggggactggggagctgaaaggaaggttgcgacccctaacccttcactctcaatacaacatgcactgccttagcttcctgtcaggcaaacctgtaacataagcctctctgctcgaagaggtgcaggaaaagccaagacttggccattttcctctgtgcttcctaacaccgagtgctatcgagttctaatgctggctctccttatttcacagtggcaattagcacagcttttaggtggaaatggcactagggtgacaatgcttttctaataagctgcctttcctaattcccaatactctgggcctaggaaggaaaggctgacaccacgcagatggtggtgggagtcagacctgggcccgctgggtgatcagctgtgaggcattgaacttggccaccacactcttgagcacctcgttgacaatggacggcaacactcgttcctcgtagtccagccctaggcgctggtacatgctaggaagctcctgagcattgggtcgagacaacactcgcagggagatattcaccatctgtaggtctgagattgaggtcagcagtggctggtcaaggccaaacaccctttcccaagcattttctccttcatgttcctccctgtatgccctgtgcaatggtgtacagcctggcactaccctggggggaggagagttaatcaggctgacaaggaagacaagacgcagcacagctgaaatgcaccctcacccactgtgaagccttgaactgcaaaccccgtcaccagcagagctgactactctttccccctctgtactctgtgcaacctctaacgtgggcgctttcgtgctgtaccgtaatcatgtctcctgtaaggacttgggggacaagaattgtgtttaatgaatcttttattcccagggcccagtctagtaaatgaataagcgacctgcactaggtatagcacaaagaagtacattacaggttacaggtgagctacctgacccagggtgtatatgtgtgcgtgggtggggaggaggaagaggtctggggaactcaaaggcacggcttttatgtatggtctagaaggagagaacaggtgaactagtcaagcttagggacaaacttctccagaacagagtgtactagtggatgtaactgtagatatagtaagtcaagcagttagaaaaaaaaggctttaaaacaaagctttgatctaggcagtgaacaagacgagggacaaacaatactcttattgaatacacgtcagggaggagacagtaaaaagcacgcaaacacagtgtgttcagaatttgctgctttgaccccaggaggcaggtatttttgttacagctcttgcagatgtggaaagaggcctaaaggcctgacactaccatattcccctggggtttcttgccagctaccttgatcatcccacctgccatgtgattaccaagtgctcagacctacctttggagcctgtaggggaggagatttttcgaggtctggcccgaatgtcatagataatggggtactggaaccaagggatcctggagaggacagggataggtattaagaggccacagtttcggccgggcgcggtggctcacgcctgtaatcccagcactttgggaggccgaggcgggcggatcatttgaggtcaggagttcgagaccagcttgatctacatagtgaaaccccgtctctactaaaatacaaaaattagccgggcgtggtggcgggcgcctgtaatcccagctactcgtgaggctgaggcaggagaatcgcttgaaatcaggaggcggaggttgcagtgagccgagatcgcgccactgcactccagcctgggcgacagagcaagactccctctccaaaaaaaaaaaaagaaaaggccgcagtttcactagccttgcccggtttcccctcaccacgcgttttttggcctgctcctctccacgaccacagacaaggagagattctcttgtccctctggaaaacaacagtttgtatgctgctggaggttctcgcagcacccactatcctaggggcagggatgaggagggtgggaaaagagcagcgttgaatcctgttgcacgtccgactatagccactgctgggtcggcgtcaagggtgaaaggtcagggtcagcaggctctgcccgccattacctgaagtgaaggccctcggccaggatagtgtcctgctgcactccaccgatccgattgaagaagatggctctgtgcccgccttccactgtggggagatgggtggtgatcaggccaggccgctgctcagaggaaatgctaggcccgtggaggggcgcggggacagggcaaggggtttgggggagggactggaagcgtccggcgagcaggcggaggttgctcaccggtgaacacagattcgcgcacaccgtaggccacggcgccggcccccagcaacagcttcagggccgtgcccatgccccggggcccggcgggcagccgtcccgccaagtccttcaagttctgggccatgtctgatcttgaggccggcggcactggaggtcagaagggggtgccggcccgcctctaccccgctccggcttaggtactgcacccttcacacgagggttcgggcccgtaaggctggcgaaagaaagggcagcggaagtgcgctccctttgaaaccctcccccttagcccactacggacccgaacttcgcgcacaggaatcgcgcatacggaagtcccgcccctttctggaaggctgccctcccagggagggcagcgcaagacagcaagtcatctccatttcctggcccactttcaaaatggcagccggaaggaaatttgtgattagaagccgcgctgttcttatttaagagcgttagcgcaacttccggtattgttgcaagatggccgcgcccagtgatggattcaagcctcgtgaacgaagcggtggggagcaggcacaggactgggatgctctgccacccaagcggccccgactaggggcaggaaacaagatcggaggccgtagtttattgtggtgctggaaggggccagtctggagacagtcaaggtagtttgggacaggaagtggagaagtagtaaatcgataggttgggactccgtggaatgagggtaaggggcccagagtggatgtagaaagcagagaggggtgaaagatgcttttgaaggaaggtggcttggttggctttgcgttgatttgacatcctgggatggtagtactcatttttctttctttttttttttttttttgagacggagtctcgctctgtcgcccaggctggagtgcagttgcgcgacctcggctcactgcaacttctgcctcccgccttcaaacagttctcctgactcagcctctggagtagctgggactacaggcaggtgccaccacgcccggctaatttttttgtatttttagttcagatggggtttcaccatgttggccacgctggtctcgaactcctgacctcaagtgatccgcccgcctcggcctcccaaagtgttgggattagaggcgtgagccactgtgcccggccggtagtactcattttcttttgctctttttgaatgatattctagccctcacctccttgcttccaattggtttaccaggattctgtggtatagtagtctaagcagaggaaagtttcgttccttgcgtcattccacatcccaagacaagttactgggcagatgagaaacgtagttatgtagcctagtctgcccacactttttgtaagggcttcgtgtttcaattcattagtatccatagtcacctctctctaatatccacctatgatacactgtccagacctggttattatttaaaacttttacatctgcatttttatctatcattcatctctttccccacatgtaatagaaccagcagttctctatcttaaagccttgggcagtgttcttcctcctcctttctcttacccgttagaactaattgaataggcccagaagaaatcgcattggtttagaagtcaggccaggattttaatcttcgttctaaatacacttttttttttttttttttttgagatggagtctcagtctctaccaggctggagtgcagtggcacgatcttggctcactgcagcctccgcctcccgggttcaatcgattctcctgcctcagcctccagagtagctgggattacaggcctgcgcctgtaatctattaaaagaatagaaaacatgattatatcctactaatgggttgaaactgtattattcattcaagaaggtttttttcttctataactaagggtgtctcatggacttagttcttggtcatttgttctttgtgctctctgtgacattacttcaactattcaatttcaaaatctacatcccttttttcgcagactttttggagccatatatctcaagaatgttgctagacatatacattccagtgatacataaaaacttaaccttccaaaacttgtatttgtatataacagtttgtttttagactttttactgaccaccctaatgctccttgggactccaaattgcaacttggaattatttcttttagctgctacagatgtagtccacttctttaacatcaaacttctgatgtcttttccagtgtacagagagttgttaggatagtgtctgtcagtcattcccatcctgccctgcttactccagaattatttttggctttgtgcttgatacattaggattctgtggtttacaaagcagcttcatatataatcactgccctttagtgtctcagctcccaattttcctcaaaatttcctttcttcgtttccactttttcttttttgtttcttttttgagatagggtcttgctctgttgcctgggcaacagagtgcagtggtgtgatggttcactgcagcctctacttccctggctcaagcagtcctcccacctcatcctcctgagtaactgggactgccagcaaatggcactgcgcctggctaatttttttttttttttttgtgagacagggtcccaccgtgttgcccaggccggtctcaaattcctgggctcaagtgatccttccacctcggcctcctaaagtgttgggatcacaggcataagccaccacacctggctactttgtcttgattccatctgtacctttgctcatgccagtctttcttttttcttttttttgagacagggtcttgctggagtgcagtggtacagtcttggctcactgcaatctctgtctcctgggctcaagccatcctcccaccttagcctcccaagtagctaggactacaggcatgtgccaccatgcccagctaatttttgtatttttagtagagatggggtttcgccatgttgcccaggctggtcttgaactcctgaccttaagtgatttgcctgccttggcctcccagagtgctgggattacagccgtgagccactgcatctgcccccatgcccgtcttaaaactgggaataacccctcttccttttacttctgagagttttctttgattaaactgcctcctgcatcattagttttcacatttcttttttttgagatggagtctcgctctgttgcccgggctggagtgcagtggcgctgcaagctccgcctcctgggttcatgccattctcctgcctctgcctcccaagtagctgggactacaggcgcctgccaccatgcccggctaattttttatatttttagtagagatggggtttcaccgtgttagccacgatggtctcaatctcctgaccttgtgatctgcccgcctcggcctcccaaagtgctgggattacaggcgtgagccaccacgcccggccttcacatttcttgttcagatttgcagctcttcacttagtgcatgtttggtgtacgcaaactgagggtggtgactcgatattttgcacagtacctacttactgctcctgtaataaacacagcattcagccttgctaactactaactcctgcctagttccaggatgtctcattggccttgcctaacagccacaggttttttaattaaatccagtgtattagtagataatgtgaagtcacaggttgtgcccttcctcctgtttccctctcagaccattcactggggagtgcaaataaggctgcacagtaatcccccgaagggcttgctgggctccacccccagtgttcctggtttagtaggtctagggtgggcctgagaatttgcctaacaagtttccaggtgcagctgctgctggtagtttggggaccacacttgaagaaccacggggctaggtaacagaagcttatgctgttctctcgtcatgttccctgttcttcaggtagggaagacatatgagctactcaactgtgacaagcacaagtctatattgttgaagaatggacgggaccctggggaagcgcggccagatatcacccaccaggtaactccagggacagtgctcacaaccctttgagcctctgtatggaagggttggcagctgagtgctgcctctcttcagccttaaccatgtctcggtttctgctttgctcagagtttgctgatgctgatggatagtcccctgaaccgagctggcttgctacaggtttatatccatacacagaagaatgttctgattgaagtgaatccccagacccgaattcccagaacctttgaccgcttttgtggcctcatgggtaagaagccttagaacaaagttagaatgaacttgtcagtagggaagaagggaggaagaggaaaagggagaactaaatgtggatttttaagcgagaaaatgggagaacaacatgattaataccaggacaaggactgttattatttttctatgtttgtggaaactccactcctgttcttgcagtagcttcctggctgagtgaaagagggagtctgaacccatcactgtacagctagccatatgcttggcaactgtttgttcctaacatttcaggagtccagtctagatataaagcacacagggaactcatcttatccatggggttttccttgttcgatgactggacagaaggactgtggtctccatctagctctgaactcttttttcccccttctagttcaacttttacacaagctcagtgttcgagcagctgatggcccccagaagcttttgaaggtgaggtattgaaacctgttagttgaaggctggttctgggaatgtttctggggctgacttttctctcttttttactttaggtaattaagaatccagtatcagatcactttccagttggatgtatgaaagttggcacttctttttccatcccggttgtcagtgatgtgcgtgagctggtgcccagcagtgatcctattgtttttgtggtaggggcctttgcccatggcaaggtaaggtctgggctcaaccctgaaattcttggtagagctgaacttagtatagaattcccagagcagtaggcattttaacaatgcttacaatgagctagaagacacatgacagttccacaccctgccccagggcacatcctttgagggctgctgccataattggaagtcacagttaggaccttcttcatcctttgtagggatttgatattcaacagcacagctgaaatactagctcagccatagttttcctgccctaaagaagggctgaaacagctactgagtgacagagttggctgacaaaactgttcttttcttaggtcagtgtggagtatacagagaagatggtgtccatcagtaactaccccctttctgctgccctcacctgtgcaaaacttaccacagcctttgaggaagtatggggggtcatttgacagtagtagaacctgttctgaaaccagaaactgttgatgtcacatcctttgaccctggtctgagctgactgctggaagatgatctttctgcactgagactgtggagtttggggaagccaaggctgtacatttgctatttgtttatcctatgaatactgttcttgcaaacctggttgttttggggttcctaaagtatccagtggtgtaaaactgtttgttccccgggacttcagggacagataggaggttacagagtttgcagtttggttccatgctttgaaggcaggctttagctcccagattcccatgtgctaaaggagagaaccctgatgatggagaagaactgtgaaagagagcagtcaggaatgctagtggtgaaaaactgaacaaacagaagtgattttatctaatacagttccaaggtagaaaaagtggagcaggcagggccttgcacccctctccacccccccatggggggggtggtggtagcggcacatacacaatcatagtaaattggcagaagaaaaacacaatagattcctggctagatggggagagataaggcaatgtgcatgggggaatcagaggggagatgtgagcccctctgctcctcccacaagagtttcccctttgggccgggcacggtggctcacgcctgtaatcccagcactttgggaggcggaggcgggtggatcacttgcggtcaggagttcgagaccagcctggccaacgtggtgaaatcccgtttctactgaaaatacaaaaattagctgggcatggtggcgtgcctgtattcccagctacttgggaggctgaggcaggaaaatcacttgaacccaggaggtggaggttgcggtgagctgagatcccgccactgcattccagcgtgggtgacaaagcaagacgccttctccaaaaaaaagtttcccctttggccccaaatgaagacttggctggcagcagaggcacagctggaagcatcgatcttccacctccctggcttttccattctctgctctggggcaaaggagtgctgtgaaaagggagacgagtagtttctgcaccagtcccgcacaggccacctgcaagacaagaggagtttggaaggctggttagttactcctgtaattcctggtctatagcccttccagatgtttcctagcatgcctcaataagtcacagtagtcattgcccatactgtgttccttagtagccaggctaatccttggaattcaccccagatttctaatactattgtttttttccagtctgttgctctattctgtaacctggtggtagttttagtttagctgtattaacttaccagggaaatggattattccatcttctttaacttctctttccttggcaccattgctttgtgaatataaggcaatatgaatagtaggctcaggaagaagatgtggccaaggaaatagatggatttatacacctgtggagagagaggccactaaggtagacaggcctggagtgtcctttgcaacctttgaggttgcagtgagtccctcccagtctcacaagcaggccttcacttgccttaagccatttgtcccacgtgaagaggcagaaggcagtcatggagtaacccatgaagagccagtggatggtctgttgcaccaaatagtagaagggctggaggacagtaatggcggccagcttgctcagggtggggctctcttgaatgagcctggcagcctggggagggaggaggagctcatcagcatcttgtcccttatattccccttcacccccaccctggaggcctacctgtctttccacaataacaatgaggaattccatctggaagcagaccaggtatcctgagtgcaggccgtgccagagggccaggaatagcaacgagagaccctgagagagttctttatttccaaggaacttgagtcgtttgaagatgtagctggagaaaagggtgggtggggcgaccctcaaactgactggtccttgcatcccgccacctgcctctgggtcctcaccctgaggattggattggagtgctggtgggttcccacgtgtagcccccagagggtacaggaggcagtgctgactgattacttttagagatggaaagcagacccaaggcggagctggagaccgtgtgcgcacgagccacttggttcagcagcagtgactgaggctgatgctgagatcagtggtgaaccagacactctactcaagctgcccacactctagtggtggggacaaacaagtaaagctgttgataaacagggcagtggaggacataagtccattggcagagctggagtaacacccaggtcttaacgcacttttatatcttgcctttttttcaaatatgacagtaatggtttttttgggaggggggtataggtgggggtcaaagtcagtgtgagcgacagggggttctgcccagatgggaaagacgcataggggtgacatggtacacccctgccctccaatctgggaagacagtggaaggaaggaaccagggtccaggctccccaccagcagctcaccgggccacccaggcgttggtgttgatgttgaatgaggcaatggtgccagtgaagcgggggtttgtttcaaagagccacaccttcatgttggcacaggcatcccactttgccttgcccttttcttcaaagccattgaagcccaggcccgtcaaaatgcatactccttcctgagagggaatagctcagttagggctcttgccactccccatactggcccccatggcttgtctaaataggaccttgtttcaacttttctacttactgtgaccagccaacaggtgacatatttgtacagcacaaacttgccccagatcagcatgtacatgcagcggaaccagaaggggtggttcttgagggaagaaagcacagtgcattagggatatcacatgactaggcagtttctctcagcactcttccttttcacacttgtggctggctacttcatacctgcctgagtcctgctgccagatgccctcaatagtctggcctgattgccttcacaataggcagagaggaataagcagagggcctggagaatattcattcgcctttcccttggagagcctcaagggcagcactgtatttaacttctctactgtttgccttcgttggcaaagtgtttggaatgagcatttggaatgttaagtacagaggggcccatattggattttaatttaaggagagaaacctgcccagaattactgaactgttttcaagcctttcagctgggcaggagcaaaagccagcacttccccccttcccttggtttctgaattccctagaagtgcccaaatgtatcagtcaagagaagaaaataggatggagaatcagaagctgctgtgctctgaggggtcacgtggatgtgataaggcaagctaggagcggctcctagagaaggcaacgggtgctaaatgtgcacctggcacagccctgtgcccgcgaaggttgttcagtgctggctgatgaacatgtcccagcacggctggcattgacaactcacagatctagagcaaaaccaacatgcacttgtagatgatatttcctacttctctgctatctgtagggatccttgcctgtccattttctagctctggtgcagtcatgctgctgctgctttagtagacactcacgtcatagtcttcagtgaggagatagtcttctgtgatgtgggggctgagcagtgtgtagcccactaggtagaaaaggcccagactcaggcgcttgagagcaggaatgatgctggaaaggaacgagtgaagttcctggtcacagagagcagagactattcccttcaccctctgaccttcagttatggagaggagtgtttaggggtgtggttgtctacctggaatgggatgagaagctctgctgcccaaagtgtttcctgtttcagggaaagatttctatggctggctatgaggaatggggactgcaaacctcttaagagttgtaggaaagtcagggcagcagacagtggaccagtcttgtgtttacccctcagggatgctactgatctcaaggtcttgccaggtctcacaatctccattgggactgaaaacccagtggaggtaagataataaaaataaccactttgaatctgctccttcatttcttggttgaattgatgctgaaacacaggatggacaagttctcagtgaaggaattcttctggcaattaaactttttttttttttttttttttaccattttaatttttattttctagagtcagggccttgctctgccactccggctagagtacagaggcatagtcattgctcgctgtggccttgaactcctgggctcaagcgatccccttgccttggccacctgagtagctgggactataggcatgtaccaccttgcctggataatttttttttgtagagatggggtctcactatgttgcccaggctggtcttgaactcctggcctccagtgatcctcctgccttggcctcccagagcgttggcattacaggcatgagccactgtgccctcctgcatttcctactgataaatatttttgagacaggattttgctatgttgcccagaatggagtgcagtggtgtgatcaaagctcactgcagccttgacccacctcccctggactcaagcaattctcccacttcagcctcctatgtagcttggactacagatgcatgccactatgtctgataatttttgtatttttttgtagagacagagtctctctatgttgccaggctggtctagaactcacgggctcaagtgatcctcccacctcggcctcccaaagtgctgggattatagaggtgaaaccactgtgcccagcctctatctacctacctacctatcaacctgcctacctacctatcaatcataaatatatttcatatatacatgaaaataggctttaaaggcagaaatgtgactggttcaggcaaaatcctgtggcataaatgtggatttttatgtttgtactagtgttagaatggataactggaagaaccctaaactaaaaagggcccactcctggcacagagtgcctgttacaacagtccagggcctgcatgactcaggtctctatgccagggtcatgctggagaatgcagctttcagaagagtcacttcagagtgagtgaaatacctacacaaacatctggaccaagaggggcaattacctgtttggtatctttcctggtatgtcaatcagctctccctgcaccagcttcatgtagtgattcattgagaactggggccctaccaagaaggccccatagaagtaggagaaaccagcaacttccagcagggaaggaacaccacgtatggcatatttctgttgctcagaggacaaggaattctatgccaagaagagaatgcatggttcaggatagccttgaatctccccacaagagccactttgagtgttccccacctgtgtgccccactgactggggttcttcaaatagccttctctttgggggatgacaaatagttgcttcttgtggaaatgcgtatgtgtgtgcatagctggctgttgctgctttagcaaatgccttgctggcattgatctctggactttgtgcaagagctggatcctgggcaaattagatttgttgatccttgctcagtgctatctgaaagggagattgcacaggctggggaatgagggagagctccgctctggaatttgggttcagtcttttgttaacaacttttttcttccctttcattaagtcttgaacctctctgccgatgaatgggtacttacctgatctttccctccgtcaaagtagtcaacagccaaacctgagcagagagagaacggatgggtagggtggtgggagaggacactgaggatgtggcctgtagactgagtgcagccagaagtgtatggcggggggcggagggggggtgccgaggaagtttttagtgagatgggggagggacctacatgtaaggaaggcaggcagtgaccatcactcaccaatcagcttcaaagtcagaacacaatgtggcattgtccacttgatatcgtagttgccggtggcagtgtaatagtatccagccagaaggtaggcctaggagaggcagaagtatttattctagcatcactactatttcttctccttgctctgaaattcaatgttctctttcctttttcctttctcctcatcccatcattaaaagccttaataaattcctacaaatggaggtgctgaaaacctgtaatgggaagagcgttgctcaaggcttcttggcaaaatgagggctaaactgagatgagaatttagatgctgggaccacaggtgcatgccaccccacccggctaatttttaattttttttgtttcaccatgttgcccaggctggagggctaatttttgtattttttttgtagagatggggtttcaccatgttgcccgggttagtctcaaactcctgggctcaagcaatctgactgccttggcctcccaaggtgctgggattacaggtgtgagccactttgcctggcctaggcttaggttctttaactcattctaagttgcttttctgtcttgccttgaagtgactctgctcctggatagtgggttaaaccaaagagcctaatggcacagtatgcaaagggttagctggtggcccttccttgaggcaggcaaagagttaccattacaatctgtggatggaacacttgggcctgtgataagccacctacctgaagtcatactgctaagtgctgggagaggggttagaaattaggtctgctaatttctataccacagtcccctgcctacccctgtcccctgaaccgctgtcagctgtagcctgagctgctaagggaaagacgtttaccatctggaagcaaaaggtagtgaggacggcagtgatggtgcggcccattagtcgaaggatgaggaactgaagcacaatacacagcagggagtggtagagctggtttcctggatgcaagaagagagaatttagcctggtttttacactcccaccgtcctgagacttccaatcacaacgtaatatataaagaaaaaatgttggcatcaggatcttttttttcagaataacctcatgttttggaggagaggatggaaattatttattaaaataaaaaagattattagggtgttattttatttcttttctttttttgtttgtttttttagagatgcgacttgctctgttgtccagacttgagtgcagtagctcaatcatagctcactgcagccttgaattccgggctaccacacccagcttgttactgtatttttgaatgtctgaagtgaagaatgaatctaagtggggactgcttggctcggtcattcagttacatccacagcacagagaaactgaggattctttgttgatgaggtatggcaagggtaaccaccctcaaaatgtttttatctgacagaagaatgtacataaaagaaaaaaaggaaaagttaagctgtgttcctcttcatacaaccctctttgcaagtgggagcattataacttccctacctattagattctctcaaggaaattttgttcaagtctgttccttccaggttcccactaattgcggtgtcactgctaatttagtttactcaccaaagttaaaataagcaattgagaggcctgtaaaggtatggaagaggtggatgaggtaggtctccttgtagaaaaggtaatgccgataaaacaaagcaaaggggtaacctagatgggggaaaagataagaagagtgttatttgtgcctggtgccatcccagtttggtttggaagtttatctggcatgaaacgcagcccagagggagagagaaaaaaaaaacaacatacattatatggatggcaacagagaaggcaataacggtatccccaagaaccaaaagttttttgtaaatacaaattttgaactaaagatattaatatttgattgaggcaatataaagctgggtcctaagactaggtttcatttatagcttatgaactattgccagacattttctcttacttgaattttaaaaaatgatacaaggaagctaggcatggtggctcccatgtataatcccagcactctgggaggctgaggcaaggggattgcttgagccgaggagttcgacaccagcctgagcaacatagcgaaaccccgtctctattaaaaaacaagatacaaagatttgagcgtacccatctatgctccagaaacactcatttacactttgtgatctatcttgctagcactgtattatcagattatgaggaaaaatataaattaatatcaggctaaatactggaattgctgactgcatatatagcagttacaagttatgtggagatactcctcacagtctgtaatctgggcatcaaccaagttataaaatccatttaagtatactaaaaaaatgtcttctaaagccatgattcagagtatagtccaaaggccatgagtgaaccacagaggatcttctgatgggtcatgaactgattatacatggccaagggttgcttattgaattaaaaacggtcaataaaatttggtattcctaaactaaaattagcacattccatggctttactgcagactcaccttcagtgttctatctagaggtctggcggccatgcctggcaacatccccactgcactagtgcatatgtggaggatggggatctctcaactgctttttggaaagacattctgcctattctttcattgattattctcttgagttggtcatggtttatactttctgcaattcttgcttttatttttatttattttgagacagggtctcttgctctgtcacccaggctggagtgcagtggcacgatcatcgctcactgcagccttgacctcctgggctcaagtgatcctccaacttcagcctcttgagtagctgggaccacaggtgcttgccaccatgcctggctattttgtaatttttgtggacatgagttctcactatgttgcccaggctggccttgacctcctgggctcaaggaatcttcctgccttggcctcccaaagtgttgggattacaggcgtgagtcactgtgcctgatgaattgctgcgattcttgcttttaaattatgtaactgcagtttttatcatgggcaatacagtttactgtgagtttgcttaactctaaaacgcttagaatagtatcatacagaaataaattgctcaattatttgttaaataagtaaatgcacacaatcatgttatatgttggtttctgtccttctagtcatttttcccccatacattaaaaaaaaaaaaaaaaaaaaggctgggcgcggtggctcatgcctgtaatcccagcactatgggaggctgagacgggcggatcatgaggacaggagatcgagactatcctggctaacacggtgaaccccgtctctactaaaaatacaaaaaaaaaaattagccgggtgtggtggcgggcgcctatagtcccagctactagggaggctgaggcaggagaatggcatgaacacgggaggcggagcttgcagtgagctgagatggcaccactgcactccagcctgggcgacagagcgagattccgtctcaaaaaaccaaaataaaacaaaacaaaaaactgtactggctggtgcagtggctcacgcctgtaaaccaaggcactttgggaggctgaggtgggtggatcacttgagatccggagtttgagaccatactggccaacatggtgaaaccccatctctaccaaaaatataaaaaattagctgggtgtggtggcgggtgcctgtaatcccagctactcaggaggctgaggcaggagaatcacttgaacctgggaggcagaggttgcagtgagcagagattgcagtgagcagagagagccactgcactccagcctggtgacagagtgagactctgtctcaaaaaaaaaaaaaaaaaaaaaaaaagttacacctgtcggccgggtgcggcagctcacacctgtaatcccctactttgggaggcttaggcgggtgggtcgcctgagatcaggagtttgagacgagcctggccaacatggtgaaaccccatctctactaaaaatacaaaaattagttaggcgtggtgcaggcacctgtaatcccacctacttgggaagctgaggcaggagaattgcttgaacccaggaggcggaggtggcagtgagctgagatcacgccattgcactccagcttgggcaacgagcaagattctgtctcaaaaaaaaaagaaaaaaaagttttatgaggatttttgactgtacaaggggtgggatcccataggacctgcgctgttcaaggctcaactgtaattaattctacagatatcttatggattactggctcatgtattcattcaccaagtgtttagtaaatgcctgctatatgccaggtattctgtttatgaagcacgtaattgggtaggaggtggcatgtgatggttcgttttctagctggctgagatgatgggatataggatcactagctctagggaggtggagacatctatgaccctttcaggtagatcaatgagcaaggaaataggatcaagtctcatatatttcacatgggcagaaatttggcagagacagaacaccaggttagcagcaaatattgctaagaactagagccaggaactagaaagtatatagactaaatgtcaatgccttcaatcttttgctttatttttacttttgttttagtaacggggtataaataaaaaaatataaaacagtagataattatctagagcactcataaataagttctaggtagctaagtttctctctttaagcatgaaaacccttaaccatttggaatgctcgaaattaaaaaacaccacacatattactctgcctctttaagttgaatctaatttaacattttctaggtgtctggatcgtatctattccagagtaaagtcatgatggctttatgacgttctgaggtatgtgaaattgtctgcctgactctaacaaggcctacactgtcctgagttctgagttcttgtgtccacttcttatagcctgtctgtccctttccttgctactctgggatcaacagtcacctcttgaacttttggggtgcttggcaatagttcctctccctactcctaatttacggcaggccttagaaaccataaccttattttaaaggtgtaaaaaaaaaaagatttaagacaaaagcaaggggcttgggtgctttccttatggacttaggcctggtaacatctgttctggccacttagaggccttgtgtgctatttcttgttttcaggtgcgttttgcaggaggggacgttgttgagttccaaacaggtgaggtattgcacactagcaaacacatgagaagaaggcggaggaattgggagaaaaataaaaagaatgcagcaggccaggttagcaggaacgttaagacggtgacggagaacagcaaagcctggaagcaagccgccgtggagaaggaagaactgtgctgaggtgagttgctgtgacaacccaggctgattttgagtatgtaaacaccaaaccttgttcttggctgccgctcagctcagcgggctttggagcctggctgcccagccaccacttcagggatgtgctgtttttagggagggtgtgaccctacaagatgtttctgagccttaatgcttttttgtgggagccaatgcttaatatggtggctagagttacctgaagaatctataaaaaatgaccgaagccccttctgctcaccctcccactcatcagagttggcttccgtgggtctgagtgggaaggacttccacttttaacagcatgagacacggttctgacagccccactaacatccgaatgcaggccgcagtgctcagtcctgaggataaaattctcagcttggagattggggttgatgccttacctttattagcaccagatgggtttgtaacaacccagaggtttgtaagaacttgttggccgggcgccgtggctcacgcctgtaatcccagcactttgggaggccgaggcaggcggatcacctgaggtcaggagtttgagactagcctcaacatggagaaaccctgtctctactaaaaaaaatacaaaattagctgggcgtggtagtgcatgcctgtaatcccagctactcgggaggctgaggcagaattgcttgaacctgggaggtggaggttgtggtgagccgagatcacgccattgcactccagcctggcaacaagagcgaaactccatctcaaaaaaaaaaaaagaacttgtttggcagcactgtaactgttccttctttttgattgtttgtttaaagcagggacttcagaaatttattagcaggcgaaggatgatgacctttagtacactccaaacctgaggatcttctactagaatgggacctttataatccctaatgctagggacattcaaaatgcgtgttttttttttttttttttgagacagagtctctgtcgcccaggctggagtgcagtggtgcaatctcggctcactgcaagctccgcctcccgggttcacgccattctcctgcctcagcctctccgagtagctgggactacaggcgcccgccatcacgcccagctaattttttgtatttttagtagagacagggtttcaccgtggtctcgatctcctgacctcgtgatccgcccgcctcggcctcccaaagtgctgggattacaagcgtgagtcaccgtgcccggccaatgctgtggtctttcaagcagctgctgggatacatttaatttgtacaagccctcttcaggggttgtagtcaagcacagggagtggatagaactgtattattcagtctctggacttcactcagttccaagtgctgtttgtgtcagggaccagatctatcacaacgtgcattgttagcgggaacgttttcttatttcctgtacaatagttgtgagattacttattaatcctaaagttgtgaggtttcatctgaagaaacagaaatggactgtttccattaagtctggtaaatttggctgggagtggtggctcacacctgtaatcccagtgctttgggaggctgagacgggagaatcactggaacccaggagtttgagaccagcctgggcaacatagcaagactctgtctctacaaaaaataaaaaaaatagttgggtggggtgggtggtgcgtgcctgtagtcccagctacttgagaggctgaggcaggaggatcacctgagtctggggagacagaagctacaatgagctacgatgatgccactgcactccagcctgggcaacaaagttgttttttttgagaccctgtctcaaaaataaataaataaataaataaaaataaaaaaaatataagcggggcacggtggctcatgcctgtaatcccagcacttcgggaggctgaggcgggcggatcacgaggtcaggagatcgagaccatcctggttaacatggtgaaaccctgtctctactaaaaatacaaaaaattagccgggtgtggtggcgggcacctgtagccccagctactcgggaggctgaggcaggagaatggtgtgaacctgggaggcagagcttgcagtgagccgagattgtgccactgcactccagcctgggcgacacagtgagactccgcctcaaaaagaaaattaaaataaaataaataaataaataaataaataaataaataaataaattgagcaccccaaacaacttttgttaatgtgggaactatatatcaatgtctactgtgttagaaaataagactaaaaactgggtgtggtggctcactcctgtaatcccaatgctttgggaggccgaggtgggtggatcacttgaggtcaggagtttgagaccatcctggccaacatggtgaaaccctactaaaaatacaaaaaccagccagacatggtggcaggcgcctgtgatcccagctacttgggaggctgaggcaggagaatcgcttgaacccaggaggtgggggttgtagtgagctgagatcacgccactgtgctccagactaggcaacagagcgagactccaaatcaaaaaaaaaaaaaaaaggaagaaaataaaactaaaaaaaaagtaaaagatatgattaattcagtaaaaatattaacagtaaaactactacacattatattaatataaataacatactttaaatgtaaaccactatatttcccaaaacaatcaaagaaataaagccatctaatgagaagaatgccactgttttacattttcataaatttatggcctctgtctgacttaatagaagatgactggattctcaaatctgcttctgcatttaatctgttgtaatatgttagtttggttaaaatatacaaagaaaatctggctttacacagacagagaaagtatctgcattttcagataattttggatattctttagcgctacatcaaaacttgacaagtagtagtttcttaacagttaggaacttttgttataataaaacccattggcttctcttgcactttgaatggatattttaccatgcatgactttgtaacatcacacatagatcactgcaaaatactggttccctgttgttaggcagatcttctaaatactgacatatttcattagaatacatatcaaaaaatcatattccttaaatttcaccattgatttcagcagaaaagtctgtatatattgaaaagtggtcaagctcatgggagtggatacaagttttccaaaattctaatttttacttgaaagtgtaaattttatcactggctacaaatattgtcatttgtttaccttgaagtgacaggctcacttcatacagtttcaagagactgtctgccagatgcctaagtctaaaaccatagtttgtctatcattctttcaagtaaaaatggtggtcggtgaaaaaagaagctgctaaatcaatatgcaacttgaataatcgcccaaatgcttttccttgtgacaaccaccgtactctaccagtgtgcagcagaggcggtttatgcatatttcccatttcttcaaacaagtttaaaaagatgtactcaggatcaggcatggtggcccacacctcccagcactctgggaggccaagacgggtagatcactttaggtcaggagttccagaccagcctggccaacatggcgaaaccccgtctctactaaaaatacaaaaattagctgggtgtggtggtgcataccagttaaaaaaaaaagatttattcaaggactgacatttgatacaattaacaatatttagcctgggcgacagagtgaaaccccatctctaaaaacaaaacaaaacaaaacaaaaacaaaaattagccaggtgtggtggtgcacacctgtagcctcagctactcaggaggctgaggtagcatcacctgagcccaggaagttgaggcggcagtgagctgtgatgcccccaccgcactctagcctgggtaagaccctgcctcaaaaaaaaaaaacaaaaaaaatttaccacttcatcaacgattcttaagtgaaactggctctgttttgattgtgagtgcatggcagtaaagaatgcagtgaccactggtacagtttggtgtcaccgtcctgatttgtgctaaggcgccagcagttttaccaccattttgcaacatcagtgcaagtgtcaacatagggaaaagacaaatacatcttagtagtatcatgaaaataatttttaccccaaagagattccttaaagaagtctcaggaacttttaggagtagtctatggactgcatgctgatatggaatgatttgttttaatctttcatcttctaatacccaaatccactagtctttcctttctccctggtttccttgactgccctgctgtgttttcaatctttttgaaacttctctttcactggtttcattggttttgaatacagttatctcttggtgtccatgaaggattggttctagtactcgcagcagacaccacagatgctcaagtcccttatataatatggtgtagtattgcatgtaacctatgcacatcttcacatacactttaaatcatctctggattactcataatacctaatataatgtaaatgcaatgcaaatagctgctatatagcatattgttttttatttatatttttattattgtattattatttagcttagaatccatgaatgtggaacccacaaatatggagggctgactatacacagtttcctggatttttttctactgagatataatttaccataaaattcacccttcaaagtgtaaaatgtaatgttttttagtatattcaaaaggttgtcgccgggcatggtggcttatgcctgtaatcccagcactttgggagccggaggagggcagatcacgaggtcaggagatcaagaccatcctggccaacatggtgaaaccctgtctctactaacaaaaaattagctgggcgtggtggtgcctgcctgtagtcccagctactcaggaggctgagggaggagaattgcttgaacccaggaggcagagattgcagtgagctgagattgcgccactgcactccagcctggcaacagagcgagactccatctcaaaaagaaaaaaaaaaaaggttgtgcagccatccccactatctatctaatttcagaatatcttcatcacctcaagtagaaaccccatacatgttggcagtcatttcccattctctcttaactcccagagcctggcaaccattcatctactttatgtctctatagattggcctattctaggtgtttcatataaatggcgtcaggcaatgtgtagacctttgtgtctggcttatttcacttagcatgttttcaaggttcatccatgttgtagcatgtatcagtacttcattcctgtttatggctgaataatatcccgttgtatggatactctgcattcttttttttaacatttaaaaattttttatagacaaggtctcactatgttgctcaggctggtcttgaattcctgagctcaaatgatctgtccacctcagcttcccaaagtgctaggattgcaggcatgagccactacgcccagcctggatactctgcatataatctacccattcatcagctgacaaacaactgggttgtttccactttaggaacattatgaagaatgctgctacaaacattcatgcattttgtagagacagggtctcactatgttgcctaggccggtcttgaactcctggcctcaaatgatcctcctgctttggcctcccagagtgctgcaattacaggtatgagcccatgtacaagtttttgtgtgaacatatgtttttatgttttcaattctcttgggtatatacctaggaatggatctcctggatctttttcttttttttccctttgggacagagtctctctgtgttgtccaggctgaagtgcagtggcatgatcttggctcacggcaacctccgcttcccaggttcaagtgattctcctgtctcagcctcccgagtagctgggattacaggtgtgcaccaccatgcccagctaatttttgtattttcagtagagatggggtttctccatgttggccaggctagtctcgaactcctgacctcaagtgatcgacctgccttggcgtcccaaagtgctgggattacaggcgtgagccaccgggctgttgcccacgctggagtgcagtggcatgctcacagctcactgcagcctcaactttctaggttcaagtgatcctcccacctgagcctccctagcagctgggactacaggtgtgcacaggaccggctaatttcttgtagagttggagtttcaccatgttgctcaggctggtctcgaactcctgagctcaagcaatctgcccgccttggcctcccaaagtgttgggattacaggcatcagccactgtgcttggccaatgttcactcttactttctgtgcttacttctggcatgggttggctgactacaatttgaatagacccatctttccgtttctttcaccgaaggcattttttctggctcctagatgttgctgacccccaggatccagtcttggccctccactattcttgctacactgcttctttggaaactcatctactctcaagtaacttaatataatctttatgccaaagacagatccacatctttagttctaacttctttttcagttccacatttcctacttccttgctggacagttttaatttgatatttcattaccatctcaaactctgtataactaaggcataaatttctccctaaatcagccttctctgggctttttttttttttttaaattaacagtgttaccattctccaggtcacacaacattcaaaagtgtgttttcctgccagggcatggtggctccacgtctgtaatcccagcactttgggaggccaaggcaggcggatcaccaggtcaagagttcaagaccagcctgaccaacatggtgaaaccccatctctactaaaaatacaaaaattagccgggcgtggtggtgcatgcctgtaatcccagctactcaggaggctgaggcaggagaatcgcttgaacccaggaggcggaggttgcagtgagctgagatcgtctcactgtactccagcctgggcaacagagccagaatccgtttcaaaaaaaaaaaaaaagtgttttccttcttcatattggttctctgttatctagtcatgaaatcctgttgattcctcctttccagtctctctcaccatcactgtcaccatgaccatcaccactccctttttcctctgctgatttgcagttaaaacccttatggatctcacccttaaatccttgcaatggcctcctacctgatctctgcctgcaccacgtcttcccagcagtcctataccggggtaatcttccttcagctcctgctcagaaaccatcaatagctcccagctgactactcaacagagtcagcaatcctgtctgttctaccttcaaaataaatccaaaatctgaccacttctctccgcctctactgcttcccctggtctgagttgccactatctctggattattattattaatatatcattattatattcaatgtattatcattatatacttgcctcctgactgatctcaccctgcctttgcctcccttcagtctagccttaatgaagcatctagagggttctattcaacttaagtcagcaggtcactcctctgctcaaagccctctcaaggcctctattctcactcagatcaaaaggctgattgccagcacccgcaggttctgtccctctgcccgggccccactgtcctctgactcatctctcaatctggcctctacccttctgctccagccccaaagctttcccttcctggaatgttaagcaggtccagccttggtgccttcacatggtaagttccttgcctggaaggctctttgcacagataagctcaaatccttcctacacctcaggtcctttgtaaaatgtcaccataagtatcagtgaggacttccctatcttatctagaagtgtatacaacactacccctccccaccctgtaaccctcccccatcacacacttcttgttcttctttcctgctttttctatttttcttctcagtacttattaccttttgacataccatatatcttacttttcagtctttcaaagcagggattatcatctactttagtccctaccgtaccccagtgcatagtacagttcctggtacacaaaatttctcaaaaagtattagctgaatggccgaacaatgagtgaacaagtgctctgtactctaggcagtcaatacaatatttattaagcactcactatgtggttagcattgcattaggcattgggggaatatggtagaattttaagaggtgctttctattcttaaggagcaaaatcaaacaatgatgttctatgctaagggctaactgtatggaatagccaatgttgtagaggttaaagagaaatcaatctcgaccacagtggtcgggagaagtagttcttgaacagagaagagatgacggcattccaagggaggataatgtagtaaagacacagcggtaggaaggagcatggggcattcactccaagagactgggctaatttcaagggaggaaaaatattgtaacaaaatggatgggaaagtgaaaaaccaggcagagtctgaaattgataaatgggaaaaaaaaaatcaattgactaggtgtaggagaaggaaaaggacaaattaaagatgtttatgccactgatataatggtcttcaggtcttcaaacctttttgctggcatagctcctagaagaattttgaaaaactgtatatcctcctttcacattttaaagttgccatctaaaccttatgtttttatttctttatttttttattttcttgagacagtacttcactctgttgcccaggctggagtgcagcggcacaatcacagctcactgcagtttcaacttcctgggttcaagtgatcctcctgcctgagcctcccaagtagctaggactataggtatgtgccgccatgcccccaaaacaacagcaaattatgtgtgtgtgtgtgtgtgtgtgtgtgtgtgtgtgtgtgtgtgtgtgtgtttcaagacacagtctcactctgttgcccaggctggagtgcagtggtgcaatcttggcttactgcaacctctgcctcccaggttcaagcgattctcctgcctcagcctcccaggtagatgggattacaactgtgtgtcaccatgcatggctgattttcttttctttttttttttttgagatggagtttcgctcttgttgcccaggctggagtgcaatggcgtgatctcggctcaccgtaacctctgcctcctgggttcaagtgattctcctgcctcagcctcccaagtagctgggattacaggcaggcgccaccacacggggctaattttgtatttttagtagagacaggatttcaccatgttggtcaggctggtctcgaactcctgacctcaggtgatcctcctgccttagcttcccaaagtgctgggattacaggcgagagccactgcacctggccgcatggctgatttttgtatttttagtagagtagggtttcaccatgttggccaggctggtcttaaactcctgacctcaagtgatctgcctgcctcagcctcctaaagtgctgggcataagccaccatccctagtcagtgtgtgtgttttgaggcagggtcttgctctgtcgcaaaggctggagtgcaatggcacagtcatggctcactgcagccttgatctcctgggctcaagtgatcttccgacctcagacccctgagtagctgagaccacaggaatgtactaccacattcagataattttaaaattttttgtagagatggcatcttgctatattgcccaggctggtcttgaactgctgggctcaagcaatcctcctgcctcagcctcacaaagtattggcattacaggtgtgagctactatgtttggccgtgtgtgtgctttctaatgcctattgaaggtgtgttttaagtgcttatggcagatgtctgccatgcaatctaaatggcaaaccaatcagctggatcagtcttacttacaacacacctggcctgtccctcaacttttctattctttcaccaaaatggaagttccttatgttagagaacttacagagaaaaggaagacaaaggaaaataggaaggagagttaagctctgcctgacactgtctacttaagtgatgggtaactgattaggttcagtgcttagaacttcatataatgagatacaaaatctcattactgacccactctgccagctagaagagcacttgtagatcatggacatttaggtggggatatagccacctttgatcctttctgttcactagattaagccttgttgctagtacaggcaggagccaacataccttccacactccagcaatcctgtacaccttgggctgagtcatatgctgaacagttattcatgaatacagattcttacttagaactgaagaattacctgctccaaacccttcattaggtagataagagactaaggtccaaaggggataactggcatgcccaaggttaacagagcagagctcaaattagaatccacatcacctgatttccattctactattcttgccacatgccttggcacttggcagtgacctgggagtgaatcactaataaccagctgtgtgctcttttaaagctacagctctattattctttgatgtccagataacaatctatgctccagcacctgtttatagacataagcacacccatttttatgtttgcttatcctcctattgaaaaatattttaaaagttcattttaatgctaaatttaggtgtactttctttgttaatctaattcttgagcactctgcacccttcagcagttcatttctgaaagttacctccacctaaatagctcaagcattgtgacagctgtgatacaggactcatggaaactgggacaagtgatcaaaaatgtctgagggaggaacaatagaggggacattttaaaggtaagctattggatagttgttacctgtgagaaagaaagaaaaagggttaggttaagaaatgttagttttttactctctcaacccagccaaacaacctaaacttgaactgtcccaaaggcctaccaaaattctttaatttcttcacttaagctgagtgctcttaataagcaagacttctgaggtgtagtgctagtgattaatgttatacacacccgttggctgactggtgaaacctgctgcaataactaaaaattattctataaaaatgtatagacagagagaatgttaaagctaaaagaggccgttgactcatttctttgttttagtagaacaggtgcaacagattgaggcactttaagacatctaaatggctttactagcaaagataaaaatcacacttgcctgtactcagggaattttatcacattctaattctttgtaaatcagtgaatcccctggtgcaacttctagccagattatctgggctttggaatcagaattatctagtttaaaatttagctctgcagcttgggcaaattacttacattctttttttttttttttttttttgagacagagtctcgctctgttcctcaggctggagtgcagtagtgcagtcttggctcactgaaacctctgcctctcaggttcaagcaattctcctgcctcagcctcctgggtagctgggactacaggtgcccgccaccacgcctggctaatttttttgtatttttagtggagacggggtttcaccgtgttagccaggatagtctcgatctcctgacctcgtgatctgcccgcctcagcctcccaaagtgctgggattataggtgtgagccactgcgcccggccgaaaattgagtattcttttaatggattttaagatataaaatctcaggctcagaaatttgagccacctaggggtgagaaattttggcctttgcccgcttcgaactgacttaactaaattaaatctatagaaagtaaaaaataaaggtctgtgaatgtacccagtactctcaggaagaagcatatttgccatgaagctaaaaaagcttcagtttcactccccttccaaggctctggggggtggggtgggggcgggagctagcaacgtgctcacatggtcatatatttttgtaaaacttatagaagatatttttgtattctttttcttaaagaagatatccaagattgtataagcttcagatcccagaaatcctagatttaaaaaaaataatcaaccaccaccccaacaaaattaggcacatgcctgaaaattctgctgctactgccagaattctgcgggtaggggcttcatccaaggtgttcctaataataggcagagtccccagattagttccggtgaggcttttgggaggggttatttggcgcggtgttggtgttggtaggatcctggctgtgaggctgaggcaggcctgaggagggctggggctgacaggtaggcagagttggctgggatgtgaggtgcaaggggtggtacttcggaaacaaactttgaagaggagaaggggcagcaagactgtgagtctggactttgtgatacactgtcacccctagtttagtgtgcctggttagggagaatcaagcagcatggaacccctcttcctttttcactaacatttttctgtatagtggttgaaacccagtgttaagagactgcatgacattggaaaagaaggggaggagaaaaagagtccatatgaggcaagaacagaacgcagccagaattagggcaggcagggaaaggaagggagtgagatgtgggagtcgggggggagttgaggtaacctgcattttatatgctagagctacgtattttagatgcaggggcaactgtttcggtccaggagtggaaaggactgtagaagcaatctagcacagctgtttctcacttgggaaaactgaagccctcagaggcagagggaggaatggggagcggccaggccaggacaggactcagcccccagttcctcttctcaggcgtccgattccttctgatctttctctcctgccctctctgttactgcttcctcctgttcttacccttatatacacttgaagttttatccccattttttatgcttatgggattgtacactttctggttctctctcaagtccaaccagtatgtggtaacctgtctcttcccacttcatttgtggcactggtttgcagtggacaaaaggtccgtgctcctcttctaacctaatctggactgggttgcccaaaggttgccctgccacactgccaagtgcctaattagctgttttctctccaacccctccaaacacttatcatgagtaatttctcttgtctttagagttgccaaatctaatctctgtaaatacaaatgtggtgagacttcttctcaggagtttcagcaaatgaaacaataaactcttttttaccctgctaagattctaaagataaccatgagaatactcctaattatccttataaatttgaataagtgtggttgttgggttctctcaccctttttatatcccttcaaaagaaaatacaagtttgaattctataaaatatttttctggccgggcgcagtggctaacgcctgtaatcccagcactttgggaggctgaggtgggtggatcacaaggtcaggagttcaagaccagcctggccaacatggtgaaaccccatctctactaaaaatacaaaagttagctgggcgtggtggcgggcgcctgtaatcccagctgctcaggaggctgaggcaggagaatcacttgaaactggaaggcagaggttgcagtgagctgagatggcaccactgcactccagcctgggcgaaagagtgaaactccatctcaaaaaaagaaaaaaaaaatttctaatatttatggaatgcactctcttatataccaacatacatttgtagcattttttttccttcagagtatgaagaaatcagtaaaaatgggcaaagcacaaatgacaactaatggattttgttaagtcctatgtgtcactttaagaacttgaaactggctcaaataaaaaccattttatttggttattaaaatgagacttaaaaacttaaaacaagattttaagtgatcttaaaatgtcttatcctacagaagattttagaggcaatgtagtacaaaaagctcttccttttctctgaagaatttattgagtgctttgggagtagggtgagttttttttttttttttaacatatgtttgattcaattaagcaaaaatattgtttcatgtctcactgaactgaatacattctactatccattggttttcaatgttcacttatttattttattttagtagagactgggtctcactgtgttgtccaggttgggttttcaaattttatgtctaacacagtgtgctaaatacaactgagtttcataagccatttttcccacttctgtacatggcactggtctcaacctgtatcatgcataagaattacctaggatgcggccgggcgcggtggctcacgcctgtaatcccagcactttgggaggccgaggcgggtggatcatgaggtcaggagatcgagaccatcctggctaacaaggtgaaaccccgtctctattaaaaatacaaaaaattagccgggcgcggtggcgggcgcctgtagtcccagctacttgggaggctgaggcaggagaatggcgtgaacccgggaagcggagcttgcagtgagccgagattgcaccactgcagtccgcagtccggcctgggcgacagagcgagactccgtctcaaaaaaaaaaaaaaaaaaaaaagaattacctaggatgcttattaaaaatgcagattcccaattcctgaagggaggtcatgccttggcatcttacttagcgaatcagtgctatacagaaagtatgagagactggttcatatcaaagaatattgtgaaactctacactatatttgtgaagatatagaaaacccgttttatggctaaaaatcatcattttactactactaagcttcattattagtagatggagtttttttaaagggtcatttttcacaaagaaaaatttgttttgtcttttaacactttaggactgttacttcatagtttatccggggcagagaacaacagcgggttactctcaaacctgctctggagtttcagactagcagctgacatttttggggacctttctttaagcttgacattgtaaacactttgtatgtattaacccacttaatcctcaaaacaaccttgatgagtaggtatccttatcttacggaagaggaagctgaagcacagacagggttagtgacttacctaaggtcacagtgctggaaggtagcccagctggaatttgaacccagacagcatgtgggttcagagtgttttcatttttaactactctgctatattaccctctctagttttcagtattcatattagcacctcagccttccccagatgactacaaatcccatacatatgtgtatacacacatacccagggtcattcatgaaatctgaaacttcgggtgttcaatttgactttatagaaccttctacctctcctggctgatagtatctctttctcatttcacaaattaaacttcctataacactaccttaaacatgccacccctgctcaaaatactctggtggcttcctacgatctataagatgaaagctaacttccttagcttgccattcaaggcccttcacagtctttccagtcttactgtttattctatccctacttgagcacaaagcatttttttctttgatcatgcatagtccttctttcttcatttttttaagtgtacaattcagtggattttagtatattcagtgttatgcaaccatctccactatctaatgccagaacattttcatctctgctatctaatgccagaacattagaaaccctgtaccgcatagtggccattcccaattcacccttcctcttatcccctagcaaccaccaatctattttctgtctttacgaattagcttattctgggtatttcatataaatggaatcatacaatatgtggccatttgtgtctggcttgtttcatgtcacaatttttcaaggttcatctgtgtcgcagcatgtgatcaggatttcattgttttcttatggctgaataacattccattgtgtggatataacattttgtgtattcattcaatttgtcccaattggtggacaactgggttgtttccacttttggctattataataaagctatgaacatttgtgtacaagtttttgtgtgaatctatgctttcagttcccttgggtgtaaccctaggaatggaattgctgggtcatatggtaactgtgaactttttgaggaactgacaaactattttccacaagtggctgcaccattttacattcccaccagcaatgcttgagggttccaatttctccgtatcttcaccaacatctgtttgtgtgtttttgattattgccatcctagtaggtgtgaaatgatatatcattgtggttttgatttgcatttccctaatgactaaagatattaaacagcttttcacgagcttattggccatgtatatgtctcttttagagaactgtctattcatatccattttgtaaactgggttatctttttattgttgaattctaagagttctttagacatctgaatactagacttatgatttacaaatattttctcctattctgtgggatagctttttactttcttgatagtatcctttggtgcacaaaagcttttaattttgatgaagtccaatttatcactgatcataccagctggaaatctacttttttctatgtcagcatctcaatattacttgatgatctggggagaatttttgaaaatataaaaataatatacataaaattttgatataaaacaagagggccaagacttgaagaaatctggagcttctgttgagacgatgacctggggtcccaatgattactgttaggatcttaatgtacttagtggaaaggttgagaggcgctggcctacggcaggcactcctacagtaagactgaacctaaactgacattggtcagtttacttgggaagttgaccatatgttttttgtttgttttctcccaggctatagtacagtggcgtgatcttggctccctgcaacctctgtcttccaggttcaagcagttctactgcctcagcctcctgagtagctgggattacaggtgtgtgctaccacacccagttagtttttgtatttttagtagagatggggtttcaccatgttgcccagggtggtctccaactcctgacctcaaatgatccgcccaccttggcctcccaaagtgctgggattacaggcgtgagccatggtgcctggccgatggtatacattttaaaaataaatgtatgctatctaggagttcccatgttttgctattatttcctattctttcagagcaccaatagtcaatgaagaattaaaagtgaagtcagattatcctttagctaaagaatggggatttctagtagtacggttcaatatttttggtcagggccccatatgtttatactccaactttaatcaatcttttccacttctgactgagggatatgctgtaggaactttatgtgtactatttcagttggcctctgctggcttataaacagtagttgatatttagggacagtaatccagagtagtgtccaagtccatctgagtttagaattgctaccacagcagaaattggaaacctcgagagttataagccatttaccacatctacatggatgccacttctccttaaagcatatacaaatatatagagatcggaactttaaccttctgggatctaatatcttcctaagatttgcatacagaatgtacacatggatcttctattatagcaaattcttttttttttgagacggagtttttgctcttgttgcccaggtggagtgcaatggcgcgatctcggctcactgcaacctctgcctcccgggttcaagtgattctcctgcctcagcctcccaagttgctgggattacaagcgcctgccaccatgcccggctaattttttggatttttttttttagtagagacagggtttcgccatgttggccaggctggtctcaaactcctgacctcaggtgatccacccaccttggctttccaaagtgctgggattacaggtgtaagccaccgcgcctggccagcaaattcttaattgcctgtaaaattactatctcactatgtattattttcggaagcagatatgaccgtgtacagttttcttataaaagtgccatagcaacatgaatactcagtactgacaagcatctttaattgacaaaagctttttttttttttttttttgagacggagtctcactctgtcccccaggctggagtgcaatggtacgatctcggctcactgcaacctccccctcccaggttcaagcgattctcctgcctcagcctcccgagtagctgggattacaggcgtgcaccaccgtgcccggctaatttttgtatttttagtagagacagggtttcaccatgttggtcagaccagtctcaaattcctgacctcaggtgatccacccacctcagcctcccaaagtgctgggattacaggcatgagccactgtgcccggccatgacaaaagctttttatttttaatttaatcttagcctatggttaaagtgaagcatttaaatagcctacttgatgacttcatgtgagccaagaacaaaacctgggtctgataatcttctacctactctctgacaaactgtccctacaattataatgcaatgacatttctatgagcagcctctattactaacagttattatacacttggttcttatacagaatacttcattcaagatgtccagagcttcatctagctcactatcttcaaagcttctgcttgcaaagggaggaacttacaccatcagtccattttaagccaaaaggaaattcttacccagaaattaattacttatcctttttttagtgtgttactctccacacccccttcctgttttgaaagcagggagaaataatgatgtatacagtatcttctgaactatacaaattacagataagctttaaaggtctctaggaagctactactgtttcaccataagaactccaagtgggccctaaatctcctggtccttgacttcagccactgctaggaaaatgtcaatacacacacactcctatcttaaaaactctgtgcttgagaagaaggatggtttgctttgatattagactagctttccctggcagctgcaactagggaacctaatttttgttaaagctacaagtcacaatttattacttatattaagaaacgtaaggagatcaatcaggagaatgctatattgcttaaggtggttgatgcaacacaaaaaagatggagccattagtccaataaccttattaaaaaaattcctcctctgggtgtggtggctcacgcctgtaatcccagctactccggaggctgaggcaggagaattgctggaacctcggaggtggaggttgcagtgagctgagattgtacctctgcactccagcctgggcaacaaagtgagactccatctcaaaaaaaaaacaaaaaacacaactcctctgtatctaaccttcttatcaaaagtgtgaaacagatggtgtatgtgatgatcatgataatgaacataataacaatgtgaacataataacaatgtgaacataataacaacaacatctctttattcctcagataacatccagagcaggaactctggagtcaggcagaactgaatgtgactttaagcaagttactcaatttttgtaggcccaactttcctatctgtcaggcctacaaatgggaaaaactaaaccataaggaatctaagagttttgtttattccaaagagtacaggatacaatgacctttctttttttttctgtcacccaggctggagtgccatggtgcaatctcggctcactacaacctctgcctcctgggttccagcgattatcctgtctcagcttcccaagtagctgggactacaggcatgtgccaccatgcccagctaatttttatctttttaatagaaatgggtttcaccatgttggccaggctagtctccaactcctgacctcaggtgatctgcctgcctcggcctcccaaagtgctgggattacaggcgtgagccaccgcgcctggccaatgacattccaaaaaggtactatcaggacatcaagtactacaaaataggcaccggaagaaatatgctaaattagtaatcctcaaactctagagtaataagtataacctggcttgctagaacagattactgggcactatcctcagagtttctcaatcagtagttttggagtagaccaaagaatctgcatttctaacaggctcccataagatacagatgctgttggtcacaagaccatactttgtgtctccttggaaagggagaaaataaatatttattgacagggaagggaagaacaattatttaagatgatcttgggtcaagcatggttaagtgtttacatagtttatcttatttagtccttacaacatcccaatgagcaacagttctcaaacttttccaggccaaaggagaatgaacacatcacaaaagagtatgcctaagcagtcttctagaaatagaaaatttctttgatgactgtattactttaaaaattcatataaattttgtattctgtttcaaaatactgctgctagttatgaatgaaatataaatctaaaaatatttatcagataaattgcttaactcttcattgcaattctttagtaaaattggcctgtgggaatataaagaaatgggtggttgaactctggtaatgagcttatggtgaaacagctagtacatatttatttgatccagcatttgaacctaggccagaagatctctaaagacaatgcacatgttactaccttactctgtcattgacctccacctacataaaaggcctatcatgtttttctctactgctcttttacgatcttctattgttctggttaaagaggactacttgctgttcctcagatttttctcaaaatttttttttctttttccttagattcagggacagacagggtcttactcttcctgatctccagattactctttgtagctggaaagctcctccgctttcatctctactttactagaatcttaccatcccctttaaggcccagctaaaatgtcactttctttcagaagaccaaataccattattgattgattgattgactgactgagacaaggcctcactcctgttgcccaggctggtgcagtgatgtgatcatggctcactgcagccttgacttctggggctctggtgcatcctctcacttcagtcccctgagtagctgggactacagacacatgctaccatgcccagctaatgcaaatatcatttttaaaaggcgactgaactggacgcctcatatgagctcccatggctgcccagacatgctttcatgtcagtgattatataattttttttgtaaattagcttatgcaaataatcttgtggaccctaacttatacatgcttctgcaaagaaacatgtttaacgataaagttatactggaattcaaaacatgatgttttatggaatgtaagacattggggtatagataaaaagtggttggaaaaaatatatatatttatttttagagatgaggtctccttctgtcatctaggttggaatgcagtggcatcatcatagttcactgcagtctcaaattcctgggctcaaatgatcctcccaccttggtctcctgaatagctgggactacaggtgcatgccatcatgcctggctaattaaaaacaaaatttatttatttatttttgagacagaatcttgctcttttgcccatgctggagtgtagaggtatgatcttggctcaatgcagcctcaacgtcctgagttgagcggaggaccccgggctccagtgatccttccacctcagcctcccaagcagcagggactacagacatatgccacccagcccagttaattttgttcactttttgtagagatgaggtatcactatgttgcccaggctggtcttgaactcccggactcaagtgatcctcttgctttggcctcccaaagtgctggggttacaggcgtaagcaccgtgcctgacctggaaaattgtatttaaaagaaattcttggccaggggcaatggcttatgcctgtaatctcagcactttgggaggctgaggctggtggattgcttgagctcaggagtttgagaccaccctgggcaacacggtaaaaccctgtttctacaaaaaatacagaaaaaattagccaggcatggtggctcacgcctgtagttccagctactcaggaggctgaggctagagaattgcttgatctgggaagcagacgttgcagtgagctgagattgcaccactgcactccagcctgaatgacagagtaacaccatgtctcaaaaaaaaaaaaaaaaaaaaagaaagaaagaaaaagaaattcccaaacgggaaggtttagattatgatgaaatttgtggctatgaactagaataaagtctaaacatgtagaagtaatatacctagacttttaaaattggaagggtccttgaaagtcatttaggacagtctccctattttatagcagtagaatttttggaccctgctttgtattatggtcagaagtctctttgtttcattaatgctgcttaattttcatctagcttacctttggtctctttatattgtgattccagtgctacctgaagaaagctttctgcactgaataatggatttttttctgaagggccagacctgactttggtccaaagggaactaaactgcaggacctcctttgattttaaaggtcgctaactttagtgatgctaattctgaacctctgagggatgaattgttacccccagctgcaatttttgatcagtctaacagccaagccaccatcatggccaagactagggaacactcacagtaagcagggtggccatctgctccatttggccagctctagctttggacactgagaggtggctcatatactgattgcatcttggtttaaccactgagagtgaaaagagaaaaggacaccaagggcatttatcttttccagccccacatgctcctcccaatctcagcggtaaagagcaggaactctggagtcaggcagaactcagtgtgacttactcaatctttgtagggctgactttcctatctgtaccaggagatcttaacagcactataattacctcacgggtaactggcaggtttaggtggggaactgcctgttgaccatttaggacaatgtctggtacacagaaaatccttaataaatgccagctattactattatcaaggggtagcaacattaacatacccaatcaacgtgaataagatcctcttctctgtataaccttttccatggcatttcattccctccctgagtcagttatgataccaatactgtctcctaaaactctgtctttagcccagcttctttcctgagctcaagaccaggcttcacaactcccaagatacctggaagtgcccttggaacctaaagtgaaccccaaaccagat

SEQ ID NO: 229 - DNA, 4661 bp, Homo sapiens
gctggacttgcctgcggtgacacctgctcccctctgagagcttcaggttctccggcctgccttcactggtttgtgtccagagccggactgattctctcaatttgcgatcttcagcctgttaaacaagaaaacgaaaaaccccttccagaaaacatggatgcatttgaaaaagtgagaacaaaattagaaacacagccacaagaagaatatgaaatcatcaatgtggaagttaaacatggtggttttgtttattaccaagaaggttgttgcttggttcgttccaaagatgaagaagcagacaatgataattatgaagttttattcaatttggaggaacttaagttagaccagcccttcattgattgtatcagagttgctccagatgaaaaatatgtggctgccaagataagaactgaagattctgaagcatctacctgtgtaattataaagctcagcgatcagcccgtaatggaagcttctttcccgaatgtgtccagttttgaatgggtaaaggacgaggaagatgaagatgttttattctacaccttccagaggaaccttcgctgtcatgacgtatatcgagccacttttggtgataacaaacgtaatgaacgcttttacacagaaaaagacccaagctactttgttttcctttatcttacaaaagacagtcgtttcctcaccataaatattatgaacaagactacttctgaagtgtggttgatagatggcctgagcccttgggacccaccagtacttatccagaagcgaatacatggggtcctttactatgttgaacacagagatgatgaattatacattctcactaatgttggagaacctacagaatttaagctaatgagaacagcggctgatacccctgcaattatgaattgggatttattttttacaatgaagagaaatacaaaagtgatagacttggacatgtttaaggatcactgtgttctatttctgaagcacagcaatctcctttatgttaatgtgattggtctggctgatgattcagttcggtctctaaagctccctccttgggcctgtggattcataatggatacaaattctgacccaaagaactgcccctttcaactttgctctccaatacgtcccccaaaatattacacatacaagtttgcagaaggcaaactgtttgaggaaactgggcatgaagacccaatcacaaagactagtcgcgttttacgtctagaagccaaaagcaaggatggaaaattagtgccaatgactgttttccacaaaactgactctgaggacttgcagaagaaacctctcttggtacatgtatatggagcttatggaatggatttgaaaatgaatttcaggcctgagaggcgggtcctggtggatgatggatggatattagcatactgccatgttcgaggtggtggtgagttaggcctccagtggcacgctgatggccgcctaactaaaaaactcaatggccttgctgatttagaggcttgcattaagacgcttcatggccaaggcttttctcagccaagtctaacaaccctgactgctttcagtgctggaggggtgcttgcaggagcattgtgtaattctaatccagagctggtgagagcggtgactttggaggcacctttcttggatgttctcaacaccatgatggacactacacttcctctgacattagaagaattagaagaatgggggaatccttcatctgatgaaaaacacaagaactacataaaacgttactgtccctatcaaaatattaaacctcagcattatccttcaattcacataacggcatatgaaaacgatgaacgggtacctctgaaaggaattgtaagttatactgagaaactcaaggaagccatcgcggagcatgctaaggacacaggtgaaggctatcagacccctaatattattctagatattcagcctggaggcaatcatgtaattgaggattctcacaaaaagattacagcccaaattaaattcctgtacgaggaacttggacttgacagcaccagtgttttcgaggatcttaagaaatacctgaaattctgaaacactgcattcaactgggaattggaaacacactgaaatatttcatagtcttacttccaattgagttagcaaaaaaaaaattaataacttgagacttttaagttattaattttttaaaatgtgcttctccatctaaattttgcttagtctacatctcacttgcttatactattcctccattgatgcacatgcccattaacctaggaaagtagttttcaaatcatgctccttagaaggatgtggagtagagggaagggaaggattggtgatagcagagctccaggcctcccttccagtcagaacagttgagcagtttacaaattagtgtcctgcctctttgctagcaaatgcttttagacactgtggcagtgagtcatcctctaatttctatgactgcattttaagggaaaagataaaattcttccccttaaaattcgttaaagtttttgaataatctggggtcctaatgtgttctggtcatccctgattgatgctatctgaataaagttataagctcctataagccataatttacttttaaacattttatttttttcaaaacatttgagaacctttcttaaagcggttacattcaagctacagaaatatcgaagaattaatgattgttcaccaagcagcatgctgtacatgaagctattacaaatgcttacaatcccactgaaatgccagtgtcttcatctcttcataaaggtgcctaacacgaggtatacagtatgttcagtacactggaatagcatgctcgattggaaacaaagcatctatctctgaaagctgtttggcgatgaaggagattcttcgtgttgtgttcaaagatgagtccctctcccttgtccagaaaaatgccacttgtatcaactttactgcctttgtcggcagaattggtacttaaccttattcttattttagcgggaaggcccgaaatcatattatgtagatttaacagtgttgattctccaaaattcagaaccacgataaagattctgtcgatgccatccagctctcttgtgtacacaacatagtggctgtcattcctcaaatggcaaaaccagcccctgttgaggagtagctcattggcatgaagtagacttaaatcttgatataacttcaaagccgatctgggctgagtcttttggacctatttttttaaaaaagtatttacgtaagtgtttgattctaagaattgtttgtaagtatttttaatatattgtaaggagttatttacccaaaacacttgctccaattttgccccttataattgccaaattgtaagcatcaataagtaggtaagaacaatttatataaaaactgatagaaatgacaaattcggggtttcggcttgtccgggagtcaataagtacgcacagtgctctgctacattgtagagtttctgtagagatcaaatttgactccactttaggagtcccaaagcaaatgtccatgtctaagatgaatatttaacttgcatagtcattctgtgctatattgtaactgccagatggccagaaagaaggcaacagtggactcagacttctgaggaatttgggtttgttcccctttgtagactaatgtgtaggttgctgttgtgcgaagatcgtgtaactttagcagacatgtatttcttgcacagctaatagaagacaaagttgaaaaaaaggatgcaaaataaaaagctgcctaaggtgaaagttagaaattgtagacttttttttaccataatagtatgtgttcattgaagatgatttgggtttattttacagctatataaaacataatttgatgatgtacttctaacctttcaagcattttctgttattgactatataatatagcctccataaatgtttttaatgacaatattctgttgaacggttgtaccatactcagccatgccctttcattttgacgatagtgtttctaatattttgtatttttattcccctccccccatttttgtattacttaagatagattatcagaaagacagttactttgtcaaagagtatgggcacttgatacataatgccaaattattcttcataagagctgttgccaaatcagtgataatgttcatttaattgtattcttgccagccatgtttactggggtgatagttgttattgtggttgttattgttctttaggggtaggttcccaatatgtggtctttaaataattatctaatggtgtttaaaaagatgtttattctgtttgtcaggtacaaagatatttatgatacatgtatgacttgtctaagttattaacattttctctagccttaggtaatgcatgaaagcacatgtttcagtgccactcacataagaagtgcccggtaagtgttagctattattgtctacttgagttactactttctaaaagtatgttgaagtctttttctgtaattgcagatttgttgattttgcatttgagtattttctatattttgaagctgttagatgcatagtcatgatttttggtggaatgttttatcaatttttgaaaattgcctttgtctcatataatgcttttcatattgaactatattttgtctgctattaaatacttccaagcctg

SEQ ID NO: 230 - DNA, 5839 bp, Homo sapiens
gaattcttagatgtttactattttagtgggtataattgaaaatggtatcccccaaaaattggcagttgaaactgccagaatttttaaatgagttgttctatttcttccttacctcattccataaaatctactttcaagaaggggttgaggttaactgtgctgaaataagcttctctgagctaatcactaaaagaaatagattcataaggaatgaagccagataagaaagtgagggaagaggcatctgttgtcctcactgtggtggtatatatccccgtggaggctgaaaaacatctgtgcttcatgaaacccttccgtgaaagaattatgcgtctctaccagacatttcaagctctttaaaaaaagatgcattttaaaaagacaattttccatactagcatttaacttagcatttggcttagttttattctgaattaatttaagtttcctatgaagtagatttcaagctagatgtggatttctgcatgttttataaagcataccctttccctttgaaatggtaactccatgagtttggaagacaggaaagaagacaagaaggttgtatttaaaagttaagtccggatataagcaaaaacaaacaaaaatctcaggaaaatctccatttcagttggaatatggcaatgttctttgaagaatgcaaagcctccaggggaaaaatagggtttgagtatggtttcctgaatgtcgtaattaactttattatttttattttatttatttacttattttgagacggatctcactctgtcacccaggctggagtgcagtggcacgatcgcggctcactgcaccctccgcctcccgggttcaagcaattctcctgcctcagcctcctgagtagctgggattataggcatgcgccaccacacccagctaatttttgtatttttagtagagatggggtttcaccatgttggtcaggctgatctcaaaaccctgaccttgtgatccacccgcctgggtctcccaaagtgctgggattacaagcgtgagccaccacacccggccggacaaattaaactttaagcatgtaaaacctagtagatttccatttctgttaatatggaaaaataaccagaaaactctcctgctacaaaacccatagaactgctgaagaaaacatagcaacactcctttatgtgtattacttagatcataagaaaaggaaagcaatccttagaggaacaacacaaaaaaagtcctgacatcaaggctgccctagcgatgatgttgtggtggcgggtgtgcaggttatgggagggcttatggttcctcaaaccaaggggcctgtgattcaattgcaaggaaagagcacaaggcacaaggctaaggtcttaggttcacttgaagtgggaatttggaaatgagatcccctgaacaaagccaagactttgaagaagcatacatatgttggattttaaaaaatgccatcagaacagtgagattccaaggaactatgcctatgttagtctggtctctggatggggggcgggagaaaggctctcctgagaacttataaatgcagattttcattttaacaggttatggtctgaatttatactactcacatgatccacggatacctaaagtaaaatactaaagtaaaaagtggtccccagaaggtaatactcccaggttgccttagcagtggtaaactcaaaacttgtctaggaggaatgttcaatccaggcagaagaggattcctacagataaattatctctgaagattagctcagagttcaaaatttgccgtagaaaagagtcaacagccacaacaaatagctctggtgttactccaagaacttttaagaatcattaagtagataaaaagaactatctttaaattgattaaagaaacagtaccaaataatgtttaaaaaactaaggaaagaacattatgacaaaagttcacacatattcttaaagagattaaactaataaaaatgaataaatacataggtgttgaaactaaaagctagcagaatatttattaaaaaagtgaaaacctccggagtgatatgattctaatgagtaaaaatctattaaaacggttttaataaggtagagtaaaaattaggacagtcatgccacacagatttcactttattttaaagtctcccctgatttaaaaataatactataataatcctaaggttaaagaacatcattgacttacagatatccagatgtatattttgtagtaaaaaaactgaaaagcaattttcatatgaagtatgcagtagtaaattgagatgattttccagattaaactaaagacttcgaatgtaactttagatactaatggcacaattggaacacagtctacatataataaatatctctataaatatgagcaattttctatgatatgttttgtttacagattataacatatagtatttttcacatacacatatcttcttcattttattaaattggctttattggtggttgatatggtttggctctgtgtccccacccaaatctcatcttgtagctcccataattcccacatgttgtgggagggaactgatgggagatgactgaataggggggtgggtctttcccgtactgttctcctgacagtgaatgggtctcccgagatctgatggttttaaaaacgggagttgggccccgcaacttgctccacttagttctctgcctccgcacggcagccccggccatagccgcctcctagcccactgccaccacctcttagcataagatggctgtgccacccatgtatgccaatcttggcaaatctgccagggatgtcttcactaagggctatggatttggcttaataatgcttgatttgaaaacaaaatctgagaatgggttggaatttacaagctcaggctcagccaatactgagaccaccaaagtgacgggcagtctggaaaccaagtacagatggactgagtacggcctgacgtttacagagaaatagaacaccgacaatacactaggcaccgagatgactgtggaagatcagcttgcacgtggactgaagctgaccttcgattcatccttcttacctaagactgggggaaaaaagatgctaaaatcaagacagggtacaagcaggagcacattaccctggactgcaacatagatttcgacattgctgggccttccatccgggctgctctggtgctgggttacaagggctggctggccggctaccagatgaattttgagactgcaaagtccggagtgacccagagcaactttgcagttggctgcaagactgatgaattccagcttcacactaatgtgaatgacgggacagagtttggtggcctcatttaccagaaagtgaacaagaagttggagactgctgtcaatctcacctggacagcaggaaacagtaacacgcgtttcgaaatagcagccaagtatttgattgaccctgaagcctgcttcttggctaaagtgaacaactccagcctgataggtttaggatacactcagaccctaaagccaggtatcaaactgacactgtcagctcttctggatggcaagaacgtcaatgctggtggccacaagcttggtctaggactggaatttcaagcataaatgaatactctacaattgtttaattttaaactattttgcagcatagctaccttcagaatttagtgtatcttttaatgttgtatgtctgggacgcaagtattgctaaatatgttacccctccaggttaaagatgattcagctttaagatgttaccctttcagaggtacagaagaaactcatttccaaaaaaggccctttcagtggtagacttgggggaacttggcagccactttgagatgccaggtttcttttttctctagaaatggctgcaagtggaagctgataatatgtaggcgctttgtaagttcatattgagtaaatgaatgaaattgtgatttcctgagaatcgaaccttggtttcctaaccctaactgatgaggggcttgctgcttgatggtgtgtacaaactcacctgaatgggactcttttagacagagcttcatgaccttttcccagcccagttcatctttacctcttttacaccaaaaggtctgcagggtgtggtcactctttcttttgtgccattttggggtggagagggtggatgtgatgaagccaataattcaggacttattccttccttcctgtgttgcgttttttagcccttgcaccagagtatgaaatagcttccaggaactccagctataagcttggaagcgtctgtgtgattgtaatcacatggtgacaacactcagaatctaaattggacttctgttatattctcacccttcaatttgttttttagcagtctaatgggtacattttagagtcttccattttctgtggaattagatcctccccttcaaatgctgtaattaacatcacttaaacttgaataaaatattgaaacctaaaaaaaagaaaacaacaacaacaacaggagttaccctgcacaagctctctttttgcctgctgccatccacataaggtgtgacttgttcctccttgccttccactatgattgtgaggcttccccagccatgtggaactgtaagtccaataaacctctttcttttataaattgcccagtctcaggtatgtctttatcagcacaatgaaaatggactaatagagtggtataaaaggttaagtggtagatccagaaaataacctataatttctgattccaaatcattttttttccaatgaatcatttttttgcaacagcaagcagtgggggacttatcagctagccacatttttttttaatcagatactgcatcattgtagacttccagagcacttaggaaaccacaactatagatctttgtggaatatacaatttcggcaaggacaagccaaatttttcttgaataattgaaaacatagcccagataggaaccagtgtgatggaacttggttctccttcattttttccttattcaattcttcattcaaagattgaatggggagtgagataaaatcacacataacctgtcagtcatagcactgtcgagttagctattaaatatttacaaaatgtaagactgtcactgtactgtgagtttcttgaggaatgagaacaagtcttgctcactatatatatatatatttatatattcagtgtatatatatattcagtgtatataaatatattcagtgtatatatatattcagtgtatatatatatatattcagtgtatatatatatattcagtgtatatatacatatattcagtgtatatatatatatatatacatatataaaatatatacactgtgtacaacctcacacaggacttcaaaactagtagacactcagtgatatttactgaattgacaaattaactaaattcaactgctattcatttctttctttttaaatatataaaagtagtaatacagttttataatttgatatgtgttacatatctttcatcaaagcaacataaaatgctctatacagatctccagtttggggctgggcatggtggttcatgcctgtaatcccagaactttgggagggcgcagcgggatgatctgttgagctctctcagggaagtaatttcagcaagtgacaattttaaaaagctggaggtttcttcgttttgtttaatttggtttggttttgagacagatctcgcccaggctgtagtgcagtggcatgagctcaagcaatcctcctgcctcagccttccgagtagctgggactacaggctcacactggctaaattttgttgttgtttatagtagggacaaggtctcactacattggccttgctggtctccaactcct

SEQ ID NO: 231 - DNA, 128 bp, Homo sapiens
gccccagggccgccgggcggaaggcggaggccgagaccagacgcggagccatggccgaggtgttgcggacgctggccggtgagtgcaggcctcggccccgggtgcccgcgaggagccgctaccgcagg

SEQ ID NO: 232 - DNA, 1078 bp, Homo sapiens
gtgtcgcgcggcgcggtggcctcggtcggtaccctgggcgcggacgagctgcctcattagtattcgtacccacgaggcggcgcacggggccctcggggacagcgagcgtcgcgccatggcttatcactcgggctacggagcccacggctccaagcacagggcccgggcagccccggatccccctcccctcttcgatgacacaagcggtggttattccagccagcccgggggatacccagccacaggagcagacgtggccttcagtgtcaaccacttgcttggggacccaatggccaatgtggctatggcctatggcagctccatcgcatcccatgggaaggacatggtgcacaaggagctgcaccgttttgtgtctgtgagcaaactcaagtatttttttgctgtggacacagcctacgtggccaagaagctagggctgctggtcttcccctacacacaccagaactgggaagtgcagtacagtcgtgatgctcctctgcccccccggcaagacctcaacgcccctgacctctatatccccacgaaggccttcattacttacgtgctcctggctgggatggcactgggcattcagaaaaggttctccccggaggtgctgggcctgtgtgcaagcacagcgctggtgtgggtggtgatggaggtgctggccctgctcctgggcctctacctggccaccgtgcgcagtgacctgagcacctttcacctgctggcctacagtggctacaaatacgtgggaatgatcctcagtgtgctcacggggctgctgttcggcagcgatggctactacgtggcgctggcctggacctcatcggcgctcatgtacttcattgtgcgctctttgcggacagcagccctgggccccgacagcatggggggccccgtcccccggcagcgtctccagctctacctgactctgggagctgcagccttccagcccctcatcatatactggctgactttccacctggtccggtgaccccctggccccagatggcactgagtttttcattcattgaagatttgatttccttgaaaaaaaaaaaaaaaaaaaaaaaaa

SEQ ID NO: 233 - DNA, 1349 bp, Homo sapiens
cggccgcccgcgagcggcgtgccacgtacggctccggccgaagcgacggcctctgctagggcacaagagagacgggcgctcgcgtctcgcagtcctcttccgtcagtgtcttttgcttcgactcccggcggagcgcgcaacgtggagtgacgtgcaggggccaagtgcaacccaggcagccacggctgtttcggagctcaggactctaaaatggcagagcagctttctccaggaaaggcggtggatcaggtgtgcaccttccttttcaaaaagcctgggcggaaaggggctgctggacgcagaaagcgcccggcctgcgacccagagcccggagaaagcggcagcagtagcgacgaaggctgcactgtggttcgaccggaaaagaagcgggtgacccacaatccaatgatacagaagacccgtgacagtggtaaacagaaggcggcttacggcgacttgagcagcgaagaggaagaggaaaatgagcccgagagtctcggcgtggtttataaatccacccgttcggcgaaacccgtgggaccagaggatatgggagcgacagctgtctatgagctggacacagagaaagagcgcgatgcacaagccatctttgagcgcagccagaagatccaggaggagctgaggggcaaggaggatgacaagatctatcggggaatcaacaattatcagaaatacatgaagcccaaggatacgtctatgggcaatgcctcttccgggatggtgaggaagggccccatccgagcgcccgagcatctacgtgccaccgtgcgctgggattaccagcccgacatctgtaaggactacaaagagactggcttctgcggcttcggagacagctgcaaattcctccatgaccgttcagattacaagcatgggtggcagatcgaacgtgagcttgatgagggtcgctatggtgtctatgaggatgaaaactatgaagtgggaagcgatgatgaggaaataccattcaagtgtttcatctgtcgccagagcttccaaaacccagttgtcaccaagtgcaggcattatttctgcgagagctgtgcactgcagcatttccgcaccaccccgcgctgctatgtctgtgaccagcagaccaatggcgtcttcaatccagcgaaagaattgattgctaaactagagaagcatcgagctacaggagagggtggtgcttccgacttgccagaagaccccgatgaggatgcaattcccattacttaggtttcccataattcttaaatttaaaaaataaacgttttgttcttttggaagtcttacttcgtgtccttcctttgtagagaaagtgacagagcaggcgggtggtgaag

SEQ ID NO: 234 - DNA, 1254 bp, Homo sapiens
gaattcggggcggcggcggcggaggctgccatggacgacgaggaggagacgtaccggctctggaaaatccgcaagaccatcatgcagctgtgccacgaccgtggctatctggtgacccaggacgagcttgaccagaccctggaggagttcaaagcccaatttggggacaagccgagtgaggggcggccgcggcgcacggacctcaccgtgctggtggcccacaacgatgaccccaccgaccagatgtttgtgttctttccagaggagcccaaggtgggcatcaagaccatcaaggtgtactgccagcgcatgcaggaggagaacatcacacgggctctcatcgtggtgcagcagggcatgacaccctccgccaagcagtccctggtcgacatggcccccaagtacatcctggagcagtttctcgagcaggagctgctcatcaacatcacggagcacgagctagtccctgagcacgtcgtcatgaccaaggaggaggtgtcagagctgctggcccgatataagcttcgagagaaccagctgcccaggatccaggcgggggaccctgtggcgcgctactttgggataaggcgtgggcaggtggtgaagatcatccggcccagtgagacggctggcaggtacatcacctaccggctggtgcagtagctaccgcctgacagcccctagaggcggacacacagcgacccccatccctgcaggacaaacgcccctgccctgccagaatccggcccccacagctctcacggctgctgctcctctggactccccaaggcaggtggcctccacccacgttctcccgtcctggggtgaggcttcctgtggcccagcccgccccattcacctgtggatttgtgcgagatgcagcctcagaaggaacaaggcccccagagggaggtcacctgggggcaactggtgccgggtcttcacccagaccacgctgggtcccctctgttgggggtttggggtccgggtctcccaccagccactgcttcctcctgggccctcaattccacccctcgtcttccctccctcggggccctgatgcgtggcggcccccacccggcctcggctctttactccattcacagccatgcacgcgctcaagtacaccagggtgcgagatgccagctctggagttctcggttgttgtaggaggttgggtgttttcaaatggtaaagatgttttgacgaaataaatttgcttgatacagaaaaaaaaaaaaaaaacccgaattc

SEQ ID NO: 235 - DNA, 3678 bp, Homo sapiens
gtgaagacatcgcggggaccgattcaccatggagggcgccggcggcgcgaacgacaagaaaaagataagttctgaacgtcgaaaagaaaagtctcgagatgcagccagatctcggcgaagtaaagaatctgaagttttttatgagcttgctcatcagttgccacttccacataatgtgagttcgcatcttgataaggcctctgtgatgaggcttaccatcagctatttgcgtgtgaggaaacttctggatgctggtgatttggatattgaagatgacatgaaagcacagatgaattgcttttatttgaaagccttggatggttttgttatggttctcacagatgatggtgacatgatttacatttctgataatgtgaacaaatacatgggattaactcagtttgaactaactggacacagtgtgtttgattttactcatccatgtgaccatgaggaaatgagagaaatgcttacacacagaaatggccttgtgaaaaagggtaaagaacaaaacacacagcgaagcttttttctcagaatgaagtgtaccctaactagccgaggaagaactatgaacataaagtctgcaacatggaaggtattgcactgcacaggccacattcacgtatatgataccaacagtaaccaacctcagtgtgggtataagaaaccacctatgacctgcttggtgctgatttgtgaacccattcctcacccatcaaatattgaaattcctttagatagcaagactttcctcagtcgacacagcctggatatgaaattttcttattgtgatgaaagaattaccgaattgatgggatatgagccagaagaacttttaggccgctcaatttatgaatattatcatgctttggactctgatcatctgaccaaaactcatcatgatatgtttactaaaggacaagtcaccacaggacagtacaggatgcttgccaaaagaggtggatatgtctgggttgaaactcaagcaactgtcatatataacaccaagaattctcaaccacagtgcattgtatgtgtgaattacgttgtgagtggtattattcagcacgacttgattttctcccttcaacaaacagaatgtgtccttaaaccggttgaatcttcagatatgaaaatgactcagctattcaccaaagttgaatcagaagatacaagtagcctctttgacaaacttaagaaggaacctgatgctttaactttgctggccccagccgctggagacacaatcatatctttagattttggcagcaacgacacagaaactgatgaccagcaacttgaggaagtaccattatataatgatgtaatgctcccctcacccaacgaaaaattacagaatataaatttggcaatgtctccattacccaccgctgaaacgccaaagccacttcgaagtagtgctgaccctgcactcaatcaagaagttgcattaaaattagaaccaaatccagagtcactggaactttcttttaccatgccccagattcaggatcagacacctagtccttccgatggaagcactagacaaagttcacctgagcctaatagtcccagtgaatattgtttttatgtggatagtgatatggtcaatgaattcaagttggaattggtagaaaaactttttgctgaagacacagaagcaaagaacccattttctactcaggacacagatttagacttggagatgttagctccctatatcccaatggatgatgacttccagttacgttccttcgatcagttgtcaccattagaaagcagttccgcaagccctgaaagcgcaagtcctcaaagcacagttacagtattccagcagactcaaatacaagaacctactgctaatgccaccactaccactgccaccactgatgaattaaaaacagtgacaaaagaccgtatggaagacattaaaatattgattgcatctccatctcctacccacatacataaagaaactactagtgccacatcatcaccatatagagatactcaaagtcggacagcctcaccaaacagagcaggaaaaggagtcatagaacagacagaaaaatctcatccaagaagccctaacgtgttatctgtcgctttgagtcaaagaactacagttcctgaggaagaactaaatccaaagatactagctttgcagaatgctcagagaaagcgaaaaatggaacatgatggttcactttttcaagcagtaggaattggaacattattacagcagccagacgatcatgcagctactacatcactttcttggaaacgtgtaaaaggatgcaaatctagtgaacagaatggaatggagcaaaagacaattattttaataccctctgatttagcatgtagactgctggggcaatcaatggatgaaagtggattaccacagctgaccagttatgattgtgaagttaatgctcctatacaaggcagcagaaacctactgcagggtgaagaattactcagagctttggatcaagttaactgagctttttcttaatttcattcctttttttggacactggtggctcactacctaaagcagtctatttatattttctacatctaattttagaagcctggctacaatactgcacaaacttggttagttcaatttttgatcccctttctacttaatttacattaatgctcttttttagtatgttctttaatgctggatcacagacagctcattttctcagttttttggtatttaaaccattgcattgcagtagcatcattttaaaaaatgcacctttttatttatttatttttggctagggagtttatccctttttcgaattatttttaagaagatgccaatataatttttgtaagaaggcagtaacctttcatcatgatcataggcagttgaaaaatttttacaccttttttttcacattttacataaataataatgctttgccagcagtacgtggtagccacaattgcacaatatattttcttaaaaaataccagcagttactcatggaatatattctgcgtttataaaactagtttttaagaagaaattttttttggcctatgaaattgttaaacctggaacatgacattgttaatcatataataatgattcttaaatgctgtatggtttattatttaaatgggtaaagccatttacataatatagaaagatatgcatatatctagaaggtatgtggcatttatttggataaaattctcaattcagagaaatcatctgatgtttctatagtcactttgccagctcaaaagaaaacaataccctatgtagttgtggaagtttatgctaatattgtgtaactgatattaaacctaaatgttctgcctaccctgttggtataaagatattttgagcagactgtaaacaagaaaaaaaaaatcatgcattcttagcaaaattgcctagtatgttaatttgctcaaaatacaatgtttgattttatgcactttgtcgctattaacatcctttttttcatgtagatttcaataattgagtaattttagaagcattattttaggaatatatagttgtcacagtaaatatcttgttttttctatgtacattgtacaaatttttcattccttttgctctttgtggttggatctaacactaactgtattgttttgttacatcaaataaacatcttctgtgga

SEQ ID NO: 236 - DNA, 5715 bp, Homo sapiens
agctgattctatcacattgtaagatgcctttggataattctacagtcctcttaaatgaatctttagaacttggcaagtctcactagataccttcaatcatcattttgagctcaaagaattctgagacttatggttggtcatatagaagaggaccttgaacctatagtttcctgaagaatcagtttaaaagatccaaggagtacaaaaggagaagtacaaatgtctactacaagacgaaaacgtagtatgttatgttgtttaccgtaagctgtagtaaaatgagctcgattgttgacagagatgacagtagtatttttgatgggttggtggaagaagatgacaaggacaaagcgaaaagagtatctagaaacaaatctgaaaagaaacgtagagatcaatttaatgttctcattaaagaactgggatccatgcttcctggtaatgctagaaagatggacaaatctactgttctgcagaaaagcattgattttttacgaaaacataaagaaatcactgcacagtcagatgctagtgaaattcgacaggactggaaacctacattccttagtaatgaagagtttacacaattaatgttagaggctcttgatggtttttttttagcaatcatgacagatggaagcataatatatgtgtctgagagtgtaacttcattacttgaacatttaccatctgatcttgtggatcaaagtatatttaattttatcccagaaggggaacattcagaggtttataaaatactctctactcatctgctggaaagtgattcattaaccccagaatatttaaaatcaaaaaatcagttagaattctgttgtcacatgctgcgaggaacaatagacccaaaggagccatctacctatgaatatgtaaaatttataggaaatttcaaatctttaaacagtgtatcctcttcagcacacaatggttttgaaggaactatacaacgcacacataggccatcttatgaagatagagtttgttttgtagctactgtcaggttagctacacctcagttcatcaaggaaatgtgcactgttgaagaacccaatgaagagtttacatctagacatagtttagaatggaagtttctgtttctagatcacagggcaccacccataatagggtatttgccatttgaagttctgggaacatcaggctatgattactatcatgtggatgacctagaaaatttggcaaaatgtcatgagcacttaatgcaatatgggaaaggcaaatcatgttattataggttcctgactaaggggcaacagtggatttggcttcagactcattattatatcacttaccatcagtggaattcaaggccagagtttattgtttgtactcacactgtagtaagttatgcagaagttagggctgaaagacgacgagaacttggcattgaagagtctcttcctgagacagctgctgacaaaagccaagattctgggtcagataatcgtataaacacagtcagtctcaaggaagcattggaaaggtttgatcacagcccaaccccttctgcctcttctcggagttcaagaaaatcatctcacacggccgtctcagacccttcctcaacaccaaccaagatcccgacggatacgagcactccacccaggcagcatttaccagctcatgagaagatggtgcaaagaaggtcatcatttagtagtcagtccataaattcccagtctgttggttcatcattaacacagccagtgatgtctcaagctacaaatttaccaattccacaaggcatgtcccagtttcagttttcagctcaattaggagccatgcaacatctgaaagaccaattggaacaacggacacgcatgatagaagcaaatattcatcggcaacaagaagaactaagaaaaattcaagaacaacttcagatggtccatggtcaggggctgcagatgtttttgcaacaatcaaatcctgggttgaattttggttccgttcaactttcttctggaaattcatctaacatccagcaacttgcacctataaatatgcaaggccaagttgttcctactaaccagattcaaagtggaatgaatactggacacattggcacaactcagcacatgatacaacaacagactttacagagtacatcaactcagagtcaacaaaatgtactgagtgggcacagtcagcaaacatctctacccagtcagacacagagcactcttacagccccactgtataacactatggtgatttctcagcctgcagccggaagcatggtccagattccatctagtatgccacaaaacagcacccagagtgctgcagtaactacattcactcaggacaggcagataagattttctcaaggtcaacaacttgtgaccaaattagtgactgctcctgtagcttgtggggcagtcatggtacctagtactatgcttatgggccaggtggtgactgcatatcctacttttgctacacaacagcaacagtcacagacattgtcagtaacgcagcagcagcagcagcagagctcccaggagcagcagctcacttcagttcagcaaccatctcaggctcagctgacccagccaccgcaacaatttttacagacttctaggttgctccatgggaatccctcaactcaactcattctctctgctgcatttcctctacaacagagcaccttccctcagtcacatcaccagcaacatcagtctcagcaacagcagcaactcagccggcacaggactgacagcttgcccgacccttccaaggttcaaccacagtagcacacgtgcttcctctcttgacatcaagggaggaaggggatggcccattaagagttactcagatgacctgaggaaaggagggaaagttccagcagtttcatgagatgcagtattgagtgttctagttcctggaattagttggcagagaaaatgctgcctagtgctacagatgtacattaaataccagccagcaggaggtgatcataggggcacagccagttctgacagtgttttaggtgcctggatattttttgatggaaaaagaatatattgccaaatattaagaagctcagctatgaaatgacctccagggaatcagaaaggcactaatgatgttagtaacttttagtggttctgtgcctcttatcaagtgttacagaggacataccactgccatgtcaggggtttgcttacagtgatgccatgaagacagtccagtagacttggtagcgaccccctcccccaacccctctcccttttcagataatgatggaacagtaattactttcagaatgttgtgtgggttcaaattctctatgtacagatgatgtaaaaatatgtatatgtctagataaaaggagagaaagcaaaacattttgtatgctgcatgaaagcgttatctcttccttacaggtgtgagcacctttcctgaaattctgacaccatgtgcaaactgatccatcctgtttttccttttgtttacaacacagtagtgttctgttcacttttccggggcacaagtttttttgttcatactttggctgtgatgtcacagtttgttcagtgaggtatgatgtgctgctgggaatggatttttttttttcaggttaaattattgatacaacaggattttcaagttattcagaaatatccctcatttcattatttttcaattatgtttgaaaataggatttgcactgctttattttaggtggctgggagttttgattgcatattttgttatagttcatagttggaaatatttgcgtaaatggttttcaacaagcctgaaagtaatttcaagaatgtttcagttatagaggtaaaatttgcacacaaaacatcttaggcactttttaacattctcaatcatgggaattttaacttttgggatttgttgaaatcttttttattatccttcacaatttcaatgcttcttttagtcagaaatgattcagggttatttgaggggaaaaaaccccatagtgccttgattttaattcaggtgataactcaccatcttgaagtcattgtccggtttccgtagcagttttgaaaccttagtacctttttaacagcatgtgggtgtcagtgtcattattagtctcctaataagttcctctgaagactgctatcagtctcttggactggagttacaaataatttagaaataaaagatgataacctaacactatcatagttattaatgtgatcctaaaattgtttcctaaatcagcatttttctttagtcatttaagaatttaccagaaatatttgctcaatatgatcttgatattcctacaaagaaaaaagaaggggtagggatttggctatgccttcactacaacattagaatattgtaactcacatgccttctaaacgtgaactaagatttcctttggcaatatcatattctaaaagtaataaattccaatacaagttacatacatttaaaaaacattttacagattttatggtactaatgaaatttacagtgatagaacaaaagaggattagtagaaaatacattattagaatataaaaaatgttattactgaggaaagggaggagaggacaagtgtaataaatcaaaattgacctcaaaagaaaatgtgtaacagagttgaggttgttaaaacagaaaaggttctgaataatgaagattaacctaatgcagaattgctaggtaaagaggtcaggggaatgctaagccagttcttaagacttctctgtcctctgctttgctgttatccttaaggcatatactttgtctttctgcagaaaattctacctggctacaattactttgaacattaatgttgaaaaagaaaacaaccaaagaaaattggtacttacccttctacaaaagaagtgtgactagatatcaatcagtaattaacatatcaaggagctcttctagctaaatgaccatccagtagagatttcccacattcccatgaatatcaagaatagttgtcagaatatgtatgtacctgagcatatgtacacagacaagggggatgttgtggaatatggcaatagcattgttcttctcccctttcaaattgcctttcttgaccttatgccattccatatatatctgagttgtgcctcatttatttattggcaatacctagtgatacggatttagctaacaaaagatatgaagaactattatattgaggcctgtcctctacataccacacttaaaagatggtgaactgtgagtactacttaggttgacagcaacaaagcataagacaagccccaggtaaacgtctaaactgtttactcacattgtcctactccagccccttcaattatttcccatctccacaaatagtcgggggaaaaaattaaaattttcctttatgattcttactgttcttcgcagctcatcttttcctgcttagaattaaccattgctaatttaaaggagcagctagctgcttttctgtcagtctgaagcgtagtagtggaagaggtagtaagcaccagctgcctctttgctgctttgttttcctcctgattctcttaaatttgggttgcaaagctatcccgccccccaccctgccccatgaaacttgagcattcaaatgaagattcagcagtgtctgttcttcatttctatagccaaagctgttagttaaaatcccaaatctatagcatttaaagataccaaatagaaacaccttccagcttt

SEQ ID NO: 237 - DNA, 3509 bp, Homo sapiens
atggaattcagcagcatctgtattgaatttaaaagtaccttgagacaggaggcgcctccgccatcccgtgccgcagaacctagatcgagctgtacagttcaccacctccctgtcacctttccaggcaggtcccttatgatgaaatctctgctgttcatcagcatagttatcatccgtcaggaaggcaaacctaagagtcagcagacgtctttccagtcctctccttgtaataaatcgcccaagagccatggccttcagaatcaaccttggcagaaattgaggaatgagaagcaccatatcagagtcaagaaagcacagagtcttgctgagcagacctcagatacagctggattagagagctcgaccagatcagagagtgggacagacctcagagagcatagtccttctgagagtgagaaggaagttgtgggtgcagatcccaggggagcaaaacccaaaaaagcaacacagtttgtatacagctatgctagaggaccaaaagtcaaggagaaactcaaatgtgaatggagtaaccgaacaactccaaaaccggagatgctggacccgaaagtaccaaacctgtgggggttttccaccctgactcttcagaggcatcctctagaaaaggagtattggatgggtatggagccagacgaaatgagcagagaagatacccacagaaaaggcctccctgggaagtggagggggccaggccacgaccaggcagaaatccaccaaaacaggagggccaccgacatacaaacgcaggacacagaaacaacatgggccccattccaaagtgatgacctcaatgaaagaccagcaaaatctacctgtgacagtgagaacttggcagtcatcaacaagtcttccaggagggttgacccagagaaatgcactgtacggaggcaggatcctcaagtagtatctcctttctcccgaggcaaacagaaccatgtgctaaagaatgtggaaacgcacacaggttctctaattgaacaactaacaacagaaaaatacgagtgcatggtgtgctgtgaattggttcgtgtcacggccccagtgtggagttgtcagagctgttaccatgtgtttcatttgaactgcataaagaaatgggcaaggtctccagcatctcaagcagatggccagagtggttggaggtgccctgcctgtcagaatgtttctgcacatgttcctaataccttctcttgtttctgtggcaaggtaaagaatcctgagtggagcagaaatgaaattccacatagctgtggtgaggtttgtagaaagaaacagcctggccaggactgcccacattcctgtaaccttctctgccatccaggaccctgcccaccctgccctgcctttatgacaaaaacatgtgaatgtggacgaaccaggcacacagttcgctgtggtcaggctgtctcagtccactgttctaacccatgtgagaatattttgaactgtggtcagcaccagtgtgctgagctgtgccatgggggtcagtgccagccttgccagatcattttgaaccaggtatgctattgcggcagcacctcccgagatgtgttatgtggaaccgatgtaggaaagtctgatggatttggggatttcagctgtttaaagacatgtggcaaggacttgaaatgcggtaaccatacatgttcgcaagtgtgccaccctcagccctgccagcaatgcccacggctcccccagctggtgcgctgttgcccctgtggccaaactcctctcagccaattgctagaacttggaagtagtagtcggaaaacatgcatggaccctgtgccttcatgtggaaaagtgtgcggcaagcctctgccttgtggttccttagatttcattcatacctgtgaaaagctctgccatgaaggagactgtggaccagtctctcgcacatcagttatttcctgcagatgctctttcagaacaaaggagcttccatgtaccagtctcaaaagtgaagatgctacatttatgtgtgacaagcggtgtaacaagaaacggttgtgtggacggcataaatgtaatgagatatgctgtgtggataaggagcacaagtgtcctttgaattgtgggaggaaactccgttgtggccttcataggtgtgaagaaccttgtcatcgtggaaactgccagacatgctggcaagccagttttgatgaattaacctgccattgtggtgcatcagtgatttaccctccagttccctgtggtactaggccccctgaatgtacccaaacctgcgctagagtccatgagtgtgaccatccagtatatcattctggtcatagtgaggagaagtgtcccccttgcactttcctaactcagaagtggtgcatgggcaagcatgagtttcggagcaacatcccctgtcacctggttgatatctcttgcggattaccctgcagtgccacgctaccatgtgggatgcacaaatgtcagagactctgtcacaaaggggagtgtcttgtggatgagccctgcaagcagccctgcaccacccccagagctgactgtgggcacccctgtatggcaccctgccataccagctcaccctgccctgtgactgcttgtaaagctaaggtagagctacagtgtgaatgtggacgaagaaaagagatggtgatttgctctgaagcatctagtacttatcaaagaatagctgcaatctccatggcctctaagataacagacatgcagcttggaggttcagtggagatcagcaagttaattaccaaaaaggaagttcatcaagccaggctggagtgtgatgaggagtgttcagccttggaaaggaaaaagagattagcagaggcatttcatatcagtgaggattctgatcctttcaatatacgttcttcagggtcaaaattcagtgatagtttgaaagaagatgccaggaaggacttaaagtttgtcagtgacgttgagaaggaaatggaaaccctcgtggaggccgtgaataagggaaagaatagtaagaaaagccacagcttccctcccatgaacagagaccaccgccggatcatccatgacttggcccaagtttatggcctggagagcgtgagctatgacagtgaaccgaagcgcaatgtggtggtcactgccatcagggggaagtccgtttgtcctcctaccacgctgacaggtgtgcttgaaagggaaatgcaggcacggcctccaccaccgattcctcatcacagacatcagtcagacaagaatcctgggagcagtaatttacagaaaataaccaaggagccaataattgactattttgacgtccaggactaagaagatcatgatgcacttagataaaagaatgattaggtatagtggagacttatttgccagcagataaatcatgcccgttcccctctgcctggcagaatcacagtctcacatactgtcttgtactgacacatccaaagcatgagtgtgtcagaaatcccttgtctattcctgtctgtataaagtgtttcaggatg

SEQ ID NO: 238 - DNA, 2444 bp, Homo sapiens
ggcacgaggcggggccgggtcgcagctgggcccgcggcatggacgaactgttccccctcatcttcccggcagagcagcccaagcagcggggcatgcgcttccgctacaagtgcgaggggcgctccgcgggcagcatcccaggcgagaggagcacagataccaccaagacccaccccaccatcaagatcaatggctacacaggaccagggacagtgcgcatctccctggtcaccaaggaccctcctcaccggcctcacccccacgagcttgtaggaaaggactgccgggatggcttctatgaggctgagctctgcccggaccgctgcatccacagtttccagaacctgggaatccagtgtgtgaagaagcgggacctggagcaggctatcagtcagcgcatccagaccaacaacaaccccttccaagttcctatagaagagcagcgtggggactacgacctgaatgctgtgcggctctgcttccaggtgacagtgcgggacccatcaggcaggcccctccgcctgccgcctgtcctttctcatcccatctttgacaatcgtgcccccaacactgccgagctcaagatctgccgagtgaaccgaaactctggcagctgcctcggtggggatgagatcttcctactgtgtgacaaggtgcagaaagaggacattgaggtgtatttcacgggaccaggctgggaggcccgaggctccttttcgcaagctgatgtgcaccgacaagtggccattgtgttccggacccctccctacgcagaccccagcctgcaggctcctgtgcgtgtctccatgcagctgcggcggccttccgaccgggagctcagtgagcccatggaattccagtacctgccagatacagacgatcgtcaccggattgaggagaaacgtaaaaggacatatgagaccttcaagagcatcatgaagaagagtcctttcagcggacccaccgacccccggcctccacctcgacgcattgctgtgccttcccgcagctcagcttctgtccccaagccagcaccccagccctatccctttacgtcatccctgagcaccatcaactatgatgagtttcccaccatggtgtttccttctgggcagatcagccaggcctcggccttggccccggcccctccccaagtcctgccccaggctccagcccctgcccctgctccagccatggtatcagctctggcccaggccccagcccctgtcccagtcctagccccaggccctcctcaggctgtggccccacctgcccccaagcccacccaggctggggaaggaacgctgtcagaggccctgctgcagctgcagtttgatgatgaagacctgggggccttgcttggcaacagcacagacccagctgtgttcacagacctggcatccgtcgacaactccgagtttcagcagctgctgaaccagggcatacctgtggccccccacacaactgagcccatgctgatggagtaccctgaggctataactcgcctagtgacagcccagaggccccccgacccagctcctgctccactgggggccccggggctccccaatggcctcctttcaggagatgaagacttctcctccattgcggacatggacttctcagccctgctgagtcagatcagctcctaagggggtgacgcctgccctccccagagcactggttgcaggggattgaagccctccaaaagcacttacggattctggtggggtgtgttccaactgcccccaactttgtggatgtcttccttggaggggggagccatattttattcttttattgtcagtatctgtatctctctctctttttggaggtgcttaagcagaagcattaacttctctggaaaggggggagctggggaaactcaaacttttcccctgtcctgatggtcagctcccttctctgtagggaactgtggggtcccccatccccatcctccagcttctggtactctcctagagacagaagcaggctggaggtaaggcctttgagcccacaaagccttatcaagtgtcttccatcatggattcattacagcttaatcaaaataacgccccagataccagcccctgtatggcactggcattgtccctgtgcctaacaccagcgtttgaggggctgccttcctgccctacagaggtctctgccggctctttccttgctcaaccatggctgaaggaaacagtgcaacagcactggctctctccaggatccagaaggggtttggtctggacttccttgctctcccctcttctcaagtgccttaatagtagggtaagttgttaagagtgggggagagcaggctggcagctctccagtcaggaggcatagtttttagtgaacaatcaaagcacttggactcttgctctttctactctgaactaataaagctgttgccaagctggacggcacgagctcgtgcc

SEQ ID NO: 239 - DNA, 5376 bp, Homo sapiens
gaattccgcggcgccgggacagccccgggactctgccaggtggatgttgtgcgtacgcggagccaggttgaagagagaactcgatgccaccgcaacggtattggcgaaccggcaggatgaaagtgagcagtccagaaagcggcttatcgaacagagccgggagttcaagaagaacactccagaggatttgcgcaagcaggtagcgccgctgctgaagagtttccaaggagagattgatgcactgagtaaaagaagcaaggaagctgaagcagctttcttgaatgtctacaaaagattgattgacgtcccagatcccgtaccagctttggatctcggacagcaactccagctcaaagtgcagcgcctgcacgatattgaaacagagaaccagaaacttagggaaactctggaagaatacaacaaggaatttgctgaagtgaaaaatcaagaggttacgataaaagcacttaaagagaaaatccgagaatatgaacagacactgaagaaccaagccgaaaccatagctcttgagaaggaacagaagttacagaatgactttgcagaaaaggagagaaagctgcaggagacacagatgtccaccacctcaaagctggaggaagctgagcataaggttcagagcctacaaacagccctggaaaaaactcgaacagaattatttgacctgaaaaccaaatacgatgaagaaactactgcaaaggccgacgagattgaaatgatcatgacggaccttgaaagggcaaaccagagggcagaggtggctcagagagaggcggagaccttaagggaacagctctcatcggccaatcactccctccagctggcctcacagatccagaaggcaccagacgtggagcaggccatagaggtgctgacccgctccagcctagaagttgagttggccgccaaggagcgggagatcgcacagctggtggaggacgtgcagagactccaggccagcctcaccaagctgcgggagaattcggccagccagatctcacagcttgagcagcagctgagcgccaaaaacagcacactcaaacaactggaagaaaaactcaaaggccaggctgactatgaagaggtgaagaaagagctgaacattctgaagtccatggagtttgcaccgtccgagggcgctgggacacaggatgcggccaagcccctggaggtgctgttgctggagaagaaccgctcgctgcagtccgagaacgccgcgctgcgcatctccaacagcgacctgagcgggtcagccaggaggaaagggaaagaccagcctgaaagtcggcgcccgggatctttgccggccccccctccttctcagttgccccgcaacccgggggagcaggcttccaatactaatggtacacaccagttctcaccagcggggttaagtcaagactttttcagctcatccctggcaagccccagcctacccctggcttctacaggaaaatttgcactaaactctcttctccagcggcagctaatgcagtccttctactccaaggctatgcaggaagccggaagcacaagcatgattttttcaacaggtccatacagcacaaactccatatcttcccaaagtccattacaacaaagcccagatgtcaatggcatggccccatcccccagccagtcagaaagtgctgggagcgtctccgagggagaggagatggacactgcagaaatcgcccggcaggtgaaagagcagctgattaagcacaatatcggacaacgtattttcggacattatgtgttgggactgtctcaagggtccgtgagcgagattctggcccggcccaagccatggaataaactgactgttcgtggcaaggagccatttcacaagatgaaacagttcctctccgatgagcagaacatcctggccctccgtagcatccaaggcagacaaagagagaatccaggccagagcctgaacagactatttcaggaagtaccgaaacgaagaaatgggtctgaaggtaacatcaccacccggatccgagcctcggagactggctctgatgaagccatcaagtccatcctagagcaagccaagagggagctccaagtgcagaaaactgcagagccggcccagccttcctccgcatccggcagcgggaactctgatgagcccatccgctccatcctgcagcaagcccgccgggagatggaggcccagcaggctgccctcgaccctgccttaaagcaggcaccactgtcccagagtgacatcaccatcctcacccccaagcttctgtccacctcgcccatgcccaccgtgtccagctacccacctctcgccatctccctgaagaagccctccgcagctcctgaggccggtgcctctgctctgccgaaccccccggccctcaaaaaggaggcccaggacgcccccgggctggacccccagggagcagccgattgtgcacaaggggtcctgagacaggtgaaaaatgaggtgggccgcagcggtgcctggaaggaccactggtggagcgcggtgcagccggagagaagaaatgccgcctcctccgaggaggccaaggccagagaaacgggcggcgggaaagagaagggcagcggtggcagcggaggtggcagccagcctcgggccgagcgcagtcagctccagggaccctcgtcgtcagagtactggaaggagtggcccagcgctgagtccccatactcccagagctcagagctgagtctgaccggggccagccgcagcgagacaccacagaacagccccctgccatcctccccgatcgtgcccatgtccaagcccaccaagccctcggtccccccgctgacccccgagcagtacgaggtctacatgtaccaggaggtggacaccatcgagctcacccggcaggttaaggaaaagctggccaagaacggcatctgccagagaatcttcggggagaaggtgctgggcctgtcccagggcagcgtcagcgacatgctgtcccgaccgaagccatggagcaagctgacgcagaaaggccgagaacccttcatccggatgcagctctggctgaacggcgagctaggccagggtgttctacccgtccagggccagcagcaagggccagtcctccactccgtgacatcgctccaggacccgctgcagcagggctgtgtgagctcagaaagcactccaaagacctccgccagctgcagccctgcccctgagtccccgatgagttccagtgagtcggtgaagagcctgaccgagctggtccagcagccctgtccccccatcgaggcgagcaaggacagcaagccaccagagcccagtgacccgccagcatccgactcccagcccacaaccccgctgcctctctccggacactcggccctcagcatccaagaattagtagccatgtccccggagctggacacctacggcataaccaagcgggtgaaggaggtgctgacggacaacaacctcggccagcgcttatttggggagaccatcttagggctcacccaaggctctgtctctgacctccttgcccgccccaaaccctggcataagctcagtctgaaaggacgagagcccttcgtccggatgcagctgtggctgaacgaccccaacaatgtggagaagctgatggacatgaaacggatggagaagaaagcctacatgaagcggcggcacagctcagtcagtgacagccagccctgcgaaccgccctctgtcggcaccgagtacagccagggcgccagcccccagccccagcaccagctgaagaaaccccgggtggtgctggctccggaggagaaggaggcgctgaaacgagcgtatcagcaaaagccatacccgtcaccaaaaaccatcgaagacctcgccacccagctcaacctgaaaacaagcaccgtcatcaactggttccacaactacaggtctcggatccgcagagaactgttcattgaggaaattcaggccgggagtcagggccaggcgggcgccagcgactcaccctcggcccgcagcggccgggcggcgcccagctcggagggcgacagctgcgacggcgtggaggccactgagggcccaggcagcgccgacaccgaggagcccaagtctcagggagaggccgagcgggaggaggtgccgcggccggcggagcagacggagccgccgccctcggggaccccgggcccggacgacgcccgcgacgacgaccacgagggaggccccgtggaaggcccggggcccctgcccagccccgcctccgcgaccgccaccgccgcgcccgcggcccccgaggacgccgctacctcagccgccgccgcgccgggggagggccccgcggccccgacgtccgcgccaccgcccagcaacagcagcagcagcagcgccccccgcaggcccagctcgctgcagagccttttcggcctccccgaggccgcgggcgcccgggactcgcgcgacaaccccctgcgcaagaagaaggccgcgaacttgaacagcatcatccaccgcctggagaaggccgccagccgggaggaacctatcgaatgggagttctgaggggctgcggccctggggcgggcagccaggctgggccgcaagggcctggacggggtcggacggggcaggcgctgcggacaccgtggcctgggcttggcccgcggcctgcaccgaccccgggccggacctgagcccgcagcccagaccccctccacggtccgcggcctgcaccgacccgaggcccagatccaaggccgcggcccagacccactctgcggcccgggccgaccctgcggcctccaccaaccccgcggcccagacccagcccgcggcctggacccctggaccgctttgcgcacttaccgccctgcggccacagggcaaaatcgccataggccaaggtgcatatagaaaacaaaggagcattaagcccaatctatgtcgtgttttcaaggaagaaaacggaaatgtgtggtcgagcttttttgtaccctgaagtgttttttttattgccctaagtgatttccacaggttctggaataactcttacagctttgccttgtgtcctcttgttccgtgtgggctttaaaagaaaaaaaatcaaacccacatattaaaagggggctttttatctgccatctaatggcttcagagcgataatacactattatcttcttaaaccaggaaaaaataaaagggggggtgggatttttcagaaaaataaaaaaagaaagtttttgtagctgttcagttgccactaagagattgcacagtcaaaaactctaaacacactagtttggattcctaaatattttcaagaaaagaatcttctcgtttgaaactttgaattaaaataaaacacatttactccacag

SEQ ID NO: 240 - DNA, 13695 bp, Homo sapiens
cgccgcctgtgcagccgctgccgccgccgccgccgccgccgccgccgccgccgccgccgccgccgctgccgccccggctgccgcgccgcgccgctgcctctgccccggccgcccccgccgccgctgccgccgccggcccgcagccagccaggcgggcggcccagcccgcctgagcccgcagcggctgccgccgcagcgtcgggtcgctgggtgcgcgggctaccgcggaccgagcggacccgagtgggcgaccaggcgcttgcccgcccagtgccactgccgccgcttcctcgccggagcacaggaccagacacctccagcgcccgctgctgctgccgatgcggcccggacacttttagctgggcgggagggctggagagccgggggccgccgagaaccgccagcgagctgtgccgagagccgcgccgacccgctgcgatcagggacaggcgcccgcccgccgccgccgcctggccgctatggatctattcgactttttcagagactgggacttggagcagcagtgtcactatgaacaagaccgtagtgcacttaaaaaaagggaatgggagcggaggaatcaagaagtccagcaagaagacgatctcttttcttcaggctttgatctttttggggagccatacaaggtagctgaatatacaaacaaaggtgatgcacttgccaaccgagtccagaacacgcttggaaactatgatgaaatgaagaatttgctaactaaccattctaatcagaatcacctagtgggaattccaaagaattctgtgccccagaatcccaacaacaaaaatgaaccaagcttttttccagaacaaaagaacagaataattccacctcaccaggataatacccatccttcagcaccaatgcctccaccttctgttgtgatactgaattcaactctaatacacagcaacagaaaatcaaaacctgagtggtcacgtgatagtcataaccctagcactgtactggcaagccaggccagtggtcagccaaacaagatgcagactttgacacaggaccagtctcaagccaaactggaagacttctttgtctacccagctgaacagccccagattggagaagttgaagagtcaaacccatctgcaaaggaagacagtaaccctaattctagtggagaagatgctttcaaagaaatctttcaatccaattcaccggaagaatctgaattcgccgtgcaagcgcctgggtctcccctagtggcttcctctttattagctcctagcagtggcctttcagttcaaaacttcccaccagggctttactgcaaaacaagcatggggcagcaaaagccaactgcatacgtcagacccatggatggccaggaccaggcaccggacatctcaccaacactgaaaccttcaattgaatttgagaacagctttgggaatctgtcatttggaacactcttggatggaaaacccagtgcagccagttcaaagactaaactgccaaagttcaccatcctccaaacaagtgaagtaagccttcccagtgatccaagctgtgttgaagaaatcttgcgggagatgacccattcctggcctactcctctcacttccatgcatactgctggacactctgagcagagcaccttttccatcccaggacaggaatcgcagcatctgaccccaggattcaccttacaaaagtggaatgacccaaccaccagagcttctacaaagtcagtgtctttcaaatcgatgcttgaggatgacctgaagctgagcagtgatgaagatgaccttgagcctgtgaagaccttgaccactcagtgcactgccactgagctctaccaggctgttgaaaaggcaaaacctaggaataatcctgtgaacccacccttggccactccccagcccccacctgcagtgcaagccagcgggggttctggcagctccagcgaatcggagagcagctctgagtcggattcagacactgaaagtagcaccactgacagcgaatctaatgaggcacctcgtgtggcaactccagagcctgagccaccctcaaccaacaagtggcaactggataaatggcttaacaaagtgacatcccagaacaagtcttttatttgtggcccaaatgaaacacccatggagactatttctctgcctcctccaatcatccaaccaatggaagtccagatgaaagtgaagacgaatgccagtcaggtcccagctgaacccaaagaaaggcctctcctcagtctcattagggagaaagcccgtccacggcccactcagaaaattccagaaacaaaggctttgaagcataagttgtcaacaactagtgagacagtgtctcaaaggacaattgggaaaaaacagcccaaaaaagttgagaagaacaccagcactgacgagtttacctggcccaaaccaaatattaccagcagcactcccaaagaaaaagaaagtgtggagcttcatgacccaccaagaggccgcaacaaagccactgcccacaaaccagcccctaggaaagaaccaagacctaacatccctttggctcccgagaagaagaagtacagagggcctggcaagattgtgccaaagtctcgggaattcattgaaacagattcatctacatctgactccaacacagatcaggaagagaccctgcaaatcaaagtcctgcctccgtgcattatttctggaggtaatactgccaaatccaaggaaatctgtggtgccagcctgaccctcagcaccttaatgagtagcagtggcagcaacaacaacttatccatcagtaatgaagagccaacattttcacctattcctgtcatgcaaactgaaatcctgtcccctctgcgagatcatgagaacctgaaaaacctctgggtgaagattgaccttgacttactctctagagtacctggccacagctcactccatgcagcacctgccaagccagaccacaaggagactgccacaaaacccaagcgtcagacagctgtcacagctgtggagaaaccagcccctaagggcaaacgtaagcacaagccaatagaagttgcagagaagatccctgagaagaagcagcgcctggaggaggccacaactatctgcttgctccctccttgcatctcaccagccccaccccacaagcctcccaacactagagaaaataattcatccaggagagcaaatagaagaaaggaagaaaaactatttcctcctccactttccccactgccagaggaccctccacgccgcagaaatgtcagtggcaataatggtccctttggtcaagacaaaaacatcgccatgactggacaaatcacatctaccaaacctaagagaactgaaggcaaattctgtgctactttcaaagggatatcggtaaatgagggagacactccaaaaaaggcatcctctgccaccatcactgtcaccaatactgctattgccactgctactgtcactgctactgccattgtcaccaccactgtcacagctactgccaccgccacggccaccaccacaactactaccactaccatttccaccatcacctctaccatcactactggcctcatggatagcagtcacctggagatgacgtcctgggcggctctgccccttctatccagcagcagcactaatgtccggagacccaagctcacttttgatgactcggttcacaatgctgattattacatgcaagaagctaagaagctgaagcacaaagctgatgcactgttcgagaaatttggcaaagctgtgaattatgctgatgccgccctctccttcactgaatgtggcaatgccatggaacgcgaccctctggaagcaaagtccccatacaccatgtactctgagactgtggagctcctcaggtatgcaatgaggctgaagaactttgcaagtcccttggcttcggatggggacaaaaagctagcagtactatgctaccgatgtttatcactcctctatttgagaatgtttaagctgaagaaggaccatgctatgaagtactccagatcactgatggaatattttaagcaaaatgcttcaaaagtcgcacagataccctctccatgggtaagcaatggaaagaacactccatccccagtgtctctcaacaacgtctcccccatcaacgcaatggggaactgtaacaatggcccagtcaccattccccagcgcattcaccacatggctgccagccacgtcaacatcactagcaatgtgttacggggctatgaacactgggatatggccgacaaactgacaagagaaaacaaagaattctttggtgatctggacacgctgatggggcctctgacccagcacagcagcatgaccaatcttgtccgctacgttcgccaaggactgtgttggctgcgcatcgatgcccacttgttgtagtgggtgttctcagatctctagcatcacgacccatcactctacctctaccagcgcactgatggtcactggtggaactccactcactggggaacgttctctttggttatgtttgtttttatgcttcttttgttatctgtaaaaaacagaagtcattgtaagttgacactacaacttaagggcagtgtacgttttattacttagtcattttttttcttttagcatttgatatgcatttctcagattccaccatctttttgtgctttatggaatgacagtccctacaatattgttttaagcccacactacccaaaacaaagaatgggaagcacttgtgataaagacaggctcctgagaaatgcaacaagtggtcttacatatacatgagaacttagacacaagggaccatcccccaaactctactcttatacccagaaaagaacatatttcagaatctgtcaaacttttgtgtatcccacagattcaatcttcaggtgagaattttcattgtcaaaacccactggttagatgttgtagcaacatcataaaatcaagagtatcaagaaaataaatgagcatagcaatgctactcttaaaaagatgctatgccacacaaccagaggactttcttgttagcatccctttcctgattccctattttgttaattttaatgataagaagaaagggtgacatttattttgacaagttttaggcatcagctggcatcagtgtttttcaactccattatttgaagtgtaaatcctcacctggggttctctgtgtgcaaagctgtccttttgaagaacagtttggttgatgcatgccttagtagccaaaatgctacactctagacttacaagtgggagttaagagaggtctggaaagtgtccaacaaggaattcacacctctgcctcctttgcaacaacaacatttacacagttggtaagtgggtccataactggcaggatttttaaattgtattttgctcaaatctatgggaacaaaagtcaaggtatcactacctagaagtaatgatatacagttttcttcctagtggcttgaaaatctggacttcctcaattattattcacattttctctcttataggttttctgttttctactttcttttttctcttatctgtgtttccctttcctttgtttggctcattaacttttgactgaattacaattactccttttattaaagtccatattattgtgaatcatttccatgaaaatttctaagaaaactccaaactctctaaatagtagctaacttttatttttttaaaatgagtcgtggggtagtgcttcaccttgagatgctttgaaagagccctaaacattgggaaccattcacctaatttggagacatttctcactggttgtgactacccccttatgatccttcacattcattttatgtccctaaacatcacaatgtaaatatcatttttgatgttccagctcaccagaagattcttacacttggggtaaacactatccatgcattacttactggtaattacctgctggtatataattccatgtagcctttaatatgctgggttatcaaattctgttcactgagttatgaccagataaataatagatatgcacatgaaagatgcaaacttgtgtgattattaaagccagccatgcaggtccatgatagaaacagcaggtgatgactctgcactctcattgtcaaggttagctatatccccagttgcaaaacagccagacttgagctgtgctctggtcatctttgagtttaaggccttttgttgtataaggctgtggaagttgtactccaatggctgaagccatgttgttaatatggctgatgggagcatccctgcagctgaacccagcactttttatgctcccactgtggttgagctttatgtttacagtctcagcaacaacacttatgcatccaaacactcacaaatgaaacctgaaagaatcttttctgagcctcttaaaagaggaaaatgatgataacattaaagactctgaacacccaaggttggtgtcacatataaaaattaagctgatgactttgcagtgactcaagttgtctctttatcatggtttaccaggtagagtgcctggctattactatataatgaagcccactggcttgacttgtaagttcaacctaaaccacaatcctagaccatcatggatttaggagtagattcttcttgaaatcccacatccagaaactagacattagaatgttgaggcagtttcccagagaaacaagcatattgcctcatggatgaaagacttgtagttctagtttcagtgacttgttatatctacttacatacaacagggaggcaagaggattctctgtcatctctggtgactgagtgtaaaatatgtgccaagtctgcagcacagtgaccaaatctgacaatcgagctctggatcaccacttgattatgtagtagactcatttataaagcagcttaggaactaattaaacatggaggatgaattaccttcctatcccttgagataagacatctttcagtttcatgattaaggattgttgctgttttatagttactctgttcatcacagtgtaaatggtgatgcgtgtcgtaggtgtgcagctatttgagggactaagggatggagatattctgtcaaatgaatctcttcagtataccagtttgtgggagggatatgagacatgtggatggcagtgagagatcgtgcctctagatcttgatggaggcttggtgagacacacttaaataagcacgtggaggttagaatagagggcagagtaaaaggaagctccatctgagcaagtacaccaaatgatctcagccctgcaacttgacccaggtagggccaccactacgccttcacttgtcacccaagctccaaccacagagagtttgacaagtttgtgttatgatgttggcttggctttgtatttttaattaactttggatttttagtggttttgtcatataactgtctgagtttggtaggtaggattactttgaaaagggtttactagtgtggtcctccgggtagaatttagctgtaacatgttgttagccagcctgtagactgttaattacttaataatctcattgggaaaatactagtagttttatatttggatgacataattggaaaaagcagattagctgctactacttttaaaagacttaaggtcgggatgcctttttttccatgtaaggaaatgaaaagacccaaaatcttcaggcaaaaagcaagttgcaaaattagaaaccattggctaaaaatgtgttttgttgagtttccaaatggatgaattttcatttggacattacatcactaaattcattagattttgtctgcattggaaagatactcttctagcatatctttcccaaagatatctaatttggattctgtttcatgcaaatttgcatcccggaggttgaagttggagtttgaggttggaaaatatctttgaaggcagaatcagttgagttgtgagggtgaagcctcacatacttctcaacagacatgataaaattcacctgcatgagttggcaggtgggagaaccaaactggatcactgggtaagactactcagtaaagcaatgaactgcttgcttagagaagcatcactatccccattgagaaaaatgtgtggcaagatgatacagctacacagtatcaaatgaatgggtcaattcagcacccccaaatttaattctgtggggaaaaattattgagccagttgtcagtgttctgttacatgactggcagactaaattcttcatcgttgttgttattgttgttgttgtttctcattttcactcgcacggccttattctcataattaaaatctaattcattttctctttagtgttagtagactccaacaacagaagtggcatctgtgtattcataatcagcatttaccctggcaggagactaatcagataggccggtctcagacattaatcctaccatctgatatttttggtgaaggaaaaagtattaattctctttccatcctcctcctcagaaatatagaagccctctttaccaaaatcatcacattttactctgtaatctaccagctaaaagaaaattgcattgaagccccacaaagccagattgcagttcttgcccctttttgcgtctgacatgagatgttaaagaattattcattgtgctcacattgggttaggggacactgaactgctttttagatccatgatcagtcatcattcttctaagagattggagctttgctgtttcattaactgtgcagtgtagactaatggtgtttaataaaaatcattcaaaatttcaaactcttttgccagtgacctcaattttgttggctctgtgatttgtatcagactttgaggagggaagggggaagtgaaggaagcctacgtccaggcccctgacaggatgctgcagtagcaagctcaagctcgcctgcctgccagcagttgctggtgagcagcagcatgcagaccagctgtgggaagcctcctgaagaatgccccagctgatgctttcagctgggaatagtttgttcctattggggaactcattgttctccagtctctgcagcaggaagccagctgtcatattcggagggaatttcagatgctttacctttttggttttgtcctgcatcactcatgtggctacgaaagtgtctctgagaatagagcccaatgtggtgacaatgggtagtcaaatgcaccccagatgctcaagccctgttgtggttctgcagtgtttatgaaattgggaggaaggagaccctggacagtaagcaaaattggagacactccaacgaggctaagttaatgccgtgttgcccagaacaagatctagcttctcatttggtcagcctagcatgcaaccagtggtgtgctggtaaaatgtttaacaaccagctcgctgagaatagaaagcacctggtttgcaccatttgccaatttccatggcataaatactaccactttagatgattttaagctaccaactgtgatgtcactgaacacatggttggaaagagatgcacgcagttggctcttgcaagcctgggcaaaaatgcttcaacacgccactggatgcagccagtcagagggttcatatttaatatatgtgttcatgtggacacacacagacacacacacacaaactcacccttacacacacacttcgatgactaaaacaattacatagttttaagatatgaatcaatgtgtgaatgtagaaagcttatgataaggccctagaggtatgggttgccctggaagcctaggttttaagcaggagaatagctgagaagaatgaagccctcctgagctgaaaggagagatggatcaatggagatggttccatcatctccttccatatctcacaggtaaaatgggcactcagaaaaccctcacgattgattttttaaaaagataagtgagtgttttttattttattattattgtcatcattattttgatttacaaatgctatttgtaacttttacatgtaactaggataaagtatttacgggaactctatggagaatagcacaatccagaatttactgtgtttttcttttatgtgacgtggaaactcagtaattctcccaccttcacattgttgttcataagaattttactttagttattagggaatctaagttttttgttaacatttgtttttagttaaaagtatctacttactgttttagctctgaactcaaaccagaatatctctgtatcaattgcatgactattcagaaacaataatccaaaccaaaataattctttttccacccagtacgaagaaaactaagctcagtaacaagaaggcataaactaaagtatataatgaggctttcattaaatacacacacacacacactcacacacacacacatacactttttaaatttttaaattaggcctccacacataaatcattttgaaagtagaatagaaaatctcaaagaattcattctcctggtcctgtgcatcttctgcagttaataagaggtttgtatctggaaagatggaagaacttgttctaaaatcttatttttcaaaaaaaaatttccattttctctctgggcctgtatccatggttgaatgttagccctggaggagatccatgtcttactcgctctttctggcccttctgtcttttgcctctgcaattctttttgtagctggcacgatagcagggactgggggtctatcctttcatggtattgctacaatatttgtccttactggaaaatggtaacatccgggtctgatttaattggcattacacttacacagggactctgagcacccccgtcaccacaccagacagtggaccagttttcacagctacaaagagctagaaatgtgtttaacatcatccagtgcatcccctaattcaaaaccatcctcactaatcaatcatattcacccataaatattacaaatgagattgattccatctcaagacaatttgtcaaatacttaattttcttcctggatgattctacttactggatattttagaaagagaaatgtctgagataaaatccctcacatttactcaatataacaaattactgtttctactcctattctgagtagtgcttctgaagattgtttgctgtagtgttgtctttgataaaatgaatgtcagtagtgagccttttagagataccatgctcagacatcctctttgggatcagaagatacctaaaattctccccttttgcccacttggttagatgagtgatatattctttggatcctgcaaagaagagattggtttcttttcttttctggtggtggtagtggttgtatctgtggctgtgatggttgttgttacttgtctctctctctctctggctctggcttttgctttcctgctagtgttctttctctttccaaacaaatagttaaattaaacgtgagcttctgaattgtacttgttcatactttcaaaacataacagattaataaaaatagatgtgtcctgatttaaaacatgccccctggaaaggcatgctgtattatgaaatcgtgataatataactgcattattacatggcagtataaatattagtctgttgaattcatttgtccaattgtataactttgtggagcagtgttttgacctttgatacataattctggagcaagtggagtggttgcaggcagatgagacagtgttatatcaggatttttcaatcaactttagttggaggcctggcaattacaaacatcttcagatgtttctgtaaccattataaatatgaaaaaaacctcttcaaaaaatttcccatagtacttcagtcaagactttttaggtttatcttttttttttcatttctccttttccttttccattatttttcgatgggggggttgttatcattgactgaagaaatattttgattgcaatggtctctctctctctccccctctctctctctctcctctattctttcctccttccctctgtccatcacccctcattaaaatattgaaatctggagtctttgataaatctgcattagaccaggctatatgctaggaatgaaatctgggcaaatatcgatgggttttcaaagaatgctccatgttcattgggccctttcacaccccacagtgataaatgaaaaggatagaggtagttttttcaaaagagcactttaataatatcctctgagacctaatgcagtttaacaaatgactccacctatttttccagtaggtaaattgactgagacttgcaaaatacccctgagagttgtcaggggtgtcttctgcctggtctatagcgtgtgtgtttgctttgtatctaacaggcacattcacgtctcgtgtactcatatgaagtatttcctaacattcccattagcctgtatataagaatcagaaagataatcccaacatgttgtaaatgaagatgtgactctataacctttctcttcttcctggaaaaaaaaggacattttcatgcatattttaaacagaaattttgtatatttaagtgtcatagaaaatatttattgagtaactgggacacaaatgggaatttaattgtcatcatatgctttgtgtgtggggatgcttaccaacaccatgtcgctggaccattgtggcaagccataactgcacaaagagtacacatcgtcagtgtgtgtgtgtgtgtgtgtgtgcgcgcacgcacgtgcgtgtgtgtgtccctgcatgtgcaacatgtctagcttgctgtccttcatgggattttagctttcccttcttgaaaaacattattttacagttccaggaggccctggttacattactatatgaaggcagtgatttgaaatgaaaattcctttcctcttggaagctttggtcataatatcatggttcaattaaacggattccaccggactttgtgatgaaaaaggctctgttaaaatccaattgagtttccaagaggaaattgtagtaggtcaagatgcatgagagggaagatggaggccacctcagctggagaacatgagctgagttgagccctcagtgttgaagttgacttgctccaagctgcagtctaaaaccctggggcccgtgcctggcctatgctccctcccaagtaagtagaggagcagaaccatcaggaacagcctgcctggctcctatgaagaaaacttcctgacgtcctgtccccaaaggaagaccctttccccaagggcaccccaggtggccattaaattgtgatgatcattcagaaagtgcccccttggctttatgagaatccaattagtcttctgaaccaccttttcttgggtgcagatttccaacattcatgctcattgcagatccaccaactgtcactgttcttaacaagcatgctcgtcttgtcagaatttcagtaagttccaatttcctgtacagaccagggtaaactgttctaaaatcaatcaattaatgaaatgttatctggtttttaaaagctggtttcatgtgctttatgtgtataaaactatatctgcctgtgtggctttgcatttcaaatgtgtggcgcacaagcgttttgttggtgctttgttctcagtacagtaactctgtgtacaaacattttaatgtggttttgttgttttccaacaagatgtctctgtaaaaatgatattggctgagctggtgcgttggtttctctcatagaggcattaactatactgccaatgcattgaattatttaaaaatgcaaaataaaatttttatgaaaatctca

SEQ ID NO: 241 - DNA, 577 bp, Homo sapiens
ttcggcacgatgggtgtttctctcatgggctgtctaacaggagagacacgtttctttctttccttttctttttggctaggccaccatgacttgtgacctagaacccccaggattaacagaggcctcacatttactctgcaagctgactccaaaggatctacagtccttacttgtcatgccacactcacacatccagtagtggtctctatctacccgcattcctagctagctggcactggcctcaactccaaagactgcctttaggaccatcaaatggcctatgcaagctagcggggtggttattaggacagattgtatattttgtatattctgggaccatcccttcaagacacgtctataaaacaaaaatggcgcttggtccacacacggttgctgctccctcctaccagctggctcccctcctgtcctcctttgactgtttgactcattgactgttaaaatgccaccccatacatatttgggatgcaaaactgaagtcaaaaggaaataatataagaaacacaaacacatatatgacagcaaccttcaagatctgggttttcagctttctgcaacc

SEQ ID NO: 242 - DNA, 1550 bp, Homo sapiens
tgccgccgtcccgcccgccagcgccccagcgaggaagcagcgcgcagcccgcggcccagcgcacccgcagcagcgcccgcagctcgtccgcgccatgttccaggcggccgagcgcccccaggagtgggccatggagggcccccgcgacgggctgaagaaggagcggctactggacgaccgccacgacagcggcctggactccatgaaagacgaggagtacgagcagatggtcaaggagctgcaggagatccgcctcgagccgcaggaggtgccgcgcggctcggagccctggaagcagcagctcaccgaggacggggactcgttcctgcacttggccatcatccatgaagaaaaggcactgaccatggaagtgatccgccaggtgaagggagacctggctttcctcaacttccagaacaacctgcagcagactccactccacttggctgtgatcaccaaccagccagaaattgctgaggcacttctgggagctggctgtgatcctgagctccgagactttcgaggaaatacccccctacaccttgcctgtgagcagggctgcctggccagcgtgggagtcctgactcagtcctgcaccaccccgcacctccactccatcctgaaggctaccaactacaatggccacacgtgtctacacttagcctctatccatggctacctgggcatcgtggagcttttggtgtccttgggtgctgatgtcaatgctcaggagccctgtaatggccggactgcccttcacctcgcagtggacctgcaaaatcctgacctggtgtcactcctgttgaagtgtggggctgatgtcaacagagttacctaccagggctattctccctaccagctcacctggggccgcccaagcacccggatacagcagcagctgggccagctgacactagaaaaccttcagatgctgccagagagtgaggatgaggagagctatgacacagagtcagagttcacggagttcacagaggacgagctgccctatgatgactgtgtgtttggaggccagcgtctgacgttatgagtgcaaaggggctgaaagaacatggacttgtatatttgtacaaaaaaaaagttttatttttctaaaaaaagaaaaaagaagaaaaaatttaaagggtgtacttatatccacactgcacactgcctagcccaaaacgtcttattgtggtaggatcagccctcattttgttgcttttgtgaactttttgtaggggacgagaaagatcattgaaattctgagaaaacttcttttaaacctcacctttgtggggtttttggagaaggttatcaaaaatttcatggaaggaccacattttatatttattgtgcttcgagtgactgaccccagtggtatcctgtgacatgtaacagccaggagtgttaagcgttcagtgatgtggggtgaaaagttactacctgtcaaggtttgtgttaccctcctgtaaatggtgtacataatgtattgttggtaattattttggtacttttatgatgtatatttattaaagagatttttacaaatg

SEQ ID NO: 243 - DNA, 780 bp, Homo sapiens
cgggatctaccataccattgactaactatggaagattataccaaaatagagaaaattggagaaggtacctatggagttgtgtataagggtagacacaaaactacaggtcaagtggtagccatgaaaaaaatcagactagaaagtgaagaggaaggggttcctagtactgcaattcgggaaatttctctattaaaggaacttcgtcatccaaatatagtcagtcttcaggatgtgcttatgcaggattccaggttatatctcatctttgagtttctttccatggatctgaagaaatacttggattctatccctcctggtcagtacatggattcttcacttgttaaggtagtaacactctggtacagatctccagaagtattgctggggtcagctcgttactcaactccagttgacatttggagtataggcaccatatttgctgaactagcaactaagaaaccacttttccatggggattcagaaattgatcaactcttcaggattttcagagctttgggcactcccaataatgaagtgtggccagaagtggaatctttacaggactataagaatacatttcccaaatggaaaccaggaagcctagcatcccatgtcaaaaacttggatgaaaatggcttggatttgctctcgaaaatgttaatctatgatccagccaaacgaatttctggcaaaatggcactgaatcatccatattttaatgatttggacaatcagattaagaagatgtagctttctgacaaaaagtttccatatgttatg

SEQ ID NO: 244 - DNA, 1089 bp, Homo sapiens
ccggccgccgcgatgcagaaatacgagaaactggaaaagattggggaaggcacctacggaactgtgttcaaggccaaaaaccgggagactcatgagatcgtggctctaaaacgggtgaggctggatgacgatgatgagggtgtgccgagttccgccctccgggagatctgcctactcaaggagctgaagcacaagaacatcgtcaggcttcatgacgtcctgcacagcgacaagaagctgactttggtttttgaattctgtgaccaggacctgaagaagtattttgacagttgcaatggtgacctcgatcctgagattgtaaagtcattcctcttccagctactaaaagggctgggattctgtcatagccgcaatgtgctacacagggacctgaagccccagaacctgctaataaacaggaatggggagctgaaattggctgattttggcctggctcgagcctttgggattcccgtccgctgttactcagctgaggtggtcacactgtggtaccgcccaccggatgtcctctttggggccaagctgtactccacgtccatcgacatgtggtcagccggctgcatctttgcagagctggccaatgctgggcggcctctttttcccggcaatgatgtcgatgaccagttgaagaggatcttccgactgctggggacgcccaccgaggagcagtggccctctatgaccaagctgccagactataagccctatccgatgtacccggccacaacatccctggtgaacgtcgtgcccaaactcaatgccacagggagggatctgctgcagaaccttctgaagtgtaaccctgtccagcgtatctcagcagaagaggccctgcagcacccctacttctccgacttctgtccgccctaggcccgggacccccggcctcagctgggcctggcctatttaagcccctcttgagaggggtgagacagtgggggtgcctggtgcgctgtgctcagcagtgctgggccagccggggtggggtgcctgagcccgaatttctcactccctttgtggactttatttaatttcataaattggctcctttcccacaaaaaaaaaagg

SEQ ID NO: 245 - DNA, 1161 bp, Homo sapiens
ccacatggaagctggaggagcaaccgggagcgctgggctggggtgcaaattgcccagtgccttctgtttcccaggcagctctgtggccatggatatgttccagaaggtagagaagatcggagagggcacctatggggtggtgtacaaggccaagaacagggagacagggcagctggtggccctgaagaagatcagactggatttggagatggagggggtcccaagcactgccatcagggagatctcgctgctcaaggaactgaagcaccccaacatcgtccgactgctggacgtggtgcacaacgagaggaagctctatctggtgtttgagttcctcagccaggacctgaagaagtacatggactccaccccaggctcagagctccccctgcacctcatcaagagctacctcttccagctgctgcagggggtgagtttctgccactcacatcgggtcatccaccgagacctgaagccccagaacctgctcatcaatgagttgggtgccatcaagctggctgacttcggcctggctcgcgccttcggggtgcccctgcgcacctacacccatgaggtggtgacactgtggtatcgcgcccccgagattctcttgggcagcaagttctataccacagctgtggatatctggagcattggttgcatctttgcagagatggtgactcgaaaagccctgtttcctggtgactctgagattgaccagctctttcgtatctttcgtatgctggggacacccagcgaagacacatggcccggggtcacccagctgcctgactataagggcagcttccctaagtggaccaggaagggactggaagagattgtgcccaatctggagccagagggcagggacctgctcatgcaactcctgcagtatgaccccagccagcggatcacagccaagactgccctggcccacccgtacttctcatcccctgagccctccccagctgcccgccagtatgtgctgcagcgattccgccattgagaatgtcaaggccacactcagatcctttctcgagcagcagctgctgccccagctgcctcctacccattgccaagagaggatgcatctggggagagcaaagcactaaggaattcagcatcagcctgcagagggctgagtctgggttagtcctgccc

SEQ ID NO: 246 - DNA, 1508 bp, Homo sapiens
gagcgcggttaccggacgggctgggtctatggtcgctccgcggccgctccgccgcgtggtgcttttttatcagggcaagctgtgttccatggcagggaacttttggcagagctcccactatttgcaatggattttggataaacaagatctgttgaaggagcgccaaaaggatttaaagtttctctcagaggaagaatattggaagttacaaatattttttacaaatgttatccaagcattaggtgaacatcttaaattaagacaacaagttattgccactgctacggtatatttcaagagattctatgccaggtattctctgaaaagtatagatcctgtattaatggctcctacatgtgtgtttttggcatccaaagtagaggaatttggagtagtttcaaatacaagattgattgctgctgctacttctgtattaaaaactagattttcatatgcctttccaaaggaatttccttataggatgaatcatatattagaatgtgaattctatctgttagaactaatggattgttgcttgatagtgtatcatccttatagacctttgctccagtatgtgcaggacatgggccaagaagacatgttgcttccccttgcatggaggatagtgaatgatacctacagaacggatctttgcctactgtatcctcctttcatgatagctttagcttgcctacatgtagcctgtgttgtacagcagaaagatgccaggcaatggtttgctgagctttctgtggatatggaaaagattttggaaataatcagggttattttaaaactatatgagcagtggaagaatttcgatgagagaaaagagatggcaaccattcttagtaagatgccaaaaccaaaaccacctccaaacagtgaaggagagcagggtccaaatggaagtcagaactctagctacagccaatcttaaaacattccgaagaattccatagtggaccacttggaaataaaccattggacagatttcagtaatgtcttcagtggaacacaaatgaaaatgaatagcttgtttctgtcaagcatattggaaagtgattttatttttgcaaatagtttttctttaatatgattctagtacataattgattgattaaatctcttgattataaatgtttggaaaggttctaaggggacctacagacagacatacatagacatttcaaaattaatagcttttgattagtataatatttcttaatttggataataaaaattgtagctttttattaagccaggaaacatgaagcataatttgtttaaaattctctttggtcattgagggaccaaaaaaggacgtaaaatttacagtcaatctatgagggtttttttccctccataagtttaactttaaaactgtatttaaggaatcaaatcttacaaaatcctggaagattttggtaatgatgttgataatttcagggaaattaatcaagtaccgtatattgatttaaaagtgtattttattcagtagtttgagg

SEQ ID NO: 247 - DNA, 1817 bp, Homo sapiens
ctgtcagaatggccaccatggtaccatccgtgttgtggcccagggcctgctggactctgctggtctgctgtctgctgaccccaggtgtccaggggcaggagttccttttgcgggtggagccccagaaccctgtgctctctgctggagggtccctgtttgtgaactgcagtactgattgtcccagctctgagaaaatcgccttggagacgtccctatcaaaggagctggtggccagtggcatgggctgggcagccttcaatctcagcaacgtgactggcaacagtcggatcctctgctcagtgtactgcaatggctcccagataacaggctcctctaacatcaccgtgtacgggctcccggagcgtgtggagctggcacccctgcctccttggcagccggtgggccagaacttcaccctgcgctgccaagtggagggtgggtcgccccggaccagcctcacggtggtgctgcttcgctgggaggaggagctgagccggcagcccgcagtggaggagccagcggaggtcactgccactgtgctggccagcagagacgaccacggagcccctttctcatgccgcacagaactggacatgcagccccaggggctgggactgttcgtgaacacctcagccccccgccagctccgaacctttgtcctgcccgtgacccccccgcgcctcgtggccccccggttcttggaggtggaaacgtcgtggccggtggactgcaccctagacgggctttttccagcctcagaggcccaggtctacctggcgctgggggaccagatgctgaatgcgacagtcatgaaccacggggacacgctaacggccacagccacagccacggcgcgcgcggatcaggagggtgcccgggagatcgtctgcaacgtgaccctagggggcgagagacgggaggcccgggagaacttgacggtctttagcttcctaggacccattgtgaacctcagcgagcccaccgcccatgaggggtccacagtgaccgtgagttgcatggctggggctcgagtccaggtcacgctggacggagttccggccgcggccccggggcagccagctcaacttcagctaaatgctaccgagagtgacgacggacgcagcttcttctgcagtgccactctcgaggtggacggcgagttcttgcacaggaacagtagcgtccagctgcgagtcctgtatggtcccaaaattgaccgagccacatgcccccagcacttgaaatggaaagataaaacgagacacgtcctgcagtgccaagccaggggcaacccgtaccccgagctgcggtgtttgaaggaaggctccagccgggaggtgccggtggggatcccgttcttcgtcaacgtaacacataatggtacttatcagtgccaagcgtccagctcacgaggcaaatacaccctggtcgtggtgatggacattgaggctgggagctcccactttgtccccgtcttcgtggcggtgttactgaccctgggcgtggtgactatcgtactggccttaatgtacgtcttcagggagcaccaacggagcggcagttaccatgttagggaggagagcacctatctgcccctcacgtctatgcagccgacagaagcaatgggggaagaaccgtccagagctgagtgacgctgggatccgggatcaaagttggcgggggcttggctgtgccctcagattccgcaccaataaagccttcaaactccctaaaaaaaaaaaaaaaaaaaaaaaaaaaaaaaaaaaaaaaaaaaaaaaaaaaaaaaaaaaaaaaaaaaaaaaaaaaaaaaaaaaaaa

SEQ ID NO: 248 - DNA, 3854 bp, Homo sapiens
tgattcatctggtgaaagacgagactccaatatctaaaaaaaagaaaaaaaaatagggctaataaatgatttaagcaaagatctgtaggatacaagggcaacatacaaaaatcatcatttatatttatatacactaacagtgaacaatctgaaaaagaaatattaaaaaattataattaaaatatccgcactgcaggtggagctcattgctcatgcctgtaatcccaacactttaggaggctgaggcataccgaccacttgcggtcaggagtcaagaccagcctggccaacatggcgaaacctcgtctctactagaaatacaaaaaataaaaataaaaataaattaaccaggcgtggtggcccacgcgcccctgtagtcgcagctactttggaggctgaggtgggagaatcacttgaactcgggaggcggaggtcgcagcgagcagagattgagccactgcactccaacctgggtgacacaagaaagaaagaaaatgaaggaaagaagaaggaaggaaagaaagaaggaaagaaggaaggaaggaagaaaggaaggaaggaaggaaggaaaaaaatagctggacatgatggaggactagcatttctcaatttcaaaacgtactacaaaccacactaatcaaaacaatgtggtactggcataaggatagacatatagatcaatggaatagaattgagagtcagaaacccatacatctaaggtcaactgattttcaaagagatgtcaagaccatgcaattggaaaagaataatctcttcaacaaatggtgctggaatacttggatactcacatgcaaaagaatgaagctgggcccttacctcacgccatttacaaaaaataactcaaaatgaaccaaagacctaaatataagagctaaaattgtaagcctcttagaaataaacagagggcgggtcgcgcgctcggtggccgttgtgcgcgtgtgtggagtgccctgctgcccccagctggaggggaactagtctgctccaggtggcaagctgcgtgagcaagcaagccaacatggaccgcgactcgtaccatcactatttctacgactatgacggcggggaggatttctaccgctccacgacgcccagcgaggacatctggaagaaattcgagttggtgccgccgccctggacttgggtccgcagccgggaacccagccctcagctttggtctcctggaacgtggccggtagggtgcgctggggacgagacggaatcccaggactactggaaagcttgggacgcgaactacgcctccctcatccgccgtgactgcatgtggagcggcttctccacccaggagccgctggagagagcggtgagtgacctgcttgccgttggcgcgccctcgggatactcgcccaaggagttcgccacccccgactacactcccgagctcgaagccggcaacctagcgcccatcttcccctgtttgttgggcgagcccaagatccaggcctgctccaggtctgagagcccaagcgactccgagggtgaagaaatcgacgtgacagtaaagaagaggcagtctttgagtacgcggaagccagtcatcatcgcggtgcgtgcagaccttctggatccccgcatgaatctcttccacatctccatccaccagcaacagcacaactatgctgccccttttcctccagaaagctgcttccaagaaggggctccaaagaggatgcccccaaaagaggctctagagagagaagctccagggggaaaggatgataaggaagatgaagagattgtgagcctcccacctgtagaaagtgaggctgcccagtcctgccagcccaaacccatccattatgatactgagaattggaccaagaagaagtaccacagctacctggagcgcaagagacggaatgatcaacgttcgcggttcttggccctgagggacgaggtacccgccctggccagctgctctagggtttccaaagtaatgatcctagtcaaggccacggaatacttacatgaactggcggaagccgaggagaggatggctacggagaaaaggcagctcgaatgccagcgacggcaattgcagaaaagaattgagtacctcagtagctactgaccaaaaagcctgaccattctgtcttaaaaagacacaagttttctttttgatctccctctcccctttagtaacttgtacatttttgttacagcaggacactctggacagtagattgcagaatcgattgcagccagtgcacaaacaatataaaggcttgcattcttggaaactttgaaacccagctctctctcttccctgacttatgggagtgctttgtgttttctggcacctttggcttctcagcaggcagctgactgaggagacttggggtcttcctggctcactatctccaaagaaaaggctgacagatggtatgcaacaggtggtggatgttgttgggggctccagcctggaggaaatctcacactctacatgaactttaggctaggaaaggatgtctctggggtgatgcaaggacagctgggtgtggacgctctcctgcggctccatttttttccaggagacacacaagctgccttgggtgaaaacaagctcagagacttgatcaacgtggaccattacctcactgtcagacactacagctagctgaggagttggaaaccttacatatatgtatatatatatgtatgtatatatgtatatatgtatatatatatgtatgtatatatgtatatatgtatatatatatgtatgtatatatgtatatatgtatatatatatgtatgtatatatgtatatattatgatgttggctgacccccttcctcccactctcaatgctgtgactcagaacatttaagagaacttcgtctgtaagtaatttgtcttaaagccctctgggctctcttctctgagtgagggaactttctgtcttcacaagggactttgtctcattctgcctctgttatgcaatgggttctacagcaccctttcccgcaggttagaaatatttccctaagacacagggaaatgggtcttagcctggggcctggggaaagttcccaagccctggctcatgaactcaatccctgcccaggtgttttctgaggggcccttgaggccaatcttttctcaagacagtgtgaggcaccttagaagggagaactgtaacactttctctttcgcacctgcctctcatctcaatccttgactgatgaatttgaagttctactagaaccatgaaaacttgttcctttcgtgcatctccaaggagcttgctggctctgcagccacgcttgggccctcgcaccagcctgcaatgaatcagatgtctgtcacagaatctgggcctctctgaagttttctggagagctgttgggactcatccagtgctccacaacgtggacttgcctcctggtgtgttttaaaggatcctccaggagctctgcttagccaatcatcatgatggatttttttttttttttttgagacggagtctcaactcttgtcgcccaggctggaggttaatggcatgatctcggctcactgcaacctctgcctcccgggttcaagcgattctcctgcctgagccttccgagtagctgggatcgcaggcgcctgccaccacgcctagctaatttctgtatttttagtagagatggggtttcaccacattggccaggctggtcttgacctcctgacctaggtgatccactgcctccatgatagattttgccccagctggactctgcagctccacgtggaatccaggtgcctgcctccagtctgggaaagtcaccaacccgcagcttgtcatgtgggtaacttctgaaccctaagcc

SEQ ID NO: 249 - DNA, 2355 bp, Homo sapiens
ccgttgcctcaacgtccaacccttctgcagggctgcagtccggccaccccaagaccttgctgcagggtgcttcggatcctgatcgtgagtcgcggggtccactccccgcccttagccagtgcccagggggcaacagcggcgatcgcaacctctagtttgagtcaaggtccagtttgaatgaccgctctcagctggtgaagacatgaccaccctggactccaacaacaacacaggtggcgtcatcacctacattggctccagtggctcctccccaagccgcaccagccctgaatccctctatagtgacaactccaatggcagcttccagtccctgacccaaggctgtcccacctacttcccaccatcccccactggctccctcacccaagacccggctcgctcctttgggagcattccacccagcctgagtgatgacggctccccttcttcctcatcttcctcgtcgtcatcctcctcctccttctataatgggagcccccctgggagtctacaagtggccatggaggacagcagccgagtgtcccccagcaagagcaccagcaacatcaccaagctgaatggcatggtgttactgtgtaaagtgtgtggggacgttgcctcgggcttccactacggtgtgctcgcctgcgagggctgcaagggctttttccgtcggagcatccagcagaacatccagtacaaaaggtgtctgaagaatgagaattgctccatcgtccgcatcaatcgcaaccgctgccagcaatgtcgcttcaagaagtgtctctctgtgggcatgtctcgagacgctgtgcgttttgggcgcatccccaaacgagagaagcagcggatgcttgctgagatgcagagtgccatgaacctggccaacaaccagttgagcagccagtgcccgctggagacttcacccacccagcaccccaccccaggccccatgggcccctcgccaccccctgctccggtcccctcacccctggtgggcttctcccagtttccacaacagctgacgcctcccagatccccaagccctgagcccacagtggaggatgtgatatcccaggtggcccgggcccatcgagagatcttcacctacgcccatgacaagctgggcagctcacctggcaacttcaatgccaaccatgcatcaggtagccctccagccaccaccccacatcgctgggaaaatcagggctgcccacctgcccccaatgacaacaacaccttggctgcccagcgtcataacgaggccctaaatggtctgcgccaggctccctcctcctaccctcccacctggcctcctggccctgcacaccacagctgccaccagtccaacagcaacgggcaccgtctatgccccacccacgtgtatgcagccccagaaggcaaggcacctgccaacagtccccggcagggcaactcaaagaatgttctgctggcatgtcctatgaacatgtacccgcatggacgcagtgggcgaacggtgcaggagatctgggaggatttctccatgagcttcacgcccgctgtgcgggaggtggtagagtttgccaaacacatcccgggcttccgtgacctttctcagcatgaccaagtcaccctgcttaaggctggcacctttgaggtgctgatggtgcgctttgcttcgttgttcaacgtgaaggaccagacagtgatgttcctaagccggaccacctacagcctgcaggagcttggtgccatgggcatgggagacctgctcagtgccatgttcgacttcagcgagaagctcaactccctggcgcttaccgaggaggagctgggcctcttcaccgcggtggtgcttgtctctgcagaccgctcgggcatggagaattccgcttcggtggagcagctccaggagacgctgctgcgggctcttcgggctctggtgctgaagaaccggcccttggagacttcccgcttcaccaagctgctgctcaagctgccggacctgcggaccctgaacaacatgcattccgagaagctgctgtccttccgggtggacgcccagtgacccgcccggccggccttctgccgctgcccccttgtacagaatcgaactctgcacttctctctcctttacgagacgaaaaggaaaagcaaaccagaatcttatttatattgttataaaatattccaagatgagcctctggccccctgagccttcttgtaaatacctgcctccctcccccatcaccgaacttcccctcctcccctatttaaaccactctgtctcccccacaaccctcccctggccctctgatttgttctgttcctgtctcaaatccaatagttcacagctaaaaaaaaaaaaaaaaaaag

SEQ ID NO: 250 - DNA, 1848 bp, Homo sapiens
ggctcaccccaggtaaggagggaggccaccgacctactgggccgacggactcccacacagttcctgagctggtgccaggcaggtgacacctcctgcagcccccagcatgcgggcaggcccaggccccaccgttacattggccctggtgctggcggtgtcatgggccatggagctcaagcccacagcaccacccatcttcactggccggccctttgtggtagcgtgggacgtgcccacacaggactgtggcccacgcctcaaggtgccactggacctgaatgcctttgatgtgcaggcctcacctaatgagggttttgtgaaccagaatattaccatcttctaccgcgaccgtctaggcctgtatccacgcttcgattctgccggaaggtctgtgcatggtggtgtgccacagaatgtcagcctttgggcacaccggaagatgctgcagaaacgtgtggagcactacattcggacacaggagtctgcggggctggcggtcatcgactgggaggactggcgacctgtgtgggtgcgcaactggcaggacaaagatgtgtatcgccggttatcacgccagctagtggccagtcgtcaccctgactggcctccagaccgcatagtcaaacaggcacaatatgagtttgagttcgcagcacagcagttcatgctggagacactgcgttatgtcaaggcagtgcggccccggcacctctggggcttctacctctttcctgactgctacaatcatgattatgtgcagaactgggagagctacacaggccgctgccctgatgttgaggtggcccgcaatgaccagctggcctggctgtgggctgagagcacggccctcttcccgtctgtctacctggacgagacacttgcttcctcccgccatggccgcaactttgtgagcttccgtgttcaggaggcccttcgtgtggctcgcacccaccatgccaaccatgcactcccagtctacgtcttcacacgacccacctacagccgcaggctcacggggcttagtgagatggacctcatctctaccattggcgagagtgcggccctgggcgcagctggtgtcatcctctggggtgacgcggggtacaccacaagcacggagacctgccagtacctcaaagattacctgacacggctgctggtcccctacgtggtcaatgtgtcctgggccacccaatattgcagccgggcccagtgccatggccatgggcgctgtgtgcgccgcaaccccagtgccagtaccttcctgcatctcagcaccaacagtttccgcctagtgcctggccatgcacctggtgaaccccagctgcgacctgtgggggagctcagttgggccgacattgaccacctgcagacacacttccgctgccagtgctacttgggctggagtggtgagcaatgccagtgggaccataggcaggcagctggaggtgccagcgaggcctgggctgggtcccacctcaccagtctgctggctctggcagccctggcctttacctggaccttgtaggggtctcctgcctagctgcctagcaagctggcctctaccacaagggctctcttaggcatgtaggaccctgcagggggtggacaaactggagtctggagtgggcagagcccccaggaagcccaggagggcatccataccagctcgcacccccctgttctaagggggaggggaagtccctgggaggccccttctctccctgccagaggggaaggagggtacagctgggctggggaggacctgaccctactcccttgccctagatagtttattattattattattttggggtctcttttgtaaattaaacataaaacaattgc

SEQ ID NO: 251 - DNA, 742 bp, Homo sapiens
ttttttttaacgatttctcaattgcattctggtggccgggggcccggtggccgcggcgtgggcggggcgttggaggtgggagggccccggctgagtgaggggctcactcaaaacaggcacagtcagctgggctgagcgaggctcaaagtaaggcggtgttcctcacagaagaacacatcggaaaaagctgctcctcttctgctggtccggtgtgattttgactccctggttgctcccctggggggctgttgccttccaattttttgtccatttttgctttgatatctctggcgagagtgaaaaatgcattttccacattgatgttggccttcgcgctggtctccatgaacttgattccatagtcgagggccagcttttctccccgttccttggaaacttgtctcttgtcattcacatcacacttgttcccaagtatcatcttttcgacgtctgcagaggcgtgctcctcaatgttgcgaatccagttccggatgttgtcgaaggacttctcgttggtgatgtcgtagaccagcatgatgcccattgcacccctgtagtaggccgttgtgatcgtccgaaaccgttcctgaccggctgtgtcccatatctgcagtttaattctcttgccatcgagctctatgggcctaatttaaagtcaattcctatggtggagataaaagttgagttgaagcgtccttcgagaagcggaacaggacacaggtctttcccaccccgtagtccc

SEQ ID NO: 252 - DNA, 2566 bp, Homo sapiens
ggcacgagttgtgctcctcgcttgcctgttccttttccacgcattttccaggataactgtgactccaggcccgcaatggatgccctgcaactagcaaattcggcttttgccgttgatctgttcaaacaactatgtgaaaaggagccactgggcaatgtcctcttctctccaatctgtctctccacctctctgtcacttgctcaagtgggtgctaaaggtgacactgcaaatgaaattggacaggttcttcattttgaaaatgtcaaagatataccctttggatttcaaacagtaacatcggatgtaaacaaacttagttccttttactcactgaaactaatcaagcggctctacgtagacaaatctctgaatctttctacagagttcatcagctctacgaagagaccctatgcaaaggaattggaaactgttgacttcaaagataaattggaagaaacgaaaggtcagatcaacaactcaattaaggatctcacagatggccactttgagaacattttagctgacaacagtgtgaacgaccagaccaaaatccttgtggttaatgctgcctactttgttggcaagtggatgaagaaatttcctgaatcagaaacaaaagaatgtcctttcagactcaacaagacagacaccaaaccagtgcagatgatgaacatggaggccacgttctgtatgggaaacattgacagtatcaattgtaagatcatagagcttccttttcaaaataagcatctcagcatgttcatcctactacccaaggatgtggaggatgagtccacaggcttggagaagattgaaaaacaactcaactcagagtcactgtcacagtggactaatcccagcaccatggccaatgccaaggtcaaactctccattccaaaatttaaggtggaaaagatgattgatcccaaggcttgtctggaaaatctagggctgaaacatatcttcagtgaagacacatctgatttctctggaatgtcagagaccaagggagtggccctatcaaatgttatccacaaagtgtgcttagaaataactgaagatggtggggattccatagaggtgccaggagcacggatcctgcagcacaaggatgaattgaatgctgaccatccctttatttacatcatcaggcacaacaaaactcgaaacatcattttctttggcaaattctgttctccttaagtggcatagcccatgttaagtcctccctgacttttctgtggatgccgatttctgtaaactctgcatccagagattcattttctagatacaataaattgctaatgttgctggatcaggaagccgccagtacttgtcatatgtagccttcacacagatagacctttttttttttccaattctatcttttgtttccttttttcccataagacaatgacatacgcttttaatgaaaaggaatcacgttagaggaaaaatatttattcattatttgtcaaattgtccggggtagttggcagaaatacagtcttccacaaagaaaattcctataaggaagatttggaagctcttcttcccagcactatgctttccttctttgggatagagaatgttccagacattctcgcttccctgaaagactgaagaaagtgtagtgcatgggacccacgaaactgccctggctccagtgaaacttgggcacatgctcaggctactataggtccagaagtccttatgttaagccctggcaggcaggtgtttattaaaattctgaattttggggattttcaaaagataatattttacatacactgtatgttatagaacttcatggatcagatctggggcagcaacctataaatcaacaccttaatatgctgcaacaaaatgtagaatattcagacaaaatggatacataaagactaagtagcccataaggggtcaaaatttgctgccaaatgcgtatgccaccaacttacaaaaacacttcgttcgcagagcttttcagattgtggaatgttggataaggaattatagacctctagtagctgaaatgcaagaccccaagaggaagttcagatcttaatataaattcactttcatttttgatagctgtcccatctggtcatgtggttggcactagactggtggcaggggcttctagctgactcgcacagggattctcacaatagccgatatcagaatttgtgttgaaggaacttgtctcttcatctaatatgatagcgggaaaaggagaggaaactactgcctttagaaaatataagtaaagtgattaaagtgctcacgttaccttgacacatagtttttcagtctatgggtttagttactttagatggcaagcatgtaacttatattaatagtaatttgtaaagttgggtggataagctatccctgttgccggttcatggattacttctctataaaaaatatatatttaccaaaaaattttgtgacattccttctcccatctcttccttgacatgcattgtaaataggttcttcttgttctgagattcaatattgaatttctcctatgctattgacaataaaatattattgaactacc

SEQ ID NO: 253 - DNA, 8600 bp, Homo sapiens
  misc_feature (7444)..(7444): n is a, c, g, or t
gtgctgtacgtccaagatggcggcgcctgtaggctggagggactgtgaggtaaacagctgagggggaggagacggtggtgaccatgaaagacaccaggttgacagcactggaaactgaagtaccagttgtcgctagaacagtttggtagtggccccaatgaagaaccttcagaacctgtagcacacgtcctggagccagcacagcgccttcgagcgagagaatggcccaacaagcaaatgtcggggagcttcttgccatgctggactcccccatgctgggtgtgcgggacgacgtgacagctgtctttaaagagaacctcaattctgaccgtggccctatgcttgtaaacaccttggtggattattacctggaaaccagctctcagccggcattgcacatcctgaccaccttgcaagagccacatgacaagcacctcttggacaggattaacgaatatgtgggcaaagccgccactcgtttatccatcctctcgttactgggtcatgtcataagactgcagccatcttggaagcataagctctctcaagcacctcttttgccttctttactaaaatgtctcaagatggacactgacgtcgttgtcctcacaacaggcgtcttggtgttgataaccatgctaccaatgattccacagtctgggaaacagcatcttcttgatttctttgacatttttggccgtctgtcatcatggtgcctgaagaaaccaggccacgtggcggaagtctatctcgtccatctccatgccagtgtgtacgcactctttcatcgcctttatggaatgtacccttgcaacttcgtctcctttttgcgttctcattacagtatgaaagaaaacctggagacttttgaagaagtggtcaagccaatgatggagcatgtgcgaattcatccggaattagtgactggatccaaggaccatgaactggaccctcgaaggtggaagagattagaaactcatgatgttgtgatcgagtgtgccaaaatctctctggatcccacagaagcctcatatgaagatggctattctgtgtctcaccaaatctcagcccgctttcctcatcgttcagccgatgtcaccaccagcccttatgctgacacacagaatagctatgggtgtgctacttctaccccttactccacgtctcggctgatgttgttaaatatgccagggcagctacctcagactctgagttccccatcgacacggctgataactgaaccaccacaagctactctttggagcccatctatggtttgtggtatgaccactcctccaacttctcctggaaatgtcccacctgatctgtcacacccttacagtaaagtctttggtacaactgcaggtggaaaaggaactcctctgggaaccccagcaacctctcctcctccagccccactctgtcattcggatgactacgtgcacatttcactcccccaggccacagtcacaccccccaggaaggaagagagaatggattctgcaagaccatgtctacacagacaacaccatcttctgaatgacagaggatcagaagagccacctggcagcaaaggttctgtcactctaagtgatcttccagggtttttaggtgatctggcctctgaagaagatagtattgaaaaagataaagaagaagctgcaatatctagagaactttctgagatcaccacagcagaggcagagcctgtggttcctcgaggaggctttgactctcccttttaccgagacagtctcccaggttctcagcggaagacccactcggcagcctccagttctcagggcgccagcgtgaaccctgagcctttacactcctccctggacaagcttgggcctgacacaccaaagcaagcctttactcccatagacctgccctgcggcagtgctgatgaaagccctgcgggagacagggaatgccagacttctttggagaccagtatcttcactcccagtccttgtaaaattccacctccgacgagagtgggctttggaagcgggcagcctcccccgtatgatcatctttttgaggtggcattgccaaagacagcccatcattttgtcatcaggaagactgaggagctgttaaagaaagcaaaaggaaacacagaggaagatggtgtgccctctacctccccaatggaagtgctggacagactgatacagcagggagcagacgcgcacagcaaggagctgaacaagttgcctttacccagcaagtctgtcgactggacccactttggaggctctcctccttcagatgagatccgcaccctccgagaccagttgcttttactgcacaaccagttactctatgagcgttttaagaggcagcagcatgccctccggaacaggcggctcctccgcaaggtgatcaaagcagcagctctggaggaacataatgctgccatgaaagatcagttgaagttacaagagaaggacatccagatgtggaaggttagtctgcagaaagaacaagctagatacaatcagctccaggagcagcgtgacactatggtaaccaagctccacagccagatcagacagctgcagcatgaccgagaggaattctacaaccagagccaggaattacagacgaagctggaggactgcaggaacatgattgcggagctgcggatagaactgaagaaggccaacaacaaggtgtgtcacactgagctgctgctcagtcaggtttcccaaaagctctcaaacagtgagtcggtccagcagcagatggagttcttgaacaggcagctgttggttcttggggaggtcaacgagctctatttggaacaactgcagaacaagcactcagataccacaaaggaagtagaaatgatgaaagccgcctatcggaaagagctagaaaaaaacagaagccatgttctccagcagactcagaggcttgatacctcccaaaaacggattttggaactggaatctcacctggccaagaaagaccaccttcttttggaacagaagaaatatctagaggatgtcaaactccaggcaagaggacagctgcaggccgcagagagcaggtatgaggctcagaaaaggataacccaggtgtttgaattggagatcttagatttatatggcaggttggagaaagatggcctcctgaaaaaacttgaagaagaaaaagcagaagcagctgaagcagcagaagaaaggcttgactgttgtaatgacgggtgctcagattccatggtagggcacaatgaagaggcatctggccacaacggtgagaccaagacccccaggcccagcagcgcccggggcagtagtggaagcagaggtggtggaggcagcagcagcagcagcagcgagctttctaccccagagaaacccccacaccagagggcaggcccattcagcagtcggtgggagacgactatgggagaagcgtctgccagcatccccaccactgtgggctcacttcccagttcaaaaagcttcctgggtatgaaggctcgagagttatttcgtaataagagcgagagccagtgtgatgaggacggcatgaccagtagcctttctgagagcctaaagacagaactgggcaaagacttgggtgtggaagccaagattcccctgaacctagatggccctcacccgtctcccccgaccccggacagtgttggacagctacatatcatggactacaatgagactcatcatgaacacagctaaggaatgatggtcaatcagtgttaacttgcatattgttggcacagaacaggaggtgtgaatgcacgtttcaaagctttcctgtttccagggtctgagtgcaagttcatgtgtggaaatgggacggaggtcctttggacagctgactgaatgcagaacggtttttggatctggcattgaaatgcctcttgaccttcccctccacccgccctaaccccctctcatttacctcgcagtgtgttctaatccaagggccagttggtgttcctcagtagctttactttcttccttcccccccaaatggttgcgtcctttgaacctgtgcaatatgaggccaaatttaatctttgagtctaacacaccactttctgctttcccgaagttcagataactgggttggctctcaattagaccaggtagtttgttgcattgcaggtaagtctggttttgtcccttccaggaggacatagcctgcaaagctggttgtctttacatgaaagcgtttacatgagactttccgactgcttttttgattctgaagttcagcatctaaagcagcaggtctagaagaacaacggtttattcatacttgcattcttttggcagttctgataagcttcctagaaagttctgtgtaaacagaagcctgtttcagaaatctggagctggcactgtggagaccacacaccctttgggaaagctcttgtctcttcttcccccactacctcttatttatttggtgtttgcttgaatgctggtactattgtgaccacaggctggtgtgtaggtggtaaaacctgttctccataggagggaaggagcagtcactgggagaggttacccgagaagcacttgagcatgaggaactgcacctttaggccatctcagcttgctgggccttttgttaaacccttctgtctactggcctccctttgtgtgcatacgcctcttgttcatgtcagcttatatgtgacactgcagcagaaaggctctgaaggtccaaagagtttctgcaaagtgtatgtgaccatcatttcccaggccattagggttgcctcactgtagcaggttctaggctaccagaagaggggcagctttttcataccaattccaactttcaggggctgactctccagggagctgatgtcatcacactctccatgttagtaatggcagagcagtctaaacagagtccgggagaatgctggcaaaggctggctgtgtatacccactaggctgccccacgtgctcccgagagatgacactagtcagaaaagtggcagtggcagagaatccaaactcaacaagtgctcctgaaagaaatgctagaagcctaagaactgtggtctggtgttccagctgaggcagggggatttggtaggaaggagccagtgaacttggctttcctgtttctatctttcattaaaaagaatagaaggattcagtcataaagaggtaaaaaactgtcacggtacgaaatcttagtgcctacggaggcctcgagcagaaagaatgaaagtcttttttttttttttttttttttagcatggcaataaatattctagcatccctaactaaaggggactagacagttagagactctgtcaccctagctataccagcagaaaacctgttcaggcaggctttctgggtgtgactgattcccagcctgtggcagggcgtggtcccaactactcagcctagcacaggctggcagttggtactgaattgtcagatgtggagtattagtgacaccacacatttaattcagctttgtccaaaggaaagcttaaaacccaatacagtctagtttcctggttccgttttagaaaaggaaaacgtgaacaaacttagaaagggaaggaaatcccatcagtgaatcctgaaactggttttaagtgctttccttctcctcatgcccaagagatctgtgccatagaacaagataccaggcacttaaagccttttcctgaattggaaaggaaaagaggcccaagtgcaaaagaaaaaacattttagaaacggacagcttataaaaataaagggaagaaaggaggcagcatggagagaggcctgtgctagaagctccatggacgtgtctgcacagggtcctcagctcatccatgcggcctgggtgtccttttactcagctttataacaaatgtggctccaagctcaggtgcctttgagttctaggaggctgtgggttttattcaactacggttgggagaatgagacctggagtcatgttgaaggtgcccaacctaaaaatgtaggctttcatgttgcaaagaactccagagtcagtagttaggtttggtttggttttggacatgataaacctgccaagagtcaacaggtcacttgatcatgctgcagtgggtagttctaaggatggaaaggtgacagtattactctcgagaggcaattcagtcctgggcaaaggtattagtacaataagcgttaagggcagagtctaccttgaaaccaattaagcagcttggtattcataaatattgggattggatggcctccatccagaaatcactatgggtgagcatacctgtctcagctgtttggccaatgtgcataacctactcggatccccacctgacactaaccagagtcagcacaggccccgaggagcccgaagttctctgctgtgcagcatggaattcctttaaaaaggtgcactacagttttagcggggagggggataggaagacgcagagcaaatgagctccggagtccctgcaggtgaataaacacacagatctgcatctgatagaactttgatggattttcaaaaagccgttgacaaggctctgctatacagtctataaaaattgttattatgggattggaagaaacacatggtcatgaatagaaaaaaaacaaacccaaaggtaggaaggtcaaggtcatttcttagatggagaagttgtgaaagatgtccttggagatgagttttaggaccagcattactaaggcaggtgggcagacagtgacctctctaggtgtgtccacagagtttttcaggagagaaaactgcctgacctttgggactaagctgcggaatcttcttactaagcttgaagagtggagaggcgagaggtgagctactttgtgagccaaagcttatgtgacatggttggggaaacagtccaaactgttctgagaaggtgaactgttacgacccaggacaattagaaaaattcacccaccatgccgcacattactgggtaaaagcagggcagcagggaacaaaactccagactcttgggccgtccccatttgcaacagcacacatagtttctggtatatttgttgggaaagataaaactctagcagttgttgaggggaggatgtataaaatggtcatggggatgaaaggatctctgagaccacagaggctcagactcactgttaagaatagaaaactgggtatgcgtttcatgtagccagcagaactgaagtgtgctgtgacaagccaatgtgaatttctaccaaatagtagagcataccacttgaagaaggaaagaaccgaagagcaaacaaaagttctgcgtaatgagactcaccttttctcgctgaaagcactaagaggtgggaggaggcctgcacaggctggaggagggtttgggcagagcgaagacccggccaggaccttggtgagatggagtgccgcccacctcctgcggatactcttggagagttgttcccccaggggnctctgccccacctggagaaggaagctgcctggtgtggagtgactcaaatcagtatacctatctgctgcaccttcactctccagggtacatgctttaaaaccgacccgcaacaagtattggaaaaatgtatccagtctgaagatgtttgtgtatctgtttacatccagagttctgtgacacatgccccccagattgctgcaaagatcccaaggcattgattgcacttgattaagcttttgtctgtaggtgaaagaacaagtttaggtcgaggactggcccctaggctgctgctgtgacccttgtcccatgtggcttgtttgcctgtccgggactcttcgatgtgcccaggggagcgtgttcctgtctcttccatgccgtcctgcagtccttatctgctcgcctgagggaagagtagctgtagctacaagggaagcctgcctggaagagccgagcacctgtgcccatggcttctggtcatgaaacgagttaatgatggcagaggagcttcctccccacttcgcagcgccacattatccatcctctgagataagtaggctggtttaaccattggaatggacctttcagtggaaaccctgagagtctgagaacccccagaccaacccttccctccctttccccacctcttacagtgtttggacaggagggtatggtgctgctctgtgtagcaagtactttggcttatgaaagaggcagccacgcattttgcactaggaagaatcagtaatcacttttcagaagacttctatggaccacaaatatattacggaggaacagattttgctaagacataatctagttttataactcaatcatgaatgaaccatgtgtggcaaacttgcagtttaaaggggtcccatcagtgaaagaaactgattttttttaacggactgcttttagttaaattgaagaaagtcagctcttgtcaaaaggtctaaactttcccgcctcaatcctaaaagcatgtcaacaatccacatcagatgccataaatatgaactgcaggataaaatggtacaatcttagtgaatgggaattggaatcaaaagagtttgctgtccttcttagaatgttctaaaatgtcaaggcagttgcttgtgtttaactgtgaacaaataaaaatttattgttttgcact

SEQ ID NO: 254 - DNA, 1829 bp, Homo sapiens
ccggtgctgagagaaccgtggctggcaaagatgattcaggcgattctggttttcaacaaccatgggaagccacggctagtccgcttctaccagcgtttcccagaagaaattcaacagcagattgttcgagagactttccatctagtcctcaagcgggatgacaacatctgtaacttcttggagggtggaagtttgattggtggctctgactacaaactgatctaccggcactatgctaccctctactttgtattttgtgtggattcctcagagagtgaacttggaatcttggacctcatccaggtttttgtggaaactctggataagtgtttcgaaaatgtgtgtgaattggatttgatcttccatatggataaggtgcactacatcctccaggaggtggtgatgggtgggatggtgttggaaacaaacatgaatgaaatcgtggctcagattgaggctcaaaacaggctggagaaatccgagggtggcctttcagcagcccctgcgcgggctgtgtctgctgtgaaaaacatcaacctgccagagattcctcggaacatcaacattggcgatctcaacatcaaagttcccaacctgtcccagtttgtctgaggatcaagtattggcctgaaatagagtccttaagacaagcaaagacaagcaaggcaagcacgtctggaaacagaacccattttgagccttagaagagtcaagcctcaggacctggaaactttgtgtctggggaagactgtttggcatggaatagggaagggattcctattgacactgctcgggtgcacccagttctcacatgtgcagtcatgccgttctctgatgcatacggccactgcagatgtgaggggccctgccttcctcagtagggagtcaacatgcccaagtcatttgcacctttacctctcacatggatgctcccaagggttagggactgcattgagcaggcccacctgcttcccagaacctcctcactagggctgagcaccttctctgagtagagtcttcatccttagcaccacagacttctgaggtcctgtgccctttacttgctggtgaggtgtcataggtagaaaagggctggcccttcagatctgggggtgtggtgagtggcaagtaagggcagaattttaggagaaccagagtcacccgctggctctactgagattgttacacccagaatccttttgtgtttttttgtggttttttttttttgaggtggagtcttgctctgtcacccaggctggagtgctgtggtgcaatctcggctcactgcaacctctgcttcccgggttcaagcatttctcctgtctcagcctccccagtagctgggattacaggcacccaccaccatgcccagctaattgttgtatgtttagtagagacagggtttcaccatgttggccaggctgggctcgaactcctggacctcaagtgatctacccgccttggcctcccaaagtgctggcattacaggtgtgagccaccgtgcccggccaccagaatcctttggtatagccaagccttttggttaccgcctcatgaagaatatgcttcccgcattgtcctagtcccagttgtattctcacaggtgttatgtgcaggacacaatccaaatcataaacctggctcatgcccaacacatttctgctaatagggagagggacccaccacacacccacacatgccagaggtccctcctcacagaggagagggcctgtgtctgtagaaggttaaagctgacaacatgtgaaacatcccagaattatgactcttcccaagtttaaaatacattctcctcatgagagcagaaggtt

SEQ ID NO: 255 - DNA, 688 bp, Homo sapiens
  misc_feature (665)..(665): n is a, c, g, or t
tttttcgtaatcaactactttatgtgaagaaaaaaggcattgttaacaatggctcaaaactgttcttgcaacacgtgaggcagcctcagtcccgcttctagctggcgaaggccttgccggcatcctccttgcctctgtaccttctcttcccatgtgtgaacgggatgtaccggtacttaatcatgtgcttgatttgcctcttcatcgtgatacagaagagcatgatgaagtacatcaccagaatcggccagaacaccgggacgttgaaagcgtcgaagaaagtacagaccatagccacaaggatgcccttggtagccgcatgccaaaatttaaactctgggagccttcgaatgaaggggcggaattcctcgttctgtttggtgggtagcgaaggaccgtcatctgagtcttccattaaggaaggatccactttgggagaaagaaaagctatgaaaagatttagatggtagatccccaaggcataggtcacaatgtaccaaccctgcagcaggtaaactcgaatcatgtagacaaagctcaggcccagtgtcacgacccatcgcacagccgtgtagggtgtggacttgtctagccaggactgataaatctgtccaagtcttgtgaaaaatctgtacaccaaccgaagtttcccatggacggattcntccacactgtccccttcagacat

SEQ ID NO: 256 - DNA, 1201 bp, Homo sapiens
gggcgaggagggagcccgcggcggcggcagcagctacagcgaaatggcggagaccgtggctgacacccggcggctgatcaccaagccgcagaacctgaatgacgcctacggaccccccagcaacttcctcgagatcgatgtgagcaacccgcaaacggtgggggtcggccggggccgcttcaccacttacgaaatcagggtcaagacaaatcttcctattttcaagctgaaagaatctactgttagaagaagatacagtgactttgaatggctgcgaagtgaattagaaagagagagcaaggtcgtagttcccccgctccctgggaaagcgtttttgcgtcagcttccttttagaggagatgatggaatatttgatgacaattttattgaggaaagaaaacaagggctggagcagtttataaacaaggtcgctggtcatcctctggcacagaacgaacgttgtcttcacatgtttttacaagatgaaataatagataaaagctatactccatctaaaataagacatgcctgaaatttggcaagaaggggcaaaaacgtgactattaatgattgataagcaccagtgaagaagttctaacttttagcatgctgcacagaaactggtataacatgccttcagtatactaacactcatatgctcagttttgttttgttttggcagttgacaagaagttaatttgctttagtaaaaatccctcattccagcctttctatataaatagctctttcttgctgttttaatgtggtgcacactatagcctcacaaacctgttattccagtgtaatctgcagtgtcgtaactaaagttactggcttggtcttatttgcacagtttttgcgtcttgtttgcttcttgcatctgattaactagaatatttctctttcccccttttaatttgtgatgtcacttgaccccatttatgtgtaggagcactacaccattggtttccaatactgcacacataagatacatacttgtgtgcagaaagtatcttcctccaggcttgtaatacccttcacatggaagattaatgagggaaatctttatattctgtataaaaacaaaagcaaatttatatactaaaatcatttgtctaaaaatttaagttgttttcaaataaaaattaaaatgcatttctgatatgcaaaaaaaaaaaaaaaaaaaaaaaaaaaaaaaaaa

SEQ ID NO: 257 - DNA, 974 bp, Homo sapiens
cggaaactggacactggaccggcagcgccatgagactcctcccccgcttgctgctgcttctcttactcgtgttccctgccactgtcttgttccgaggcggccccagaggctcgttagcagtggcacaagatcttacagaggatgaagaaacagtagaagattccataattgaggatgaagatgatgaagccgaggtagaagaagatgaacccacagatttggtagaagataaagaggaagaagatgtgtctggtgaacctgaagcttcaccgagtgcagatacaactatactgtttgtaaaaggagaagattttccagcaaataacattgtgaagttcctggtaggctttaccaacaagggtacagaagattttattgttgaatccttagatgcctcattccgttatcctcaggaccaccagttttatatccagaatttcacagctcttcctctgaacactgtagtgccaccccagagacaggcaacttttgagtactctttcattcctgcagagcccatgggcggacgaccatttggtttggtcatcaatctgaactacaaagatttgaacggcaatgtattccaagatgcagtcttcaatcaaacagttacagttattgaaagagaggatgggttagatggagaaacaatctttatgtatatgttccttgctggtcttgggcttctggttattgttggccttcatcaactcctagaatctagaaagcgtaagagacccatacagaaagtagaaatgggtacatcaagtcagaatgatgttgacatgagttggattcctcaggaaacattgaatcaaatcaataaagcttcaccaagaaggttgcccaggaaacgggcacagaagagatcagtgggatctgatgagtaaatgttcctttgtgcaacaattcggtctttacttaacctgccctaatatttttcggcctgatgggaattagtgcagagaagccaa

SEQ ID NO: 258 - DNA, 859 bp, Homo sapiens
ccgccgtcgtcgccgccccccgtcccggcccccctgggttccctcagcccagccctgtccagcccggttcccgggaggatgaagttcgtgtacaaagaagagcatccgttcgagaagcgccgctctgagggcgagaagatccgaaagaaatacccggaccgggtgccggtgatagtagaaaaggctcccaaagctcggataggagacctggacaaaaagaaatacctggtgccttctgatctcacagttggtcagttctacttcttgatccggaagcgaattcatctccgagctgaggatgccttgtttttctttgtcaacaatgtcattccacccaccagtgccacaatgggtcagctgtaccaggaacaccatgaagaagacttctttctctacattgcctacagtgacgaaagtgtctacggtctgtgaagctgctgcccctgagctggaggggggtctcattctacaaagagagaggtggcccccctttcttgacctcctcctccttcaagctcaaacaccacctcccttattcaggaccggcacttcttaatgtttgtggctttctctccagcctctcttaggaggggtaatggtggagttggcatcttgtaactctcctttctcctttcttcccctttctctgcccgcctttcccatcctgctgtagacttcttgattgtcagtctgtgtcacatccagtgattgttttggtttctgttccctttctgactgcccaaggggctcagaaccccagcaatcccttcctttcactaccttcttttttgggggtagttggaagggactgaaattgtggggggaaggtaggaggcacatcaataaagaggaaaccacc

SEQ ID NO: 259 - DNA, 1378 bp, Homo sapiens
gctggcaccgaggcctgaccatggacgaggaatacgatgtgatcgtgctgggcaccggcctgacggaatgtatcctgtcaggtataatgtcagtgaatggcaagaaagttcttcatatggatcgaaacccttactacggaggagaaagtgcatctataacaccattggaagatttatacaaaagatttaaaataccaggatcaccacccgagtcaatggggagaggaagagactggaatgttgacttgattcccaagttccttatggctaatggtcagctggttaagatgctgctttatacagaggtaactcgctatctggattttaaagtgactgaagggagctttgtctataagggtggaaaaatctacaaggttccttccactgaagcagaagccctggcatctagcctaatgggattgtttgaaaaacgtcgcttcaggaaattcctagtgtatgttgccaacttcgatgaaaaagatccaagaacttttgaaggcattgatcctaagaagaccacaatgcgagatgtgtataagaaatttgatttgggtcaagacgttatagattttactggtcatgctcttgcactttacagaactgatgattacttagatcaaccgtgttatgaaaccattaatagaattaaactttacagtgaatctttggcaagatatggcaaaagcccatacctttatccactctatggccttggagaactgccccaaggatttgcaaggctaagtgctatttatggaggtacctatatgctgaataaacccattgaagaaatcattgtacagaatggaaaagtaattggtgtaaaatctgaaggagaaattgctcgctgtaagcagctcatctgtgaccccagctacgtaaaagatcgggtagaaaaagtgggccaggtgatcagagttatttgcatcctcagccaccccatcaagaacaccaatgatgccaactcctgccagatcattattccacagaaccaagtcaatcgaaagtcagatatctacgtctgcatgatctcctttgcgcacaatgtagcagcacaagggaagtacattgctatagttagtacaactgtggaaaccaaggagcctgagaaggaaatcagaccagctttggagctcttggaaccaattgaacagaaatttgttagcatcagtgacctcctggtaccaaaagacttgggaacagaaagccagatctttatttcccgcacatatgatgccaccactcattttgagacaacgtgtgatgacattaaaaacatctataagaggatgacaggatcagagtttgactttgaggaaatgaagcgcaagaagaatgacatctatggggaagactaacagcagtacatgttattatg

SEQ ID NO: 260 - DNA, 1232 bp, Homo sapiens
aagcttccttgaggtttctaaaatttatacaaaaacatcatatgtaagtaaactcaccagatttggcatctgctctttggtgatggacccagaagaaacttcagtttatttggattattactatgctacgagcccaaactctgacatcagggagacccactcccatgttccttacacctctgtcttccttccagtcttttacacagctgtgttcctgactggagtgctggggaaccttgttctcatgggagcgttgcatttcaaacccggcagccgaagactgatcgacatctttatcatcaatctggctgcctctgacttcatttttcttgtcacattgcctctctgggtggataaagaagcatctctaggactgtggaggacgggctccttcctgtgcaaagggagctcctacatgatctccgtcaatatgcactgcagtgtcctcctgctcacttgcatgagtgttgaccgctacctggccattgtgtggccagtcgtatccaggaaattcagaaggacagactgtgcatatgtagtctgtgccagcatctggtttatctcctgcctgctggggttgcctactcttctgtccagggagctcacgctgattgatgataagccatactgtgcagagaaaaaggcaactccaattaaactcatatggtccctggtggccttaattttcaccttttttgtccctttgttgagcattgtgacctgctactgttgcattgcaaggaagctgtgtgcccattaccagcaatcaggaaagcacaacaaaaagctgaagaaatctataaagatcatctttattgtcgtggcagcctttcttgtctcctggctgcccttcaatactttcaagttcctggccattgtctctgggttgcggcaagaacactatttaccctcagctattcttcagcttggtatggaggtgagtggacccttggcatttgccaacagctgtgtcaaccctttcatttactatatcttcgacagctacatccgccgggccattgtccactgcttgtgcccttgcctgaaaaactatgactttgggagtagcactgagacatcagatagtcacctcactaaggctctctccaccttcattcatgcagaagattttgccaggaggaggaagaggtctgtgtcactctaaagggaactgtgacatttcaagctctgttggtgggtttaggagttaatttttgtcagcaacaaagaaa

SEQ ID NO: 261 - DNA, 3542 bp, Homo sapiens
  misc_feature (11)..(11): n is a, c, g, or t
gaattctgggnttaggcgattctgggttagcaggcttgggcccaagtgctcgagtgctggggttgagttggatgacccggcgaagggtaagcattcctgcagggacccgaggccctggwgggactgatggtcatctgcggttaagccggcaggaggcgtctggggcagggacccaggggtccgaacagcaggaggtgtccaatttaggaatccaggtatccaggcaggaggcagagtcaggcccaaaatccaggtgtccgggcagaaggaggcatctgactcagggatccagtcttccagcaggggggtctgcccagagacctagagattcaggcggaaagaagggtccagccaggaacagaagtctgggagggtggggggtggggggctgagttcccaggtgttaccgcgggagtgcggggtgatggctggcgggagcttcacgcgcattccctgggggcggagtctaaggctggcagtactgaaaatcgtgaggggtctgggagcctcaggcacgagctagcatcatcatctctgatgggagggagcggagctgctcagtctccctgatggggtagatgtttccctaccccaatcttgagccttcgggggcatcccctggatcctatggccctcttccacttatagtaccccttcttctgtctctcctctggtcacacacgtgggaaaaagagacctgcaggacctaggacagggatccccaggaagagacccctgtttagaggcctgggggcattggaggggacagcggtatcctgggaagagccccagggcatgaatgtggggataaggcattgggactctatcaggtatcctgaggagagactcccaccacgtatcctgagaagcacctcaccccctccagaccccaactcccatcacccagcttggtcagcttctcacaaggcctttctcctgcaggtaccatgatgtggggtgcaggcagccctctggcctggctctcagctggctcaggcaacgtgaatgtaagcagcgtgggcccagcagaggggcccacaggtccagccgcaccactgccctcgcctaaggcctgggatgtggtgctctgcatctcaggcaccctggtgtcctgcgagaatgcgctagtggtggccatcatcgtgggcactcctgccttccgtgcccccatgttcctgctggtgggcagcctggccgtggcagacctgctggcaggcctgggcctggtcctgcactttgctgctgtcttctgcatcggctcagcggagatgagcctggtgctggttggcgtgctggcaatggcctttaccgccagcatcggcagtctactggccatcactgtcgaccgctacctttctctgtacaatgccctcacctactattcagagacaacagtgacacggacctatgtgatgctggccttagtgtggggaggtgccctgggcctggggctgctgcctgtgctggcctggaactgcctggatggcctgaccacatgtggcgtggtttatccactctccaagaaccatctggtagttctggccattgccttcttcatggtgtttggcatcatgctgcagctctacgcccaaatctgccgcatcgtctgccgccatgcccagcagattgcccttcagcggcacctgctgcctgcctcccactatgtggccacccgcaagggcattgccacactggccgtggtgcttggagcctttgccgcctgctggttgcccttcactgtctactgcctgctgggtgatgcccactctccacctctctacacctatcttaccttgctccctgccacctacaactccatgatcaaccctatcatctacgccttccgcaaccaggatgtgcagaaagtgctgtgggctgtctgctgctgctgttcctcttccaagatccccttccgatcccgctcccccagtgatgtctagctgagtcttcatgacccttcaaccctgattactacagaattccagaatgttaggctctccagggcttctttccaaacccccagctccacaccccccagacccagctggttctggagttctaggacattgggtgtttcaaggttctgttcagatccctatgggggcccagctggctccacggttccagaatgttcaggtggtcagtgttctactcagaaatgtctcacagcccagctgggttgcaattccagaatgctgggagttttacagtgccattccaagtcccagatgtccctcttcccccaaacttgaccttgaccatgtcactttacgtttgaatttctgagctaaagagtcagagagattagtcacatagttgcctaaataggagagagaaagattatatatgcacatatacaaagacagtgtctatttatgattgatttatttatttataaatttacttatgggtggtaaggggcaaaaaagaggcccacaccttgatatccaggccataccagggtatcccttgtcccttcacccccatttctracctcagttcctggaggggggaaagggtgaaagagaaaccacgtattttgttattattttggattattttttatcgaagagatcatagaaaccagagccttctccccaggcctgccctcctcgggtttggaaggggaacacaccagcctctggttttttatttttttaagaagccatcacctgagcaaccaaaaattcctctgcgctggggtccgactgccctctggtggccatttggggaaaactgcagcccggccaggcagctgggaccagaatgcaaccccagctccactccagcctggcgtccagggccacagccatggcctgggggccaagcctcaccctgcggtgccctaaaggagggggggcacgagccaacaccccacccctctgccaaccggggtatggcccccagtgcattccctgttcccgtctccaacccaactcaataaaaaatgattttgtcataaatatgtttccctatgtgtgtgtggagggtatggagtggggcctgatgggggatggcctggaatgagagggtcaagccaggcctggrgggcctgttgggggatctggggagctggacagagggtggagggtggctggcaggtgactccttctcagatgtcagtgcccctctgctcagacctgggcactgactggcaaggaccttacctcctcctggtgacaggaacctgggtgcttggctcttcctgggtcaaggatgctcacatcctgcccacaccggccactgtggggcttagacatgatgaatatgctcaaagcatgtcagtttccttaataataataggtcctactttttttttttttttttttttttgagacagagtctcgctctgtcccccaggctggagtgcagtggcgtgatctcggctcactgcaagctccacctcccgggttcacgccattctcctgcctcagcctcccgagtagctgggacyacaggcgcccaccatcacgcccggctaattttttttgtayttttagtagagacggggtttcactgtgtaagccaggatggtctcgatc

SEQ ID NO: 262 - DNA, 2060 bp, Homo sapiens
cacccgcactgcagtctccagcctgagccatgggccgccgagccctcctgctcctgcttctgtcttttctggcgccctgggccaccatagccctccggccggccttaagggccctcggcagcctacacttgccaaccaaccccacatccctcccggctgtagccaagaactattcggttctctacttccaacagaaggttgatcattttggatttaatactgtgaaaacttttaatcagcggtacctagtagctgataaatactggaagaaaaatggtggatcaatacttttctacactggtaatgaaggggacattatctggttttgtaataacacggggttcatgtgggatgtggctgaggaactgaaagctatgttggtgtttgctgaacatcgatactatggagagtctctcccctttggtgacaactcattcaaggattccagacacttgaatttcctgacatcagaacaagctctggctgattttgcagagttaatcaaacacttgaaaagaacaatcccaggagctgaaaatcaacctgtcattgccataggaggctcctatggtggcatgcttgccgcctggtttaggatgaaatatcctcatatggtagttggagctcttgcagcttctgcccctatctggcagtttgaggatttagtaccttgtggtgtatttatgaagatcgtaactacagattttaggaaaagcggtccacattgttcagagagcatccacaggtcctgggatgccattaatcgactctcaaatactggcagtggtttgcagtggcttactggagcccttcacttatgcagcccattaacttctcaggacatccaacatttgaaagactggatctctgaaacctgggtgaatctggcaatggtggactatccttatgcctctaactttttacagcctttgcctgcttggcctatcaaggtagtgtgccagtatttgaaaaatcccaacgtatctgattcactgctgctgcagaatattttccaagctctgaatgtatattacaattattcgggccaggtgaaatgcctgaatatttcagagacagcaactagcagtctgggaacactgggttggagctatcaggcctgcacagaagtagtcatgcccttttgtactaatggtgtcgatgacatgtttgaacctcactcatggaacttaaaggaactttctgatgactgttttcaacagtggggtgtgagaccaaggccctcctggatcactactatgtatggaggcaaaaacattagttcacacacaaacattgttttcagcaatggtgaactagacccctggtcaggaggtggagtaactaaggatatcacagacactctggttgcagtcaccatctcagagggggcccaccacttagatctccgcaccaagaatgccttggatcctatgtctgtgctgttagcccgctccttggaagttagacatatgaagaattggatcagagatttctatgacagtgcaggaaagcagcactgagaaacttttgattgttttcaatttcttcttttatgttcacaccaccacattcccattcactttgattttctacatgtaattaccttcttttgtttatcattagatttgatggggccaaagttgagatagaatagagggtgatgacggtaagagcaagtgtcccatgaatgtgatttcctgggttctcactgtctttgcaccacgtctaggaagaatcttcttgatagctctcccacaccatcagtggccctcataactggagtagagttcctggttgcttttcataagagggagagttactttctttgtatctctgcaagcagagatttctctttggttttgaggttgaagtgtctttggcccatttgtaagtccccatccctaccctacacaaagtaaaagcagaagatagataaaaaatgatgtaattgcagctggtaggatgtctggtgcccaatcccaggaagtgagagccatttcttttgtactggatttaatgactttgaactgtgctgtaaataaataatacagctggacctt

SEQ ID NO: 263 - DNA, 925 bp, Homo sapiens
ttttttctgctaccgtgactaagatggaagcgtttttggggtcgcggtccggactttgggcggggggtccggccccaggacagttttaccgcattccgtccactcccgattccttcatggatccggcgtctgcactttacagaggtccaatcacgcggacccagaaccccatggtgaccgggacctcagtcctcggcgttaagttcgagggcggagtggtgattgccgcagacatgctgggatcctacggctccttggctcgtttccgcaacatctctcgcattatgcgagtcaacaacagtaccatgctgggtgcctctggcgactacgctgatttccagtatttgaagcaagttctcggccagatggtgattgatgaggagcttctgggagatggacacagctatagtcctagagctattcattcatggctgaccagggccatgtacagccggcgctcgaagatgaaccctttgtggaacaccatggtcatcggaggctatgctgatggagagagcttcctcggttatgtggacatgcttggtgtagcctatgaagccccttcgctggccactggttatggtgcatacttggctcagcctctgctgcgagaagttctggagaagcagccagtgctaagccagaccgaggcccgcgacttagtagaacgctgcatgcgagtgctgtactaccgagatgcccgttcttacaaccggtttcaaaccgccactgtcaccgaaaaaggtgttgaaatagagggaccattgtctacagagaccaactgggatattgcccacatgatcagtggctttgaatgaaatacagatgcattatccagaactgaagttgccctacttttaactttgaacttggctagttcaaagatagactcttcttttgtaaagtaaataaattcttcaaaatg

SEQ ID NO: 264 - DNA, 1584 bp, Homo sapiens
tttccggcagccatccccgcggtgctgacatcccggttgttcttctgtgccgggggtcttcctgctgtcatgaaggacgtaccgggcttcctacagcagagccagaactccgggcccgggcagcccgctgtgtggcaccgtctggaggagctctacacgaagaagttgtggcatcagctgacacttcaggtgcttgattttgtgcaggatccgtgctttgcccaaggagatggtctcattaagctttatgaaaactttatcagtgaatttgaacacagggtgaaccctttgtccctcgtggaaatcattcttcatgtagttagacagatgactgatcctaatgtggctcttacttttctggaaaagactcgtgagaaggtgaaaagtagtgatgaggcagtgatcctgtgtaaaacagcaattggagctctaaaattaaacatcggggacctacaggttacaaaggaaacaattgaagatgttgaagaaatgctcaacaaccttcctggtgtgacatcggttcacagtcgtttctatgatctctccagtaaatactatcaaacaatcggaaaccacgcgtcctactacaaagatgctctgcggtttttgggctgtgttgacatcaaggatctaccagtgtctgagcagcaggagagagccttcacgctggggctagcaggacttctcggcgagggagtttttaactttggagaactcctcatgcaccctgtgctggagtccctgaggaatactgaccggcagtggctgattgacaccctctatgccttcaacagtggcaacgtagagcggttccagactctgaagactgcctggggccagcagcctgatttagcagctaatgaagcccagcttctgaggaaaattcagttgttgtgcctcatggagatgactttcacacgacctgccaatcacagacaactcacttttgaagaaattgccaaaagtgctaaaatcacagtgaatgaggtggagcttctggtgatgaaggccctttcggtggggctggtgaaaggcagtatagacgaggtggacaaacgagtccacatgacctgggtgcagccccgagtgttggatttgcaacagatcaagggaatgaaggaccgcctggagttctggtgcacggatgtgaagagcatggagatgctggtggagcaccaggcccatgacatcctcacctagggccccctggttccccgtcgtgtctcctttgactcacctgagagaggcgtttgcagccaatgaagctggctgctcagacggtcgacattgaatttgggtgggggttgggatcctgtctgaagtacagactgttcttgctctaaaaacaggactgtccctgatgggagccaggccacagggaggaggcttctttgtgggtctctcctgcagagggtgggggtctcagggtcttaggtgatacgggagagaaagaacgtgccaggcaggaggccccctgaagtctgtgtactccgaggtggatctccatccccatccacctgtacggacatcttttccgttgcggtttgagaatgttcctataataaacccctctgctttgttaac

SEQ ID NO: 265 - DNA, 692 bp, Homo sapiens
cctagtacaccgcaatcatgtctattatgtcctataacggaggggccgtcatggccatgaaggggaagaactgtgtggccatcgctgcagacaggcgcttcgggatccaggcccagttggtgaccacggacttccagaagatctttcccatgggtgaccggctgtacatcggtctggccgggctcgccactgacgtccagacagttgcccagcgcctcaagttccggctgaacctgtatgagttgaaggaaggtcggcagatcaaaccttataccctcatgagcatggtggccaacctcttgtatgagaaacggtttggcccttactacactgagccagtcattgccgggttggacccgaagacctttaagcccttcatttgctctctagacctcatcggctgccccatggtgactgatgactttgtggtcagtggcacctgcgccgaacaaatgtacggaatgtgtgagtccctctgggagcccaacatggatccggatcacctgtttgaaaccatctcccaagccatgctgaatgctgtggaccgggatgcagtgtcaggcatgggagtcattgtccacatcatcgagaaggacaaaatcaccaccaggacactgaaggcccgaatggactaaccctgttcccagagcccacttttttttctttttttgaaataaaatagcctgtctttc

SEQ ID NO: 266 - DNA, 980 bp, Homo sapiens
gctttcttgggaagatggcggctgtgtcggtgtatgctccaccagttggaggcttctcttttgataactgccgcaggaatgccgtcttggaagccgattttgcaaagaggggatacaagcttccaaaggtccggaaaactggcacgaccatcgctggggtggtctataaggatggcatagttcttggagcagatacaagagcaactgaagggatggttgttgctgacaagaactgttcaaaaatacacttcatatctcctaatatttattgttgtggtgctgggacagctgcagacacagacatgacaacccagctcatttcttccaacctggagctccactccctctccactggccgtcttcccagagttgtgacagccaatcggatgctgaagcagatgcttttcaggtatcaaggttacattggtgcagccctagttttagggggagtagatgttactggacctcacctctacagcatctatcctcatggatcaactgataagttgccttatgtcaccatgggttctggctccttggcagcaatggctgtatttgaagataagtttaggccagacatggaggaggaggaagccaagaatctggtgagcgaagccatcgcagctggcatcttcaacgacctgggctccggaagcaacattgacctctgcgtcatcagcaagaacaagctggattttctccgcccatacacagtgcccaacaagaaggggaccaggcttggccggtacaggtgtgagaaagggactactgcagtcctcactgagaaaatcactcctctggagattgaggtgctggaagaaacagtccaaacaatggacacttcctgaatggcatcagtgggtggctggccgcggttctggaaggtggtgagcattgaggcccagtaagacactcatgtggctagtgtttgccgaatgaaactcaactcaataaaaaacaaaaaccaaattgggcagctg

SEQ ID NO: 267 - DNA, 10482 bp, Homo sapiens
gcgttgcagtccttactgtgtgaaaggcccccgcggcgctcccggccgccgtcttcttcccgcgcccttgggctcgcgtcctgcccgtccgggcctggcgtagcgctgccgggaacccacgcggcgctggcgccgggcgccttcaagggacgcgctcccgtctttctcccgccccgggtttctccgtgaaaaagcgctcggtttgatggccactgtcctaggtttcgtgggaataaagcgcgcagagcccatgactcgggggcaggagaaagggagtcccgaaagcgcgaggcggaaccgcgggagcaggccggcctctgcgagtttgctcacttccgacagagaaaaacaaaaggtgacagttcgcattcggagaaaaagacggcgaagaggaagggctcggctgtcgatgcgtctgtccaggaggagagtccggtaaccaaggaggacagcgcactctgtggaggaggggacatttgcaaaagcacatcatgtgacgacacccctgatggggcaggaggggcctttgcagctcagccggaggactgtgatggagagaagagagaggacttggaacagctgcagcagaagcaagtcaatgaccatcctccagagcagtgtgggatgttcacagtcagtgaccacccaccagaacagcatgggatgttcacagtcggtgaccacccaccagaacagcgtgggatgttcacagtcagtgaccacccaccagaacagcatgggatgttcacagtcagtgaccacccaccagaacagcgtgggatgttcacaatcagtgaccaccaaccggaacagcgtgggatgttcacagtcagtgaccacacaccagaacagcgtgggatcttcacaatcagtgaccacccagcagaacagcgtgggatgttcacaaaggagtgtgaacaagaatgtgaacttgccattactgacctggagagcggccgtgaagatgaggctggcctgcatcagagtcaggccgtgcatggccttgagctggaggcgctgcgcctgagtctgagcaacatgcacacggcgcagctggagctgacacaggccaacctccagaaggagaaggagacggcattgacggagctgcgggagatgctcaacagccggcgtgcccaggagctggccctgctacagagcaggcagcagcacgagctggagctcctcagggagcagcacgcacgggagaaggaggaggtggtgctcaggtgtggacaggaagcagctgagctgaaggagaagttacaatcagaaatggagaaaaacgcccagatagtaaagaccctgaaggaagattgggaatctgaaaaagatttatgtttagaaaatctacgcaaagaactgtctgcaaagcatcaatcagaaatggaggatttacaaaaccagtttcagaaagaattggcagaacagagagctgagttggagaagatttttcaagacaaaaaccaggctgaacgggcccttaggaacctggagagtcatcatcaagcagccattgagaagttacgtgaagacctgcagtccgagcacggccggtgtttagaagacttggagttcaagttcaaagagagcgagaaagaaaaacagctggagttagagaatcttcaagcatcatatgaagacctgaaggcacaatcacaagaagagatcaggcgcttgtggtcccagcttgattctgccaggaccagtagacaggaattgagtgagctacatgagcaactcctggcgcgcacctctcgtgtggaagatttagaacagctgaagcagcgagaaaaaacccagcatgagtcagaactggagcaactgaggatttattttgaaaagaagttaagggatgctgagaaaacttaccaagaagacctaaccctgttacagcagaggctgcagggggcgagggaagatgctcttctggactctgtggaagttgggttgtcctgtgtgggtttagaagagaaacctgagaaaggaagaaaagatcacgttgatgaactcgagcctgagcgacataaggagagcctgccacgcttccaggcggagttagaagaaagccacaggcaccagctggaagcgctggagtctcccctctgcatccagcacgaggggcatgtctcagacagatgctgcgtagagacttcagcattgggacacgagtggcgtctggaaccctctgaagggcacagccaagagcttccctgggtgcatctccagggtgtgcaggacggggacttggaggccgacacagagcgggcagccagagtcttgggtctggaaactgagcacaaggtgcaactttcgcttcttcagactgagctcaaagaagaaattgaactcctaaaaatagaaaatagaaatttgtatgagaagttgcagcatgaaactcgtctgaaggacgatttggagaaggtaaaacacaatctaattgaagaccaccagaaggaactaaataatgctaagcaaaagactgagctgatgaaacaggaattccaaagaaaagaaacggactggaaagttatgaaggaggagctacagcgggaagctgaggagaagttaacattgatgctacttgaactgagagaaaaggctgaatccgagaaacagaccatcataaacaagtttgagcttcgagaagctgaaatgaggcagcttcaggaccaacaggcagcccagatcctggatctggagaggtccttgacggagcagcagggccgcctgcagcagctggaacaggacctcacttcagacgacgccctgcattgcagccagtgtgggcgggagccgcccacagcccaggacggggagcttgccgcgctccacgtgaaggaagactgcgccctgcagctgatgctggcccggagcaggtttttagaggaacgtaaagagatcaccgagaaattcagtgcggaacaagatgccttcctgcaggaggcccaggagcagcatgcccgtgagctgcagctcctccaggagagacaccagcagcagctcctgtcagtgacggcggagctcgaggccagacaccaggccgcgttgggcgagctgacagcctccttagagagcaagcagggggctctgctggctgcacgtgtggccgaactgcagacaaaacacgctgccgacctcggcgctctggagaccagacatctgtccagccttgattctttggaatcctgttacctgtctgaatttcagaccatccgtgaggagcacaggcaggccctagagctcttacgagcagactttgaggaacaactgtggaaaaaggactctcttcaccaaacgattttgactcaagagttggagaaactgaagcggaaacacgaaggggagctacagtctgtgcgggaccacctgcgaaccgaagcgagcacagagctcgccggaaccgtggctcacgagctgcagggagtgcaccagggtgaatttggaagtgaaaagaaaactgctttgcatgaaaaagaggagacacttcggcttcagagtgcacaggcacagccttttcaccaagaggagaaagagtctttgtctctgcagcttcaaaagaagaatcaccaagtccagcagctgaaagaccaggttttatccttaagtcacgagatagaagagtgccgctccgagttggaggtgctgcagcagaggcgggagcgggagaaccgggaaggcgcaaacctcctctccatgctcaaggccgacgtcaacctgtcccacagcgaaagaggggccctccaggacgccctgcgcaggctgctgggtttgtttggagagacgctgagggcagccgtcaccctgaggagccggatcggggagcgcgtggggctctgcctggatgacgcgggcgcaggcctggccctgtcgacagctccggcgctggaggagacatggtctgatgtggccctcccggagttggacagaactttgtctgaatgtgcagagatgtcttccgtggctgaaattagcagccacatgcgtgaaagctttctcatgagcccagaaagtgtgcgggagtgtgagcagcccatccggagggtcttccagagcctcagcctggccgtggacggcctcatggagatggccctggactccagcaggcagctggaagaagcacgccaaattcattctcgttttgaaaaagaatttagttttaagaatgaggagacagcacaggttgtcaggaagcaccaggagctgctggagtgtttgaaggaggagagcgcagcaaaggcagagctggcgctggagctgcacaagactcagggtacccttgagggattcaaggtggagacagcagatctgaaggaggtgctggccgggaaggaggattccgagcaccgtctggtgctggagctggagagcctgagacggcagctgcagcaggcggcccaggagcaggcggcgctgagggaggagtgcacccgtctgtggagtcggggggaggccacagccacggacgccgaggccagagaagctgctctccggaaggaagtggaggatctgaccaaagaacagtcggagaccaggaagcaggctgagaaggaccgctcagccctgctctcccagatgaagattttggagtctgagttagaagaacagctgtctcagcatcgcgggtgtgccaagcaggcggaggccgtcactgccctggaacagcaggtggcatctctggacaagcatttgcgcaaccagcggcaattcatggatgagcaggcagccgagcgggagcacgagcgcgaggagttccagcaggagattcagaggctggaggggcagctccgccaggcggccaagccgcagccctggggccctcgcgacagccagcaggcgccgctggatggagaggttgagttgttacaacaaaagttgagagaaaagttggatgaatttaatgaattggctatacagaaagagtcggcagatagacaagtgttaatgcaggaagaagaaattaaacgtctggaggagatgaacatcaacatcaggaaaaaagtggcccagctccaggaagaagtggaaaaacagaaaaacatcgtgaaagggctggaacaggataaagaggtgttaaagaaacagcagatgagtagcttgcttctggcgtccacgttgcagtctacactagatgcaggcagatgtcccgagcctccttcgggcagccctcctgagggtccagaaatacagttagaggtgacacagagagcactcctgcggcgcgagagcgaggttttggacttaaaagaacagctagaaaagatgaaaggtgacttagaaagtaaaaatgaagaaatactacatctgaacttaaaattggacatgcagaacagccagactgctgtcagcctcagagaacttgaggaagagaacacgagcttgaaggtcatatataccagaagttctgagattgaagagctgaaagccactattgaaaatctgcaagagaatcagaaacgattacaaaaggagaaagcagaggaaattgaacaactccatgaagtcattgagaagctgcagcacgagctgtccctcatggggcctgtggtgcacgaagtcagcgacagtcaggctggcagtctgcagagcgagctgctctgctcccaggccgggggccctcgtgggcaggccctacagggcgagctcgaggctgcgctggaagccaaggaggccctgagccggctgctggctgaccaggagcgcaggcacagccaggccctggaggccctgcagcagcgcctccagggcgcagaggaggctgcggagctacagctggctgagctggagcgcaatgtagccctcagggaggctgaggtcgaagacatggcctcccggatccaggagttcgaagcggccctgaaagcaaaggaagcgacgattgccgagagaaatttagaaatcgacgctctgaaccagcggaaggcggcccactctgccgagctggaggccgtcctgttggccttggcccgcatccgccgcgccctggagcagcagcccctggcagccggggcggcgcctcccgagctgcagtggctccgagcgcagtgtgcccgcctcagccgccagctgcaggtgctgcaccagcggttcctgaggtgccaggtggagctggacaggcggcaggcccgcagagccacagctcacacacgggtgcccggggcccacccacagcctcgcatggatggtggcgccaaggcccaggtcaccggcgacgtggaggcctcccatgatgctgctttggagccggttgtccctgacccacagggtgatctgcagcctgtcctggtgacgttgaaggatgcacctctctgcaagcaagaaggcgtgatgtcagtgctcaccgtctgccagaggcagctgcagtcggagctgctcttggtgaaaaatgaaatgcgcctgagtctggaggacggcggcaagggtaaagaaaaagtactggaagattgtcagctgccgaaggtcgatctcgtagctcaggtgaaacagcttcaggaaaaactgaaccgtttgctgtattccatgaccttccagaatgtggatgctgccgacaccaaatctctgtggcccatggcctcagcacacctgttggagagcagctggagtgatgattcctgtgacggagaagagcctgacatatcaccccacatagacacatgtgatgccaatacagccacggggggtgtaactgatgttatcaaaaatcaggccatagacgcgtgtgatgccaatacaaccccagggggtgtaactgatgttatcaaaaattgggattccttgataccagatgaaatgccagattctcccattcaagaaaaatcagaatgtcaggacatgtctctttcttcaccgaccagcgtacttggtggctcccgccaccagagccacactgcagaggctgggccccggaagagcccggtcgggatgctggacctgtcttcctggagctcccctgaggtcctcaggaaggactggaccctggagccctggcccagcctccccgtgacaccccactcaggagccctgagcctgtgcagtgccgacacatccctgggggacagggcggacacctcgctgccacagacccaggggccggggctgctttgttccccaggcgtgtctgcagcagcgctggcactgcagtgggccgagtctccgccggctgacgaccaccatgtgcagaggacggctgtggagaaagatgtcgaagattttatcacaacatcctttgattctcaagaaacattaagttcacctcctcctggattagaaggaaaagctgatagaagtgagaaaagtgacggctcgggttttggagcaagactgagcccggggtcaggaggccctgaggctcaaactgctggtcctgtgacccctgcttccatctctggaaggtttcagccgctgccggaagccatgaaggagaaggaagtgcgtccgaagcacgtgaaggctttactgcagatggtgcgtgacgagagccaccagatcctggcgctgtcagaaggccttgcacccccaagcggcgagccacacccaccccggaaggaagacgagatacaggacatctcgctccatgggggaaagacgcaggaagtgcccaccgcgtgccccgattggagaggggaccttctgcaggttgtgcaagaggcctttgaaaaagagcaggagatgcagggggttgagctgcagccccgactcagtggctcagatctggggggtcacagctccctgctcgaaaggctggagaagatcatccgtgagcagggagacctgcaggaaaagtccctggagcatcttcgcttgccggaccggagcagcctgctgtccgagatccaggcgctgcgtgcccagctgcgcatgacgcacctgcagaaccaggagaagctgcagcacttgcgcacggcgctgacaagcgcagaggcgcgcgggagccagcaggagcaccagctgcgcaggcaggttgaactgctggcttataaagtagagcaggagaagtgcattgctggtgacttgcagaagacgctgagtgaagagcaagagaaggcaaacagcgtgcagaagctcctggcggcggagcagactgtagtgcgagatttgaagtccgacctctgtgagagcaggcagaagagcgaacagctgtcccggtccctctgcgaggtgcagcaggaggtcctccagctgagatccatgctgagcagtaaggagaacgagctgaaggccgcgcttcaggagctggagagtgagcaggggaaggggcgtgccctgcagagccagctggaggaggagcagctgcggcacctgcagagggagagccagagtgccaaggccctggaggagctgcgggcgtctttggagacacagcgtgctcagagcagtcgactctgcgtggcactgaaacacgagcagacggccaaggacaacctgcagaaggagctgcgtatcgagcactcacgctgcgaggccttgctggctcaggagcggagccagctctctgagctccagaaggaccttgcggctgagaagagccgcaccctggagctgtcagaggccttgcggcacgagcggctcctgaccgagcagctgagccagaggacacaggaggcttgcgtgcaccaggacacacaggcccatcacgctctgctgcagaagctgaaggaggagaagtcccgggtggtggacttgcaagcgatgcttgaaaaggtgcagcagcaagccctgcattctcagcagcagcttgaggctgaggctcagaagcactgtgaggcgctcaggagagagaaggagcgagaattagaactgcagcgtcagcgtgacttgcataagatcaagcagcttcagcagacagtgagagacctggagtcgaaggacgaggtgcctggcagccgcctccacctaggttctgcccgcagggctgccggctcggatgcggaccacctccgggaacagcagcgagagctggaggcgatgaggcagcggctgctctctgccgcccggcttctcaccagcttcaccagccaggccgtggacaggacagttaatgattggacgtcatccaatgagaaagcagtgatgtctttactgcacacgttggaggagctgaagtctgacttgagcaggcccacctcctcccagaaaaaaatggcagcagagctgcagttccagtttgtggacgtcctgctgaaagacaatgtttccctcacaaaagcgctcagcacggtgacccaggagaagctggagctgagcagagccgtgtctaagcttgagaagttgctgaagcaccatctgcagaagggctgcagcccaagcaggtcggaaaggtctgcttggaagccagacgaaacggctccacagagttccctgaggcgcccagaccccggccggcttccaccagctgccagcgaggaagcacacaccagcaatgtcaagatggaaaaattgtacctgcattacttgagagcagagagctttagaaaagctctgatttatcaaaagaagtatcttttgctgttgattggtggattccaggattctgaacaagaaacactctccatgattgcccatttgggggtatttccttccaaagcagaacggaaaatcacatctcgtcctttcaccaggttccgcacggccgtcagggtggtcattgcaatattaagattacgttttttggttaagaaatggcaagaagtagatcggaaaggagctctggcacaaggcaaagcccctcgcccagggccccgagcacgacagccgcagtctccacccagaaccagagagtcccccccaacccgggatgtaccctctggccacaccagggaccctgccagaggccgcagactggcagcagcagcctccccacacagtgggggaagagccactccatccccaaattcaagattagaaagatccctgactgcttctcaagatccagaacattccttgacagagtatattcaccatttagaagtgatccagcaaagattgggaggggtactaccagattctacttcaaagaaatcctgccacccgatgattaaacagtgaataaaatgtcatggctctttcctgcgacaattctatttgaggaaaagatttgtttttcccttttcccaaggaagctcgtgggacagcatgggcactactcttcatgtgcggtgacaccagcccccagatgccttgaattaagtgtcctcacctttatgcatgactgcaaagccagctggagcattttctatggagcctccgtatgttttaggcccatgaccttcgtgaggtgacgggcactcactcccatgagccctggctgtgtgctgttgtgtgcctatcggcagatccatccttcctgcctccaaggaggatacacagagaatggcttcctgttgttttgtttattttcttaacgtgtacagatggaaacttcatttaaaaataaaaacaaaacaactcaaaaaggaataaaatttaatcactgttttgtttgtg

SEQ ID NO: 268 - DNA, 3474 bp, Homo sapiens
gcgcgccggcggctcgggcagaggggcgggagctgaggcgggagcggacaggctggtgggcgagcgagaggcgcggaatggtggactaccacgcggcgaaccagtcgtaccagtacggccccagcagcgcggcaatggcttggcggcgggggagcatgggcgactacatggcccaggaggacgactgggaccgggacctgctgctggacccggcctgggagaagcagcagcgcaagaccttcacggcatggagcaactcccacctgcggaaggcaggcacacagatcgagaacattgatgaggacttccgagacgggctcaagctcatgctgctcctggaggtcatatcaggggagcggttacctaagccggagcgggggaagatgagagtgcacaaaatcaacaatgtgaacaaagcgctggactttattgccagcaaagggatcaagctggacttccatcgggcagaagagattgtggacggcaacgcaaagatgaccctgggaatgatctggaccatcatccttaggttcgccatccaggacatctccgtggaagagacctcggccaaggaagggctccttctctggtgccagagaaagacagccccatataagaacgtcaatgtgcagaacttccacatcagctggaaggatggtcttgccttcaatgccctgatccaccggcacagaccagagctgattgagtatgacaagctgaggaaggacgaccctgtcaccaacctgaacaatgccttcgaagtggctgagaaatacctcgacatccccaagatgctggatgcagaggacatcgtgaacacggcccggcccgacgagaaggccataatgacctatgtgtccagcttctaccatgccttttcaggagcgcagaaggctgaaactgaaactgccgccaaccggatctgtaaggtgctggctgtcaaccaagagaactgcagcacctcgatggaggactacgagaagctggccagcgacctcctggagtggatccggcgcaccatcccctggctggaggaccgtgtgccccaaaagactatccaggagatgcagcagaagctggaggacttccgcgactaccggcgtgtgcacaagccgcccaaggtgcaggagaagtgccagctggagatcaacttcaacagcgtgcagaccaagctgcgcctcagcaaccggcccgccttcatgccctccgagggcaagatggtctcggacatcaacaatggctggcagcacttggagcaggctgagaagggctacgaggagtggctgctgaatgagattcgcaggctggagcggctcgaccacctggcagagaagttccggcagaaagcctccatccacgaggcctggactgacgggaaggaagccatgctgaagcaccgggactacgagacggccacactatcggacatcaaagccctcattcgcaagcacgaggccttcgagagcgacctggctgcgcaccaggaccgcgtggagcagatcgccgcctccgcccaggagctcaacgagctggattactacgactcccacaatgtcaacacccggtgccagaagatctgtgaccagtgggacgccctcggctctctgacacatagtcgcagggaagccctggagaaaacagagaagcagctggaggccatcatcgaccagctgcacctggaatacgccaagcccgcggcccccttcaacaactggatggagagcgccatggaggacctccaggacatgttcatcgtccataccatcgaggagattgagggcctgatctcagcccatgaccagttcaagtccaccctgccggacgccgatagggagcgcgaggccatcctgcatccacaaggaggccagaggatcgctgagagcaaccacatcaagctgtcgggcagcaacccctacaccaccgtcaccccgcaaatcatcaactccaagtgggagaaggtgcagcagctggtgccaaaacgggaccatgccctcctggaggagcagagcaagcagcagcagtccaacgagcacctgcgccgccagttcgccagccaggccaatgttgtggggccctggatccagaccaagatggaggagatcgcgatctccattgagatgaacgggaccctggaggaccagctgagccacctgaagcagtatgaacgcagcatcgtggactacaagcccaacctggacctgctggagcagcagcaccagctcatccaggaggccctcatcttcgacaacaagcacaccaactataccatggagcacatccgcgtgggctgggagcagctgctcaccaccattgcccgcaccatcaacgaggtggagaaccagatccttacccgcgacgccaagggcatcagccaggagcagatgcaggagttccgggcgtccttcaaccacttcgacaaggatcatggcggggcgctggggcgaggagttcaaggcctgcctcatcagcctgggctacgacgtggagaacgaccggcaggtgaggccgagttcaaccgcatcatgagcctggtcgaccccaaccatagcggccttgttaccttccaagccttcatcgacttcatgtcgcgggagaccaccgacaccgacacggctgaccaggtaatcacttccttcaaggtcctagcaggggacaagaacttcatcacagctgaggagctgcggagagagctgccccccgaccaggccgagtactgcatcgcccgcatggcgccataccagggccctgacggcgtgcgcggtgccctcgactacaagtccttctccacggccttgtatggcgagagcgacctgtgaggccccagagacctgacccaacacccccgacgcctccaggagcctggcagccccacagtcccattcctccactctgtatctatgcaaagcactctctctgcagtctccggggtgggtgggtgggcagggaggggctggggcaggctctctcctctctctctttgtgggttggccaggaggttcccccgaccaggttggggagacttggggccagcgcttctggtctggtaaatatgtatgatgtgttgtgcttttttaaccaaggaggggccagtggattcccacagcacaaccggtcccttccatgccctgggatgcctcaccacacccaggtctcttcctttgctctgaggtcccttcaaggcctccccaatccaggccaaagccccatgtgccttgtccagggaactgcctgggccatgcgaggggccagcagagggcgccaccacctgacggctgggacccacccagcccctctcccctctctgctccagactcacttgccattgccaggagatggccccaacaagcaccccgcttttgcagcagaggagctgagttggcagaccgggcccccctgaaccgcaccccatcccaccagccccggccttgctttgtctggcctcacgtgtctcagattttctaagaaccaaaaaaa

SEQ ID NO: 269 - DNA, 5968 bp, Homo sapiens
gggataatgctcccgagaaggattctggcagcagttctcaaaggctagacttgagtggtattgctgcatatgcgctgattcttcagcttgtctctaaccgaggaagcattgattgggagctactcattcagaaaattaaaagaaagaagccagaaaatattatcaaccctttgagaacacgacacaacgaactttatattttaccacttccttgaatagttgcaggagaaataacaaggcattgaagaatggcagatgaacggaaagacgaagcaaaggcacctcactggacctcagcaccgctaacagaggcatctgcacactcacatccacctgagattaaggatcaaggcggacgaggggaaggacttgtccgaagcgccaatggattcccatacagggaggatgaagagggtgcctttggagagcatgggtcacagggcacctattcaaataccaaagagaatgggatcaacggagagctgacctcagctgacagagaaacagcagaggaggtgtctgcaaggatagttcaagtagtcactgctgaggctgtagcagtcctgaaagctgaacaagagaaagaagctcaacataaagaccagactgcagctctgcctttagcagctgaagaaacagctaatctgcctccttctccacccccatcacctgcctcagaacagactgtcacagtggaggaagatttacttacagcctcgaagatggagttccacgatcaacaggaattgactccctctacagctgagccttcagaccagaaggaaaaggagtcagagaagcaaagtagtcctggtgaagaccttaaacatgctgccttagtttctcagccagagacaactaaaacttaccctgataaaaaggacatgcaaggcacagaagaagaaaaagcacccctagctttgtttgggcacactcttgttgccagcctggaagacatgaaacagaagacagaaccaagccttgtagtacctggcattgacctccctaaagagcctccaactccaaaagaacaaaaggactggttcatcgaaatgccaacggaagcaaaaaaggatgagtggggtttagttgcccccatatctcctggccctctgactcccatgagggaaaaagatgtatttgatgatatcccaaaatgggaagggaaacagtttgattctcccatgccaagtccctttcaagggggaagcttcactcttcctttagatgtcatgaagaatgaaatagttacagaaacatcgccctttgcccctgcctttttacagccagatgacaaaaaatctctgcaacaaaccagtggcccagctactgccaaagatagttttaaaattgaagagccccatgaggctaaacctgacaaaatggcagaagcaccaccctcagaggcaatgaccttacccaaagatgctcacattccagttgtagaagaacatgttatggggaaagttttagaggaagaaaaggaggccataaatcaagagactgtgcagcaaagggatactttcacccccagtggacaggaacctatacttactgaaaaggaaactgagctgaagcttgaagaaaaaaccaccatttctgacaaagaagctgtgccaaaagagagtaaacccccaaaacctgcagatgaagaaataggcataattcagacctccacagagcacactttctcagaacagaaagaccaagagcctaccacagatatgttgaaacaggactcgttccctgtaagtttggagcaagcagttacagattcagccatgacctctaaaacactggagaaagccatgaccgaaccatctgcattaattgaaaagagctcaattcaggaactttttgaaatgagagttgatgacaaagataagattgaaggagttggagctgcaacatcagctgagcttgatatgccattttatgaagataaatcaggaatgtccaagtactttgaaacatctgccttgaaagaagaagcaacaaaaagcattgagccaggcagtgattactatgaactgagtgacactagagaaagtgtccatgagtctattgataccatgtctcccatgcataaaaatggtgacaaggagtttcaaacaggaaaagaatcccagcccagtcctccagcacaagaagcagggtacagcactctcgcacagagttatccatcagatttacctgaagaacccagttctcctcaagaaagaatgttcactattgatccaaaagtgtatggagagaaaagggacctccacagtaagaataaggatgatttgacccttagcaggagtttaggacttggtggtaggtctgcaatagaacaaagaagcatgtcaatcaatttgccgatgtcttgcctagattccatagcccttggatttaactttggtcggggacatgatctttctcctctggcttccgatattctaaccaacactagtggaagtatggatgaaggggatgattaccttccagccaccacacctgcactggagaaagccccttgcttccctgtagaaagcaaagaggaagaacagatagagaaagtaaaagctactggagaagaaagtactcaagcggagatatcatgtgagtctcctttcctagccaaagatttttacaaaaatggtactgtcatggcacctgaccttcctgaaatgctagatctggcaggcacaaggtcaagattggcttctgtgagtgcagatgctgaggttgccaggaggaaatcagtcccatcagagactgtggttgaggatagtcgtactggcttgcccccggtaactgatgaaaaccatgtcattgtaaaaacggacagtcagctcgaagacctgggctactgtgtgttcaataagtacacagtcccattgccatcacctgttcaagacagtgagaatttatcaggggagagtggtaccttttacgaaggcactgatgataaagttcgaagagatttggccacagacctttcactgattgaagtgaaactggcagcagccggaagagtcaaagatgagttcagtgttgacaaagaagcatccgcgcatatctctggtgacaaatcaggactgagtaaggagtttgaccaagagaagaaagctaatgataggttggatactgtactagaaaagagtgaagaacatgctgattcaaaagaacatgccaagaaaactgaagaggctggtgatgaaatagaaacattcggattaggagtaacctatgagcaagctttggccaaagatttgtcaataccaacagatgcatcctctgagaaagcagagaagggtcttagttcagttccagagatagctgaggtagaaccatccaaaaaggtggaacaaggtctggattttgctgtccagggtcaactagatgttaaaattagtgactttggacagatggcttcagggctaaacatagatgatagaagggcaacagagctaaaacttgaggctacacaggacatgaccccctcatccaaagcaccgcaggaggcagatgcatttatgggtgttgagtctggccacatgaaagaaggcactaaagttagtgagacagaagtcaaacagaaggtggccaagcctgacttggtgcaccaggaggctgtagacaaggaggagtcctatgaatctagtggtgagcatgaaagtctcaccatggagtccttgaaagctgatgagggcaagaaggaaacatctccagaatcatctctaattcaagatgagattgccgtcaaattgtcagtggaaataccttgcccacctgctgtttcagaggctgatttagccacagatgagagagctgatgtccagatggaatttattcaggggccaaaagaagaaagcaaagagaccccagatatatccatcacgccttctgatgttgcagagccattgcatgaaacgatcgtatctgaaccagcagagattcagagtgaggaagaagagatagaagcccagggagaatatgataaactgctcttccgctcagacacccttcagataactgacctgggtgtctcaggtgccagggaggaatttgtggagacctgcccaagtgaacacaaaggagtgattgagtctgttgtgaccatcgaggatgatttcatcactgtagtgcaaaccacaactgatgaaggggagtcagggtcccacagcgtgcgttttgcagccctagagcagcctgaggtggaaaggagaccatctcctcatgatgaagaagagtttgaagtagaagaggcagctgaagcccaggcagaacccaaagatggttccccagaggctccagcttcccctgagagagaagaggttgcactttctgaatataagacagaaacctatgacgattacaaagatgagaccaccattgacgactccatcatggacgctgacagcctctgggtggacactcaagatgatgataggagcatcatgacagaacagttagaaactattcctaaagaggagaaagctgaaaaggaagctcggagatcatctcttgagaaacatagaaaagaaaagccttttaaaaccgggagaggcagaatttccactcctgaaagaaaagtagctaaaaaggaacctagcacagtctccagagatgaagtgagaaggaaaaaagcagtttataagaaggctgaacttgctaaaaaaacagaagttcaggcccactctccctccaggaaattcattttaaaacctgctatcaaatatactagaccaactcatctctcctgtgttaagcggaaaaccacagcagcaggtggggaatcagctctggctcccagtgtatttaaacaggcaaaggacaaagtctctgacggagtaaccaagagcccagaaaagcgctcttctctcccaagaccttcctccattctccctcctcggcgaggtgtgtcaggagacagagatgagaattccttctctctcaacagttctatctcttcttcagcacggcggaccaccaggtcagagccaattcgcagagcaggaaagagtggtacctcaacacccactacccctgggtctactgccatcactcctggcaccccaccaagttattcttcacgcacaccaggcactcctggaacccctagctatcccaggacccctcacacaccaggaacccccaagtctgccatcttggtgccgagtgagaagaaggtcgccatcatacgtactcctccaaaatctcctgcgactcccaagcagcttcggcttattaaccaaccactgccagacctgaagaatgtcaaatccaaaatcggatcaacagacaacatcaaataccagcctaaaggggggcaggtacaaattgttaccaagaaaatagacctaagccatgtgacatccaaatgtggctctctgaagaacatcgacaggccaggtggcggacgtgtgaaaattgagagtgtaaaactagatttcaaggaaaaggtccaagctaaagttggttctcttgataatgctcatcatgtacctggaggtggtaatgtcaagattgacagccaaaagttgaacttcagagagcatgctaaagcccgtgtggaccatggggctgagatcattacacagtccccaggcagatccagcgtggcatcaccccgacgactcagcaatgtctcctcgtctggaagcatcaacctgctcgaatctcctcagcttgccactttggctgaggatgtcactgctgcactcgctaagcagggcttgtgaatatttctcatttagcattgaaataataatatttaggcatgagctcttggcaggagtgggctctgagcagttgttatattcattctttataaaccataaataaataatctcatccccaaactgtagtaattgttacaattttctatttaaaaaatgaatagtacatgcagaaattgacctgatttccatttgcaacaggaagacactggctttactgggttcaattggacaattatttt

SEQ ID NO: 270 - DNA, 7465 bp, Homo sapiens
gctctgggcaggagagagagtgagagacaagagacacacacagagagacggcgaggaagggaaagacccagagggacgcctagaacgagacttggagccagacagaggaagaggggacgtgtgtttgcagactggctgggcccgtgacccagcttcctgagtcctccgtgcaggtggcagctgtaccaggctggcaggtcactgagagtgggcagctgggccccagaactgtgcctggcccagtgggcagcaggagctcctgacttgggaccatggtgattcttcagcagggggaccatgtgtggatggacctgagattggggcaggagttcgacgtgcccatcggggcggtggtgaagctctgcgactctgggcaggtccaggtggtggatgatgaagacaatgaacactggatctctccgcagaacgcaacgcacatcaagcctatgcaccccacgtcggtccacggcgtggaggacatgatccgcctgggggacctcaacgaggcgggcatcttgcgcaacctgcttatccgctaccgggaccacctcatctacacgtatacgggctccatcctggtggctgtgaacccctaccagctgctctccatctactcgccagagcacatccgccagtataccaacaagaagattggggagatgcccccccacatctttgccattgctgacaactgctacttcaacatgaaacgcaacagccgagaccagtgctgcatcatcagtggggaatctggggccgggaagacggagagcacaaagctgatcctgcagttcctggcagccatcagtgggcagcactcgtggattgagcagcaggtcttggaggccacccccattctggaagcatttgggaatgccaagaccatccgcaatgacaactcaagccgtttcggaaagtacatcgacatccacttcaacaagcggggcgccatcgagggcgcgaagattgagcagtacctgctggaaaagtcacgtgtctgtcgccaggccctggatgaaaggaactaccacgtgttctactgcatgctggagggtatgagtgaggatcagaagaagaagctgggcttgggccaggcctctgactacaactacttggccatgggtaactgcataacctgtgagggccgggtggacagccaggagtacgccaacatccgctccgccatgaaggtgctcatgttcactgacaccgagaactgggagatctcgaagctcctggctgccatcctgcacctgggcaacctgcagtatgaggcacgcacatttgaaaacctggatgcctgtgaggttctcttctccccatcgctggccacagctgcatccctgcttgaggtgaaccccccagacctgatgagctgcctgactagccgcaccctcatcacccgcggggagacggtgtccaccccactgagcagggaacaggcactggacgtgcgcgacgccttcgtaaaggggatctacgggcggctgttcgtgtggattgtggacaagatcaacgcagcaatttacaagcctccctcccaggatgtgaagaactctcgcaggtccatcggcctcctggacatctttgggtttgagaactttgctgtgaacagctttgagcagctctgcatcaacttcgccaatgagcacctgcagcagttctttgtgcggcacgtgttcaagctggagcaggaggaatatgacctggagagcattgactggctgcacatcgagttcactgacaaccaggatgccctggacatgattgccaacaagcccatgaacatcatctccctcatcgatgaggagagcaagttccccaagggcacagacaccaccatgttacacaagctgaactcccagcacaagctcaacgccaactacatcccccccaagaacaaccatgagacccagtttggcatcaaccattttgcaggcatcgtctactatgagacccaaggcttcctggagaagaaccgagacaccctgcatggggacattatccagctggtccactcctccaggaacaagttcatcaagcagatcttccaggccgatgtcgccatgggcgccgagaccaggaagcgctcgcccacacttagcagccagttcaagcggtcactggagctgctgatgcgcacgctgggtgcctgccagcccttctttgtgcgatgcatcaagcccaatgagttcaagaagcccatgctgttcgaccggcacctgtgcgtgcgccagctgcggtactcaggaatgatggagaccatccgaatccgccgagctggctaccccatccgctacagcttcgtagagtttgtggagcggtaccgtgtgctgctgccaggtgtgaagccggcctacaagcagggcgacctccgcgggacttgccagcgcatggctgaggctgtgctgggcacccacgatgactggcagataggcaaaaccaagatctttctgaaggaccaccatgacatgctgctggaagtggagcgggacaaagccatcaccgacagagtcatcctccttcagaaagtcatccggggattcaaagacaggtctaactttctgaagctgaagaacgctgccacactgatccagaggcactggcggggtcacaactgtaggaagaactacgggctgatgcgtctgggcttcctgcggctgcaggccctgcaccgctcccggaagctgcaccagcagtaccgcctggcccgccagcgcatcatccagttccaggcccgctgccgcgcctatctggtgcgcaaggccttccgccaccgcctctgggctgtgctcaccgtgcaggcctatgcccggggcatgatcgcccgcaggctgcaccaacgcctcagggctgagtatctgtggcgcctcgaggctgagaaaatgcggctggcggaggaagagaagcttcggaaggagatgagcgccaagaaggccaaggaggaggccgagcgcaagcatcaggagcgcctggcccagctggctcgtgaggacgctgagcgggagctgaaggagaaggaggccgctcggcggaagaaggagctcctggagcagatggaaagggcccgccatgagcctgtcaatcactcagacatggtggacaagatgtttggcttcctggggacttcaggtggcctgccaggccaggagggccaggcacctagtggctttgaggacctggagcgagggcggagggagatggtggaggaggacctggatgcagccctgcccctgcctgacgaggatgaggaggacctctctgagtataaatttgccaagttcgcggccacctacttccaggggacaaccacgcactcctacacccggcggccactcaaacagccactgctctaccatgacgacgagggtgaccagctggcagccctggcggtctggatcaccatcctccgcttcatgggggacctccctgagcccaagtaccacacagccatgagtgatggcagtgagaagatccctgtgatgaccaagatttatgagaccctgggcaagaagacgtacaagagggagctgcaggccctgcagggcgagggcgaggcccagctccccgagggccagaagaagagcagtgtgaggcacaagctggtgcatttgactctgaaaaagaagtccaagctcacagaggaggtgaccaagaggctgcatgacggggagtccacagtgcagggcaacagcatgctggaggaccggcccacctccaacctggagaagctgcacttcatcatcggcaatggcatcctgcggccagcactccgggacgagatctactgccagatcagcaagcagctgacccacaacccctccaagagcagctatgcccggggctggattctcgtgtctctctgcgtgggctgtttcgccccctccgagaagtttgtcaagtacctgcggaacttcatccacgggggcccgcccggctacgccccgtactgtgaggagcgcctgagaaggacctttgtcaatgggacacggacacagccgcccagctggctggagctgcaggccaccaagtccaagaagccaatcatgttgcccgtgacattcatggatgggaccaccaagaccctgctgacggactcggcaaccacggccaaggagctctgcaacgcgctggccgacaagatctctctcaaggaccggttcgggttctccctctacattgccctgtttgacaaggtgtcctccctgggcagcggcagtgaccacgtcatggacgccatctcccagtgcgagcagtacgccaaggagcagggcgcccaggagcgcaacgccccctggaggctcttcttccgcaaagaggtcttcacgccctggcacagcccctccgaggacaacgtggccaccaacctcatctaccagcaggtggtgcgaggagtcaagtttggggagtacaggtgtgagaaggaggacgacctggctgagctggcctcccagcagtactttgtagactatggctctgagatgatcctggagcgcctcctgaacctcgtgcccacctacatccccgaccgcgagatcacgcccctgaagacgctggagaagtgggcccagctggccatcgccgcccacaagaaggggatttatgcccagaggagaactgatgcccagaaggtcaaagaggatgtggtcagttatgcccgcttcaagtggcccttgctcttctccaggttttatgaagcctacaaattctcaggccccagtctccccaagaacgacgtcatcgtggccgtcaactggacgggtgtgtactttgtggatgagcaggagcaggtacttctggagctgtccttcccagagatcatggccgtgtccagcagcagggagtgccgtgtctggctctcactgggctgctctgatcttggctgtgctgcgcctcactcaggctgggcaggactgaccccggcggggccctgttctccgtgttggtcctgcaggggagcgaaaacgacggcccccagcttcacgctggccaccatcaagggggacgaatacaccttcacctccagtaatgctgaggacattcgtgacctggtggtcaccttcctagaggggctccggaagagatctaagtatgttgtggccctgcaggataaccccaaccccgcaggcgaggagtcaggcttcctcagctttgccaagggagacctcatcatcctggaccatgacacgggcgagcaggtcatgaactcgggctgggccaacggcatcaatgagaggaccaagcagcgtggggacttccccaccgactgtgtgtacgtcatgcccactgtcaccatgccaccgcgggagattgtggccctggtcaccatgactcccgatcagaggcaggacgttgtccggctcttgcagctgcgaacggcggagcccgaggtgcgtgccaagccctacacgctggaggagttttcctatgactacttcaggcccccacccaagcacacgctgagccgtgtcatggtgtccaaggcccgaggcaaggaccggctgtggagccacacgcgggaaccgctcaagcaggcgctgctcaagaagctcctgggcagtgaggagctctcgcaggaggcctgcctggccttcattgctgtgctcaagtacatgggcgactacccgtccaagaggacacgctccgtcaacgagctcaccgaccagatctttgagggtcccctgaaagccgagcccctgaaggacgaggcatatgtgcagatcctgaagcagctgaccgacaaccacatcaggtacagcgaggagcggggttgggagctgctctggctgtgcacgggccttttcccacccagcaacatcctcctgccccacgtgcagcgcttcctgcagtcccgaaagcactgcccactcgccatcgactgcctgcaacggctccagaaagccctgagaaacgggtcccggaagtaccctccgcacctggtggaggtggaggccatccagcacaagaccacccagattttccacaaggtctacttccctgatgacactgacgaggccttcgaagtggagtccagcaccaaggccaaggacttctgccagaacatcgccaccaggctgctcctcaagtcctcagagggattcagcctctttgtcaaaattgcagacaaggtcatcagcgttcctgagaatgacttcttctttgactttgttcgacacttgacagactggataaagaaagctcggcccatcaaggacggaattgtgccctcactcacctaccaggtgttcttcatgaagaagctgtggaccaccacggtgccagggaaggatcccatggccgattccatcttccactattaccaggagttgcccaagtatctccgaggctaccacaagtgcacgcgggaggaggtgctgcagctgggggcgctgatctacagggtcaagttcgaggaggacaagtcctacttccccagcatccccaagctgctgcgggagctggtgccccaggaccttatccggcaggtctcacctgatgactggaagcggtccatcgtcgcctacttcaacaagcacgcagggaagtccaaggaggaggccaagctggccttcctgaagctcatcttcaagtggcccacctttggctcagccttcttcgaggtgaagcaaactacggagccaaacttccctgagatcctcctaattgccatcaacaagtatggggtcagcctcatcgatcccaaaacgaaggatatcctcaccactcatcccttcaccaagatctccaactggagcagcggcaacacctacttccacatcaccattgggaacttggtgcgcgggagcaaactgctctgcgagacgtcactgggctacaagatggatgacctcctgacttcctacattagccagatgctcacagccatgagcaaacagcggggctccaggagcggcaagtgaacagtcacggggaggtgctggttccatgcctgctctcgaggcagcagtgggttcaggcccatcagctacccctgcagctggggaagacttatgccatcccggcagcgaggctgggctggccagccaccactgactataccaactgggcctctgatgttcttccagtgaggcatctctctgggatgcagaacttccctccatccacccctctggcacctgggttggtctaatcctagtttgctgtggccttcccggttgtgagagcctgtgatccttagatgtgtctcctgtttcagaccagccccaccatgcaacttcctttgactttctgtgtaccactgggatagaggaatcaagaggacaatctagctctccatactttgaacaaccaaatgtgcattgaatactctgaaaccgaagggactggatctgcaggtgggatgagggagacagaccacttttctatattgcagtgtgaatgctgggcccctgctcaagtctaccctgatcacctcagggcataaagcatgtttcattctctgaaa

SEQ ID NO: 271 - DNA, 808 bp, Homo sapiens
  misc_feature (13)..(13): n is a, c, g, or t
  misc_feature (36)..(36): n is a, c, g, or t
  misc_feature (44)..(44): n is a, c, g, or t
  misc_feature (298)..(298): n is a, c, g, or t
  misc_feature (302)..(302): n is a, c, g, or t
  misc_feature (310)..(310): n is a, c, g, or t
  misc_feature (330)..(330): n is a, c, g, or t
  misc_feature (334)..(334): n is a, c, g, or t
  misc_feature (361)..(361): n is a, c, g, or t
  misc_feature (415)..(415): n is a, c, g, or t
  misc_feature (417)..(417): n is a, c, g, or t
  misc_feature (422)..(422): n is a, c, g, or t
  misc_feature (426)..(426): n is a, c, g, or t
  misc_feature (430)..(431): n is a, c, g, or t
  misc_feature (433)..(433): n is a, c, g, or t
  misc_feature (438)..(439): n is a, c, g, or t
  misc_feature (449)..(449): n is a, c, g, or t
  misc_feature (455)..(455): n is a, c, g, or t
  misc_feature (474)..(474): n is a, c, g, or t
  misc_feature (476)..(476): n is a, c, g, or t
  misc_feature (478)..(478): n is a, c, g, or t
  misc_feature (501)..(501): n is a, c, g, or t
  misc_feature (534)..(534): n is a, c, g, or t
  misc_feature (539)..(539): n is a, c, g, or t
  misc_feature (543)..(543): n is a, c, g, or t
  misc_feature (555)..(555): n is a, c, g, or t
  misc_feature (557)..(557): n is a, c, g, or t
  misc_feature (560)..(560): n is a, c, g, or t
  misc_feature (565)..(566): n is a, c, g, or t
  misc_feature (568)..(568): n is a, c, g, or t
  misc_feature (582)..(582): n is a, c, g, or t
  misc_feature (588)..(588): n is a, c, g, or t
  misc_feature (595)..(595): n is a, c, g, or t
  misc_feature (605)..(605): n is a, c, g, or t
  misc_feature (609)..(609): n is a, c, g, or t
  misc_feature (620)..(620): n is a, c, g, or t
  misc_feature (627)..(628): n is a, c, g, or t
  misc_feature (635)..(635): n is a, c, g, or t
  misc_feature (639)..(640): n is a, c, g, or t
  misc_feature (647)..(647): n is a, c, g, or t
  misc_feature (655)..(655): n is a, c, g, or t
  misc_feature (664)..(664): n is a, c, g, or t
  misc_feature (667)..(669): n is a, c, g, or t
  misc_feature (677)..(677): n is a, c, g, or t
  misc_feature (692)..(692): n is a, c, g, or t
  misc_feature (694)..(694): n is a, c, g, or t
  misc_feature (696)..(697): n is a, c, g, or t
  misc_feature (701)..(701): n is a, c, g, or t
  misc_feature (705)..(705): n is a, c, g, or t
  misc_feature (713)..(714): n is a, c, g, or t
  misc_feature (718)..(719): n is a, c, g, or t
  misc_feature (723)..(724): n is a, c, g, or t
  misc_feature (728)..(728): n is a, c, g, or t
  misc_feature (735)..(735): n is a, c, g, or t
  misc_feature (749)..(749): n is a, c, g, or t
  misc_feature (751)..(751): n is a, c, g, or t
  misc_feature (753)..(753): n is a, c, g, or t
  misc_feature (760)..(760): n is a, c, g, or t
  misc_feature (766)..(766): n is a, c, g, or t
  misc_feature (769)..(769): n is a, c, g, or t
  misc_feature (773)..(774): n is a, c, g, or t
  misc_feature (780)..(780): n is a, c, g, or t
  misc_feature (788)..(788): n is a, c, g, or t
  misc_feature (791)..(791): n is a, c, g, or t
  misc_feature (793)..(793): n is a, c, g, or t
  misc_feature (795)..(795): n is a, c, g, or t
  misc_feature (805)..(805): n is a, c, g, or t
  misc_feature (808)..(808): n is a, c, g, or t
gcacgaggtttgncgtggttataaaacaattagcangaatcccntgtacaaaacacatgaaaccaaacacttcatctacttctaccgtgggccaagtggcattcttctgttcaaatctggttaaaagcatggactgtgccacacacccagtgatccatccaaaaacaaggactgcagcctaaattccaaataccagagactgaaattttcagccttgctaagggaacatctcgatgtttgaacctttgttgtgttttgtacagggcattctctgtactagtttgtcgtggttataaancaanttagcagnattagcctacatttgtaatntatntttctatttccatacttctgcccacgntgttttctctcaaaatccattcctttaaaaattaaatctggatgcaggattgananataanaatnaatnntntcctnngtgggggggnggcccnggtccccaaatttcggccntntnagtggtgtcggtcttacaagttnctcttggccggtcggtttttaaatcggcggtgnccttngggnaaacccttgggngnttnccctnncnttacttcggctttngggggnctatccnccctttttgnctcncttgggggaanttggggnngtgggcntganncggtttngccttttnccattcagnttnnnggcggttnaatttgggggattgncnanntgtnaggnggtaagtnntttnnttanntttngggggtnaatgtttttgtgtnantnggggttntgtttntancccnntggggnggttttgnggntntncctttttttnttn

SEQ ID NO: 272 - DNA, 672 bp, Homo sapiens
cgggacatccaggaggaggagctggaggtgctgctggaggaggaggcagccggcggcgatgaggaccgggaaaaggagattctcattgaacggatccagtccatcaaggaggagaaggaggacatcacctaccggctgccggagctggacccaaggggctcggacgaggagaacctggactcggagacgtcggccagcaccgagagcctgctggaggagcgggccgggcggggggcctcggaagggccccctgcgcctgctctcccttgccccggcgcgcccaccccgagccccctcccaccgtggccgcccctccaccgacgaaggctgtcgtccttcgtaacggtcagagtgaagaccccccggcggacccccatcatgtccacggccaacatcaagctcccaccaggcctgccctcccacctgcctcgctgggcaccgggtgcccgggaggcggctgccccagtgcggcgccgggagccacctgcccgccgcccggaccagatacattccgtgtacatcacgcccggggcagacctgccagtgcagggcgccctggagcccctagaagaggatggccagccacctggggccaagcggaggtactcggatcccccaacgtactgcctgccccccgcctcgggccagaccatggctgagagccacagctga

SEQ ID NO: 273 - DNA, 1284 bp, Homo sapiens
ctggagcaggagaagcaccggccccatgaggtgggctccgtgcagtgggccgggagcacctttgggcctatgcagaagagtcggctgggggagcatgagtttgaggccctcatgaggatgctggacaacctgggctacagaacaggttacacgtatcgccacccctttgttcaagagaaaaccaaacacaaaagtgaggtggagattccagccacggtcacagccttcgtgtttgaggaggacggtgccccggtgcccgccctgcgacagcatgcccagaagcagcagaaggagaagacccgctggctcaatacgcccaacacctacctgcgggtcaatgtggccgatgaggtccagaggagcatgggcagcccccgacccaagaccacgtggatgaaggctgacgaggtggagaaatccagcagtggcatgccgattcgcatcgaaaacccaaaccaatttgtgcctctctatactgacccccaggaagtactggagatgaggaacaagattcgagaacaaaaccgacaagatgtgaagtcagcggggcctcagtcccagctcctggcgagcgtcattgccgagaagagccgaagcccgtctacagagagccagctgatgtccaagggagacgaggataccaaagacgattcagaggagacggtgcccaaccccttcagccaactcactgaccaggagttggaggagtacaagaaagaggtggagaggaagaaactagaacttgatgagacaggacaggaacgagagccaggctctggtccggccgtgtgcgagttcttcagcgttgccctccacatctggagtaacatattggagagaaagaaactgccccagaagagcctggctcacctgcaaagtctgcacctgcttctccagtgcagagcccagcgaaggaggcagagacaaagagccctttagtctctccttccaagtctttagaggaaggtactaagaagacagaaacaagcaaagccgccaccacagagcccgaaacaacccagccggaaggggtggtggtcaacgggagggaggaggagcagacggcagaggaaatcctcagcaaaggcctgagccagatgaccaccagtgctgacacggatgttgatacctctaaggacaaaaccgagtcggtcaccagcggccccatgtccccagagggctcaccttccaagtctccctcaaagaagaaaaagaaattccgaaccccctccttcctgaaaaagagcaaaaagaaggagaaagtggagtcctgattcatgacac

SEQ ID NO: 274 - DNA, 2242 bp, Homo sapiens
gggacccgccgccatgagtagctttggagctggcaaaaccaaagaagttatcttcagtgtggaggatggctccgtgaaaatgttcctgaggggccgccctgtgcccatgatgatcccagacgagctggcacccacctacagcctggacacacgctcggagctgccttcttgccggctcaagctggagtgggtctatggctaccgtggccgagactgccgggccaacctttatttgctgcccaccggggagatagtgtactttgtggcctccgtagccgtgctatacagcgtggaggagcagaggcagcgacactacctgggacacaacgatgacatcaaatgcttggccatccacccagatatggtcaccatcgccacgggacaggtggcgggaaccactaaggaagggaagccgctgccgccccacgtgcgcatctgggactcagtttccctctccaccttacacgtgctgggcttgggggtgtttgacagagccgtgtgctgtgtgggcttctccaaatctaatggaggcaacctgctgtgtgcagtggatgaatccaatgatcacatgctctcggtgtgggactgggccaaggagaccaaggtggtggatgtcaagtgctccaatgaggctgtattggtggccaccttccaccccacggacccactgtgcttatcacctgcgggaaatctcacatctacttctggaccttggaggggggcagcttgagcaagcggcaaggcctctttgagaaacatgagaaaccgaagtatgtgctgtgtgtgacctttttggaaggtggcgacgtggtcacgggggactctggggggaacctctatgtttggggcaaaggtgggaaccgtatcacacaggcggtgctgggcgcccacggcggcggcgtgtttgggctctgcgccctgcgggacgggacgctggtgtctggagggggccgtgatcggcgggtggtcctctggggttctgactacagcaagctgcaggaagtggaggtccctgaggactttggccctgtgcgtaccgtggcagagggccacggagacacactgtacgtggggaccacccgcaattccatcctgcagggctccgtgcacacaggcttctcactgctggtccagggccatgtggaagagctgtggggcctggccacacaccccagtcgggcccagtttgtgacctgcgggcaggataagctggtgcatctatggagctcagattcccaccagcccctgtggagcaggatcatcgaggaccctgcccgctcagccggcttccaccccagtggctctgtcctggctgtgggtacagtgactggcagatggctgctgctggacacggagacccatgacctggtggctatccacacagacggcaatgaacagatctcagtggtcagcttctccccagacggggcgtacctggccgtgggctcccacgacaacttggtgtacgtgtacacggtggaccagggcggccgcaaggtcagccgcctgggcaagtgctcgggccattccagttttatcacccacctggattgggcccaggacagcagctgctttgtcaccaactccggggactatgagattctgtactgggacccggctacctgtaagcagatcaccagtgcggatgctgtgaggaacatggaatgggccacagctacttgtgtcctagggtttggggtgtttgggatctggtctgagggggcggacggcactgatatcaacgctgtggcccgctttcatgatgggaagttgctggcttcagctgatgactttggcaaagttcacctgtttagctacccctgctgtcagcctcgagccctcagccacaagtacggtggacacagcagccatgtgacaaatgtggccttcttgtgggatgacagcatggccctgaccacagggggcaaggacaccagtgtgctacagtggcgggtggtctgatgcggccagggaagagtcaggtgtcaggacaggaattctattttcgggagatgtctattgccgagtagagtaatatatacccagagtatgtctatagcagagggggttgtgggggcgggagggtagactgacatacagaagtctctatttatccgggtgggaagagggagtcacatcgctttggggatccattggtgtttggtttggggtgttttttaagttttttcttttatatcatccagaaataaagacacgtacactaaaagaaaaaaaaaaaaac

SEQ ID NO: 275 - DNA, 797 bp, Homo sapiens
  misc_feature (593)..(593): n is a, c, g, or t
  misc_feature (704)..(704): n is a, c, g, or t
ttctggtgtcacagctggagcagctgcacaggcagggcctcctttcgctgcagaagctctggttctacatccagccagccatgcgcaccatggacatcctggcctccctcgccacctcggtggacaaaggcgaatgtcttggggggtccacgctgagcctgctccacgacaggagcttcagctacacaggggacagccaggcgcaggagctatgcctgtacctaaccaaggcggccagtgctccctacttcgaggttctggagaagtggatctacaggggcatcatccacgacccatacagtgagtttatggtcgaggagcacgagctgcggaaggagaggatccaggaggattacaacgacaagtactgggaccagcggtacaccatcgtccagcagcagatcccgtccttcctgcagaaaatggcggacaagatcctcagcacaggaaaatatctaaatgtggtcagagagtgtggccatgacgtcacctgcccggtggctaaagagatcatctacacgttaaaagaagcggcgtatgtggagcagatcgagaaggcgtctaactacgccagcaatgtgctgctggacttnctgatggaggagaacgagctggtcgctcacctcaggtccatcaagctgctactactcatggaccagtgcgacttcttcgtgcacttcatggacctcgcgggagatgagctncggaagccggtgggagacatcacgcactctacgctggaaagcgctctggagctggcgctgcgcatgagcactgccaacactgaccacttcaag

SEQ ID NO: 276 - DNA, 1744 bp, Homo sapiens
tgaggcctgactttttcaataaaacattgtgtagttctgggcctcctgctgccccggctctgtttcccctggcgccaagagaagaaggcggaactgaacccaggcccagagccggctccctgaggctgtgcccctttccggcaatctctggccacaacccccactggccaggccgtccctcccactggccctagggcccctcccactcccacaccagataaggacagcccagtgccgctttctctggcagtaggcaccagggctggaatggggccgcccggctccccatggcagtgggtgacgctgctgctggggctgctgctccctcctgccgcccccttctggctcctcaatgtgctcttccccccgcacaccacgcccaaggctgagctcagtaaccacacacggcccgtcatcctcgtgcccggctgcctggggaatcagctagaagccaagctggacaaaccagatgtggtgaactggatgtgctaccgcaagacagaggacttcttcaccatctggctggatctcaacatgttcctaccccttggggtagactgctggatcgataacaccagggttgtctacaaccggagctctgggctcgtgtccaacgcccctggtgtccagatccgcgtccctggctttggcaagacctactctgtggagtacctggacagcagcaagctggcagggtacctgcacacactggtgcagaacctggtcaacaatggctacgtgcgggacgagactgtgcgcgccgccccctatgactggcggctggagcccggccagcaggaggagtactaccgcaagctcgcagggctggtggaggagatgcacgctgcctatgggaagcctgtcttcctcattggccacagcctcggctgtctacacttgctctatttcctgctgcgccagccccaggcctggaaggaccgctttattgatggcttcatctctcttggggctccctggggtggctccatcaagcccatgctggtcttggcctcaggtgacaaccagggcatccccatcatgtccagcatcaagctgaaagaggagcagcgcataaccaccacctccccctggatgtttccctctcgcatggcgtggcctgaggaccacgtgttcatttccacacccagcttcaactacacaggccgtgacttccaacgcttctttgcagacctgcactttgaggaaggctggtacatgtggctgcagtcacgtgacctcctggcaggactcccagcacctggtgtggaagtatactgtctttacggcgtgggcctgcccacgccccgcacctacatctacgaccacggcttcccctacacggaccctgtgggtgtgctctatgaggatggtgatgacacggtggcgacccgcagcaccgagctctgtggcctgtggcagggccgccagccacagcctgtgcacctgctgcccctgcacgggatacagcatctcaacatggtcttcagcaacctgaccctggagcacatcaatgccatcctgctgggtgcctaccgccagggtccccctgcatccccgactgccagcccagagcccccgcctcctgaataaagaccttcctttgctaccgtaagccctgatggctatgtttcaggttgaagggaggcactagagtcccacactaggtttcactcctcaccagccacaggctcagtgctgtgtgcagtgaggcaagatgggctctgctgaggcctgggactgagct

SEQ ID NO: 277 - DNA, 2019 bp, Homo sapiens
  misc_feature (22)..(22): n is a, c, g, or t
accccggcgctctccccgtgtnctctccacgactcgctcggcccctctggaataaaacacccgcgagccccgagggcccagaggaggccgacgtgcccgagctcctccgggggtcccgcccgcaagctttcttctcgccttcgcatctcctcctcgcgcgtcttggacatgccaggaataaaaaggatactcactgttaccattctggctctctgtcttccaagccctgggaatgcacaggcacagtgcacgaatggctttgacctggatcgccagtcaggacagtgtttagatattgatgaatgccgaaccatccccgaggcctgccgaggagacatgatgtgtgttaaccaaaatggggggtatttatgccattcccggacaaaccctgtgtatcgagggccctactcgaacccctactcgaccccctactcaggtccgtacccagcagctgccccaccactctcagctccaaactatcccacgatctccaggcctcttatatgccgctttggataccagatggatgaaagcaaccaatgtgtggatgtggacgagtgtgcaacagattcccaccagtgcaaccccacccagatttgcatcaatatgaagggcgggtacacctgctcctgcaccgacggatattggcttttggaaggccagtgcttagacattgatgaatgtcgctatggttactgccagcagctctgtgcgaatgttcctggatcctattcttgtacatgcaaccctggttttaccctcaatgaggatggaaggtcttgccaagatgtgaacgagtgtgccaccgagaacccctgcgtgcaaacctgcgtcaacacctacggctctttcatctgccgctgtgacccaggatatgaacttgaggaagatggcgttcattgcagtgatatggacgagtgcagcttctctgagttcctctgccaacatgagtgtgtgaaccagcccggcacatacttctgctcctgccctccaggctacatcctgctggatgacaaccgaagctgccaagacatcaacgaatgtgagcacaggaaccacacgtgcaacctgcagcagacgtgctacaatttacaagggggcttcaaatgcatcgaccccatccgctgtgaggagccttatctgaggatcagtgataaccgctgtatgtgtcctgctgagaaccctggctgcagagaccagccctttaccatcttgtaccgggacatggacgtggtgtcaggacgctccgttcccgctgacatcttccaaatgcaagccacgacccgctaccctggggcctattacattttccagatcaaatctgggaatgagggcagagaattttacatgcggcaaacgggccccatcagtgccaccctggtgatgacacgccccatcaaagggccccgggaaatccagctggacttggaaatgatcactgtcaacactgtcatcaacttcagaggcagctccgtgatccgactgcggatatatgtgtcgcagtacccattctgagcctcgggctggagcctccgacgctgcctctcattggcaccaagggacaggagaagagaggaaataacagagagaatgagagcgacacagacgttaggcatttcctgctgaacgtttccccgaagagtcagccccgacttcctgactctcacctgtactattgcagacctgtcaccctgcaggacttgccacccccagttcctatgacacagttatcaaaaagtattatcattgctcccctgatagaagattgttggtgaattttcaaggccttcagtttatttccactattttcaaagaaaatagattaggtttgcgggggtctgagtctatgttcaaagactgtgaacagcttgctgtcacttcttcacctcttccactccttctctcactgtgttactgctttgcaaagacccggggagctggcggggaaaccctggggagtagctagtttgctttttgcgtacacagaagaaggctatgtaaacaaaccacagcaggatc

SEQ ID NO: 278 - DNA, 1008 bp, Homo sapiens
ggacctccgggcctccggggcgaccccggctttgagggagaacgaggcaagccggggctcccaggagagaagggagaagccggagatcctggaagacccggggacctcggacctgttgggtaccagggaatgaagggagaaaaagggagccgtggggagaagggctccaggggaccaaagggctacaagggagagaagggcaagcgtggcatcgacggggtggacggcgtgaagggggagatggggtacccaggcctgccaggctgcaagggctcgccgggttttgacggcattcaaggaccccctggccccaagggagaccccggcgcctttggactgaaaggagaaaagggcgagcctggagctgacggggaggccgggagaccaggagctcggggaccatctggagacgaggggccagccggagagcctgggccccccggagagaaaggagaggcgggcgacgaggggaacccaggacctgacggtgcccccggggagcggggtggccctggagagagaggaccacgggggaccccaggcccgcggggaccaagaggagaccctggtgaagctggcccgcagggtgatcagggaagagaagggcccgttggtgtccctggagacccgggcgaggctggccctatcggacctaaaggctaccgaggcgatgagggtcccccagggtccgagggtgccagaggagccccaggacctgccggaccccctggagacccggggctgatgggagaaaggggagaagacggccccgctggaaatggcaccgagggcttccccggcttccccgggtatcccgggaacaggggcgctcccgggataaacggcacgaagggctaccccggcctcaagggggacgagggagaagccggggaccccggagacgataacaacgacattgcaccccgaggagtcaaaggagcaaaggggtaccggggtcccgagggcccccagggacccccaggacaccaaggaccgcctgggccggac

SEQ ID NO: 279 - DNA, 1258 bp, Homo sapiens
ggctctggactggggacacagggatagctgagccccagctgggggtggaagctgagccagggacagtcacggaggaacaagatcaagatgcgctgtaactgagaagcccccaaggcggaggctgagaatcagagacatttcagcagacatctacaaatctgaaagacaaaacatggttcaagcatccgggcacaggcggtccacccgtggctccaaaatggtctcctggtccgtgatagcaaagatccaggaaatactgcagaggaagatggtgcgagagttcctggccgagttcatgagcacatatgtcatgatggtattcggccttggttccgtggcccatatggttctaaataaaaaatatgggagctaccttggtgtcaacttgggttttggcttcggagtcaccatgggagtgcacgtggcaggccgcatctctggagcccacatgaacgcagctgtgacctttgctaactgtgcgctgggccgcgtgccctggaggaagtttccggtctatgtgctggggcagttcctgggctccttcctggcggctgccaccatctacagtctcttctacacggccattctccacttttcgggtggacagctgatggtgaccggtcccgtcgctacagctggcatttttgccacctaccttcctgatcacatgacattgtggcggggcttcctgaatgaggcgtggctgaccgggatgctccagctgtgtctcttcgccatcacggaccaggagaacaacccagcactgccaggaacagaggcgctggtgataggcatcctcgtggtcatcatcggggtgtcccttggcatgaacacaggatatgccatcaacccgtcccgggacctgcccccccgcatcttcaccttcattgctggttggggcaaacaggtcttcagcaatggggagaactggtggtgggtgccagtggtggcaccacttctgggtgcctatctaggtggcatcatctacctggtcttcattggctccaccatcccacgggagcccctgaaattggaggattctgtggcgtatgaagaccacgggataaccgtattgcccaagatgggatctcatgaacccacgatctctcccctcacccccgtctctgtgagccctgccaacagatcttcagtccaccctgccccacccttacatgaatccatggccctagagcacttctaagcagagattatttgtgatcccatccattccccaataaagcaaggcttgtccgacaaa

SEQ ID NO: 280 - DNA, 793 bp, Homo sapiens
tgcgccacgatgtccggggagtcagccaggagcttggggaagggaagcgcgcccccggggccggtcccggagggctcgatccgcatctacagcatgaggttctgcccgtttgctgagaggacgcgtctagtcctgaaggccaagggaatcaggcatgaagtcatcaatatcaacctgaaaaataagcctgagtggttctttaagaaaaatccctttggtctggtgccagttctggaaaacagtcagggtcagctgatctacgagtctgccatcacctgtgagtacctggatgaagcatacccagggaagaagctgttgccggatgacccctatgagaaagcttgccagaagatgatcttagagttgttttctaaggtgccatccttggtaggaagctttattagaagccaaaataaagaagactatgctggcctaaaagaagaatttcgtaaagaatttaccaagctagaggaggttctgactaataagaagacgaccttctttggtggcaattctatctctatgattgattacctcatctggccctggtttgaacggctggaagcaatgaagttaaatgagtgtgtagaccacactccaaaactgaaactgtggatggcagccatgaaggaagatcccacagtctcagccctgcttactagtgagaaagactggcaaggtttcctagagctctacttacagaacagccctgaggcctgtgactatgggctctgaagggggcaggagtcagcaataaagctatgtctgatattttccttcagtaaaaaaaaaa

SEQ ID NO: 281 - DNA, 1453 bp, Homo sapiens
gggagtgcatccgccccaacccttttccccctcgtctcctgtgagaattccccgtcggatacgagcagcgtggccgttggctgcctcgcacaggacttccttcccgactccatcactttctcctggaaatacaagaacaactctgacatcagcagcacccggggcttcccatcagtcctgagagggggcaagtacgcagccacctcacaggtgctgctgccttccaaggacgtcatgcagggcacagacgaacacgtggtgtgcaaagtccagcaccccaacggcaacaaagaaaagaacgtgcctcttccagtgattgccgagctgcctcccaaagtgagcgtcttcgtcccaccccgcgacggcttcttcggcaacccccgcaagtccaagctcatctgccaggccacgggtttcagtccccggcagattcaggtgtcctggctgcgcgaggggaagcaggtggggtctggcgtcaccacggaccaggtgcaggctgaggccaaagagtctgggcccacgacctacaaggtgaccagcacactgaccatcaaagagagcgactggctcagccagagcatgttcacctgccgcgtggatcacaggggcctgaccttccagcagaatgcgtcctccatgtgtgtccccgatcaagacacagccatccgggtcttcgccatccccccatcctttgccagcatcttcctcaccaagtccaccaagttgacctgcctggtcacagacctgaccacctatgacagcgtgaccatctcctggacccgccagaatggcgaagctgtgaaaacccacaccaacatctccgagagccaccccaatgccactttcagcgccgtgggtgaggccagcatctgcgaggatgactggaattccggggagaggttcacgtgcaccgtgacccacacagacctgccctcgccactgaagcagaccatctcccggcccaagggggtggccctgcacaggcccgatgtctacttgctgccaccagcccgggagcagctgaacctgcgggagtcggccaccatcacgtgcctggtgacgggcttctctcccgcggacgtcttcgtgcagtggatgcagagggggcagcccttgtccccggagaagtatgtgaccagcgccccaatgcctgagccccaggccccaggccggtacttcgcccacagcatcctgaccgtgtccgaagaggaatggaacacgggggagacctacacctgcgtggtggcccatgaggccctgcccaacagggtcaccgagaggaccgtggacaagtccaccggtaaacccaccctgtacaacgtgtccctggtcatgtccgacacagctggcacctgctactgaccctgctggcctgcccacaggctcggggcggctggccgctctgtgtgtgcatgcaaactaacccgtgtcaacggggtgagatgttgcatct

SEQ ID NO: 282 - DNA, 3658 bp, Homo sapiens
gagggaaggcaggaaggaggcagccgaaggccgagctgggtggctggaccgggtgctggctgcgcgcgctgctttcggctcccacggcctctcccatgcgctgagggagcccggctgcgggccggcggcgggaggggaggctcctctccatggtccagaagaccagcatgtcccggggcccttacccaccctcccaggagatccccatggaggtcttcgaccccagcccgcagggcaaatacagcaagaggaaagggcgattcaaacggtcagatgggagcacgtcctcggataccacatccaacagctttgtccgccagggctcagcggagtcctacaccagccgtccatcagactctgatgtatctctggaggaggaccgggaagccttaaggaaggaagcagagcgccaggcattagcgcagctcgagaaggccaagaccaagccagtggcatttgctgtgcggacaaatgttggctacaatccgtctccaggggatgaggtgcctgtgcagggagtggccatcaccttcgagcccaaagacttcctgcacatcaaggagaaatacaataatgactggtggatcgggcggctggtgaaggagggctgtgaggttggcttcattcccagccccgtcaaactggacagccttcgcctgctgcaggaacagaagctgcgccagaaccgcctcggctccagcaaatcaggcgataactccagttccagtctgggagatgtggtgactggcacccgccgccccacaccccctgccagtgccaaacagaagcagaagtcgacagagcatgtgcccccctatgacgtggtgccttccatgaggcccatcatcctggtgggaccgtcgctcaagggctacgaggttacagacatgatgcagaaagctttatttgacttcttgaagcatcggtttgatggcaggatctccatcactcgtgtgacggcagatatttccctggctaagcgctcagttctcaacaaccccagcaaacacatcatcattgagcgctccaacacacgctccagcctggctgaggtgcagagtgaaatcgagcgaatcttcgagctggcccggacccttcagttggtcgctctggatgctgacaccatcaatcacccagcccagctgtccaagacctcgctggcccccatcattgtttacatcaagatcacctctcccaaggtacttcaaaggctcatcaagtcccgaggaaagtctcagtccaaacacctcaatgtccaaatagcggcctcggaaaagctggcacagtgcccccctgaaatgtttgacatcatcctggatgagaaccaattggaggatgcctgcgagcatctggcggagtacttggaagcctattggaaggccacacacccgcccagcagcacgccacccaatccgctgctgaaccgcaccatggctaccgcagccctgcgccgtagccctgcccctgtctccaacctccagggaccctaccttgcttccggggaccagccactggaacgggccaccggggagcacgccagcatgcacgagtacccaggggagctgggccagcccccaggcctttaccccagcagccacccaccaggccgggcaggcacgctacgggcactgtcccgccaagacacttttgatgccgacacccccggcagccgaaactctgcctacacggagctgggagactcatgtgtggacatggagactgacccctcagagggcccagggcttggagaccctgcagggggcgcaccagcccgacagggatcctgggaggacgaggaagaagactatgaggaagagctgaccgacaaccggaaccggggccggaataaggcccgctactggcctgagggtgggggtccagttttggggcgcaacaagaatgagctggagggctggggacgaggcgtctacattcgctgagaggcaggggcacacggcgggaggaagggctctgagccaggggaggggagggagcgaggggctcacacctgacatgtatgtcctccagggggcgctgtctccctcctttcagatgcctttgctcaaagcttggggtttctttggtgttaccatcccagctcccgggagcccttaagccccagctgtcggtttttacctgcctgttgtggatggatgggggatacccacctttctgaagtgtcccctttctcccatcttaaggggctctcctccctcaccctcctagagaaaaggtgcacttccttaactctttctactcggggccctaagtgacggtcctaagtgggatggctctccttctcccaagctgcagtactggggaagggctgggcgcttttcctggaaaggaggccacagattctttcccatggggctctcttccccagaccccagatccaaggtccctcaccctgcctgccccttcctcccagcttcctgcagcatcgtctggtcggtgaaagccatagcatgacaccccatggagcttgtcttggggagggttctgggtggaagctggcaggcatacagcaccctctacctccgtggccatggcaacgtccagggcccagaaccctgaggagtgagcggccgagacgctgctccccaccccccacctccatgcctcagcctttgcctaccccaggaatgagcttggcctccaacatcccttgcctgctgccattagtagaggggcccctctgcatctgagccccccatccctgtgcacctgggtgtggagcccatggaacactctggtccgcctcattttaaaccaaaaaactgctccttcaccctcaccctgaggccccaggggagaggacccgtgggatggtgcccaggggttgccttgggacctcggatctcctctggggggcttggctgctgctgttgctgctctgtatttgcctctcgtgattctgtttgttacccatgttcacttcccccaggagaggccttggtaccccctctcccctggggcatccctttgccttggcatccctgtagcccagcaaccctgcccctccccagcatcccagctgggccagagagagccgagtgtgccaacaaggactggggcctgcccgtgcccgcctcagggatggcacctcatgcctgtctcgccacctcctgtgccaatgtcaccctaccctgggggtggggtgcagcttccacttactgattagaagacaccactgccctcccttcccccctccctgtctggtgtcctgtgcccccatctgtctgtctatatttgtctgtactcccctaggagaagtattttgccatatataaaaccactgtcctgtcctttgtggctgcctcccaagcctgcttctttgtcctcgccacatagtcgtcagcgtaggcacctgggagctgctgatatgcacggggagttgaaagggtgggtgcctgaagatgttgtgccctgagtcattgactcaaaagaaaagatgatcctttgattttggccctctgatgtattgctagagccaggagtgccttgggcagtcccagctccacactgccctgagccccttcacttacctgtctctccacaagtagagccaaaggcaatgggaagctcaatgttgctcagtgggtgagatccagacccactggtgcaatgtcttaaatacacatgactgtttttctgc

SEQ ID NO: 283 - DNA, 5542 bp, Homo sapiens
ctgactgcactggtgatggtccctggcaatccaacctggcaccatcgcagttggagtactatgcatcttcaccagatgaaaaggctctagtagaagctgctgcaaggattggtattgtgtttattggcaattctgaagaaactatggaggttaaaactcttggaaaactggaacggtacaaactgcttcatattctggaatttgattcagatcgtaggagaatgagtgtaattgttcaggcaccttcaggtgagaagttattatttgctaaaggagctgagtcatcaattctccctaaatgtataggtggagaaatagaaaaaaccagaattcatgtagatgaatttgctttgaaagggctaagaactctgtgtatagcatatagaaaatttacatcaaaagagtatgaggaaatagataaacgcatatttgaagccaggactgccttgcagcagcgggaagagaaattggcagctgttttccagttcatagagaaagacctgatattacttggagccacagcagtagaagacagactacaagataaagttcgagaaactattgaagcattgagaatggctggtatcaaagtatgggtacttactggggataaacatgaaacagctgttagtgtgagtttatcatgtggccattttcatagaaccatgaacatccttgaacttataaaccagaaatcagacagcgagtgtgctgaacaattgaggcagcttgccagaagaattacagaggatcatgtgattcagcatgggctggtagtggatgggaccagcctatctcttgcactcagggagcatgaaaaactatttatggaagtttgcagaaattgttcagctgtattatgctgtcgtatggctccactgcagaaagcaaaagtaataagactaataaaaatatcacctgagaaacctataacattggctgttggtgatggtgctaatgacgtaagcatgatacaagaagcccatgttggcataggaatcatgggtaaagaaggaagacaggctgcaagaaacagtgactatgcaatagccagatttaagttcctctccaaattgctttttgttcatggtcatttttattatattagaatagctacccttgtacagtattttttttataagaatgtgtgctttatcacaccccagtttttatatcagttctactgtttgttttctcagcaaacattgtatgacagcgtgtacctgactttatacaatatttgttttacttccctacctattctgatatatagtcttttggaacagcatgtagaccctcatgtgttacaaaataagcccaccctttatcgagacattagtaaaaaccgcctcttaagtattaaaacatttctttattggaccatcctgggcttcagtcatgcctttattttcttttttggatcctatttactaatagggaaagatacatctctgcttggaaatggccagatgtttggaaactggacatttggcactttggtcttcacagtcatggttattacagtcacagtaaagatggctctggaaactcatttttggacttggatcaaccatctcgttacctggggatctattatattttattttgtattttccttgttttatggagggattctctggccatttttgggctcccagaatatgtattttgtgtttattcagctcctgtcaagtggttctgcttggtttgccataatcctcatggttgttacatgtctatttcttgatatcataaagaaggtctttgaccgacacctccaccctacaagtactgaaaaggcacagcttactgaaacaaatgcaggtatcaagtgcttggactccatgtgctgtttcccggaaggagaagcagcgtgtgcatctgttggaagaatgctggaacgagttataggaagatgtagtccaacccacatcagcagatcatggagtgcatcggatcctttctataccaacgacaggagcatcttgactctctccacaatggactcatctacttgttaaaggggcagtagtactttgtgggagccagttcacctcctttcctaaaattcagtgtgatcaccctgttaatggccacactagctctgaaattaatttccaaaatctttgtagtagttcatacccactcagagttataatggcaaacaaacagaaagcattagtacaagcccctcccaacacccttaatttgaatctgaacatgttaaaatttgagaataaagagacatttttcatctctttgtctggtttgtcccttgtgcttatgggactcctaatggcatttcagtctgttgctgaggccattatattttaatataaatgtagaaaaaagagagaaatcttagtaaagagtattttttagtattagcttgattattgactcttctatttaaatctgcttctgtaaattatgctgaaagtttgccttgagaactctatttttttattagagttatatttaaagcttttcatgggaaaagttaatgtgaatactgaggaattttggtccctcagtgacctgtgttgttaattcattaatgcattctgagttcacagagcaaattaggagaatcatttccaaccattatttactgcagtatggggagtaaatttataccaattcctctaactgtactgtaacacagcctgtaaagttagccatataaatgcaagggtatatcatatatacaaatcaggaatcaggtccgttcaccgaacttcaaattgatgtttactaatatttttgtgacagagtataaagaccctatagtgggtaaattagatactattagcatattattaatttaatgtctttatcattggatcttttgcatgctttaatctggttaacatatttaaatttgctttttttctctttacctgaaggctctgtgtatagtatttcatgacatcgttgtacagtttaactatcaataaaaagtttggacagtatttaaatattgcaaatatgtttaattatacaaatcagaatagtatgggtaattaaatgaatacaaaaagaagagcctctttctgcagccgacttagacatgctcttccctttctataagctagattttagaataaagggtttcagttaataatcttattttcaggttatgtcatctaacttatagcaaactaccacaatacagtgagttctgccagtgtcccagtacaaggcatatttcaggtgtggctgtggaatgtaaaaatgctcaacttgtatcaggtaatgttagcaataaattaaatgctaagaatgattaatcgggtacatgttactgtaattaactcattgcacttcaaaacctaacttccatcctgaatttatcaagtagttcagtattgtcatttgtttttgttttattgaaaagtaatgttgtcttaagatttagaagtgattattagcttgagaactattacccagctctaagcaaataatgattgtatacatattaagataatggttaaatgcggttttaccaagttttcccttgaaaatgtaattcctttatggagatttattgtgcagccctaagcttccttcccatttcatgaatataaggcttctagaattggactggcaggggaaagaatggtagagacagaaattaagactttatccttgtttgcttgtaaactattattttcttgctaatgtaacatttgtctgttccagtgatgtaaggatattaagttattaagctaaatattaattttcaaaaatagtccttctttaacttagatatttcatagctggatttaggaagatctgttattctggaagtactaaaaagaataatacaacgtacaatgtctgcattcactaattcatgttccagaagaggaaataatgaagatatactcagtagagtactaggtgggaggatatggaaatttgctcataaaatctcttataaaacgtgcatataacaaaatgacacccagtaggcctgcattacatttacatgaccgtgtttatttgccatcaaataaactgagtactgacaccagacaaagactccaaagtcataaaatagcctatgaccaactgcagcaagacaggaggtcagctcgcctataatggtgcttaaagtgtgattgatgtaattttctgtactcaccatttgaagttagttaaggagaactttatttttttaaaaaaagtaaatggcaaccactagtgtgctcatcctgaactgttactccaaatccactccgtttttaaagcaaaattatcttgtgattttaagaaaagagttttctatttatttaagaaagtaacaatgcagtctgcaagctttcagtagttttctagtgctatattcatcctgtaaaactcttactacgtaaccagtaatcacaaggaaagtgtcccctttgcatatttctttaaaattctttctttggaaagtatgatgttgataattaacttacccttatctgccaaaaccagagcaaaatgctaaatacgttattgctaatcagtggtctcaaatcgatttgcctccctttgcctcgtctgagggctgtaagcctgaagatagtggcaagcaccaagtcagtttccaaaattgcccctcagctgctttaagtgactcagcaccctgcctcagcttcagcaggcgtaggctcaccctgggcggagcaaagtatgggccagggagaactacagctacgaagacctgctgtcgagttgagaaaaggggagaatttatggtctgaattttctaactgtcctctttcttgggtctaaagctcataatacacaaaggcttccagacctgagccacacccaggccctatcctgaacaggagactaaacagaggcaaatcaaccctaggaaatacttgcattctgccctacggttagtaccaggactgaggtcatttctactggaaaagattgtgagattgaacttatctgatcgcttgagactcctaataggcaggagtcaaggccactagaaaattgacagttaagagccaaaagtttttaaaatatgctactctgaaaaatctcgtgaaggctgtaggaaaagggagaatcttccatgttggtgtttttcctgtaaagatcagtttggggtatgatataagcaggtattaataaaaataacacaccaaagagttacgtaaaacatgttttattaattttggtccccacgtacagacattttatttctattttgaaatgagttatctattttcataaaagtaaaacactattaaagtgctgttttatgtgaaataacttgaatgttgttcctataaaaaatagatcataactcatgatatgtttgtaatcatggtaatttagatttttatgaggaatgagtatctggaaatattgtagcaatacttggtttaaaattttggacctgagacactgtggctgtctaatgtaatcctttaaaaattctctgcattgtcagtaaatgtagtatattattgtacagctactcataattttttaaagtttatgaagttatatttatcaaataaaaactttcctatat

SEQ ID NO: 284 - DNA, 1105 bp, Homo sapiens
gccaccgctgtggtgtcggtgggtcggttggtttttgtctcaccgttggtgtccgtgccgttcagttgcccgccatggctgagctggatccgttcggcgcccctgccggcgcccctggcggtcccgcgctggggaacggagtggccggcgccggcgaagaagacccggctgcggccttcttggcgcagcaagagagcgagattgcgggcatcgagaacgacgaggccttcgccatcctggacggcggcgcccccgggccccagccgcacggcgagccgccggggggtccggatgctgttgatggagtaatgaatggtgaatactaccaggaaagtaatggtccaacagacagttatgcagctatttcacaagtggatcgattgcagtcagagcctgaaagtatccgtaaatggagagaagaacaaatggaacgcttggaagcccttgatgccaattctcggaagcaagaagcagagtggaaagaaaaggcaataaaggagctagaagaatggtatgcaagacaggacgagcagctacagaaaacaaaagcaaacaacagggtggcagatgaagctttctacaaacaacccttcgctgacgtgattggttatgtcacaaacataaaccatccttgctacagcctagaacaggcagcagaagaagcctttgtaaatgacattgacgagtcgtccccaggcactgagtgggaacgggtggcccggctgtgtgactttaaccccaagtctagcaagcaggccaaagatgtctcccgcatgcgctcagtcctcatctccctcaagcaggccccgctggtgcactgaagagccaccctgtggaaacactacatctgcaatatcttaatcctactcagtgaagctcttcacagtcattggattaattatgttgagttcttttggaccaaacctttttgtctttagagttgttcattgtttgtgattgcatgtttccttccttcaactgtgttctccctggcattcagagaggagggagaggaggaagaggaaggggagggaagcttcccaagagtagcctcaacctgtgcttctgtgcattattctgagaataaatttctgtttcaaactgt

SEQ ID NO: 285 - DNA, 737 bp, Homo sapiens
ccagctcaagactttgctctccaccaggcagaagatgacagactgtgaatttggatatatttacaggctggctcaggactatctgcagtgcgtcctacagataccacaacctggatcaggtccaagcaaaacgtccagagtgctacaaaatgttgcgttctcagtccaaaaagaagtggaaaagaatctgaagtcatgcttggacaatgttaatgttgtgtccgtagacactgccagaacactattcaaccaagtgatggaaaaggagtttgaagacggcatcattaactggggaagaattgtaaccatatttgcatttgaaggtattctcatcaagaaacttctacgacagcaaattgccccggatgtggatacctataaggagatttcatattttgttgcggagttcataatgaataacacaggagaatggataaggcaaaacggaggctgggaaaatggctttgtaaagaagtttgaacctaaatctggctggatgacttttctagaagttacaggaaagatctgtgaaatgctatctctcctgaagcaatactgttgaccagaaaggacactccatattgtgaaaccggcctaatttttctgactgatatggaaacgattgccaacacatacttctacttttaaataaacaactttgatgatgtaacttgaccttccagagttatggaaattttgtccccatgtaatgaataaattgtatgtatttttctcta

SEQ ID NO: 286 - DNA, 10211 bp, Homo sapiens
gagaggtcgttttcccgtccccgagagcaagtttatttacaaatgttggagtaataaagaaggcagaacaaaatgagctgggctttggaagaatggaaagaagggctgcctacaagagctcttcagaaaattcaagagcttgaaggacagcttgacaaactgaagaaggaaaagcagcaaaggcagtttcagcttgacagtctcgaggctgcgcctcagaagcaaacacagaaggttgaaaatgaaaaaaccgagggtacaaacctgaaaagggagaatcaaagattgatggaaatatgtgaaagtctggagaaaactaagcagaagatttctcatgaacttcaagtcaaggagtcacaagtgaatttccaggaaggacaactgaattcaggcaaaaaacaaatagaaaaactggaacaggaacttaaaaggtgtaaatctgagcttgaaagaagccaacaagctgcgcagtctgcagatgtctctctgaatccatgcaatacaccacaaaaaatttttacaactccactaacaccaagtcaatattatagtggttccaagtatgaagatctaaaagaaaaatataataaagaggttgaagaacgaaaaagattagaggcagaggttaaagccttgcaggctaaaaaagcaagccagactcttccacaagccaccatgaatcaccgcgacattgcccggcatcaggcttcatcatctgtgttctcatggcagcaagagaagaccccaagtcatctttcatctaattctcaaagaactccaattaggagagatttctctgcatcttacttttctggggaacaagaggtgactccaagtcgatcaactttgcaaatagggaaaagagatgctaatagcagtttctttgacaattctagcagtcctcatcttttggatcaattaaaagcgcagaatcaagagctaagaaacaagattaatgagttggaactacgcctgcaaggacatgaaaaagaaatgaaaggccaagtgaataagtttcaagaactccaactccaactggagaaagcaaaagtggaattaattgaaaaagagaaagttttgaacaaatgtagggatgaactagtgagaacaacagcacaatacgaccaggcgtcaaccaagtatactgcattggaacaaaaactgaaaaaattgacggaagatttgagttgtcagcgacaaaatgcagaaagtgccagatgttctctggaacagaaaattaaggaaaaagaaaaggagtttcaagaggagctctcccgtcaacagcgttctttccaaacactggaccaggagtgcatccagatgaaggccagactcacccaggagttacagcaagccaagaatatgcacaacgtcctgcaggctgaactggataaactcacatcagtaaagcaacagctagaaaacaatttggaagagtttaagcaaaagttgtgcagagctgaacaggcgttccaggcgagtcagatcaaggagaatgagctgaggagaagcatggaggaaatgaagaaggaaaacaacctccttaagagtcactctgagcaaaaggccagagaagtctgccacctggaggcagaactcaagaacatcaaacagtgtttaaatcagagccagaattttgcagaagaaatgaaagcgaagaatacctctcaggaaaccatgttaagagatcttcaagaaaaaataaatcagcaagaaaactccttgactttagaaaaactgaagcttgctgtggctgatctggaaaagcagcgagattgttctcaagaccttttgaagaaaagagaacatcacattgaacaacttaatgataagttaagcaagacagagaaagagtccaaagccttgctgagtgctttagagttaaaaaagaaagaatatgaattgaaagaagagaaaactctgttttcttgttggaaaagtgaaaacgaaaaacttttaactcagatggaatcagaaaaggaaaacttgcagagtaaaattaatcacttggaaacttgtctgaagacacagcaaataaaaagtcatgaatacaacgagagagtaagaacgctggagatggacagagaaaacctaagtgtcgagatcagaaaccttcacaacgtgttagacagtaagtcagtggaggtagagacccagaaactagcttatatggagctacagcagaaagctgagttctcagatcagaaacatcagaaggaaatagaaaatatgtgtttgaagacttctcagcttactgggcaagttgaagatctagaacacaagcttcagttactgtcaaatgaaataatggacaaagaccggtgttaccaagacttgcatgccgaatatgagagcctcagggatctgctaaaatccaaagatgcttctctggtgacaaatgaagatcatcagagaagtcttttggcttttgatcagcagcctgccatgcatcattcctttgcaaatataattggagaacaaggaagcatgccttcagagaggagtgaatgtcgtttagaagcagaccaaagtccgaaaaattctgccatcctacaaaatagagttgattcacttgaattttcattagagtctcaaaaacagatgaactcagacctgcaaaagcagtgtgaagagttggtgcaaatcaaaggagaaatagaagaaaatctcatgaaagcagaacagatgcatcaaagttttgtggctgaaacaagtcagcgcattagtaagttacaggaagacacttctgctcaccagaatgttgttgctgaaaccttaagtgcccttgagaacaaggaaaaagagctgcaacttttaaatgataaggtagaaactgagcaggcagagattcaagaattaaaaaagagcaaccatctacttgaagactctctaaaggagctacaacttttatccgaaaccctaagcttggagaagaaagaaatgagttccatcatttctctaaataaaagggaaattgaagagctgacccaagagaatgggactcttaaggaaattaatgcatccttaaatcaagagaagatgaacttaatccagaaaagtgagagttttgcaaactatatagatgaaagggagaaaagcatttcagagttatctgatcagtacaagcaagaaaaacttattttactacaaagatgtgaagaaaccggaaatgcatatgaggatcttagtcaaaaatacaaagcagcacaggaaaagaattctaaattagaatgcttgctaaatgaatgcactagtctttgtgaaaataggaaaaatgagttggaacagctaaaggaagcatttgcaaaggaacaccaagaattcttaacaaaattagcatttgctgaagaaagaaatcagaatctgatgctagagttggagacagtgcagcaagctctgagatctgagatgacagataaccaaaacaattctaagagcgaggctggtggtttaaagcaagaaatcatgactttaaaggaagaacaaaacaaaatgcaaaaggaagttaatgacttattacaagagaatgaacagctgatgaaggtaatgaagactaaacatgaatgtcaaaatctagaatcagaaccaattaggaactctgtgaaagaaagagagagtgagagaaatcaatgtaattttaaacctcagatggatcttgaagttaaagaaatttctctagatagttataatgcgcagttggtgcaattagaagctatgctaagaaataaggaattaaaacttcaggaaagtgagaaggagaaggagtgcctgcagcatgaattacagacaattagaggagatcttgaaaccagcaatttgcaagacatgcagtcacaagaaattagtggccttaaagactgtgaaatagatgcggaagaaaagtatatttcagggcctcatgagttgtcaacaagtcaaaacgacaatgcacaccttcagtgctctctgcaaacaacaatgaacaagctgaatgagctagagaaaatatgtgaaatactgcaggctgaaaagtatgaactcgtaactgagctgaatgattcaaggtcagaatgtatcacagcaactaggaaaatggcagaagaggtagggaaactactaaatgaagttaaaatattaaatgatgacagtggtcttctccatggtgagttagtggaagacataccaggaggtgaatttggtgaacaaccaaatgaacagcaccctgtgtctttggctccattggacgagagtaattcctacgagcacttgacattgtcagacaaagaagttcaaatgcactttgccgaattgcaagagaaattcttatctttacaaagtgaacacaaaattttacatgatcagcactgtcagatgagctctaaaatgtcagagctgcagacctatgttgactcattaaaggccgaaaatttggtcttgtcaacgaatctgagaaactttcaaggtgacttggtgaaggagatgcagctgggcttggaggaggggctcgttccatccctgtcatcctcttgtgtgcctgacagctctagtcttagcagtttgggagactcctccttttacagagctcttttagaacagacaggagatatgtctcttttgagtaatttagaaggggctgtttcagcaaaccagtgcagtgtagatgaagtattttgcagcagtctgcaggaggagaatctgaccaggaaagaaaccccttcggccccagcgaagggtgttgaagagcttgagtccctctgtgaggtgtaccggcagtccctcgagaagctagaagagaaaatggaaagtcaagggattatgaaaaataaggaaattcaagagctcgagcagttattaagttctgaaaggcaagagcttgactgccttaggaagcagtatttgtcagaaaatgaacagtggcaacagaagctgacaagcgtgactctggagatggagtccaagttggcggcagaaaagaaacagacggaacaactgtcacttgagctggaagtagcacgactccagctacaaggtctggacttaagttctcggtctttgcttggcatcgacacagaagatgctattcaaggccgaaatgagagctgtgacatatcaaaagaacatacttcagaaactacagaaagaacaccaaagcatgatgttcatcagatttgtgataaagatgctcagcaggacctcaatctagacattgagaaaataactgagactggtgcattgaaacccacaggagagtgctctggggaacagtccccagataccaattatgagcctccaggggaagataaaacccagggctcttcagaatgcatttctgaattgtcattttctggtcctaatgctttggtacctatggatttcctggggaatcaggaagatatccataatcttcaactgcgggtaaaagagacatcaaatgagaatttgagattacttcatgtgatagaggaccgtgacagaaaagttgaaagtttgctaaatgaaatgaaagaattagactcaaaactccatttacaggaggtacaactaatgaccaaaattgaagcatgcatagaattggaaaaaatagttggggaacttaagaaagaaaactcagatttaagtgaaaaattggaatatttttcttgtgatcaccaggagttactccagagagtagaaacttctgaaggcctcaattctgatttagaaatgcatgcagataaatcatcacgtgaagatattggagataatgtggccaaggtgaatgacagctggaaggagagatttcttgatgtggaaaatgagctgagtaggatcagatcggagaaagctagcattgagcatgaagccctctacctggaggctgacttagaggtagttcaaacagagaagctatgtttagaaaaagacaatgaaaataagcagaaggttattgtctgccttgaagaagaactctcagtggtcacaagtgagagaaaccagcttcgtggagaattagatactatgtcaaaaaaaaccacggcactggatcagttgtctgaaaaaatgaaggagaaaacacaagagcttgagtctcatcaaagtgagtgtctccattgcattcaggtggcagaggcagaggtgaaggaaaagacggaactccttcagactttgtcctctgatgtgagtgagctgttaaaagacaaaactcatctccaggaaaagctgcagagtttggaaaaggactcacaggcactgtctttgacaaaatgtgagctggaaaaccaaattgcacaactgaataaagagaaagaattgcttgtcaaggaatctgaaagcctgcaggccagactgagtgaatcagattatgaaaagctgaatgtctccaaggccttggaggccgcactggtggagaaaggtgagttcgcattgaggctgagctcaacacaggaggaagtgcatcagctgagaagaggcatcgagaaactgagagttcgcattgaggccgatgaaaagaagcagctgcacatcgcagagaaactgaaagaacgcgagcgggagaatgattcacttaaggataaagttgagaaccttgaaagggaattgcagatgtcagaagaaaaccaggagctagtgattcttgatgccgagaattccaaagcagaagtagagactctaaaaacacaaatagaagagatggccagaagcctgaaagtttttgaattagaccttgtcacgttaaggtctgaaaaagaaaatctgacaaaacaaatacaagaaaaacaaggtcagttgtcagaactagacaagttactctcttcatttaaaagtctgttagaagaaaaggagcaagcagagatacagatcaaagaagaatctaaaactgcagtggagatgcttcagaatcagttaaaggagctaaatgaggcagtagcagccttgtgtggtgaccaagaaattatgaaggccacagaacagagtctagacccaccaatagaggaagagcatcagctgagaaatagcattgaaaagctgagagcccgcctagaagctgatgaaaagaagcagctctgtgtcttacaacaactgaaggaaagtgagcatcatgcagatttacttaagggtagagtggagaaccttgaaagagagctagagatagccaggacaaaccaagagcatgcagctcttgaggcagagaattccaaaggagaggtagagaccctaaaagcaaaaatagaagggatgacccaaagtctgagaggtctggaattagatgttgttactataaggtcagaaaaagaaaatctgacaaatgaattacaaaaagagcaagagcgaatatctgaattagaaataataaattcatcatttgaaaatattttgcaagaaaaagagcaagagaaagtacagatgaaagaaaaatcaagcactgccatggagatgcttcaaacacaattaaaagagctcaatgagagagtggcagccctgcataatgaccaagaagcctgtaaggccaaagagcagaatcttagtagtcaagtagagtgtcttgaacttgagaaggctcagttgctacaaggccttgatgaggccaaaaataattatattgttttgcaatcttcagtgaatggcctcattcaagaagtagaagatggcaagcagaaactggagaagaaggatgaagaaatcagtagactgaaaaatcaaattcaagaccaagagcagcttgtctctaaactgtcccaggtggaaggagagcaccaactttggaaggagcaaaacttagaactgagaaatctgacagtggaattggagcagaagatccaagtgctacaatccaaaaatgcctctttgcaggacacattagaagtgctgcagagttcttacaagaatctagagaatgagcttgaattgacaaaaatggacaaaatgtcctttgttgaaaaagtaaacaaaatgactgcaaaggaaactgagctgcagagggaaatgcatgagatggcacagaaaacagcagagctgcaagaagaactcagtggagagaaaaataggctagctggagagttgcagttactgttggaagaaataaagagcagcaaagatcaattgaaggagctcacactagaaaatagtgaattgaagaagagcctagattgcatgcacaaagaccaggtggaaaaggaagggaaagtgagagaggaaatagctgaatatcagctacggcttcatgaagctgaaaagaaacaccaggctttgcttttggacacaaacaaacagtatgaagtagaaatccagacataccgagagaaattgacttctaaagaagaatgtctcagttcacagaagctggagatagaccttttaaagtctagtaaagaagagctcaataattcattgaaagctactactcagattttggaagaattgaagaaaaccaagatggacaatctaaaatatgtaaatcagttgaagaaggaaaatgaacgtgcccaggggaaaatgaagttgttgatcaaatcctgtaaacagctggaagaggaaaaggagatactgcagaaagaactctctcaacttcaagctgcacaggagaagcagaaaacaggtactgttatggataccaaggtcgatgaattaacaactgagatcaaagaactgaaagaaactcttgaagaaaaaaccaaggaggcagatgaatacttggataagtactgttccttgcttataagccatgaaaagttagagaaagctaaagagatgttagagacacaagtggcccatctgtgttcacagcaatctaaacaagattcccgagggtctcctttgctaggtccagttgttccaggaccatctccaatcccttctgttactgaaaagaggttatcatctggccaaaataaagcttcaggcaagaggcaaagatccagtggaatatgggagaatggtggaggaccaacacctgctaccccagagagcttttctaaaaaaagcaagaaagcagtcatgagtggtattcaccctgcagaagacacggaaggtactgagtttgagccagagggacttccagaagttgtaaagaaagggtttgctgacatcccgacaggaaagactagcccatatatcctgcgaagaacaaccatggcaactcggaccagcccccgcctggctgcacagaagttagcgctatccccactgagtctcggcaaagaaaatcttgcagagtcctccaaaccaacagctggtggcagcagatcacaaaaggtcaaagttgctcagcggagcccagtagattcaggcaccatcctccgagaacccaccacgaaatccgtcccagtcaataatcttcctgagagaagtccgactgacagccccagagagggcctgagggtcaagcgaggccgacttgtccccagccccaaagctggactggagtccaagggcagtgagaactgtaaggtccagtgaaggcactttgtgtgtcagtacccctgggaggtgccagtcattgaatagataaggctgtgcctacaggacttctctttagtcagggcatgctttattagtgaggagaaaacaattccttagaagtcttaaatatattgtactctttagatctcccatgtgtaggtattgaaaaagtttggaagcactgatcacctgttagcattgccattcctctactgcaatgtaaatagtataaagctatgtatataaagctttttggtaatatgttacaattaaaatgacaagcactatatcacaatctctgtttgtatgtgggttttacactaaaaaaatgcaaaacacattttattcttctaattaacagctcctaggaaaatgtagacttttgctttatgatattctatctgtagtatgaggcatggaatagttttgtatcgggaatttctcagagctgagtaaaatgaaggaaaagcatgttatgtgtttttaaggaaaatgtgcacacatatacatgtaggagtgtttatctttctcttacaatctgttttagacatctttgcttatgaaacctgtacatatgtgtgtgtgggtatgtgtttatttccagtgagggctgcaggcttcctagaggtgtgctataccatgcgtctgtcgttgtgcttttttctgtttttagaccaattttttacagttctttggtaagcattgtcgtatctggtgatggattaacatatagcctttgttttctaataaaatagtcgccttcgttttctgtaaaaaaaaaaaaaaaaaaaaaa

SEQ ID NO: 287 - DNA, 540 bp, Homo sapiens
gcggccgctcgcctgccgtcccgagtcccaatcggccgggcctcgcgcggcgcgggaagcgctccgccagcagcaagaggagcgcgcgggccccgccaccctggttccgtgccccggggctccagcgcagactcgggtcctggaccccggccgcctcggggctcctctggctgctcccagggcacagctgtaccaggagcagcagcgcggccagcagcgctgcgcgtcccgcctgcctcatggtgccggcggccaggttgtcggcgagcgtctgtacggtccaagattgagctccagtctctgtccctcggggcaggctgaagacgccttggggaacacagggtctgtcccggggctgtcgccagccttatatagtgccaggacagctccgactgacgtcagcgaagaacatgcactgattgtagaagcaatgacagccacagcttcgagtctgacggctggcgggcccccggaggggcgcacctccctacaccagccttcgtgcccctggggctagcgctggaagcagcactggacgca

SEQ ID NO: 288 - DNA, 6296 bp, Homo sapiens
cactgggagagtttatgtggccgaggcagacaagtggaattaggccttgctgcaggggacttcatttccttctcagtactggacccatttatgaggaggtggcttatgaaagtgtgatgttcgcgtatttcttgacaggcagtggcgtgatcttggctcactgcaacctccgactccctggttcaagcgattctcctgcctcagcctcctgagtggggattacaggccacagcaaacacaggtgtgcaggaaccgtttgtcatggaagccagggagcctgggaggcccacacccacctaccatcttgtccctaacaccagccagtcccaggtggaagaagatgtcagctcgccacctcaaaggtcctccgaaactatgcagctgaagaaggagatctccctgctgaatggggtcagcctggtggtgggcaacatgatcggctcagggatctttgtctcacccaagggtgtgctggtacacactgcctcctatgggatgtcactgattgtgtgggccattggtgggctcttctctgttgtgggtgccctttgttatgcagagctggggaccaccatcaccaagtcgggagccagctacgcttatattctagaggcctttgggggcttcattgccttcatccgcctgtgggtctcactgctagttgttgagcccaccggtcaggccatcatcgccatcacctttgccaactacatcatccagccgtccttccccagctgtgatcccccatacctggcctgccgtctcctggctgctgcttgcatatgtctgctgacatttgtgaactgtgcctatgtcaagtggggcacacgtgtgcaggacacgttcacttacgccaaggtcgtagcgctcattgccatcattgtcatgggccttgttaaactgtgccagggacactctgagcactttcaggacgcctttgagggttcctcctgggacatgggaaacctctctcttgccctctactctgccctcttctcttactcaggttgggacacccttaattttgtaacagaagaaatcaaaaacccagaaagaaatttgcccttggccattgggatttctatgccaattgtgacgctcatctacatcctgaccaatgtggcctattacacagtgctgaacatttcagatgtccttagcagtgatgctgtggctgtgacatttgctgaccagacgtttggcatgttcagctggaccatccccattgctgttgccctgtcctgctttgggggcctcaatgcatccatctttgcttcatcaaggttgttcttcgtgggctcccgggagggccacctaccggaccttctgtccatgatccacattgagcgttttacacctatccctgctttactgttcaattgcaccatggcactcatctacctcatcgtggaggatgttttccagcttatcaactacttcagcttcagctactggttcttcgtgggcctgtctgttgttggacagctctacctccgctggaaggagcccaagcggccccggcctctcaagctgagcgtgtttttccccatcgtgttctgcatatgctccgtgtttctggtgatagtgcccctcttcactgacaccattaattccctcattggcatcgggattgccctttctggagtccctttctacttcatgggtgtttacctgccagagtcccggaggccattgtttattcggaatgtcctggctgctatcaccagaggcacccagcagctttgcttttgtgtcctgactgagcttgatgtagccgaagaaaaaaaggatgagaggaaaactgactagaggtcagaggtggctttctgaggcctggaaggcaggccaaccagcaaaatcctgataacaagactctgtgggcccaactctcctgaattaaaggagccttttgacccaatcatatagtggggctcagggccagtgctcactcttattggtaagctataggagactcaggatctgggccaacctcaaggtgggggcttcagagggtggggggaagattggggaacggggggaatggtcatttagttttactcctgataggtagatgcagctcttacagatatttacttggtaaagtgcagtggggaagagggaatgctaggttgatagggctggtggcttctgaatttggtatttgaactaggagtccctatagaggggctgctttatgggaagtttttctctgaccaggtacaacacctgactttaaaggcctgaaatgctaccatttcttcctctggctcaaaattcttccctggggagagagttatattcccttatttattgatatttagtccagaacaccagttctaacgaagcatgcgtgtctcttcatctacaggatgcaataggctgattgtatttaaaaatcaaagtacccaaaactgagtccctttgggctcagaaatgtctgtggtattgggtcagactctgaccacagattttatgctgtttagcacaatttctattgagtcttacctgcaacaatgaaccttaaagatttttttactcacgtacctgttacactttagcatacagatagatcatagatcacgttacaagcacttggctcaggtccagcaaggacagatgaacaaattcctgagtcagaagtctgttaatattgctgttttgaaggacaatcctttattttacttgagaccttacatctttgttctagctgacagtaaatctctgggtttctgttacgaactctaagagggctgaaacttctgatattcaggtggatcacctgaattctctcagctgtcaatggcttggagaacatctcatgggcccaagtcatcaaataacctgttcctctctgtaagggcagtgtgagggactgctgtgcagacccaagcaatcccaacctggtgctaggtcatttcacttttctgaaaacctcacatcaggctgcatcctcttctgtccctggcaccaggctttgtttacacttggagccaccttggtgtgggtcaccgggacagtgtactcctctcctgccagcctccccttccccgaggtgtggtggctgcagtctcaggaagagcttggtacttgtggggacttctgttttctccctgtggagatcagtgaagactgggaggaaagctgcttcaacctgagtccggctcttcagcaggctgcacaagtggaagcaactaattctggtgctcaggctgggctctccacccaagttaggcctgctctggcctaatggatcttactgtatgagcaggacggctgcattggattgtacaactgttttgtgatgcccccagacactgtcatcctaggccgagaagaacctgctagcttgacataccccatgggcttatccttaggttttggaattggtcaacagtgaggcagtctcccttcctgaccattcttctccacccagtcacagataagggaataaccttggccatatatttgctcaataaagattgaaggaagcatggtcatagttgccctgggttcagagcataatgcatatgtgaagcatggggtgacattcctactgtcatgggtttgggatttgtaacggcaaattcctgcccgacgacagggtgtcttatgcaaaggctgacttgcctgaacgctaagaacatgacttctgtctgagctaagctggcacccatcccagggctcctctggagctaatcctttaagcaaaatgtgcttgccttttaaagatccctgaccccagctttagctttctccaccagataaccagctaatcccaggaatttgctgccccccaccagtggcttctagggaaagcaaggacctcacatgccaggtgccctagtacttgcttagtgagccatgtcatcctcctttcatttttggatggtgacagcatttttcccctctgtgctggatacagacttctcccaggatcctctctttgggagcgaagccagaggatccctacagcactcaagcttcatggtggaattaatttctgccagctctttgttgtctgtctccttaaatccttttcctggtgtgcttattatcccttttgcagtgagtacagtttattaagttgtcagccctttaatattggggaaacttaatgagtataaatagcagggagcacattgtaacagcacagtgttttgtttttttcacccggttgctgtatgagaatggctttcaatcctttgtttctatgcctacagacagaaagcaagatgtctaatattagacatacaagttgctgcctgttataacggtgaattatacctttgtgcatgcctaggatgtttgttgttttaattagctgcaatatatacggcctgtgtacacagaatttaatcacttcggcaggttgaacaactccatgtagataagagcaagtgtaggcaaaggtttagaaaatggacataaagtcaaagaatgatggcaggtaggatgaaggagagatacttaggaaatcctaaaagaggcggcaagaaggtacctccctgtgtaactcaccttcccccatgacagtaagagacactcacaggctatgagggtacacccctagctgaatgttctgtgttgtttccttagacctgtggtgtccgctgcaacagctactagccacgtgtagctaattacattaaaatgaaataaaattaaaagctcagtttctcagttgcgctaatcacatttcaagtgctcagcagccacccgtgtctactactacacagtgcagacacagaacatatcatcactgcagatagttctactggacaatgttacgctagaataaacaccaaggcagtcagttaaggcagctatggtttggaaaggcatacggacagagtctgcttagaagagatacaagttgttaataaaattgatcctgttgatagtagtttgtttttgtggtgggtgctgtgaagagtaaacattactcagtggaaagctaagttcagaaggtactttgtttttcctcccttgccttaagtccttggtatttataatcaatgctgaaccttctatttcactaccgctccctgttttagatattcagatttaaaaggttttcaaagaattactttcttccatgttcaaagctagattttactaaacacatgtatcacattcatatatattgtttcttggccccactgccaaaggaagtcagtcagtaatttcacaaccgttatcagagtttggaagcagaaatagctgttaactaaaatctcccactgctcagactactttctgccctaatggccattactatccagtctgtattgctacaagggacccactggtaccccttttagattctatcaaaaggaacagggttttcctagaggcaggcagcctggtggtatggcacagcagaagcttactgctaatgaaatgggaacctccccctcccttgtggtttcagcacagaacctgaatgccaggaaaaattcctgggccaagaagctaaagctaaagaaaccttccttttttcaacgtttttttttctttcaaactgtagggtcacttttgattgaggcaaaggggtcctactgtaagtggaaaagactcactcccctaacataagttttcactgtggtgggatggtgccgcccgatatgcttgatatgcttttccttccacatgttaagctaggaaacctaacaggatgtcagcagggcagttaactctggactcagagccctcaagggcatgtggcagaacctcatggacatcacaagaccatcagtctgaatccaggtcgtgggggctgtcatagccgaactccttctgcacatccagagggtacttgctccacatccgctgtctgctgctgcctctttcctcctcactcaggctgttgtagtcagcagagcctagaatgacatcccgggagtggattctaaatgtgattttcctaggctactgcaggagccccttctcttctcagaaaggtctgtttttgttcccgattgtaatgcaaaatccttgctcaataaataaaaaagaatatagaattcttttttttttaaagaaggaatcactttcctatcatctaaaccaagttccttcacactggagtattttgtcacttctcccctccgtggagtattttgtcacttctcccctccgtataggattttttgttgttgtaagagttgtagtcatattgtaaatatttttgtacctttctccttttaacgtgttattgacaaacctccccaaaagaatatgcaattgtttgattcatttctctgttatcagacaccaataaattctttttgttgggc

SEQ ID NO: 289 - DNA, 1173 bp, Homo sapiens
ctgagttgggaggtttgtttgattttgtttttggtggtaggagatacgtactttgagggagtaagcttcattcatctgacaagtttatttgccccgatattttcatcccatacttcacaaaggcaaagtgtcttagggtcatcagggaggcctgccgttacacatgcctgatcccatccttgtttccagctgtgggtcaggtttcgggccctgactgtggcacttctgcttcacctgcccactgggttccccctggccagcctttaaacacactgtatttttgacagcttcagcctgaagttgaaatagtttatgactctaaaactgggagactgcagggcttaactgaagatatcatacacgtaagagatacatgcacaatctcaaatggaatttgagaggacagaagggaagaatcagtcttcagctcctccctgaattacgtgtcgcaatctgagtctaataaatgtgtgtgcacatcagcatgtacagagagctgtcatgggtgctgttcgaaactttggaactctagatagaaaatatctcttggcacttaatctgctactaatttttgctgttaaatcagatggatcaaactttgtgtttaatagctaaatgttgaatctgaaatggtaattactgaattataattttaaaaagtctcaaagtcagcattttggaagtggtactttcatagatttttaaattccataatgtgccttatcttttcattgcaggatgacagaccaaagttaaacaagcctccggaaactcttatcactactattgattctagttccagttggtggaccaactgggtgatccctgccatctctgcagtggccgtcgccttgatgtatcgcctatacatggcagaggactgaacacctcctcagaagtcagcgcaggaagagcctgctttggacacgggagaaaagaagccattgctaactacttcaactgacagaaaccttcacttgaaaacaatgattttaatatatctctttctttttcttccgacattagaaacaaaacaaaaagaactgtcctttctgcgcccaaatttttcgagtgtgcctttttattcatctactttattttgatgtttccttaatgtgtaatttacttattataagcatgatcttttaaaaatatatttggcttttaaagtat

SEQ ID NO: 290 - DNA, 1049 bp, Homo sapiens
gtagccatggcggccatgagtttgttgcggcgggtttcggttactgcggtggcagctctgtctggccggccccttggcactcgcctcggatttgggggcttcctcactcgtggctttccgaaggctgctgctcctgttcgacacagtggagaccatgggaaaagactatttgtcatcagaccttctagattctatgacaggcgttttttgaagttattgagattctacattgcattgactgggattccagtagcaattttcataactctggtgaatgtattcattggtcaagctgaactagcagaaattccagaaggctatgtcccagaacactgggaatattataagcatcccatatcaagatggattgcccgtaatttctatgatagtcctgaaaagatatatgaaagaacaatggccgtccttcagattgaagctgaaaaggctgaattacgggtaaaggagctggaagtgcgaaaattgatgcatgtgagaggagatggaccctggtattactatgagacaattgacaaggaacttattgatcattctccgaaagcaactcctgacaattaagcctttttttctccaaatacaaagtatattctctttattggaaaataaattaataaatatattctgtatttttgctctccgtgaaaaacaaaagagcctctgacattactgtctctcagtgttggttcagattgaggcttttgtttgaggagtttggcttccagtccccaaagaaggtttaaaatgtactaataaaaactggagaaataggaatttgtgaacccctaaaattgtagcaactttgaaaggttagtgttttatttacctgacaaatggaagttatagaagtctaataatgttaagcaccagtaattatagtattttgtacaaatgcctgtactgtagatgtctgtattattgaggggcaactcaggattttaagttccataaagtattgaaccaactctaaaatgttaactccttaataaacagattctcagtaaacaaattttaaagttaaaaaaaaaaaaaaa

SEQ ID NO: 291 - DNA, 1584 bp, Homo sapiens
gcgtcccccacaccacagacccgcgccgccgacgacccagcagccgccatgcgtctgctccgaggtgtgtttgtagttgctgctaagcgaacgccctttggagcttacggaggccttctgaaagacttcactgctactgacttgtctgaatttgctgccaaggctgccttgtctgctggcaaagtctcacctgaaacagttgacagtgtgattatgggcaatgtcctgcagagttcttcagatgctatatatttggcaaggcatgttggtttgcgtgtgggaatcccaaaggagaccccagctctcacgattaataggctctgtggttctggttttcagtccattgtgaatggatgtcaggaaatttgtgttaaagaagctgaagttgttttatgtggaggaaccgaaagcatgagccaagctccctactgtgtcagaaatgtgcgttttggaaccaagcttggatcagatatcaagctggaagattctttatgggtatcattaacagatcagcatgtccagctccccatggcaatgactgcagagaatcttactgtaaaacacaaaataagcagagaagaatgtgacaaatatgccctgcagtcacagcagagatggaaagctgctaatgatgctggctactttaatgatgaaatggcaccaattgaagtgaagacaaagaaaggaaaacagacaatgcaggtagacgagcatgctcggccccaaaccaccctggaacagttacagaaacttcctccagtattcaagaaagatggaactgttactgcagggaatgcatcgggtgtagctgatggtgctggagctgttatcatagctagtgaagatgctgttaagaaacataacttcacaccactggcaagaattgtgggctactttgtatctggatgtgatccctctatcatgggtattggtcctgtccctgctatcagtggggcactgaagaaagcaggactgagtcttaaggacatggatttggtagaggtgaatgaagcttttgctccccagtacttggctgttgagaggagtttggatcttgacataagtaaaaccaatgtgaatggaggagccattgctttgggtcacccactgggaggatctggatcaagaattactgcacacctggttcacgaattaaggcgtcgaggtggaaaatatgccgttggatcagcttgcattggaggtggccaaggtattgctgtcatcattcagagcacagcctgaagagaccagtgagctcactgtgacccatccttactctacttggccaggccacagtaaaacaagtgaccttcagagcagctgccacaactggccatgccctgccattgaaacagtgattaagtttgatcaagccatggtgacacaaaaatgcattgatcatgaataggagcccatgctagaagtacattctctcagatttgaaccagtgaaatatgatgtatttctgagctaaaactcaactatagaagacattaaaagaaatcgtattcttgccaagtaaccaccacttctgccttagataatatgattataaggaaatcaaataaatgttgccttaacttc

SEQ ID NO: 292 - DNA, 1173 bp, Homo sapiens
aggccaagatggcggcagctgcggcttcgcttcgcggggtagtgttgggcccgcggggcgcggggctcccgggcgcgcgtgcccggggtctgctgtgcagcgcgcggcccgggcagctcccgctacggacacctcaggcagtggccttgtcgtcgaagtctggcctttcccgaggccggaaagtgatgctgtcagcgctgggcatgctggcggcagggggtgcggggctggccgtggctctgcattcggctgtgagtgccagtgacctggaggtgcacccccccagctatccgtggtctcaccgtggcctcctctcttccttggaccacaccagcatccggaggggtttccaggtatataagcaggtgtgcgcctcctgccacagcatggacttcgtggcctaccgccacctggtgggcgtgtgctacacggaggatgaagctaaggagctggctgcggaggtggaggttcaagacggccccaatgaagatggggagatgttcatgcggccagggaagctgttcgactatttcccaaaaccataccccaacagtgaggctgctcgagctgccaacaacggagcattgccccctgacctcagctacatcgtgcgagctaggcatggtggtgaggactacgtcttctccctgctcacgggctactgcgagccacccaccggggtgtcactgcgggaaggtctctacttcaacccctactttcctggccaggccattgccatggcccctcccatctacacagatgtcttagagtttgacgatggcaccccagctaccatgtcccagatagccaaggatgtgtgcaccttcctgcgctgggcatctgagccagagcacgaccatcgaaaacgcatggggctcaagatgttgatgatgatggctctgctggtgcccctggtctacaccataaagcggcacaagtggtcagtcctgaagagtcggaagctggcatatcggccgcccaagtgaccctgtccagtgtctgcttgccatcctgccagaacaggccctcaagcccaagagccatcccaggcctgttcaggctcagctaagcctctcttcatctggaagaagaggcaagggggcaggagaccaggctctagctctgggccctccttcagcccccatcatgggaataaattaattttctcaatgt

SEQ ID NO: 293 - DNA, 778 bp, Homo sapiens
  misc_feature (8)..(8): n is a, c, g, or t
  misc_feature (10)..(10): n is a, c, g, or t
  misc_feature (26)..(26): n is a, c, g, or t
  misc_feature (39)..(39): n is a, c, g, or t
  misc_feature (92)..(92): n is a, c, g, or t
  misc_feature (110)..(110): n is a, c, g, or t
  misc_feature (118)..(118): n is a, c, g, or t
  misc_feature (156)..(156): n is a, c, g, or t
  misc_feature (362)..(362): n is a, c, g, or t
  misc_feature (394)..(395): n is a, c, g, or t
  misc_feature (397)..(398): n is a, c, g, or t
  misc_feature (400)..(400): n is a, c, g, or t
  misc_feature (405)..(405): n is a, c, g, or t
  misc_feature (419)..(419): n is a, c, g, or t
  misc_feature (425)..(425): n is a, c, g, or t
  misc_feature (427)..(427): n is a, c, g, or t
  misc_feature (438)..(438): n is a, c, g, or t
  misc_feature (448)..(448): n is a, c, g, or t
  misc_feature (465)..(465): n is a, c, g, or t
  misc_feature (471)..(471): n is a, c, g, or t
  misc_feature (494)..(494): n is a, c, g, or t
  misc_feature (513)..(513): n is a, c, g, or t
  misc_feature (523)..(523): n is a, c, g, or t
  misc_feature (528)..(529): n is a, c, g, or t
  misc_feature (537)..(537): n is a, c, g, or t
  misc_feature (543)..(543): n is a, c, g, or t
  misc_feature (545)..(545): n is a, c, g, or t
  misc_feature (556)..(556): n is a, c, g, or t
  misc_feature (563)..(563): n is a, c, g, or t
  misc_feature (575)..(575): n is a, c, g, or t
  misc_feature (578)..(578): n is a, c, g, or t
  misc_feature (580)..(581): n is a, c, g, or t
  misc_feature (590)..(591): n is a, c, g, or t
  misc_feature (598)..(598): n is a, c, g, or t
  misc_feature (612)..(612): n is a, c, g, or t
  misc_feature (627)..(627): n is a, c, g, or t
  misc_feature (633)..(633): n is a, c, g, or t
  misc_feature (641)..(641): n is a, c, g, or t
  misc_feature (644)..(644): n is a, c, g, or t
  misc_feature (648)..(649): n is a, c, g, or t
  misc_feature (656)..(657): n is a, c, g, or t
  misc_feature (668)..(668): n is a, c, g, or t
  misc_feature (670)..(670): n is a, c, g, or t
  misc_feature (676)..(677): n is a, c, g, or t
  misc_feature (696)..(696): n is a, c, g, or t
  misc_feature (705)..(705): n is a, c, g, or t
  misc_feature (707)..(707): n is a, c, g, or t
  misc_feature (709)..(709): n is a, c, g, or t
  misc_feature (716)..(716): n is a, c, g, or t
  misc_feature (723)..(723): n is a, c, g, or t
  misc_feature (725)..(725): n is a, c, g, or t
  misc_feature (728)..(728): n is a, c, g, or t
  misc_feature (730)..(730): n is a, c, g, or t
  misc_feature (738)..(738): n is a, c, g, or t
  misc_feature (744)..(744): n is a, c, g, or t
  misc_feature (751)..(751): n is a, c, g, or t
  misc_feature (754)..(754): n is a, c, g, or t
  misc_feature (760)..(760): n is a, c, g, or t
  misc_feature (766)..(767): n is a, c, g, or t
  misc_feature (770)..(770): n is a, c, g, or t
gggaattngnacgaggagccttggcngctgcacaatggncgcgagtttgggaatctgacgcggatcggcactgtgatcagctacagcttgtnaccgttcgagcagcgcgnctatccgnacgtcttcactaaaggaatccccaatgttctgcgccgnattcgggagtctttctttcgcgtggtgccgcagtttgtagtgttttatcttatctacacacgggggactgaagagttcgagagatccaagaggaagaatccagctgcctatgaaaatgacaaatgagcaacgcatccggatgacggttccctgtctctgaaagacctttctctggaagaggagtctgcattgtagtgtctcaaagncacaataaacttcctatggtctgcaaaaaaannannanaaaanctcggaggggtggncccggntncccaatttcgncctatagtgngtcgtatttacaatttnacttgnccgtcggttttaaaccgttgtgncttgggaaaaccctggggntttcccaacnttaanncggctttnaagganantcccccttttngccaagnttgggttaattnggngnngggggcccnnaacccgntttggcctttcccnaacaaagtttcggancctttnattttggnggnttgnnaaatttnnaaggggttaantntttttnntaaaaattttggggttaanttttttttnanancagcttnttttttntnccnanttggcccnattttnaaaaatnccnttttantttaannggntggccttt

SEQ ID NO: 294 - DNA, 7041 bp, Homo sapiens
atggatgaaccatctcccttggcccaacctctggagctgaaccagcactctcgattcataataggttctgtgtcagaagataactcagaggatgagatcagcaacctggtgaagctggacctactggaggagaaggagggctccttgtcacctgcttctgttggctcagatacactctctgatttggggatctctgccctacaggatggcttggccttgcacataaggtccagctggtctggcttgcacctagtaaagcagggcggagacagaaagaaaatagattctcaacgagatttcactgtggcttctccagcagaatttgttactcgctttgggggaaataaagtgattgagaaggttctcatcgctaacaatggcattgcagcagtgaaatgcatgcggtctatccgtaggtggtcttatgaaatgtttcgaaatgaacgtgcaattagattcgttgtcatggtcacacctgaagaccttaaagccaatgcagaatacattaagatggcagatcactatgtgccggtgcctggaggagcaaacaacaacaactatgcaaatgtggaattaattcttgatattgctaaaaggatcccagtgcaagcagtgtgggctggctggggtcatgcttctgagaatcccaaactaccggaacttctcttgaaaaatggcattgccttcatgggtcctccaaaccaggccatgtgggctttaggggataagattgcatcttccatagtggctcaaactgcaggtatcccaactcttccctggagcggcagtggtcttcgtgtggactggcaggaaaatgatttttcaaaacgtatcttaaatgttccccaggagctatatgaaaaaggttatgtgaaagatgtggatgatgggctaaaggcagctgagaaggttggatatccagtaatgatcaaggcctcagagggaggaggagggaagggaattagaaaagttaacaatgcagatgacttccctaatctcttcagacaggttcaagctgaagttcctggatctcccatatttgtgatgagactagccaaacaatctcgtcatctggaggtgcagatcttagcggaccaatatggcaatgctatctctttgtttggtcgtgattgctctgtacaacgcaggcatcagaagattattgaagaagcacctgctactattgctactccagcagtatttgaacacatggaacagtgtgcggtgaaacttgccaaaatggtgggttatgtgagtgctgggactgtggaatacctgtacagccaggatggcagcttctactttctagaattgaaccctcggctacaggttgaacaaccttgtacagagatggtggctgatgtcaatctccccgcagcacagctccagattgccatggggattcctctatatagaatcaaggatatccgtatgatgtatggggtatctccttggggtgattctcccattgattttgaaaattctgctcacgttccttgtccaaggggccatgttattgctgctcggatcactagtgaaaatccagatgagggttttaagcccagctcaggaacagttcaggagctaaatttccgcagcaataagaatgtttggggatatttcagtgttgctgctgcagggggacttcatgaatttgctggttctcagtttggtcactgcttttcttggggagaaaacagagaagaagcaatttcaaacatggtggtggcattgaaggagctgtctattcggggtgactttcgaactacagttgaatacctgatcaaattgttagagactgaaagctttcaaatgaacagaattgatactggctggctggacagactgatagcagaaaaagtacgggctgagcgtcctgacaccatgttgggggttgtgtgtggtgccctccacgtcggagatgtgagcctgcgaaatagcgtctctaacttccttcactccttagaaaggggtcaagtccttccggctcatacacttctgaatacagtagatgttgaacttatctatgagggagtcaagtatgtacttaaggtgactcgacagtcccccaactcctatgtggtgatcatgaatggctcatgtgtagaagtagatgtacatcggctgagtgacggtggactgctcttgtcctatgatggcagcagttacaccacgtatatgaaggaggaagtagacagatatcgcatcacaattggcaataaaacctgtgtgtttgagaaggaaaatgacccatcggtgatgcgctcaccttctgctgggaagttaatccagtacattgtagaagatggaggtcatgtgtttgccggccagtgctatgcagagattgaggtaatgaagatggtaatgactttgacagctgtggagtctggctgtatccattacgtcaagcgtcctggagcagctcttgaccctggctgtgtactcgccaaaatgcaactggacaaccccagcaaggttcagcaggctgaacttcacacaggtagtctgccacggatccagagcaccgctctccgaggcgagaagctccatcgagtgttccactatgtcctggataatctggtcaatgtaatgaatggatactgccttccagatcctttctttagcagcaaggtaaaagactgggtagaacgattgatgaaaaccctcagagatccctccctgcctctcctagaattgcaagatattatgaccagtgtgtctggccgcattccccccaatgtggagaagtctatcaagaaggaaatggctcagtatgctagcaacatcacatcagtcctctgtcagtttcccagccagcagattgcaaacatcctagatagccatgcagctacattgaaccggaaatctgaacgggaagtcttctttatgaatactcagagcattgtccagctggtacagaggtaccgaagtggcatccgaggccacatgaaggctgtggtgatggatctgctccggcagtacctgcgagtagagacacaattccagaatggtcactatgacaaatgtgtattcgcccttcgagaagagaataagagtgacatgaacactgtactgaactacatcttctctcacgctcaagtcaccaagaagaatcttctggtcacaatgcttattgatcagttgtgtggccgggaccctactctaactgatgagctgctgagtattctcacagagctaactcaactcagtaagaccaccaatgccaaagtagcacttcgagcacgccaggttcttattgcctcccatttgccatcatatgacgttcgccataaccaagtagagtctatcttcctatcagctattgacatgtatggacatcaattttgcattgagaacctgcagaaactcatcctatcagaaacatctatttttgatgtcctaccaaacttcttctatcacagcaaccaagtagtgaggatggcagctctggaggtgtacgttcgaagggcttatattgcctatgaacttaacagcgtacaacaccgccagcttaaggacaacacctgcgtggtggaattccagttcatgctgcccacatctcatccaaacagagggaacatccctacgctaaacagaatgtccttctcctccaacctcaaccactatggcatgacccatgtagctagtgtcagcgatgttctgttggacaacgccttcacaccaccttgtcaacgcatgggcggaatggtctcttttcggacttttgaagattttgtcaggatctttgatgaagtaatgggctgcttctgtgactccccaccccagagtcccacattccctgaggcaggtcacacgtctctttatgatgaggataaggttcccagggatgaaccaattcacattctcaatgtggctatcaagactgacggtgatattgaggatgacaggctggcagctatgttcagagaattcacccagcaaaataaagctaccctggctgaccatgggatccggcgcctgactttcctggttgcacaaaaggatttcagaaagcaggtcaactatgaggtggatcggagatttcatagagaattccctaaattttttacattccgagcaagggataagtttgaggaggatcgtatctatcgtcatctggagcctgctctggctttccagttagagctgaaccggatgagaaattttgacctcactgccattccatgtgctaatcacaagatgcacctgtatctcggggcagccaaggtggaagtgggcacagaagtgacagactacaggttctttgttcgtgcaatcatcaggcattctgatctggtcaccaaggaagcttcttttgaatatctgcaaagtgaaggggagcggctactcctggaagccatggatgagttggaagttgcttttaacaatacaaatgtccgcactgactgtaaccacatcctcctcaactttgtgcccacggttatcatggacccatcaaagattgaggaatccgtgcggagcatggtaatgcggtatggaagtcgcctgtggaaattgcgcgtcctccaggcagaactgaaaatcaacattcgcctgacgccaactggaaaagcaattcccatccgccttttcctgacaaacgagtctggctattacttggatatcagcctatacaaggaagtgactgactccaggacagcacagatcatgtttcaggcatatggagacaagcagggaccactgcatggaatgttaatcaatactccatatgtgaccaaagacctgctgcaatcaaagaggttccaggcacaatccttagggacaacgtacatatatgatatcccagagatgtttcggcagtccctgatcaaactctgggagtctatgtcaactcaagcatttcttccatctccccctctgccttctgacatgctgacttacactgaactggtactggatgatcaaggtcagctggtccacatgaacaggcttccaggaggaaatgagattggcatggtagcttggaaaatgagccttaaaagtcctgaatatccagaaggccgagatgttattgttattggcaatgacattacataccgaattgggtcctttgggcctcaagaagatttgttatttctcagagcttccgaacttgctagggccgaaggcattccacgcatctatgtatcagccaacagtggagcaagaatcggactggcagaagaaattcgccatatgtttcatgtggcctgggtagattctgaggatccttacaagggatacaggtatttatatctgactcctcaagattataagagagtcggtgctctcaactctgtccattgtgaacacgtggaagatgaaggagaatccaggtacaagataacagatattattgggaaagaagagggaattggacccgagaaccttcgaggttctggaatgatcgctggagaatcctcattggcctataatgagatcattaccatcagcctggtgacgtcccgggccattgggattggggcttaccttgtccggctgggacagagaaccatccaggttgagaattctcacttgattctaacaggagctggagccctcaacaaagtcctcgggcgggaagtgtacacctccaataaccagctggggggcatccagattacgcacaacaatggggtgacccactgcactgtgtgtgacggctttgaaggggttttcactgtcctgcactggctgtcttacatgcccaagagcgtacacagttcagttcctcttctgaactcaaaggatcctatagacagaatcatcgagtttgttcccacaaagaccccatatgatcctcgatggatgctagcaggccgccctcacccaacccaaaaaggtcagtggttgagtggcttttttgactatggatctttctcagagattatgcagccctgggcacagacggtggtggttggtagagccaggttagggggaatacctgtgggagttgttgctgtagaaacccggacagtagaactaagtgtaccagctgatccagcaaacctggattctgaagccaagataatccagcacgccggccaagtttggtttccggattctgcgtttaagacgtatcaggccatcaaggacttcaaccgggaagggctacctctaatggtctttgccaactggagaggcttctctggtggaatgaaagatatgtatcaccaagtgctgaagtttggtgcttacattgtggatggcttgcgggaatgttcccagcctgtgctggtctacattcctccccaggctgagctgcggggtggctcctgggtggtgatcgacccaaccatcaatcctcggcacatggagatgtatgctgaccgagaaagcaggggatctgttctggagccagaagggacggtagaaatcaaattccgcagaaaggatctggtgaaaaccatgcgtcgggtggacccagtctacatccacttggctgagcgattggggaccccagagctgagcccaactgagcggaaggagttggagagcaagttgaaggagcgggaggaattcctaattccaatttaccatcaggtagccgtgcagtttgctgacttgcacgacactccaggccggatgcaggagaagggtgttattagcgatatcctggattggaaaacatcccgtaccttcttctactggcgactgaggcgtcttctgctggaggacctggtcaagaagaaaatccacagtgccaaccctgagctgactgatggccagattcaagccatgttaagacgctggtttgtggaagtggaaggaacagtgaaggcttatgtttgggacaataataaggatctggcggagtggctagagaaacagctgacagaggaggatggtgttcactcggtaatagaggaaaacatcaaatgcatcagcagagactacgtcctcaagcaaatccgcagcttggtccaggccaatccagaggttgccatggattccatcatccatatgacgcagcacatatcacccactcagcgggcagaagtcataaggatcctttccactatggactccccttctacgtag

SEQ ID NO: 295 - DNA, 1292 bp, Homo sapiens
acgaggaaatggcggcaggggtggccgggtggggggttgaggcagaggagttcgaagatgctcctgatgtggagccgctggagcctacacttagcaacatcatcgagcagcgcagcctgaagtggatcttcgtcgggggcaagggtggtgtgggcaagaccacctgcagctgcagcctggcagtccagctctccaaggggcgtgagagtgttctgatcatctccacagacccagcacacaacatctcagatgcttttgaccagaagttctcaaaggtgcctaccaaggtcaaaggctatgacaacctctttgctatggagattgaccccagcctgggcgtggcggagctgcctgacgagttcttcgaggaggacaacatgctgagcatgggcaagaagatgatgcaggaggccatgagcgcatttcccggcatcgatgaggccatgagctatgccgaggtcatgaggctggtgaagggcatgaacttctcggtggtggtatttgacacggcacccacgggccacaccctgaggctgctcaacttccccaccatcgtggagcggggcctgggccggcttatgcagatcaagaaccagatcagccctttcatctcacagatgttcaacatgctgggcctgggggacatgaacgcagaccagctggcctccaagctggaggagacgctgcccgtcatccgctcagtcagcgaacagttcaaggaccctgagcagacaactttcatctgcgtatgcattgctgagttcctgtccctgtatgagacagagaggctgatccaggagctggccaagtgcaagattgacacacacaatataattgtcaaccagctcgtcttccccgaccccgagaagccctgcaagatgtgtgaggcccgtcacaagatccaggccaagtatctggaccagatggaggacctgtatgaagacttccacatcgtgaagctgccgctgttaccccatgaggtgcggggggcagacaaggtcaacaccttctcggccctcctcctggagccctacaagccccccagtgcccagtagcacagctgccagccccaaccgctgccatttcacactcaccttccaccctccccaccccctcggggcagagtttgcacaaagtcccccccataatacagggggagccacttgggcaggaggcagggaggggtccattccccctggtggggctggtggggagctgtagttgccccctacctctcccacctcttgctcttcaataaaatgatcttaaactgcaaaaaaaaaaaaaaaaaa

SEQ ID NO: 296 - DNA, 1668 bp, Homo sapiens
ccgcgccttatcgccaaagctgcggctctggacgcccagccgcggcgtatcccgatcacttccgggtagtgctccacgggcacgagccgcgattgggctaccgtagatggggtacttccggtgtgcaggtgctgggtccttcggcaggaggaggaagatggagcccagcaccgcggcccgggcttgggccctcttttggttgctgctgcccttgcttggcgcggtttgcgccagcggaccccgcaccttagtgctgctggacaacctcaacgtgcgggagactcattcgcttttcttccggagcctgaaggaccggggctttgagctcacattcaagaccgctgatgaccccagcctgtctctcataaagtatggggaattcctctatgacaatctcatcattttctccccttcggtagaagattttggaggcaacatcaacgtggagaccatcagtgcctttattgacggcggaggcagtgtgctggtagctgccagctccgacattggtgaccctcttcgagagctgggcagtgagtgcgggattgagtttgacgaggagaaaacggctgtcattgaccatcacaactatgacatctcagaccttggccagcatacgctcatcgtggctgacactgagaacctgctgaaggccccaaccatcgttgggaaatcatctctaaatcccatcctctttcgaggtgttgggatggtggccgatcctgataaccctttggtgctggacatcctgacgggctcttccacctcttactccttcttcccggacaagcctatcacccagtatccacatgcggtggggaagaacaccctcctcattgctgggctccaggccaggaacaatgcccgcgtcatcttcagcggctccctcgacttcttcagcgactccttcttcaactcagcagtgcagaaggcggcgcccggctcccagaggtattcccagacaggcaactatgaactagctgtggccctctcccgctgggtgttcaaggaggagggtgtcctccgtgtggggcctgtgtcccatcatcgggtgggcgagacagccccacccaatgcctacactgtcactgacctagtggagtatagcatcgtgatccagcagctctcaaatggcaaatgggtcccctttgatggcgatgacattcagctggagtttgtccgcattgatccttttgtgaggaccttcctgaagaagaaaggtggcaaatacagtgttcagttcaagttgcccgacgtgtatggtgtattccagtttaaagtggattacaaccggctaggctacacacacctgtactcttccactcaggtatccgtgcggccactccagcacacgcagtatgagcgcttcatcccctcggcctacccctactacgccagcgccttccccatgatgctggggctcttcatcttcagcatcgtcttcttgcacatgaaggagaaggagaagtccgactgaggggctagagccctctccgcacagcgtggagacggggcaaggaggggggttattaggattggtggttttgttttgctttgtttaaagccgtgggaaaatggcacaactttacctctgtgggagatgcaacactgagagccaaggggtgggagttgggataatttttatataaaagaagtttttccactttg

SEQ ID NO: 297 - DNA, 110096 bp, Homo sapiens
gatcctatgagcccaggaagtcaaggcttcagtaagccatgatcacaccactgcactccagcctgggcaacagggtgagaccctgtcttgaaaaatgaaattaaaaataataaagaataggccaggtgcaatggcttatgcatgtaatcctagtactttgggaggccaagatgggtggatcacttgaggtcaggaattcgaaaccagcctggccaacatggtgaaaccccatttccactaaaaatacaaaaaaattagttgggcgtggtggcacatgcctgtaatcccagctacttggaaggctgaggcaggagaattgcttgaacccgggaggtggaggttggtgtgagccaagatcccaccactgcactccagcctgggcaacagagcgagactctgtctcaaaataataataataataataataataataataatgattaatagtaataaataaacaattctgcagcatttagtaattcaccatgctgtacagccattagatctatgtagttgcagaacttttttatcacccccaaagggaaacctcacacccattacacactccctcctcattcctccctccctgcagtccctggcaaccactaatctattttctctctctgtggaattgctttttctggatatttctttttttttttttttttgagacagaatttcactcttgttgcccaggctggagtgcaatggcgtgatctcggctcactgcaacctccgcctcccaggttcaagcaattctcctccctcagcctcctgagtagctgggattataggcatgcgccaccacacctggctaattttgtatttttagtaaagacagggtttcaccatgttggtcaggctggtctcgaactcctgacctcaggtgatctgcctgccttggcctcccaaagtgctgcgattacaggcgtgagccacatgcctggcctttttctggatatttcctataaatgggatcgtatgctctgtggcctcttatgactggcttatttcacttaacataacgtttctgaggtttatccatgttgtagcttgtgtcactgcttcattcatttttatagccgagtaatattccattgaatggtagatgcattcatccactggtgaacattgggttgtccatctttcatctgttgtaaatagtgctcttatgaatgtgggtgtacaaatatttggctggacaactgctttgagttatttaggatatacgtctagaggtggaatttcttggtcatatggtagctctatgtttaacttatagaggaatcctgcatgggctttcgagcaagctaactggctgtatgtgttaatggcagctcagcatggggaaaattgccaattctattcccaggccagccacactttggcagatgttccagatgtctagtggagagtcctaccccaatggccacacatgtgttttctctgaactgcctagtatttttcaaaaatttgggctgggcctgatggctcacggctgtaatcccagcactttgagagactgcggcgggtggatcacttgaggtcaggaagtcgagaccagcctggccaacatggtgaaaccctgtctctactaaaaaaatacataaaattagccaggtgtggtggtgcccacccgtaatcccagctacttgggaggctgaggcaggagaactgctggaaccagggagacaaagattgcagtgagccgatatcaaaccactgcactccagcctgggtgagagagtgagactccatcttgaaaaaaataaaaatagataaataaaagaagcaaaatataaaaattgaaagatttttgcttcaaaatctgggtttgggccttctcttgaaaaatcagaagttctagggctgggtgtagtggctcatgcctgtagtcccagcactttgggaagccaaggtggcaggattgcttgagcccaggagtttgaaaccagtctggacaacatagcaagaccctgtctctacttaaaaaaaaatagaagaagaagaagttctaataatactgtggtggaaccagctgagtgggggtggtcctgtgatattgggtacctgccccttcgtcatccatggcctccaccctggtctactggcccctgaagacgcttaagtttgtaatctttatttcaaattgtgtctatacagtcacacagatatatacacatacctttcctttatgtatatatttaaaaggaatctcacaatatatgccatttgtttaattttttgaataggtaatggaatgacatcactcaaaatctaaaactctaaaaaaaggtatttatctctcattgtttgtaggattctgttattccttttaatcaaacttgttaattgagtgattcaaatcttccatctccctattcatttatcttgcctgattaatctaatagtttctgagagaaatgtgaaaccttattttaagcaaattctccttgtaattctgtcaattttttttttttttttgccattttggtttttatttgattataggtaagagttccatacaatagtgtgcgaagtattgcaaacaataaaggaaaaatacagcataagatacctcttacactctgcccaattctgtcaatttttatgtcagatatttttaggctacattctttggagcatataagttcaatatttttatatatcatagatctttttatgtaatatctatgtaataaatctctttgtccctaagaaaaatcaaaataattttcaagaaagatatacagtgaaaaaaatcttactcctaccttttttccccattgccctatagccctgaaatatgattacatagttttattttgccacttttttttttttttttagacaaagttccactcttgttgcccaggctggagtgcaacagtgtgatctcggctcactgcaacctctgcttcctgggttcaagtggttctcctgcttcagccttccaagcagctgggattataggcaaccaccaccacgcctggctaagtttttgtatttttaatagagacagggtttcaccatgttggccaggctggtctcgaactcctgaccttcaggtgatccacttgccttggcctcccaaagtgctgggattgcaggtgtgagccaccacacctggcctttgccacatttttttgcacataaacgtacaatacatattgcctattgcatttttacacttaataaaatagaggactttctaaatccatagacagagagtttcctcattatttctaacagtggcacaatgtttctttatctaactaccccacatgtgtttgtttggctaatttaacgtatggattattatttccaatctcacaatgagcaagatagtagatataccatttttcacatgtgcaagtatatctgtagcataaattcaaaagtaaaattgctgagtcaaagggaacatgtatttgtaattctgatctgtatcaaacagtaatttacactcccaacagcaaagtatatatgttcacctacatatttgcccatagaggatatcaggttttggagttttttctcccaatctgctaggtgaaaaatggtattttgtggtagttataatttgcctttctgttattgtaagtgagattgagaattttttttttttgagatggagttttgctcttgttgcccaggctggagtgcaatgccacgatctcggctcaccacaacctctgcctcctgggttcaagcgattctcctgcctcagcctcctgagtagctgggattacaggcatgtgccatcatgcccagctgattttgtatttttagtatagatggggtttctccatgttggccaggcttgtctcgagctcctgacctcaggtgatccaccagcctcagcctcccaggtgatccgcccgccttggcctcccaaagtgctggggttacaagcgtaagccactgcacctggccaagaatcttttttttttttttgagacagagtctcgctctgtcacccaggctgaagtgcagtggcatgatctctgctcactgcaagctctgcctcccgggttcacgccattctcctgcctcagcctcccaagtagctgggactacatgtgcccgccaccatgcctggctaattgtttcgtattttcagtagagatggggtttcacagtgttagccaggatggtctcgatctcctgaccgcatgatccgcccaccttggccttccaaagtgctgtgattacaggcgtgagccaccgctccaggcccgaatcttttagtatgtttaagagctgtaactctggctgggtacagtggctcatgcctgtagtccctactctttgggaggccaaggcaggcagattgcttcagcctaggagttcaagagcagcctgggcaagatggcaaaaccaaaatactaaaattagcctggcatggtggcatgtgcctgtggtcccagctacctgggaggctgaggcaggagaatcacttgagccctagaggtggaggctgcagtgagcaccactacactccagtctgaatatcagagtgagaacctatctcaaaaaaaaaaaaaaaaaaaaaaaaaaaaaaagctctaactgtaatttacttacctcacccacttttttctcttcaattgttaggcttttgttattgatttttgggaactctttatatatttatatattaggatgactattttgttggtttcctgctatcttttctagtggaagaagatgagaatatgtcttcagagtcagtcttgggttcaagtcctaactttctctttcattatggcacttggatgaaggactctttcattctgtgcctcagtttccccatgtgtaaaatgaaattaaaagcatcctgctctcatgatgatgatggtggtgtggtctccatctttttcctgaagggccgcagcagcaaggccaagaaaccgccgggggagaatgacttcgataccatcaagctcataagcaacggtgcctacgggtgagccacccggggctctggcggggggagggtggcggaggccgggtgtctcggaggtgacggccggtcctcgctctctccccctgcagcgctgtctacctggtgcggcaccgcgacacgcggcagcgctttgccatgaaaaagatcaacaagcagaacttgatcctccgcaaccagatccagcaggcctttgtggagcgcgatatcctcaccttcgccgagaacccgtttgtggtcggcatgttctgctcctttgagactcggcgccacctctgcatggtcatggaatatgtggaaggtgtggctgcctgcggggctgcagggaagatggggccgtgctcactggtcagggctgcggggtggcctgcctgagccgcagtctccatattgattagtcggcctgtatgtttatccatctatttatttctccagtcattgatttgtccatccattctacctatatatttattcagtcatctattggtttatttgtttttcatttcattcagcataaaaacattcagtctgacccattatccatccatctatccttctatctactgatgtgctaatccatctgtttttccatccatacatccatgaacctgtttttatttatttatttatttattcatttattcatttatttattttttgagacagagtcttgctctgtcacccaggctgcagtgcagtggtgcaatctcggttcactgcaacctccgactcccaggctcaagcgattcttatgcctcagcctcccgagtagctgggattatgggcctgtgccaccattcatgggtaatttttctatttttagcagagacaggatttcgccatgtttgccaggctagtcttgaactcctgaccttaagtgatctgcctgcctgggcctcccaaagtgctgggattacaggcatgagccactgtgccaggcctattttattttatttatttatttttgagacaagatctcactctgttgctcaggctggaatgtagtggtgcgatcacagctcactgcagcctcaaatgcctgggctcaatcaattctcccacctcagcctcccaaatacctgggattataggtgcggaccaccacactcggctaatttttgggaggccaaggtggggagatcacaaggtcaggggttcaagaccagcctggccaacatggtgaaaccctgactctaccaaaaatacaaaaattagccagatggcacactcctataatcccagctactcacgtggctgaagtgggaggattgtttaaacacaggaagcagaggttgcagtaagccgagatcgtgctgctgcactccaggctaggctgagatcatgccattgcactccagccctggcaactgagcaagaccctgtcccgcaaaaaaaaaaaaaaaaaagttttttgttttttgtttttttttgttcgtttgttttgttttttatgcagtctccctgtattgcccaagttagtctccaactcctgggctcaagcaaccgtcctgcctcagccttccaaagtcctgggattacaggcacgagccaccgagcccatcccatatacctgtttattaatccacctttccatccatccctcacatcccgcaatttgtctttgtggttgtccatctgtttatccatccgtatgtctgtttaccattatacacctatttttcttttttttgggggggacggcgtcttgctctgtctcccaggctggagtgcagtggcgcaatctcagctcactgcaagctccacctcctaggttcacaccattctcctgcctcagcctcctgagtagctgggattacaggtgcccgccaccatgcccgactaattttttttgtatttttagtagagacggggtttcaccgtgttggccaggatggtctcgatctcttgacctcatgatccgcccacctcggcctcccaaagtgctgtgattacaggcgtgaaccaccacacccggcttatacacctatttttcctttttctttctttctttttttttttttttttgagacagagtcttgctctgtcaccaggctcgaatgcagtggcgctatctcggctcactgtaacctccaccttccaggttcaagtgattctcctgcctgagcctcccgagtagctgggattacaggtgtgtgccaccacacctggctaattttttgtatttttagtagaaatagggttttcaccatgttggccaggctggtctcgaactcctgacctcaggtgatcctcccacctcagcctcccaaagtgctgggattacaggcgtgagccatagcttgcggcccatatattgtttttaatccatccgtgcatgtattcacccaaatgttaatccatctattgtccaaaaccacacatgctgtggctattatgacacatacatgatccctggggcctcagctgtgcctcctccaagccttccagtcaaccatccagtcactcaacgaacacctcctcatcatctccctcgtgtcacatgctgtgctaggtgccagtgacacagaggagacccaggcacagacatctccccgccatggagattccattctggtctgtatagacagacaataaacaagcagagcaagccaaagagataaggacatttatttatttatttatttatggagtctcgctctttcacccaggctggagtgccgtggcgcaatcttggtgcacagcaacctccatctcccaggctcaaggattctcatgcctcagcctcctgagtagctgggactaaaggcgcgcctccaccatgcccagctgatttttgtatttttagtagagacaggggtttcaccaggttggccaggctggtcttgaactcctgacctcaggtgatcagcccaccttggcctcccaaagtgctgggattacaggcatgagccaccatgcccagccagggcatttcatagtgaggacatgaggtccatgaggctggaggaggtgatggggaggcaggcagggagcttctcagaggcctggattatgatggaataagtgacctgctagtacaaagtctcttaggtgacaatttagatttggaggagtggcaagcaggcccatggagccgaaggcaagtgagcaagggaggggagatgaggatgaaggggcgctgatgaggagggtattccagagactggaatggcattggatttcattctgaatgcaacagaaggtcactggagcattgttgtttttttctttttctttttctctctttctttctttctttctttctttctttctttctttctttcttttttgagatagagtctcgttctgttgcccaggctggagtgcagtggcgcatcctcggctcactgcaacctccgcctcccgggttcaagcgattctcctgcctcaacctcctgagtagctgggattacaggtgcccgccaccacgcccacctaatttctgtatttttagtagagatggggtttcatcatgttggtcaggctggtctcaaactccacacctcatgatctgtctgcctcggcctcccaaagtgctgggattacaggagtgagccaccgtgcctgcctttttttttttttttttttgaaatggagtctcactcacgctgtcacccaggctagagtgcaatggggtgatctcggattactgcagcctccgtctccaaggttcaagtgattctcctgcctcagtctcccgagtagctaggattacaggcgtgtgccaccacatctggcaaatttttgtacttttagtagagacggattttcaccatgttggccaggctggtctcgaattcctagccttaaatgatccatcagtctcggcctcccgaagtatggggattacaggcgtgaatcactgcgcccagccttgttttgttttatttttagtgcattgtccaggctggagtgcagtggtgtgatcacagcttactgcagccttgaactcctgggctcaagcaatcctcccacctcagcctccaaaagtagctgaaactacaggcaggcaccaccatgtccagctaatggagggttttaagaagatttgatatgatcagatttatgttttaagaaaatccatttggaggcccattatagtagcttacgactgtaatcccagcacttacagtgggagaccaaggcaggcagaacacttgtggtcaagagtccaagatcaacctacccagcatggtgaaaccctgttgttgttgtttttttcttttcctttttttttttttttttgagacagagtttcgctctggctaaactcgttgcccaggctagagtgcaatgacgtgatcttggctcaccgcaacctcctcctcccgggttcaagcgattctcctgcctcagcttcttgagtagctggaattataggtatgcaccaccacacctggctatttttgtatttttagtagagatggggtttctccatgtcagccaggctggtctcgaactcccaacctcaggtgatgtgcctgcctcggcttcccaaagtgttgggattacaggcgtgagccactgtgcccggccaatgaaaccctgtttctactaaaattacaaaaattagccaggagtggcggtgcacgcctatcatcccagctactcgggaggctgaggaacaagaatctcttgaacccgggggcagtgagtgggcagaggttgcagtgagccgagatggagccactgcactctagcctgggtgacagagccagactctgactcaaaaaaaaaaaaaaaaaaaaaaagagaaaaagaaaaaaattaagaaaagataatccatttggctcttgtggagagagcagaatcaggagactaggaggtagatgactgctctagtccaggttcattgcagaggaggaggagagaagggggccaaatcagtatctctatggtgggtctgtgtgcacaatagatgtgctcaaatgcagattcctgggccccaccctcagagagtttctgaaaccagcaaaatctcgcagaaaagagaacagaaaaaagaaagaaatcattagctttcttggtcattggtgattgaaaaaccaatattaccttcaggaatggctggatgtaggtgctcaaaccattccatcaggaaactctccatctcttggctctgtactcccacatgtgggcttccttctagacaagccctcatgtagcaaggttgccatctagcagatctcagcttacattctatgagcttagcaattcttacaggaaaagagtgaaaattccaagggctaactcactggagcaacttgggttacatactgccccggttgctgcacatggaaggaaatctagcctttgtaggataaaaaggaaatagatattgagaaactgaaataccaatgccaattacagtaaatctggcagaggggcagaggcagtggccaacactttgggaagctgaggcaggaggatcctttgaacccaagagttggagaccagcttgggcaacacaatgaaactcgtttctacaaaaaacttttttttttttttttttgagacggagtcttgctctgtcacccaggctggactgcagtggtgcgatcttggatctctgcaacctctgcctcccaggttcaagccattcttctgccttagcctcccgagtagctgggattacagccgtctgccaacaagccaggctaactttagtattcttttttcagagatggggtttcaccatgttgaccaggctggtctcgaactcctgacctcaagtgatccacccgccttggcttcccaaagtgctgggatttcaggcgtgagctaccatgcccagccttgaacaattttttaaaaatcagctgggcatggtggctcacatctgtagtcccagctactcaggaggctgaagcaggaggattgcttgagctgggaggttgaggatgcagtgagctgtgatcttgccaccgcactctagactgggcaatggagtaagaccctgtctcaaaaaaaaaaaaaaaaaatctagtgaagaccaagaatctgcatctaaggcttccagctccaaggttcagacaccaggagatagagggctgtgcttccagatgcagttgataagtgggtagcctttgttccccaactaaacctcacctctaccaacaactgcctgcatgacccatcctttctttgagtctccatccctttgtgtataagatgagctgatgacaccaactttggaggatggctaagaggacaagaagaacccagtagaggacctggagggagggaggcccctctcagagcctcagtttcccttatctataaaacgggtacaacataacatgagaagttggtgctatggtgcatgtccagagagaggaatgcctccctttttatgcgggcccatttcctggcctgcaggcggcgactgtgccaccctgctgaagaatattggagcgctgcccgtagagatggcccgcatgtactttgctgagacggtgctagccctggagtatttgcacaactatggcatcgtgcaccgcgacctcaagcctgacaagtgagctttgatctttcccatcactccctctgtccctcgggaggccaggaggcagaatggacgggcctcatccctgagatccccacctgtgcctacagcctccttatcacctccatgggtcacatcaagctcacagatttcggcctctccaagatggggctcatgagcctcaccaccaacttatatgaaggccacatcgagaaggacgcccgagagttcctggacaaacaggtgtgtgtgcgggcatgggggtcgctgagggtggagtgaccctgcaggacctcgggaacccagggcctggtggggggcacagctctcccttgagggccctcctctggctggggcgtgggctgacagcctgcccccaggtgtgtgggaccccagagtacatcgcgcccgaggtcatcctgcgtcaaggctacggcaagccagtggactggtgggctatggggatcatcctctacgagttcctggtgggctgtgtgcccttcttcggagacacaccagaggagctatttggacaggtcatcagtggtacgtggcttggcagtgtacaggggcagagtgtggtgtgcacggagagatggacaggctcagggttccagggatttcaaaagcgaccccccagaggatcgcttgcactcaggaggtcaaggctgcagtgagccatgatcgtgccactgcactccagctgggtgacacagtgagatcctgtgtccaaacaacaacaacaacaaaaaccgcccctaagttccgttttgttttgcagatgacatcctgtggcccgagggggatgaggccctacctacggaggcccaactcctcatatccagcctcctgcagaccaaccctctggtcaggcttggggcaggtaagtccgccatgcagaggagctgagggcccactgatagagagcaggcctccaaaaccccaggcccagcctgtgctgtggccccggggcggaagacatggggggcggggctgggctgctgggttggccatcagctgtggctggaatcccttccgtcccaggcggcgcttttgaggtgaagcagcacagtttctttcgagacctggactggacagggctgctgaggcagaaggccgagttcatcccccacctagagtcggaagatgacactagctactttgacagtgagctgggacaccaggcacgacctgggtcgaggggtgggatccgggaagagggaccctggggtaagtaaagcctgggatagggcctggctaagtaccaagatgtgatgcctaggtgcgaaggtggtattttggtgggggcggggccaagtggggcggggctgacatacaggcggggctcaggctgaaatgtaggtaagaacctgagattgggctaggtgtggggcctggcctgggtgagttgtgagtgtgggcctggaactgaactagagagaggtactagcgctcagaatggcctggggtgatgccagggtgcagagcactgtaggtggagcgtggcctctttggaggcggggctagacggtgccactgagaatggggcaaggaccttgcctgggagcggagcctaaattaaatacactaatgaggcaggggcgtggcctgacctgaagacttgtaaacccgtcttgaaccaggactgggctcctgtggggatgtgatatgaggaggaaccccgtaccctcagtcacagcccatacccgctccccagcccgctcagacaggtatcaccacgtgaactcctatgacgaggatgacacgacggaggaggagcccgtggaaatccgccagttctcttcctgctctccgcgcttcagcaaggtgggccaagtctgggtgtgggacagggcgagaccccaggagggatggggcttggagagacagtgagaaacaggttccctggtgcccaaggtctcaggagcgggaagttattgatggggcgggagtctggaaggtggtaaggccacgcaagaggcaggttcgggagtctatgggacgggcctttggcactgagtggaatctaacaggaatcaggacagttgtgcagattgaggccatggtggggcggggctaggtgtgggtggggcggggtcaggacgtgggaatgaggccagcagcgaaggcggagtaaagcccagcgaagtcttgcttttatttatttatttttattttttctaataacgggcagagaagccataggccttgctttgagaagcaacttgtagaggcgtgcagggcctagcctgggctaaggagacataaattaagggggttgctgggaagatggggctgtgtagagagcagattggtcagggcatcgtcggggcagagcctagaataaaacgcagtgcctaactttgtggtgtggggcctgaactgaagaattgtaggttgggggatcatgcacaattgggcggagcaggcctcggagggtggagtgcgttttgcgggggatccactgccaggaagctgattagctccggagtgaaagtggaacccgggctggacttgcctcccaccaccacctacaggtgtatagcagcatggagcagctgtcgcagcacgagcccaagaccccagtagcagctgcagggagcagcaagcgggagccgagcaccaagggccccgaggagaaggtggccggcaagcgggaggggctgggcggcctgaccctgcgtgagaagacctggagagggggctctccggagatgtgagcaggggaatggcggagtttgggggcggggtcgaagggggcgtgtcttccataaccacgccccctccatgcagcaagcgattctccgcgtccgaggccagtttcctggagggagaggccagtccccctttgggcgcccgccgccgtttctcggcgctgctggagcccagccgcttcagcgccccccaagaggacgaggatgaggcccggctgcgcaggcctccccggcccagctccgaccccgcgggatccctggatgcacgggcccccaaagaggagactcaaggggaaggcacctccagcgccggggactccgaggccagtgagtgccctatcgtgctgccttccccaatcttccccaatgtcctactggtcatatagtgagcatcccacgagcctggtgctgtttatgaaagatctcaggtcctattcacattgcaatttgggatttttttttttttttttttttttgagacagagtctcactccatcacccaggatggagtgcagtggcgtgatctcggctcactgcaacctccacctcccaagttcaagtggttctcgcacctcagcctcccgagtagctgggattacaggcgcgcgccactacccccggctaatttttgtatttttagtagagacagggtttcttcatgttggcaaggctggtctcgaactcctgacctcaagtgatctgccttccttggcctaccaaagtgctggggttacagtcgtgagccaccacacccagcccaatttgggattcttaacattagaaacaccccaataccatggtcagtcagtgatacagaccgatacagactatgtctctatatgaggagcagtgaggcatgcaggttacctgctcagatgaaactcaccatccatcaagggtaaaaagtggaaagagcattccaggcagggaaacagtatgtgggaaatccctggccttggactaattcctaacacacttgctttctgttgcagctgaccgtccacgcccaggtgacctctgcccaccctcgaaggatggggatgcatcaggcccaagggctaccaatgacttggttctgcgccgggcgcggcaccagcagatgtcaggggatgtggcagtagagaagaggccttctcgaactgggggcaaagtcatcaaatcagcctcagccactgccttatctgtcatgattcctgcaggtaatgctgggccccacctggcaggggaggggctgccccccatttgaggcaggacagaccaatgaaaatgctgcattttccctgtccaccgtgattggctccaggctggaccaatgagaggctgctctgccactgccttgggaggagggaggagcagatacagggagatgtctatcttcttggttctgatttctgaccatggttgtgtgtctgtagtggacccacatggaagttcaccccttgctagtcccatgtctccacgatctctgtcctccaacccatcctcacgggactcctcacccagccgggactactcaccagctgtcagtgggctccgctcccccatcaccatccagcgctcgggcaagaagtatggcttcacactgcgtgccatccgtgtctacatgggtgacacggatgtctatagtgtccaccacattgtctgggtgagtactcatgggtggagtctccatcacagagtggagggtggtggggaaaaggcccctccagctcaaaccagttagcctgggtgagacacctctgtgaccctctatgcctcttccctctctaaacctgtttcttttttcttttacttttttattttaggcggagactcactgtgtcgccaggccggagtgcagtggcaggatctcggctcactgcaacctctgcctcctgagttcaagccattctcctgcctcaaccttctgagtagctgggactacagacaggcgcgcgccaccacgcccagctaatttttgtatttttagtagagacggggtttcaccatgttggctaggatggtctcaatctcttgacctcgtgattcacccacctcggcctctcaaactgctgggattacaggcgtgagccacggtgcctggccgagactgtttcttcatctgcaaaatggggagaataggccaggcgcagtggctcaggcctgtaatcccagcactttgggaggctgaggtgggcagatcactggaggtcaggagtttgagactagcctggccaatatggtgaaaccctgtctctattaaaaatacaaaaattgggccgagcgcggtggctgtaatcccggcactttgggaggccgaggagggtggatcatgaggtcaggagatcgagaccatcctggctaacatggtgaaaccccctctctactaaaaatacaaaaaattagctgggcatggtggtgggcgcctgtagtcccagctacttgggaggctgaggcaggagaatcgcttgaacccgggaggcggagcttgcagtgagccgagattgcgccactgcactttagcctgggcgacagagcaagacaccatctcaaaaaaaaaaaaaaaaaaaaaaaaaatggccaggcgcggtggctcacgcctgtaatcccggcactttgggaggccgaggtgggtggatcacgaggttaggagtttgagatcagcctgaccaacatggtgaaaccccatctctactaaaaatacaaaaaaaattagccaggcgtggtggcagatgcctgtaatcccagctactcaggaggctgagacaggataatcgcgtgaacccgggaggcggagcttgcagtgagccgacatcgcgccactgcactccagcctgggtgacagagcgagagactccgtctcaaaaaaaaaaaaaaaaaaaattagccggaggtagtggcgcatgcctataatcccagctacttgggaggctgagggaggagaatcgcttgaacctgggaggcgggtgttgttgcagtgagccaggattgcgccacagcactccagcctgggtgacagagtgagactccgtccaaaaaaaaaaaaaaaatgtggggggaggaataataactatttcacaaggtgttatgaggattctaatgcatgcagagctaagtgtcctgcatataagtttaggagctttccttgttaccaatcccactaaccctgtccctatggggtgctcttttcccagcatgtggaggaaggaggcccagcccaggaggcaggactctgtgctggggacctcatcacccacgtgaatggggagcctgtgcatggcatggtgcatcctgaggtcgtggagctgatccttaaggtgagtgcagggaaggaggcaccctgggcggagggtgggggaggcctgagcagcccctagcagagcattttcccgcattcttcccccagagtggcaacaaggtagcagtgaccacaacgcccttcgaaaatacctctatccgcattggtcccgcaaggcgcagcagctacaaggctaaaatggctcggaggaacaagcgaccctccgccaaggagggccaggagaggtgggcacagccgtaaacagcctggtctttgagcagtgggtggaacttaggcgggaggggcacagatgaggatggagaagggaagagcacgggaaaggtggcgggaacaaatgaccaacaagcaaagggaagaggacaattaagaggggctgcgggctgggcgcggtggctcacgcctgtaaccccagcactttgggaggccgaggcgggcagatcacgaggtcaggagtttgagaccagcctggccaatatggtgaaaccccatctctactaaaaatacaaaaattagcctggcatggtggcgctcgcctgcagtcccagctacttaggaagctgaggcagaagaatcccttgaacccgggaggtggatgttgcagtgagccaagattgtgccactgcactccaacctgggcaacagagtgagactccatctcaaacaaacaaacaaacaaacaaacaaaaaaagaggggctgggatgagtcacacctgtaatcacagcactttgggaggctgaggcagaaggatcacttgagcccaggagtcaagattaggggcaacatagagagaccccatctctacaaaaaacttaaaaaactagttgggtttggtggcacacacctgtggtctcagctactcggaggctgaagtgggaggattgcttgagcctgggaggtcgaggctgcagtgagctatgatctcaccactgcagtccagctgtgacaacagagctagactctttcaaaaaaaaaaaaaaaaaaaaaaaagaggggctgtaaaagtggaaggagccaagaatggaagctgtgccaaatttctaggatcagagaaaagcattgtaggagggtcttgcacatataggcaggcccaggagatgtgaactggaaagggagatgtccagagacggagggggtccaggagatggtcctatcctgttagatgtgtttagacagaactgggaaaggctagaataagaaatgtctatctggaatgagcatgccaggcaaggttcagccaactgaaatcctattttcccttatagataggaggagctaggtgggaggtgggtggggccagaagggtattctgtttgtttgtttgtttttagtattctgttttgatcagtgagtttggcccagacaagtacagggatttgggtgagaggagccagacggggttgagataagtacatttcttcccactcttataggtgggttgtagtggaagaggcgggactagaggcaggtgggaccaagttggttttgtttggatgtgtttctagcctggactgggagtggccaaaaggttgggcaggacctgaagtgggaggagggaggagccaagcagcactgagttaagggaagttctgtcttgataggtgggttgtagtgaaagacggagggactagaggggtgggcaggactagaagaggttgtttttggccgggcgaggtggttcacacctgtaatcccagcactttgggaggccgaggtgggtggatcacctgaggtcaggagtttgagaccagcctgaccaacatggtgaaaccccatctctactaaaaatacaaaaattagctgggagtggtggctcactcctgtagtcccacctactcaggaggctactcacgaagctgaagcacggtaatcgcttgaacccgggaggtagaggttgcagtgagccgagatcgtgccattgcactccagcctgggcgacaagagcgaaacttcgtctcaaaaaaaaaaaaaaaaatggttttgtttggatgagtgtttgtagccagaattgggagtggcctaaagttgggcggggcctgaagtaggaggagctaaaggaagttctatcttgataggtggattgtagtggaagagggaggagctagagaggtgggcggggcagaacaggttggttttgtttggatgcttgtttctagcttggactaggagtggccaaagggggtgggtggggactgaagtgggaggagccaagcagcactgagctaaaggaagttctttatcttgataggtgggttgtagctggagagggaagggccagaaggggtgggtggttaccgttgtgaggccgtgaaatgggaggagccctgagctctggcgtccaggtcaaggacgcttggccccctccctgtcccgcagcaagaagcgcagctccctcttccggaagatcacgaagcagtcgaacctgctgcatactagccgctcgctgtcgtcgctgaaccgctcgctgtcatccagcgatagtctcccgggctcgcctacgcacgggctgccggcgcgctcgcccacgcacagctaccgctccacgcctgactccgcctacctaggtattacctcctgcacctgcgcggggaccgagcagcgcggggtggcctggctggtgcttgggctgtactcactcgcttcacctcctgtctcccgcaggcgcctcatcccagagcagctccccagcctcgagcacgcccaactcgcctgcgtcgtcggcgtcgcaccacattcggcccagcacgctgcacggactgtcgccaaagctccatcgccagtaccgctctgcgcgatgcaagtcggccggcaacatccctctatcgccgctggcacacacgccgtcccccacgcaggcgtcaccgccgccactgccgggccacacggtgggcagctcgcacactactcagagcttcccggccaaactgcactcatcgcctcccgtcgtgcgcccgcgccccaagagtgccgagccccctcgctcgccgctcctcaagcgcgtgcagtcggccgagaagctgggagcctctttgagtgcggacaagaagggcgcgctgcgcaaacacagcctcgaggtgggccacccggatttccgcaaggacttccatggcgagctggcgctgcatagccttgccgagtccgacggtgagacgcccccagtcgagggccttggcgcgccccggcaggtcgccgtccgccgcctgggccgacaggagtcacctttgagcctgggcgcggacccgttgctgcccgagggtgcctccaggccaccagtgtcgagcaaggagaaggaatccccggggggcgccgaggcgtgcaccccaccccgcgcgacgacccccggtggccggaccctggagcgggacgtcggctgcacgcggcatcagagcgtgcagacggaggatggcactggcgggatggccagggctgtggccaaggcggcgctgagcccggtgcaggaacacgagacaggccggcgcagcagctctggcgaggcgggcacacccctggtacccattgtcgtagagcctgcgcggcccggggctaaggctgtggtgcctcagcctctgggcgcggactccaaggggttgcaggaacccgcacccctggcgccttccgtgcccgaggccccccggggccgggagcgctgggtgttggaggtggtggaggagcgcaccacgctgagcggtcctcgctccaagcccgcctccccaaagctctccccggagccccagacaccctccctagccccagcgaagtgcagtgcacccagcagtgcagtgaccccagtcccacccgcatccctcttgggctcaggcaccaagcctcaagtggggctgacctcccggtgccctgctgaagctgtgcccccagcaggcctgaccaaaaaaggagtgtccagtcccgcacccccgggaccatagccaagggggtcatcggccccgcgctgtacagcctccgtatacatatgtacacatataaataaagtgcgtccgtgctgcgtgagttttctggggctcactcctctccaggcaaggcgagacatcacacgaccccacccccatgcccaggtgctttttgggaggtgggactccagttctggttaccatggagagtggagggaattttggatagacacctcctgtggtcccacttctggtctcacctctgcaccaactgcccccaaacctttagggggagaattgaagctgcgatgctcttgtgtcccagcgcccacctgaagagaaggttaacagcctcgtccaccaatttccatttatttactcctcaacaatcctgatggcaggtattatgtttcccattttgcagacaggtagactgtgtcacagagcggttaaggcacacaatcaaggtcatacagctaggaaggggatgaactgggattcaaaatcaagtccaaactggttcctgagcccttagattttttattttttatttttttgacacagagtctcattctgtcacccaggctgaagtgccgtggtgttagctcagctcatgacaacctctgcctcccgagttcaagcgattctcctgcctcagcctcccgaggagctaggaccacagacgcgtgccaccatgtctggctaatttttaaatatttttaatggatatggggtttcaccatgttggccaggctggtctcgaactcctgacctcaagtgatctgcccatctcagcctcccaaagtgctggggttacagatgtgagccactgcacccacccgtcccccgccccccctttttttttgaaacagagtcttgctatgtgacccaggttggcgtaatcatagttcactgtgaccatgatctccctggttcaatcgatcctctggcttcagtggctgggactacaggcatttatcaccgtgcctggctaactttttttaagttctagtagagatgtggtctcactatgtagcccaggctggtctcgaattcctgagttcaagtgatcctccctccttggcttcccaaagtgctgggattacatacgtgagccactgcacctggccataagggttagatcttataagctctgctgggcttcctggccatgccattacagggctggtagttcttcaccagcggctggaaggctttccagagggctggcagctgggcacacagtgtgcccccaccccgttgctcctctccctggttccgattcatgtcacccacgcaggtccagggcccttttggggacacgcaccatttggagtggtcctctgtgctgttgaagcttgggccggctggtccagggaaagctatctggttcacattcagaacctgccagatatccgagcagttagagggcaggatgcctacagttttgtgccagaactggacctgcaggttggtaccaagggctgctgccaaccagccggagtacaggtctgcaaaggatggagagagggcacaggtagggtcagggccactgcgagggagtccctagtccacttcccctctctcagctcagtttccatatttccttttttttttttttttttgacatggagtcttgctctgtcgcccaggctagagtgcattggtgcaatctaggctcattgcaacctctgcctccgaggttcaagtgattctcctgcctcagccttctgagtagctgggactacaggcatgcacaaccatacccggctaattttttaataaagaggggtttcaccatattgaccaggctggtctcaaactcctgatctcaagcaatccgcccacctcggtcttccaaaatgctgggactacaggtgtgtgtcaccgcgccctgccacagtttccatatttctgagctcagttgtcaattcccagtcctgggaatgatgacattaatattaattgcccttcccaaatttgtttttgagacagagtctcactctgtcgcccaggctggagtgcagtggtgtaatctcggcacactgcaacctctgcctcctggtttcaagcgattctcatgcctcagcctcctgagtagctgggattacaggtgcccgccaccacacccggctaatttttgtacttttagtagagatggggttccaccatgttggccaggctgttctcaaactcctgaccgtgtaatcagccagcgccctccaccatgcccagataatttttgtacttttagtagagatggagtttcaccatgttggccagactggtcttgaactcctgggctcaagtgacccacccgccttggtctcccaaaatgtggggattacaggtgagccaccgcgtccggccctgagtgtttttaattaattaacttatttattttgagactgggtctcattttgacaccccagctggagtgcagtggcaggatcatgactcacttgcagcctcgacctcctgggctcaagctgttctcccacctcagcctcctgagtagtggggactacacgtgtgtgccactatgccccactaattaaaattttttttgtagagatggggtcccgctgtgttgcccaggctggtctcaaactcctgggctcaagcaatcctcctgcctcgactgggattacaggtgtgagccactgtgcctggcctatttatttgtatttatttatttatttatttattttgagacacagtctcactctgtcacccaggctggagtgcagtggcactatcttgactcactgcaagctccaccttccgggttcacgccattctcctgcctcagcctcccgagtaactgggactacaggtgcccgccaccatgcctggctaatttttgcacttttagtagagacagggtttcaccgtgttagccaggatggtctcgatctcctgagctcgtgatctgcccacctcagcctcccaaagtgctgggattacaggcatgagccactgtgcccagcctatttatttatttttaaataaagacagggtcttgctctgtcacccaggctggagtgcagtggagtcattatagctcactgcagtctgaaactctgggctcaatttatcctcctgcctcagcctcccaagttgcttggctaatttttaattttgtagagatgaggtcttgctatgtttcccaggcttgtcttggatgcctgtcttcaaatgatcctcctgcctcagcctcctaagtaactgggattacaggagtgaggcaccacctctggcacccaaatgacttacaggtaccacttcattcacaattttttaagtagatgtcagtatccccatttttcagatgagtagaccaaggctcaggtgaagttatacatcacacagcaaaacccagggtttgaacccaggtctgttcactgatcatgtgattatagctcccaaacagacctggtctctaccgctgacttgaactcagccatggccacaccagtcaccctgtctgcagagaaggagctctccaaccctcaaccttgagactcaccatctccaaatttgctgaacttggcaaagctctggaaaacagccccggcctgggatgtgagtgtgatgctgctgttccagggttcttggctaacgtggtggcccttgaccacattctccaagtcggggaattcctgggcaaagatcccttccagctggtagttatagacccaggggtaggtgtaggtcagctgcttgcctggaggacaaggggaggaggaaatgcaagatcgttccaggttctggtcagtaaacccaggactcatcctgtgtccctgactcgacttacccatcttcgagaactgagcgaagggaaaagacacacagagcagggtctgcccgtaggtacaggcgctatgaggccagctgtatgcagcagaggaggccggtggagggaagttaggtacactgtggaccagccagaagcccccatcgtggtcaaggagcaggacacctggaccaaaagaaggcattaggggaggtcgggcgcagtggctcacgcctgtaatcccagcactttgggagaccgagacacacagatcacctgaggtcaggagttagaaatcagcctggccaacatggcgaaaccccatctctactaaaaatacaaaaattagctgagcgtggtggtggacgcctgtaatcccagctactcaggaggctgaggcaggagaatcgcttgaacccaggaggtggaggttgcagtgagctgagatccaccactgcactccagcctgggccacagagcaaaatttcatctcaaacataagtaagtaagtaagtaaataaataaataaataaataaataaataaaaatttaaaaaaagaaggcaggccccacgcagtgtaatcccagcactttgggaagccgaggagggcggatcacctgaggtcgggagttcaagaccagcctggccaacatggagaaacctcatcactactaaaaatacaacattagccgggcatggtggtgcatgcctgtaatcccagctactcgggaggctgatgcaggagaatcacttgaacccaggaggcggaggttgcagtgagccgagattgcaccattgcactccagcctgggtagcaagagcaaaactccttctcaaaaaaaaaaaaaaaaaaaaggcaattagagggtattgctccaggcctcccagcaagctcatctgcaatcaggaacaccctcagtttgcagcggggcttagagagggtgccagcagtgttagaaccacagctgagctcagtttttgcaggcataaattcttatagtccagaataacgccaagagtaatgtaaggtagggaaacaggccaggtgtggcggctcatgccggtaatcgcagcacattaagaggccaaggtgggtggattgcttgaaccaggacttagagaccagcctaggcaacatggcaaaagcccactctacaaaaatacaaaaagtaggccaggtgtggtggctcacgcctgtaatcccagcactttgggaggccaaggcaggtggatcacctgaggtcaggagttcaatatcagcctgtccaacctggtaaaaccccatctctactaaaacatacaacatttagctgggcatggtggcgcacacctgtaatcccagctactccagaggctgaggcagaagaatcgcttgaactggggagatggagattgcagtgagctgagattgcaccaccgaactccagcctgggtgatggagagagagtgccgcaaaaaaaaaaaaaaaaaaaaaagccaggcgtggtggggggtaccggcaggcccagtacttgggaggctgaggtaggaggatcacctgagccctgggaggtcaaggctgcagtgagctgtgatactgcactccagcctaggtgactgggtgagaccttgtctaaaagaaaataaaataggggaaatagatgcccaaggtctgacaggggagatctcccaccccactatggaggtcaggggttagcttggaaaaatgcataggaactcggctgggcagggtggctcattcctgtaatcccagcactttgggaggccaaggcgggtagatcacttgaggtagaaaccaggagttcgagaccagcctggccaacatggtgaaacctcgtctgtactaaaaatatgaaaattagcctggtgtgatggtgcgcctttaataccagctacttgggaggctgagacaggagaattgcttcaaccccagaggcagagattgcagtgagccaagattgtgccactgcactccagcttgggtgacagagcgaactcccaccgtctcaaaaacaaagaaaaaaaaaagttggggggaatagatgcccagggtctgacagtgcagatctccccgaccaccccatgcacgtcaggggttaccttggaaaaatgggacccgagtctctccccagcccccaatccaggcctcacccttcgtgtgcccacgcatggaagagtcctgagccttgctgggttgaggcggttggtcattgtagagcaggaaggcgagctgcgggcggataaacggaggcaacgtgaaattcctcccaggcagggcagccctagagtttcgcccctagttggcccggggcccccttcacctggctggtgttgctccggtacagcggctgcaggcttcggcccacggccccctccgggctgttgatgagtgccctgccgtcccgccagcctccggagctctcgtccagatacttgtactgcagccctctctgcgccgcctccccggaccctctaagagctggcagcttgtagaccacgaacctggaggtcggagaatgcacagaaataggagagagggaagagaaggcaccccagggttccccgaggaggtagccatcccggttgagtgaccgcagccggaccccggggcgatggtaggccccccgctgcgcactcaccagtctacaggctgcccggagtccccgtagcaggtcagggccccggcggggacgcacagcagcgctgccagcagcagcgggatcatagctgctatggggctgagatccaggaatctgtgtcgggactgcggggcgctgggttacatcagaggccaggactggcacctggcgcctttcacttccctaaacttgcctgggaaccggggcggggacatcacgagggtacagactcctcccccgagacgcgatgctgcgttttggagaggcaaaaggcaacgctgagtctgcccagaccacgcccacgacgggcccggcgctccagcgtctcctggagcctggccaccgttccttttcgtggtagctaatcccagcccacgctcttctgtctgacccaactcccgcccgggtttctggatcaggcacaagtttgtattttattttttattccagccctacaacctgggtccaactcttgggacctttgttcttcctcttttttttttttttttttttttttttttttttgagacggagtttcactcttgtcgcccaggctggagtgcaatggcacgatctcggttcactgcaacctccgccttcctgattaaagcgattatcctgcctcagcctcccgagtagctgggattacaggcgcccgacaccacgcccggctaatttttgtagttttagtagagacggggtttttccatgttgactaggctggtctcgaactcctgacctcgtgatccaccagcctcggcccccgaaagtgccaagattgcagaagtgagccactgcgccccttaagaagcatttgtgttccagtgtatcttcccctttttctttctttttttttttccttccttttttttttttttttttcccggacaatatctcgctctgttgcccaggccggagtgcagtggcgcaatcttggctcactgcaacctctgcctccccagctcaagtgatcctctcacctcagcctcccgagtagctgggatcacgggcacatgccactatgcccagctaatttttgtagttttttttttgaaacacggtttcaccatgtggctcaggctgaactcctgagctcaagggatccacctgtcttgcctcccaaagtgctgggattacaggcatgtaatccacgccacccagactctcctttttcattctgcacgttttctccaggatcccctgagctagcaaagaggtgactgtatgtttgttttttgtcgttttgagacaggataatggtttctcacccaggctagaatgcagtgactccatcacagttcactgcagcctcaacctactgggctcaagagatcttcccaggtagctggtactacaggcctgtgccaccacacccagataattgttcattgcagagatgagggtctcactatgttgcccaggctgctctggaactccggggttcaagtgattctcccacctcagcctcaaaggatcatggcagggcaaagggctatgggaatctgagtactggcttgaaactgcctttgcaaaaattatgacagaaaattatgtcagtgaaagagctctgacctaaccaactccatcttgcctttaatctccaaactgcccttgcttggtcattcctggagtggggtcaagctaactttttttttttttttgacacgttgtctcactctgtcgcccaggctggagtccagtggtgtgatctcagctcactgcaacatccgcctcctaggttcaagcaatcctcctgcctcagcttcctgagtagctgggattacaggcatgcgccacatgcccagctaatttttgtatttttggtagagactgggtttcaccatttttggtagagatggggtttcaccttggggctcaggctggtgtcgaactcctgggctcaagtgatctgcccgcctcagcctgccaaattgctgggattaaagagggagccaccatgcctggccccaagctaattttgggaggaatttagtttatagcttaaatgataatagcccttccccaaactaaactgcctttgtagaaataatgaaagggcactaggttaggaggatgagaggagcctgaattctgctaaactgtaggtgtagtagttaaattatgaccagccatttttccggccgggtgcggtgcctcacgcctgtaatcccagcactttgagaggccgaggctggcagattacctgaggtcaggatttcgaaaccagcctggccagcatttcgaaaccccatctcttctaaaaatacaaaaattagcccggcatggtggcatgtgcctgtaatcctagctacctggtaggctgacacaggagaatcacttgaacccaggaggcagaggttgcagtgagccaagatggaacaactgcactccagcctgggcaagagcaagactccatctcaaaaacaaaaacaaagatggccagccattattctggaggtcacaaggtttgcaacttccccagttatttctgcaaataacatgactattgcaaaacctaacgctggcctttttagatgtctttttaggctttttgcatatctgacaactggatgactccacccagactagcgactctatggtccccacccagaagctgactcagcaactgttttccacagctccaggattgcagcaaggcacccattccctagccctcctgcccaccaaactgttcttgaataaccctagcctctgaattttcagggaggctgattcaagtaataaaactcccatctcccatttagctggatgtatgtggattaaactctctctattgcaatccctctgtctcgataaattggctctatctggacagtgggcaagatgaaccccctgggcagtcataggctgtgaactcttaaatccagggagatgtttgctgtcaatgtccgcagggttcaaggcagaagacaaggacagtgtagcctgaactgggtgggaaaagagaggacagcaaggcctccagtgcccaagggggcttgttggagttgaggggtgtcactgtagtttaggagatgagggtgtgtaaggccctctaatatgacctctaggtttacagcctcctgccatcttccagcctccaaaacccaaaaattcaggccaacgctgaagctttatctgggaggggcatttttataggacccataaccattgacagttaatatcagccacaataagggaccttcaggagccgctttctagacccagggtctctgggaagcctcatcccacaccctctcctgctgtccagggccatctgggagctggtctgagtgtccactgagtccgtttatttggcggtctgtctcactgggtttgcacgacagtttggacatctctgtgtggctccctgtggctgaaggcttgtcggattttccgtaagaggctcccccagggctgtctatgggtccgtgtttgatatttgggtggatctttgggaacgcgagtccaggagagggtccattcgtgggaaaaccacccagcattgtgtcacgcgcgtccgtgtgaagagaccaccaaacaggcttcttgtcccatccccagtcactaggagagtccaagtgccagggcagggctcaaaggtggcgcttcatgtgcaaggccaggtggtcagagcgcgaaaaagcacgtgggcagagctggcagcggaaggggcgctgccccgtgtgtttccggtagtggcgggtcagctcgtccgagcgcgcgaatctccagccgcagccttcccacgtgcaggcgtatggcttctcccctaggggacaaggaagccataagcgccactgtctgcccagtcatgtccccgggtcccctgcatctggccacacccctttactcagcctgggctgggactaggatgaacaaagtgaggcccctagggcacaaaatttaaggaggcactcactctcagaggccagccaagtccaagtcccgccctctgcaacccttcttcccctgtaactacagcgggcgccgcgccctttctcatgtccggggccccgccccctcacctgtgtgcgtgcgcagatgcgccttcaggtgggagctcttggtgtagctcttgccgcaacccgggtgcgcgcacgtgtgcgctgcctgcctcttgcgcgcccacgaacgtcggcctcgcttggatggcgcggtctcggctatcacacctggatcctctgcagtccccccgagtccagtgcccaccgtcccgggtcccaaacaactcaggaaggagggggacgtggcgggaccgggcgcgggtccctggagcccgcggaagagctggaagtgcccttggtactgaggcgccgggtacatcgcggggtacccggacagtagcccgtagggggcgcccgacgccgcaggcactgaaagcccggtccgcgggaagtagccacccgaggagccggcgccgggccccgggtacaccggttgcagcgccagcgccttgggctcgggggccggggctggagccagggctgggcccacgaaggcgtcgggagcccgggctcgcagggcagggcgcacccaacccgagtgatcctccgaacccaaaagcccagccaccagccccgggccgccagcatatgcgcccagagtctcgggcggcggcggatattgcgccccggaggcctcgctgggcgccagagcgcaggtctggggcgcgccaccgggctccgggcccgagaagttggtgaggaggagatccaggtcccaggtggcgtccgcgcccctctcatcgtcctcttcctccccgggctggtcctcagacttcacgtggaggggcggctccgtggggtcaggaggacccgggcccatgtcctgcgcctcttcggagcgccaccactgcgggagggagcaggcagctcgaggttcggtggacactggggtgccctgcccagggacatcgcgggctggacactctgacgcagaggctttggaaaggggtcttgtttgcctgtctgtctgtcccacttccccaacactgcccctctaaccgcccctctccccgctccccccccagctccagggacagaaaccgatcaggtctggctggagacaggagataagacttccactatctggaaccacactcggggatgggggaaggggtagcagagctgctggagatggaaaactggcaggggacgggggagaggatgccagccttgacttagttttcccccagaacatccctctccttccctgtctcccaaaacaagattaattccgaaattttggatgtcccccagacacactcatcatttcccgctgatatctggaagattgtctgtgagcctagatctcgttcctttttttttttttttttcttgagatagggtcttactcttttgcccaggctggagtgcagtggtgcagctcactgtatccttaatctcctgggctctaatgatcctcctgcatcagcctacggagtacctgggactacaggcacacgcccccatgcctggcctaatgtttttggtattttttgtagagatagggtttcaccatgttgcccaggctaccttcgttttctattaccgaaatagatcacacttagaacctcaaacccctagaccaccctcctcaccccctgccagactaagctgagatctcctctcctggactgagcgtacctcagtcctggttaagtctcttgatttcaggtcaagatgcaggtctggaccccaagatctgtgactgtggccctggattccagccagcccacctagaccccaccttctaggccccaccttgaggaagtcatcctgtgtgtccgggaaggggcccagggcggtcagtgtgctgatggagggcaaggcggtctcggctgtggccatggctggctggtgcccaccctgggcctcaagcctcctcttcctcggctgcctcgtgaactctgaggctgtgatagccccttcgagggctcctctctgtccttagctgattggctgcagcctctgataaggcaaagcaaggcaaggcggcgggggggcactgtttctggggcacaaacttcacgttggcctgtctggggctggggttaaagactaaccctgtgtccaaagccaagtcaaatatcaagggttggggggttcagggtttgagggtccaggtgctgggtaaaaacagacattgggtctccaaagaaggagagacttgggggtcttccctcagttaactttcctggaaaaggcagaaagggtattctgggaagaagctgtgggaccccctgtccccctgattgaggctccacagccctccccctccccagtaaacagcaacaaccgtgctgatggcgggacttggcacgagctccccgccaagcattatcagacaccccagacgttggaggctgctatcaggtgggggcccaggccagctagagctctgtcctccggtgaaggggagggctgggagttgggtcttcaaattagcctggcgttcaatttgcctgggttgggacctcccagggtctcagccctgcagcaggaggaagcccctgacaactggcccaccattgtctactggggacccttgggtggcactgcatgggactgcatggaggctggttcagtgccagctgctttagtgcgatgggggcagccaagggaaaagtgaccctctctcctcctgggtgggataggaccgttggatcaagccacaggcagtacctgacctgcaggagaccagtgccctggctctgggcctggctgctccttgattctgcccaacatgaggagaggatctgagtttctacaacaggaacctccactctggtgccctgggagcctgggaaggggacatggatacgtattacagacacataactcatagtcactcattggaagactgaggcaggaggatcacttgacaccaggatttcaagaccagcctgggcaacataaaacctatctctccaacaaaaagctgtgagtggtggtgcatgcccatagtcccagctactcaggaggctgaggtgggaggattgcctgagcccaggaggtcgggactgcactgaactataatcacaccactgcagtccagcctggggcacagaaagcaagactctgtcgctggaaaaaaaaaaaagttgggtggccatctttattcctggcagatcaacctgggtgacacaaacaaaaacaaggccaggtgcggtggttcacacctgtaaccccagcactttgggaagccaaggtggggagatcacttgaggtcaggagttcgagaccagactggccaacaggatgaagccctctctctgctaaaaatacaaaaattagctgggcattgtggcacatgcttgtaatcccagctatttgggaggctgagctggagaactggttgaaacttggaggcatggggccaggcgcagtagctcacgctagtaatcccagcactttgggaggccgaggcaggcagatcacctgaggccaggagttcgagacaaacctggccaacacagtgaaaccctgtctactaaaaatataaaaataggccggggatggtggcatacacctctaatcccaggtacccgggaggctgaggcacaagaatcacttgagcctgggaggcagaggttgcagtgagccaagatcatgccactgcactccagcctgggctacagagtgagattctgtctctaaaaaacaaaaacaaaacaggcttggagcagtgagtagtggctcatgcctgcagtcccagcactttgggaggccaaggtaggaggaatgctcgagcccaggagttcaagaccagcttgggcaacatagcgagatcccatctctaaaaacaaaaacaaaaacacagttactcacaggaccatgcaattacataatgacatgagttcctgttccctcagtcacactgatcatataatccgtgcacatataattgtgtgtctgtctatgtatatggactatgcacagacatacaattcccaggcactaaaacacaaccctatgctatattggttacacaatgtcatagccaaacaatctctaaaacacagaattcataatccacaggcaggcacacagttatacaatcctactgacacaatttagccgtaattgagcagacacacatggggagtcagatacattgtcacagaactttttttttttagatagtgtctctctctgtcacccaggctggagtgcagtggcatgattttggctcactgcaacctccacctcctaggctcaagtgattcctctgcctcagcctcccaagtagctgggattacaggtgcctgctaccacgccacgctaattttttttttttttttttttttgagacagagtttcactcttgttgcccaggctggagtgcaatggcatgatctcagctcactgcaacctctgcctcctgggttcaagtgattctcctgcctcagcctcccgagttgctgggattacaggcacccacaagcaggcctggctaatttttgtatttttagtagagatggggtttccccatgttggccaggctggtcctgacctcaggtgacccaccctccttggcctcccaaagtgctgggatgacaggcatgagccgccccagccagtcaaaacctacactttatacagtcacaccaccggtcacttttacaatatgtaaagtaattatttagtcacagttgcatagctaccagtgcccaaccgtaggggatgcacccagttaaacacagacaaacgcaaggacatggcatcacaggtcctgagaatcaagacacacacatttctcaacagatacacaatcagaatgggtgcaccacaaatgcactacacaaaaagacaaaacaggcggggcgcggtggctcacgcctgtaatcccagcactttgggaggccgaggtgggtggatcacttgaggtcaggagtttgaggccagcctggccaacatggtgaaacccgtctctattaaatataagaaaaaaggccaggcatggtggctcacacctgtaatcccagctactcaggaggctgaggcaggagaattgcttgaatccagtaggcagaggttgcagtgagccaagattgcgctactgcactccagcctgggcaacagagtgagaatccgtctcaaaaaaaaaaaaaaaaaaaaaaaattagccaggcatgatggcatgcttcagtggtcccagctacttggaggctgaggtgggaggatcgcccaggaggtggaagctgcagtgagctatgatcgcgccactgcactccagcctgagcgacagaacgagaccctgtctaaaaagaaaaaacaaaaacaaaacaaaacaaccacatagactcacagaatcacacaagttcacacacacacacacatacacagacacagacacacacacacacacacacacacacacacagagtcacaagtatctacatgtgcttcctgggacagactggcagaaaggtttgctaagatcgcccacttggagctcgtcttccccacaaccagcacccaattagagaactcgagtctggcctcctgggttcaggaggacgcctagtgctcgcgccagaatttctttgtttaattcttgactccctccgcacacaccccctgcaactgaccaaccaggagtgggccgagccctttcctacggccaataagaggagaaacccagctggccaatcggtttcccgcactcgtcttccgcccctaccccgtccgcttcttaaaggggctagcctatctctgtctgggccccccgatttccacaggcaaggctaccttagcccttttaaaaggcagagctgcggagggggccggattctaggaggaaccaatgaaaagcctcactcggcctccgctcctcccacttcttgctgaggtcaaaggcctgcgtcagttgcactgtagcctcggcagtgaaccgggaggtactaccaggtaaggaaggtgcggtagccccagccgtgggtgagaggagctccgctctgacacccccgctcctgtaggtcgccgtcgttgctccgctcgctctgagagagcatggccctgagaggcgtctccgtgcggctgctgagccgcggacccggcctgcacgtccttcgcacgtgggtctcgtcggcggcgcagaccggtcagtgtggggtcgggagtgtggagggaaggagggaggaactgggggtttagggactttccggggtgactttcccgttctgtgcttgcagagaaaggcgggagaacacagagccaactggctaagtgtaaggacctctggtcgcaccgtgtgtctgctgcccctgttcagctgtctgtctgccgcaggtggactctgtcccagaatccgagagctgcccgagcggggtggcagggtcgtggccagggtcagaggcactaaggcagtgagtgcgctgtgcctgcggggccggagaaaagtcacctgatcagtctcgcttgcagctcgcactagccggggggcgacatgggtgttggggggtagggctgatgagggtccgagaagggagggcacagtgatcttgcggactggaccgaggcgaattccccttcccagcctcgcgtcccgagtttgactggcaggacccgctggtgctggaggagcagctgaccacagatgagatcctcatcagggacaccttccgcacctactgccaggagagactcatgcctcgcatcctgttggccaatcgcaacgaaggtgggcgggctggtgggtgccctgagactgctcctccgcctggagccatagccaccccacctcaaggcccctctgtccttggggctggggcttcctgtggcctaggcctgggcctgaatttgggcactggtccctttgcagtttttcatcgggagatcatttcggagatgggggagttgggtgtgctgggccccaccatcaaaggtaggaacaagtatctctccacacactgcagaaccctctgtattctgaaagcctcttcctccttccctccctccctttcttccttccttctctttcttttcttttccttttctttcctttcttcttcccccccaacagagtctggctctgttgcccaggctggagtgcagtggcacgatcttggctcactgcaaattctgcctcccaggctcaagcgattctcctgcctccacccctctagtagctgggattacaggtatgtgccaccatgcctggctaatttttgtatttttagtagagacagggtttcactgtgttggccaggctggtctcaaactcctgacctcaggtgatccgcccacctcagcctcctaaagtgctgggattacaggcatgagccaccacgttcagccttctttttgagatggagtttcgctcttgttgtccaggctggagtgcagtgatgcaatcttggctcactgcagcctccacctcccgggtttaagtgattatcctgcctcaggctcccgagtagctgggattacaggcgtccgccaccacgcctggctaatttttgtatttttagtagaggtggggtttcaccgtgttggccaggctagtctcgaactcctgacctcaggtgatccacccgcctcagcctcctgattacaggtgtgagccaccgttgcccggcccttttcttttttttttttttttgagatggagtttcgctctgtcacccagcctggattactggattacagtggtgcgatcctggctcactgcagtttcctcctcctaggttcaagcaattctgccacctcagccttctgagtagctgggattacaggggtgcaccaccacgcccagctaatttttgtattttttagtagaaatgggatttcaccatgttggccaggctggtcttgaactcctgacctcaggtgatccacccacctcggcctcccaaagtgctgggattataaacgtgagccaccgtgcctggcccctttgtttctttttttagagacagggtctcactgtgttgcccaggctgttctcaagtgatcctcttgccttactgaaagcccccttctttccctaagccacaatttcccagtctgtaaagtggggctgttgtcccaccctctgaaagtggctgtggagatgaaatgaataaacctcagctagggccagcttggtgcctgcctccttgtgtgtccttattcagccctgtctcttgggtcttagctgggcagggccctgttctctattgtcctgctttcccctcctactaccaccaggatatggctgtgctggggtttcgtctgtggcctatgggctcctggcccgagagctggagcgggtggacagtggctacaggtcggcgatgagtgtccagtcctccctcgtcatgcaccctatctatgcctatggcagcgaggaacagcggcagaagtacctgccccagctgggtgagtggctgcccatggggcctggtggaaggaagacagtctctgaggtctggaactcaagggtggggctgtcccctgagcctattctgtccctatctcaaagatagcataagtggccacctggacccccgccagaccctgggcttcacctggagatctgatccctggccagcctgactgtccccctctgtgaccaccgtcatctccctatgctttctgtgttccccagtccagcccaaagtttaaagtccaccaggttcctgctggccatttgcagtggctcacacctataatcccagcactttgggagggtgaagtgagaagatcccttgagcccaagagttcgaaaccagcctgggcaacgtaaggagaccccatgtctattagaaaaacaaaaaaaggaaagagcctatgtgacctgcgctaagtggacgttggccctcttccgtggtgtctcggaggtgttcagctgcttcaagatgaagctgaacatctccttcccagccactggctgccagaaactcattgaagtggacgatgaacgcaaactttgtactttttatgagaagcgtatggccacagaagttgctgttgacgctctgggtgaagaatggaagggttacgtggtcggaatcagtggtgggaacaataaacaaggtttccccttgaaacagggtgtcttgacccatggccgtgtccacttgctactgagtaaggggcattcctattacagaccaaggagaactggagaaagaaagagaagatcagttcatggttgcatcgtggatgccaatctgagtgttctcaacttggttattgtaaaaaaaaggagagaagggtattcctggactgactgagactatgatgcctcgtcacctggggcccagtacagctagcagaatccgtaaacttttcagtctctctaaagaaaatgatgtctgccagtatgttgtaaaaaagcccttaaacaaagaaggtaagaaacctaggaccaaagcacccaagattcagcgccttgtcactccacatgtcctgcagcacaaacagcggcgtattgctctgaagcagccgcatattaagaaaaataaagaagaggctgcagaatatgctaaacttttggccaagagaatgaaggaggctaagaagcaccagggacaaatcgtgaagagacgcagactgtcctctctgcgagcttccacttctaagtctgaatccagtcagaaataagattttttgagtaacaaataagatcagattcgcaaaaaaaaaaaaaaacccacaaggccctgtgtgaccaggcctctgctgacctttccacctcatctctggccactcatgtgatcctcccagccagacttagctacttgaaattctccagaagtaccaccagttctttacacatctgttccctctcccagcactgctcttccccacagcctcctcctgcttaactcctcacacccttccagtttggccaactccttcctgattccctgggtccccctccccatcttggcattgtgatcatgactttggggtaacctgtctcttgaaagcagggccagatctaacttagttatgaggtctgactcaggggcgagggtaattttttttttctttttttgagacaaagtcccgctccgtcccccaggctgaagtgcagtggtacaatcttggctcactgcaacctgcggttccccagttcaagcaattcctgtgcctcggcctcccaattagctgggattgcaggtgcttgctacccgtgcctggctaatttttgtatttttagtagagatggtgtttcactatgttggccaggctggtctcgaactccagacctcaagtgatccatctgccttggcctcccaaagtgctgagattacatgtgtgagccacctcgactggcctaattttttgtatttttagtagagatggggtttcaccatattggtcaggctggattttttttcttttttgagatggagtcttgctctgttgcccaggctgtagtgcagtggcatgatcttggctcactgcaacctctcctgcccgggttcaagcgattctcctgcctcagtctcctgagtagctgggattacaggcacccaccaccacatctggctatttttttttttttttttttttaagtagagatggggtttcaccatgttggccaggctggtctggaactcctgacctcaattgatccacctgccttggcctcctaaagtgctgggatgacaggcgtgagccactgcaccccgccacgaggataatttttgagtaaggggatgtatcagggaccaggcagccttgtgactttgtcttgtgcctgcagccaagggggagctcctgggctgcttcgggctcacagagcccaacagcggaagtgaccccagcagcatggagaccagagcccactacaactcatccaacaagagctacaccctcaatgggaccaagacctggtaagggttctgggtggtgggcaggtggtgaacaggggcaaaggggcactggtcagacccctcaccgactgttccatccccaggatcacgaactcgcctatggccgatctgtttgtagtgtgggctcggtgtgaagatggctgcattcggggcttcctgctggagaaggggatgcggggtctctcggcccccaggatccagggcaagttctcgctgcgggcctcagccacaggcatgatcatcatggacggtgtggaggtgccagaggagaatgtgctccctggtgcatccagcctgggggtaagtggcagccactttgggaatgggtgttgggtcacctgcggatgcggctttgtcaggcaggctccgtgctggggacgcggctccctgtgcctgtggagcccacacagtggtgattcttactcagccggactcgctgacgtgctgaaaactgcccccatttggtgaccgtctcgctcatcccggctctgcccgggacacatgggcctgaaccagctcagtcatttgactcacagtgcatcttctggcatccgtcagcctcctggctctgagcatcgaacccagatgccaggctgggtgggactgtgtgcaaaccgagtgagcaggcaccgagcttcagtgccagggccatctgtgatgtgaaccacaacctgagtccccctgcgtggggtggctggggaggaggctttccctgcttcagagttggttctgcataggccctcttggtgtctcttgggtgggcctgaggcgccatctcaaccctacagggtcccttcggctgcctgaacaacgcccggtacggcatcgcgtggggcgtgcttggagcttcggagttctgcttgcacacagcccggcagtacgccctcgacaggtgtgtgagggctgcagtgagattctctgggggtgtggggcagcttgggtttcactctctataccatgggtgactccccagcccccacccaccaggcctgagttccttgctctggaatgaccagtgacgtccttctgagcagctgtgggctgagtcaacggcagggccagggcaagcttgggggcactgaggcagcctgggaaggcgtcctggagcagggggccccaggacagggacggggtgggagagtgggcctcccctcgctcttaccctgccattgcccatgtaggatgcagtttggtgtcccactggccaggaaccagctgattcagaagaagctggcagacatgctcactgagattaccctgggccttcacgcctgcctgcagctcggccgcttgaaggaccaggacaagtaggggctgtgtggtgggggcggggggatggcagcggtggctggaggaccttgtgtccttcctggagagaaaggtccttcctgcctggtggccctggggacctgaaccttctgctgtccctcttgtccttgatgggctgggctgaggacagccccactggtccctcattgggagcttggctgcatcagggaatccccaccccgggctaggtttgcttggagcatcgggatgccaggatccccagtccttgttaccctcatgtgccactcccagggctgcccccgagatggtttctctgctgaagaggaataactgtgggaaagccctggacatcgcccgccaggcccgagacatgctgggggggaatgggatttctgacgagtatcacgtgatccggcacgccatgaacctggaggccgtgaacacctacgaaggtaggagctggacctcagagggctcactgaggcctcagtgtctggggagggggtacagggaggtgggacggggacaggtctgagtccaactccacctatcactaagtgacagtgtgacctggggcgagccttacccctctgtccctcatctggagttactcacatggggactgtggaagtgaagtgcttcatgcagcacacagaggccccatcaggccttgcgaggggctcccagctctttctcccacatgctcgggaggagggatgttcctgagacaggtaagctccgaaggcagcccaggggtgaggcccgactcctagcaggctggtggacgcaagggagtgagcgaagctacacgcaggaatcaacgctccattttgttaagagacaaaagtcatcttcagatgacggtgtttgcaccctgtaactgatggtgatttacatgggggtccagaaccccttgcttggtgggaagacagatgtggaaaaagatacttaaaaaaaaaaaaaaagtgcaaacccagcatgcgctatgtagaaatagagggaggtatgaggaccccccgggcagagatgcttccagacagagagaacagcaaatgcaggaggggtgccttccctgcgcaccttgcaaccccagatcttgtctctatctggcatctggggggtggggggatcctacaaatgtgagaatgaccctgaggacaagcagcgggcgccatgagatggttttatgcagagaagggatgagtcagatttggtgctttaggggctcggcgcagtggctcacacctgtaatcccagcgctttgggaggctaaggcaggaggattgcttgagcccaggagttagaagttatgatgagctatgatcaccccactgcactccagcctgggtgacagagtgagaccctatctatatttaaaaaaaataggtttgtactttaggaagtaaacagaattggctctaaaaaggaggctacaatctgccttctgcttcaaggagctggggaggagcaaaggatgagacaccagggcatggggtgtgggattctctgggagaggcggcttcagatgggcagaggtcagctgaggcaagtgactgctcttccgatgtgctgtccctcctatccctcccgagggtaagaaagggcttgctgtgtttccttggagctcaggggtgctttcagcctctgtggcaaggaagcgtggccaggttgaaaatcaaacatttaataaactgtggggctgggggtggggagaacttgccaagggtggggagcacgaagcctgggcctatggcaggggctggacttgctacattttgggagttcagcacaaggagctttgggtttttgtttttttctgccaagatgcattatagaaccatgaaaaacaatttctcagtgtggcccaaatggtggcctcacagtcttctcctggagactgtcactaaggcgtgagtctcccggcagctgtcagcattcaccatctctgttggtctgtacttctgaagcagtggcctggggatacatgaaaattgattttaaagggaagttgtgagctatgaaaactccaaaccgactctgtattaatcttgtccaggtacacatgacattcacgccctgatccttgggagagctatcacgggaatccaggcgttcacggccagcaagtgagccgctccatcaggggcccgaaactctcaagcccctttctggagagatgcctggctggaccgtaggagcgctgtgctctgagcttagaaagggaggtggcggatggagtgggaagtgagagacactgatttttaaatatcaaaatttcccttctgaagtcgttcagatgtgttccttaaaaagaagatggaattctctgtagagcgtctcaatccacttttaaccatggatgagagcagactccatttaccctgaaatagcagcttctcttgagaggagagtgacatggaagcaactccgtctgctgcagctgaccccctcacactgagttcacagtgcgccctccctccctcccatctgggggtagtgccttatgctgggtgttggagcagagtgagggagaggaaaataaagacctgcacatctgaccccaaggtgtcaggccggtttactggtaaccacctgagaagtagtttcagccacagaagaaacgaacacgtctgggggctgtgagttgccgggacgtggtggggactttcccctagagtggtctggcccccatctgagtcttaggctctgctgtaaaaaagaaacccaggttagcagtgccggtctgtgccagggctgtgggcagaggggatgatttctgagtggcaggggtgcaagggactttgtcctttctgtcaccacagagctgctcatacaacagtgggacatgacaacggtttggcttctcagctcagacacaccatgttataggggatcacaaacaagatggtgagtgcaccaagggctttgcagggactgtggcctggcggggtcagggctgggtgcctggtttctgttcacatttactcttggctgggccatccctgtcctcttcctcaggcagcgccccccctgtgagtttactcatacctcaggctggagacacaggtctttgtacacagtctccacgctgtggcagacttgtttgagctctgtctccaaatggctgatctttgccattttctgggtgaactcttggagcttttcctggatgatcttgttgtggtcattataaatctgatagatcctctcctctaatttctctgtcagatccgaaacctgttaaacaataagatgtgttctcggaaaatcaaacaagaggtatcacaagacatctgtgttaagtgggtttcttagatttctgcaatttatcttatgaaaatgacaaaataggctgggcacggtggctcatgcctgtaaccccagcactttggtaggccaaggtgggtggattacttgaggccaggagttcaagaccaacctggccaacatggtgaaaacccatctctattaaaaatataaaagctaggacgggtgtggtggctcacgcctgtaatcctaacactttgggaggccgaggcgggcggatcacgaggtcaggagatcgagaccactgtgaaaccccgtctctactaaaaatacaaaaaaatttagccgggcgaggtggcgggcgcctgtagtcccagctacttgggaggctgaggcaggagaatggcgtgaacccgggcggcggagcttgcagtgagctgagatcgcgccactgcactccagcctgggctacagagcaagactccatctcaaaataaataaataaataaataaataaataaataaataaatacacaaatacataaaaactaactgggcatggtggtgtgcacctgtaatcccagctactcgggaggctgagacaggagaattgcttgaacctgggaggtggaggttgcagtgaaccaagatgatgccattgcactctaacctgggcaacaagagcaaaactccgtctcaaaaaaaaaaaaattagcaaggcataggtgacgcgcacttgcagtcccagctactcggaaggctgaggcaggaggatcacttgagcccaggagttggaggctacagtgagtcatgatcacactactgcactccagcctgagagaccctacctcaaaagaagaaaagaaaaacaccaaaaactaaaacccagtgcagtgactgggggtcagattgcctatattttaaatttttttgctttttttgttttgttttcttgcggcggagtttcgctctcattgcccaagctggagttcaatggcatgatcttggctcactgcaacctccgcctcctgggttcaagcgattctcctgcctcagcctcccgagtagctgggattacaggcgagcgccaccacacccagctaactttttgtatttttagtagaaacggggtttcaccatgttagccaggctggtctccaactcctgacctcaggagatccccaccttcagcctcccaaagtgctgggattacaggcatgagccactgcacctggcctgttaaatttttttaagaggcaaaagtatatacagtcgtgtgctgcataatgacattttggtcaatgtcagactgtatatacaatgatggcccataagagtataatgccatatttttactgtaccttttctatgtttatatatatttagatacacaaatacttaccatcatgttataagtgcctacagtattcagtatggtaacatgctgtgtgcaggtttgtagcttaggagcaataggctcttccacgtagcctaggtgtgtagtagactataccatctaggtttgtgtaaattcaatctatgatgttcagatgatgacagtgtcacctagggatgcatgtcacaaaactgtacagtacaagctcagccaggttaggaagaaagtacacagaatagaagaggcatccaacaaagtggcctctgggtgctgtatcaaaataaataaataaataaataaatgtttttgtatcttttctactagaggccaaggcagcagggtgaggagttcaagaccagcctgggtaacatagcaagatcccatctctacaaaaaaaatgtttaaagaaaattagctgggcatggtggtgcacacctgtagtctcagctacttaagaggcagaggtgggaggatcatttgagcccaggagtttgaggctccagtgagctgtgatcgtgccactgctctgtaagcctgggcaacagagtgagacgccacctctaaaaatataaataaataaataaaacaagtgagccgggcatgatgttgcatgcctatagtctcaagctactcgagaggctgaggtgagaagattgcttgagcccaggagttcaagattgcagtgacctatgattccaccactgcactgcagtctgggcaacagcaaggcttgtctcaaaaaaaaagaaaaaggaaaataaagtcaatctgtcatcaagacacctagaaccagcaagctgtcccactcatgtgacccattatgtattttgtttgtttgtttgtttgctggaattataggcacgtgctaccatgcctggctaatttttttttttttttcgagacagccaagatcgtgccactctactccagcctgggctgggcaacagagcgagactctgtctcaaaaaaaaaaaaaaaagaaaaagaaaaaaccagaaagaggcagtcttctttttcttctttttttttttttttgagatgaagtcttgctctgtcacccaggctggaatgcagtggcgggatctctgctcactgcaagctccgcctcccgggttcaggccattctcctgcctcagcctcctgagtagctgggactacaggcgcccgccaccacgcccagctaattttttgtatttttagtagagacagggtttcatcatgttaaccaggatggtcttgatctcctgacctcgtgatctgcccgcctcggcctcccaaagtgctgggattacaggcctgagccaccacgcccggccctcttctttttttttttttgagacggagtctcacctgtcaccaggctggagtgcagtggtgcaatctcggctcactgcaacctccgcctcccaggttcaagcaattctgtctcatcctcccgagtagctgggactacaggcgcgcaccaccatgcccagctaatttttgtatttttcatagagacggggtttcaccatgttggccaggatggtctccatctcctgaccttgtgatccccctgcctcagcctcccaaagtgctgggattataggcgtgagccaccacacctggcccctatttatttatttttgagacgaaatcttgctctctagcccaggctgcagtgccgtgcagagccactgcactgagccaatttttttatttttagtagagacgtggtttcaccatgttggccaggctggtctcgaactcctggcctcaagtgatccacctgcctcggccttccaaagtgctgggattacaggcgtgagccactgtgcctggtccccccattatatattctgaagaggcatcaggtgcaaccattcatgtaggacctgaacatcacaccagcttttgcaagatgtaagccctgggcatgtggaagaagctccactcccccgtcacagaccattcgatggcttctgcaggacatatgggtgtgacaatgcaagttgtgcctcaaccccctactcccgtggctgctcgaccttgcgtgaagtaagagggctgcgtgttggaggcaggagggcatccaacgccccgctccctcagcctggctctctcgtcaggcaaatcattcatttccaagccttatctatatcatgggtccaatctcttctctgtaggactattctaagggtaaattgagatacagatggtcccaacttactacagttcaacttactacatttttgacttacagcattttcaactcacaatgggtttattgggacgtagccccatcataagtggaggagctcctgtgctgtgtgtgaatggcctagcaccgtgcctggtgtacaacagacaccatcagtggttcattccctccccttttgcataaggaatcccccctctcgctgggtggagtctgtcaccttggtcttcaggctgttcctgaagttggtcatgagtgcatggtccttttgccggctcttgttgatgttttcgatcagctcctgggctctcttctgcaggatgtcaatgcttgagtccagagaggagaagtagagtcccgacttcccttccaggaccgtcagctggcaactggcactggaggtggcgacacaagggcaagaaacctgacttctcagagtacaggaagcggccaggtgtagtcgctcatgcctgtaatctcagcactttgtaggccgaggtgggcggatcacaaggtcaggagttcgagaccagcctggcaacatggtgaaacctcgtctctagtaaaaacaaaaaaacaaaaaattagccaggcacggtggcacgtgcctgtagtcccagctacttgggaggctgaggcaggagaattgcttgaacccaggggatgaagttgcagtgagccgagatcacgccactgtactccagcctgggtgacagagcgagactccgtctaaaaaaaaaaaaaggacaggatgctgagatcagcaccagactcttccaagagcggctgatctgagagagatcaggtgggaggggacccgcgttgttgccttccatgggtgacacgaggcatgcttcctaggttattccattcacacacacgccctgaatgatgagaatggcacccccattttatagctgagaaaacagaccaagaggcacgactaaatatgcccaaggttccagaccaaggaggtctgtctgtccccaaagcccactgttattttatgacaccaacttgcttctttggaattttggaataccaataatagtgtcaatgctttctttcttttttttttgagacggagtctcactctgtcgcccaggctggagtgcagtggcgcgatctcggctcactgcaagctccacctcccgggttcatgccattctcctggctcagcctcctgagtagctgggactacaggcgcccgccaccacgtccagctaattttttgtatttttagtagagacggggtttcaccgtgttagccaggatggtctccatctcctgacctcgtgatccgcccgcctcagcctcccaaactgctgggattacaggcgtgagccaccgcgcccagcccaatgctttctttcttattttctttttttttatagagacaggtctttctctgttgcccaggctggagtgcagtggcacaatcatagctcactgcagtgtcagcttcaagtgatcctcccacctcagcctcctgaataggtgggactacaagcatgtgctaccatgcacagctaatttttaaaatttttaaatagagactgggcttcactatgttattcaggctgctctcaaacttctggcctcccaaaatgttgggattacaggcatgagccactgcgcctgactgatgcaatcagcaatctcctgcaacctctgtctcctaggttcaagccattcttctgcctcagcctcccgagtagctggaattacaggtgcacaccactacacccaggtaatttttgtgtttttagtagagacagggtttcaccatattggccaggctggtctcgaactcctgacaagtgatcctcctgcctcggcctccaaaagtgctgggattacaggcgtgagccactgcgcccagcctgatgctttcttaagtgaccttcctgtcattaacctgctgcatccctttcccaacctactgggtgatgttgaccgcctggggctacagtgtacctgcacctccttgctcccaccaggtgaggtgaatacctgttgaattatatttaaagagcatttaaagaaatgcgcacacacaaaaagttgttggtcccatgttgtacatgtaactgtaattatgtaattcaaatattgtgttaacaagtgaaatagtggcagaagagtgacagctatctaaaaagctaaacagaatgaaaaattttgagtaatatgtaatgttccgtaacttcataatattcaatgtaataaaatggaacttcagttgggtatgggagagagaactaaaattgaagcaaagatcataaaaatctagaaaaattctgcatatagattgctctgccaaggccttgttctctgctttaaaaacagaactggggccgggcgcggtggctcaagcctgtaatcccagtactttgggaggccgaggtgggtggatcacaagggcaggagttcgagaccagcctggccaacatggtgaaaccccatctctactaaaaacacaaaaaattagccaggcgcagtggcaggcgcctgtaatcccagctactcaggaggctgaggtacaagaatcgcttgaactcgggagccgagatcacaccactgcactctagcccgggcaacagagtaagacttcgtctcaaaaataaataaattaattaaattaaattaaaataaattaaaacaactgaaaattgtgggtaatgcattgtgaatgaagtttatggaaaaaatgtgatctgataaggcaacccattggtattttaaattaagatatattttttcttcttctgatgctctggtttatttgaccggtttgacgtctgatcagttagcggttctggccaggtagagctgcccctgtgagtcacagctaacttttcctcagccatgttcccggcactgagctaagtcacatgccttgtcttggtgcatcctcacgaccacactcgggtcatctgctgttctctttacgacatgggcttagagtggttacaccaccttctcaaggtggaggacagtctgtggcagagctgggctttgtacccagaaggcctgacttcccagctggtatcctgcttcctactaaggcactcaggcgccactcccctcctggatcttacatttcctcgtcgccctctgaggtcctccagctctgaaaggccaagccttgtaggtgtggacagagcagttcctgaatgcagcaggtcacacttgtgtccacaagcaggttactgattacttacaaaaataaatcttggccaggcacagtggctcacgcctgtaatcccagcattttgggaggccgaggcgggtagatcaccagagatcaggagttcgagatcagcctggccaacatggtgaaaccccgtctctactaaaaatacaaaaattacccaggcatggtggcatgtgtctgtaatcccagctactaggcggactgaggcaggaggatcgcttgaacctgggaggcagaggttgcagtgagctgagatcgtgccactgcactccagcctgggcaacagagcgagactccatctcaaaaatataaaataaaataaaaataaatctcagctatctcaaccaggcacagtgggctcacgcctgtaataccagcacttcggggggctaaggcaggtgaatcgtgagctcagggttttgagaccagcctgggcaacatggcaaaaccccatctctacaaaaaacacaaaaattagccgagtgtggtggtgtgtacttgtagtcccagctacttaggaggctgaggtgagaggatcacttgagcccgggaggtcaaggctgcagtaagcttgatcatgccactgcactggagcctagatgatatcacgccactgtactccagcctgggcgacagagtgagaccctgtttcaaacaaacaaacaaaacaaccacaacacacatatacacccctcccctctccacccggtctcccccagccggccacctccctctttcctccccatcaaggccaaggttctagaaggagctgcttaaattttctgggcttttttttttttttttttttaagagagagagagagtctcaccctgggcttcttttcttttcttttgagacagagtctcgctctgtcaccgaggctggagtgcactggcatgatctcagctcactgcaagctctgcctcccgggttcacgccattctctttcctcagcctcccgagtagctgggactacaggcgcccgccaccacgcccggctaattttttgtatttttagtagagacagggtttcaccgtgttagccaggatggtttccatctcgtgacctcatgatctgcccacctcagcctctcaaagtgctgggattacaggcgtgagccaccgcgcccggccatcctgggcttattttcttacccccattcacttttcagtccattgtaatcaggttcctcccccggttctcaaatgaaacagctcctaccacagtcaccatgaccttgtggttagaccgatagacatctcagagtgacatgctgacctcttggcagcagccagcactgctgaccacccttccctgctactcccgacatgtggtatcccagaggtctgtgcttgggcctctgctgtcttcttgccagacaccgtcaatcacacacttgttctgcagtgaggcctccatgcctcctccctgctggcccctgcagctaatatcccagccaccattccacaatgcacaggctattattctccaaaggcattcattcccgtagcatgggatccctgaacagtcccctttcccacctacgtcctgtctcctccagaaagtgttccttggctggattaggtgcacacagcacctacggtttcactgtttacaccttggcctcccactgtagtctgctgaagggccagggccatccttcatctttgtatcttcagtacttacccctcatgagagaagcaataaatgtgctgctaataagtaaatgacttgcgagtactatccattaccatccacactttggattctatcatctaaattctatcatcccagcccatgcctctctcctgaggacccaagaatatatgaaacctcccagcctccccacatggctgtctcaaaggcatctgaaactccacatttgcacaaccaaaagcgtcatctcccaggcaacccgatttcatcttccattcccttagttaatgacataaaaagccacctggttcccaagctcaaaacttagcagcaagcctagagtccagcttctctctgtccctctgcatcctgtctcaaaatcccctcatttctaccttctttgtttttttatttttatttttaattaatttttttttcagatggagtttcactcttattgcccaggctggagtgcaatggcgcgatctcggctcactgcaacctccgcctcccgggttcaagcgattctcttgcctcagcctcccgaatagctgggattacaggcatgtaccaccacactcggcgaattttgtatttttagtagagacggagtttctccatgttggtcaggctggtctcaaactcccgacctcaggtgatccgccctcctcggcctctcaaagtgctgggattacaggcatgaaccactgtgcccagcctttttatttatttgtttttgagacagagtcttgctttgttgcccaagctagagtgcagtggagcgatctcaggtcactgcaacctccaactcccggtttcaagcgattctcttgcctcggcctcccaagtagctgggattacaggcacctgccaccacacccagctaatttttgtatttttagtagagacggggtttcaacatcttggccaggctggtctccaactcctgacctcgtgatctacctgcctcagcctcccaaagtgctgggattacaggcgtgagccaccatgcccggccctaccttcttaatgtctctaaatctaccatcattagcagctctataactttcacttctcaactaggccatagggacctttattttatttacttatttatttttgtaaaaaattttgtaataaattttatgttaaaaaatttttttttcttttgtaagaaattttcttttgtaaaaaattttgttattattattttgtttttgagacagactctcactcggtcgctcaggctggagtgacaggctggagtgtcgctcaggctggagtggtgcaatctcagctcactgccacctccacctcctgggctcgagtcattctcgtgccccagcctcctgagtagctgggactacaggcacacaccaccacgcccggctaatttttatatttttagtagagacagggtctcaccatgttggccaggctggtctcaaactcctgacctcaagtgatccgcctgcttcggcctcccaaagtgctgggattataggcatgagccaccacgcctgaccttttatatatatatattttttttgagatggagtctcgctctgtcccccaggctggagtgcagtggcacaatctcggctcactgcaagctctgcctcccgggttcatgccattctcctgcctcagcctcccgagtagctgggactacaggcgcccgccaccacacctggctaattttttgtatttttagtagaggcggggtttcaccatgttagccaggatggtctcaatctgctgacctcatgatccgcccgtctcggcctcccaaagtgctgggattacaggcgtgagccaccgcacccggcctgacctttttttttcttttgaaggcagggtttgctacattgccaagctggagtacatcagtacaattactgcaactttgaactcccccaggctcaagtgatcctctcgtctctgcctcctgaatatctaggactacaggcgggtaccactactcctggctaaattttgtttaatttttctgtatagatggaggtcttgctatgttacccaagctggtctcaaactcctggcctcaaaaaatcctgcctcggcccccaaagtgctgagattacaaacgtgagccacagtgtcagcccctagtgacattctacactgtaatctgatttcctactcctgtttgttagcctaaaaccatccccaccagccacaagatcaagtctaaattccttcacacagcatacaaggccttccagggccctggcctccaccctctcttccagccttaatgggtttttttctttttctttcttttttcttttttgagaaggggtctcactctgtcgcccaggctggagtgcagtggcatgatcttggctcactgcagcctccacctcctgggttcaagcaattctcccacctcagcctcccctgtagctgggattacaggtgcctaccaaccatgcctggataatttttgccttttttttttttttttttttttttagacgaggtctcgctcagctgcccaggatggagtgcagtgccacgatctcggctcactgcaaccactatctcccaggttcaagtgattttcccatctcagcctcctgagtagctgggattacaggcacctgccatcatgcccagctaatttttgtatttttagtagagatagggtttcaccatgttggccaggctggtcttgaactcctgaccttaggtgatccacctgccttggcctcccaaattgctgggattacaggcgtgagccaccgtgcccagtgcagccttactgttttctttttgtttgtttgtttttttcaagacagagtcttgctctgtcacctaggctggagtgcagtggcacgatctcggctcactgcaacctctgcctcccgggttcaagcaattatcctgcctcagcttcccaagtagctaggattacaggtgcccaccactgcacccagctaacttttgtatttttagtagagacagggtttcaccatgttagccaggctggtctcgaactcctgacctcgtgatctgcccgccttggcctcccaaagtgctgggattacaggcgtgagccaccaagcccgatctagccttactgttttctacagcccctccatctgcagcaattggggacctaccacaatttccccaaacatgtcagcctttgcctggaatgactttcccttcctgcctccttcataatggaacatttggaacttttgcttctctaccccccgctatacctaggccttgctggtcacaaagctgccaaagtttatgaacatcagtcccctccagcgcacgacaccttgagggtgcagactacaccctactcatttgttttgcagcaccccaaaggtttcatcagtttgctgaatatctaaatgaatgcagcactgacattggggctcccacacctcctcgtacccagttcaccttgttgtctcagcctctcctggatgctctcaacagtttcagaccctaaaattaaaatcgatgagagcaccaggtgtttctttttgtgtgattgttcacaacctgcttgagctgctaatggttcagagctgctcctttttaaggctcaagggatgaggctggaaccggttttcatggcagctaagcaaacagtaaaaaaaaaaaaaaatcacttgaattcagctaattcgagtttcatggtaggacaaaggcctgcatcagatgtctgctgagagcttctttatttttccaacctctcctttggggatttatcccttttgatttcatttttcttaatacacagcagctgcatattaatcaggatgctaatgaatcataggcttccctgggcctgcattcaccaattaactttaacaaacaaaatgcgtggtgtcctctctgctggctttcccggttcctaggctggcttctgttgccgaaccctggaccgaggccagagaatgcaagtcagcccaacacagcacgtcgggtgtgcatggcctgcgcccggattgggcagcgggctgggggctgtgaacacagcgctgcgttcatctattatggtctgtccttctaagaagtccctaatttggctgcgaggattaggacatagttcccaagcagggcccacgctggcagggggcccaggagctgcggaggaaatgggtctaagcgaagagaccatctgttcgctccaggtaaagctgtgattggcaggcgactgagccagaactgcccgctggtggggccctccctccgtggcctctaacagatatacaagtaaacaatccgccagccacttatgaccaccgcgggtggcagtcccgggagaggaggcaagctaatcaaacattcaaggggggaacacaacagaatctctggcgcttgggcaaaacaatgttttgctgaagtacagccaggaagggggaaggtttgaatggaagctgatgagccagttcctcaacctctccttttctctctggaaacgtgttaacattttaatcatgttgctgagtatctgctgctggatctattaactggcccctgcactggttttaatctatctgttttttggcccagggttcctgtggagctccttgaagtctctaaatgatttgcagcggtctgtgtctcttcactacacagatcctggtctaaacatgctattccgcagtaaggtattagcaaacaaacgacttcaaccattgcttccctttttttttggtctccaattgacagcacacacctataaaccatttcacgcgtggcctgctttccagcagaggaatgtgcgaggagagggaagctggcttgctttctgcctagagtcctcagggccctgtcctgaccctcctctcactccttctccaggtgagctcattcattccacagctgctgctgaaacaatgactcccacagaaccatctccagaccctcaccccaccccgagttccgggtcagaaagttgaactgtatcctggacatgtggatgtccctggccaccgaaagtggctcagataaacaaggacaacacagaactcatgttcttgtctctgccagagaagccaccacctaccggaaaccaccacaagctggaaagcagacagcagtgatgtgcttgtaagcatttagcaactggctgtgtgatgggggggaagccctgattcgtagtgtttgccaatttccgtggtgcagagcctcccaccattagccaatttcaggctaccaacatgaagacgctaaatgccaagttgggaagagatgtgtagaattggctctttcaagccggtaggagctggccccagtacatcatggccgggaaacatcctccctcatccccttcctgtgtcttatggcacaaggcacttcctccatctgccctgctaaaggccaccccccccacaccccccataaaagcctcccactagacctccctacacccacacattctccctcccaaccattctctacaaagcagccatatttttttattaatattttttgagacagggttttgttcttgttgcctaggctggagtgcaatggtgcaatcttggctcagtgcaacctctgcctcccaggttcaagcgattctcctgcctaaccctcccaagtagctgggattacaggcatgcaccaccacccctggctaattttgtatttttagtagagacggggttttgccatgttggccaggctggtcttgaactcctgacctcaggtgatccatctacctcgaactcccaaagtgctgggattacaggcatgagccatcgtgcccggcctgcagccgtatctttttataacgggaacctgagcatgtcacttctgtgacccagcagttcccctcctaggtatgagtatgcccagaagaaatgaaatcatctgtccacacacaaacttttctaaatggatttcatagcagtgctgctcataatagccaaaaagtgaaaaccacccgaatgactatcaacagatgagtggataaacaaaatgtggtagactcatgtggaatattattcagccattgaaaagatgaagtccagatgcagtggctcacgcctgtaatcccagcattttgggaggccactgtatctggcctggagtgatgaagctgttttaaagttgactatgagaatggttgtccagctctgaatataccaaaagcaatcaaatcatacccttcaaggaggtgagccgggcgcggtggctcacgcctataatctcagcactttgggaggccgaggcgggcggatcatgaggtcaggagattgagaccatcctggctaacacggtgaaaccccgtctctaccaaaaatatataaaaaaaagccaggcctggtggcacatgcttgtagtcccagctactcgggaggctaaggcaggagaattgcttgaatctgggagggggaggttgcagtgagccaagatcatgccccctcactccagcctgggcaacagagcgagactccatctcaaaaaaaaaaaaaaaaaaaggtgaaccgtatgctatgggaattatatctcaaagctgttactgaaaaaacctctaggataaagtctgtagcccacaaaatgcctcataacctggccccttctgcagccctccccttgcactcacccctgtaccccactcgctcgcctagccacactggccttcctttagctcccccgaatgccacgagcagggacttcgcacgagctcttctctcaacccctccttccccaccctgcccacactttctgcttcaacatctcttctacaaggacaccttccctggctccccattccaggctggctgcccacaggggaaaggtctcccagcaccatgatctcttccctgttggtgtttggtcagatgcaaacagcaggagggtatgagcatgtctgtctggaggacaggagtgtccctgctgccaatcacaatactgccatatcagcctttttttttttttttttcctcgagacagggtctcactctgtcacccaggatggagtgcaatggtgctatcttggctcactgcaacctctgcctcccaggttcaagcaattctcctgcctcaggctccggagtagctgggattaaaggcatgcgccaccacgcctggctaattttttgtatttttagtagaaacagggtttcactatgttggccaggctggtctcgaactcctgacctcgtgatccgcctgcctcggcctcccaaagtcctaggattacaggttgagccactgcgcccggccaacatgagcctccttcttgctcttttgagaacacatcaagcttattcctacctgagggacttcatacttgcggccccctctgcgtggaaggtttgggcccagaatgcctcctggctggcctcttctcatgtgacctcttcagagttctccaactgctctaaggtccctgtcactctacttgctccttactatattttgtttcttcattccacttacttgccaccagttgaaatcacattattcacttatttatttttgagacagggtcttgctcttccagtgcagtgaagcaatcacgtctcactgcagcctcgacctcccaggctcaagtggtcctcccacctcagccttccaagtagctagggccacaggtgtgtgcaaccgcaccacaccacgctcatttctttctttctttctttcttttttttcagagagatatgtctccctctgttgcccaggctggtctcaaactcctgggctcaagggatcctcctgccttggcctcctgaatagccaggactacatgcatgcaccaccacgcctggctgatttttgtgtttttagtagagacggagtttcaccatgtgggccaggctggtctcgaaatcctgacctcaagttatctgccagcgccagcctcccaaagtgctgggattacaggcgtgagccactgcgcccagcctctactatatatatactttttttttttttttttgagacagagtcttgctctgtcaccaaggctggaatgcaatggcacaatcttggcttactgcaatctctgcctcccaggttaaagcaattctcctgcctcagcctcctgagtagctgggattacaagtgtctgtcaccatgcctggctaatttttgtagacacagggtttcaccatattggccaggctagtctcaaactcctgacctcatgatctgcctgccttggcctcccaaagtgctgggattacaggcgtaagccaccgtgcccggcctactaaatttttcttttttcttttttttgagacggagtctcactctgtcgccaggctggcatgcagtggcatgatctcggctcactacaacctctgcctctggggttcaagcgattctcctgccttagcctcccgagtagctgggactacaggcgtgcaccacaacacccagctaacttctgtatttttagtagagacggggtttcatcatgttagccaggatggtctccatctcttgaccttttgatccacccccctcggcctcccaaagtgctaggattacaggcataagccaccattcctggcttttttttttttttttttttttttttttgagacagcgtttcggtctttttgcccaggctggagtgcaatggcgccatctcagctcactgcaacctccacctcctgggttcaagcgattctcctgcctcagcctcctgagtagctgggattacaggcatgtgccactatgcccagctaattttgtatttttagtagagacggggtttctccatgtttgtcaggctggtctcaaactcccgaccttaggtgatccacccgccttggcctcccaaagtgttgggattacaggtgtgaaccactgcacctggccaatattttttaataaattggcccgacattctggcccgcctctagtcccagccatttcggaggctgaggtgggaggatcacttgagtctgggaggtggaggttgcagtgagccgtgatcatgccactgcgtggtgacaaagcaagacgctgtgttaggagggaaaaaaaaagcagcagacactggcatagccttgtggaagaaaagggtgaatgagagggacccaggggcctgtgtagacccatagggctgggatcttcctcacctagctggccctccaccagcttcctcctcgcagttctcttcccaccgcggatgctccttgctctcccccaagggctgcggttcctggtctttgcatttcacatggggcacgtccacctgcaagcacagtcaggacggaggccaaggagggagaatgaggagtgaacagatcgccctcctgccgacccttcaaccctggtcacctcgatgtgctgctgcgggacggtggggacccgcaggaaagacgggcagggctggggcaggtgccatgagggcaggggcatggggtgaaaggacactctgtccctaggggacaccaggacaccagacctagaggggccgggtgagggcagggctgtgggaatgtaactggaggacctgggctcctaactggtatgtgtgttggctggagtccttcgagaaaggagaagaggtaggagaaaagagatgaggccgggcgcggtggctcacgcctgtaatcccagcactttgggaggcggaggcgggcggatcacgaggtcaggagtgcgagaacagcctgagcaatatggtgaaaccccgtctctactaaaaatacaaaaattagctgacgtggtggtgcgtgcctgtaatcccagctactcgggaggctgaggaaggagaatcacttgaacccgggaggcagaggttgcagtgagccgagatcacgccactgcactccagactgggcgacagagtgatacttcgtctcaaaaaaaaaaaaagaaaagaaatgaaagaaacgggtgcggtgcgtgggtgtttgtgcctttctctactccgttccggccacgcgccatgtgtggaaatcagacccgtcagtgcgtcagtcagggccgggttcagtcagtcaggaaatttgaggccaggcctgatgagagggagccccaatggcaaaggacaagcggccgggctcgggtccgctggagatggctgggatcgcagccgttccctgcctatctgtccgcccgccccacgcgcgagaaggaaacaagcgccgcgtactccctgtcgctccattccgtattttcccgccttcaagctcgcaccctctgcgcatgcgccgaccccgcccctggccagctgcgctcccgcggacgagtgtgttgtgacgcgtgctcccggccccgccctctttgagaacttgcgcggccaactgggcggggccgaccgttaagcagcagtttcgcggtccgcgggctgcgcgcgcagtcggcgccccttgggaacaggacggcgcgctctgggtgcgcttgtgtgcccctgtgaggctcctgggttccacggggcgcccaggttatacggatctcagagtcctgtatttattcggtgcttctaacttcatccactctgccttggaaaatatactccataacaatttttttttttttttgagacaagatcttggtctgtcgcccaggctggagtgcagtggtgcgatcacagctcactgtagcctcgacctcccaggttcaagcgatcctcctgcctcggcctcctgagtagcagtgtcattcaccaggcccttctaatttaaaaatatttttctggccgggcgcggtggctcacgcctgtaatcccagcactttgggaggccgaggcgggtggatcacctgaggtcatgagttcgagaccagcctagccaacatggtgaaactgtctctactaaaaatacaaaaaatagccgggcgtggtggcgggcgcctatagtcccagctactcgggaggctggggcaggagaattgcttaaacccaggacgcagaggttgcagtgagctgagatcatgccactgcactccagccggggtgacagagtaaagctccgtctcaaaaaaaaaaaaaagattgtatgtatatatacacacacacacacacacacacacacacacacacacacacacacaaattatatttttttttcctgtagaaatgagatctcactgtgctgagcccaggctgatccccaactcctgggctcaagccgtcctcccgtcttggtctcccaaagtgctgtctcaaaaaaagaagaaattatctgatctaccctattgactgtaggtcataagacccccgtttcaaagaagtttctgccccacacaaggcctatctatctagattcttcttggcctctctgagcatgcattcctgagactccaagaagaatctagacagacaggccttgctgggtttccccactcagcctattagtattagacgacccccccggcttttttttttttttctttttttgtcttgctctgttgtccaggcaacactggagtgcagtggcaagatctcaactcgctgcaaccttggcctcccaggttcaagcgattctcagccaaccaagtagctgggattacagatgcaccatgcccagctaatttttgtatttttagtagagatggggtttttccatgttgctcaggctggtctcaaactcctggcctcaagtgatccacccgcctcagcctcccaaagtgtcaggattacaagtatgaaccacgacaaaccctttttgtccaatcaaatttctacctgggtgttcaaactttgctgaacctaagcataagacacttttcattaatcaggcatggtggcgggcacctgtaatcccagctgcttgggaagctgaggctgctgtgagccaagatcgcccctacactccagcccagggaacagagccagactccgtctcaaaacaaaacaaaacaaaaacacagtttcccctgtatctctggatcttcattctgaaggcttgtcaggtaacactatgatcaaatacattcgtattccttttctcttattaatctgccttttctcagtaatttttagtgaaacttcagagggcaataaggaagctttctcttcacccctacacagccaaagttcagatttgatggaaatggcaagattccagggtacttgtgtttatttagacacataaatatgtatttaacgacagggtctcactctgttgcccaggctggagtgcagtggtgtaatcacggctcattgcagcctcgacctcccaggctcaagtgatcaacctcagtctctggagtacctgggattacaggcatgagccactatgctgagctaatttttgttttctgtttttgggggacaggtctcactctgtggcccagactggagtgcagtggtgtgatctcagctccctacaacctccacctcctgggttcaagtgattctcccacctcagcctcccagatagctgggactacactacaggtgcctgccatcatgcctggctaatttttgttttttgtttttttttttggaacagagtcttcttctgtcacccaggctgtagtgcagtggcacaatcttggctcactgcaacctccacctcctggttcaaacgattctcgtgcctcagcctcccgggtagctgggactacaggtgctcaccaccacgcccagctttttttttgtatttttagtagagacgggttttcaccacgttggccaggctgctctcgaactcctgacctcaagtgatctgcctgcctcagcttcccaaagtgttggaattacaggcgtgagccaccacgcccagcctaattttttttttttttttttgagacggagtcttgctctattgcccaggctggagtgcagtggtgcgatctccgctcactgcaagctccgcctcccaggttcacaccattctcctgcctcagcctcctgagtagctgggactacaggcacccgccaccacgcccggctaattttttgtatttttagtagacagggtttcaccatgttggccaggatggtctcaatctcttgacctcgtgatccacacgcctcggcctcccaaagtgctgggattacaggcatgagccaccgcacccagccctaatttttttatttttagtagagacggggtttcaccacgttggccaggctgctcctgaattcctgacctcaagtgacccacccaccttggcctcccaaaagttctgggattacagaagtgagccactgtgcctggctcagtacccagactttttttttttttttttgtatttttagtagagacggggtttcaccctgttagccaggatggtctcgatcgcctggcctcgtgacccgcccgcctcagcctcccaaagtgctgcgattacagacgcgggccacctcgcccagcccagtacccagaattttgaccatcaagtggcacactgagctagggggacccaacaagacccctcacccctaaggaaagccaccagatgggggcaactgcccactttattagacaataggtggcccacaggtctcctcagggcccaccctcacagtagacacaccacacaggacaacagaaggaacctgctacccagtcctctgtccctgggattctggtcctgggacaggtgggaaagaggaaggtgggggctggcctcacagaggcctcataaatacaaggtcactggccagggatgcaaaggagcgcagcagcagggactcggggaggatgacctgtcctagagtggcccatgtcacgcagcctcctgtgtgggagggggcctcggctcggcatccaggcggcacaggggactgtcatacaccatctgcaggttcaccttgtggcccaccagctcccggatattgttgatgccatatttgatcatcgttgggcttgtgggggagggaacagagtttatcatgaggtcagcacgtgcacccttctgctcagatttccatggctcccatcttcttcagaggaaaagttcaagttctccccatgacccacagggccctgcgccaactgctctatcacctctcaccctccgccttcagccacaccagcctcctcactcttctcctaatacaaaaagcacattcccacctctgggcctttgaactgactgtgaccactacctgggacacccttccccagatactctcatggtttacctctttatctacctctagattttgcttaggtggcacttcttcctccatgatgccttcactgaccacgtagttgccttagccctccctataccacttactgccctggtacacacttctgtcttcttttgctgagtgcatttgtttttttgaaacagagtctcactctgtaacctagggtggagtgcagtggcgtaatctcagctcactgcaacctccgcctcccaggttcaagtgattctcatacctcagcctcctgagtacctaggactaggactacagacgcacgcaacagtgcctggctaatttttgtagttttagtagagacgggagacagagtcacactctgttgtctagactagaatagagtgcagtggcatgatcttggctcactgcaacctctgcctcctgggttcaaacgattctcctgcctcagcctcctaagtagctgggattacaggcacctgctaccacgccaggctaatttttatatttttagtagagatgaggtttcgccatgttggccaggctggcctcgaactcctgtcctcaggtgatgcacctgcctcagccacccacagtgcttggattacaggcatgtgccaccgcgcctggcctgtttttattctttgtagaggcggagacttgctctattgcccaggctgatctcaaactcctggctcaggcgatcctcctgccttggcctcccacagcactgggatgacaggcatgagctaccacgcctggcctgatgtacttgttggtcttgctagttatcatccttctcgctccactgggaccccagattcagagggagggacataagctgtcatgttcacagcacggggctgagcattcagtttgtactcacgatgaaagttttgtccattggatgaatgaatgggtggtgctgaaaccacgcaggcccctatacctggagagttatttgaggcagctggacaccccgagtttccacttgggcacttaccgctccagggagaggccccaggcaatgaccgacacgttctcgggaagccccatgggcagcagcatctctggacggaagacccccgagtttccgacctccacccacttcttcaggcctgcagaggcaggacagaaaagacgggcagtgcgtgttgagtttctgggcactgctggtacaggttctgggtctaggtggtgagcttgggaggtggggtacaggcatggcaatggggggacccaggccaaaccatagtagcctgagacctccctcccaccccagtaccagggcctaccctgaccttggtggtagctgaacacctccatgctgggctctgtgtatgggttgtaggctggcttgaagcggagttgcgtgatacctgcaggaagtggggggcgggcaggagagcaggggtttggaggataatgctggtgatcaacacacctgcccgctgcctcaccaccatggcccacccctgcccccctgctcacccagcttggtgaagaactcccgcagaacgcccatgaggtggcccaaggtgagaccatgatccgccaccacgccctcgatctggtggaactcagccaggtgcgtggcgtccagggtctcattccggaatacgcggtcgatggagaagtacttgaccggagtgaagggcttctaggggtgacaaccgagccaggcccaggtatgggtcagaaggtccctttgacagcaccctctccccactggggcccccgcctgggccaaccgcaccttctgggcaaggcggtagagcgcacgggcgctggctgatgtggtgtgggttcgcagtaggtttttccgggcctcgtccagcttccagttatacttgtaccttcaggagggaaggtgggaagtccatgcaatggcccaggggtccccagcctccttcccttccataccaggtaagtcctgcctcacccctgtgagccgtagccgccctgagagtgggtccgcttgacccgctggacatagtccattgggagctgcagggcctccgctggatctgggcaggacagagcaacatcaggtcagtcaacgagcatttcccacccctttttttttttcagacagggtctcactgttgtccaggctggagtgcggtggtgcaatctgggcttactgcaacctctgcctcccaggttcaagtgattctcgtgcctcagttttctcatttgtgtgtggcttttttgggttctttttttttgagacagagtcttgttcagttggcccagctgaagtacaatggctcaatcttggctcactgcaacctccacctcccaagttcaagcaattctcctgattcagcctcccaagtagctgggattacaggtgcctgccaccacacccgggaaatttttgtatttttagtagagatggggtttcgccatgttggtcagggtggtctcgaactcctgatctcaggtgatccacccacctcggcctcccagtgttgggattacaggcatgagccactgcacctgggctttatttatgtatgtacgtatgtatgtatgtattttgagatggagtcttgctctgttgcccaggctggagtgcagtggcatgatcttggctcactgcaacctcctcctcccaggttcaagcaattctcctgcctcagcctcccaagtagctgggattacagaagtgcaccaccacacacagctaattttttatatttggtagacgtgaggtttcaccatgttggccaggctggtctcgaactcctgacttcaagtgatccgcctgcctgggcctcccaaagtgctgggatcatgccaccgcgcccgacctttttattttttctttttttttgagacggagtctcgctctgtcgcccaggctggagtgcagtggcgcgatctcggctcactgcaacctctgcctcccaggttcgagtgattctcctgcctcagcctcctgaatagatgggactacaggcacacgccaccatgcccagctaatttttgtatttttagtagagatgggatttcaccatgttggccaggatggtctcgatccacccaccgtggcctcccaaagtgctggaattacaggcgtgagccaccgcgcccggcctattttttttttttaaagggacaaaattttttttttttttagacggagtctcgctcagtcacccaggctggagtgcagtggcatgatctcggctaactgccagctccgcctccagggttcacaccattctcctgcctcagcctcccgagtagctgggactacaggcgcccgccactatgcctggctaattgtttttgtatttttggtagagacggggtttcactgtgttatccaggatggtcttgatctcctgacctcgcgatccgcccgtctcagcctcccaaagtgctgggattacaggcgtgagccaccgcgcccggcctaaagagacaaagtcttgctctgttgcttggcctgcagtgcagtgatgcaatcatagctcactgcagcctcaaactcccaggctcaagcaatccttcacctcagcctcccgagtagctgcaactacaggcgtgcactactatgcccagctaattttatttgtacagatgggtctttctatgttgcttaggctgttctcaaactcctgggctcaagcgatcctcctcccttgccctcccaaacagtgggattatacccactgaggctggccaagtttccttctttgtaaaaaggggtaacagtactgcttccagtagttggcaggaagattagaatagtggctagtatgtgatgagtgcttagtaagttttgggtgctatgacaataatgacaagaatgatgttgctcctctggccaggtaagccggcacccaatgacctcaactgccctcttggtcaggaaggccaccccattgtgggaagtcattccatttcagacagtgctaagggcaatgaaagaaagaaatgggacagaagaatgaacactaggggagaagggcttctgtagaactcggggtgagcccgggagtgttaggctggcctgtctctggtgacacgtgagcagagatttgaggctgcagcctgccttgaagatctgggagaaaacagctcttggctaaagacggaacataagcaaaggccctgaggtgtgcacggcctggaatgcccaaagaagacatgggggcaggcagggtgtgggggctcatgcctgtaatctcagcactttgggaggctgaggcaaaactgtttgagatcaggagtttgagaccagcctgggcaacatagtgagaacaaaacaaaacaaaaattcattaattttgggctaggcgtggtgctcacgcctgtaatcctagcactttgggaggctgaggcgggagtatcacttgaggtcaggagttccagaccagcctggccaacatggcaaaccccatctctattaaaaacacaaaaattagccgagcgtggtggcaggtgcctgtaatcccagctactcaggaggctgaggcaggagaatcgcttgaacccaggaggtggaaattgcagtgagctgagatcgtgccactgcactctagcttgggcgacagaatgagactgtctcaaaaaaaaaaaaaaaaaaaaaaaagccaggtgcggtggctcacgcctgtaatcccagcactttgggaggccgaggcagactggagtttgagaccaccctggccaacatggcaaaactccatctctactaaaaatacaaaaattagctgggcatggtggtatgcacctgtaatcccagctactcgggaggctgaggcaggagaatcgcttgaacctgggaggcaaagtttgcagcgagccaagatcgtgccactgcacactccagcttgggcgacagagtgagaccctgtctcaaaaaaaaaaaaaaaaaaaaaaaaaaagactgcaggtggcataatgagaacagagcttgacacatccaacaaggatggactttaatttaactcaattaatttttttagaggtagattcttccctatgttgcctgagctggatttgaactcctgggctcatgcaatcctcctgccttggcctcccaaatagccggactacaggtgcacaccaccatgcccagttctagacctaatttgatcaaatgggatgcccatcctgtaaaggctccgccgtggcctggtgtctctcatgtctcagggaggccctaggggctgacccacctcgaaggaagaaggtgtcgtgctggtcacgggctgggtgctgctggggctggaagagggcgtcaaagttccagaaggagctctcaatgaagttatcagtcggcatctcggtgaacctggtgggagacgcagcctgactgccctgcctgtacccagcagaagcaccaggcaccgcccccagccctgtgctcaccccatctccaggaagatctgtcggaactgggagcggaccttgagcagcgggtgaaggtggccgctgtcggggaggacaccgtgggccaagaagttgtagggcttgaagggccggtcccgccaagagccactgggggaggatgcaagggcctggtaagggctgcccgcccctgccccctgccccagctcccacctgccctgaccctggggttgcctgctacctggagatcatctctgggctcagctctgtctcttgcttggagatgctggtactaaaggcactgcctttgctcacccagtaggtcttcagagtcctgtggccaggggaaggaaggggacgccactgccatctcctcctagaggacttccttgatctcccgtctgatgaggatccccatgctacctaccaagtcactctgctttatttccatcctgacatttatcactacctgaaatcctcctatgtgaccatgctgtatctccctgtattcactcactgattcattcaacacttactgagaacctaatgtgtgccagggtctgttcaaggtgctaagtacacgactgagtgatgatactagggaaagtctagcagatttattctgtgccaggctctgttctgcaaaagtctccccacaagccccggaaagagggcagttttttttatttgtttgtttgttttccttttttgagacagagttttgctcttgttgcctaggctagagtgcaatggcacggtctcagctcactgcatcctccacctcccagattcaagcgattctcctgcctcagcctccagagtagctgggattacaggcacccgccaccacacccggctaagttttgtattttcagtaaagacgaggtttcaccatgttggccaggctggtctcgaactcctgacctcaggtgatttgcccgcctcggcctcccaaagtgctgggattacaggcatgagccatcgtgcctggcccctttttctttgagatgggggtctctctatgttgcccaggctggccttgaattcatggattcaagtgatcctaacacttcagcctcctgagtagctgggattacacacgtgagccacacacttggcccaggctattttatagataaggaaacggagaccagcaaaggccaggtgacttggccaaggtcataaaactagttaagtgacagagcccgaacttcagttaggcatcccagctctagtctcttctctctgccactctgtgtctgctcaaaggggacatttgtcctgtgagaggacggcccctagcccatctaggttccagaagcctgtctggtgtgtgttcattaaactttggaccacactaaggacagtgaaagaaatgaacaagcaccaaagatgaagactaggggcgatgggcttcatggaactcaaggggagaggagggctgtcagggtggcctctttaaggggacacaggagagagacttgatgaggagcctatcttgaagatcagagggaaaacagttctcagcagaagggtcctcatgggcaaagaccccaaggcacgtaggcttgacaactatggcattaagcgagctgggaggaaactggccacacctgtgcttggtgtgggcaagatgtctccctcccaccatgcctccaccatgcttcgcaggtggtgggggcctgagcctgcagggggcacccactcacacttcagccaacagcttcctcttcctcagctcgctcctctccttctcccccagcttctcagcctgtcccccccggaccagctggagccgccgctgcacctcatcctccatgctgtccacctgccaggataaggagtgtgaggggtatgagggccaggggcccatgtgcccgtccacctgccccctgaccagcccgcaggaacgcaccactcggaacacccggggcccgtcagccgcactcttgtccacccgaatccacttgttggacatggccttgctgaagcccactttgccactgggcagtcgctggaaaagagaggctgcagtgagtggggcacgagggccaccttcatcccatcactcactccccattcaccccgcagctcctaccataagctcgctctgggccaggccctctgggggaatgcttcgaaacacacgggcctcatggctgccctcccgggcaatctcctcgccctccgcagtaagctcccagtgcttggtggaccgaagttcagcctcgatgacctagagggaaatgtggggagggtgtccaggcaggggtgaggctcagagccaggcaccccctttctgcagcgctgggtcccaggttgaaagcacagcccttaaagctaggttcacatcccagctatacaactttacagccaagtggtctcaagggaaagacttccccttgctgtgtctccatttcccttatgtaacacaggggtagtaataatgatagtttacacctcccagggtaaagtacaccactaaagatgttacctggcagaagacaaattctgtcggttttgaacctgtgacagattttaatgtgaaaaattaggtgaactgatatgtctccacatttttttgtttgtttttgttttctttgaaagggggtctcaccctgtcactaggctgggtgcagtggtgtgatcatagctcactgcagcctagacctcctgggctcaagcgatccttccgccagtcccgagtagctgggactacaggcatgtgccgccacacctggttaatttttaaattactttttttttttgagacggagtcttgcactgtcgctcaggctagagtgcaatggtgcgatctcggttcactgcaacctctgcctcccgggttcaaatgattctcctgcctcagcctcccgagtagctcggattacaggtgcccaccaccacccccagctaatttttgtatttttagtagagatggggtttcaccatgttggccaggctggtctcaaactcctgacctcgtaatcggccgactccgcctcccaaagtgctaggattacaggcgtgagccgccgtgcccggccctttaaattactttttaaagacagggtgttgttatgttgtccaggctggtctcaaactcctggcctcaagtgattctccttcctcagcctcccaaagtgctggcataatgggcatgagccaccatacccagcctgtctccatgtttaaatgttcacatgtcagtgcccagaatgtcagagacgggccctggaggtccacattacaaacaaaaactgaggttccaggtccagagtcatgaagacaaggacaacaagggtaagtagagtgcacagggcctggctcccacttcattctaatcccaactctgcccttcacttactgtgtgacctcaggaaagttgcttaacctctcagtgactcttctcatccataagagaaaggtgtgatgggttctacctcagatgattttaaggagtagctaaattaatactcagaaagaatatatagtgcctaccacgtgacaaacactgcataaatttttttttttttttttttttgagacggagtctcgctctgtcgcccaggctggagtgcgatctcggctcactgcaacctccacctcccgattcaaaaaattctctgcctcagcctcccaagtagctgggattacgggtgcccaccaacacgcctggctaatttttttttgtatttttagtagagacagggtttcatcatcttggccaggctggtcttgaactcctgacctcgtgatccacccgccttggtctcccaaagtgctgggattacaggtgtgaccactgcacccggcataaattctaattactataattatttttatggctattactgtcattagattgaacctcacctccttatattatttaaccctctgtgacgtatacaaatgtcagatcatattggtcaaggcactgtcaccccacacaacacagctgccatctctcctctgcattgaggactatgggctctgcagcctgagtgcctaatttcaaatctgggctcatcggcctcttctattcacactgattatgttactgaccatcagttgtcacatctgcaaaatgggaataacatggccatcagccaggattatggaatggattggacaaacaagctgagaccaaagtggggcacagaacatgagctctacggataaacagcccagatcctggccccatggatctagccttctgggtggcccacgggcccctcagcatcctacgcctgtgactctgtcactgtccacttgcccaagtcagaaggctggacttcatctgtgcgccccctgccttgtcctgaatcccacgccttccccacctcccccaagcttccttcccatagccagacatcatgccctccagcttggggaagtgccagcttcttctttcatcccttcacctccagtcctgtccatgccaattcttcccaaaggtgatgtggatagcacactcatctgaccggctctagctcctgctatcgcttcccagttccctcatgaggtaaagacctaagaggctttgcaattacagctatgctggtctcccttgccgcctgccatcccccaagatcccggccactgatctctaaagtgctatcactttcctcaacagagaacagactcagccgtcacctgcaccaggccgctctccctgacccccaaggctgggtcagctgtcacagctgggtcccctgttttcccccatcactctggttcttgaagcaccttcctattacgtcgcaacctgcgtgagggcagcaaccgcgcttcctcgtccatcatcgtaccctctacccacgctgaccgtgcctcaataaacgtttattgcatgaggaacatccgtgcgtctgggccctcactcgtcccacttcccgcccgcacatcccggagtggacacatatacagctaccccaaactaggcctgagggaatttggcttggacgtagagcgcccgtggcaaggggactgtaggtgcaagggcaaggcggtccggcatcacgggcccggctcacctcgcccagcgcctgaaggctcttcacggcgcccaccaccgcctggtgctccatgcccagctcagccgccaactcggcgctgtccaggccgccatcagacgcctccagccgccggagcagcagttccgccacctgaccatccgccatgactccttccagtgtgctcagcgtgtccgggccagggtgggcggggggagctgagccaccggaaccggaaccggagtgtgtaccgccatcttgaatgtgtctaactgtagaacagggctcaatgtgtcgtcatcttgagtgtggcgacggagccgcaaaaggtgcatgggactcagttcccacctccaccctggctccatcaatggcgtctggttgaccagaggggtaaaattgattatctcaaggtcagaagcaccgccctgttttgagttttatctagcctcacttcgagcgggctgtgtgaccttggacttccccgtctctgggttacagaaccctctgcccttctggtattctctcttgccctaggagaggcggtgggtggtgggctccagagatggtcattttggcgatgtcagctacttttaaaatttcaaaggaaggctgggtaggtaccgtccctttttatagagggaaaaggaattcacctagtaagtcaaggtggcacctaacctgtgtggactacctcgtatgtggtagtacttagcccagaactgagtacttcacgtgtagtatttcatttatccccaaaactttatgatgtagatactgatataaccgcattacacatgtgagaaaactgaggctcagagggtggtatgacttgcccaaggttctacagagagttggtggaaatgaagtcataaattataaaccttccagatcctcccacccctgtgcgctgagagtaacgtcagtgcaaatactgcatggcctagattagcactgtcctatagaaacacagtgcaaaacatctttcttttttgagacagggtcttgctctgtcacccatgctggagtgcagtggtgcaattatggcttactgcagccttgacttcccaggctctaaggatcctccaaccttaggctcctgagtagctggaactgcaggtgcgcgccaccacacccagctttttttttttttttaagtatgggttttggccatgttgcccaggctggtctcaaactcctaggctcaggttatcctcctgcatcggtctcccaaaatgctggcattagaggcatgacccacctcgcccagccagccagaccctgactcttacaaaaaaaaagatgactaataaaatattttgcactcggccgggcacagtggctcacctctgtaatcccagcactttgggaggccgaggcgggtggatcacctgaggtcgggagtttgagaccagcctgaccaacatggagaaaccccgtctctactaaaaatacaaaattagcagggcgtggtggcgcatgcctgtaatctcagctacttgggaggctgaggcaggagagtcgcttgaacctgggaggcagaggttgtggtgagccgagatcgtgtcattgcactccagcctgggtgacaaggcgaaactccgtctcaaaaaaaaaaaaattgcactttttttcatactaaatcttcaaaatctgatgcgtattttacacttacaacacatctcagttcggaccaaccacatttcaaatggtcagtaatcacatgtgggcagtggtgacttacgtcagcacaggtagattagaatcctagatctgctggccaggctcagtaatcccagcactttgggaggctgaggcgggtgaatcacctgaggtcaggagttcaagaccagcttggccaagatggcgaaaccccatctcctctaaaaacacaaaaattagctgggtgcagtgggggtgcctgtaatcccagctacacgggaagctgaggcaggagaatcacttgagcctggtaggtggagcttgcagtgagcagagatcgcaccactgcactccagcctcggtgacagagcaaggctctgtctcaaaaaaaaaaaaaaaaaaaaaaaagaatcctagatctgttatttatgtcattcaaccagaaggtgtagtctttctgtgcctcagtttcttgctcacatggaggtgattggagcccaggttactgtgagaattaaatgcccacacatattcacactgcttactaaattgagtgtggcccatgttcgaacactcttataagcagaacacatttattccttttacatcacaattattatttgagtctgtaaaatgggattactcatatccccaaatcctgaccctatatgaggttctgtattaaggatacatttctcaaagtcccttctctcctcccattttatgttgattatttatttatttatttagggagtgggtctcactctattgcccaggctggagtgcagtggcatgatcttggctgactgcagcctccacctcctgggctcaagcaatcctctcacctcagcctcccgagtagttgggactacaggtgtgtaccagcaggccaggctaatttgtgttatgtatattatatattatatgctatatataatatacatactattcatatatttatgcattatatgtcatatataatatattacatatgtgtacatatatatattttgtaagaatgaggttccaccatgttgcccaggctggttttgaactgccgggctcaaacaatctgcctgcctcaggttcccaaggtgctaggattataagtgtgaactaccatgtccggcttatttttatttatttttgagacagggtcttgctctgtaacccaggctagagtgtgcagtggcaacaacacagctcacggcagcgtcaacctcctggtctcaagtgatcctcctgcctcagccttctgagtagctgggaacacaggcaggcgccaccacgcctggcaattaaaaaaaatgtttttgtaaaaatggcctcctgctatgttgcccaggctggtcttgaactcctggccttaagcattcctcccatcttggcctgccaaagtgttgggattacaggcgtgagccactgtgccccgtgtgtttttagttaatttccacaagagtccttccttcctctcttctatcatgcagcaagtactttttaagcctgttctgtgccaggtgctgcaggtgacactggaggatgcgaagtgaacaaaacaggcagtgtctaacctcaagtaggaagcgccaagcccacaggtgcctgacacaggaacaggaggaagggtcagcaagaggcctgggatggtccccgggatcctcatgggggggaccagactaggcaatactgaatactacctagaggaagtggtagaaccccaacttcccagttcattctcccccgtctttttttcgagatggagtcttgctctgtcacctgggctggtgggctggagtggagtggcgtgatcttggctcactgcaatctctggctcccaggttcaagcgattctcccacctcagcctcccgagtactgggattagaggcacccgccaccacgcctggctaatttttatttatttatttatttttatttttagtggagatgggttttcaccttgttggccaggctggtctcgaactgacctaaaatgatctgcccgcctcggcctccccaagtgctgggtttacaggcgtgagccactgcgcccggccaccatttcttttttttttttttaaccagagacccttgccaagtcattccccccactccactttattttccttttcattttttccttcctctcttttctgagtcacaaccattagccaggaagcaccccctccccaccctctttcctggatccccctcattccctccttccatagtccactcccgcgctcccaggtccagggcttatttgcccagagtttggaaaacccccagctctccttcctcctttctacagcgtgggggcagggtactggtgccagtcacgtgcctctggcttctgaagaagactctagactggggtcggggggtgggtcctgcccatctccctagcatcttatcgtccctaccatctgtgtcttttttccctccccaaacggaaccccctgccctctcgcctgcctatagccgtttaattgcaaaagccaggccgtttgtgggagaccacagacagcgacccccttcatttaccggttgagaggagggtaaaggggcggctgcaatctgggtaataaccctatccccactccaggagtcacagtcacatcgttaagccttcctcccctcttgtcccaggacagctttaaaaacgttaaaagcatttctgctgggtagcatctggccagggtcgccccctctgtctgctcaggaacgtctgtcacttcagagagcttaagtgacttgccccggtcacacagcagcagtccgataggctgccagggctctaggggcagaaggaggagagggctggcattcttcccaccggcccgcgtgactgtagcaccggggtgcagcgaagccccaagggccccaatccgtgagctctctcccatcccaggcaggggtgggggagcagcagtggggtgctggttctcaaatgcaagataagagctggctaagaaagccttgcccagcccctccacctagagggaatgggagggagagaagctgagggcagggtcccggtcccgcgtggagacagctgcgctcccgcggtttctttaaacgcccagatgggcaacgacgcgcgcggacgagggcggggttgggttcaggtctggtcacatgacctggcctgaggtgctcgcggcccccaccccaccagtgggcgtcccccccacgcgtggtcgaccatcattggtcggtggtgaggccaatagaaatcggccatctgggaacccagcgttccgaggcgcagcctaacatagtgaaccgacgaaggtccaatggaaaaagacggccatgggcatagaccaatgacaaagtggcaggggcgggcccaagggctgggtcaggttggtttgagaggcgggtgggtataaaagtgcaaggcgggcggcggcgtccgtccgtactgcagagccgctgccggagggtcgttttaaagggcccgcgcgttgccgccccctcggcccgccatgctgctatccgtgccgctgctgctcggcctcctcggcctggccgtcgccgagcctgccgtctacttcaaggagcagtttctggacggaggtaacgcctggtcccgcctcgaggccgccccgacgacgcggccggcccccgatcctggatctgcgttgtcgcccgtaattaccgtttagaggtccaacacggtggcctcccgggactagagccgcgggcgatttctcttctgcgtccctggggagcgcggagggcgtagcggcctcccgcggcgggagttagggttagcccgaggatctctgaaggcacccgacgtgtcaaactagaggttggaatggggagtgtcggggatctcctttcctgtccccagcagcttgtggctctcggcagatgtttggtgtggggggggattagcacagccgctctgacctacccctctaatcccccacttagacgggtggacttcccgctggatcgaatccaaacacaagtcagattttggcaaattcgttctcagttccggcaagttctacggtgacgaggagaaagataaaggtaagagcctaggagtgggtgctcagatccgggaggacttcctggcagaagtccttgtctgtacacacacagccgggacagtccccttggaggaggacaggtggaggaagtgggggagtcttctctattctctaagtcgagggtcctcgcgagtcaaggcccaacggtgacctcactaccgtcccgtctcaggtttgcagacaagccaggatgcacgcttttatgctctgtcggccagtttcgagcctttcagcaacaaaggccagacgctggtggtgcagttcacggtgaaacatgagcagaacatcgactgtgggggcggctatgtgaagctgtttcctaatagtttggaccagacagacatgcacggagactcagaatacaacatcatgtttggtgagggcctgcttcctggtgctgatctctgtcccattagttagagggagacccagaccccattgactttcttaataatgattttttttggaaggggagctaaaagaataagtcccagcaacaatttattgcattatgatcgcagatctaggctgttaatttaatttgcgtgtttgtatatagttatttcccaatcttactaatgaggattttgagttctagagcactgattttttttttttctcctttaaacttaaggctccacccacagcccattcaggacagaatcagggtctgagtttctcttctcagccttgacagacccgagttgaagaaccaggtcttccttttataaagaggggtgagagcctcgagatgatgggtagtctctgactcttaactggatctgcttcacacctaggtcccgacatctgtggccctggcaccaagaaggttcatgtcatcttcaactacaagggcaagaacgtgctgatcaacaaggacatccgttgcaaggtgtgcctgggggtggtggcaaatggctgtcatggggagattcagaggtcagcctcattggggggtggcccccgctcaccttcttccttcttcaggatgatgagtttacacacctgtacacactgattgtgcggccagacaacacctatgaggtgaagattgacaacagccaggtggagtccggctccttggaagacgattgggacttcctgccacccaagaagataaaggatcctgatgcttcaaaaccggaagactgggatgagcgggccaagatcgatgatcccacagactccaagcctgaggttggtgtttgggcaggggctctgctctccacattggagggtgtggaagacatctgggccaactctgatctcttcatctaccccccaggactgggacaagcccgagcatatccctgaccctgatgctaagaagcccgaggactgggatgaagagatggacggagagtgggaacccccagtgattcagaaccctgagtacaaggtgagtttggggctctgagcagggctggggctcacagtggggagtgcaccaaccttactcacccttcggtttccttctcccttctgcagggtgagtggaagccccggcagatcgacaacccagattacaagggcacttggatccacccagaaattgacaaccccgagtattctcccgatcccagtatctatgcctatgataactttggcgtgctgggcctggacctctggcaggtgagacttggaggaaaaaggaggatccctggggtacctcaagtgcataagatcacccaagaggaaagggacagggtaggcaccccaggtgagtctgactcaaaaatggtacttcttgtaaacagtacttcctggtctgtccctgtgaagtcctcacagcaacccctttaaggttatacttgctgtgcaccaagtacttccccaagtacttttatgcaaatcaacttctttacccccaaagacctagaaggtggtcaggtaacccagttagttagctggggctgggcacagtggctcacccttacaatcacggtactttgggaggctgagacagaggattgcttgaggccaggagttacacaactcaacctagcttggcaacacagcgaggagaccctatctctacaaaaaaaatttttttttttgagacagagtttcactcttgttgctgaggctggagtgcaatggcacgatctcagctcactgcgccctccgtctcctggtttcaagcgattctcctgcctcagcctccggagtagctgggattacaggcatgtgctactatggatgccaggctaatttttttttttttttttgagaccgtgccttgctctgtcgcccaggctggagtgcagtggtgtgatctctgctcactgcaagctccgcacgaccccccaggttcactccattcttctgcctcagggtcccgagtaactgggactacaggcaccccccaccatgcctggctaatttttttgtatttttttttttagtacagacatggtttcaccgtgttagccaggatggtctccatctcctgacctcatgaaccacccaccttggcctcccaaagtgctgggattacaggcgtgagccacctcacccagcctttttgtagagacagggcttcatgttgcccaggttggtctcgaactcctggcctcaggtcatctgcccgcctcggcctcccaaagtgctgggattacaagggttagccaccatgcctagcctctacaaaaactttaaaaattggcgagatgtcatgcatacctgtagtcccaactaccaaggaagaaggatgatcacttgagcctggggcatcgaggctgcagtgagccatgattatgtcactgcactccagcctcggtgacagagtgagaccctctcaaaaaaagttgggacttggccggacacagtggctcacacctgtaatcccagcactttgggaggccaaggcgggtggatcacaaggtcaggagatggagaccatcctggctaacatggtgaatgaaaccccatctctagtaaaaatacaaaaaatttgcccggtgtggtggtgggcgcctgtagtcccagctactcgggaggctgaggcaaaaggatgacgtgaacccgggaggcggagcttgcagtgagccgagatcatgccattgcactccagcctgggtgatagcgagactctgtcccaaaaaaaaaaaaaaatgctgggactgaatttttgtctgttttggtcactgaaataccttctgtgcccaagacagttctggcatgtagtaggtacctgaaaaatacctgaataagagagtgagaaacaagaaacaggtgcagagaactgaagtcagtggcccaaggtcatgggggtaggaaccacaaagctggggtttgaacctgggcagtacagcacctgagtctctccatcttttttttttttttttttaagacagagtcttgctctgtcacccaggttggagtgcagtggcttgatctcggctcactgcagcctctgccttccaggttcaagtgattctcatgcctcatcctctcgagcagctggaattacaggcatgcgccacgacgctgggcttttttttttttgagatggaatttcactcttgttgcccaggctggagtgcaatgatgcaatctcggcggctcaccacaacctctgcatcccagattcaagcgattctcctgcctcggcctcctgagtagctgggattacagggatgcgccatcacagaccccgggctaattttttttagtagagacagagtttcactatgttgcccaggttggtctcgaactcctggcctcaagtgatccgttcgccatgacctcccaaagtgctgggattacaggcatgagcccgtcccgtccctggctgtctctccatctttccatcttttttttttttttttttttttttggagatggagtctcactctgtcacccaggctggagtgcagtggcacgatcttggctcactgcaagctccgcctcctgggttcacatcattctcctgtctcagcctcccaaatagctgggactacaggcacttgccaccacgcctggctgattttttgtatttttagtagagacggggtttcaccgtgttagccagggtggtctcgatctcctgacctcgtgatccgcccaccttggcctctgggcgaggattacaggcgtgatccacctcacctggcctctccatctttttaactgcagtgtcagcggtgttccttgtcttctctgcagatgcaggcagcagaatatagtggttataggaacacaggtggaaaccctgtccaaagcaagggctatcgggtatcacctctgaccatccttcccattcatcctccaggtcaagtctggcaccatctttgacaacttcctcatcaccaacgatgaggcatacgctgaggagtttggcaacgagacgtggggcgtaacaaaggtgaggcctggtcctggtcctgatgtcgggggcgggcagggctggcagggggcaaggccctgaggtgtgtgctctgcctgcaggcagcagagaaacaaatgaaggacaaacaggacgaggagcagaggcttaaggaggaggaagaagacaagaaacgcaaagaggaggaggaggcagaggacaaggaggatgatgaggacaaagatgaggatgaggaggatgaggaggacaaggaggaagatgaggaggaagatgtccccggccaggccaaggacgagctgtagagaggcctgcctccagggctggactgaggcctgagcgctcctgccgcagagcttgccgcgccaaataatgtctctgtgagactcgagaactttcatttttttccaggctggttcggatttggggtggattttggttttgttcccctcctccactctcccccaccccctccccgccctttttttttttttttttaaactggtattttatctttgattctccttcagccctcacccctggttctcatctttcttgatcaacatcttttcttgcctctgtccccttctctcatctcttagctcccctccaacctggggggcagtggtgtggagaagccacaggcctgagatttcatctgctctccttcctggagcccagaggagggcagcagaagggggtggtgtctccaaccccccagcactgaggaagaacggggctcttctcatttcacccctccctttctcccctgcccccaggactgggccacttctgggtggggcagtgggtcccagattggctcacactgagaatgtaagaactacaaacaaaatttctattaaattaaattttgtgtctcccccctgtgtctccttctggggaaagacagacttaaggaaacccagcagtggtctttttggggggggggggggtttccagtatatctcctttttcagctattgctagagaggttgctgagtgttccacaagattccagggacccttatttaccccataaccctcaaaaccaacgggggaatggctgttgctgctgtaaatactccacatactaacttactgaatccttgaacctaactggtaagttttggttctgcttatttatttatttttaagatagactctcgctctgttgtccaggctggcgtacagtggctcaatctggttcaccctgccccttaaactggcctttttcatgcttctattcctttggggtcctgtggctcagcccaacccctctgggatgcctccaggactggtagatccaagggagaattctgtatttaatgtagtgaggctttgaaagttaacatctttaaatacttctggggtcagattaggtatagtacaacaaagtactcctgcccggagacccaagaatgaaaattgtaggttcattccaaaactccagatccctaaagaatgaatgaggctacaaaatggcaccttgcccccgcttccaacttaaggttttttttctgtgcttggtggcctttcaggtatttctagttttgagtaactttcactttgactgctctacaagggttcctgccaggatacccagaccagaataaaactcatttgggggccgggtacggtggttcacgcctgtaatcccagcactttgggaggccgaggcgggtggatcacctgaggtcaggagttttgagaccagcctggccaacacggtgaaacccaatacaaaaaattatccgggcgtggtggggggtgcctgtaatcccagttactcgggaggctgaggcaggagaattgcatgaacccggaaggcggaagctgcagtgagccgagatcgcgccactgcactccagcctgggtgacagagactgtttgaaagaaaaaattctcatttggaagaggcaaaatgaggtttttacagaagaaatacaaatgtctgtaaccagtacaggtacataaaaactttgttaaaaattcatttgagcgtgagagtggggacaccagagtcactttgcagccccgtgacgtcaccgataacgggcatggcgtcactcaggagaccacgtgtgcgggccgagcaagaagccccgcccacagcgcggagtttagtctgcgcgtacctcgctcgagaacgcgctcgtgcgcatgcccacaaaggccaaggagggagtgcgcaggtcacgtgcgccggtggtcagcgcgcgcattgcctgccccggaagtggtcggcgcgcggcgcggcgcgcctgggcgctaagatggcggcggcgtgagttgcatgttgtgtgaggatcccggggccgccgcgtcgctcgggccccgccatggccgtcaccatcacgctcaaaacgctgcagcagcagaccttcaagatccgcatggagcctgacgagacggtgcgggccgggccggagcccgggggcgggagcgacgggtttcgggggtggggtgggggcggggaggctagaatcccaacgggaggggcagggaggacggcgcgggtcggccctgcccagacccccgacctgcccgactttcctggaccccccgatggtctttggcccagcccccagccgatcgggcggcgctcctgcgccggtctccgggcgaggccccacccccggggcgctggccaggccccggctccaatgtcagcgctctcgcggggcgcgggagtcacaagctcggattcctgggcaggccaagctctccaagactgggctccacgttcccagctttgcaggcgtctccttgggacactggtggtcgaatctaggagtaatgaccaggagatactgagtagtgacgacaacaacgatgttaatgataataaacgggtctcagtctttataattttggtggtccgtgtttgttggccgtttactttttatcagtcaccgagtgttgtagtgttgttttaccgctctgcaaaacgggcttgtcattggggacctctgatcattttacagatgtggaaacctagggattgaggaactttgccacagtcacacacaagtaatggcagagctgggattcaaattcggttctgcctcgtgtgagcgtccacgatataaatattatgctgcctttttagtcaaaagtagaattaggacctaattcaaacatactgaatgtctattgggtacttggcgctttttgcatagtgagggagacattgaagtccactttttgtagaaaaggaaacacacattttttgatccgctcaagtgtttggctttgggcaagttaacctgcctacctgtctgtgcctccgttttctcaaatatcaaatgaaccggtcgcctgctggcttccgcctgtaatcccagcacttagggaggcagagggaagaggagcccttgagcctaggaattcgagatcatcctggcaacacagtgagaccccgttctctacaaaaaaaagaaacaaaaatcaataaataaaatgagaccaattaaacgtatttcataggaaacttaaaaggtatgacacatatacatttacagtagcactattggccaggcacggtggctcatgcctctaatcctgatgatttgggaggcagaggcaggaggattgcttgaggccaggagtttgagaccagccagtctaacatagggagacttatctacaaaaaaaaattatttttaattagtctggagtggtggtgtgtacctttagtcctagctactcccaaggctggacaagagtaccagttgagcccaggagtttgaggctgcagtcagcgatgatcgtgccacatcaatccagcatgggcggcagcgagatcctgcctcttaaaattaaaaaatatcactattaactattagtcacttattgtccaaggtagagtgtagagtgggggactgtcccctttattctgttaattatactttatactacccgaaattacattttcttcacattagtgttctctcattgagagcagggacttacttgtgttgagtttgttctgtgctgtggcctctgtgtctaaaacagcacctggcacataatgggtgtttagtataagtaaatactgtgttgaatggcatgatgattgaatgaattcaaatctagcatgctttagatgctgagaaagcttaaaaaacccagcgtgcttgcctttctgccatcagggctggcagtttctctgtcctaaactagaagggaaaagagaatcttggggtctccagtgactgtctgtaccactccctctaggtgaaggtgctaaaggagaagatagaagctgagaagggtcgtgatgccttccccgtggctggacagaaactcatctatgccggcaagatcttgagtgacgatgtccctatcagggactatcgcatcgatgagaagaactttgtggtcgtcatggtgaccaaggtgggtgacgtgtgctggctgggagggtgggtggacgagctggggagctggcaaagagcctgtgtgcccaggagagattagctgtgaacagggcggggccacagcggagcgggttgttgggtctgatagggttgctgatgccagctccctttttcttgctgttgcagaccaaagccggccagggtacctcagcacccccagaggcctcacccacagctgccccagagtcctctacatccttcccgcctgcccccacctcaggcatgtcccatcccccacctgccgccagagaggacaagagcccatcagaggaatccgcccccacgacgtccccagagtctgtgtcagggtaaggcgggggcagcagtcccagcttgggccctgtcctcctagcacattccagcgtccacataagtggtcccacacacctggagggagggcaagccgccagaagccagggtccgatttctctctcttgaatttgcagctctgttccctcttcaggtagcagcgggcgagaggaagacgcggcctccacgctaggtgggtgggtggtccccagggcagaggtgactgggtgccccagccatcagctgggccttgtctgggtgcgggagggcctgggagctgccctttcctcttcctggtgacctaggctttgctgcttcctccacagtgacgggctctgagtatgagacgatgctgacggagatcatgtccatgggctatgagcgagagcgggtcgtggccgccctgagagccagctacaacaacccccaccgagccgtggagtatctgctcacggtgaggtggggcttccgcctcccggggaggccttgagggagtacccgggcgtcactgccctgatgggcggttgggaaggcaaaacctgccctgaaaagcctttgggtagtgattctagccactaaaggcttcccacaggaggctggatgtgagtgatgggtgggcctctggagggcagggccgaggcctcatctgtgtcctgccagggcatggaggagggtggcagcaggaggtctgtgcattagaactaaacaggacccctgacagggaattcctgggagccccgagccggaacacggttctgtccaggagagccaggtatcggagcagccggccacggaagcaggtgggtgtgcacatgccgcatctgccctccaggtacctgactcacattacactccaccccgcagtgctcctaggagcccggcgtggtgtctgactgcaccccttcctactaccagcaggagagaaccccctggagttcctgcgggaccagccccagttccagaacatgcggcaggtgattcagcagaaccctgcgctgctgcccgccctgctccagcagctgggccaggagaaccctcagcttttacaggtgtggtcccaagggcagagggagctagggcagccaccatttcccttccctgtgggcaccagagtccataacacgtaggaatcgttctaggtccggaaagcaggactaagcacatgcttcccccacgcccctgtgcttcctgtgacctggtgacccccctggtttctcagtcttcccaaccaccttgtaaggtgtgggtgctgtcaacatcacctcccacagaagaagacaccggaaacttagagcagcctgtcattcccagggtcacgcagctggtagtgtgtgtgtctgcctcctgcctcggggtggggtcctgggctggggctctggcttcacatacagatggtgctgcgtaaatgtctgtaaggtggcatgacgtcacccaggacagctgtgccccagttggctctgggacaactctgctcagtgaggctccatcttgcccttgaaggttcacaggaagagtgggggagtggccccctgggtgcaagtaggttcctctgggttctcggtgaagtgcctaccggtcttggctcaggaccctgctgtctgacccttctcctctcacttctcagtcccttgccagctcctcctggtcggtcgtgttcttcatctgcactcagccctccctcatagtgtcctggggccttcagtctgtatgggaacccccaaatctatgtagccagcccaggcctctctgaatgccacactccatggctggcttaattaactctccatcaaagtgctccctagactagacgtctaagacttagaacagacctccccagtcctccccgatctctgcaaggattagcttggggttgcttcagccccaggccctggggatctgctggggtctaccccttgtcctgtctgctcttcccactcagcccctccctgcactccagctctctggtagcctcttcctgggcctctgccactgcatagtcccacagtccacttttcaaccatgaggcagatgactaaaaagcactttcttttctttttttttttgagaggaaatctcgctctgtcgcccaggctggagtgcaatggcgcaatcccggctcactgcaacctccgcctcccgggttcaagcgattcttttgcccccgcccgagtagctgggactacaggcgcccgccaccacgcctgactaattttttgtatttttagtagagatgggatttcaccctgttagccaggatggtctcaatctcctgacctgatgatctgcccgccttggcctcccaaagtgctgcaattacaggcatgagccatcacacctggctgactgaaaagcactttcttctttaatgtgaaaatgatcagatgcatacaatggtagagttatatcagagcttccagatacccaggtagggcacagtggctcatgcctgtaatcccagcactttgggaggctaaggcaggcagaccacttggtcaggagttttagaccagcctggccaacatggcaaaaactcgtctctactataaatacaaaaagtagctgagcatggcggcaggccactgtagtcccagctactcaggaggtggaggcaggagaatcgcttgaacccaggaggcagaaattacagtgaaccgagattgccccactgcactccagcctgggtgacagagtgagagtgtctcaaaaagaacagaaacaaaaatgaacaaatgaacttccagatacctaaatccaacacccagatgagttcactttttttggtttgggggctggtaggtgggaatagagatagggtctatgttgcccaggctggttttgaactcttgggcccaagcagtccctcctgccttgcctcccaaattgttgaggttacaggcgtgagccaccacacccggccaagttcacctttctaaaagatccacagaccacgtcttttcccatgtaactgtcaccaccgtggcttccccctgctctagaaaatgggtctgacttgggccttcctctctggtgtcattgtctgcctcctcccccttcccttgttcgctgttttttgttttttttgttgttgttgtttgtttgtttttgagatggagtttcgctcttgttgcccaggctggagtgcagtggcgtgatctcagctcaccgtaacctccgcctcctgggttcaagagattctcctgcctcagcccccagagtagctgggattacaggcatgtgccaccacgccctgctaattttatatttttagtagagatgggatttctccatgttggtcaggctgctctcaaactcctgacctcaagtgatctgcctgcctcagcctcccaaagtactgggattgcaggcatgaggcaccgtgcccagccccattcactctgttcctgcttctgtttctgagacttcccagatgcatccaccctgggcctttgcacttgctgtttgctttacctggaggaaaccctctgcatctgccatactgcaggcctctccaccagccctcatctgcagttccttcctagccagacacttgcagttgtctggttcatttattggctcactcacttattttttgagagtctcttgcccaggctggagtgcagtggcacagtctcggctccctgcaacctctgcctcccgtgttcaagtgattctcctaccttagccttcttgagtagatgggattacaggcacgtgccatcacacccagctaatttttgtattttagtagagacggagtttcaccatattggccaggctggtctcgaactccaggctggtctagaatcacctgaagtgattataggtgtgaaccactgcagccagcctatttatgtatttatttattcaagacagggtcttgctctgttgcccaggctggagttcagtggcttactgcagcctccgcctcctgggttcagtcttatgcctcagcctgccaagtagctgggattacaggcgtctgccaccacacctggctactttttgtattcttagtagagatgggggttcaccatgttggccaggctggactcgaactcctgacctcaagtgatccacctgcctctgcctcccaaagtgctgggattacaggtgtgagccaccgtgcccggcttatttcttggctcacttaaaagcacatcatcagctcttccagggtagggcttgtgtcgactgctatgttgtgtttggccagaacaggctcctctggatatttgcctgactgaatgaaaaagcaagggctgtgatgacctggggagaggaggggaccagggctgtgaattaccttcccttccccaccctctcctgcagcaaatcagccggcaccaggagcagttcatccagatgctgaacgagccccctggggagctggcggacatctcagatgtggagggggaggtgggcgccataggagaggaggccccgcagatgaactacatccaggtgacgccgcaggagaaagaagctatagagagggtaagaggcctggctgaggggtgactgcaggtgggcaggacccctaccctctcctgctcacacttaacctatcttcccacagttgaaggccctgggcttcccagagagcctggtcatccaggcctatttcgcgtgtgaaaaaaatgagaacttggctgccaacttcctcctgagtcagaactttgatgacgagtgatgccaggaagccaggccaccgaagcccccaccctacccttattccatgaaagttttataaaagaaaaaatatatatatattcatgtttatttaagaaatggaaaaaaaaatcaaaaatcttaaaaaaacaagcaaacagtccagcttcctgtcctcctaaagtggcccctgttcccatctcccgggccagacagctgtccccccgtcctcctccccagcccagcctgctcagagaagctggcaggactgggaggcgacagatgggcccctcttggcctctgtcccagctctctgcagccagacggaaaggcggctgcttgcctctccatcctccgaaaaacccctgaggacccccccccatcctcttctaggatgaggggaagctggagccccaactttgatcctccattggagtggcccaaatctttccatctagggcaagtcctgaaaggcccaaggccccctccccagtctagccttggcctccagcctggagaagggctaacatcagctcattgtcaaggccacccccaccccagaacagaaccgtgtctctgataaaggttttgaagtgaataaagttttaaaaactagccctatggtctgtgcctgctggggctccccgcgcccacctgtctgggtcttggggggctggctgggcacaggcaggcatggtgacgggtgcctggaagggggagaggagtctgtgagtccctgcagattgaggcttccggtgtctcctcccccagtgtgtcatttccaggcagtggaccccagcccaacgttacaaggactgcttctccccggcccccaccatcatcaccacagtctgttttggctatacttccccccccaccagccttgtaattggctaattactggagatgaatgttggtaaacagaagccttcttctcttctgccatctgcttctccattatttgcccattgtacaccccccttttcctcccactgaagccccagttagtcagcagggcctagagtccctgtccccttttgagtacagccaagtgggggattccccagctcttaagtattgggggaggaaccaggggacccagagaggcacaccttgagaggacgcagatctcttcaggggtactgccaggtagcaggctttattgggaagggacaaagcctcaggagctgggtgccccagaggctgctgggtcttgagccacagctgcagccaatgcagcagctcgcgcctccttcttccgtttctgtttttcctccttgaggcgcttgcgctccttcttctctaggtcctggagcagctcctggaagcgggcactccttgggtccacctggtagcccaggagctcctgggcctcagcctgcagtcgggccctcctctccttgtcagcctgggccttctcccagttctcccgctgctgctgctgccagttcacaatcatctgtggcatcttggccatgcactctgcgatgtgctgctccctgcaggggagggagagtgggctgtgacactggcactcagccagggcagagcccacccacccatatctcacccataggcctttgcccacgagcctgcctcctcaactcccccagtagattaactgtcaggaaaagcccttgacaagtgaagaaacaggaagagatgatgagaaagttacctgtgcatgaatttgatcacaagggcatgtcaagccccagtaaaccccaggtgccaaagccaaatcagcatttcactgagctgcctactgagcaagccaagtgccactcccatggataatttcacacctttatttcatagacattgctgagcacttcctgtacagaggccaggcccaattctaggcacaggagtgaaagcaagaaagacatttcccaccaatccttgagtttgtagctaccagtcacagccccatttttttcttttaagttcaggggtacaagtgcaggtttgttacgtaggtaaacttgtgtcatggggtttttttgtacagatttatttcatcactcaggtattaaacctagtacctagaggtcatttttcctgatcctctccctccaccctccaaaaagccctagtgtgtgttgctcccctgtgtgtccatgtgttctcatcatttagctcccacttacaagtgagaacacgttgtatttggttttctgttcctgtgttagtttgctagggatgatagcctccagctcccgtcgtgtccctgcaaaggacatgatctcgttcttttttatgacagcctcatttaaggattagaaaagtaaaagaattaagccctataatggtcatctggctgaggaggggcagaaacaggagtccctgctccatgattccctgcctgggtgatcagacgcatgacttcacttcaccaagcctcagtttcctcatctctaaaattagggcaatcccttcttcctcttaaggctattaggaaaacaagaagattaaacaccaggaacacacttgacctacccccttcacgctccaggatgtggcattatctataagagatgcccctggtctggcccgacgcggtggctcacgcctgtaatcctagcactttgggaggccgaggcagatggatcacctgaggtcaggagtttgagaccagcctggccaatatggcgaaaccccatctctactaaaaatacaaaaaatgagccgggtgtggtggtgggcgcttgtaatcccagctactcgggaggctgaagcaggagaatctcttgatcctgggaggcagaggttgcagtgagctgagattgcactccagcctgggcaacaagagcaaaactctgcctcaaaacaacaacaacaacaacaacaaaaagatgcccctggtccttcagacctgcctctgtatctgacctctgccctcttggttccaggacccatcaccttcctgccctcaccttttccccagccacactggcttcctggctgttctttaaggcatatcgtatctcagggcatttgccccagctgttccctttaccagaaactttctacccaagagatcgccccatagctaagtctggttattcaggtctttgcttaaacatcacctcctcagagaggcctgaggcttcccaaaccaaagctgccctcaggcacacactcttcactcttttaccttcctactagtcggctgtcaccattggtattatcttgcctgtcagctgtcgccatctgatattaagggcccttttggggcctgcctcggcctcccaaataactgggattacaggcacgagccaccgcccccggcctgggacagggtcttgcacacggtatgcgctcagtaaagacttggtggtgatggccggacgtgatggctcacacctgtaatcccggcactttgggaggctgaggcaggtggatcacttgaagtaaggagtttgagaccagcctggccaacatggtggaaccccgtctctactaaaactacaaaaatttgccgggcgtggtggtgcacgcctgtaatcccagctacaccggaggctaaggcgggagaatcgcttgaaccggggaggcggaggttgcagtgagccaagatcttgcgactgcactccagcctgggcaacagagcgagactcttgtctccaaaaaacaaacaaacaaacaaacaaaacttgctgatgaatgactaaatggacgttattctgagtttgttttgcggccaggtgagcgtatacataaatctacaacatgcagatgctgcgacgtgaccccgaaggggtaggcacggtttggggcccagttcgcccacggggcacagagggcagccccgcgtctgcctgcacgcacgcacctctcccgacgcttctgctcttcggccagctgcttcacccgcagcgactcctgcatggtcgccaggctcgggtaccattcgcgttcttcggcctccagctcccgcagctgctccggcgacggccataacgaaccggggaccaccccggaggcggcgccgtaacgcgcgaactgcttagccgcgtagcgcggtcccagctgccaccgcggggtcaggaggtcctcggggtctggccaccggggtcccggcctgcggcgcgggggcggccgcgcccggtagccacgggaacccggggccagggtcgccgccacacctagtaggctgcgtgcctgtcgcacggacgccgccatcttggctgtgcggggtcctcacaggcccgccgggctgtccatgcccggtgcctgagcgcgaggcccggtgtgggccagggcagggcgaggggtgtccctgctgcctcagttcgggggagggcggcgaaggggatagtatgggttttatacgtttccaagtataactttaaattttagttaagcagttactgattaaagtcatttttaattttcactttttttcttctcctttctgcacactgacacttaaaaatacatatttttgtcgggcgcggtggctcacgcctgtaatctcagcactttgggaggccgaggcgggcggatcacctgaggtcgcgagttcgagaccagtcttttttttttttttttttcgagacagagtctcgctctgtcgcccaggctggagggtaacggcgtgatctcgggtcactgtaacctccgccttccgggaggagaggagaaaccccgtctctactaaaaatacaaaattagccgggcatggtggcgcatgcctgtagtcccagctccgcgggaggctgaggcaggagaatcgcttgaacccgggaggcggaggttggggtgggccgagatcgtgccattgcattccagcctgggtaacaagagcgaaactccgtctaaaaaattaataaataaaaataaatacatacatgcatacacacacacacacatatacatatatatatacgctcacctggctacaaatatatatttgtgtatttttttctaagtgttcagtgttctttgggtaaaaattgtatttttgttttttgcatatcagaaaccatactgttttattcatccatgtgtcttctgtgcacacagtagccctccaatgaataatctgaaatcatgttgaatgaacacattgaaaaatcaaaaataagaggctgtggcagggccactgatatggtttggctctgtgtccccaaccaaatctcatcctgaattataatccccatgtgtccagggagggacctgtaatccccacatgtcggggaagggaggtggttggatcacgggggtggtttcccccatgctattcttttttttttttttttgccttcaaaaagtttattttattttattttattattattatactttaagttttagggtacttgtgcacaacgtgcaggtttgttacatatgtatacatgtgccatgttggtgtgctgcacccattaactcgtcatttagcattaggtatatctcctaatgctatccctcccccctccccccaccccacaacagtccccggtgtgtgatgttccctttcctgtgtccatgtggtctcattgttcacttcccacctatgagtgagaacatgcggtgtttggttttttgtccttgagatagtttgctgagaatgatggtttccagtttcatccatgtccctacaaaggacacgaactcatcattttttatggctgcgtaaaaattatatttttaactttacttttatacatttaaactagcatttattaggctgggcttggtggctcacgcctgtaatcccagtactttgggaggctgaagcgggcggatcacttgaggtcaggagttggagaccagcctgaccaacatggcaaaaccttgtctctactaaaaatacaaaaattacctgggcgtggtggtgggcgcctgtaatcccaactactcaggaggctgaggcaggagaatcgcttgaacctgggaggtggaggttgcaatgagctgagatcgtgccattgcactctacccagggtgacagagtgagactctgtctgaacaaacaaacagacaaaaagcccactagcatttattatttttttaatgtaaatgtggctgaacgcggtggttcacacctgtaatcccagcactttgggaggctgaggcaggtatcactgaggtcaggagttcgagaccagcctggccaacatggtgaaaccccgtctttactaaaaatacaaaaattggctgggtgcggtggtgcacacctgtaatcccaactactcgagaagctaaggcaggagaatcgcttgaacccgggaggcggaggttgcagtgagctgagattacaccactgctctccagcctgggcaacagatcgagactctgtctcaaaataaataaataaataaataaataattctgtcacatgctgtgacatggatgaaccttgaggacattaggctaagtgaaagaagccagtcacaaaaggacaaatattgtatgattccacttatatgaggtaactagagtagtcaaattcatagagacagaaagtagattaggagttccaggggttgggggtggaggagtgggagttattgcttataatgtataatatattttatattgtaaaatatacaaaataaataaaacgaatttgtgttttgttttgttttgagtcagagtctcgctctgtctcccaggtgagagtacagtgatgcaatcttggctcactgcaacctctgcctcccagattcaagggattttcgagcctctgcctcctaagtagctgggaccacaggcgcaagccaccaagcctggctgattttcatattttactagagacggggtttcaccacgttggtaaggctggtctcaaactcctgaccttaagtgatctgcccacttcagcctcccaaagtgctaggattacaggtgtgagccaccatgactggccacgttttttttgttttttttttttgtttgtttttttttgagatggagtttagctctgttgcccaagctggagtgcagtggtgcgatctccgctcactgcaagctccgcctccggggttcacgccattctcctgcctcagcctcccgagtagctgggactacaggcgcccgccaccacgcccggctaatttttttgcatttttagtagagagggggtttcaccgtgttagccaggatggtctcgatcgcctgaccttgtgatccacccgcctcggcctcccaaagtgctgggattacaggcatgagccaccgcgcctggcctgttgtttttgtttttaatcacacacgcacaccttctctacccccacaaaaaataactgcagttttctcaagacatgaatgttcatagcaacaccacatatatatgtcattaccaagctggaaatagctcacacccaatgtccatctgaagtagaatggacacctaaattatgctgtttcagccaatggaatactacacaggaatgaaagagcaaatattacatcttctcacagaagatggatgatgcttataagcataatgtgcaacaaaggaagaggacctatatgattgctttttaaattttatttttttgagacagggtattgctctgttgcccaggctagagtgccctggctcggtcatagctcactgcagccttgaattcctgggctcaagcaatcctcccgcctcagtctcttcagtagcaagactataggcatgaaccgctactcccacctacattttaaatttttttgtagagacggggtttctctatgttacccaggttggtcttgaactcctgggctcacctcccctcccctcccctcctttcttgacagggtctcactgttgcccaggctggagtacactggcatatcactgcagcctcaatctcctggtctcaagtggtcctcccacctcgggctcctaagtagctggaacttcaggcactcaccatcaagcctggctaatttttgtattatttgtagagatagagtctcaatatgttgcccagggtggtcctgaattctgggacccaagttatcctcccaccttggcctcccaaaatgttgggattacaggtatgagctaccatgcctgacctcagaattttttcatcttgcaaacctgtaactctatacactcactccccagtttccctttcgcccagtccctggcagtcactattcctttttttttttttttttttgagacggatggagtctcgctccgttgcccaggctggagtgcagtggcgcgatctcggctcactgcaagctccgcctcccgggttcacgccattctcctgcctcagcctcccgagtagctgggactccaggcacccgccaccacacccggctaatttgtttgtatttttggtagagacagggtttcaccgtgttagccaggatggtctcgatcccctgacctcgcgatctgcccgtctcggcctcccaaagtgctgggattacaggcgtgagcaccgcgcccggcctggcagtcactattctaccttgtttctatgaatttgactactctaggtacctcatataagtcgaatcatacggtacttgtccttttgtaactggcttattttttattttgagacagagtcttgctctgttgtccaggctgaagtgcagtggcacaattattataactggctgcagaatcgacctcctggactcaagtgatactcccacctcagcctctcaagtagctgaaactacaggtgctcacctggctaattttttttttttttttttttttttttttgaaacagggtttcgctctgtcgcccaagctagagtgcaggggcgccatctcggctcactacaagctccgccgcccgggttcacgccattcttctgcctcagcctcccgagtagctgggactacaggcgcccgccaccacgcccggctaattttttgtatttttagtagagacggggtttcaccatgttagccaggttggtctcgatctcctgacctcgtgatcctcctgcctcggcctcccaaagtgctgggattacaggcgtgagccaccacacctggcctttttttttttttttttgagacagagtacttactctgttgcccaggctggagcgcagtggcatgatctcggctcactgcaacctctgcctcccaggctcaagcaattctcatgcctcagccacctgagtagctgggactacaggtgtaaaccactgcacctggggctggctgattttaattagtataatatcctaaaatttctttctttctttctttctttctttctttctttctttctttctttctgtctgtctgtctgtctttctttctttctgtctgtctttctttctttctttctgtctttctttctttctttctctttctttctttccttctcttctcttctctccttccttccttcctttctttctttccttccttcctttctctttctttcgacattctctctctatcgcccaggctggagtgcagtggcactgtcttggatcactgcaacccccacctccccggttcaagcaattcttgtgcctcagcctcccgagtagctgggattacaggtgcccgccaccacacctggctaatttttgtatttttcgaggtttcaccatgttggccaggctgatctcaaactcctgacctcaagtgatctgcccacctcagcctcccaaagtgctgggattacaggtgtgagccaccgtgcttggcatatcctaaagtttcatccatgttgtagcacgtgtccgaatttctttttttcttttttttgtatttttagtagagacggggtttccccgcattagccaggatggtctcaatctcctgacctcatgatccgcccgcctcagcctcccaaagtgctgggattacaggcttgagccaccgcacccggccaacgtgtcagtatttctttcctagcctgggcaacactgtgaaaccctgtctctccaaaaaatacaaaaattagctggctatggtggtgcatccctgtagtccctcctacttgggaggctgaggtgggaggtcaattgagcctgggcggtgaagtctgcagtgagctgtgagtatgtcagtgcactccagactgggtgacagagcgagactgtctcaaaaaaaattttttttttcctttttaaggctgaatgctattccattgtatgaatggaccacattttttttttcccaattgcagatgtcaggctgaaagaatggaccacattttaggctgggcacgatggctcatgcctgtaatcccagcactttgggaggccgaggcaggcggattacaaggtcaggagttcgagaacagcctgtggtgaaacgctgtctctactaaaaagacaaaaattagccgagcgtggtggtgcgtgcctgtaatcccagctactcaggaggctgaggcaggagaatcgcctgaacccaggaggtggaggttgcagtgagccaagatagcgccactgcactctagcctgtgtgacagagtgagacttcgtctcgaaaaaaaagaaaaaaaaagcggccaggcacggtggctcacgcctgtaatcccagcactttgggaggccgagacaggcagatc

SEQ ID NO: 298 - DNA, 1522 bp, Homo sapiens
caggtgtggattccgccggtgaaggctgaaggcagctaccttaaagatgccgggatccgcagcgaagggctcggagttgtcagagaggatcgagagcttcgtggagaccctgaagcggggtggtgggccgcgcagctccgaggaaatggctcgggagaccctagggttgctgcgccagatcatcacggaccaccgctggagcaacgcgggggagctgatggagctgatccgcagagagggcaggaggatgacggccgctcagccctccgagaccaccgtgggcaacatggtgcggagagtgctcaagattatccgggaggagtatggcagactccatggacgcagcgacgagagtgatcagcaggagtccctgcacaaactgttgacatccggaggcctaaacgaggatttcagcttccattatgcccaactccagtccaacatcattgaggcgattaatgagctgctagtggagctggaagggacaatggagaacattgcagcccaggctctggagcacattcactccaatgaggtgatcatgaccattggcttctcccgaacagtagaggccttcctcaaagaggctgcccgaaagaggaaattccatgtcattgtagcagagtgtgctcctttctgccagggtcatgaaatggctgtgaatttgtccaaagcaggtattgagacaactgtcatgactgatgctgccatttttgccgttatgtcaagagtcaacaaggtgatcattggcacgaagaccatcctggccaatggggccctgagagctgtgacaggaactcacactctggcactggcagcaaaacaccattccaccccactcatcgtctgtgcacctatgttcaaactttctccacagttccccaatgaagaagactcatttcataagtttgtggctcctgaagaagtcctgccattcacagaaggggacattctggagaaggtcagcgtgcattgccctgtgtttgactacgttcccccagagctcattaccctctttatctccaacattggtgggaatgcaccttcctacatctaccgcctgatgagtgaactctaccatcctgatgatcatgttttatgaccgaccacacgtgtcctaagcagattgcttaggcagatacagaatgaagaggagacttgagtgttgctgctgaagcacatccttgcaatgtgggagtgcacaggagtccacctaaaaaaaaaatccttgatactgttgcctgcctttttagtcaccccgtaacaagggcacacatccagcactgtgtcttgcctttcagatcttaacagagcagcagggcttaacttgttgattttggagcctcttagtgacctggttgcgtctgtgtcaggaacttaaactttctggttcagtagtgtgttaaacataacactgaataccttactgggatacagatttttgctcagaaatggctatgacactttttctaggctctaccaataaaagccacttgaaggttcaaaaaaaaaaaaaaaaaaa

SEQ ID NO: 299 - DNA, 2481 bp, Homo sapiens
ggcacgagcagaatccaggggcccggggctgtagattccttgacaaggatatcctagcggcgaaacaacaccgtactgggagtcagaacgtctgggttctagtcttgactgccattaactagcggtatgacattggagaagcttttttgacccttctggatttccgtttccttttctgtaaaatgaggagcttggaagatccggaaaatgaggcccataggaaacaagtgacttgctgagtccagataacactgactgtcagagagaaacatgaaccagaagctactgaagttggagaacttgctacgatttcacactatttataggcaactgcacagtctgtgtcaaagaagagcattaagacagtggaggcatgggttttcatctgcttaccctgtgtggacagctcaactgtgtgcctggccctggccaacagatgtgctcaatggggctgctttatctcagtataggcttctagtaacaaaaaaggaagaaggaccatggaaatctcagttatcttcaacaaaatctaaaaaggtggtagaagtatggattggaatgactattgaggaactggccagggcaatggaaaaaaacacagattatgtatatgaagctttattgaacactgatattgacatagattcactggaagcagactcacatttagatgaagtctggatcaaagaagtgataacgaaggcagggatgaagttaaagtggagtaaattaaaacaggacaaagtcagaaaaaataaagatgctgtaagaaggccccaggcagatccagctttattaaccccaaggtccccagttgttactataatgggccatgttgatcacgggaaaacgacattacttgacaaatttcgaaaaactcaagtggcagcagtggaaactggaggcatcactcagcacattggtgcctttcttgtctctctgccttctggggaaaagataacttttcttgatactccaggacatgctgctttctcagcaatgagagccagaggtgctcaggtcactgacattgtcgtattggttgtagctgcagatgatggagtgatgaaacaaactgtagaatctattcagcatgccaaagatgcacaggttcctattatccttgccgtaaataaatgtgacaaagctgaggctgatcctgagaaagtgaaaaaagagctgctggcttacgatgtggtatgtgaagattatggaggtgatgttcaagcagtgcctgtctccgcacttacgggcgataatctgatggctttggcagaagcaacagttgctcttgcagaaatgttagaattgaaagcagatcccaatggtccagtggaaggaacagtaatagagtctttcacagacaaaggaagaggtcttgttactacagctataattcaaagaggaactttaagaaaaggctctgttctggttgctggaaaatgttgggcaaaagtacgcttaatgtttgatgaaaatggaaaaacaattgatgaggcctatcccagcatgccagtgggaattacaggctggagagaccttccttctgcaggagaagaaattcttgaagtagaatctgagccaagggcacgtgaagttgttgactggaggaaatatgaacaagaacaggagaaaggtcaggaggatctgaaaataatagaagaaaagcgaaaggaacacaaagaagcacatcagaaagcccgtgagaagtatggccatctactgtggaagaagagatcaattctacggtttttagaaagaaaagaacaaatacccttaaagccaaaagagaaaagggaaagagattcaaatgtactttctgtgattattaaaggtgatgttgatggttctgttgaggccattttgaacattatagatacctatgatgcttcacacgagtgtgaactagaattagtacattttggagtgggtgatataagtgcaaatgatgttaaccttgctgaaacatttgatggtgttatatatggctttaatgtgaatgcaggcaatgttatccaacagtcagctgcaaaaaaaggagtaaaaattaaacttcacaaaataatttaccgtcttgttgaagatttgcaagaggaactgagcagcagattaccctgtgctgtggaagagcacccagtaggtgaggcatctatactagctaccttctctgtaacagaagggaagaaaaaagttcctgtggctggctgcagagtccaaaagggacagttagaaaaacaaaaaaaatttaaactaacccgtaatggacatgtaatttggaagggctcattaacctcattgaaacaccataaagatgacatttcaattgtcaaaacgggaatggattgtggtctcagtttagatgaagacaatatggaatttcaagtgggagacagaattgtttgttatgaagaaaagcaaattcaagccaagacttcttgggatccaggattttaaaattacattaaaaatgtaaataactca

SEQ ID NO: 300 - DNA, 1509 bp, Homo sapiens
taacattaaagagaaaatgctgctatccgtgacttccaggcccgggatttcgacttttggctacaatagaaacaacaagaagccatatgtgtcactggctcagcagatggcaccacctagcccaagcaacagtacacctaacagcagtagtggaagcaatggaaatgaccagctgagcaaaaccaacctatacatccgaggattgcaaccaggcactactgaccaagatcttgtcaagctgtgtcagccatatggcaagattgtttccactaaggccatactggacaagaccacaaacaaatgtaaaggctatggctttgtagattttgacagcccttcagcagcacagaaagctgtaacagcactgaaggccagcggtgtacaggcacagatggcaaagcaacaggaacaggaccccacaaatttatacatctcaaacctcccactgtcaatggatgagcaggaactggaggggatgctgaagccctttggccaggttatctccacccgtatccttcgagataccagtgggaccagcagaggtgttggctttgcaaggatggagtccacagagaagtgtgaagccatcatcacccactttaatggaaaatatattaagacaccccctggagtaccagccccatccgatcccttgctttgcaaatttgctgatggcgggccaaagaaacgacagaaccaaggaaaatttgtgcaaaatggacgggcttggccaaggaatgcagacatgggcgtcatggccttgacctatgaccccaccacagctcttcagaatgggttttacccagccccctataacatcacccccaacaggatgcttgctcagtctgcactctccccatacctttcctctcctgtgtcttcgtatcagagagtgactcagacatctcctctacaagtacctaacccatcctggatgcaccaccattcatacctcatgcagccttcaggttcagttctgacaccagggatggaccatcccatttctctccagcctgcctccatgatgggaccccttacccagcaactgggccatctctccctcagcagcacaggcacgtatatgccgacggctgcagctatgcaaggagcttacatctcccagtacacccctgtgccttcttccagtgtttcagtcgaggagagcagcggccaacagaaccaagtggcagtggacgcaccctcagagcatggggtctattctttccagttcaacaagtaacagtgggattcccctccccatctttactgaatagaaatgaattcttggagatactcatgctcccagattccagagggttaaccaggaatggagaccatccgtcggccctgctaaggactaacacttagccatcgtttttcacaggcctgggcctggaaaaagaaatctctacgttcctgccctttactattgctgatggagcctgggggaaccatcactttttttgtgtgctacattcaaggagatcaaaaaaacttttcttcttttgc

SEQ ID NO: 301 - DNA, 2153 bp, Homo sapiens
agtacagctccggccgccgcgccgcctggctttcgtattcgttgttctcggcgggctgtggggcctccgcgccgcggccgttagtcatgtcggattctggaagttacggtcagtctgggggtgagcagcaaagttattctacctatggaaatccaggcagccaaggctatggacaagcatcacaaagctattctggctatgggcaaacgactgattcctcttatggacagaactacagcggttactccagttatggacaaagtcagtcaggttattcacagtcctatggtggttatgagaatcaaaagcagagctcatatagccagcaaccatataataaccagggacagcagcaaaacatggaatcatcaggaagccaaggtggaagagcaccttcctatgaccagccagactatggtcaacaagattcatatgaccagcagtcaggctatgatcaacatcaaggctcatatgatgagcagtcaaattatgatcagcagcatgattcctatagtcaaaaccagcagtcctatcattcacaaagggaaaactacagccaccacacacaagatgaccgtcgtgatgtgagtaggtatggagaagataatagaggatatggcgggtcacagggaggaggtagagggcgtgggggatatgacaaggatggaagaggtcctatgacaggatcaagtggtggtgaccgcggtggcttcaaaaattttggtggtcacagggattatggacccagaacagatgctgattcagaatctgataattcagataacaacacaatctttgtgcaaggacttggggagggtgtgtctacagatcaagttggggagttctttaaacaaataggaattatcaagacaaataagaagaccggaaaaccaatgataaatctttatacagacaaggacacaggaaagccaaagggggaggcaacagtgtcatttgatgaccctccttcagctaaggcagccattgactggtttgatggaaaagaattccatggcaacatcattaaagtgtcctttgccactagaagacctgaattcatgagaggaggtggaagtggaggtgggcggcgaggccgtggaggatatagaggtcgtggaggctttcaagggagaggtggagaccccaaaagtggggattgggtttgccctaatccgtcatgcggaaatatgaactttgctcgaaggaattcctgcaatcagtgcaatgagcctagaccagaggactctcgtccctcaggaggagatttccgggggagaggctacggtggagagaggggctacagaggtcgtgggggcagaggtggagaccgaggcggctatggtggagacagaagtgggggtggctatggtggggacagaagcagcggtggtggctacagcggagatagaagtgggggcggctatggtggagacagaagtgggggtggctatggtggggacagaggcggcggctatggtggggacagaggaggcggctatggaggagaccgaggaggtggctatggaggagatcgaggtggctatggaggagaccgaggtggaggctatggtggagaccgaggaggctatggaggagatcgaggaggttacggaggagatcgaggaggttatggaggagatcgaggaggctatggaggagacagaagccgggggggctatggaggagaccgtggtggtggcagtggctacggtggagaccgaagtggaggctatggaggagacaggagtggtggcggctatggaggagaccgaggtgggggctacggaggagaccgaggtggctatggaggcaaaatgggaggaagaaacgactacagaaatgatcagcgcaaccgaccatactgatgactgtttgaatgttcctttgtctctgacatgatccatagtgaaattgccagagttttgcctgctgctttcctcgtggcctcttcttgggtagtgaaattaagtgacatttggatttttatttgggtgggagggctgggacagtttttcttctagaaatgtctgttgagatttccccctttagtttccaaccttctccccaacccttggagctaaatgcgttgtaaaatattgccaaaatgaaaagtgttttgtaatactgcaataaaaggctgcttgtttttgtgg

SEQ ID NO: 302 - DNA, 661 bp, Homo sapiens
cggccgcggatccattgtggtccgcttctctgcactatgtcgggtggcctcctgaaggcgctgcgcagcgactcctacgtggagctgagccagtaccgggaccagcacttccggggtgacaatgaagaacaagaaaaattactgaagaaaagctgtacgttatatgttggaaatctttctttttacacaactgaagaacaaatctatgaactcttcagcaaaagtggtgacataaagaaaatcattatgggtctggataaaatgaagaaaacagcatgtggattctgttttgtggaatattactcacgcgcagatgcggaaaactccatgcggtacataaatgggacgcgtctggatgaccgaatcattcgcacagactgggacgcaggctttaaggagggcaggcaatacggccgtgggcgatctgggggccaggttcgggatgagtatcggcaggactacgatgctgggagaggaggctatggaaaactggcacagaaccagtgagtggtgagagctctgtcagtgacaaacactcctttggcctgttgaatttgctgaagaacatcacctaaagtctgcacacgagcccatttttaccaagatttgagtcagtgtctttactgagctggaagcctctgaaagttattaaaggcagatc

SEQ ID NO: 303 - DNA, 1569 bp, Homo sapiens
atgctctacgagaagttcagcccggccgggcccatcctctccatccgggtctgcagggacatgatcacccgccgctccttgggctacgcgtatgtgaacttccagcagccggcggacgcggagcgtgctttggacaccatgaattttgatgttataaagggcaagccagtacgcatcatgtggtctcagcgtgatccatcacttcgcaaaagtggagtaggcaacatattcattaaaaatctggacaaatccattgataataaagcactgtatgatacattttctgcttttggtaacatcctttcatgtaaggtggtttgtgatgaaaatggttccaagggctatggatttgtacactttgagacgcaggaagcagctgaaagagctattgaaaaaatgaatggaatgctcctaaatgatcgcaaagtatttgttggacgatttaagtctcgtaaagaacgagaagctgaacttggagctagggcaaaagaattcaccaatgtttacatcaagaattttggagaagacatggatgatgagcgccttaaggatctctttggcaagtttgggcctgccttaagtgtgaaagtaatgactgatgaaagtggaaaatccaaaggatttggatttgtaagctttgaaaggcatgaagatgcacagaaagctgtggatgagatgaacggaaaggagctcaatggaaaacaaatttatgttggtcgagctcagaaaaaggtggaacggcagacggaacttaagcgcaaatttgaacagatgaaacaagataggatcaccagataccagggtgttaatctttatgtgaaaaatcttgatgatggtattgatgatgaacgtctccggaaagagttttctccatttggtacaatcactagtgcaaaggttatgatggagggtggtcgcagcaaagggtttggttttgtatgtttctcctccccagaagaagccactaaagcagttacagaaatgaacggtagaattgtggccacaaagccattgtatgtagctttagctcagcgcaaagaagagcgccaggctcacctcactaaccagtatatgcagagaatggcaagtgtacgagctgttcccaaccctgtaatcaacccctaccagccagcacctccttcaggttacttcatcgcagctatcccacagactcagaaccgtgctgcatactatcctcctagccaaattgctcaactaagaccaagtcctcgctggactgctcagggtgccagacctcatcctgctgttcatgtacaaggtcaggaacctttgactgcttccatgttggcatctgcccctcctcaagagcaaaagcaaatgttgggtgaacggctgtttcctcttattcaagccatgcaccctactcttgctggtaaaatcactggcatgttgttggagattgataattcagaacttcttcatatgctcgagtctccagagtcactccgttctaaggttgatgaagctgtagctgtactacaagcccaccaagctaaagaggctgcccagaaagcagttaacagtgccaccggtgttccaactgtttaa

SEQ ID NO: 304 - DNA, 2092 bp, Homo sapiens
ggccttcgtcgaagatgtctccgacgccgccgctcttcagtttgcccgaagcgcggacgcggtttacgaagtctaccagagaggccttgaacaacaaaaacatcaagccattgttaagtaccttcagccaggtacctggcagtgaaaatgaaaaaaaatgtacccttgaccaagctttcagaggtattctagaagaagaaattataaatcattcatcatgtgaaaacgttttagctattatttctcttgctattgggggagtaactgaaggtatttgtaccgcatctacaccttttgtattgttgggagatgttttggattgtcttcctttggatcagtgtgacacaatattcacttttgtcgaaaaaaatgttgctacttggaaatcaaataccttctatgctgctgggaaaaattacttactacgtatgtgcaatgatctcctaagaagattgtctaaatcccagaatacagtcttctgtggacggattcagctctttttggccaggcttttccctctgtctgagaaatcaggtcttaacttgcagagtcagtttaatctggaaaatgtcactgttttcaatacaaatgagcaggaaagcaccctgggtcagaagcacactgaagatagagaagaaggaatggatgtagaagaaggcgaaatgggagatgaggaagctccaacaacgtgctctattccaattgattacaacctgtatcgaaaattctggtcacttcaggattacttcaggaaccctgtgcaatgctatgagaagatttcatggaaaacttttctcaagtattctgaagaagttttagctgtttttaagagttataaattagatgatactcaggcctcaagaaaaaagatggaagaattgaaaacaggaggagaacatgtatattttgcaaaatttttaacaagtgaaaagctgatggatttacaactgagtgacagtaactttcgtcgacacatcctgttgcagtatctcattttattccaatatctcaaggggcaggtcaaattcaaaagttcaaactatgttttaactgatgagcaatcactttggattgaagatactacaaaatcagtttatcaactactatctgaaaacccccccgatggagaaagattttcaaagatggtagagcatatattaaacactgaagaaaactggaactcgtggaaaaatgaaggttgcccaagttttgtgaaagaaagaacatcagataccaaacctacgagaataattcggaagagaacagcacccgaggacttcctagggaaaggacccaccaaaaaaattctgacgggaaatgaggagttaacaaggctttggaatctttgccctgataatatggaagcctgtaaatcagagacaagggaacacatgcccactttggaggaattctttgaagaagccattgaacaggcagaccctgaaaatatggcggaaaatgaatataaggctatgaacaattcaaattatggttggagagccctgaaactattagcacggagaagccctcacttcttccagccaaccaaccagcagtttaaaagtttacaagaatatcttgaaaatatggtaataaagctagccaaggaattaccgcctccttctgaagaaataaaaacaggtgaggatgaagatgaggaagataatgatgctctactgaaggaaaatgaaagtcctgatgttcggcgagacaaacctgtaacaggagaacaaatagaggtatttgccaacaagctgggtgaacaatggaagattctggctccctacttggaaatgaaagactcagaaattaggcagattgagtgtgacagtgaagacatgaagatgagagctaagcagctcctggttgcctggcaagatcaagagggagttcatgcaacacctgagaatctgattaatgcactgaataagtctggattaagtgaccttgcagaaagtctaactaatgacaatgagacaaatagttagcttcttttttttttctttttattaaaactgtgatagattttgttaccaagcagcatttgataagaggtccactggttttggtaaacaataaacatttttataac

SEQ ID NO: 305 - DNA, 1525 bp, Homo sapiens
attcggcatgagggggtcacgtggtggctgggccggggaaatggcggcttcaggagagagcgggacttcaggcggcggaggcagcaccgaggaagcatttatgaccttctacagtgaggtgaaacaaatagagaagagagactcggttctaacttcgaaaaatcagattgaaagactgacccgtcctggttcctcttacttcaatttgaacccatttgaggttcttcagatagatcctgaagttacagatgaagaaataaaaaagaggtttcggcagttatccatcttggtgcatcctgacaaaaatcaagatgatgctgacagagcacaaaaggcttttgaagctgtggacaaagcttacaagttgctactggatcaggagcaaaagaagagggccctggatgtaattcaggcaggaaaagaatacgtggaacacactgtgaaagagcgaaaaaaacaattaaagaaggaaggaaaacctacaattgtagaggaggatgatcctgagctgttcaaacaagctgtatataaacagacaatgaaactctttgcagagctggaaattaaaaggaaagagagagaagccaaagagatgcatgaaaggaaacgacaaagggaagaagagattgaagctcaagaaaaagccaaacgggaaagagagtggcagaaaaactttgaggaaagtcgagatggtcgtgtggacagctggcgaaacttccaagccaatacgaaggggaagaaagagaagaaaaatcggaccttcctgagaccaccgaaagtaaaaatggagcaacgtgagtgaccgcccaaggtcacaggcacagaacctttcccctgctatctcccttcctgcttcgaaggactcattctttcctcccacttccaccccaacatagagtagtatttgctttttagtccattttgttttcaatacgatttaatatcgatcagagtaattcttttgtacattgaaatgaggggcttggtttaaaaaaagacctttccctctccctgcccctagaacaaccagtattagaaggtgccaccattggtgctgccttctcttcccacagcctgtaactcagtgttttgtacttcactgaattgtgatggttagaaacttcgtggatagtttgtggaaatcatccaattaaacatactgcttaaaacagtgttgctgtgacttcagagacaagcctggaaggggcaccttaggaagccccttcgcttcagttgctcgcttctgggtgtgctcccttcgaaggcccagataagacagggaacacttgtgagcacacagagcagcatctgatgccctgtggtgtttggcatgtgccccctgtctactgaccaatcagtgtggcatgaggcccacgccacccaaacctttcactttccaaagagctagccgtcctccacccagtaccatgtcctagcctgtctgcatttgttagtggtaatattctttatgtataataaatttttatacccaaaaaaaaaaaaaaaaaaaaaaaaaaaaaaaaaa

SEQ ID NO: 306 - DNA, 124 bp, Homo sapiens
attttcgtggacgccgggtgagtgagagagttggttggtgttgggccggaggaaagcgggaagactcatcggagcgtgtggatttgagccgccgcattttttaaccctagatctcgaaatgcat

SEQ ID NO: 307 - DNA, 5961 bp, Homo sapiens
agcaaatgatcaatgtgctttgtgaatgaagagtcaacattttaccagggcgaagtggggaggtacaaaaaaatttccagtccttgaatggtgtgaagtaaaagtgcctcaaagaatcccaccagaatggcacaggtgggcataatgggtctgtctcatcgtcaaaggacccaaggagtctaaaggaaactctaactacaacacccaaatgccacaaaaccttagttattaatacaaactatcatccctgcctatctgtcaccatctcatcttaaaaaacttgtgaaaatacgtaatcctcaggagacttcaattaggtataaataccagcagccagaggaggtgcagcacattgttctgatcatctgaagatcagctattagaagagaaagatcagttaagtcctttggacctgatcagcttgatacaagaactactgatttcaacttctttggcttaattctctcggaaacgatgaaatatacaagttatatcttggcttttcagctctgcatcgttttgggttctcttggctgttactgccaggacccatatgtaaaagaagcagaaaaccttaagaaatattttgtaagtatgactttttaatagtacttgtttgtggttgaaaatgactgaatatcgacttgctgtagcatctctgataggctgtcatctcttgtaggcagtcattttgagatttggtgttattttgttaattattgactagatgagttccttgactaaataatctagatattgttttaaccttctgctcagtttgtatagagacttaaaagggatttatgaattttccaaaagatgggcataatatgggtatgaagcataatgatgttaataattttgtggtgggaactcattcagttgtgatagtcaaggagtatgcagattgaaaaaaatgattggttattagtttttgacttctcagactctaaggtcaagattagcattaaaaaggtaataggaaatgtttacaaattaaagtcaaaaaggtccttaaagctttggcttaaaaaaataactgataggtgattttctccaaaaagtgatttcaacattctgcttctctatctatattacttgtgaagtattccggaacttcgttgctcactgggattttggaagaattatgattctggctaaggaatgtttaaaaattttaagtgaattttttgagtttcttttaaaattttattgatggttaatgaaaagtttttacattttaaatatttcattatttgtttaaaacttagctgttataattatagctgtcataataatattcagacattcacaattgattttattcttacaacacaaaatcaaatctcacacacacacacacacacacacactcgcacatgtttggaactatcttttaaagctcgtataataataccctacaggaaggcacagtagatgtaatagaaacctgtaccattggggggcagtattttatagtggggtggctttgctgttttttgtttttgtattttttagcctagcttgaaaatactttctttagcttactatagtttttgggacctttggagtatcagctttgttgagctcatttgtgacattgcaatttaatggttatattgggaaataaaaaagctaaaagaacataatagtctttgtctatatctcacataagccttttgggaatacttattgttagaactaagcagaagagttgaaaaggaaatcagtgaatattgtcacatctgagttcaatgaaacttgaaatatatttttaaggcaatttatgggctaattgtaaaccaattttttcttttttttttttagaatgcaggtcattcagatgtagcggataatggaactcttttcttaggcattttgaagaattggaaagaggtaagctgaatattcccatttggctaattttcctgttgcttgctttctgatggataaattcacatcatcctctgtttgtgctctttccttccaaggagagtgacagaaaaataatgcagagccaaattgtctccttttacttcaaactttttaaaaactttaaagatgaccagagcatccaaaagagtgtggagaccatcaaggaagacatgaatgtcaagtttttcaatagcaacaaaaagaaacgagatgacttcgaaaagctgactaattattcggtgaggctatttaaattctttctttggtttcattgccgagggtcttgcaaagcatttattctccagaaagtagacattagctatttaacagttgctaaagctatgaactcaactcatggctgaaactctaccttactatttccattcgtgtttgggtgactttgcaaagccagtaagagaatcgctgaagtatgtaatgtagagaaatgctggcattgtaactattgcgtaaagacaggtgagttgacaaattccagtgaagaggaagtaggtgaggaagaagcagggagtactgagaagcagttctctcattgtcccttgctcatatgatggaaattctcttactttgaatgagaggctgtctgtcttaatggaaagagcagtgggaggagctgagaagatgtgtgttctcctcccaactcagccaccaaggaactgtgatgaatcacatggctggctgggctcagtttcctcatcttaaaaggaaactgttaggttcactgtataagtttgatgaccttctttgctccaaaactctacaatgcaaagaatagaaaatgagaatgagatagaagaaagctacagtctttgaataggtaccagggacaccccactgcaagtctctagccaacctatcagattgtactgcccaattagaagcaagaatggttgctgtttgtttgtttttagggaaaaatagatagaatttataccttatgaaaagattgttctatcaactctctatcaactttcagaatatctcagctggagaactccttagactcctaagtcttacctcatgaacttgtatctttaagttatggcttctataaacagaaagataacgttgaggcataaagacaaatcatgtttttcagaatgttttctagaagacaaaggcctctagattcctttggggttgactttgatataaatgggctcaaatgagagggaccagggtcttcaagctagcatttgtgttcttaggatatgtgctcagctttcactattgctgggcctgcctctcactcctctcatgtaagcccccagaaacagaaaggagagacatggcaacaggtctcctttggttataaactagacactcagcacttgtttctaatccagtggtgcccctggcttactgttcagtcctggataagtctcttagtttcttggtgatgatttgaacattggaaagtaaaatctgtcacttgcaaacacacagcttgtcgaaaattttttctactctgcaggaactgggccttaaaaaaatgaaaaaaaatctgtggtttcttccttctggaagctacaaacctcctgtttcttgatgggcaatcttgagtgagctctattaattattattctctttggctcagttgctaagctattttatgcatgttatgccctttgacaattagtctttagctgtaatcccccagccatcctcagaaatgtggtgaggtagccatagtgttcccaagattagaaaaatgtaatggcagagccaagaggaaggtaaatggtccacatcttatgaagcatcatctaaatggccctattggttagagtgaggagatgcaagtagttcaatttgcttgcctagaaggcagggtactggaaaagttgttgcaattcttaattttaaactttatatatcagtaagccatatataaatatgattgggggtgtttattttaaaatctattatggaaattgagagactgacctaatctgggagaaattaaaaattacagttttcactcgttttggatttggtgttttctagggtacctaacctagatcagtggttctcaaacttaggtggatgtcagaatcacctggggagcttagtgaatgcacagggcacagtccttccacttcatgcacctggatctctgaggtctttgacaggtttccggattaatctgctatgcacaacagtgagaatcattgacctatagttactcatttgatgcatacaggaaagactgaagtataaagtgatataattggtagattgatgatagagaggtcatagaaacagtctcatcctcctttagatgagaaaatagaagttcagagaggttaagtagctggctcaaggtcagaattattgcatgcatgagattcaaacccacctttttatgctgactccacaaccaggagtcttttcactatataatttcaagaattctatagaagtagatttaaagatatgtgatggactccaccacattatagcacaactagaaatgtaattgtaatttttagcttcaactgctgaagaagtaaatattgtatattaaggtaatacggtccattttttaaaggaatacttttattttcactgaccatcatgacattagcagaatatcctgatggcttatatgcctgaaattaattttgctcttttctttcccgataggtaactgacttgaatgtccaacgcaaagcaatacatgaactcatccaagtgatggctgaactgtcgccagcagctaaaacagggaagcgaaaaaggagtcagatgctgtttcgaggtcgaagagcatcccagtaatggttgtcctgcctgcaatatttgaattttaaatctaaatctatttattaatatttaacattatttatatggggaatatatttttagactcatcaatcaaataagtatttataatagcaacttttgtgtaatgaaaatgaatatctattaatatatgtattatttataattcctatatcctgtgactgtctcacttaatcctttgttttctgactaattaggcaaggctatgtgattacaaggctttatctcaggggccaactaggcagccaacctaagcaagatcccatgggttgtgtgtttatttcacttgatgatacaatgaacacttataagtgaagtgatactatccagttactgccggtttgaaaatatgcctgcaatctgagccagtgctttaatggcatgtcagacagaacttgaatgtgtcaggtgaccctgatgaaaacatagcatctcaggagatttcatgcctggtgcttccaaatattgttgacaactgtgactgtacccaaatggaaagtaactcatttgttaaaattatcaatatctaatatatatgaataaagtgtaagttcacaactacttatgctgtgttggactttttctaagtgagacctggagtgaaagaactacctattaatgaattagtagggaggggagtcttcttagctgtgaaaattttagagttgcatttggttccattaaatgtggtatttctttccactagcattttgttggctttcgcttttccagttagcagctctttgaattatctttctaagatacagatttaattatgtcactattcaattcagaggttctgctatggaatgtagtttaaactgcttagcttggcacacagagatttatttctagccccttctccaccttcctatttcctccttcgtttcagaatcttcctctccctcatccaatgctggcaaacaccagtgggggtggagtagtgggtgtaagctctagggagaaggcttggattggaatccaagttattccattacaagtagtgtgacctttaatacattatgtatattgtctaagtttcagctttattgtctgaaaaagaaaaataattgtgtgttcctcataatattgtggtacgaattgattctttcactcaagaaatatttactggagtacctactacatgcctggtgctgttgtagaccttgagataccttactcaagcaaaacagccaaggatcc

SEQ ID NO: 308 - DNA, 1696 bp, Homo sapiens
gctgtagctggtgagaggaagtcctagaggctatggacactctgctgctgggatcaccgagatgagcagcagctgctcagggctgagcagggtcctggtggccgtggctacagccctggtgtctgcctcctccccctgcccccaggcctggggccccccaggggtccagtatgggcagccagggaggtccgtgaagctgtgttgtcctggagtgactgccggggacccagtgtcctggtttcgggatggggagccaaagctgctccagggacctgactctgggctagggcatgaactggtcctggcccaggcagacagcactgatgagggcacctacatctgccagaccctggatggtgcacttgggggcacagtgaccctgcagctgggctaccctccagcccgccctgttgtctcctgccaagcagccgactatgagaacttctcttgcacttggagtcccagccagatcagcggtttacccacccgctacctcacctcctacaggaagaagacagtcctaggagctgatagccagaggaggagtccatccacagggccctggccatgcccacaggatcccctaggggctgcccgctgtgttgtccacggggctgagttctggagccagtaccggattaatgtgactgaggtgaacccactgggtgccagcacacgcctgctggatgtgagcttgcagagcatcttgcgccctgacccaccccagggcctgcgggtagagtcagtaccaggttacccccgacgcctgcgagccagctggacataccctgcctcctggccgtgccagccccacttcctgctcaagttccgtttgcagtaccgtccggcgcagcatccagcctggtccacggtggagccagctggactggaggaggtgatcacagatgctgtggctgggctgccccatgctgtacgagtcagtgcccgggactttctagatgctggcacctggagcacctggagcccggaggcctggggaactccgagcactgggaccataccaaaggagataccagcatggggccagctacacacgcagccagaggtggagcctcaggtggacagccctgctcctccaaggccctccctccaaccacaccctcggctacttgatcacagggactctgtggagcaggtagctgtgctggcgtctttgggaatcctttctttcctgggactggtggctggggccctggcactggggctctggctgaggctgagacggggtgggaaggatggatccccaaagcctgggttcttggcctcagtgattccagtggacaggcgtccaggagctccaaacctgtagaggacccaggagggcttcggcagattccacctataattctgtcttgctggtgtggatagaaaccaggcaggacagtagatccctatggttggatctcagctggaagttctgtttggagcccatttctgtgagaccctgtatttcaaatttgcagctgaaaggtgcttgtacctctgatttcaccccagagttggagttctgctcaaggaacgtgtgtaatgtgtacatctgtgtccatgtgtgaccatgtgtctgtgaaggccagggaacatgtattcctctgcatgcatgtatgtaggtgcctgggagtgtgtgtggtccttgctctggccctttcccttgcagggttgtgcaggtgtgaataaa

SEQ ID NO: 309 - DNA, 4871 bp, Homo sapiens
gggagaggaatcgtatctccatatttcttctttcagccccaatccaagggttgtagctggaactttccatcagttcttcctttctttttcctctctaagcctttgccttgctctgtcacagtgaagtcagccagagcagggctgttaaactctgtgaaatttgtcataagggtgtcaggtatttcttactggcttccaaagaaacatagataaagaaatctttcctgtggcttcccttggcaggctgcattcagaaggtctctcagttgaagaaagagcttggaggacaacagcacaacaggagagtaaaagatgccccagggctgaggcctccgctcaggcagccgcatctggggtcaatcatactcaccttgcccgggccatgctccagcaaaatcaagctgttttcttttgaaagttcaaactcatcaagattatgctgctcactcttatcattctgttgccagtagtttcaaaatttagttttgttagtctctcagcaccgcagcactggagctgtcctgaaggtactctcgcaggaaatgggaattctacttgtgtgggtcctgcacccttcttaattttctcccatggaaatagtatctttaggattgacacagaaggaaccaattatgagcaattggtggtggatgctggtgtctcagtgatcatggattttcattataatgagaaaagaatctattgggtggatttagaaagacaacttttgcaaagagtttttctgaatgggtcaaggcaagagagagtatgtaatatagagaaaaatgtttctggaatggcaataaattggataaatgaagaagttatttggtcaaatcaacaggaaggaatcattacagtaacagatatgaaaggaaataattcccacattcttttaagtgctttaaaatatcctgcaaatgtagcagttgatccagtagaaaggtttatattttggtcttcagaggtggctggaagcctttatagagcagatctcgatggtgtgggagtgaaggctctgttggagacatcagagaaaataacagctgtgtcattggatgtgcttgataagcggctgttttggattcagtacaacagagaaggaagcaattctcttatttgctcctgtgattatgatggaggttctgtccacattagtaaacatccaacacagcataatttgtttgcaatgtccctttttggtgaccgtatcttctattcaacatggaaaatgaagacaatttggatagccaacaaacacactggaaaggacatggttagaattaacctccattcatcatttgtaccacttggtgaactgaaagtagtgcatccacttgcacaacccaaggcagaagatgacacttgggagcctgagcagaaactttgcaaattgaggaaaggaaactgcagcagcactgtgtgtgggcaagacctccagtcacacttgtgcatgtgtgcagagggatacgccctaagtcgagaccggaagtactgtgaagatgttaatgaatgtgctttttggaatcatggctgtactcttgggtgtaaaaacacccctggatcctattactgcacgtgccctgtaggatttgttctgcttcctgatgggaaacgatgtcatcaacttgtttcctgtccacgcaatgtgtctgaatgcagccatgactgtgttctgacatcagaaggtcccttatgtttctgtcctgaaggctcagtgcttgagagagatgggaaaacatgtagcggttgttcctcacccgataatggtggatgtagccagctctgcgttcctcttagcccagtatcctgggaatgtgattgctttcctgggtatgacctacaactggatgaaaaaagctgtgcagcttcaggaccacaaccatttttgctgtttgccaattctcaagatattcgacacatgcattttgatggaacagactatggaactctgctcagccagcagatgggaatggtttatgccctagatcatgaccctgtggaaaataagatatactttgcccatacagccctgaagtggatagagagagctaatatggatggttcccagcgagaaaggcttattgaggaaggagtagatgtgccagaaggtcttgctgtggactggattggccgtagattctattggacagacagagggaaatctctgattggaaggagtgatttaaatgggaaacgttccaaaataatcactaaggagaacatctctcaaccacgaggaattgctgttcatccaatggccaagagattattctggactgatacagggattaatccacgaattgaaagttcttccctccaaggccttggccgtctggttatagccagctctgatctaatctggcccagtggaataacgattgacttcttaactgacaagttgtactggtgcgatgccaagcagtctgtgattgaaatggccaatctggatggttcaaaacgccgaagacttacccagaatgatgtaggtcacccatttgctgtagcagtgtttgaggattatgtgtggttctcagattgggctatgccatcagtaataagagtaaacaagaggactggcaaagatagagtacgtctccaaggcagcatgctgaagccctcatcactggttgtggttcatccattggcaaaaccaggagcagatccctgcttatatcaaaacggaggctgtgaacatatttgcaaaaagaggcttggaactgcttggtgttcgtgtcgtgaaggttttatgaaagcctcagatgggaaaacgtgtctggctctggatggtcatcagctgttggcaggtggtgaagttgatctaaagaaccaagtaacaccattggacatcttgtccaagactagagtgtcagaagataacattacagaatctcaacacatgctagtggctgaaatcatggtgtcagatcaagatgactgtgctcctgtgggatgcagcatgtatgctcggtgtatttcagagggagaggatgccacatgtcagtgtttgaaaggatttgctggggatggaaaactatgttctgatatagatgaatgtgagatgggtgtcccagtgtgcccccctgcctcctccaagtgcatcaacaccgaaggtggttatgtctgccggtgctcagaaggctaccaaggagatgggattcactgtcttgatattgatgagtgccaactgggggtgcacagctgtggagagaatgccagctgcacaaatacagagggaggctatacctgcatgtgtgctggacgcctgtctgaaccaggactgatttgccctgactctactccaccccctcacctcagggaagatgaccaccactattccgtaagaaatagtgactctgaatgtcccctgtcccacgatgggtactgcctccatgatggtgtgtgcatgtatattgaagcattggacaagtatgcatgcaactgtgttgttggctacatcggggagcgatgtcagtaccgagacctgaagtggtgggaactgcgccacgctggccacgggcagcagcagaaggtcatcgtggtggctgtctgcgtggtggtgcttgtcatgctgctcctcctgagcctgtggggggcccactactacaggactcagaagctgctatcgaaaaacccaaagaatccttatgaggagtcgagcagagatgtgaggagtcgcaggcctgctgacactgaggatgggatgtcctcttgccctcaaccttggtttgtggttataaaagaacaccaagacctcaagaatgggggtcaaccagtggctggtgaggatggccaggcagcagatgggtcaatgcaaccaacttcatggaggcaggagccccagttatgtggaatgggcacagagcaaggctgctggattccagtatccagtgataagggctcctgtccccaggtaatggagcgaagctttcatatgccctcctatgggacacagacccttgaagggggtgtcgagaagccccattctctcctatcagctaacccattatggcaacaaagggccctggacccaccacaccaaatggagctgactcagtgaaaactggaattaaaaggaaagtcaagaagaatgaactatgtcgatgcacagtatcttttctttcaaaagtagagcaaaactataggttttggttccacaatctctacgactaatcacctactcaatgcctggagacagatacgtagttgtgcttttgtttgctcttttaagcagtctcactgcagtcttatttccaagtaagagtactgggagaatcactaggtaacttattagaaacccaaattgggacaacagtgctttgtaaattgtgttgtcttcagcagtcaatacaaatagatttttgtttttgttgttcctgcagccccagaagaaattaggggttaaagcagacagtcacactggtttggtcagttacaaagtaatttctttgatctggacagaacatttatatcagtttcatgaaatgattggaatattacaataccgttaagatacagtgtaggcatttaactcctcattggcgtggtccatgctgatgattttgccaaaatgagttgtgatgaatcaatgaaaaatgtaatttagaaactgatttcttcagaattagatggccttattttttaaaatatttgaatgaaaacattttatttttaaaatattacacaggaggccttcggagtttcttagtcattactgtccttttcccctacagaattttccctcttggtgtgattgcacagaatttgtatgtattttcagttacaagattgtaagtaaattgcctgatttgttttcattatagacaacgatgaatttcttctaattatttaaataaaatcaccaaaaacat

SEQ ID NO: 310 - DNA, 1085 bp, Homo sapiens
ggtttctattgacttgggttaatcgtgtgaccgcggtggctggcacgaaattgaccaaccctggggttagtatagcttagttaaactttcgtttattgctaaaggttaatcactgctgtttcccgtgggggtgtggctaggctaagcgttttgagctgcattgctgcgtgcttgatgcttgtcccttttgatcgtggtgatttagagggtgaactcactggaatggggatgcttgcatgtgtaatcttactaagagctaatagaaaggctaggaccaaaccagaaacctccaattctcatgtggaagcccatgccctcaccctccaacatgaaagcctctgcagcacttctgtgtctgctgctcacagcagctgctttcagcccccaggggcttgctcagccagttgggattaatacttcaactacctgctgctacagatttatcaataagaaaatccctaagcagaggctggagagctacagaaggaccaccagtagccactgtccccgggaagctgtaatcttcaagaccaaactggacaaggagatctgtgctgaccccacacagaagtgggtccaggactttatgaagcacctggacaagaaaacccaaactccaaagctttgaacattcatgactgaactgaaaacaagccatgacttgagaaacaaataatttgtataccctgtcctttctcagagtggttctgagattattttaatctaattctaaggaatatgagctttatgtaataatgtgaatcatggtttttcttagtagattttaaaagttattaatattttaatttaatcttccatggattttggtgggttttgaacataaagccttggatgtatatgtcatctcagtgctgtaaaaactgtgggatgctcctcccttctctacctcatgggggtattgtataagtccttgcaagaatcagtgcaaagatttgctttaattgttaagatatgatgtccctatggaagcatattgttattatataattacatatttgcatatgtatgactcccaaattttcacataaaatagatttttgtataacaaaaaaaaaaaaaaaaaa

SEQ ID NO: 311 - DNA, 1173 bp, Homo sapiens
cggcacgagcacagtgctccggatcctccaatcttcgctcctccaatctccgctcctccacccagttcaggaacccgcgaccgctcgcagcgctctcttgaccactatgagcctcctgtccagccgcgcggcccgtgtccccggtccttcgagctccttgtgcgcgctgttggtgctgctgctgctgctgacgcagccagggcccatcgccagcgctggtcctgccgctgctgtgttgagagagctgcgttgcgtttgtttacagaccacgcagggagttcatcccaaaatgatcagtaatctgcaagtgttcgccataggcccacagtgctccaaggtggaagtggtagcctccctgaagaacgggaaggaaatttgtcttgatccagaagccccttttctaaagaaagtcatccagaaaattttggacggtggaaacaaggaaaactgattaagagaaatgagcacgcatggaaaagtttcccagtctacagcagagaagttttctggaggtctctgaacccagggaagacaagaaggaaagattttgttgttgtttgtttatttggtttccccagtagttagctttcttccctggattcctcacttttgaagagtgtgaggaaaacctatgtttggcgcttaagctttcagctcagcttaatgaagtgtttagcatagtacctctgctatttgctgttattttatctgctatgctattgaagttttggcaattgactatagtgtgagccaggaatcactggctgttaatcttacaaagtgtcttggaattgtaggtgactattatttttccaagaaatatcccttaagatattaactgagaaggctgggggtttaatgtggaaatgatgtttcaaaaggaatcctgtgatggaaatacaactggtatcttcacttttttaggaattgggaaatattttaatgtttcttggggaatatgttagagaattcccttactcttgattgtgggatactatttaattatttcactttagaaagctgagtgtttcacaccttatctatgtagaatatatttccttattcagaatttctaaaagtttaagttctatgagggctaatatcttatcttcctataattttagacattgctttaactttttagtaaaaaaaaaaaaaaaaaaaaaaaaaaaa

SEQ ID NO: 312 - DNA, 6757 bp, Homo sapiens
cggccccagaaaacccgagcgagtagggggcggcgcgcaggagggaggagaactgggggcgcgggaggctggtgggtgtcgggggtggagatgtagaagatgtgacgccgcggcccggcgggtgccagattagcggacggctgcccgcggttgcaacgggatcccgggcgctgcagcttgggaggcggctctccccaggcggcgtccgcggagacacccatccgtgaaccccaggtcccgggccgccggctcgccgcgcaccaggggccggcggacagaagagcggccgagcggctcgaggctgggggaccgcgggcgcggccgcgcgctgccgggcgggaggctggggggccggggccggggccgtgccccggagcgggtcggaggccggggccggggccgggggacggcggctccccgcgcggctccagcggctcggggatcccggccgggccccgcagggaccatggcagccgggagcatcaccacgctgcccgccttgcccgaggatggcggcagcggcgccttcccgcccggccacttcaaggaccccaagcggctgtactgcaaaaacgggggcttcttcctgcgcatccaccccgacggccgagttgacggggtccgggagaagagcgaccctcacatcaagctacaacttcaagcagaagagagaggagttgtgtctatcaaaggagtgtgtgctaaccgttacctggctatgaaggaagatggaagattactggcttctaaatgtgttacggatgagtgtttcttttttgaacgattggaatctaataactacaatacttaccggtcaaggaaatacaccagttggtatgtggcactgaaacgaactgggcagtataaacttggatccaaaacaggacctgggcagaaagctatactttttcttccaatgtctgctaagagctgattttaatggccacatctaatctcatttcacatgaaagaagaagtatattttagaaatttgttaatgagagtaaaagaaaataaatgtgtatagctcagtttggataattggtcaaacaattttttatccagtagtaaaatatgtaaccattgtcccagtaaagaaaaataacaaaagttgtaaaatgtatattctcccttttatattgcatctgctgttacccagtgaagcttacctagagcaatgatctttttcacgcatttgctttattcgaaaagaggcttttaaaatgtgcatgtttagaaacaaaatttcttcatggaaatcatatacattagaaaatcacagtcagatgtttaatcaatccaaaatgtccactatttcttatgtcattcgttagtctacatgtttctaaacatataaatgtgaatttaatcaattcctttcatagttttataattctctggcagttccttatgatagagtttataaaacagtcctgtgtaaactgctggaagttcttccacagtcaggtcaattttgtcaaacccttctctgtacccatacagcagcagcctagcaactctgctggtgatgggagttgtattttcagtcttcgccaggtcattgagatccatccactcacatcttaagcattcttcctggcaaaaatttatggtgaatgaatatggctttaggcggcagatgatatacatatctgacttcccaaaagctccaggatttgtgtgctgttgccgaatactcaggacggacctgaattctgattttataccagtctcttcaaaaacttctcgaaccgctgtgtctcctacgtaaaaaaagagatgtacaaatcaataataattacacttttagaaactgtatcatcaaagattttcagttaaagtagcattatgtaaaggctcaaaacattaccctaacaaagtaaagttttcaatacaaattctttgccttgtggatatcaagaaatcccaaaatattttcttaccactgtaaattcaagaagcttttgaaatgctgaatatttctttggctgctacttggaggcttatctacctgtacatttttggggtcagctctttttaacttcttgctgctctttttcccaaaaggtaaaaatatagattgaaaagttaaaacattttgcatggctgcagttcctttgtttcttgagataagattccaaagaacttagattcatttcttcaacaccgaaatgctggaggtgtttgatcagttttcaagaaacttggaatataaataattttataattcaacaaaggttttcacattttataaggttgatttttcaattaaatgcaaatttgtgtggcaggatttttattgccattaacatatttttgtggctgctttttctacacatccagatggtccctctaactgggctttctctaattttgtgatgttctgtcattgtctcccaaagtatttaggagaagccctttaaaaagctgccttcctctaccactttgctggaaagcttcacaattgtcacagacaaagatttttgttccaatactcgttttgcctctatttttcttgtttgtcaaatagtaaatgatatttgcccttgcagtaattctactggtgaaaaacatgcaaagaagaggaagtcacagaaacatgtctcaattcccatgtgctgtgactgtagactgtcttaccatagactgtcttacccatcccctggatatgctcttgttttttccctctaatagctatggaaagatgcatagaaagagtataatgttttaaaacataaggcattcatctgccatttttcaattacatgctgacttcccttacaattgagatttgcccataggttaaacatggttagaaacaactgaaagcataaaagaaaaatctaggccgggtgcagtggctcatgcctatattccctgcactttgggaggccaaagcaggaggatcgcttgagcccaggagttcaagaccaacctggtgaaaccccgtctctacaaaaaaacacaaaaaatagccaggcatggtggcgtgtacatgtggtctcagatacttgggaggctgaggtgggagggttgatcacttgaggctgagaggtcaaggttgcagtgagccataatcgtgccactgcagtccagcctaggcaacagagtgagactttgtctcaaaaaaagagaaattttccttaataagaaaagtaatttttactctgatgtgcaatacatttgttattaaatttattatttaagatggtagcactagtcttaaattgtataaaatatcccctaacatgtttaaatgtccatttttattcattatgctttgaaaaataattatggggaaatacatgtttgttattaaatttattattaaagatagtagcactagtcttaaatttgatataacatctcctaacttgtttaaatgtccatttttattctttatgcttgaaaataaattatggggatcctatttagctcttagtaccactaatcaaaagttcggcatgtagctcatgatctatgctgtttctatgtcgtggaagcaccggatgggggtagtgagcaaatctgccctgctcagcagtcaccatagcagctgactgaaaatcagcactgcctgagtagttttgatcagtttaacttgaatcactaactgactgaaaattgaatgggcaaataagtgcttttgtctccagagtatgcgggagacccttccacctcaagatggatatttcttccccaaggatttcaagatgaattgaaatttttaatcaagatagtgtgctttattctgttgtattttttattattttaatatactgtaagccaaactgaaataacatttgctgttttataggtttgaagaacataggaaaaactaagaggttttgtttttatttttgctgatgaagagatatgtttaaatatgttgtattgttttgtttagttacaggacaataatgaaatggagtttatatttgttatttctattttgttatatttaataatagaattagattgaaataaaatataatgggaaataatctgcagaatgtgggtttcctggtgtttcctctgactctagtgcactgatgatctctgataaggctcagctgctttatagttctctggctaatgcagcagatactcttcctgccagtggtaatacgattttttaagaaggcagtttgtcaattttaatcttgtggatacctttatactcttagggtattattttatacaaaagccttgaggattgcattctattttctatatgaccctcttgatatttaaaaaacactatggataacaattcttcatttacctagtattatgaaagaatgaaggagttcaaacaaatgtgtttcccagttaactagggtttactgtttgagccaatataaatgtttaactgtttgtgatggcagtattcctaaagtacattgcatgttttcctaaatacagagtttaaataatttcagtaattcttagatgattcagcttcatcattaagaatatcttttgttttatgttgagttagaaatgccttcatatagacatagtctttcagacctctactgtcagttttcatttctagctgctttcagggttttatgaattttcaggcaaagctttaatttatactaagcttaggaagtatggctaatgccaacggcagtttttttcttcttaattccacatgactgaggcatatatgatctctgggtaggtgagttgttgtgacaaccacaagcactttttttttttttaaagaaaaaaaggtagtgaatttttaatcatctggactttaagaaggattctggagtatacttaggcctgaaattatatatatttggcttggaaatgtgtttttcttcaattacatctacaagtaagtacagctgaaattcagaggacccataagagttcacatgaaaaaaatcaattcatttgaaaaggcaagatgcaggagagaggaagccttgcaaacctgcagactgctttttgcccaatatagattgggtaaggctgcaaaacataagcttaattagctcacatgctctgctctcacgtggcaccagtggatagtgtgagagaattaggctgtagaacaaatggccttctctttcagcattcacaccactacaaaatcatcttttatatcaacagaagaataagcataaactaagcaaaaggtcaataagtacctgaaaccaagattggctagagatatatcttaatgcaatccattttctgatggattgttacgagttggctatataatgtatgtatggtattttgatttgtgtaaaagttttaaaaatcaagctttaagtacatggacatttttaaataaaatatttaaagacaatttagaaaattgccttaatatcattgttggctaaatagaataggggacatgcatattaaggaaaaggtcatggagaaataatattggtatcaaacaaatacattgatttgtcatgatacacattgaatttgatccaatagtttaaggaataggtaggaaaatttggtttctatttttcgatttcctgtaaatcagtgacataaataattcttagcttattttatatttccttgtcttaaatactgagctcagtaagttgtgttaggggattatttctcagttgagactttcttatatgacattttactatgttttgacttcctgactattaaaaataaatagtagaaacaattttcataaagtgaagaattatataatcactgctttataactgactttattatatttatttcaaagttcatttaaaggctactattcatcctctgtgatggaatggtcaggaatttgttttctcatagtttaattccaacaacaatattagtcgtatccaaaataacctttaatgctaaactttactgatgtatatccaaagcttctccttttcagacagattaatccagaagcagtcataaacagaagaataggtggtatgttcctaatgatattatttctactaatggaataaactgtaatattagaaattatgctgctaattatatcagctctgaggtaatttctgaaatgttcagactcagtcggaacaaattggaaaatttaaatttttattcttagctataaagcaagaaagtaaacacattaatttcctcaacatttttaagccaattaaaaatataaaagatacacaccaatatcttcttcaggctctgacaggcctcctggaaacttccacatatttttcaactgcagtataaagtcagaaaataaagttaacataactttcactaacacacacatatgtagatttcacaaaatccacctataattggtcaaagtggttgagaatatattttttagtaattgcatgcaaaatttttctagcttccatcctttctccctcgtttcttctttttttgggggagctggtaactgatgaaatcttttcccaccttttctcttcaggaaatataagtggttttgtttggttaacgtgatacattctgtatgaatgaaacattggagggaaacatctactgaatttctgtaatttaaaatattttgctgctagttaactatgaacagatagaagaatcttacagatgctgctataaataagtagaaaatataaatttcatcactaaaatatgctattttaaaatctatttcctatattgtatttctaatcagatgtattactcttattatttctattgtatgtgttaatgattttatgtaaaaatgtaattgcttttcatgagtagtatgaataaaattgattagtttgtg

SEQ ID NO: 313 - DNA, 756 bp, Homo sapiens
cgggggaagctggaagagaagaaacctcctgaggctgacatgaatatttttgaagacattggggattacgtaccctccacaaccaagacacctcgggacaaggagcgggagagatatcgggaacgggagcgtgatcgggaaagagacagagaccgtgaccgagagcgagagcgagaacgagatcgggaacgagagcgagagcgggaccgagagagagaagaggaaaagaagagacacagctactttgagaagccaaaagtagatgatgagcccatggacgttgacaaaggacctgggtctaccaaggagttgatcaagtccatcaatgaaaagtttgctgggtctgctggctgggaaggcacagaatcgctgaagaagccagaagacaaaaagcagctgggagatttctttggcatgtccaacagttatgcagagtgctacccagccacgatggatgacatggctgtggatagtgatgaggaggtggattatagcaaaatggaccagggtaacaagaagggcccttagggccgttgggactttgatacccaggaagaatacagcgagtatatgaacaacaaagaagctttgcccaaggctgcattccagtatggtatcaaaatgtctgaagggcggaaaaccaggcgcttcaaggaaaccaatgacaaagcagagcttgatcgccagtggaagaagattagtgcaatcattgagaagaggaagaagatggaagctgatggggttgaagtcaagccg

SEQ ID NO: 314 - DNA, 1079 bp, Homo sapiens
ccatgagccctctgctccgccgcctgctgctcgccgcactcctgcagctggcccccgcccaggcccctgtctcccagcctgatgcccctggccaccagaggaaagtggtgtcatggatagatgtgtatactcgcgctacctgccagccccgggaggtggtggtgcccttgactgtggagctcatgggcaccgtggccaaacagctggtgcccagctgcgtgactgtgcagcgctgtggtggctgctgccctgacgatggcctggagtgtgtgcccactgggcagcaccaagtccggatgcagatcctcatgatccggtacccgagcagtcagctgggggagatgtccctggaagaacacagccagtgtgaatgcagacctaaaaaaaaggacagtgctgtgaagccagacagggctgccactccccaccaccgtccccagccccgttctgttccgggctgggactctgcccccggagcaccctccccagctgacatcacccatcccactccagccccaggcccctctgcccacgctgcacccagcaccaccagcgccctgacccccggacctgccgctgccgctgccgacgccgcagcttcctccgttgccaagggcggggcttagagctcaacccagacacctgcaggtgccggaagctgcgaaggtgacacatggcttttcagactcagcagggtgacttgcctcagaggctatatcccagtgggggaacaaaggggagcctggtaaaaaacagccaagcccccaagacctcagcccaggcagaagctgctctaggacctgggcctctcagagggctcttctgccatcccttgtctccctgaggccatcatcaaacaggacagagttggaagaggagactgggaggcagcaagaggggtcacataccagctcaggggagaatggagtactgtctcagtttctaaccactctgtgcaagtaagcatcttacaactggctcttcctcccctcactaagaagacccaaacctctgcataatgggatttgggctttggtacaagaactgtgacccccaaccctgataaaagagatggaagg

SEQ ID NO: 315 - DNA, 107603 bp, Homo sapiens
gatcctcctgcctcagcctcccaaagtgctgggattacaggtgtgagccactgcacccagcccagactgctgcttctctaacaagacaactaaaatgatttcctttgaattgtttctctaaatgtctgtggcatacctgcaagttgcttgcaggatttctgtgttttgtgatgcatgttgtaaaggatgctgcttcagatgtagaagttttaggagccgagagccaagctgaatctgtgcctcttcctaacataaagtggaagttggccaggcgcagtggctcatgcctgtaatcccagcactttgggaggctgaggagggcggatcacgaggtcaggagatcgagaccatcctggctaacacggtgaaatcccgtctctactaaaaatacaaaaaaattagccgggcgtgttggcaggcgcctgtagtcccagctactcaggaggctgaggcaggagaatggtgtgaacccgggaggcggagcttgcagtgagctgagattgcgccactgcactccagcctgggcgacagagcgagactccgtctcaaaaaaaaaaaaaaaaagtggaagttgcttttaaaaatactttccatgttagtttgtcttgtgactaacctcatttccatagacactaactacaaaagataattataactaattgacattctaaattaatttggttctggctaactgaaacttttgttcatatctaatggagtaagtttcataaggctgatgatagctgaaggtctttaaatattttgccaaaacaggaagtttaaaaataggtaatttaaaacttctcctaaagcatgaagtatgaacctaaagcaacaccactcaaattttaatgtgcatctgagtcatctggggctgcagggctgcaggagtctaagattctgcattttgtttttgtgtttgtttttgaaacggagtctcgctgtgtcacccaggctggagtgcagtggtgcgatctcggctcaccacaacctccacctcccaggttccagtgattctcctgcctcagcctccaaagtagctgggactacaggtgcgcgccaccatgcctggctaattttgtatttttagtagagacagggtttcaccatgttggctagactggtcttgaactcctgacctcaggtgatccacctgccttgacctcccaaagtgctgggattataggcatgagccaccgcacccagccagattctgcattttgaaccagctcctcctgggtgctgcaggtaccactgctctgcccatccacacgttgagtagcaggaacccagaggtttgtccctttgcaggtcttctcacctgacatgaccttttgactcaactttgcctcttttcagagtttggattatgatcgctgtatcaatgacccttacctggaagttttggagaccatggataataaggtgggtcttacaattcttcatctctggggatcaaatcagtcttaacatggcattttttttctcttctaaaggccccagtaaacatctttacaccttgttttttgaaccttttcatgcgatacaggcagacctcactttatgcgctttgctttatttcacctcgcaggtactgcaggttttacaaactggaggttggtggcaaccctgtgttgagcaaggtgccatttttccaatagcatgcattttgtttgcattttttagccataaagtattttttaattaaggtaggtacatttttgtaggcataatgctattacacactttatagacctcagtatagtgtaaacatcacttttatatgcactgggtaaccaaaacactcgtgtgactcactttattgtgatatttgctttattgtggtggtctagaaccaaacccatgctatctgtaaggtaggcctatgttggcatttattccctaggcctttatcctgccaaccagagttccccctgtcagtgcaccttgcccagcctcttaagagtccatcatttttgcactgtaaagcacctgaaatcccaacatcatctttactgtgcctgctctccacgtggaatttagcttaaaactggttggccaagatgtatttcttcccctctgccaccataaccctgtaaactgaatcattcttttcctgtgtgaacagaaaggtcgaagatatgaggcggtgaagtggatggtggtgtttgccattggagtctgcactggcctggtgaggaggcagggcctggagggatggtgggccatagggctggaggggcttacagggaaagccctggcctggtgaataacattgtcatttgtcattataacatttataacattataatgcaataacacttgtcattataatcaagagtgccttttcttttttcccttttttttttttaaatgaataatcctggcacagtttttcacacttcccctgcttttgctttgtgaaatgaaagcgagacacatgacaatggtgctcttgaagcgctcaaaggtttgggcaggactttatcttttatgatatgattatggatcataatctctaatctacctagtaaactagatgtctccctaatgggtagataatgcattgggtagagtaaataatggaagttaaagttacttttttttttcttttaatttaaatagagacagggtctcgctttgtcaccctggctggagcacagtggcgtaatcacagttcactgcagcctcgaccttctgggcttgggtgatcctcctacctcagcctcccgagtggttaggactctaggcaggcatgagatcgctctttagggaaaaagcgaagtcgtgggtacggaactgtgaacatcgtgcccttcatttagcacagcgtgccagtgaacagggtggcacaccatagctattgatctcatgcagggagtttatggtgctatcctgggctcctccccgtacgtcgttaatgttatctagaagatagagccagcagctgtgagtgaagggatatgcccgtatgaacagagttggtggaggcagcaacttcacaggtgaatcaaagacaaggcaagattggaaacatggccaaagatgaggatagcaaaaagtctggaaccaaaactgccgacttcacattgttaaatatgaggaagagaagctggaaaaatcagcatcagtcaaaaagatccatgtcaaatctgattccggtcagtacagtgttgggatagggtatctgtcctcagtaacagcctgttgaccacctttatcttgaactggccacaagcctcctacttaatttgacatgatatgcctagaaaatgtacacatgtgttcggtataatatagccacaggggccaaccacaatttttattttcatggcatgcatcaaatttttactatagtaaatccacaagtaaaggaacatcttactaggtaagactgatggcattcagaagccctcttcagtgatattctgatggataccattttggggaaacttgggttgatttattgttttatttaaatctcagggtgttgggccagggacggtggctcacacctgtaatcccagcattttgagaggccgagacaggaggactgcttgagcccaggagtttgagaccagcctgggcaacgtagggagaccctgtctccttaaaaataaaaaaaaaattaaaaaaaagaaatctcagggtatttattttgctatatatgtttctggttgcagatttctctataataagcatagtccttaggcctctagttgttagtgtttgtgctacttttatatcaaactctttggagctgccacttgtcagtactacaggttgagtgttccttatcagaaaatccaaaatgctccaaaatccaaaactttttgaatgctgacacgattctcaggaaatactcattggcgcattcagattttggatttcaaatttttggatttgggatgtttaatcagtataatgtagatattcgaaaaaaaaatctgaaatccaaaacacttctggtcccaagcatttcagataagtgttactcaagctgaagcaactttacctcctacctttgtattttaggaaggcacacctgcctttatgacatagcactcccaactcttgtccattgatgtgtggccactttatggcttcagtatcaaaaagcctccaggcattggcttgagggaaggccagagttaaaggcaagaagctttgatcctgaatccataaaattagaagtctttctagttctcctttaagccctgagcactttggagagtggaatactggaatttggttgttttctctacccagagtaactatggactataagatggttataagtcaagcctggcacagtggggtgtgcctgtaatcccagctacctgggaggctgaggcaggaggatctcttaaaccctggagttcaaggccagcctaggcaatatagcaagaccccatctcaaaaaaagatgatttcaagtcaaaataatgacttacaaaatagaacctgctaataaggaacatgcaaaaagcacatacacctaaatgaatgttgtgttttaaagcaagcttgtccaacccatggcccaacacagattcatataccttttaaaaacatttatgagatttttctgagtttttcttttcttagctcatcagctgtcattagtgtattttatgtgtggccaaagacaattcttcttccagtgtggtccagggaagccaaaagagtagacacccctgtgtcagtagtctttcttggtctcacatctttttctgcacctgcttccctctttgttttccgttgcttcactcaacttagctgtactctctgcctttgttctttggaggggcagtgggactgggctggagaagggatctcctccttctgcgcttttctgctgtgcattcacgtactgctggctggtgagcagcctccgtatgtgcagtgggggaggagatgccttcaagaggagcacacctgtactatacttgtgctacacttggaaataaggctgtgtgacagatctcttgctcttcacaggtgggtctctttgtggacttttttgtgcgactcttcacccaactcaagttcggagtggtacagacatgtatccttttcacggttcctggtgttcgtggacttcagtggtcaccaagattctttcttacatagaaatgggtctaacagtaagcatagtattagaagggccgcttattagctattcagctttaatatttctaatgatcactgaaggacacaaaagaaggactttaataagcaaagacatatacctatgtttgtggttgataagattacagatgccgcaaagatgcctgtactccctaatctgtaaatttaatgtagttccaatcaaaattccaatagaatttgttgtggaactcagaaattctttgtaaatttgtgtagaagagtaaagggccaaaagcagtcagtatagttctaaatgacaagaaggtggacttgaccctgtcagatatcaagtcttataaaattaacaagtttggggagttagggaaaaaaaagtcataaaatttaagatacagtcattgaaattggtcatattggtgcaggaatacctagacagtggaaaatgatagagaagcagaagctggtcctcacatacatggaactttggtgaatgacagttaatattacaaatcagtgagggagtgatgaatgatttaataaaagacgctgtgttatttaataaataaaagatacacatctctgtagtcccagctacttaggaggtgagcccaggagtttgaggctgtaatgcaccatgactgtgcctgggcagcatagcaagaccctgtcttaaaaaaaatgatgctgggacatgggtgatccatatggaaaaatagttatattcctatttcatactataaataagataaattccagatgaagatgtaaatatgcagaacaaaacttcgggagactatatgttgtcaagagtggggaataatttcttaaaactccagaaggcacagactataagaaaaaacatcaatggggccggacacagtggctcacgcctgtaatcccagcattttgggaggcagaggcaggcggatcacaaggtcaggagattgagaccatcctggctaacacggtgaaaccccgtctctactaaaaatacaaaaaaattagctgggcgtggcggtgtgcgcctgtagtcccagatgctggggaggctgaggcaggagaatggcatgaacctgggaggcggagcttgcagtaagccaagatcacgccactgcactccagcctgggtgacagagcaagactccgtctcaaaaacaaacaaacaaaaacatcaatggctgggtgcagtggctcatgcctgtaatctcaggactttgggaggccgaggcaggcagatcacctgaggtcaggagttcaaggccagcctggctaacatgacaaaaccccatctctactaaaagtacaaaaaattagctgggcatggtggcgggtgcctgtaatcccagctacttggaaggctgaggtgggagaatcgcttgaacccgggagacagaggctgcagtgagccgagatcgcgccattgcactccagcctgggcaatgagagcaaaactgtctcaaaaaacaacaacaaaaaaaaaaaacaaacaaaatcaataaatttgaccacatcaaagtacatattgtatttataaagacaaaaactccaaataacaacaataaaacaccataaataaagtgaaaacaagtccacagcctgagagaggttatttactatgcatttaagaggcagataattagtatccagaatacaggaagaggctgggcgcggtggctgacgcctgtaatcccagcactttgggaggccgaggcaggcggatcacttgaggtcaggagttcaagaccagcctggccaacatggtgaaaccctgtctctactaaaaatacaaattgagctgagtgtggtggtgtgcacctttagtccagatacttgggaggcagaggcaggagaatcacttgaacccaggaggcggaggttgcagtgagccgagattgcaacactgtactccagcctgggtgacagaatgagactctgattcagaacaaataatacaggaagaactcctgcaactcaatcagaaaaacaacagatggtccaatggaaggaaaacgagcaaaggatgtgaactggaattctcaaaagagaaaaactggccagtaaacctctagaaaaaggaaggtgcacattcctgtgactcatacattcctcttagaaatttgaaccgtagacatgtacaaaggtggtaattatagctttatgatagcaaaaagctggagtcaccaaatgggagaatggaaaaattatggtacattcatatggtatcattttagacatcatgtcatttctgtagattgtaaaataaaaattttagacaagtgaaagtgaacgaaccacagagttgtgtgtatcaacatggctaattctcaaagacttaatgttgagaaaaaaagagcaagttacagaatatacaagtgccgtgtacaacagtgtggacacttttgaaatacacacaataatttcaggttagtggtttctcccaggggagagaggaaggaaaactgtttttttttttgttttgttttgtttcttaaaatggtactgaatgttttcttttttaaaaatacctggagcatatatggcatgttgttgagatttgttaaagctacagttgtgagggtatgggtattcgttactttttgtaatgtttgaagtatttcctaatgtcaaaggcatctcaaacaattttttcttttttttaagagatgaggcctcacactgttgcctaggctggaatgcagtggtgcaatgacagctcactgcagcctcagcctcccaggctcaagcgatcctcccacctcagcttcttgagtagctgggaccataggcatataccttttgtactttttgtagcgacatggtctcactacattgcccaggctggcctccaactcttaggctcaagtgatcctcctgcctcagcctcccaaagtgttgggattacaggcatgagccattgcacccagtcatctcaggcagtttttaaaaaatttttatatatagagaaaaagtgcactcagcagccagcatgatccaaaggagaagcagctgcaccctctcaagtgatgacggggacacccctcggctgatgaacaagtttccttaacccagtttccgcagcggtggaggagtgcagccagaaaggctgcctcgctctgtctctccttgaactcctgggttttaacctcacctttgtcttcctggcaagcctccttgttctcattgaggtgaggtggtttggattcacctgctcgcttaggaggttttagagtcccgcactccttttccccacctccttccagaatgtcaggaaactgagaatgcagattcctgcagaaagtggcctcttgttcactaaaggtaaaggtttcacctctggtgagattaaagaagaaaggcctcccaggtgatgctcattcacagggaacttgtacagattctggggggaggaaaaaagggggaaagggctgaaaacaaaactgttgggtgccatgcgcactacctgggtgacaggatcattcatgtcccaaacctcagcatcatgcaatataccctcgtaacatacctgtacatgcaatccctgaacctaaaataaaagtggaaattatttttctttaaaaagtgcaagtctggccactttgggaggccaaggcgggcagatcacctaagatcgggagtttgagaccattctgaccagtgtagagaaaccctgtctctagtaaaaatacaaaattagccggtaaaaatacaaaattagccgggcgtggtggcgcatgcctgtaatcccagctactcgggcgactgaggcaggggaattgctggaacccagaaggcggaggttgcaatgagtggagattgtgccattgcactccagcctgggcaacaagagtgaaactctacctcaaaaaaaaaaaagaaaaaaaagtgcaagtcctcccattgcccctcagacctcctgagtcagatcctctggagtggggcccagcagctgtggttctgcaagccctccaggtgacgctcacgctgctaatgaaggtggccagctctccctcttccgccgcccagattgttgagggtaagccagagaaccaatggatttcgagttatgggtgtgcctgctctcctccatcagccggtggcagcaggttccgggatacccgaggtcaaatgctatctgaatggcgtaaaggtgccaggaatcgtccgtctccggaccctgctctgcaaggtccttggagtgctgttcagtgtggctggaggtaagaagggtccaacttgtatccttcaaatactcaaagggcagagacgacaagaagcatgatgtatttcagttattagatttggactgcagggcccagcctcaaacagctgatgtctgcactttttgttgatgggctgtttttaaatgcagacactgttcgtatgttaccattcagatacctgacaaacacactcttcagttttgggatttggaatttagcttgtggaattagcttttgtcaaaattagcaagctttttgtgtcaacagccagatagtaaatatttaaggctttgtgggccaagaatcagaatggaagctcttatgtagatgtttatgtaactatttacatgtgtgcatttaagaacgtaaaagccagtcttagttctcaggccgtgtaaaaccaggagggagctggtggtctgggctcacaggctctcatttgctgacacacaatttagaatgtagagtgttttctcttctagcaagacttgaaatggagcttatttggtgggaatttggctctttctcttataaagtcttaggatcatctctgttcagttgtcacgaggaaggtttttgtagccaaggtctcctgacccaggggcgtttctgcactgactgttggtctttcctttttcaccctgcccagggctcttcgtggagaaggaaggccccatgatccacagtggttcggtggtgggagctggcctccctcaggtaagatgggctgagagggtgtgggcctctgggcaggcctagtgggaggtctggttacactgggccaaatccattgggacaccctgacatcacattggaacctggtgccattctggcttcacgtgtaaaccatgtgtctatctctcaggaaagggcataacttatacttggaagttttaatgatgccctaccgagccctaggagcaaaaatgagacatagagaaaaactgtgacgtggcggatgaaagtcactgggtgcttccatagccatcaccaggcgcctctatatagggtggctgggtggatcatctcagtgctgccagatccaagaggctcgaagcatcgactgacatggttttaggcacagttccgtgctgattctagttggcgtggtacagtcataataactgctgctaattatggtctgtgtgccagacgccatgtatactaactgctttctccttatagccaccttcaatgattcgttgttattattacccccatcctcagatggggaaactgaggcttagagaggttgaggtactagctcgagacctcaaagctcccattcttgggggctactccagatccctggctgctgttggagaagtctcagttccctgtgaactgtcactcttagtcatttccctctccagtcctgagaagagggagttattgtggttgggagtctctgaggtgaaggagggaagattctttcgtccagagctcgtcttttggtctctctcctgctactgccttgagcaccagatctggcagaagtgagccaaggggtggaaggccaggcgtggagtgggcatcagtgtgcacctttgtggggcagacagaggacaggctctgggcccttctcttcctggcgctgctgagcagagcagactcggtcttctgcaacagcttccgcgtccccttccctcagctcagccatttgcctttattctttcagacttgttgactctgcacaaaatgggatttcagaaggtcctagaaacacgagggcaggaaaaataagctcctcccaagggtggggggtaatctccttttttcccaagtttttttattttcattttttgagacggagtctcactctgttgcccaggctggagtgcgatggtgccatctctgctcactacagcctccgcctcctgggttcaagcgattctcctggctcagcctcctgagtagctgggattacaggcatatgtcaccacgcctggctaaattttgtatttttagtagagacagggttttgccacgttggccaggttggtctccaactcctgaccttaggtaatcagccgtccgcctcggcctcccaaagtggtgggattacaggcgtgagccatgagctaccacgcccagcctccttttttcccaagttgctgttctggactttccttcctgcagcacacttacccaggtgtgctcaagcagaggggcctcccctgatgccgtggattcccatagtttcagtcctaggctgcccctgacctgtgttcttttttttttttccataattactggggtacaggtagtatttggttatatgagtaggctctttagtggctctcttttctcttgctttagtttcagagcatctccttacggaagatccagtttaacttcccctatttccgaagcgacaggtatggaaaggttagaaattggtttcttttttggaaacaacatgttcatgcgctgcgggtcagactcgacacttgctctagcctggcagtatcccctgcggggaaacccgactgggagaagggggcgggctttgaacttttcttctggaaataagaagccaaagcaccaggctggcatcgtgacttttattttgtcatgccgtaaggcctagaagcatctcaggcaaatgaagatggtcccagattaaaaacccaaccaagaaaggccacagacaggcatattcttaggaaggcgttttgtattccccagtgattcacttggtcagccaccctcctgggtcagaaggtactcttagtagacttcttagccctgtatcagatgtgtgtgttactgacctgccggcctcgtaaggctctttcaatcagagactcagtttagagtcacggaccaccttctttttgtattcctgcaagttcggcacatacccagaaggcaccttgatgtttttactgatgccggggttttctggaaggaagatccggtgggaacatggtgcagcagtgatcgtgccgatctttgatctgccccctgagctgggggctgagattctgagatcacagaaaacacagaggtcaggggctcctgttcccaggcagagtagccgccatgctgaaagggactctggtgctaaggtgtgtggctctcgggtggacacactcgcggcaaaggctgcctcaccagtgacctgcccttccaggatccctgcctattcattcacaggtgtgagaaaatgttcatgataaggaagtcagaaaccaccttttgggggctgggggctctttattggataacccgtctctctcctctcctcagagacaagagagactttgtatcagcaggagcggctgctggagttgctgcagctttcggggcgccaatcgggggtaccttgttcagtctagaggagggttcgtccttctggaaccaagggctcacgtggaaagtggtgaggaggaccttcagtgaaagcattaaccacaccccccgaattacactgggtgtcccttactcggtacatggaatggtagttttgatgagactggggggtcaactggatcagaaacagctttcctcttgtgcccataacctccacactggactttctgtacttctcatatcaataccctccctaaccccaaatcaaaccgctgttactttttttttttttttttttttttgagatggagtcttgctctgttgcccaggctggagggcagtgacgcgatctcggcttactgcagcctctgcctcctggattcaagcgattctcctgcctcagccttatgagtagctgggattataggcacgtgccaccgcatccagctaatttttgtatttttagtagagatggggcttctgacatcaggtgatccacccgccttggcttcccaaagtgttgggattacaggcgtgagccaccacgcctggccttgttatcctttcttgatgaaccacctgacatgaaaatgtgaaactggctgttgtcataaagcaggaagtgatggggcttggactggagccggtcttctccctcagagcaggctgtccttccctttgcattgatccttccttttggtgcaaggtctggtctgtaaaggctgtaaataggctctcatagtagagtaggctgctggaacggaaacttcttaaagcccaatctagagttggtcatacctggggtgtatctactgtaagggtgactagatctctgtacccggatgtagattccggaggtctctgcgtagagcagtgggtaccaggaggaagggttgggagagagtaggacatgccactcctgaaccttcttgtcttttgtcacctctcccctagctcttttgttccatgtctgccaccttcaccctcaacttcttccgttctgggattcagtttggaagctggggttccttccagctccctggattgctgaactttggcgagtttaaggtatgttttgtcctttccccaaggatttttaatttgacccatgaaaatttcctctcaagtgaaggaccagagagaaatgagcagagggctaggtacaacttccagggacacatctcacccattagcctctgccgtgcgggaaagcagccccactcttgcttctgtcttctcttctgtctcttccggttctcatggctgctatggtttttctctccctctccctttccccttctctcagtgctctgactctgataaaaaatgtcatctctggacagctatggatttgggtttcttcgtcgtgatgggggtcattgggggcctcctgggagccacattcaactgtctgaacaagaggcttgcaaagtaccgtatgcgaaacgtgcacccgaaacctaagctcgtcaggtatctgcacagtcgcctcccccccgagcctgctgcggctccctgagcttggtgtgggccgcgccatctctcccgaggagcggaccctgcctccacggctttgatttctcatctaagactgagaatctaaacacggccatgcatcttccctacttgacaggccaaagggctgagccagcttaattgatgtcagagttgctggttgactccctgcctgtcctgacttggccactcggacacatgacaaggttagaagggtcaccgtggccctgccgagcagcttgctctcaggaggcttctcgccccaggacttattataatggaaagccattcattccttggagagagatgatgtggacgtagcagcccactttaactgtccactttttacaaacaaattgctggaatacagcaaatcacggatcaattctgcacacatgttgactgaccaggggctgctgtgaatgctgtttggagaaatcggggctgggggtaggcagggttatgttttgaatttctgagaccagagcttctttctgtggcgttgtaacagctgtgctttgcctcctagagtcttagagagcctccttgtgtctctggtaaccaccgtggtggtgtttgtggcctcgatggtgttaggagaatgccgacagatgtcctcttcgagtcaaatcggtaatgactcattccagctccaggtaaccccagtgcacctgctacctttatcccataccacgaggaagaatccagaaatgtatgaccttcctctgttgagaactaatagatatgttgggttcatccttccacacccattacctgagcgttgagagatatgggaatctgtagtcgtctttttacctcagagaaagtgcacaccacatgccctgtgtctttgccacttctgtgaacaaccctggcgtcacagaggggaacctgggaacaaccctggcgtcacagaggggaacctgggaacaaccctggcgtcacagaggggaacctgggaacaaccctggcgtcacagaggggaacctgggaacaaccctggcgtcacagaggggaacctgggaacaaccctggcatcacagaggggaacctgggaacgaccctggcgtcacagaggggaacctgggaacgacactggcgtcacagaggggaacctgggaacaaccctggcatcacagagggcaactcctctctgttgaacaacactcatgggaaacagacacttggaaagctgacagcaaggtgctttctgagccccagttactcttccacctccccttgcctgaaggggccacagcccagaggctcagcacccacctcatggcctctgtgactatgacagtcactcttgagaggaagaaatatctgtgtcagggcaaggaggcttctctcttcccagcatcctctgcctcttcccggcgttgggtcctttgtgggtgcgccaccctcctgcactcctccttttcccttcttggggggcgcgatattttccagaggctttccctgaggagtggtcccatgaggtagtccgtggagcctactccacgctgtgttctttcggtccaacccggaggctctgagagctacacctgtggttcagtgagtcagccagatgtgtgattccagcccttggctgcagacaggtgagcattctctaagtgcggtcggccatccacatttgtgggtcctgcatccatggaattacgtagggtcaaccaactgtggagcaaatatattcaggatgcaaaacataaaaaagaacaagacaacagtaaaaaataatgcaaataaaaaacagtacagtgtaacaattatttacatagcatttacattgtattagggtattataaataatctagagatgatttaaaagtatataggaggacctacataggttatatgcaaatatacaccattttatatctgggacttgagcatccctggattttggtatccatcgggatcctggaccctatccctggtgaatactgaggaacaactgtactctttccttgttgcttctctgtaaccacttgaatctctcagatccccattggggcccttgtcttggaggacagcctcttcagtgtccccagttatatgtatatattatatatatatatatatatatatatatacacacacacactatatatacacacacacacacacacacacacacacacaaacacacattatatatttctgtttgttttgtttttttaagacggagtcttactctgttacccaggccggagtgcagtggcgcgatcttggcccactgcaacttccgcctcccaagttcaagtgattctcctgcctcagcctcccgagtaactgggattacaggcacccaccaccatgcccagctaattttgtatttttagtagagatggtgtttcaccatgttggccaggctggtctcgaactcctgacctcaagtgatccacccatctcggcctcccaaattgctaggattacaggtgtgtcaccacgcccagcctggtttatatatatatgtttttgtttttgtttttgtttttgtttttggcaaagtctcactctgttgcccaagctggagtggagtggcaagatctcggctcactgcaaactccacctcctgggttcaagcgattctcctgcctcagcctcccaagtagctgggacttcaggcacgcaccaccattcccagataatttttgtatttctagtagagacggagtttcactattttggctgggcttgttttgaactcctgaccttgtgatccgcccacctcggcctcccaaagtgctaggattgcaggcgtgagccaccgtgtccagctggtttatatatttttaaagggttgagagaaaaaaaagaatatgccgcagagactgtacatcactggcaacttctaaaatatttactgtctggctctttatgaaaaagtttgccgacccctgttactagttattcccaagcctagctcattaccagacagataccttgatgcgtgtgatttaaagcatacaaaaaacgattctgtggtcaaatgggctaggaattaaatatgcttctttatctttttagagacaggatctcactctgtcacccaggctggagtacggtggtgtgatcatagcttattgtaacctcaaactcctgggctcaagcgatcctcccatctcagcctcccaagtagctgggactacaggtgcatgccaccacatccagcttatttttatagagacaggatctcactatgttgcccaggctggtctcgaacttctggcctaaaatgatctcctgttttaggagtgctaggattatagacacaagccatagcacccaacctaaatacgttcctttagtacagaacttctagggccttattcccataagtgttataaatgtttggtgtctttattgtgtaccagatattccactgagtactttatatgatttcatttaatccttatcagcactgtgcttgctggccagtagctgtgcccccattttacagctaaggaagctgaggcacagtatggtcttgaccaaaaaccttcagctagtcatatatagtgagagggtaggtgttgttaccattttataggtgaggaaactcacaaaatgaaatatccttctcaacgtcactagagagtggcagagtttagagacaaagccatctgattttggagcctgtgctcagcttttagcagacacactgatttccaagaattgctaggatgtttctcagtgcagttgaccacaggactctctggaaagccttcaggactgaacttcctccagacagtttgggaaacactgcatgtgtctattatgaagccatcagctgagctcatcccccgtgcactccacaacgctgaggctctgcacatggctcaccagtgccaggtgctgccagtcagcagtgccgtgctgtttgcacagcagcctgcatacgtctatattgcccagcccgtttcacctggcggggtcacacaaaccaccccctggtattgttagcacgtccacataatggcatctccacagctgtgtcatccagaagaaacccatagccttgattaacctttgtaataagactccctatttgcatgcacagtgataggtgtgaagtacaaccttgtaccgttgtacactgtcaactagaaaataaaacagcacacttgaaacacccttgccttctagcaaagatcccatcttcccacacagaatgatggcaagaaaatgaggtctaaaatgtgtagaagtagtagaagaaataatctctttttctgtttgggttttgttccccagatggggtctagaaggagaggcagcctggaggactgggtctgctctccaggcattatggaggtgggttttcttttgcagcaaattcaggtgctttttttttttttgtagcaaattgcagcaaaatcaaaggctttttctatttggaaccagagttggggctttcggtcaagtggtgccctggattttcctccccagatacctgtcaactcccagtcacttgctctcacctgcctcatattcccccagtcctagggctctcaggccaggcttctagcagcatcacttagaaagttagcaccgggagaggaagcagaaccaaattcacggtgaatcacggccatagtgacattttcatcatgagtgtggatgaacaaaaggccctcatcccgattctttcatctgtgcattcagaatgtgaagaatacacttgcccgtgtggctgccgttggtagaggtcagtttttggcctgtttgattgatggggaaagctgtgcagccacctgttttggacccggctggagacatcccacttgaagactcaaagtcaggtgtccttgtactgattttctgattccttcttctcaggtcacagaagatgtgaattcaagtatcaagacatttttttgtcccaatgatacctacaatgacatggccacactcttcttcaacccgcaggagtctgccatcctccagctcttccaccaggatggtgagtgtctgcactgcagcccaatcgtgggtgattggtgtcatctcggacacagccaggcttgcccttcattccaagcaagaccaggacttctttgtaacgcccacccagacaaaagattggtttctgcctcctgtgttggaaggggaactggtatggggtgtggtcgggcccggtaggtctactgggccttggcaggcatccggtagtgggactcaggttggctcttcccttgcaggtactttcagccccgtcactctggccttgttcttcgttctctatttcttgcttgcatgttggacttacggcatttctgttccaagtggcctttttgtgccttctctgctgtgtggagctgcttttggacgtttagttgccaatgtcctaaaaaggtactctgtgtgtgtgcgtgtgtgtgcgcatgtgcatgtgtgtgcacgtgtgcgtgtgtatgcatgtgtgtgcgtgtgcgtgcgttgatgtgtctgtgcccatgcatgcacatatgtgcataggcacaagagtatgagctgtaggtcctccccacagcctatcagtgtggttcaaagccatgttctcggtgttttccttcactagctacattggattgggccacatctattcggggacctttgccctgattggtgcagcggctttcttgggcggggtggtccgcatgaccatcagcctcacggtcatcctgatcgagtccaccaatgagatcacctacgggctccccatcatggtcacactgatggtgagcacactccctccaggcccctgtcaggctcagggccacgtccgccccacaggacctatttttaggtctttgctttgtgtttcaggtggccaaatggacaggggactttttcaataagggcatttatgatatccacgtgggcctgcgaggcgtgccgcttctggaatgggagacagaggtggaaatggacaagtaaggccatgattttgctcatgtcctagtttcagaatgtataagctctgaggcctaaggaatgttgttattagggtaggaaacagtaactcacttttcttgggctgaaagaagcaacacacccattcctgagcatgtgtgagaatgtggagcagcccatgggctgggggctgcgggggcagggcaggggacacgggcactgtgggactgcagtgggcagggcctcttcgtggtggtttgactcccatggcattctggttagatatgaggtgaggtctctggatcaagttcgtgatgtgattgaatgtttaagggtatgccaagccccaggagtgagaatagcctgtttcacatgtgcccaccagaatgccctactgccagccgggattgttctgggcataatcacctcataacccacctgctaatccacaggtacctgggcttcctgtgtctagatagcaggcaaggcccttacgggctaacacgggggccagcaagccgtttctgtggagggccagacaggagtttattttcaactttccgggctgtatggtctctgtcacgactactcgactctgtcattgcagcaggaaagcagtaagcgtgacggacttgatcagtgggctacagtttgctgtgccctgatctaaagggggacccaagtgctgtgtttattttattattattgtttttcttttttgggacaggatctcactctgtcgcctaggctggagtagggtggcatgattatagctcactgcaacctatgcctcccaggctcaagcgatcctccacctcagcctcctgagtagctgggatcacaggcgcgtgccaccacacctggctaatttttaacattttttttatagaaatggggttttgctgtgttgcccaggctggttttgaactcctgggctcaagcaatctgctggcctcggcctcccaaagtgctgggattacatgcgtgagccgctgcacccagcccacccatttacccagttgtggtaaatgctgtagcagaattagcagttcaggggtagtatgtggagcgtgctgcagggcaccgaggagggcgtggccagcccctggaccagcagccagggcttcctggtgaggggatgttgctgttgagctgagggatgagcccgagcccatcagcctggtacagcagggtacgacattccaggtgcgggaacagcatgtgtcgggggatagaagtacaaaggaatgcatcgggtttgagggagagctggggcagttcagaagagccccccaccccgcccgtggtctgagcagggctggagagccagcacagcttgctcccaggggcctgcgggcactgtcatgaggctggatgacttgccctcctcccccaggctgagagccagcgacatcatggagcccaacctgacctacgtctacccgcacacccgcatccagtctctggtgagcatcctgcgcaccacggtccaccatgccttcccggtggtcacagagaaccgcggtaacgagaaggagttcatgaagggcaaccagctcatcagcaacaacatcaagttcaaggtaaagaaaacggcatgagaggaaaggcaggtgagagacaagcggtcccgtctcacacggcttagtgctttgcccacccctggctggggtggacttaccggctctcaggggaagttggcactgttctcatcacatgcgacagggagagtagatttgacagcaggggcagctttatcaggccgtgaagatgtgtgtgcgttcttgccgcaatgagcatgtggacagatctgtttttcaagtcagcagctttcatggtttgtttaccatgtgagagtatcagggagagttctagagatgccagcaacagaaatggacttcgacctccttaagaaagagaaagaaatccacaggaaagctcaggacagctgggaaagctgaaggaccagaaccatgtgctgtggggagcagtgcagggtctagcagacatcccttgggtaccaggaggaaggagcactggccctgggttcctcctgattccgattcagaatccagggagagggggtatcctgttgcctcacttgggtcatgtgccactccttggctttgggggcaggcacgttgattgaaaattctatcaagacaggatgtaggagatggcttgttcccctctggagaatcaagctgctcttcccagattaaaggaaaccacagaagctgcagccaggtcctagggttcaggctcatttgaaccaccagcctgagccactcttttgaacctcagccccattaagttcctgcgtccggatgtgcttctgaccctccctgtcacccaaatccttaagctccatcagtactgctgtgttcgtttgcccatgcgcagtagcctgtggcctccccacccacagaaatccagcatcctcacccgggctggcgagcagcgcaaacggagccagtccatgaagtcctacccatccagcgagctacggaacatgtgtgatgagcacatcgcctctgaggagccagccgagaaggaggacctcctgcagcagatgctggaaaggaggtgagagcctggcggggcccccactgcccgcagggctacacagcggtggggtgagcctttggctcagatgttgtgaggtggctcctgagtttcctgggaaagttggatggggagcgggctgggaacatggatcagaagcgctcccgctgagggtatcccaggcagcatctggtttttgtgtaacagatacactccctaccccaacctataccctgaccagtccccaagtgaagactggaccatggaggagcggttccgccctctgaccttccacggcctgatccttcggtcgcagcttgtcaccctgcttgtccgaggagtttgttactctgaaagccagtcggtaagtctctccgaggcagaaatcagccaggccagacctgacgaagctcgaggggttgggcgctgccggcgggccgtgaacagtgccatagggaaagctgaatgcaaggcgagaagtgcagagtggacttaggggaggagtcgccacagccgggtggtgagaagcaacagcggtttattccttcatagttcaaggccagaagtacaaaatccgggtgtcaccagggcagcgctccctggctctggtgctgtccttgccccttcctagctcatgggagttgcctgcagaccttggtgctcctgactgtgaacacagcccccatcctcgccactgtcatcacacggcgttctcctgtgtatcttctctcctttccctaaggacgcttgtcaccggatttggggcccgccctaatccagcatgggttcatctgaactcggtcacatctgtagagaccttgtttccagaaaggtcgcattcataggtactagggcttaggacttggccatatcttttggtggggggacacattcaccccccagccactttacttagtgctttctcacttaaacttcctaataagccatttgcatctcatgaatcaggaagaaagggagtgcagacagatcaggggacttgcccagggtgccacagctaggacttggccaaggacttggtttgactggagagctctcactctggagcgcttgctgctgctgcaccacctgcctcagcagcctggagctgggcatattcaggcatcaaggggaggggctctaaggtgaccctgctggccactgctgcctgagcacggacagtgtctgggttggaattgcagagcgccagccagccgcgcctctcctatgccgagatggccgaggactacccgcggtaccccgacatccacgacctggacctgacgctgctcaacccgcgcatgatcgtggtgagaagggctgccccggcctgtcccatgcggagctgcctcttcatgccgttggcgtctcaggcagtcagtgacacgtggtctctttgcaggatgtcaccccatacatgaacccttcgcctttcaccgtctcgcccaacacccacgtctcccaagtcttcaacctgttcagaacgatgggcctgcgccacctgcccgtggtgaacgctgtgggagaggtgagcgaggccccggccctgcccccacctttgagagaggatcccctagccaggtgctgtttgtgcacccaggcttctcaccagaaacgtaggcatcccaccaggaggggagagtgtggcccaacactagctttgaaccctgctcggcttccgtgcactcgggaccctttcccctgcctgccagcagatggcaccagcgtcccactggccgtcctttccagccagagccgcgcctctaccaggctgtgtcttcctcctgaaatgttgctcttcactccgtaccactggtgttccttggttctccacctgcgtagggatttgcgcattagatgagagaatttcaagcaaaatactttgagttttacaaagatataaaacacctagtaattattgctgcagactttccttttttcttctttttagaacttcattattttcttattacacaaatattttcttattacacaaatatgatttcattgtaggaaaatacaaaaacacatatgagcaaaaaacaagcaaaaaccaaaccctcgtccctaccctgtcgcggtagccctggtaacttttcaaggccaccctctcagtcttttgttgttgttgctgttgttgttgttttgagacagggtctcactctgtcacccaggctggagtgcagtggcaagatctcggctcactgcagcctcgaccttccaggctcaagcagtcctcccacctcagcctcctgagtagctgggaccacaggcatgcgccactatgcccagctagtttttgtatttatggtagagacacggtttcgccatgttgcccaggctggtcttgaactcctgaactcaagtgattcacctgcctcggcctcccaaagtgctgggattacatgcgtcagccactgcacccggcctcagtcttttcttctatgcggcacaaccctggcatgcatagtgcgtacttacacaggttttgttgcagtaggttaacttatgtcccttgaaatgtaattgccaactacactgacagagtcctaacatagtttatgacgtggctttggagttcccaacaacagtgacacgtgggaaccactgtaacgacctgtaacaaatgactcccataggtcactttgcaaggtggtgagtatgaggcatggcaggggtcataatctcaggagacttcaagggccccaccgcttgcacatctgtgaagcaggctggtcatgatgggagctgagcgctgagcatgtgccctgtggaaggacattttagttcagatgccagctggcccaagccctttttggagctaaccttgtccccttggcctccagtgtgtgagccctcgttagctgtttatcccaatcaagctgtgtctggctgtgcactatccaggcctccacattctgtgacaaactaacagggccggctcctgtcactcctgttctcgccagcgggttttaccctgaaggtgactcaggccttctctttgccctagatcgtggggatcatcacacggcacaacctcacctatgaatttctgcaggcccggctgaggcagcactaccagaccatctgacagcccagcccaccctctcctggtgctgcctggggaggcaaatcatgctcactccggcgggcacagctggctggggctgttccggggcatggaagattcccagtcacccactcactcagaaagccgggagtcatcggacaccttgctggtcagaggtcctgggggtggttttgaaccatcagagcttggacttttctgacttccccagcaaggatcttcccacttcctgctccctgtgttcccaccctccagtgttggcacaggcccacccctggctccaccagagccagaagcagaggtagaatcaggcgggccccgggctgcactccgagcagtgttcctggccatctttgctactttcctagagaacccggctgttgccttaaatgtgtgagagggacttggccaaggcaaaagctggggagatgccagtgacaacatacagttcatgactaggtttaggaattgggcactgagaaaattctcaatatttcagagagtccttcccttatttgggactcttaacacggtatcctcgctagttggttttaagggaaacactctgctcctgggtgtgagcagaggctctggtcttgccctgtggtttgactctccttagaaccaccgcccaccagaaacataaaggattaaaatcacactaataacccctggatggtcaatctgataataggatcagatttacgtctaccctaattcttaacattgcagctttctctccatctgcagattattcccagtctcccagtaacacgtttctacccagatcctttttcatttccttaagttttgatctccgtcttcctgatgaagcaggcagagctcagaggatcttggcatcacccaccaaagttagctgaaagcagggcactcctggataaagcagcttcactcaactctggggaatgctaccattttttttccaaagtagaaaggaagcacttctgagccagtgaccactgaaaggtatgtgctatgataaagcagatggcctatttgaggaagagggtgtctgcccttcacaaacacctctctctcccctgcactagctgtcccaagcttacatacagaggcccttcaggagggcctcctgtgccgcagggagggtgcgtggggaagatgcttcctgccagcacgtgcctgaaggtttcacatgaagcatgggaagcgcaccctgtcgttcagtgacgtcattcttctccaggctggcccgccccctctgactaggcacccaaagtgagcatctgggcattgggcattcatgcttatcttcccccaccttctacatggtattagtcccagcaggcatccctggggcagacgtgctttggctcaagatggccttcatttacgtttagttttttttaaaaccgtggaggttgcccacgggcctcggcacctggccctggcagcacagctctcaggcccagccctgggcgacctccttggccaagtctgcctttcaccctggggtgagcatcagtcctggctctgctggtccagatcttgcgctcagcacactctagggaataattccactccagagatggggctgcttcaaggtcttttctagctgattgtggcccctccattttccccattttcttatctccctgaccaaaattgctttgacttctaaatgtttctgcttcccagaatgcacctgacttatgaaatggggataatactcccaggaaatagcgcaggacatcacaaggaccaaaaaggcaattcttatttaaatgttactatttggccagctgctgctgtgttttatggcagtgttcagagcttgatcacgttatttcttccttttattaagaaggaagccaattgtccaagtcaggagaatggtgtgatcacctgtcacagacactttgtcccctctccccgccccttcctggagctggcagagctaacgccctgcaggaggaccccggcctctcgagggctggatcagcagccgcctgccctgaggctgccccggtgaatgttattggaattcatccctcgtgcacatcctgttgtgtttaagtcaccagatattttgttcccatcagtttagcccagagatagacagtagaatgcaaatacctccctcccctaaactgactggacggctgccaaggaggccccaaacccaggccccatgcaaaggcacgtggtttccttttctcctctctctgcatctgcgctttccagataagcccaaagacagcaacttctccactcatgacaaatcaactgtgaccctcgctccttccatttctgtccattagaaaccagccttttcagcatctcacccattagcagccccatcacccagtgatcagtcgcctcagtaaagcagatctgtggatggggagcctacgggtggtaagaagtggtgttttgtgtttcatctccagcttggtgttccatggcccctaggcgaggtgatcagggagtggggccaatgggcccccggccctggctttgggaccttgtgctgagggatgatttgctcctgaccttgattaacttaacagttcccagctggaagggacactttcaggacccagtccactgtatggcatttgtgatgcagaattatgcactgacatgaccctgggtgacaggaaagcctttcgagaggcccaaggtggcctcgccagccctgcagtattgatgtgcagtattgcaccacagctctgcggaccttggccattgccgcagtcgcagcttccttttttctgtttgcactgtttgtttgtatgatgttagctaattccactgtgtatataaattgtattttttttaatttgtaaaatgctatttttatttgaacctttggaacttgggagttctcattgtaaccctaacatgtgagaataaaatgtcttctgtctcctctgtctcctttagccttttgtctccatgctgctttctttctttctttctttttttgagacagagtctcgctgtcacccaggctggagtgcagtggtgccatctcagctcactgcaagctccgcctcccaggttcacgccattctcctgcctcagcctcccgagtggctgggactacaggcgcccaccaccatgcctggctaattttttgtatttttggtagagatggggtttcaccatgttagccaggatggtctcaatctcctgacctggtgatcctacccgcctcggcctcccaaagtgctgggattacaggcgtgagccaccacgcccggccctgctgctctttctttcaagggatacttgctttttattttactccccctctttctgatgtgtggaaattacactaggacgtagttttagagtctcagagctctccctatgcagctgggcagtggggctcttcattcttgcgggtccacttctctgtattagacagtgaccttaataagaacagatttcatcctgtggatcttagcagaggtcaccgttgtctgtttctcccttcagatgaacactcttcctgatcctctcctctagaattcatctcctcctgctagcagccgcgtcctggaggagcagcggatggggaatccattctgtttcttcctggtgtttaggaagttgccccacacacagattgccccgatgtccaaccagaagaagtgaaactgctgctgggtctggagaggtgaagacccgtggccagcttctgttgttgccatcggccattgctttttgttcgcttgcttttggttttgcaagaagagcggcctctgtctctgatctgcttcaaatcatcattccatcagtgacagaagtggctgttccatcagtggtcgcagccagttcagctcctgcatccatccccaagtgttctgtaagtcccaggggcattttctgccttgtgtttttgtcatttttcaatcagtttcattcaatgagaactccctgtgttacctgtgttacggtgacaccttgagaatgggctacttcccctcctagcaacccgcaacaccatcccagacctcaggagccaggtttgggccagtgctgtctcctgtcgctcttactttcatccttgtcattctctaccccctggttttcctggtatttaaagtccaggtagagaagattttgactggaggtggttaggtgaggctctccccccacctcaaccccctgccattagttcactgggagcctccccctttcctccgcaaggagcaagttactacttcatttcctcttttcccaatttctggacaagaccaaggcaatttgaccaacatttatggggcatcaactctgagagtgctgaaggggcatttgccctcaaagagcttgcagtctagggacgtagacacaagcaattgcacataggcaactcgtgttgtgtgctattataacagttacatgtgcaacactgcctacgaagggactcattgttactaggcatgaggtaccaggaaagaagtagtgttcatatgagccttaagaaatcagtacaatgtcctcgggaggaccagaggaaggacaccccaggtggaaggaacagcagaaataaaggcacagtggcatgtgtgggtgtggggtgttggagtgtcatagaatctgatgaggttgggatccatgggggtaacaggtgggaaaacagtttactctgtttaaggtgaacttattgcctggtgttttgtgctcagagcaaataccctcttcaggagcagatacaaaaagccggcatcttctccagcagctcttagtaaaatacaagcccaggcccttcagacccggattaggcaaagactatgtctgttttccaaatacttgttagtacacaaaaggcacatgaacttgtagtttgtctgcatggcaaacctttcttcactttgctcagtttttatttttttgagacaagtctcattctgtcacccaggctggaatgcagtggcacaataccagctcactgcagcctccacctcccaggctcaagccatcctcccacttcggcctcctgaatagctggaactacaggtgcacatcatcatgcctggctaatttttaaattttttgtagagatggggtctcactctattgctcaggctggtcttgaactcctgggctcaagtgatttgcccaccttggcctcccaaaatgctgggattacaggagtgagccaccacacccggcctgctcagcttttaaattcaacactctgcctactcttttcaaaactaaaagtaccattaccttagctgtagaacctaactctctcgaaatgtaccagagaaaatctaattaatactctcattttctgaatgttcccccctaaaaacaacaaaaaccccactaggagtggaatttgaggcctccccaaccacctaccaaaaaaggagggtgaaatgaaaggaagaagaaaaactcagcattctttcctctgacaaagagtaaaacgacaaggaatatcggcctgaattctcttcccaagaagaaagaaagcacaccaacgcaggcatttgtcttctgtccatggtgctgaagtttattcactttcaaaccactttcagtaacaggtgaggttctaccttaaaatttaatgcatggggtgggagaggcgaggaagtcaccatcaaaccactttatctacagttagcataagatgtgagaagtgttgacaggaagctgcagcttagatgggatgatcacaactccatggcaacaagatgacacaaatgcagcagagaccccaggggacaggagcctcttgcagtctgtccctaggcccagccctgcttgtcctccctggctgttatcttcagtactgcaaagagaacacagacatatctggcttggtgacctggctgtcctggaaaagtcagcttcatgtatgagtgtgcccatcctctgaacttgattactgaccacctgcttcccaccggcccccaccccagcctgatgaccctctgagcttcatgaattgataagcaagttactcatcagagtaaatttcacttaagcccttcaggatcttgcaattctggggaggaatatgaactgctaatcagccatgcaaagataacttggctctatgaatattttaatttcccagtgctagtggcagttgctttttttttttttttttttgagacggagtcttgctctgtcgcccaggctggagtgcagtggtgccatctctgctcactgcaagctccgcctcccgggttcacgccattctcctgcctcagcctccggagtagctaggacttacaggcgcctgccaccacgcctggctaattttttgtatttttagtagagacggggtttcaccgtgttagccaggatggtctccatctcctgacctcgtgatccacccgccttggcctcccaaagcgctgggattacaggcgtgagccaccgtgcctggccttttttttttttttttgagacagtctcgctctatcacctaggctggactgcagtggcgtgatctctgctcactgcaacctctgcctcctgggttcaagtgattctcctgcctcagcctcccaagtagctgagagtacaggtgcccgccaccacacccagctaatttttgtatttttagtagagctggggtttcaccatgttggccaggatagtcttgatctcttgacctcatgatccgcctgcctcggcctcccaaagtgctgggattacaggcgtgagccactgtgcccagccccccccccttttttttttaagcattttctcagcagactagctaaggacaatagatggcatgtcctgacacccatggggcactctgggtgttggggcagaaacttgagagggaatgagcttctgcattggtccctttcctgctgaaggtgtctcccagtagtgtccatcccatcccatttccatccccagttcctcttacccggaagctgttacagcccagtccgctctgggctccaatcctgtccatcctgcccccgaagcagctggatctccgcaggctccgaggggcagtgagcagcgccctcagcttgctttttaggagggcagatcgatcagaggagtcccaggggccccgcccgagggcacctccatctctctgggctgggctgacttccccggtccagggaggcacctcagggagggggctgagagcagcccccgcttcttcattcggctcactgagcacttgtgggggcacgacctcatcttctaaaggcatcttttcttccaaatggtccagcaaattctttagaaaaggaaaatacagggaaagggataaacctcactgacttggaggaaatcaagaggagtgagcacagcatcagaaagccccctggccccagactgcacccgctttcctggccctaccttgaaatccatcaggtctgcgttggacacggcattgtacatgggattagctctggtctgacctaggagctggaatgccagtaaaaggaggaagctcacggtggtggtggagaaggagctcatgctggcgtcgtcaaggagcaatccactgcttgctgctctgtctctcccctctggttcctctctggttcccctctcttggcctacgtctgtccctgtctcccagctgcccagtgccgcctctttttatagccccccagctctccaagcacgcaggagagacagaaccctccccattctgtcacttgcagtgataaagctgccaagtgagaagccagcaggagatgcccttttaaagttatcatcccgcagggcttgtcacagcccctctctgccttgggcagccccaacagccccccagaccctcagctgcaagagccgcattcttactgatttgactcaagaggctcccacttcaaaggtgtgagaagagtaaaaaagagtccttggttatctcaccgccgtgcctcaggattctttctcctcgacgctggtacccgtgcggggaaacagagggtgacgcttggctggtgcccagctcccctggtttgtttgtggctcagctgtcagggcctccaaataagggtggagaggaggaaatggcaggcagccagcagcccgagacaaatggatccagatgctcaagctggcctcacacctgcctcatccgccacgtgggcagacctctggcctcagacagggctgccttcacccctggcagtccctctccatggtcaggcgaaaggaagttattttttagtatataaagtcagctgagaaccaaatgtgatgaagctcccaggaatccaacccccaaatagaaatagcaagaaaaggcgggggagcacaagcatcctctctccaaagctcctcctcttccatgtcccccgcgaccctcctccagcatgctgcggggacaggcttagaggacgcagccaatttcatttcttccgttgctgtttatagatgctcagactcttcgtgtctgaagtttgttaacatccccctgcccttcctgggcttgtgcccgtggcaacttgaccgatggaggaagggaggtgggggtgaaggaggtatagtcagtttccctcaatgccttctacatccttccctgaggacgtggcaagtggcaagtgaccgagccaccaaggtcacaatttccctggcccccaaaagggaaataacaggcagcaagtctgtctatgtttaatgaatggcctgtttgctaagcactgaactcagtgttagccattaccattcaatgcaacgtatactgggggaaaactctaaatttgaagggctgagagaccagtactgtagcccaaaacaaaccagttgcatacctcttcgcagccttactttccttgtgtgtaaaatgagaaagaatgttaaaaaccggccgggtgcagtggctcacacgtataatcccagcactttgggaggctaaggtgggtggatcacctgaggccaggagtttgagaccagccctaccaacatggcaaaactctgtctctactaaaaatataaaaattagctgggtgtggtggcatgtgcctgtaatccccgctactagggaggctgaggtaaaagaattgcttgaccttgggaggcggaggttgtagtgaaccaagatcgcaccactgcactctagcctgggcaacagagtgggactcggtctcaaaaaataaataaataaatgaatgaataaagtagaaatcttccctgcctaccttgcaggattgttgtggagcccaagtgagctgagaacgtgtcaacacataacaagtgtgcagtgctgagtccctgcaagatggccatcatagttgtctttattggttgcttgtagcatgcctagcactgtgctgagaactttatggaaatgattttattttgatcaccatccccaggtggtagatagcattgtccttgcttacaagggaacagaactgagcccgagaggctatgccacttgcccaaggccactaggtgcctaagtggcggaaccaggactggatccccaggtctgacgctgatgtctgtatcctagcctatttcacgtagagagctgccaccttacctcttagctgcattccccaattaaacccccattccccatctttcagatgccccaagggagctccttcaccttccccatgcccctggggctgtagcttttttgtgcacttaccaagtctgtgtgtgttggctgctctcctgatctatttctacaccgaatgtgttttaatccactccttagaagctcagaaaatgtgtgttgagtgaccagctctgtcctggctggccagatctgtccccaggtgtgctgacctcatgactgaccaggtgaacaggacgttgtgcagccataaggttggaaatcagggcagcaagtgactagaggtcacaagaggtatccagggtgatattattctaagataagataaaagggaccctctttggcaagccttggggtttgtctgtaggtggggatctaatatttcatggggtggttagaagcagcctgtaggagtgagagagaagaaaagtaacaggcacagaaagccaggcccacctccatccccacctcttccacggctgaaaaatcaaaagccttttatttccttatcactggaaagaagtcatcttagtcatacaacgggtggagcactgcaaacgggtgggagaatccagaatccgggtgttgccagattccagcccagagtttggcttcacgattctctgggggtatgccttgggctgctgcagggagccccagagtgtgcagtgtcacccgcgtgcagagctggcacgaaatccccaacacattcgtggcatgattctgcgggacccagatggtctaaagcagaagccccagttgggaaaaattggttcatacttagggatgatcgttgctgactttgaaaatgatgttttgtttctttggtttaatatggaggtcactaagggctgaagactggggacagtttccctagaaaacaaagcccaaggcaaaaggtcactcgctaaagttttgtgggggttcctattcaaaggaagcaagagtgaggcggagtgagaggctgttttagttaactactgccgggtaacaagtcaccccagactgggcgtggtgactcacgcctgtcattccaacactttgggaggatcatttgaacccaggagttcaagaccaccctgggcaacatggcaaaaacccatttgtactaaaaatacaaaaaattagctgggtgcagtggtgcgtgcctgtcatcccagctaccctggacactgaggtgggagaatcaccacagcccaagaagttgaggctgccgtgagccatgaccaagccactgcactccagcctgggtgacagagtgagaacctgtctcaaaaagaacaaaagccaggcatggtggctcacgcctgtaatactagccctttgggaggctgaggcaggaagatctcttgagctcaggagttccagacaagactgagcaacataaggaaccctgtttttaataaataaacaaacaaaaaacaaaacaaaaaccaagtcaccccaaaccttagcaacttcacacaatgcacatctattatctcatcacctctgtgctctgtggatcagggatctggccctgcttggcctggggcccctgggcaatgaaggcgttggctgcggctgcagtcatctcaaggcttggctgggggaggataggctttcaggctcactcctgcagctgttggcagaagccacaggttctcgctggctggtggctggtggaaacatcagtttcttgccacgtgggtctctccatggagacgcaactgtcttctattaggtcaggcgagaaagagaagttacggaagaagccacagtctctttgttacctaatctcagaagtgacatcccattcttcatgttgtactgttctgtgtcccttagaagtgagtctctgggtctcactcacactctaagggagggggttacagagggtatgaagaccaggaggttggggatctctgggggccttctgaaagcactgcccacacaaatagagaaggaaggaaagcaaatgtaaggtgacattggctgagtgcagtggctcatgcctgtaatcccagcactttgggaggctgaggtgggtggatcacttgaggtcaggagctcgagaccagcctgaccaacatggtgaaaccccgtctctactaaaaatacaaaaattagccaggcatggtggtgtgcacctgtagtcccagctactcgggaggctgaggcaggagaatcatgaagggcagggctctgcaggaaggttgacttatttgggagtgtcttagtttaagttctcttgaaccggagacagatattccagtattagtggctgatcttggagacaaacccaggaaatgtcagtggagagtggggaagtgatacagaaaaagtagaagtcagtgaccacctctggcagtaggtgcttaatcctcctcccacagagaactccaaacaggttctctgtttggagaacagagacacatgccacctatgactcaagggagctgggtgtttgttttattttattttattttattttatttttgaaacagagtcttgctctgtcacccaggctggagtgaagtggtaatttcagccttgacttcccggctcagtgatcctcccatttcagcctcccgagtagctggactacagatgttcaccaccatacccggctaattttttttcttttatttttagtagagacgaggtctctctttgttgcccaggccggtctcgaacatctgaactcaatttatcctcccacctcagcctcccaaagtgctgggattacaagtgtaagctgctgcaccaggcgtgagctgggtctttaaatgccaactcctggccaggtgcagtggctcacacctgtaatcccagcactttgggaggctaaggtaggaggattgcttgaggccgtgagttcaaaatcagccttgcaaacatagtgagactctccatctctacagaaaaaaaaaattattttaattagccagacatggcagcatactcctgtaatcccagctacttgggaggctgacgtgggaggatcgcttgagcccaagagtttgaggttatagtgagctatgatcatgccactgcactccagccttggtgacagagcaagactctgtctctatttaaaaaaaaaaaaaaaaaaaaagccagctcctgtcagatgttggttgagcactgctcaggtcaatgtcaattccccagcacttcctgccggccccaaggagctgagtgggctgcggctgccagagaaagttcttaggcagaaaagtgcagtgctgctggatgaaaggattgatgtgtgctgaagatcaggggctacgggcctctgccgtgcccgaaacgggacagctagaggcaggagagtgggagccagtgtccaagggcagatactgagtttggttctagaaacgcttaaggcagctgtatggggcaggctccagaccccaagggaaaaatggatcacttggtggaataagactgattatttaagctaaggcagtggatgaaaaatcctagagagaggctgagatctacaacatgaacaaagacaaatggccaagttcatgtcatggtttagacccagctctgcaggaagagaaatgcattttttttccttgccacaaatcattctcagaaaggccaaagcaggtggggcacggtggctcatgcctgtaatcccagcactttgggaggccgaggagggcggatcacgaggtcaggagatggagaccattctggctaacacactgaaaccccgtctctactaaaaatacaaaaaaattagccgggcgtggtggcgcacacctgtagtctcagctactcgggaggctgaggcaggagaattgcttgaacctgggaggcagaggtcgcagtgagccgagatcgcaccactgctctccagcctgggcaacagtgagactccatctcaaaaacaaaacaaaacaaaacaaaacacaacaacgaagggtcaaatcagccataagagggagggagaggggctcagtgttccttgagactatcccaggtgcaaaatcacggacatgagatgaagctttcaggcccaacgttgtcctgacttctgtgacttcaacactgaagacctgaaaaaaaccagttcactctctattgaagcttcttgcagctctgaagccatggactaaatctcctcagtctgttttcaccaacacgtctttctggaaagattaaaataacaagagtccgggtgtggtggctcacgcctgtaatcccagcactttgggaagccgaggcaggcagatcatttgaggtcaggagttcgagaccagcctggccaacacagtgaaaccccgtctccactaaaaatacaaaaagattagccaagtgtggtggtacacgcctctagtcccagctactcaggaggctgaagcaggacaattgcttgaaccagggaggcagaggttgcagggagccaaggttgtgccactgcactccagcctgggcagcagagcaagactctgtctcaaaaaataattaataaataaaaaataagataacaagcgtaaggctgggcacagtggctcacacctgtaatcccagcactttgggaggccaaggtgtgaggattgcttgagcccaggagcttgaaaccagcctgggcaacctggtgaaaccccatctctacaaaaaattaaaagtaaaaaaaaattagccaggcgtggtgcatgagcctgtggtcccagctacttggaagactgaggtgggaggattgcttgagcctgagaggttgaggctgcagtgagctgtattcatgccactgcactccagcctgagcaacagagaactctgtctcaaaaaaaaaaaaaaagaaagaaagaaagaaaaaaaaagtgtctatggagataaatcatttggcagcttctttgggagacaaggttggtaacggggagtcagggaggttaaggccatggctacagctacgtggggaatggttagggagggctggttttaagggcatctacatgcggtgtgtgtaccacaaagctgcctgcaaacaccaaccacgtggagagcttgatgagatgtcactcactgggtacagcaggcggcccgctaccgctacccagctccaactgtcacatttggctccttcgcaggtcactttggggtcctctttccttgcttagggaaaggacccaagtaacaggatgtatggtgtgtacagcctccaccatctgagccccatttatggatgagccagactcatctgcaggaatttgaaagtgctggctgggtttggggagtattttgggaggggtgtgtcctcatcacctgagcagaggggaaaggccaccagcaggcagtggcccagatgttgaactgagtgatgccaccaggagggggacctccatcccacccacaagcctaattcactggcttggaaaaagctgggtgggacagtggttaggggtacgggtcctcgaatcttggctctgccacttgctaactacatgacattgacaagttatatatctctgtgccttggtttccccatctgtaaaaagagggatgtaagagttttaactccaggccaggagcagtggctcaagcctgtaatcccagcactttgggaggccgaggcgggtggatcacttgaggccaggagttcgagaccagcctggccaacatgatgaaaccccatctctacaaaaaatacaaaaattagctgagggtggtggtgcatgtctgtactcccagctactcaggaggttgaggcgagagaatcgcttgaacccgggagtcagaggttgcagtgagccgagattgcaccgctgcacttcaacctggatgacagagtgagacctgtctcaaaaaaaaaaaaaaaaagaaatttaactccttcattgttgtgaggtctatatgactgtgcctggtacatgaatgaggcctttatgaatattaactattctaattactcattgctctccccggtttggaagcattagacatgactcacagttggtggaaaaataagctgcccctaaaacctcttttttatttcttttattctctttttttgttcgtttgttttttgagatggggtctccctctgtcacccaagctggagtacagtggcacaatcacagctcactgcagcctccccgcttccaggcttaagcgatcctcccacctcagcctcctgagtagctgggaccacaggcatgcaccactacacccagataatttttttcattttcatttcttgaagatatgggggtcccattatgttgcccaggttggtcttgaactcctgggctcaagccgtccttctgcctcggcctttcaaagtgctgggattacagtgtgagccactgtccctggcctaaaacctcgtttttgaacaattttttttttttgagattatggagtttcactcttgttacccaggctggaatgcagtggtgcaatcttagctcactgcaacctccacctctcagattcaagcgattcccctgcctcagcctcctgaatagctggaattacaggcacacaccaccatgcccggctaatttttgtatttttagtagaaaggggatttcaccatgttggccaggctggtctcgaactcctgacctcaggtgatcctctggcctcggccttccaaagtgctgggattacaggtgtgagccaccgcacccagtctaaacaatcttaattgatgtcattagatatccataaatcctcagatgcacactgggtgaaaatgataaataacacaaagttccaccctctaggtcactctcattcaaagaaacatctgatgagaacatcagaaaagacttgagagtgaagttcaagggcaggagtgtggggctcaagagtcagagagcacaggctcaagagtcacctggatctccgctcagttcccacaccagcgcttagtcgctgtgtgctcttggataggacgcttggttttccagggtctcagttttcccgggtctcagttttcccatttggaaaatggacataataatagtggacctcatggtgccttacccctcagctgagctggaattataaatggcattgtgagaaagcgaatgacatgaggcccttcccaggaatctgaaaggagaggaactcagcactgcggaggcctggattgcagggtgtgtgggaaggggacccataggagagacagcctccccactggttaaggcaaagagaagagatgatgcagccccaggggaggggcaccctggaaagctgggctgattgccagacccctctcactttgtgggttggagttttgaaggctcctttgcaggatgaccccaggaattggagtttcaaagctgatatttggggcaggatggagggctcaccccggtatgggaatgtagatgagccacacccacacacactgcccccagtcgttgacattttagctgagacctgaaagcaataatccccagggagagtgctttaatggtggaattccaggcagagcaaggacgagtggagaaaacggctggatacgtgccctcaggttgcacacgtatcctgccctgctttgaaaagcagtttctcccaagtgcctcaagtgcttgagatattcaataacatttcagagcattaaaaactctgaaagaaaagaaagcctgctacctctgaggccacatcctcatcccaccatgaagatgccttgagatcacagggctttgtggttttagttgggttggtttctttgaaatgagggattatttttaatgcgccaagacaaatcagtttcaaaagataaagcttataatgttgactttatttcaccgtggaaattttgtgctcaaaggtaagaaaccatcttatataaaacaatcaaataaatacataaatacattaaaaaaatgagtcacttcaaaggcggccacagggttgaggaaaaagccccttgtggaatcagaagcaggtgtctgcagccaggacttcctcttaatgccgcctcagcactgtcagggaaagagagagggtgatgatggttagggtgggagatggaggcaggggctgagcttacctcatcgtgtgccacccaccaccctgttagtcatcagacgtttgaggcttaatgcaactctctgagcctcagtttcctcatctgtaaattggggattatcattgctctggtgatcctgctctctgcctttgagactatagacagtttagaggaaaccaggaggaaatgtttggttctctttctgcaccactggggggctgccaaatgataaacagacccccaaaggagattctgcccctttgataagaagtaggaggtggggagaaggtattgtgggcatggtaatgaaataagcccacatttactaattccacaaaggcaccccttggccctgaaggctgttaacaagaggaagcgatgtccaggtgaccttttctcaaagagtgtggttcccagagacaacaaaccccaaagtgactctaacagtgtcacacactggaatgggggaaggcggccggggtggcagggggtgcttacctttgcagcccaggccactggaggagctgatccggtccatcttcctcccaaagcagccagacccttgcaccatcttggggcttcgtggtgcccgcagggtgtagaggaccattttgcggtgcccacggatgccctcggtggctacctcccgggacttccagacacctgtgggacgggggctctcctggaggggctccagggatgtctgctccacctgcagctccgacagtttgccctgcaaatggttgcgctgctcctgcaatgaatgggggcgtccaagcctcagggacccacccctgggctcaccagcccttcatggcacccaagtgaaccgactgccttgggtacagggtcagggcacccagtctctccattttctgattcctttatcactaattccaaaggaaagatgagggcctcttgggacagcaggtgaggaccctttcattgctgctgtccaatccccctgagctgccctccgctctcacctgtaacccggacgtttccaagtccgaggctgaaccggggctgcccagcgggtgggaacgacctcccaggaaagccagatgcaagaagagcaggagcaggagcgcccgggaaggtgctgtctggggatccatgtctctggagggactgcggaggctgctgctgctgcttctgctgctgctgctgctgctgcgatgcgtccgggtttgcttcccacctgccctcagcctgcggggtgctcctcctggctcctcgggacaccgtggccttttatcctggagctgagtgtcgggcctgccctgccatgcagggttatctctgatttatcagccacattccgggcctctgagatcagggcccgggaatgagcccctccgcgcctgcgacgtgggaggtggagaccgggcagagccgaccttgtatagaaatgggccgggtcgggccggggggcaggaacgcgctggagacacagacaagtccccgtctcccgcttcttcctttcctgcaaatgtccaggtgtcctaggttggcgctttcttcctgcctccccaccccaccgttgctggaaaaggcagggaggaccccggctttccgaggaccgacgtgagcgcggggagcacggggtgactcacagcgaaaacagccccggccaagaccccgccacccgcggcgcctctcccctccccgcgcgagttccctggcccgcacgtagcgcagcacctgctcgccgctgtgcaccctgcctgcctgcgggtcctcgggggcgccctggccgctgtccgtggtgctgatcaccccgagggaacttggagcaaactctcaagagctgctctcttcaacgggattttcaggccagaaagacctgcgtggagcaaggacaagagacctccgagacctttccctatgctctcacaatccgccatcttatagtccttacagcaacgggatgctgattccccagtggcaattcattaaaagcctgggtatgaccaggaacttctggaatgctgacccttctttcactccttaaagggaagagcagatttcgctggaattttgagagatagggtccagtgatgacgaagtcacccaagaatgccttatatgtgtgtcctccacgtgtcaacacctcctctcccccaccaagccaacacaggatggaaaacaaaaggataggctgggcatggtggttcacgcctgtaatcccagcactttgagaggccgaggcggtcggatcacgaggtcaggagatcgagaccacggtgaaaccccgtctctactaaaattaccaaaaattagctgggcatggtggcaggcgcctgtagtcccagctactcgggaggctgaggaaggagaatcacttgaacccaggaggtggaggttgcagtgagctgagatcacgccactgcactccagcctggttgacagagagcgaaaaaagaaagaaagaaagaaggaaagaaagaaagaaagaaagaaagaaaacaaaaggatggctggaatgatggttatctatttgctgggataccagagatatggggatttcccctctcccagtgcctccttcatctgaccacccatgatctaattatcattagcaggtggcctggtgattagaagtgagactttggagagaaatgcccctgagaagagtcatagcagcttaaatacccccctaaagcatatatgactgatgtcactccccttccagagaattggtgtcaacaagcagcaggctggaggagtggagctgtctatgaggggagaagagttacagcagagaagggcagcaataagaaactgggacctctaagcagatcttgcctaaaaaatagcatctgcccctgaggtgagaaaagcacggttattattcctcacttcagaggaggaaatggtgttcatgaattaatctactttccaaaagtcacacaattgacacatgataaatcctggattctaaccagtctgattagtctagccagcagtctgattccagacctgaagctcataatcactgccagggtgatcacaaggtgtttctacaaaaagcaagcttaggtgaatcccgtgtcatctatgaaggctctgggagctgtgctgtgggggatgtgcaattctagtggtgactgtgtgtgcaggagaaagaatgggaagtggctcagatgagcattttgcagatgaaatataaatggaggtgggtgggtaagggctgtgtaaagacaccagtgctggaaatgttctggggggctggggtagttttgtgtgtgtgtgtgtgtgtgtgtgtgtgtgtgtgcgtgcacatgagcatgccacagtaagagtatcaaaaggctaagaggaagctaaagaggtaagaaaattcagccaagtgcagaggggagtcagtgggcgagaggctgctgagggtgcagaaagcccctcatgctgagtaccatgagataaagggttcagagcaaggcaggattcatcaaccagcaccatcaaaaactgactctgcatctcgccagagcctcactttgctcttcggcaaaatggacagtccttgcaaggactaaaaggaaaaaaataatatctgcaaaagcccgtggcactgtataaagggccaaataattagtagtacatgagagttggtctttacactgaaggagattgtgatctcactggggagacaaagtgaccccaagtgagacaattaagtgtctaagtgtcatacactctgacagagtttctatctgtccccagtggaggggactgtggaagaagacttgaggaagacacagaactagacacatcctccaaggcctgctgtccagggaggaggatatgttgtcaactaactctcacaccagatcagccccatcaacatttatcgagggcctgtcatatgctatgtgctttccaagtctatttaatgaagctaatcataacacctctgttggagcattaatgtacaaggattaaatttgatgatgtctgtggtaagctgaataatagtccccaaaagatgtccatattctaatccccagaatctgcgaatatactactttacatggtaaaaaggactttgcaggtgtggttaagttaaggacctcaaggtggagagattctcctggattattcaggaaggctcaatgtcatcacaagggtccttataagagggaagccagaggatcaaggtcagagggacaaaatgtaaggatgggaacaggtcagagaggagagaagagactacactgctggctttgaagatagaggaaggggccatgagccaaggaatgtaatcagcctctagaagttggaaagggcaaagaaatggatttttccctagagcttccagaaggaatatgggcctgccaataccttagttttagcccagtgaaacagatttcagacttctgatgtctggaactgtaagaaaataaaatcatgttcttttaagccaacaagcttgtgagactttgtttcagcagcaatgggaaattaatagagtatatgtcaaatgccaagcatagtgtctctcccatagtaagccctcagcaaatgttgttatggtagaagtattggttccccaccaccatccaactctaagtgcttaatctggccacacagaaagaaataagacccttaagtcattcaacaaactttcaccgagaccctggggtcacagtagcccagacccaagactgaaatcacagtctgggctcaatttcacatcaacttcttgctacctttgtgtgttgggcaagttgcttcctctctctccttgttttctcatggctacctcatagggttgttgtgagcataaaatgagactgtgcaggttaaaatctaatatttctgctggaaggtggggatacataacggacaagaaagtccctgccattgagaagcttacagtgcagggggaaaggtgggcacaatcacaggctccccaggctgccacagtgagtgacagatacagtggcagtgagtcctggatgctctgtgagcacagcaggagtgcgcagtcgagaagggagtttgttggagaaggtggggctgggctaaggctttgaaggataagaatgagttagccacaagaaggaagatggaagatggggagggcactctgggcagagcagatgcacaagcagaggctagaagggctggttaatggatcagctaccacccctatgctctctgcagaaggaagaagctgtgcagaatacaaggtttgactagtcagagagtaggactccagctgcaagatttttctgtagcttccctctggcctcaatctccagtctagtcctgggcagccaaagtggatggtatgagagcactgggcacctgggggaagcaaaggaggaaacagaggagcactgacccaggaggcaggaggcaggctcgtctctgcccgtggctgactcacggtgtggctctgttccagggattctttttttttttttttaatttttttgagatgcagtcttcctctttcacccaggctggaatgcagtggtgcgatctcagctcactgcaacctccgcctcctgggttcaagtgattctcctgtctcagcctcctgagtagctgggactagaggcacgtgccaccacacccaactaattttttatttttagtagagatggggtttcaccatgttggtcaggctggtctcgaactcctgacctcaggtgatccgcctgcctctgccccccaaattgctgggattacagatgtgagtcaccgtgcccggcctgttccgaagattctgctcggtttgcttctctgttctaggatggtttccctttgtgtagagtgaaaggattagactaaggtttctgccaggcacaaaagccctagttgtaataagtcaactcaccctatatatatactatacacatttttttttgagacagagtctcactctgtcacccaggctggagtgcagtggggctaccttggctcactgcagccttgactcccccaggctaaagcaattctcctgcctcagccccctgagtagctgagactacaggcatgcaccaccacacctggctaacttttagaaatttttcatattttttgtagagacagggtttcgccatgttgcctgggctggtcttgaattcctaagctcaagtgatcctcctgccttggcctcccaaagtgctgtgattactgctgtgagccaccacgcctggccagcttaccagcttaccccattttataggtgagattgctagctcccacttccccagtagtgcctctgtcttctgtgacccttagacttcctccaaaagccagaaaccacctgcatagggccatcaggcccttcacagctgtggcagacatgcaggtgtgcacacaagtgtgtgtgtgtgtgtgtgtgtgtgtgtgtgtgtgtgtgttagggggtgctttggaaaccagcatgggtctgtagaccttctctgctcttgaagtaaatctctagacatggttaacagagggagggctgtgcttggcagcttgaaagaaaataattactaattcccaccactcagtctggtgtggtggtgcacacctgtaatcccagcactttggaaggcccaggtgggaggattgcttgaacccagaagttgaaagccagcctgggcaacatcgtgagaccctgcctctacaaaaaaaaaaaaaagaaagaaagaaattaattaaataaaataaaaaatagccgggtatggtggtgtcacctatagtcctagctacttggaaggctgaaacgggaggatcacctgagcccaggagcccaggatcaccccactacactccagcctgggcgacagagtgagaccttgtcttcaacaataacaacaataacaacaataacaaaaccaaaaacttccaaccctccatgtccagcctcaccagcaatttctgagcatagaaattactgtgtgttgccaggtaatattctctctctctctctctgtctcccccgccccccacttcctccctccctccctccccttgcttaggaacaagggactctgaaagggtcaccttatccttcctaccacctccagaaagaactgtgcttcacccatattttccccatcgctggcattctggtgacagcattcaagtccctggatccagcaatgcctgatgtcaatctactttggactttgcagttatgtgagccaataaatctgccccttcgacctctttttccccaaagcaacttaattagatttctgtcacttccattctaaagattcttaactgacagtctccaaaagaaactgcctgcctttttcttagaaatgtttgaaaacaagatatttcagccctcgataacagccggagtctcagagtctttgcagacaaatgtcctgaacattgtctgatttaactctctccttttgtaatgtgagttagtcccctttggtcagacaaaaagcagaaaatgtgttcaacaaccttaaggagctggagagaaaaatcagaagcctggctttcttcatgtctctcaacagcaggggcatggctcagcaggtgtgaggctgccggagaaaggataagaggtccgtcccagaatctcgccctatcacccaggctggagtgcagtggtgcaatctcggctcactgcaacaaacctccacctcccgggttcaacagagtctcatcctcagcctcctgagtagctgggattacaggcgtgtgccaccacacccagctaatttttgtatttttagtagagacagggttttgccatattggcgaggctggtctcaaactcccggcctcaagtgatccgcctgcctcagcctcccaaagtgctgggattacaggtgtgagccactgcacccagctgaaagcatggtcttaaaatgaatgatgatgatggggagtattggaggaaaggggtgggggcatcttcttcctcgttagtttctacaggatccataatttcctcctgtagttgtttgccagggctgcagtaacaaagaaccacagacagggggcttgaacaacagatgtgtactgtctatcagttctgaggactgggagtccaagatcaaggtgtgggtggggctggttctcctgaggcctctttctttggctgcagatgccgtctcttcctgtgtcctcccatggtctccctctgtacatatctgtgtcctaacctcctctttttttttttttttctggatacagagtttcactcttgtcacccaggctggagtgcaatggcgcaatctcggctcactgcaaccttcacctcccgggttcaagcgattctcctgcctcagcctcctgagtagctgagatcacaggcgtgcaccactacgcccggctaatttttgtatttttagtagggatagggtttctccatgttggtcaggctggtctcaaactcccgacctcaggtgatccacccacctcggcctcccaaagtgctgggattacaggcacgagccactgtgcctggcctcctcttcttataagaacaccagtcatattggattagggcccaccctaatgaccacatttcaaagtataggttggtgcaaaagtcattgtggttttggccatgaaacgtaatggcaaactgcaatgatttttgaacgaacctgataattacccctttaaaggccctgtcttcaaatatagtcacattctgagatactgaggttaactttttttgagataggatctcactctgttgcccaggccggaggacagtggtgcaatcatggtccactgcagccttgacctcccaggctcaagcaatccttccacctcagcctcctgagccgctggactacaggcacacaccaccacgtccagccaatttttagattttttgtagagacagggtctccctatgttgcccaggctggtctcgaactcctgggctcaatcgttcttcttgcctctgcctcacaaagtgctagaattacaggcgtgagacaccacacccagccagatttcaacatacgaatttggggggacacagttcagtttggttcattacacccccttactccctcatttctgttcattgccacatctccaagggccaccaccactctctattgttctgatgattttcaatgtccaacaaaccgccccaaacttagtggcttaaaagaacaatcacttgattgtatctcgtggtcctaggggtggatgaggctcagctgcatgactgtcacttggggtctttcatgtggttgtagtcagatggcggctgagtcaggagtcacctgaagatttcatccatgcctcttacctgggctgcaatggcgaggacagatggaggctggtccattgtgtctctctccatgcagcctccttgtgtggccagcctgaattcctcagtggtgatggccttccccacagcaagtggtccaaagtggaagctgccagtcctcttctaggaactggcccggtgtctccttcatcattttctattggttaaaacagtcacaggtggccagacgcggtggctcatgcctgtaatcccagcactttgggaggctgagatggccagatcacctgaggtcgggagttcaagaccagcctgaacaacatagagaaaccccatctctactaaaaatacaaaattagctgggcgtgatggtgcatgactgtaatcccagctacttgggaggctgaggcaggagaatcgcttgaacctgggaggcggaggttgtgatgagccaagatcgcaccattgcactccagcctgggcaacaagagcaaaactccatctcaaaaaaaccaaaccaaaccaaaaaaaaaaaaaaaacagtcccgggggccgggcaccatggctcatacctatagtcccagcactttgggaaaccaaggcaggaggattgcttgagcccaggagtttgagatcaccctggccagcatagccagacacgatctccactaaaaataaaaacaaaaatattagctggtcatggtgacctgcgcctgtaatcccagctacttgcaaggctgaggtgggaggatcaccggcactccagcctgggcgacagagtgagatcccataacaaaacaaaacaaaaatagtcacagggaaacccatacataagagagtagaggaatggattctgcctctcagtggggaactacatgcatctataggaaaggagagaattggtggccaccatcctgaagatgaacgacctcatccattaatcagattctctcccagaggcaatgcgttattgaggctgctggctttgagccattcacttccaagcttctttcttgtagctggcgctgtgagccactgagtcccaaacctgtgtttggtatctggacgctcagtgctggcctttctctttctgaagatgactctgtgtgtactttgtttattaactctgctcccttctccctcctcttgatactgtgcctttttttttctctctttctttcttttttttttttttttttttttgacacagggtcttgctgtgtcccccaggctggagggcagtggatcaatcatctgcacactgcagcctccacttcttggcctcaagtgattctcccacctcagcctcccaagtagctgggaccacaggcctgtgccaccacacccagctaattttttggtattttttgtagtgacagggtttcaccaggttgcccaggctggtctcgaactcctgaactcaagcgatcctcccatctcagcctcccaaactgctgggattacaggcgtaagcccccacacccggcctgcgttgagtcttctaagcctcccttgccctgttgaccctgctcaatacctacagtggcagcaggaggtctgctggaatttggtggcttttttctacttgcgggttatctgaagtttattgtgttctgtctcctagtaatgttgaaggattgagtcatggcttcatttgcattctttgttgaccttatacatttaggtgaggatgcattcaaagattttaactcagatggccaccattaaccttgctagtacactttagctgtattagctcagccttcaaagcatccctaggataaattattacccccattaaatggatgaatatccttgatagatggtggttgcctttcgtgctgggaatctttagtcgcccgtgcagacccctctccatccttccctcccctgttcaacgctcatgaggctgacttttatggcttatgttggattcaatgaatggtggtgagcggcagaatatcagcaggagaaagagaagagagggagtccagggtgtttttttctgccagctctgacttgccgtgccacctagcgttggcacctaccacttccccagctctctctgtgtcaggatcctgcagacttaagggtggcaatctggctgctgctgttttccctgggcacaatttctagtggtttctgtatctatctgcatttatttatttttatttttcatatttttttagacagggtctcactctgtcacccagcttggaatgcagtggtgtgatcatggctcattgcagcctccaacttcctgggctcaggtgatcctcctgcctcagcctctcaagtagttgaatccacaggcatgcaccaccatacctcactgattttttattttttttagagatggggtctcactgtgttgcccaggctggtctcaaactcccggactcaagggatcctcccatctcagcctcccaaagtgctaggatagcaggcatgagctacttcacctggcctctgaatgcctttatacactatgcctatatctttgtaaagtctttattaacgtttcttgaattgtcctaatgtgagtgtgctattggttttcggctaggaccctcactgatacctttatcatcatcaccatcatcatggccatcaacatgacctccaccacatgttttcgagcttgagcttggtggctgttcctcccagttacacctgctgtgcctgccgtttggacaattctcatagtttgtcggggcagggctggttgagctaagccctctctttgggttggggagaagggagcatcccaggcctgaaaatggggcaggaggaagccagggtggtaacaggatggctctgctagggacttattttaaggtagctcttgggggcctgtcaaccacccacagccgctatctcccacaaggctcccaggacatacagtctgggggagtgagggtgcctcacacatacctttccactgagctctccttcccagcctggctgctctggcctgcagcactggagctgggccatcaggcgctcacatcttcttcctgctggaggggccggagtgggctcagaggctctagatggctctagatggctctagatggccatggatcagggagcagctggccagcctccagttctccccaggacagaacagcacctgtgacctgtgtcctgacagggaaagggagggcaggcagggccactcagaggtggcacccaacaagctctctttccctagtcgctgcatttatccttggaaaggccctaattcactcattcattccaccaagatttactgaatgcctactctgctctagatactgaggatacagtaacgaacaaaagagataacatccctgtcttgggggagcttctgttctagtggaggggagatgaacaataacccaaatcactagagtattttgtgtcttagaaggtgaccatgctggccaggtgcagtggctcacacctgtaatcctagcactttgggagaccgaggcagttgggtcacctaaagtcaggagttcgagaccagcctggccaacatggcaaagccccgtctctactaaaaatacaaaaattagctgggcgtggtggtgggtgcctgtaatcccagctactagggaggctgaggcaggagaatccttgaacctgggaggcggaggttgcagtgagccaagatggcaccactgcactccagcctgggggacagagtaagacaaaaaaaggagaaggtgtccatgcttgctaaggaggaaaacgaagcagagtgaagggaggggctgctgggagttgggcttttagcaggaaggtcagggaagagctcactatggaggtgtgttggaacaaagacttaaaagatatttaagggaacaggccaggctcggtggctcatgcccgtaatcccagcactttgggatcccgaagctggtggttcacttgagcccaggagctcaaggccagcctgagcaacatggtgaaaccccatctgtacaaaaaatataaaacttagctggggtggtggcatgccctatagtcccagctacttggaaggctgagacagaaaaatcgcttgagcccgagagatagaggtggcagcagtgagccaagattgcacccttgcactccaacctgggtgacaagagtgaaaccctgcctaaaaaaatatatatatatatatatatatatttaaggacacaggccaggcacggtgtctcatgcctgtaatcccagcactttgggaagctaaggcgggaggatcacttgagcccagcctgggtaacatagcagtgagacccttatgtctataaaaataaaagagaatttagaagatatttaatggaacagtgttccagggaggaggaacagccagtgcaaaggccctgcgtgtgtctgaaacatacaagaaccagaaggcagtgttggggagtgaagtgagtgaggagagacacgtaggaaatggctcagagaagccgtcagcgtgcgacaaagcacagccttccaggtatgactcggagtcactttcctccaagtcagatgggagccatggagtgtgttgttgttgtttgtttgtttgtttgttttttcgagatggagtctcgctctgtcacccaggctggagtgctgtggtgtgatctcggctcactgtaacctccgcctcctgggttcaagcgattctcctgcctcagcctcccaagtagctaagattacaggtgcctgccaccacgccccactaatttttatatttttagtagaggcagggtttcattgtgtcggccaggctggtcttgaattcctgacctcatgatctgcccacctcagccccgcaaagtcctgggattataagcatgagccaccgtgcccgaccagccatggagtgtattgagccaaggagaaatatgatctgactttgattaagtgtggccatgcctgtctggagagctggccccaatatctggcttcttctgattctttccatccccttcagaggtctgcgtcccagccccaagggactcctcctccaagcttctaagttttaacaacttcagcctctttccttcgttgcccttgtccaaggacggtagctacttcctgcagtttctctgtccgtgacacttagtgttttctctttgccttttcaagttttcaatatctagttaacacttttatatactaagttctctctgttagaataactggcatggttcctgtctccaagtggaccctggctgcactctcaatggtagacatccaactgtgaataagactttgtctctaggtctccctctgtcacccaggctggagtgcagtggcgtgatcatggctcaccgcagcctcaaacccctgggcttatgccattctcccacctcagcctccctagcagctgggactacaggtaggtgccaccacgtctagctaatttccgttttgttttttttttttggtgggggggttgggggcaggtagagatggggtctcactatattgctcaggctagtctcaaactcctggcctcaaatgatcctcccaccccagcctcccaaagtgctgggattacaggtgtgagccattgtgccagcctcaagcaatgatcttgaagttggttgcaaggaaaatgccttccctgcatttgtttcccagggctgctataacaaatggccaccaactcggcagcttcaaacaacagaaaagcatctttcatcattcgggaagtcagaaatccaaaatcaagatgctgtccaggccgagctgcttctggggctataggggagatctttcccggcccctctagctcctgacagcttcaggcgttcctcagctcatacatgcaccactcccatctctgactctgtcctcacatgaccttctctgcatctctgtgtctcaaatgtctctctccctttcttttataaggacccctgtcactgggcttaggacccaccctatatctaggatgatctcttctcgagatctttaatttcatgacgtctgcaatgacctttgttccaaataagatcacactcacaagttccaggagctgggaaatgaatatatctttttggaagccacctttcagtacattcttcggtggcttgtctgtttccccctctgggatggaagctgcacaggatatgtacttggaatggctggtgcaggactggacatatggaaggagcctcaccaaaggtgtgttgcctggccaatgtttactatgtttacatattttgcatttacatgttttaatccatattttaaaaatctatgtacaggttttttttgctttgtgttttttgagacagggtcttgctctgtcacccaggctggagtgcagtggcgtgatcacagctcactgcagccttgacctcctgggctcaagtgatcctccccgctcaggctcccaagtagctgggactacaggcaaacaccaccacacctggctaatctgggggggatttttttttgtttcttttttttttttttttttttgtagagatgggatttcaccatgttgcccaggctggtctcaaactcctgagctcaagtaatcctcccacctttgcctcccaaagggttgggattaccggcgtgagccccggtgcctggcctgtactgagtcctttaagcctcccttgacctgttgaccctgctcatgacctatagaggcagtggaggtctgctggtatttggtggtttttttctacctgcagattatttgaagtttgttgggttctgtctcctagtaatgttgaaggagtgagtcatggcttcatttgcattctttgttgagtttttacatttaagtgaggatgtgtgcaaagatttgaactcaggtgggtgccattaaccttgatagtacacttcagctatattaactcagccttagcaacagctctaggataaattattacccccgttagatggatgaatatccttgatagatagcagttgcctttcatgctgggaatctttagtcgcccctgcagacccctctccatccttccctcccctgctcagcacttgtgaggctgccttttatagcttatattggatccaatgattgttaggggcagcaaaatatcagcaggagaaagagaagagaggaagctcagggtgtttttttctgccacactgcagtccccgaggagggccacacagcgcacgtcccagccgggcattgttaacttaaactatggtgtgaacgccgctgcctctcactcatgggtcactgtgaacagcaaacacatggcaccttggatcctgcagacacgctggcagtggagaaagggagggagccagccacgcctgggggtcactctcatgaatggcgtagagtgggggccacacgtgaggacaggaagcatgaatggccgtcccagaacatccacatgagggttattaatagagccgtcccaggagaggacgcactgtgcttgggagggacaaccgaggaacagagccggctggaccgtaagaagtcctgtgacatgtgggaaatgagggaggcgctggcaggctaccaaaggccctctggctgcctctcctccctgaccttactccccagtgaaggtggccactgccactcgggctctgcgttctaggccctctgaggctggctgcatcctcctgggtgtgcttgatgacccaggagccatgtccctccatttaaagggctgtgcggagcttgaggggctgggaacataggcaggccatgactgggaaatcagacagggccattgtgagttgaatcatgtccccaaaattcatgtccacccagaacctcagtgtgtgaccttgtttggaaaagagatctgtgcagatgtcatttgttaggatgagatcatactggattagggtaggtcctggtccaatacggctgatgtccttgtaagaagaggagagatgcagacacagacaggcaggggggaggctgagtaaaagccgaggcagaggctgcagtgatgcatgtacaagccaaggaacacccctgattcccagcaaccctggaggctgggagaggcaaggacggcccctccctagagtcctcagagaaggcatggcccggtccacggtcacagcctgttggcctctggaaccgtaaggagaccatttctgttgtttgaagccacccactttgcggtgctttcttaggacagccacagtaaacgaacccaggcatcttgtatttgcaaagggtgtttgctgtgggcctcactgcatccttagttttgctttaggtctttgggagacttggcctgtcctggggcagccccatgcagcggtgatgcagaagtcaggacctgcattcggcctgcctgggttcgaatgtcagtccggcctcctcctagtggcggcagattgaatctccaaagatggccacgagctgccccaccccatgtgctcccaccatgggacaccgacactcctcccatcggaagcagagtccacgttccctcctcttgaatctggacaggcctgggcctgtggcagaagtgacgctctgtgacttctcagactaggttatagcattgaagtagcttccactttcctcaccagagcacttgcctgggagccctggggcaaccatggtgtgaggaagcccaaagccaccgctggagaagccctgagactccatgaagagaaatgcctggccagtcccctcctgttccgactccagccactgtctgactgcagtagcatgaaagaccctgagacagagccacacaaaatcccaaattctggccagtcgcagcagctcacgcttgtaatcccagcactttgggaggccaagcgggcatatcacttgaggtcaggagtttgagaccagcctggtcaacatggcaaaaccccatctctactaaaaatacaaaaaattagccgagtatggtggtgggcacctgtagtcccagctactggggaggctgaggcaggagaattgtttgatcctggggaggcagaggttgcagtgacccgagatcgcgccactgcactccagcctgggtgataggacaaaactccgtctttaaaaaaaaaaaaaaaatcccaaattcctgatccatggaaatcaagagcgggaataaaatgattgttgttttaagccaccaagtaatttggggctaatttgttacatagcaacagaaagtgaatacaggggagtaccatgatttctgttgtataaatgaggaaagtgaggcatccgttcatccattcaactatttattgagtgcttgctatatgccaagcactgtctgagcactgggatcacagcagaaacaaggaaaacaggacccctcatttatggagcacaagatacagacaggcttagtaatggctgaactttaatctaatctaatctaatcttcaattctgtgatcctaacgcccagggctttctcaccctacaaagaaagtcctctgaggttgaattcttgtctctcaccccagcttcttcctccagtggaggtgagagagagaactgaacccttcccgttggaagttcagctccattcccggggtgaagaaggcagacagtgttttctgccccacgttaccctattgttgggggtagcatcaggcacttgggctcccagaggaagctttgaggagggaggagagtggcgggaatgtcccagggtgtgagcacttggggaataaagccaaccaagagcttttgcctcgctccccagcacctactgtgcttatcttaatgggatcacttttctagcatgatgtgaagtagcttcgggcagaactccaaaccttagagagatcatttgaaaataccatttgggctgggcgcagtggctcatgcccatgatgtcagcaccttgggaggccgaggcaggtagatcacttgagatcaggagtacgagagcagccgggccaacatgatgaaatcccatctctactaaaaatacaaaaattagccaggtgtggtggcgcacgcctgtagtcccagctactcaggaggctgaggcaggagaatggcttgaacccaggaggcggaggttgcagtgagctgaaatcgcaccactgcactccagcctgggcaacagagcaaaactctgtctcaaatacacacacacacacacacacacacacacacacatatatgcacatatatatgtgcgtgtgtgttcatgtatatatgtgtgtgtgtgttcatgtaattatgtgtgtgtgtgtgtgtgtgtgtgtgtgtgtgtgtatatataaaattgttcatcataagtgacagatgactcctgttctcgggagcccatcagccatcagtctgtttttttgtctctgactgtggggtgagggtcatattcaagccatttattcaagaaccacgcgactccctgcttgacttagatcccagttccagcagagctgtctgctgtgctctgagagcgagcagttccttctgtctgggtgagtttttaagttcatgctcacaggctggtccccgtcaccaagacaggtccgctgttctcagcctcaaaaacaaacaaatgaacaaacaagaatgaagaggactatttatttatttatttatttcagagacagcattttgctctgtcacccaggctagagggcagtggcatgatcacagctcactgcagcctcaaactcctgggctcaagtgatcctcccacctcagcctcctgagttgccaggactacaggcgtgcaacaccacagcccagctaactttttttttttttgtagaagtgggggtctccctatgttgcccaggctggtcttgacctcccgggctcaagggatcctcctgcctcagcctcccaatgtgctgggataacaggcatgagccactgcacccggccaaagggagctttaaaaagcatccagagcaacttccgcaggcagctgcataagctgcggtaccgccggacgtcagagccaccttggcgttcaccctgggctctgcctatacacttggctggccaccccgagtcaccaaggacaagggtccttccctcagaaccctgtcccacaacctggtcaaaaactccaagaagaccatcaggcaccagcatgtcactcttaagaagtacaacccccccaagctggcagcaccggggccagctgccccctgaagaccaaggggacgagatctcagtgtcagaggagctggagcccagcacgctgaccccggcctcagctctgaagccctcagacggcatgaccatcagcagcctggtggaagaggcttgctgccgcaactagcagtacctcgggctgggcaccctgagcagcagcctgagctgggccaaagctcttccgcatttctctggacaaccgcatgttgaccaccaactgctgcagctacccggggctgctgatcgtgccccagggtgtccaggacaatgccctgcagtgggtgtcccactgctactaccagaactgcttccccgtaatctgctggtgcagcgggtggtccaaggcagtgctgctgcgctctggggcctgcagggcagaggtgtcctcggcctcttcaaggcccagaacgcaccttctccaggccagtcccaggtggactcgagtagcctggagcaggagaagtacctgcaggctgtggtcagttccatgccccactatgccgacgcgtcgggacgcaacatgcttaccggcttctcctcagcccacatgggcagtcacattcccagccccagagccagggtcatcacactgtccaaccccatggcgcccttgccctccagatggactgcaccccgaagtaagtggggcagtgtccagaccagcgggcgcagcagtgggcttggtgccaatatgggctcctggttagttggcagagacgtgctggccccaccccaggcaacagggccccctcgcccacccgggcttcctgcggctgcagcgagtagccctctacatcctcgggaacaaagcccagctcaagggtgtgcggccagactccctgcagcagtgggagctggtgcccattgaggtattcgaggaacagcaggtgaaggccaacttcaagaagctgctgaaggcatgtgtcccgggctgccccgctgctgagcccagcccagcctccttcctgtgcttgctggaggactcggagcggctgaccccaatccacaagctgctgcaggtgccagtgctggtggtggagcccctggattcagactcctctgtgctggtgggcctggaggatggctgggacatcacctcccaggtggtatccttggtgcagctgctctcagaccccttctattgcacgctggagagcttccgcctgccagtggagaagaagtggttgtccttcagtcatcccttcagccaccgtggagcccacaccctggctgggcagagcagcggcttcacacctgccttcctgtagttcctggactgtgtaacaccaggtccatctgcagttctccatggagtttgagttcagccagttctacctcaggttcctcggctgccaccatatgtcccgccgttccggaccttcctacttgactctgaccctgagagcattgagctggggctgctgtatgaggagaagggggaacgcaggggccagctgctgtgcaggtctttgtgggagtgtgtggaccggctgagcaagaggacgcccatgttctacaattacatgcatgcacccgaggacacagagctcccgcagccctacagcaacgtgtccaacctgaaggtgtgggatttctacactgaggagatactggccaagggccctccctatgactgggaactggcccaggggccccctgggcccctggaggaagaacggtctgacggaggtgctccccagtgcaggcaccgcgtggcgtggccctgctacgacagctgcccctgaccccagcctgatgctatctcacttctgctggaggagctgcagaggctggagacagagctgggctaatgccctcagtgatggaaggacacctgggaccaggtgaaggctgcacagcgcctggaaggctggccagacggaagtggcacccctagctcccttctagtgtccactgcaccccaccaccaccgttcctgggtgtgtgactgccggaggggcccgtgggctccaccctgagcctcagcctggacagcgaccagagtagtggctcgaccgcttctggctcctgccaggctgcccgccacagcaccagcaccctgtgcagccagttccagagagctgagagtgagaacgggtccaacgagggcactctgtagaagaaggaggccttcatgaagccttggaaggcccgctggttcatgttggacaagaccagcaccagctgtgctactgcaaccactgtgtggacacagagtgcaagggtgtcatcgactggcggaggtggaggctgtggcaggggcacgccctaagaccatggatgagaaggctttctttgacgtgaagacaacactttgcgtttacaacatctgtgcccaggatatgcccttggcccagcagtgggtggacgggatccagagctgcctgtcagacacctgagcctcccggccccgcccagctgctctgcttccggtcgttactgaccactaggggtgggcagggctgccccagccatctttactgccccagccctcaacaatattgaggccctgagcccccagcacatggtgcatacagcccctgccccatcccgccccgccccacccagctggccctaacttattttggggtcacagctgagcactgtccctggaggtgaccaaggtacagcccgcaatgggcctgtaaatagcccagccctgtcagcgtgtgctggtccagccagccggctgcaggcgagttgtttctagaaccagagtctatataaacagagagctaatgccaaaaaaaaataataaatacataaagaaatcatacagagcaagacaaatcatccagaaatcacctccagggaactgaagcacttattccaggacatttgaccctgcagcctggtccctctctccctccctcccgcctccatctttccccccttccatcttctgtgttcagataaacaccaagagccttcaaagagcccccgggaaataactcagtttcttgggcacatatcagctgccatgaatggttctacacactgaagtccattatctcagtgactgcgaggactgaatgagcacagcctggagctgagtcagtgttccataaaagttggctcttatttttattatactggacacagaaaggccagatgccttccccaaagcccctccctgtgggtggcagtggcccaggaagtctggcactaatgtcagtgctgtcacctgccactctgtcctcaagggcctctgggacatgctgggaaggcaggccgtgagccagatgttgcagagctgggccctgagacgctgtcccttcagtgacctttcctgtccagggcccacagcggaagctgacatgtgtgctgcccctcccctccgctcccctcccctccccaccccattctactctatgggctttggtgggaaaaaaaccagggccccatcccctgaggcctaggccagtgcagacatagacctcgaactctgcccaacatggatggcctctgcccaggtgtgggagaacaaaggcaaggaaaggctcaaggaacgttccaggcatcaggaagccaggcttccccttcagggctgtcgagtgctcaggtttctatgcctgtcagtcaccaacacttttgcagtgggcagctactatgtgccaggcacaaagggtaactgggcacacctcttttcttggaatgggtcagaggttgtcatcaaggaggtgatgtttaaactgagctcaggggaataaggaggagccagggttcggggaagagcatcccagcagaggacagagccaaagccagcgcttgaggaggcaggggtggaaggaatgtagtggtttgaggagccctggcaggctggtggggctggagagggagggtaggtgggctaattaatgccctcgcaaagacgtccactccctaatccctgcaacctgggaatctcaccttatatggcaataaacagactttgcagaggtgactaaacttttgcagtggtgactaaattaaggctccggagatgggaagaccatcctggattatgcaatggaccctaaatatgatcacaagtgttcttattatacaagagggaggcagagggcgacaccaccacacacagaagcagggaaggcagtgtgaccacggaggcagagactggggtgatgcggccacaagccaaggaacacctggagccaccagaggccggcagaggccaggaagtattcccctgacagcctccagagagggcggccctgccacacctcgacttcagcccagggatactgattttagacttctggcctccggagctataagataatacatctgtcttgttttacgccaccgagttgttggcaatttgacacagcagccgcaggaaactcatacagacgcaggaggagagcttcgagacggtttaggaaactcacatggagggcagctcgaggagagctctgagacagcttaggaggcagctggggaaagggggaaggggctggattttgttcttagtgcttctccatccccctctcattcacctcctcctttctcccctcaaagctcctcagcccttttaaaataatttcacttgttgcagtaagcaggtgtcagtttttgtgaaggtatgaacacgttttaaaaccttgcggaaggtcgaggctgcagtgagctgtgatcgcactactgcactccagcctaggcaacagagcaagaccctgtctttaaaaacaaaacaaaacaaacaaaaagacaaatatatatatatataaaactcagagacatttcctttaaaaataaaataaataaaatctctggaggagaaacaagcttctgggcccatctcctcctccctctcctccctgccatctctcctctcctcaaatgtccctgcagtgtgaaccccggccttgaggctgggagcagggaggccaagagaggaagctgtactccgcctagctcctggctgtcagcacccatggctggcaggattgccacaaactctggcgctctaaaggctgataaagccccacagcctgcacgtctggagcctgggcctccagccctgataagctggacctgtcagcaccatggccacacctgctgtaggcagtgagcgccacccgcctcccctggccactcccactcacggcttcctgttccctgtgcacagccaagccctggccaccatgcctaggccacccctccctggatgaagaacaaagtggagtggccatgggcaagcagatttgcccattacatttcatctctgcatccccccaaccccatcccgctcttaagcaccagcgctggggatcagaagacctgggagattcaggataggggtgctggagcccaccaggcacacagttccctgaggaagtcacatgggccgatcacacgcagagcatgaagtgctgtcagcagctccaacacattcctgggattctccagcccaccccatgtggccctgaggggagtgtgcaagtgcatgggggctgagagcctgggtcattgtcacggccaagcaggaagcaaactatgagagtctttgctccagccgggatcacctgtgcccgcacgtgagtgggtacaatgttctccatccctcgcccgggaagtcatcgttcatcaagcctgggctacttcccgtggtgtggaaaacctccactcaccacagcccaccaagcgggctccaggatggacccagtctgccggctctggtaggagagttagaaaggcctcttggaaaaggtgggcaggcagccagggacaggcacccctaagagatcctccagggctcttgctggtgagggacccgctcgcccttctcaccgtcctgggcttagtttagcaaacacctgttcacacctaccatgaactcaccactgttggacgaaggcgacccccaaatgtccctgccctcgaggaatgtgtagtcaaaacagagaaagaccaaacatgttttgtcgggttttttgctttgtattttattaattacaaagcccagatgtcaccaagtttcccaccaaacctcagaaatcagtggtagaaaaataacaaagtaagaagccccaagccatataatataaacctgggggttcaggctagaggggtgaggggcgtgcagtggaggtttttttgtttgtttttgcttttttgttgtttgagacggagtcttgctctgtcacccaggctggagtgcagtggcgccatcttggctcactgcaagctctgcctcctgggttcacaccactctcctgcctcagcctcccgagtagctgggactacaggcgcccaccaccacgcccggctaatttttcgtatttttagtagagacggggtttcaccgtgttagccaggatggtctcgatctcctgaccttgtgatccacctgcctcagcctcccaaagcactgggattacaggcgtgagccactgcgccgggccctttattttattttattttttttgagaaaaagtaactcaagtttacttttctcaaaaagtagtagaaatcatgccaggcatggcggctcacacctgtaatcccagcactttgggaaactgaggccagaggatcgcgtgaggccaggagtttgagaccagcctgagcaacatagtgaaaccccatctctaataaaaagacaaaaaattagccggacatggtggtgtgcacttgtggtcccagctattaggagactgaggcatgagaatcgcttaaaccgggaggcagatgttgtagtgagctgagatcatgccactgcattccagtctgggtgacagagtgagactctgtctcaaaaaaaaaaaaaacaaaaacaaaaaacaaaaaacaagaaaaacacacccatatatgtatatacatatgattctatatatcctgtatatatagaagaggacgcacaattaaaggtaactccctcccatcgaactcccagtccctcagctcccacctactcccctcccaggcatcgctgatcaatttcttatgcctccttcatgaattttcctctacagcacaagcacatgcaatttttttgcatatttgtactacttaaattattaagttatttaattactaaattgtcttagagataattccatatgaacatatttagacctaatagcataaccatgtaacataaattccaaaccaggatgcgttggtatgacatgggttgtgttaaaaagccccccaatggatggatgtaaaccagaactgccccagacaaatgtgtcttagcaggagctgggagagagccagccaagcaaagctgatgcagccccattcaactcaacacagcttttctgggtgtgttttatttttatttttaatttttaattttttaatttaaaaaaatagaaacggagtcttgccatgctgcccaggctgatctcaaactcctggactcaagcgatcctcccgcctcggcctcccaaagtgctgggattacaggcatgagccaccgcacccgtctgagtgtttaacaagcctaagcatgtgacagtgggacctggggtagggagggtcaggctctgagcccccacaggcactgagccatctctactcatatccaggagacagtatgggggttctgaggggaacaactatgccagtttttggggaaacatgttcatcattttcctgagcacttccctctacctttgctacggaaaccccagctcaccctccgagcctgattcaaggcccatctgcttgtcggctttggtctcggagaggtgccacggagtcaggctaaagagcagggcaggacaggggacctgctggggctgaccgctgagccacggacagccctgtgggtgagaccggtggacattgtccccaagccccattccagcagtgcaccctcccatggtgtcatccttctggcctcctttggtagaccaagtctcctttgcccaggtagcctgtctgtgacagccacctccctgcatttctaggcccccattgtccaagagtgaccagggcacttccctcttggtttccacctcaacgagggcaacgtgtatctctgagccccggctttgtgccaagcactggagttacaacagcaggcagattccatggagctgatgttctgatggggagcaccagcacacagcaaaaacggtcctacaagaacagatggcaataagcctgagcctaatgtcctggcctgggcaggcctctctagggaagggacatttccattgtctcacattacattgagtaagtgggactcagctgggcgaggaggagagggtgtgaacttggtgtgttggaaaacaggagagatggtcacgggtctagggcttggagtgagagctgggcagggctggaatttgtggggccttctggacggtgataaattcagaccccatcccagggccatgagcagtcgctaagggaatttaaacaggagtgtggggacaggatcaaatttgccaccctccctctccagggaaaacaccttgggctaagaggaaaggcaaatgatgaagccttggactccaggccggggccctgagaggagggagaggggtcgcctccatctccgagcagcgggactaagagccctttggcgcctcaccccaggaagtcggctctgtaaggacttccccagcttcctctgaggccagaggaggagacaaagaaagaaagtcttgggctgggcacagtggctcacacctgtaatcccagtactttgggaggccaaggcaggcagatcacttggggtcaggagttcgagaccagtctggccaacatggcgaaaccccatctctactaaaaaatccaaaaaattagtggggtgtggtggcgcatgcctataataccaactactcaggaggctgaggcagagaatcgcttgaacctgggagatgggggttacagtgagctgagatcgtgccactgcactccagcctgggagacacagcaagactctgcctaaaaaaaaagaaaaaaagaaagtcttgagcttctctgtccctgggggacagcagcctaggcccatctgggctggggataccaggccctttcctggttcatatttccccccatcccgccctcagcctccgggaacaccagcctccaagctggctgctgcttctgcatcccaccccatgacgcacatccagaatggagccaaaagcataagaagccaaaaggacagtcaaaaaaggaaggcagcctggaagggcagcagcaccgggaacatgaggctctgtccgctcgcccttgcgctggctcagtgcagacgggaagcggttggagccagttccagcattctgcaggtggggctggcggggggagaggtgcccatgcccaccggccattgggcggtcccatgcgccctgcaggctgacctcattgtccagaattgtgagcgtgcttcctggggtcacattccgtgctgaagagcccctcttcaaggcctcggttggcgccaatgtctttttaggaaccaagcctctaattttagtgtcccagccttgacaccttctcaaaatagctccctgttttctcttgtgtccctggcccttccttggagaaggtgaaccccctgcatccccgtgatctgagttggtgagcacaggtccaaggccttgtatgggtttgggtgtagggatccacgcccctgccatgtgttttgtgtggcaggacccagagaactcacctctgggagggcagctcacagcacccaccatggcaggggtcctgcgagagcccactcccaactcctccctgggggtctgccatgctcaggcgtggcacaaacgaaagtgactcaaatccaggtccccaacccctggaaatcaaggcttcatagccgcagctccacctgtaggaatcgtgggtgagctgacacctgcgccccgggagctcctctcttcctttggcaggttccatgctgttcaggtaccaatcctaacaatggcctttcctgaacatttcaatggtgccaagtgcatctcttgcataattttgtttaatcctctcagccatcctatgcagtaggtgctataattgtccccaaggtcatggagctgccaagcgatggaaccggaatttggtgggttttttgtttttgtttgtttgttttttgagatggggtcttgctctgtcacccaggatgcagtacagtggcacgatctctgctcactgcaacctccgcctcccgggttcaagagattgattctcctgcctcagcctcccaagtagctgggattacaggcatgcaccaacacacctggctaatttttatattttcagtagagatggagtttcaccgcgttggccaggttggtctcaaactcctgacctcaggtgatccatccgcctcggcctaccaaagtactgggattacaggtgtgagccaccgtgcccagcctagaactggaagtcgaacacaggaaatcgggctcccagccctcggcctcatgctactcatggtgctgccacataaacattctccttgcaccagccctttctccactgcctctgtcacagtcccttccagagtgctctgctcagattcttctaggcatcctaagcgagtagagcagagaggttgtgccgcttgcctgaagtcacacagcaaactaggggcagatgaagacacacaactccagagggctgagatccaggaagcattcctggaaggaggctaaagcttagccaagaggtgagcaaagactgtggtcccaggcaacagccaggcagtgtgtcgggacctggcagggctcatctagcagtcttttccccaacagattcgtgttctcagcggcaggaaaagccctctaaaggtgccaccagctggccgagtggcaggtatccaggaagcttgattcgacagctcccagggacactggccactaggacccatatttttctgggaaagagacacactggaaaggagaaaagccagggtgggtccttcctgggcctcctcctgctgcagtcagagcccaaaccccacacccaggggctccctggagggactgtgagtggccagagctcccttcagggcccgaggtctggctcctccctcaggttcatgccctgcaacctgagggcctgtcccattgatcacgatggggtggggagggggaagacagagaccggctggtgcaggtgatggtggggagaccagggcactgggccccatggggctggctcactccactcagccagggaagaacacattaggggcttgggaaactccttcaaatccctaaattgtctaggctcatccaagcagttttcgactatcaggacaggaaaatgcagtttttgtctaagtgagtcacagccactcttctgaaagtgccaggtgggtgggtacacatgcagggccagagggcgcaccaagaagaagagaggggtcaagactcagccagaagcaggtgcccagccttggaatgaccggagacagtcatcataacactgggcttcccacttaaattatgccgagggccgggcacagcggttcacacctgtaatcccagcactttgggaggctgaagtgggcagatcacttgaggtcaggagtccaagaccagcctggccaacatggtgaaaccctatctctactaaaaaaaaaaaaaacgaaaattagccgggtatggtggcacacgactgtaatcccagctacacggaaggctgaggcatgagaatcgcttgaacccaggggacggaggttgcaatgagccgagatcatgtcattgcactccagcctgggtgacagagctagactctgtctcaaagaaaaataaataaataaagaaagaaagaaagaaagaaagaaagctggggttgccaacccaaacacctacaggggccgggtggttggtgtaatgaaataatgaatgaagccagccaggtgacaaattgtggggaaaagaaagagagatcatattgttagtgtgtctatgcagagacaggaagacataagaaactccattttgatctgtactaagaaaaattgttctgctttgagatgctgttaatctgtaactcttgtcccaaccctatgctcacaaaaacatgtgctgtatggactcaaggtttaagggatttagggctgtgcaggatgtgttttgttagaaatgtttttgtaggcagtatgcttagtaaaagtcatcgccattctccattctcgattaaccagagatacaatgcactgcggaaggccgcagggacccctgcccaagaaagcccaggtattgtccaggattccccccactgagacagcctgagatgtggcctcgtgggaagggaaagaccttacagccccccagcctgacacccacatagggtctgcctgaggaggattagtgaaagaggaaggcctctgtgttgttgggataagaggaaggcatctgtctcctgcacgtccctgggaatggaatggctcagtgtaaaaccgaccatacatggccgggtgccgtggctcacgcctgtcatcccagcactttgggaggctgaggcgggcagatcacgaggtcaggagatcgagaccatcctggctaacacggtgaaaccccgtctcacacaccgggcgtagtggcgggtgcctgtagtcccagttactcgggaagctgaggcaggaaaatggtgtgaacccaggaggcggggcttgcagtgagctgagattgctccactgcactccagcctgggcaacagagcgagactctgtctcaaaaaaaaaaaaaaaaaaaaaaaccgaccatatattctattctgagataggagaaaactgccatatggctggaggcgagacatgatggcagcaatactgctctgttactctttactgcactgagatgtttatgtaaagttaaacataaatctagcctatgtgcacatccaggcacagcacctttccttagacttatttatgacacagattcctttgcacacacattttcctactgaccctctccccaccatcaccctatagtcacaccacattccccctgccaagatggtaaagatagtgatcaataaatactgagggaactcagagaccggggccggtgcaggtcctcacttactgagcaccggtcccctgggcccacttttcttcctctatactttgtctctgtgtcttatttcttttctcagtctctcgcctccaccttgcgagaaatacccacaggtgtggaggggctggcccccttcaacaaataacacctgacccttggcctaggtgttgaggacatactgggcatttgggaggctatgggaactggagaagggagcagctcagtgcgcttgagtactgccttgtgggaatgcacctgtactgtcagagacagagggatatctttaaaatcttaggtaagtatctgtttttttaatgttggcaaaaattttagaattttttttactgttgagagtttcaaataaaatgtgtctgcaacctgtattcagctgtggagagagatggagaggtagcatgtgctgtgagatgatgcttttcttgtttgcaaaacacagcgtcttgtataattgtcactctaactctgtgaggcagactgggcaggtcggccgtgcccatctgatagattaggaaaactgagacccagatgagtgaagcactttgcaggtgtcacacagcagtggcagagcatggatttaaactcagtgctgccagacaggggggctcatgcctgtaatcccagcaaggccaaggtgggaggattgcttgaggccaggaattcaaaaccagcttgggcaacatagcaagatcccatctgtaaaaaaataagaaaaaatttgccaagctatggtggtgtgtaactgtagtcccagctgttggagaggctgaggtgggaggatcgcttgagcccaggagatggaggctgcagcaagctataattgagccactgcacttccagcctgggcaacggaacaagaccctgtctcaaaaaaaaaaaaagaaaaataaataaataaactcaggtgtctctgattccaaaggttgccctttctgctctgctatgtcaaggctgtgtagtgagtgagggaaggggtgggcagctcgtgggactgggagccactctctgcacttttcaccaggagagctgacccaagccctgtcacctgaactctcagcatctagagaaaagcaaatggtggagataaagttgctgaggtgctggtggagcatgtgacatgaagatttctgtaggtccaaagatggcccccacctctctggggctggccagtggaatgcagaaaaggagagtccaccgggcgtcggtgatgaacggattccagtgtcactcccaggagctccagactgagacctgccccacctcagaggcccccttccccatccatgggcttcctgtgtctcactcaatctgattcctcaccctgcaaagggtcctcatgtccctggagcttgcctgcttcttggagtcccatagctctgagatctcaaacctccagtgggggaagcacagcccaggtgcctcccatcctacccatcccatccacaggacaggagcaaaccagtttgctgtggaccctgccttcgagaccacctggcattcctggtcccctaaaagaagcctaggagaagctatttgggaccaaagacaaacctccccagctcatctccagcttctgaacacccaggacacaaacacacattggaaacacctgtttagtgtctcccctggcacaggactcccagctttaccgccaacccactccggggcttaatcactcactgcccagatacaggtgctctaagcaccagtttgtggggacagactcagcctttccaagggaagtaaacagaaatcgcccacctgtaggactgagttcttgttgtttttttaagatgaagtctcactctgtcacccaggctggagtgcaatggcactctctccgctcactgcaacctccaccttctggttcaagcaattctcctgcctcagcctcccaagtgtctggcattacaggcacctgccactgtaccagctaatttttgtatttttattagagacagggtttcaccatgttggccaggctggtctcgaactcctgacctcgggtgatccacccgcctcagtctcccaaagtgctgggattacaggtgtgagccactgcgcccggccaggactaagttttgttcttttcttttctttagctttttttaataggggtctcactgtgttgcccaggctgctgtcaaactcctgggctcaagcaatcctccagcctcagcctcccaagtagctaagcttacagatgtgtgtcactgtgcctggctttgttgttttgtttttttaatccctgatgcatggtaacatgatgaggttttacctgccaggcttttcctagcaaagcaattattttttaggtagaattatccctccagcctattgtgaaagaagcagaagttactggaaagttggagtgattgcccaagtccccagaaggagggggcagctattagtgcagctgtctgtgggcttgagaagcagtttctggaactttcctcaccccacccttcagtcctgtcttattagaagcccaattctgtccttgttcaggaacagtgtagccatgaatacagccccatgctgggctctgacagctgacaggaccaccaacatgaggcccgtggatggtggagggaacctgcactcactgaccacctatcatgatttggtgccgacccgtttaacccttatgttgacctgacaataggcattattaccacattttactggtaagcaacctgaggcccagagagacagagcaacttggccaagatcacacagcctttaagaggcagagctgagatttgaactgaggtctgtgtatttgcaaagtctatgcctgggcaaaaatctcaggagagatggagtgagttgactcaaaccaccgcgtactggtcccagaccaaatgggggacaggcctcctgcacagccaggagcacccacccaaggaccaagatctcatctgagagttctgtgtctcacctaccacctggggtgtggagtggggaagaacccagcctggccttgggctgggccaccaccctgtcttcccacacctggtcagcctgctccttcccaaatcaagcatgcagtgtcgcccaggtaaggagagagcctccagcgccacctgctggagatgcagtagcagcgccctccaggggaccctgcatccccagagtgtctggggagagtggggtgagatataatgggggaaagggagggggtcagtgcgtctcgcaggcaattatctcctatacttgaccccatgaacaggggtgagtattcctccttctagaacctcagaaagttgcagctggaaggctcaaagcagggaactgatcttgcaaggatggatgggtggatgggtgggtgggtgggtggatggatgaatgggtgggtgagtggatggatggatggatgaatggatggatggatggatggatggatggatggatggatgggtgggtgggtggatggatgggtgggtggatggatgggtggatgggtggatggatgggtgggtggatgggtgggtaggtggatggatgaatgggtgggtgagaggatgaatggatggatgggtggatggatggatgggtggatgggtgggtggatggatggatgggtggatgggtggttggatgggtgggtaggtggatggatgaatgggtgggtgggtggatgaatggatggatggatgggtggatgggtgggtggatggatggatggatggatgggtgggtaggtggatggatgaatgggtgggtgagcggatgaatggatggctggatgaaagcatggataaagtcatgtcttctgccaagggccagaccaggagaaaggctagctagtttctgtgcatggaaacaaggcagttttctgcacaatgtcctggctgtttgaattcagagaggaagaacagaggagccatctggggcctcatgtcatccctattttccatcagcctgaaattttcataccaatcattatcattagcaagcgttgcaactataaacctccccatcttccttctcccagccttgctgctggcacagcctccagtgatggggagacagggacagggctcaccctgaccccaggaacctggcaggggcaggcagttcatctctggggaggaaaagaggcaatccagggctgtccccacagctcacatagatcaagtgtgtgctatgtgtcaaatcctctgcccagcacactgaaggcatggtctcattgaccctggccgtgacctatgagggaggaagggagggaagtttatacccagagtgaggcatcagtgtcccccagtcctctgtctgcatagaagtccccaggacccagtcctgctgacaccttctcctgtgtaggccacgaagggagaagcatcagggacggatgaagcaagccacttccagagccagactgccttatctggtgatcactgatcagcagtgtgatctcgagcaagttactcaccttctctgagcctcagtttcccccgggcacaggcagaataacagcatgtgttaattctgattggtggctgggacatatgcttattacactaaaaaatatatatataatatatataattgaaaattaaaaatataaaattaaaaatttatataaaattaaaaatttcaggccctgtgcagtggctcatgcctgtaatcctagcactttgggaggctgaggccagaggcttgcttgaggacaggaggtggagagcagcctgggcaacacagcaaaacccaagacgtaatctctaaaaaaaaattttaagccgggcacggtggctcatgcctgtaatttcagaactttgggaggccgaggcgggcagatcatgaggtcaggagttcaagaccagcctgaccaacatggtaaaaccccatctctactaaaaatacaaaaattagccgggcgtagtggtgcgtgcctgtaatcccagctactcaggaggctgaggcaagagaatcacttgaacccgggaggcagaggttgcagtgagctgaaatcgtgccactgaactccagcctggcaacagagtgagactccatctcgaaacaaacaaacaaacaaaaagaaataaaagaaaaaaagagaaagaaaaagagcatccgggcacagtggctcacgcctgtaattccagcactttggaagacggagacaggaggatcacctgaggtcaggggttcgaaaccagcctgaccaacatctctactaaaaatataaaattagccaggtatggtggtgcatgcctgtaatccagctacttggaagggtgaggcagaggaattgcttgaacctgggaggcagaggttgcagtgagccgagatcccgccactgcactccagcctgggcgacagagcaagactccgtctcaaaaaaaaaaaaaaaaaaaaaaaaaaaaaaaaaaagaaatttacaaaccctccagctttttaagggtttcattttattaattaaaaacaagatcagacacatctgcagtctggattcaaccagcaggctgccaatctgtcaccactggcataactgaccaagtgacagtagcaatgccgggcgtggtggcacatgcctgcggtcccagctactcaggaggctgaggagggaggatcgcttgagcccaggagttcgagagtttgaggccaacctgggcaacatagtgcaaccctatctcaagaaaaaaaagcaaggtgctaggccaggtacggtggctaacacctgtaatcccagcacttcgggaggctgaggcgggtagatcatgaggtcaggagatcgagaccatcctggctaacacagtgaaaccccatctctactaaaaatacacaaaattagctgggtgtcgtggcgggagcttgtagtcccagctacttggaaggctgaggcaggagaatggcatgaacccggaggtggagcttgcagtgagccaagatcgtgccactgcattccagcctgggtgacagagcaagactccatctcaaaaaaaaaaaaaaaaaaaaaaaaaaaaaaaaaaaagccaggtgctgagaaatgcttcatgatcatctaatgctttgctagccctataaggtagatgaagggctgttgtttgagatatttaatgtcaaacaaataaaattaaaaaatgacaaatggaatctaatcagggttgccgatctgacatctagtttaaaggaagttcagagggcataggaagaaattaaatttgcaggaagaaattctgcaaatcagatcaaattcaggatgagggatattccataggataggtaactgatccagtccttcaaaagtcttcagtgccccccctccccccgacacacacacacacaaggtgatggggaataagagtcgttcagattaaagaaggctgaaatgatataattaccaaatgcactgtgaggatcgttttaggacgctgatttgaattaatcaattctaacaggtcgtttcataaacaagtagggaaatttgaatatagactgatgtctaactttatcagaaataacagagacaagaagataattgaatatatccacttactttaaactgccaaaagaataaaaaccctgtgaatgcagaattccatatccagctaaaatttcctttaaatataggtaaaatagatgattttagaccaaaaacagcaagagcttttctttcaatcacaagcagttgcagatttctttgttccctctccattccctgctttccttcactagccttaaaaaaaaaaaaaaaattgtctcaaggccgggcgcggtggctcatgcctgtaatcccagcactttgggaggccgaggcgggtggatcacgaggtcaggagatcgagaccatcctggctaacacggtgaaaccccgtctctactaaaaatacaaaaaaattagccgggcgtggtggtgggcgccagtagtcccagctactcgggaggctgaggcaggagaatggcgtgaacccgggaagcagaggttacagtgagctgagatcgcgccacggcactccagcctgggcgacagagcgaggctccgtctcaaaaaaaaaaaaaaagaaagaaaagaaaagaaaaaaaaggaaagtaaatctattgcggagtcacatcgtgcactcccaagccaaggtgaaatgatgtaaattcccgaggcctgtgtttggcccgctctatccacctggatggcagagcactaaccgggctagtgggtgggagatggcctggggacagggagtggggacgcagaggcgggataggaagccgccttctccgggatgcccagacgcctaagcctggcagaggcaaagcgctagacggagcaccgcaaaagcccccatggagcggtgggagggccgaggcccagccgggcacagttcaggccagagacttgaattctgccggcgatttagaagtcgcctggggtgggtggggggggctgtatcgaatttctggagccgctgggccatgggagggctgactcggggatctgggttgccctggtccatgttctggctcccagtgccctggggcgatggaagctggcggggtcagggcgtggggaggggcggggagcggctggtcggggctgcgcttgagaaagggggtgtctctggaagggccatgcgcttgggcgggcagggacaacgtcccgcacctgtgctggccccggcttctccttagagtgcctctggctgcctccctgctctcacctcggggttttcctttttgcgccatccccggagggcaagactctgtccaagctgagacaaacgtggggggcggtggggagactaggtcttctcctgcccctaccccagatcgcagagcccatcttggctgccgggacccgagggcgctccaggttggctccgcgggtcgcatcacctgccaagtgctcgggagccgcagcacgggcaccaggggggtccaggatggaggggccacggaggtctccaagggaactgcccgggctgagattggccagggagggggccaggaactagtggagctacggagccgccagtggatctgaggacccacctggatccgaggtcggcccctgtccccggtgctgaaatgcgggcgcccgcggggttcacggccaggactcagccctggagtccctgagaccgctagccccgtagcaatcccctatgtaggatttgtttcaagggctcagaccggcacagagccccccagctcttccttgcctcagattctgtccttgggtgatcaaatcctgctttctgtctcctaaaattgtctctagcgctttctctgggaccactctagtgcctctgagcaggcatcacaggctggcccatcggatcattatttgtactttggtcttatgctttatcccctccaaaccaacgggctcccactctcagctgggctgcagaatttcccatccccctgcctctaacattcctaggggactctgttcctttcctccctcctatcccttgctttcaagttagttaaagctagacaatgaggtcggtgcaatgcgtctgcatctggcaggggcagccaccttccttggaaatggggagagatggtgcaagagagaagagagccgggagaataggggtggggccccagggctgaggcatgccctcctgagctactgcaaactgcagcccccaagggcccaggtgacatcatgtaatgggccttagcaagacccccttccacttctgggcccttatcttcccctctcagctcctgacccctccccagtcagatgcccttgtttgtaagctctgcatctctccccttccctctctctctttccctctcttttcaatatcattgttcttttattcttctgattataaaaattactgttggccaggccctgtggctcacgcctgtaattccagcactttgggaggctgaggtgggtggatcacggggtcaggagatcaagaccatcctggctaacacggtgaaaccctgtctctactaaaaatacaaaaaaatgagccgggcatggtggctggtgcctgtaatcctagctactcaggagactgaggcaggagaatcgcttgaacctgggaggtggaggttgcagtgagccgagatagtgccactgcactctagcctggacaacagagcaagactctgtctcaaaaaaaaaaaaatttcaccgggcgtggtggcgaatgcctgtaatcccagctactcaggaggctgaggcaggagaatcacttgaacccaggaggtggaggttgagctgagattgtactactgtactccatcctgagcgacagaatgagactctgtctcaaaaaaaaaaaaaagtgtgtttctttgcacacatttttgtacatttctgtttccttaggatgtattcccacatgtgaaattattggcttgacatatattaactgttaaaatacttttgttaggctgggcgcggtggctcacacctgtaatcctagtactttgggaggctgaggtgggtggatcacttggggccaggagttcaagaccagtctgagcaacatggtgaaaccctgtctctactaaaaatacaaaaattagccaggcatggtggcacacacctgcagtctcagctactcaggagacggaggcacgagaactgcttgaaccttggaggcagaagctgcagtgagccaagatcgcaccactgcactcccacctgggcaacagagagaaactgtgtctcaaaaaacactttttttagggctcttgatacatatcatcaagtgacattttagtaagattgggccagttcctatttctacctgtggcatctgcgttcctgtttcactgtaacatggctgcctctgaattttatattttaaaagtatttgctaatgtaatagatgggacgtgacatacagagttgcttgtatttggagtcctctgattactagtaagaccaaacaggttttcacatatttattagacatgtacatttcttctggaaaatttttctctctactatcaatgattttctattgcagtttagtattgatcccattaatttttctttttttttttttcttagatacagggtttcaccacattgcccaggttggtcttgaactcctgggctgaagccatctgccctcttcagactcccaaaggtctgggattacaagcgtgagccaccgcacccagctttatctcattaatttgtaaggctttttgatatagtacaattgttaaccctttggtgtattgcaagtatgattctggtgggaggctcacctttttgcttgattatttttgacacacagaatttcaaaatgtcaaatatatttacggtaactttttaaaggctcggcatggtggctcacacctgtaatcccagcacttcaggaggccgaggctagcggatggcttgagcccaggggttcaagaccagcctgggcaacatggaaaaaccccgtctctgcaaaaaatacaaaaaattagccagtatggtggcatgagtgcctctagtcccagctactcaggaggctgtggtgggagaatcacctgagccagcgaagttgaggctccagtgagctatgatcacaccactgcactccagcctgggtgacagagcgaactccatctcaaaaaaaaaaaagaggctgggcacagtgactcacgcctatagctgtgctggaaggccgaggcgggaggatcacctgaggtcaggaattcgacaccagcctggccaacatggtgaaaccccatctctactaaaaacacaaaaatgagccgggcgtggtggctactcaagaggctgaggcaggagaatctcttgaactcaggagatgcaggttgcagtgagccgagatcacaccactgcactccaacctgggtgacagagtgagactctgccaaaaaaaaaaaaaaaaaaagaatggccaggtgcagtgcttcacacctgtaatctcagcactttgggaggccgaggtgggtggatcacgaggtcaggagtttgagaccagcctgaccaacatggtgaaaccccgtctctactaaaaattcaaaaattagccgggcgtggtggcgggtgcctgtaatcccagctacttgggaggctgaggcaggagaatcacttgaacccgagaggtggaggttgcagtgagccgagatcacaccactgtactccagcctgggtgacagagcgagactccgtctcaaaaaaaaaaaaaaaaagaaagaaagaaagaaaaaagaaaagaaaagaaaaagaaaaatgctataatcctgctaaaaactcccctgtctctgtctactttagaacgctgaccattcctttggagttggtgtttccgaattgtccatcctcacactttgtgcttgaataaacactctttaaattagattctaacccttttgatgattttaggttgacattttggtgacccacagatgggacccaaggcaagcctcccacaatccatgctgctttgccaacattctgagctttggtacccgcaggaacagctttcactcgtctgacctcatcagagctagcggggcttcctggcattttctcttgggtttcaaatctccctggctttggctgagattcagactttattcaagtaccctgattccgcaattccatgctctatggagctggatttgaagctctacttttaaaagtagaagtttcaggccaggcatggtggctcatgcctgtaaaccgagcactttgggaggctgaggcgggcagatcacttgcggtcaggagtttgagaccagcctggccaacatggtgaaaccctgtctctactaaaaatacaaaaattccccaggcatgatggcacacatctgtaatcccagctactcaggaggctgaggcaggagaattgcttgaacccagcgggttgaaggttgcagtaagccaagatcttgccaatgcactacagcctggggaacagagcgagactccgtctcaaaagaaaaaaaaaaaagtgtgtgccaggcgtggtggctcatgcctgtaatcccagcactctgggaggcccaggcaggtggatcacctgaggtcaggatctcgagaccagtctggccaacatggtgaaaccccgcctctactaaaaatacaaaaattagccacgtgtggtggcgggcacctataatcccagctactcaggaggctgaggcaggagaaatgtttgaatccaggaggcggaggttgcggtgagccaagatcacaccactatactcctgcctgggtgacagagtaagaccctgtctcaaaaaaagaaaaaaaaaaaaggaagaagaaataaactatatgtgtgtggttattgttacaaaacacacacacacacacacacacacacacagaaaatttaaactagaaactattgaaaatgtgttgggtgcagtggctcacacctgaaatcccagcactttgggagttgggaggatcacttaagcccaggagttagagaccagcctgggcaacatagtgagaccccatctctattacaaataacaaaatgtaaacaaattttctttaaataaagaaactattgaaaatggggatgagtggaaactgggcgaaggggctagggacaggagtgggacttctctgaatatatgtttttacatagttttgatctttgagtcttgcatttttcattttcaaaaaggaaaaatcttagccgggtgtggtgctgcatgcctgtagtcccagctacttagggggctgaggtggaaggattgcttgagcctgggaggttgaggctgccgtgagctgagattgtgccactgcactccagccttggtgacggaacaagactctgtctcaaaaaaaagaaaaaggaaaaatcaaattataaagaaaaatgtattatgacttaaatgggccttatctcaggaatgcaaataattaacatccaaaaatctagcaatggcccaggagcagtggttcacacctgtaatcccagcactttggaaggccaaggtgggtgggtcacctgaggtcaggagtttgcaaccagcctggccaacaggacaaaaccccatttctactaaaaatagaaaaactagccaggcatggtggtgcacacctgtaatcccagctactcaggaggctgaggcacacgaaacgcttgaacctggaggcggaggttacggtgagctgagatcgtgccactgcactccagcctgggcaacagagtgagactctgtctcaaaaaaaaaaaaaaaaatctagcaatgtaattcaccatattgctgaattcaaaggagaaaatttatacaactatctcaatagattctgaagagcatttgataaaaaaactcagcacagagaaacctgatgatagaaggaaatttccctaacataattaatacaggctgtatgttaaaatcttacaccaggccagacgcggtgactcatgcctgtagtcccagcactttgggaggctgaagcaggcagatcatgatgtcaggagatcgagaccatcgtggccaacatggtgaaaccttgtctctactaaaaacacaaaaattagctgagcatggtggcgtgtgcctgtaatcccaactacttgggaggctgagacaagagaatcacttgaaccagggagttggaggttgcagtgagctgagaccacgtcactgcactccagcctggcaacagagcgagactccgccaaaaaaaaaaaaacaaaaaaaaaaactcacaccaaatatcacacataacaacgcattttccctgatcaggggaaatgggccaggcatggtggttcacacctgtaatcccaacactttgggcggctgagacaggaggatcacttgaggccaaaagtttgagaccagcctgagcaacatagcaagattacagctcacaaaaaataaaaataaacaaattaagcctggccaatataatgagacctagtttctacaaaaaataaaaaaaaaaattaaaaattaaaaattaactgggcaacagagcaagacctcatctctaaaaattaaaaataaattcaaaacattcacaatgttgtaataccatcactgccatccatttccaaaatttttcatcacccgaaacagaaactctatacgttacccaataactcctattatcccctcttctagatattttacctaagtacagtcacacaatctatgcctttttgtggctggcttctttcatgtagcatgcatcctcaaatttcatctacaatgtagtgtgtaccagaatttctctcctttttatggctgaatagtattccattgtatgggtaaaccacattttgtttatccactcatcagcggatagacactgggattgttgtcatctttgggctgttatgaacaacgctgctattaatgctcatgtagagtcatctgtttgagtccctgtttggaaatctttttttttttttttttgagacggagtcttgctctgtcccccaggctggagtgcagtggcacgatcttggctcattgcaacctctgcctcctgggttcaagcgattctcttgcctcagcctcccaagtaactgggactataggggcctaccatgcccagctaatttttgtgtttttagtagagacggggtttcaccatgttggccaggctggtctcgaactcctgatctcaggggatccgcccgccttggcctcccaaagtgctgggattacaggcctgagccactgcgcccggccccaagtttctttttactaaagagatttccatcagatttttttctaaaatagaaatacaaagtaaaagtgctttgctttgttgtggctgatggtgatgaggtttaggaagtctttcttccttccccacttcctccttcactcctctctctctctctctctcaggttaggaggtaaggaagcctactcatccgtctagaagatgagccagtagggggggtgtcctagttcaggtgctatgacaaaataccttaaactggataatttataaacagcagaaagttatttattgctcacagttctggaggctgggaagtccaacatcaaggcatcagcaaatttgctgtctagtgaaggcctgttcctcatagacggcgccttccctgtgtccccacttgatgggagggtgaaagggacaaactcgctccctcaaacccttttataaggacactgatcccatccatgacccaatcaccttccagaggccccacttatcaataccatcaccttggagattacatttcagcctgtggatgtgtgagtggccacgacattcagaccacagcgggagggacacggagggtgctgctgggggattgcatgggaggggagccatctttgtggagttggggttcaaagcccaggaggagggccgttcatgggaggaggcagaagatgagccagatgcggttgcaggcgggctgggaagatgagggcgtctggcctctcaaggaagcccctgggatgtcgtgggctgacacggtgagttgcagagggggaagctgaagggagagaaggattaaaaggggtgtttgtgtgtttgtttgttttttgagacggagttttgctctttcacccaggcttgagtgcaatggtgcgatctcggctcactgcaacctccgcctcctgggttcaagtggttctcgtgcctcagcctcccaagtagctgggattacaggcacgcgtcgacacaccaagataatttttgtatttttagtagagacggggtttccccatgttggccaggctggtctcgaactcctgacctcaggtgatccgcctgcctccacctcccaaagtgctgggattacaggcgtgagccaccgcactcggcctaaaaaggacatcttgaggtgggaaatggagccaatcagagaaacaggtgaagtggaggcctgtatgggaggttcccctgctgtggaatttttccagcagttcagctgctacagggcagaggctggaaagatggccctgggatcttcccaggtgagaagacggaaggaaagaggggccagcaaaggaggggctgcaggggagtgagagaacaggggtagtgggggggcccaggctccatggaccacgatcactgcggggaggcacctgcaccgcttctccttcccatctgcaaccaggagccagctaccgccccctccccatctcctgcccctcctcacctactgtttccttcctctctcccaaagtgttgggattacaggcgtgagccaccgcgcccggccaggaaacctcctctctgccctcggtttctgtgaggctcccagtccaggttttcctcctgcctccctcaatttctctaatctctttcataggctcctgcactgtcccctccttttatgccaccatcccccagggaccttccttggccttttctctcctcatttcacagcctttcccaggccttcccctgctcagccagtaatctgtctcccaaactcctcactctccatatttcaggcacaacagttgccaacagaggttctcaatgtggcctccatcagaatcacacggaggatgagttcagactcagggggctgggcccaatccccaggcctgcagtaggtctggagtggctagaagtgtaagaatttttttttggagacacgctctcgttatgttgcccaggctggtcttgaacccctagttcaggcgatcagcctgcctcagccacccaaagtgctgggattacaagggtgagccacggagtccagccaagataattttttttttacttttttttttaagttcaaaaaaattctttacttattaggctaattgtgcaattaaaaaaaaaaaaaaattgcaaaaaccgcaattacttttgcaccgatctaatagctcgcccactgtaagtaaagcaggtaaagtcagcctttttcttctgggaccagactctgctctgccccgcggtggtggcctcaggcgcagcgctaaaacgcatgaaccatttaaggtatttcctgaaactggagcgtgattggtgagactttatttgcatacccacaatgcattgcgcactaaataatgttcgtctttaaaattatttcccctttttccttcaacatatctttctcggaaccgagattgctgtcccagaattgtctgaagaaaaaggctgaagtcaatagctcttttgggccgaaggaaagttaccattacccgtttaggagtagccgttacctgagaactgtagtgtcgacgactgatgttatactctggtttctcttcaaatcgtataaatctttcgccttttactaaagatttccgtggagagaaacgagtgtgagtctgaaaccaattttttgaggccttgcgtttcttagcagggcttattttaagtgttttaaaaacagatgcgattccgttaaatcgcgtgtggagctatgtaaagtgtattatagaacaaatgcgagttacggtttttcagcttttcgctttgttaaggtatgtgatatcaattgtattgcatttctgagcagttataatattaagatgttggggtggcttactgcttttgaccaagaagtagggtttgttggttgattacaccagtggtttttaaccccagccactgagtgatggagggttaccgactcacaagcgagcattaacgcctgaggtccgcctgctgtcagggcagcaaggcatcagattctcctaggagcgggaaccctattgtgaactgcgtatacgaggtatctaggtgcgtgctccttttaagaatctaatggctgatgacgaggggcacagtttcaacctggaactgtccacaccccctacccaccttcccccgcccttggaaaaactgccttccatgaactgggtcccttgtgccagaaaggttggggaccgctggactatccgatcaaatgaagcagggactcggggcgagctcccccgctgctcccgccggcttctccgtgtagaatcgaagaaggcagtcccaagggctcttctgccccgtatccccgcctgaggagcgtgccaggcgcgcagctagtcctcccccgacccaaccggtttgatgaaacgcaagagaaagtgaattttccagccactcccattggccagaattcgtctcagccgcaagggaggctgggaagtgcagtcatgccttcaggtagccgtgagccctgctagcgataggagattctagagagaggttgagtactggggaggaaaaactagcagggtctgtcccagtaaaggagggaggaaatccatcgcaaaaaatcctgacccccaggccgggcgcggtggctcacgcctgtaatcccagcactttgggaggccgaggcgggcggatcacctgcggatcacctgaggtcaggagttcgagactggcctggccaacatggagaaaccccgtctctactaaaaatacaaaaattagccgggcaggagggcgcatgcctgtaatcacagccactcgggaggctgaggcaggagaatcgcttgaacctggaaggcggaggttgcagtgaaccgagatcgcgccactgcactcgatcctgagcgacagagcgagactctgtctcaaaaaaaaaaaaaaaaaaaaaaaaaaatctaccccgggctcaggccctgaagcagccgcccacagcccagccccgccgtgccccgccgtgccccgccgtgccccgccgtgccccgccatgcgactcaaagccccattcaagctacgtaggagggtaaattgtccttttcccccaaggccagctgctcctccagaagccagctctggtccttcagactcaaatactagggaacaatgttttctctgagttttgagtgtgtttcttgtttcagagtaaatacgaaccgtcgtaatggctaagggcatctacttttaaaacgctcaaataagccttgctaaaaaatgcaagacctctaaaaaattggtttaaaactcagaattattcctctccacggaaatctttagtaaaaggcgaaagatttatgcgatatgaagagaaactagagtaagaacttcgatgagtggcactcagttctcaggtaatggctactcccaacaggctaatggtaaatttctttctgcccaaaagagctattgacttctgcctttttcttcagacaattctggaacagcaatctcagtttcaggaaagatagattgaaggaaaaaggggactagtaattttaaagacgaaaattatttggtgcacaatgcattgtgggtatgcaaataaagtctcagcaatcaagctccaattttgacaaactggtgaagccttagggactcctcaaaaaaaggttttctgttgcttttgttttgtcttaaatttctgatttttaatgtttgtgggtacatagcatgtgtatgtatgggttacatgacaagagaaaggttttgtttgtttgagatggagtcttgctcttgtcacccaggctggagtgctgtggtgcgatctcagctcactgcaacctccgcctcctgggttcaagcgattctcctgcctcagcttcccgagtagctgggattacaggtgtgagccaccatgcccggctaatttttgtatttttagtagagatggggtttcaccatgttggccaggctggtctcgaactcctgacctaaggtgatccgcctgcctcggcctcccaaagtgctgggattacaggcgtgagctactgcgcccggcccctgcgaatgctgtgtagttgtctcttcccaaggttttattctgagaggagccccagcctttctcacgagctcacttgcccagtgttgccgtctcccaggacagccacagagcagtcacactggtccctggcccgggttttcagagctctcctccacgtgtgtgttagggttctctagagggacaggaccaataggatctacgtatatatgagagggactttattaaggagaattgactcacacgatcacaaggtcaagtcccatgataagccgcctgcaagttgaggatcaaggaagccagcagtggctcagtccaggtcccaaaacctcaaaagtaggcaagctgacagtgcagccttcaatctgtggctgaaggcctgagagcccccagcaaaccactggtgtaagtccaagagtccaaaagctgaagaacttggagtctgatgttcaagggcaggaagcctccagcacgggagaaagatgaagcccggaggacccggcaagtcggctttttccaccttcttctgcctgctttttctagctgtgctggcagccgactggatggtgcccccgacactgtgagtgggtcttcctgtcccagtccactgactcaagtgttaatctattctggccacgcccagaaacatccagatacacccagaaacaatactttgcatcctttgatgcaatcaagttgacactgtttttttggtttttttttttttttttttttttgagatgaagtttctctctgtcacccaggctggagtgcaatggcacgatctcgggtcactgcaacctctgtctcctaggttcaagcgattctcttgcctcagcctcccaagtagctgggattacaggcacccgccaccacactcggctaatgttttgtatttttagcagagatggggtttcaccatgttggccaggctggtctcgaactcctgacgcttaccattaaccatcacaagctgttagcagaggtaatgattaacacaccattggctgggggtacatcctgcaagggtgccaccacccaactccatgagtgacctttgacctttagcaagtcactgtttttcaccgggtctcaatttgcactttgtaaaacatggtgataaaaccgttctttggttttcagggaagctgtagattggctaaaattatgacagtaataaggagagaagaagggatacgtccatgggaggaatgatgatctctaatgtcactgttgccgtgaattagggccagagcccaccctttgtccctagaggtcagtgatgccaatgaagaaatccaattcttgggtgggtgcagtggctcacacctgtaatccaacactttgggaggccgaggcggaaggatcgcttgagcccaggagtttgaggccagcccgggcaacatggcgaggccccatctctacagaacatttttaaaaaattagccgggtgtggtagcatgcacttgtggtcccagctactcaggaggctgaggtgggaggatcacttgagcccaagagctcgaggctgcagtgagccatgattgtaccactgcactgcagcctgggagaccctgtttcaaaataaaggctccctggcttccctacacccacccacctctgtgcattcattcgttcactcaggctctccactgcttagcttggctgactcccatcatctttcggtttccagattggaggtttcaccttcctccaggaagacctccctgactttcaaggggaggttagatgtccctgccccatagtcccgcagccctgactgcagtatcatcatccactttctcgtctatagggtccagccctacggggtttggcgggtgttctccccatgtgcggagacagacatagtaagaaataaagacacaagacaaagagataaatagaaaacagctgggcctgggggaccactaccaccaaaacacgaagaccggtagtggccccgaatggctgggcgcgctgatatttattgtatacaagacaaggggggcaggcagggtaaggaaggtgggtcgtccaagtgattgataaggtcaagcaagtcacgtgatcataggacaggggtccctttccttttaggtagctgaagcagagagggaaggcagcatacgtcagcgttttcttctgtgcacttatcagaaattcgatcaaagactttaagattttcactatttcttctaccgctatcttctaagaacttcaaagaggaaccaggagtacgggaagagcatgaaagtggacaaggagcgtgaccatggaagcacagcaccacagggaggggtttaggcctccggatgactgcgggcaggcctggataatatccagcctcccacaagaagctggtggagcagagtgttccctgactcctccaaggaaacggagactccctttcacggtttgctaagtaacgggtgccttcccaggcactggcattaccacttgaccaaggagccctcaagcggccctgatgcaggtgtgacagagggctcacctcttgccttcttggtcacttctcacaatgtcccttcagcccctgtccctatacccgccggttattccttggttatacaacaaagagtaatattaaaagttaatgattaataatgtttatactaatgatttataatgtccatgatcatctctatatctaatttgtattataactattctcattctaactattttgtttattatactgaaacagtttgtgccttcagtctcttgcctcggcacctgggtaatcctccgtccacactcgtctgtctctcctgcaggctgcattcgctgaggtgtgtctgtgttgttcccctttgagttccagtcaaaaaagattcctagagagaattcgctctcacgccagggctaagctcctcccaccaggttcatgagcctggaagtaagtgccgtccaccaatgtcctgcctgctcttcagaggctcctcaagccttccctgcccagagagattccgggatgaaaaggaaaaacgtccctgcctggcagaaattgatgctgcttctggaaacgtagggcgggtggttgtttccaaaatgtgtctgccatcacttgagctagtagtgggagcatctagttttggagctggacaggcttgggaacgcatccctgactccacaaattatgtgactttggcttaatgacttatcatctgggagcctcactttcctcatctgtaaaacaggactgacactcaccttgcaggaatactggaggtctgtactgcgctgccaacatctattcgccctcatccgtgacaagagtacccacaatttcctctgggaagctgctcctctctgattagtgtctgttcagtggttggaggttgaccctaccccagctctgagacggcctggccagcctatcctaattagcatatccctttcaccctggccacagtgattgacttagggctgggctgtgcagaggtgagcctcagctttttgggtaggaacaccaggacttggattccagtgggtttaatgctaggagggcatcaagcttgtgataactgtggccatttttgttaccataagggtagccagtctgaggatggaagccaatctacaggaaacagagctaagagatactaatgcatccctaaatcacttgagtcctggatcaaaccgttcctgaagctcctactaagctacactgttatgtgaaccaatactcttccttttgtttaaccagtttttggttttgtgggtttttttgtttgtttttgttttgttttgatataggatcttactctgtcacataggctggagtacagtggtatgatcttggctcactgcaacctccacctcctgggctcaagcgatcctcccaccttagcctcccaagtaactggaatcacaggtgcacgccaccaccatgctcagctaacttttaaaattttctgtagagacaaggtctcactatatcactcaggctggtctcgaagtcttgggctcaagagatcctcctgtctcagcctcccaaagtgctgggattacaggtgtgagccactgtgctcagtcagaatctggttactcctgcaccagaaataccctaagatttatttggccaggcacggtggctcacgcctataatcccagcagtttaggaggctgaggtgggcggatcgattgagctcaggagtttgagaccagcctgggcaacatggtgaaaccccgtctctacaagatatacaaaaaaaattagccaggctgagtagtcccagctactcaggaggctgaggtgggagggttgcttgagcccataaggctgaggccgcagtgagctgtgattgcaccactgcactccagcctgggcgacagagcgagaccttgtctaaaaaaaaaaaaaagaagcatccacggtcctatgactctctgtattcttggtttgttatcaccagagaagagttccatttctccgctggaaggatatgcccgtattggtgtgttccggctgctctaacaatataccgtagaccgggcagcttcaaaacagcagaaattgatttctcccagttccagagactgaagttcgaaatcacagtgccagcatggttgggttctagtggggcccctctttccggttgcagactgctgtcttctcattgcattctcatatggcggaaagagggtgaggcagctctgtggggcccccttagaagggccctaatcccattcatgaggactctaccctcatgacctaagaacccccctaaaagccccacctcctaatcctatcacattggaagttaggacatcaacacaggggcctggtatgatggctcacacgtgtcatcccagcactctgggaggctgaggcaggtggaatacttgagctcaggagcttgaaaccagcctgggcaacatggcaaagccccatctctacaaaaaatacaaaaactggccaggtgtggtagtgcacacctgcagtcccagctacttggggagccgagataggaggattgcctgggcccaggaggttgaggctgtggtgagccatgttcacgtcactgcactccagcctgggtgcactccacagttctcaaaaaaaaaaaaaaaaaaaaaatttcaacgtagaaatttgaggaggggacacaattcagcccatgtcagtggccacggagaatcccacttcctcctggaaaaatcgtccagaggagccacaggcctcttggttagtgccttagcctgggtctcctacccggggcttgatcttgtggggaccttctgtttcagtccatgtcatgttgctataacagaatacctggggctgggtaatttataaagaaaagaggttttttttttttttttttttttgaggcggagtgtcgctctgtcgccaggctggagtgcagtggcatgatcttggctcactgcaacctttgactccttggttcaagcgattcttctgcctcagtctcctgtgtagctgggatacgggcatgtgccaccatactcagctaatgtttgtgtgttttttttgctttgttttgttttgttttgagacggagtcttgctctgttgcccaggctggagtgcagtggcgcaatcttggctcactgcaagctccgcctcccgggttcacgccattctcctgcctcagcctcccgagtagctgggactacaggtgcccaccaccatgcccggctaatttttttgtatttttagtagagatgtggtttcactgtgttagccaggatggtctcgatctcctgacctcatgatccgcccgccttggcctcccaaagtactgggattacaggcatgagctaccacgcccggccaatttttgtatttttagtagagacagggtttcaccatgttggccagggtggtctcgatctcctgacctcgtgatccacccgccttggcctcccaaagtgctgggattacaggcgtgaaccaccatgcccagtcaagaaaagaggtttatttaccttacggctctgcatgctgagaagttcgagggcatggtgccagcatctgcctggcctcgtagcatggtggagaaggttgaaggggaagcagacacgtgtaaagaagcaaaacccaaggggcttcctggttttataacaacctgctctctcgggaactaatccattcccacaagaggaagaactcactcactcctgagagaaggcaccaagccatccatgagggatccactctcgtgacccaaacacctcccacaaagccccacctcccaacactgccacactgagggccaaatgtcaacaaaccatatccaaaccgtagcaccttctgaggagccgaataaaatgtgcctccgaattgtccacgccagtgacagaagaggagagcttgtgtctactggctccatgtcccacgggtgaagggtggccccaaacggtgttgtcattcacatgcttcaaggctacatatgcctgagtgcctcgcagcttcctaaagatgacagaggctgatgttgggtgctgccaggacactcagacccatgcagagctggctgtcgccacaatggcaggagtcaaggtggctgagagaggccgggtgcgatggctcaagtctgtaatcccagcactttgggaggcagaggtgggtggatcacctgaggtcaggagttcaagaccagcctggccaacatggtaaaaccccgtctcttccaaaaatacaaaaattagccaggtgtggtggcacacgcctgtaatcccagctgctcaggaggctgagtgaagcaggagaatcgcttgaacctgggaggaggaggttgcagtgagctgagactgccatacggccctccagcctggacaacagaatgagaccccgtctcaaaaaaaaaaaaaaaaaaaaaaaaaaaaaaaagaggtggttgagaggatgtgagatgggacagaggtatgaggtgcaggtggattttcagggagtgaacacatttccaaaccaatgtctcggctgttgggaagcttcagatagtatgcaattaaattttccacaccagatttcaggccctgaaaaagcaatttgaaaaaggctctctgtggccgggcgcggtggctcactcctgtaatcccagcactttgggaggccgaggcgggcagatcacgaggtcaggagatcaagaccatcctggctaacatggtgaaaccccgtctctactaaaaatacagaaaattagccaggcgtggtggcgggcgcctgcagtcccagctactcaggaggctgaggcaggcgaatggcatgaacctgggaggtggagcttgcagtgagccgagatcgtgccacttcactccagcctgggtgacagcgagaccctgtctcaaaaagaaaaaaaagaaaaaggctctctgtgcagccacagcctccactggaccgtgcagatgggacccaccagggttactgcttggcccgctccaccatggaccaccagcatctcctctctaccatggtggccagctggaagccctgtggacactgagccatgccacagaagccatcagacgcacaccatggggagaaatggcagtgtggggatccaagcaagcctgcaccggcatcgaggcagagtttgcactccagtcactccatggtcgcgtggccttggacaaatgattcactgtgtgaggtccaggttccacatctctcaaactgggatcttaacccccagcaacctcttcatcccaaaaggccatgttgatgtgaaatatctaacacgtatggtgagcacttaatgagagctgtactttacaaacctcagtttattgacattctaatcattcgataggtatttctcaggcaccacatacaaaggtttgtttttttgagatggagtttcgctcttgttgcccaggctggagtgcaatggcgcgatctcggctcaccacaacctccgccttccaggttcaagtgattctcctgcctcaccctcccgagtagctgggattacaggcatgcaccaccacgcctggataattttgtatttttagtggagatggggtttctccatcttggtcaggctggtcttgaactcccgccctctggtgatctgctcacctcagcctcccaaagtgttgggattacaggcgtgagccaccacgcccggtcttgttttacatttatgggagcctacaacatgcccagttccaagttcaagaaggaatgggagctgcagttgttgtggtctaacagctttccgtttaatgtcacactgtaaatgacaccaattgcaccccaggaggttcccactctgtaataggtgaaccagcccgtggcccacggctggaagatcacatgtcagagctctgcatgagccaggggagaaggtgctgcatggacagaagtaagtgggtgaccagtgccactaaaagcagagcttgagtttactctcataaccatcggctgtgggccagacatttggctgctttgcaggcagaccaggcttcccggtgagtcatgctgcttaaaatgctgtctgggaacgcagagaaagtctaaacgccaagacgctgaggacagccccgcaggtggactgccatgcccggctcggcccctttttggtccccagagtggacccttctcctccccacagaggggaggcatctgatggtggcttcagcagacaacctggagaagaaccactcagggtttgtcttgctgacgtcctatagccagcaaaacccagggcaggagaaccctggctctttagggcaggtgggggagagggcatcttagcagggaaggagctagggtaatgccagaagcaacccactcagcagggccactcagcaaccccctggcgagcagaaaggtggcaaacaacacatcttctgggcagactcctttgaagagaggtagaacataccagaaaggaatagcattgtgacagcagggccgggtgggtgtcctgcttctgacagatctagtgctgagggcagacgtggtgcatgtctccaggtttcaaccacacacaaaccggtcgtgaaagtttgaaagatatttatttaaaaacagaacaaaaaagctttggtatttcaaaacctgacaatcatcaatcactagaaagttaaacacctcccctgaagccccaaagtacaaaaccacagatgtccacaggctcctaaaaaagggcgtgcaaacccgaggatgacagcacaacccgcaccctcctacaggcagcagcacagccaccctggggggccccggcccagcctcgggaccgtggggcctccgaacgccgagatggacatcaccgccaacactcaccatctacaggggatgcaaaagccatctagcaaaatctcaacaaaaataaattaaaacttcattaagaaagaacacgttaaattaggaaaaggacacaacttttcctagacaagagtcttttcaaaagatgatctatttcctgggacagaagaaagggggaaagtggaaggagtgagttccatttcaagtatttgccatacaggttcattttattgagtggaaagcttacaaaaggtccactggccccttccctccccacgtgacactcattccttccaatgcaaactctggtgtatccacactcacttctgcgtcaccggtttcccccaacaaggcacaaagggcgggtgcttccaaaggatcccttgctcctggcagcgggactttcagtgctgggtgtcttgtgcaaatggtggctgaaagcaggactgttagttcactcagacactgggatcttcctgttcaattcacaaaacaagtgtgattactgttcactgccaaccccagtggccagctatagaaataggctacggagacaaccctagtggcaccacaccctggctctgacccagccttgcagaattaccacggactcagtggcctgggcccttctggagctgagtgttcactggctccactctggcatggcccagcttgagcctaagtcaaggagagatcggtcagtaccccatgaaggtagtttggctcatttgcccaactgtgggaggaaccgaaggtgcactcaagagcgagggcagagaagccaccaagcagcagggaaaagcagccgcctgccaaacagacggcaaaacccacacgatgcacatttggcacctgtcctagtgcagctagttcagaggcggctcacaaggaaggcctctgtgcagtcctttttgatctgacttttgatttttcttcgaacttgaggaactcagccctgtctcccactcttctgctctttcaggtcaagttctgcttccttttccaagtcctggtcttgggccagaaactagaagccgcaggcatccctgtggatgtgatgggacacttcccatttctccagggtgggatctgggctctctgactacttgggggcacagacgcagagcctaatatacctctctactgtcactacagtttaaaaagagaagataaaggagaaaagaagagaagggaggggaggggaggaagagtagaggggaggagacgggatacaggaggagagaagagaaagggaaacagctcagctctttgggaaacattttcttctacaactgctaacaaaggcctccccctggaatccctgctggtctttctcctgaggaagcacagaaggccgggcggcagggcacagtaggcagcctcaccccgcgacagcaatgctgatgctaagatgctgccccgatgacagtcttgcagcaatgatggccaaaatcaccgcttccaggggcaaacatgtctcaggaaacttgagggcaatgcttctgtcctgtgtcctatgctaacgagatggccactctggtccgaggcctggagcaaggggctgacctctgcatgccatgaacaggcacatggggggaagctggggatcccgccagcagttcagacagaggcttcaagtcaatctaggggcttgttgcagttatttttattttattattattattatttattatttattttttatttttttgagacagagtctcactctgtcacccaggctggagtgcactggcatgatctcgggtcactgcaacctccgtctcccgggttcaagcaattctcctgcctcagcctcccgagtagctggaattacaggcatgcaccaccatgcccagctaatttttgtatttttagtacagatggggtttcaccgtgttggccaggctggtcttgaactcctgacctcaggtgatctgcccgcctcagcctcccaaagtactgggattataggcatgagccactgcacccagcctcattattattatttttagacagggtctcactctgtcacctgggatggagtgcaatggtgtaatcacagctcactgcagtctcaaactcctgggctcaagtgatcctcccacctcagcctcctaagtagctgggactacaagcgtgcaccatcacgcctggctgatttttaaattttttgtagagacaagtcctcgttatcctgcccaggctggtctcaaactactgggctcgaaggatc

SEQ ID NO: 316 - DNA, 2224 bp, Homo sapiens
cagagccgcaagcgcagggaaggcctccccgcacggtgggggaaagcggccggtgcagcgcggggacaggcactcgggctggcactggctgctagggatgtcgtcctggataaggtggcatggacccgccatggcgcggctctggggcttctgctggctggttgtgggcttctggagggccgctttcgcctgtcccacgtcctgcaaatgcagtgcctctcggatctggtgcagcgacccttctcctggcatcgtggcatttccgagattggagcctaacagtgtagatcctgagaacatcaccgaaattttcatcgcaaaccagaaaaggttagaaatcatcaacgaagatgatgttgaagcttatgtgggactgagaaatctgacaattgtggattctggattaaaatttgtggctcataaagcatttctgaaaaacagcaacctgcagcacatcaattttacccgaaacaaactgacgagtttgtctaggaaacatttccgtcaccttgacttgtctgaactgatcctggtgggcaatccatttacatgctcctgtgacattatgtggatcaagactctccaagaggctaaatccagtccagacactcaggatttgtactgcctgaatgaaagcagcaagaatattcccctggcaaacctgcagatacccaattgtggtttgccatctgcaaatctggccgcacctaacctcactgtggaggaaggaaagtctatcacattatcctgtagtgtggcaggtgatccggttcctaatatgtattgggatgttggtaacctggtttccaaacacatgaatgaaacaagccacacacagggctccttaaggataactaacatttcatccgatgacagtgggaagcagatctcttgtgtggcggaaaatcttgtaggagaagatcaagattctgtcaacctcactgtgcattttgcaccaactatcacatttctcgaatctccaacctcagaccaccactggtgcattccattcactgtgaaaggcaaccccaaaccagcgcttcagtggttctataacggggcaatattgaatgagtccaaatacatctgtactaaaatacatgttaccaatcacacggagtaccacggctgcctccagctggataatcccactcacatgaacaatggggactacactctaatagccaagaatgagtatgggaaggatgagaaacagatttctgctcacttcatgggctggcctggaattgacgatggtgcaaacccaaattatcctgatgtaatttatgaagattatggaactgcagcgaatgacatcggggacaccacgaacagaagtaatgaaatcccttccacagacgtcactgataaaaccggtcgggaacatctctcggtctatgctgtggtggtgattgcgtctgtggtgggattttgccttttggtaatgctgtttctgcttaagttggcaagacactccaagtttggcatgaaaggttttgttttgtttcataagatcccactggatgggtagctgaaataaaagaaaagacagagaaaggggctgtggtgcttgttggttgatgctgccatgtaagctggactcctgggactgctgttggcttatcccgggaagtgctgcttatctggggttttctggtagatgtgggcggtgtttggaggctgtactatatgaagcctgcatatactgtgagctgtgattggggaacaccaatgcagaggtaactctcaggcagctaagcagcacctcaagaaaacatgttaaattaatgcttctcttcttacagtagttcaaatacaaaactgaaatgaaatcccattggattgtacttctcttctgaaaagtgtgctttttgaccctactggacatttattgacttaattgcttctgtttattaaaattgacctgcaaagttaaaaaaaaattaaagttgagaacaggtataagtgcacactgaatagtctaatctacatgtaacacatattttagtatgattttctatactctaatcagcactgaattcagagggtttgactttttcatctataacacagtgactaaaagagttaagggtatatataccatcactttgggacttggtagtattattaaaaggttatttccttcactgtcaataaaagtccaaatgtttagcttaggtctgagagtcaaacaatgttaaggattgtcttaaagttccttagc

SEQ ID NO: 317 - DNA, 2715 bp, Homo sapiens
ggatccgcgtcggagatggatgtctctctttgcccagccaagtgtagtttctggcggattttcttgctgggaagcgtctggctggactatgtgggctccgtgctggcttgccctgcaaattgtgtctgcagcaagactgagatcaattgccggcggccggacgatgggaacctcttccccctcctggaagggcaggattcagggaacagcaatgggaacgccaatatcaacatcacggacatctcaaggaatatcacttccatacacatagagaactggcgcagtcttcacacgctcaacgccgtggacatggagctctacaccggacttcaaaagctgaccatcaagaactcaggacttcggagcattcagcccagagcctttgccaagaacccccatttgcgttatataaacctgtcaagtaaccggctcaccacactctcgtggcagctcttccagacgctgagtcttcgggaattgcagttggagcagaactttttcaactgcagctgtgacatccgctggatgcagctctggcaggagcagggggaggccaagctcaacagccagaacctctactgcatcaatgctgatggctcccagcttcctctcttccgcatgaacatcagtcagtgtgaccttcctgagatcagcgtgagccacgtcaacctgaccgtacgagagggtgacaatgctgttatcacttgcaatggctctggatcaccccttcctgatgtggactggatagtcactgggctgcagtccatcaacactcaccagaccaatctgaactggaccaatgttcatgccatcaacttgacgctggtgaatgtgacgagtgaggacaatggcttcaccctgacgtgcattgcagagaacgtggtgggcatgagcaatgccagtgttgccctcactgtctactatcccccacgtgtggtgagcctggaggagcctgagctgcgcctggagcactgcatcgagtttgtggtgcgtggcaaccccccaccaacgctgcactggctgcacaatgggcagcctctgcgggagtccaagatcatccatgtggaatactaccaagagggagagatttccgagggctgcctgctcttcaacaagcccacccactacaacaatggcaactataccctcattgccaaaaacccactgggcacagccaaccagaccatcaatggccacttcctcaaggagccctttccagagagcacggataactttatcttgtttgacgaagtgagtcccacacctcctatcactgtgacccacaaaccagaagaagacacttttggggtatccatagcagttggacttgctgcttttgcctgtgtcctgttggtggttctcttcgtcatgatcaacaaatatggtcgacggtccaaatttggaatgaagggtcccgtggctgtcatcagtggtgaggaggactcagccagcccactgcaccacatcaaccacggcatcaccacgccctcgtcactggatgccgggcccgacactgtggtcattggcatgactcgcatccctgtcattgagaacccccagtacttccgtcagggacacaactgccacaagccggacacgtatgtgcagcacattaagaggagagacatcgtgctgaagcgagaactgggtgagggagcctttggaaaggtcttcctggccgagtgctacaacctcagcccgaccaaggacaagatgcttgtggctgtgaaggccctgaaggatcccaccctggctgcccggaaggatttccagagggaggccgagctgctcaccaacctgcagcatgagcacattgtcaagttctatggagtgtgcggcgatggggaccccctcatcatggtctttgaatacatgaagcatggagacctgaataagttcctcagggcccatgggccagatgcaatgatccttgtggatggacagccacgccaggccaagggtgagctggggctctcccaaatgctccacattgccagtcagatcgcctcgggtatggtgtacctggcctcccagcactttgtgcaccgagacctggccaccaggaactgcctggttggagcgaatctgctagtgaagattggggacttcggcatgtccagagatgtctacagcacggattattacaggctctttaatccatctggaaatgatttttgtatatggtgtgaggtgggaggacacaccatgctccccattcgctggatgcctcctgaaagcatcatgtaccggaagttcactacagagagtgatgtatggagcttcggggtgatcctctgggagatcttcacctatggaaagcagccatggttccaactctcaaacacggaggtcattgagtgcattacccaaggtcgtgttttggagcggccccgagtctgccccaaagaggtgtacgatgtcatgctggggtgctggcagagggaaccacagcagcggttgaacatcaaggagatctacaaaatcctccatgctttggggaaggccaccccaatctacctggacattcttggctagtggtggctggtggtcatgaattcatactctgttgcctcctctctccctgcctcacatctcccttccacctcacaactccttccatccttgactgaagcgaacatcttcatataaactcaagtgcctgctacacatacaacactgaaaaaaggaaaaaaaaagaaaaaaaaaaaaaaccgc

SEQ ID NO: 318 - DNA, 1701 bp, Homo sapiens
gtgaatcaggcaccggagtgcaggttcgggggtggaatccttgggccgctgggcaagcggcgagacctggccagggccagcgagccgaggacagagggcgcgcggagggccgggccgcagccccggccgcttgcagaccccgccatggacccgttcctggtgctgctgcactcggtgtcgtccagcctgtcgagcagcgagctgaccgagctcaagttcctatgcctcgggcgcgtggtcaagcgcaagctggagcgcgtgcagagcggcctagacctcttctccatgctgctggagcagaacgacctggagcccgggcacaccgagctcctgcgcgagctgctcgcctccctgcggcgccacgacctgctgcggcgcgtcgacgacttcgaggcgggggcggcggccggggccgcgcctggggaagaagacctgtgtgcagcatttaacgtcatatgtgataatgtggggaaagattggagaaggctggctcgtcagctcaaagtctcagacaccaagatcgacagcatcgaggacagatacccccgcaacctgacagagcgtgtgcgggagtcactgagaatctggaagaacacagagaaggagaacgcaacagtggcccacctggtgggggctctcaggtcctgccagatgaacctggtggctgacctggtacaagaggttcagcaggcccgtgacctccagaacaggagtggggccatgtccccgatgtcatggaactcagacgcatctacctccgaagcgtcctgatgggccgctgctttgcgctggtggaccacaggcatctacacagcctggactttggttctctccaggaaggtagcccagcactgtgaagacccagcaggaagccaggctgagtgagccacagaccacctgcttctgaactcaagctgcgtttattaatgcctctcccgcaccaggccgggcttgggccctgcacagatatttccatttcttcctcactatgacactgagcaagatcttgtctccactaaatgagctcctgcgggagtagttggaaagttggaaccgtgtccagcacagaaggaatctgtgcagatgagcagtcacactgttactccacagcggaggagaccagctcagaggcccaggaatcggagcgaagcagagaggtggagaactgggatttgaacccccgccatccttcaccagagcccatgctcaaccactgtggcgttctgctgcccctgcagttggcagaaaggatgtttttgtcccatttccttggaggccaccgggacagacctggacactagggtcaggcggggtgctgtggtggggagaggcatggctggggtgggggtggggagacctggttggccgtggtccagctcttggcccctgtgtgagttgagtctcctctctgagactgctaagtaggggcagtgatggttgccaggacgaattgagataatatctgtgaggtgctgatgagtgattgacacacagcactctctaaatcttccttgtgaggattatgggtcctgcaattctacagtttcttactgttttgtatcaaaatcactatctttctgataacagaattgccaaggcagcgggatctcgtatctttaaaaagcagtcctcttattcctaaggtaatcctattaaaacacagctttacaacttccatattacaaaaaaaaaaaaaaaaaa

SEQ ID NO: 319 - DNA, 564 bp, Homo sapiens
  misc_feature (4)..(4): n is a, c, g, or t
  misc_feature (6)..(6): n is a, c, g, or t
  misc_feature (10)..(10): n is a, c, g, or t
  misc_feature (12)..(12): n is a, c, g, or t
  misc_feature (14)..(14): n is a, c, g, or t
  misc_feature (16)..(16): n is a, c, g, or t
  misc_feature (52)..(52): n is a, c, g, or t
  misc_feature (212)..(212): n is a, c, g, or t
  misc_feature (219)..(219): n is a, c, g, or t
  misc_feature (245)..(245): n is a, c, g, or t
  misc_feature (287)..(287): n is a, c, g, or t
  misc_feature (419)..(419): n is a, c, g, or t
  misc_feature (463)..(463): n is a, c, g, or t
  misc_feature (470)..(470): n is a, c, g, or t
  misc_feature (564)..(564): n is a, c, g, or t
gcgncncgcntncngngcactcacggctctgagggctccgacggcactgaangccatgggcgttcgaacctcccgctggcgctgggcctggcctgggtcgcattctgcctcctgggtctgcacgcgacgcccgggcccggccgcaggagcgcatggtcggagaactccgggacctgtcgcccgacgacccgcagtgcagaaggcggcgcagncggcgtnggcagctacaacatgggcagcaacancatctactacttccgagacacgcacatcatcaaggcgcagancaagctggtggccggcatcaagtacttcctgacgatggagatggggagcacagactgccgaagaccagggtcactggagaccacgtcgacctcaccacttgcccctggaagcaggggcgcacaggaagaaantgccttgttgactttgaagtcctttgtggttccttggcaagaantctcttnagttctaaagcacaactgtgtgcagatgtgataagtcccgaaggcgaaagcatttgggttttgggcatggttgaaggcatttaagtccttggcn

SEQ ID NO: 320 - DNA, 3058 bp, Homo sapiens
gccccacagtgagaggaaggaaggcaacagtcgccagcagccgatgtgaagaccggactccgtgcgcccctcgccgcctctgcctggccacatcgatgttgtgtccgccgcctgctcgcccggatcacgatgaagcccccaaggcctgtccgtacctgcagcaaagttctcgtcctgctttcactgctggccatccaccagactactactgccgaaaagaatggcatcgacatctacagcctcaccgtggactccagggtctcatcccgatttgcccacacggtcgtcaccagccgagtggtcaatagggccaatactgtgcaggaggccaccttccagatggagctgcccaagaaagccttcatcaccaacttctccatgatcatcgatggcatgacctacccagggatcatcaaggagaaggctgaagcccaggcacagtacagcgcagcagtggccaagggaaagagcgctggcctcgtcaaggccaccgggagaaacatggagcagttccaggtgtcggtcagtgtggctcccaatgccaagatcacctttgagctggtctatgaggagctgctcaagcggcgtttgggggtgtacgagctgctgctgaaagtgcggccccagcagctggtcaagcacctgcagatggacattcacatcttcgagccccagggcatcagctttctggagacagagagcaccttcatgaccaaccagctggtagacgccctcaccacctggcagaataagaccaaggctcacatccggttcaagccaacactttcccagcagcaaaagtccccagagcagcaagaaacagtcctggacggcaacctcattatccgctatgatgtggaccgggccatctccgggggctccattcagatcgagaacggctactttgtacactactttgcccccgagggcctaaccacaatgcccaagaatgtggtctttgtcattgacaagagcggctccatgagtggcaggaaaatccagcagacccgggaagccctaatcaagatcctggatgacctcagccccagagaccagttcaacctcatcgtcttcagtacagaagcaactcagtggaggccatcactggtgccagcctcagccgagaacgtgaacaaggccaggagctttgctgcgggcatccaggccctgggagggaccaacatcaatgatgcaatgctgatggctgtgcagttgctggacagcagcaaccaggaggagcggctgcccgaagggagtgtctcactcatcatcctgctcaccgatggcgaccccactgtgggggagactaaccccaggagcatccagaataacgtgcgggaagctgtaagtggccggtacagcctcttctgcctgggcttcggtttcgacgtcagctatgccttcctggagaagctggcactggacaatggcggcctggcccggcgcatccatgaggactcagactctgccctgcagctccaggacttctaccaggaagtggccaacccactgctgacagcagtgaccttcgagtacccaagcaatgccgtggaggaggtcactcagaacaacttccggctcctcttcaagggctcagagatggtggtggctgggaagctccaggaccgggggcctgatgtgctcacagccacagtcagtgggaagctgcctacacagaacatcactttccaaacggagtccagtgtggcagagcaggaggcggagttccagagccccaagtatatcttccacaacttcatggagaggctctgggcatacctgactatccagcagctgctggagcaaactgtctccgcatccgatgctgatcagcaggccctccggaaccaagcgctgaatttatcacttgcctacagctttgtcacgcctctcacatctatggtagtcaccaaacccgatgaccaagagcagtctcaagttgctgagaagcccatggaaggcgaaagtagaaacaggaatgtccactcaggttccactttcttcaaatattatctccagggagcaaaaataccaaaaccagaggcttccttttctccaagaagaggatggaatagacaagctggagctgctggctcccggatgaatttcagacctggggttctcagctccaggcaacttggactcccaggacctcctgatgttcctgaccatgctgcttaccaccccttccgccgtctggccatcttgcctgcttcagcaccaccagccacctcaaatcctgatccagctgtgtctcgtgtcatgaatatgaaaatcgaagaaacaaccatgacaacccaaaccccagcccccatacaggctccctctgccatcctgccactgcctgggcagagtgtggagcggctctgtgtggaccccagacaccgccaggggccagtgaacctgctctcagaccctgagcaaggggttgaggtgactggccagtatgagagggagaaggctgggttctcatggatcgaagtgaccttcaagaaccccctggtatgggttcacgcatcccctgaacacgtggtggtgactcggaaccgaagaagctctgcgtacaagtggaaggagacgctattctcagtgatgcccggcctgaagatgaccatggacaagacgggtctcctgctgctcagtgacccagacaaagtgaccatcggcctgttgttctgggatggccgtggggaggggctccggctccttctgcgtgacactgaccgcttctccagccacgttggagggacccttggccagttttaccaggaggtgctctggggatctccagcagcatcagatgacggcagacgcacgctgagggttcagggcaatgaccactctgccaccagagagcgcaggctggattaccaggaggggcccccgggagtggagatttcctgctggtctgtggagctgtagttctgatggaaggagctgtgcccaccctgtacacttggcttccccctgcaactgcagggccgcttctggggcctggaccaccatggggaggaagagtcccactcattacaaataaagaaaggtggtgtgagcctga

SEQ ID NO: 321 - DNA, 751 bp, Homo sapiens
cgagctccaggtacttggaaaaatggacaaggattgtgaaatgaaacgcaccacactggacagccctttggggaagctggagctgtctggttgtgagcagggtctgcacgaaataaagctcctgggcaaggggacgtctgcagctgatgccgtggaggtcccagcccccgctgcggttctcggaggtccggagcccctgatgcagtgcacagcctggctgaatgcctatttccaccagcccgaggctatcgaagagttccccgtgccggctcttcaccatcccgttttccagcaagagtcgttcaccagacaggtgttatggaagctgctgaaggttgtgaaattcggagaagtgatttcttaccagcaattagcagccctggcaggcaaccccaaagccacgcgagcagtgggaggagcaatgagaggcaatcctgtccccatcctcatcccgtgccacagagtggtctgcagcagcggagccgtgggcaactactccggaggactggccgtgaaggaatggcttctggcccatgaaggccaccggttggggaagccaggcttgggagggagctcaggtctggcaggggcctggctcaagggagcgggagctacctcgggctccccgcctgctggccgaaactgagtatgtgcagtaggatggatgtttgagcgacacacacgtgtaacactgcatcggatgcggggcgtggaggcaccgctgtattaaaggaagtggcagtgtcctggg

SEQ ID NO: 322 - DNA, 975 bp, Homo sapiens
  misc_feature (2)..(5): n is a, c, g, or t
  misc_feature (7)..(9): n is a, c, g, or t
  misc_feature (18)..(18): n is a, c, g, or t
  misc_feature (22)..(22): n is a, c, g, or t
  misc_feature (31)..(31): n is a, c, g, or t
  misc_feature (63)..(63): n is a, c, g, or t
  misc_feature (413)..(413): n is a, c, g, or t
  misc_feature (476)..(476): n is a, c, g, or t
  misc_feature (480)..(480): n is a, c, g, or t
  misc_feature (581)..(581): n is a, c, g, or t
  misc_feature (586)..(586): n is a, c, g, or t
  misc_feature (602)..(602): n is a, c, g, or t
  misc_feature (613)..(613): n is a, c, g, or t
  misc_feature (623)..(623): n is a, c, g, or t
  misc_feature (626)..(626): n is a, c, g, or t
  misc_feature (628)..(628): n is a, c, g, or t
  misc_feature (639)..(639): n is a, c, g, or t
  misc_feature (650)..(650): n is a, c, g, or t
  misc_feature (674)..(674): n is a, c, g, or t
  misc_feature (678)..(678): n is a, c, g, or t
  misc_feature (684)..(686): n is a, c, g, or t
  misc_feature (689)..(689): n is a, c, g, or t
  misc_feature (693)..(693): n is a, c, g, or t
  misc_feature (708)..(708): n is a, c, g, or t
  misc_feature (711)..(711): n is a, c, g, or t
  misc_feature (714)..(714): n is a, c, g, or t
  misc_feature (722)..(722): n is a, c, g, or t
  misc_feature (732)..(732): n is a, c, g, or t
  misc_feature (743)..(743): n is a, c, g, or t
  misc_feature (747)..(748): n is a, c, g, or t
  misc_feature (751)..(751): n is a, c, g, or t
  misc_feature (754)..(754): n is a, c, g, or t
  misc_feature (775)..(775): n is a, c, g, or t
  misc_feature (779)..(779): n is a, c, g, or t
  misc_feature (781)..(781): n is a, c, g, or t
  misc_feature (783)..(783): n is a, c, g, or t
  misc_feature (789)..(789): n is a, c, g, or t
  misc_feature (802)..(802): n is a, c, g, or t
  misc_feature (809)..(810): n is a, c, g, or t
  misc_feature (825)..(825): n is a, c, g, or t
  misc_feature (828)..(829): n is a, c, g, or t
  misc_feature (832)..(832): n is a, c, g, or t
  misc_feature (837)..(837): n is a, c, g, or t
  misc_feature (850)..(850): n is a, c, g, or t
  misc_feature (854)..(855): n is a, c, g, or t
  misc_feature (860)..(861): n is a, c, g, or t
  misc_feature (865)..(865): n is a, c, g, or t
  misc_feature (874)..(874): n is a, c, g, or t
  misc_feature (878)..(878): n is a, c, g, or t
  misc_feature (890)..(891): n is a, c, g, or t
  misc_feature (897)..(897): n is a, c, g, or t
  misc_feature (910)..(912): n is a, c, g, or t
  misc_feature (917)..(918): n is a, c, g, or t
  misc_feature (920)..(920): n is a, c, g, or t
  misc_feature (922)..(922): n is a, c, g, or t
  misc_feature (924)..(924): n is a, c, g, or t
  misc_feature (931)..(931): n is a, c, g, or t
  misc_feature (938)..(938): n is a, c, g, or t
  misc_feature (941)..(943): n is a, c, g, or t
  misc_feature (952)..(955): n is a, c, g, or t
  misc_feature (957)..(960): n is a, c, g, or t
  misc_feature (965)..(968): n is a, c, g, or t
  misc_feature (973)..(973): n is a, c, g, or t
  misc_feature (975)..(975): n is a, c, g, or t
gnnnntnnncccccttanggtnatcaggttngtgggaaagggatcctgaagttggcgcctctnctggtcccacttctcatcgtggcgggtcgactgcctgagtagaggaagaggctacagatggggttgacaaaaaagggagtgaggggaaccccaggaagatgaagccagtggacctgaactgtttgggtagagccacccggcccttccttcctcattgttgtttggtatgcgcacagttcctgtgggactgggccgtgagttttccattggaaagaagttcagtggtcccattgttaactcagcctcaaatctcaactgtcaggccctacaaagaaaatggagagcctcttctggtggatgctttgctccctctgagctgccatgctggtctggcaaacacacctttctgntttggcttcacaaaagtaatgtgttccctttcccaccccttggctgaccctcagggagtcagnctgnttccatccatgggtggggaagacttcagcacaaagggaaagacttaattcttggtcaggcatttttgggaaagggttgattattgtgtatcaaggtacagnatcgnggggttcccctaaaantggcccgtttngggttttttnggntngggtatccctnacttgaggggnctcttcttgggtgggttgtgattnaatntcccannnaangttnggggaagggggattnttnggncctcttgnagttcatggnaaccaatcctncaannccnttngggggaaggggggagaacccngttnangncccctngggggaaaaaagnagaaaannttcttttaaaaaccnagnnggncccantccaattaaaaangggnngtttnntttntaggggganaaanctattgccccannaatttntttttttcaactnnnaaacnngngntnaaccaanttccggnagnnntattttcannnntnnnnaaatnnnntgggntn

SEQ ID NO: 323 - DNA, 1853 bp, Homo sapiens
gatccctgagcgtgtggcagcagtgcggtcgtggtccctccctatgcagcctggtttctagcgtgacacgcccttgacttgaggaccatgaaccgcagccgccaggtgacgtgcgtggcctgggtccgctgcggcgtggccaaagagacaccagacaaggtagagctgagtaaagaagaagtaaaacgcctcattgctgaggcaaaggagaaattgcaagaagaaggtggtggcagtgatgaagaggagacaggcagtccttcagaagatggcatgcagagtgcacgcacccaggcacgcccaagagagcccctggaggatggtgacccagaggatgacaggacgcttgatgatgatgagctggctgagtacgacttagataaatatgatgaggaaggtgacccagatgctgagactcttggtgaatctctcttgggtcttacggtctacgggagtaatgatcaagatccttacgttactctgaaagatacagaacaatatgaacgtgaagatttcttgattaagcccagtgataatcttatagtttgtggccgagctgaacaggaccagtgcaatttagaggtgcatgtttataatcaagaagaagactctttttatgtacaccatgatatactcttgtctgcatatcctctgagtgtggaatggctgaattttgatcctagcccagatgattctactggaaattacattgctgtaggaaacatgacccctgttattgaagtgtgggaccttgatatagtggactctttagagccagtcttcacactcggaagtaaactttcaaaaaagaagaaaaagaaaggaaagaagagttcctcagcagaagggcataccgatgctgtccttgacctttcatggaataagctaatcagaaatgttttagcaagtgcatcagctgacaacactgtaattctgtgggatatgtccttggggaaaccagcagctagcctcgctgtacacacagacaaggtccaaacactgcagtttcatccatttgaagcacagactctgatttctggctcatatgataagtcagtggctttgtatgactgccgaagtccagatgaaagccatcgaatgtggcgattcagtgggcagatagagagagtgacttggaatcacttttcaccttgtcatttcttggccagtacagatgacggctttgtatataatttggatgcacgttcagataagccaatttttacacttaatgcacacaatgatgaaatctctggtcttgatcttagcagtcaaatcaagggctgtctcgtgactgcttcagctgacaaatacgtgaagatctgggacatcttaggagataggccaagtctagttcattctagggacatgaaaatgggagttctcttctgttcttcatgttgccctgatttgccatttatttatgcctttggaggtcaaaaagaagggcttcgggtctgggatataagcacagtctcttcagtaaatgaagcatttggaagacgagagaggcttgttcttgggagtgcaagaaattcatctattagtggcccttttggcagcaggagctcagatacacccatggagtcttaatgaagatcatctaatttcctgcttaccttaactgggaattttaaaaagttggcctaaaaatgttccatgcgtggcagcaaccatgcagagtgactgaaacacaattcatttctgactgacattcctttctgcaactgcggtggcaccacaaatatccggtctttgtgcttgctcttcagatggatggtttgtaaggctcttgttgcatttcttaaaaaagagtaataaaaaggatttttaaaaagtaattccttaaacat

SEQ ID NO: 324 - DNA, 1300 bp, Homo sapiens
gcgcgcggggcagccgcgtggctaggcagacggggccgggagcggcgcgcgcgcgccccgccagcctctggcgcgcccccggcggcatgagccgcagcgtgctcgcccccgccgccagctcgcctcacttatgggtcggaaacgctgcgtgggggagactgttccaagatggcggcgggttgctgcggggtgaagaagcagaaactgtccagttcgcccccctctggctcgggtggcggtggtggcgcctcctcctcctcccactgcagcggagagagccagtgccgagctggggagctgggactaggaggcgccggtacgcggctcaacgggctgggaggtctaaccggaggaggtagcggcagcggctgtaccctctctcccccccagggctgcggcggcggcggcggggggatcgccctgtcgccacctccgagctgcggagtggggaccctactttctaccccggccgccgccacctcttcctcaccctcctcatcgtccgccgcctcgtcctcatcgccgggctcccggaagatggtggtgtcagcagagatgtgctgcttttgcttcgatgtgctctactgtcacctgtatggataccagcagccccggaccccccgattcaccaacgagccctacccactgtttgtaacatggaagattggtcgagacaaaagattacgtggatgcataggtactttttctgccatgaatttgcattcaggactcagggagtacacacttaccagtgcccttaaagatagccgttttcccccaatgacaagggatgagctgccacggcttttctgctcagtgtctctgctcactaactttgaagatgtctgtgattatttggactgggaggtgggtgtacatggcattagaatagaattcatcaatgaaaaaggatcaaaacgcaccgccacctacctaccggaggttgcaaaggagcaaggatgggaccatatacagaccatagactccttattgaggaaaggaggatacaaagctccgattactaatgaattcaggaaaaccataaaactgaccaggtatcgtagtgaaaagatgaccctgagctatgctgaataccttgctcatcgccagcatcatcatttccaaaatggcattgggcatccccttccgccatacaaccattattcctgacactgagccgcacaaccagtcactgggcctctctgcagacctcttcccaggagaccctacaccttcttggtctagctatctcttttactgtaccattttatgatgatagtttccgttgccatggtgaagc

SEQ ID NO: 325 - DNA, 1208 bp, Homo sapiens
gaaagtggcgtggtaaccaggcaactactgatcaatcccctccccggctgatttgcgcatcaggaggaggactgagcttatctgactccagagctttcaggagggaagaaagatgtcagatgaagatgatctagaagactctgagccagaccaggatgattctgagaaagaagaggacgagaaggagacagaggagggggaggactacagaaaagagggggaagagttccctgaggaatggctgcccacccccctcacggaggacatgatgaaggaagggctttctctgctctgtaagacaggcaatgggctggctcatgcttatgtcaagctggaggttaaagagagggacctgacagacatctacttgctgcgctcctacatccatctgcgctatgtggatatttctgagaaccacctgacagacctgtctccactcaactacctcacccacctgctctggctcaaggctgatggcaatcggctgcgaagtgcccagatgaatgaactgccctacctgcagattgctagttttgcttataaccagattactgacactgaaggcatctctcatcctcgtcttgaaaccctgaatctcaaagggaacagcatccacatggtgacaggtctggaccccgagaagttgatcagcctgcacacagtggagcttcgggggaaccagctggaaagcaccctgggaatcaatcttcctaagctgaagaacctctacctggcccaaaacatgctgaagaaggtggaaggcttggaggatctgagcaatctcaccaccttgcatcttcgagacaaccagattgacaccctgagtggcttctccagagaaatgaaatcattgcagtacctcaacctgaggagatcaaagacgctggccttcagacctgatcagactcccaggggcagccaccacatgtatgacagaggacagaggatgcctgtttttgccccaaagctggaaattcatcacaacctgaggcccaggatctgctctgtgccggtcctctgggcagtgtggggtgcagaatggggtgcctaggcctgagcgttgcctggagcctaggccgggggccgccctcgggcaggcgtgggtgagagccaagcccgcgtgggccgcggggtgctggtaggagtggttggagagacttgcgaaggcggctggggtgttcggatttccaataaagaaacagagtgat

SEQ ID NO: 326 - DNA, 776 bp, Homo sapiens
aggtgtttaatatttatttatttagttcataaacaggcactgcacctccagtgttcatccatggcactttcatgaccgcttcctgttctgtggcttcttttagtgcccaagttgtatcacatttcttgctgaagttcagacaattgaaaacaaacagactcacatctagggaaatcaacagaccaacaatggcaaaacacaatacaatgtaatggaaaaataatgtttgttacaggagtgcagccatttagagagtgtctcaggagtgtggctcacttgcaacttcaagtaagttagtgcctccttctcgcccaagttccgaaaccagctgggctatctcaaggtgagtgaattttcctgcccgtggaatcctagaagtcttgcagtctcccaagttttgtgttcaaaggcttcatattcagatgcgttgaagaatcatttcacattgggctagctgcttcacaaatttgggcgtctgcaccagattggggctcggactcttccaaagttcatagagctcttttctgaggtcctcgggtaggagccggggtatctgcttcatagacttcggtgctttgttaaacggtcatctttgatcaccatagccatactggcatccgtacatgtgatctaaacggtctcggctctggacctcggccaattctgcctcaagccaattccatagggggcgattaatcggaacaggcaagcggtcctggtaattgtacgtcaaatccacaatagggcggaccaattgaactcggtgctaaggtgca

SEQ ID NO: 327 - DNA, 898 bp, Homo sapiens
cccgctgtcctcaccgcaatggcggctgtgagggccctggtggcctcgaggctcgctgcggcatctgcattcacgtccctgtcccccggcggtcggacgccttcccagcgcgcagcccttcacctctccgtgccgcgccccgcggccagggtcgcgctggtgctgtctggatgcggagtctacgatgggaccgagatccacgaggcctcggcgatcctggtgcacctgagccgtggaggggctgaagtccagatctttgctcctgacgtccctcagatgcacgtgattgaccacaccaaggggcagccgtccgaaggcgagagcaggaatgttttgaccgagtctgcgaggatcgcccgtggcaaaatcacagacctggccaacctcagtgcagccaaccatgatgctgccatctttccaggaggctttggagcggctaaaaacctcttgtgctgcattgcacctgtcctcgcggccaaggtgctcagaggcgtcgaggtgactgtgggccacgagcaggaggaaggtggcaagtggccttatgccgggaccgcagaggccatcaaggccctgggtgccaagcactgcgtgaaggaagtggtcgaagctcacgtggaccagaaaaacaaggtggtcacgaccccagccttcatgtgcgagacggcactccactacatccatgatgggatcggagccatggtgaggaaggtgctggaactcactggaaagtgacgcgcatggacggggcccagctaggcgccaggacttggcctcaccctctggctgaggagctgtcggctgctttccatccagctgggagtctggcaggcccttttttttttttctttgccgaaacctgcaggcgttctctctctaaggaggatgtgctgcagtgcat

SEQ ID NO: 328 - DNA, 3252 bp, Homo sapiens
ggggtgaaccgtgacagcgcttcggcccgcactaaggccggctcttgtgccggaaggaggaaggcgtggggcattcgcccctcggagctagggagtgtgtgcgacgccgctgcgaggtcacgtgagccactgccggcagagagggaaaggggcggggcccagaacgaagcggggaggcgccccttgtttccctggggtcacgcgcagccggaagtggcggctgctgcggagaattggagatggggaccgccctggacatcaagattaaaagagcgaataaagtttatcacgccggggaagtgctctctggcgtggtggtcatatcgagtaaggattcagtccaacaccagggagtgtctttgaccatggaaggaactgtaaacctccagctcagtgccaaaagtgtgggtgtgtttgaagctttttataattctgttaagcctatccagattatcaacagcaccatagaaatggtgaagccggggaaatttcccagcggcaaaacagaaatcccttttgaatttcctctgcacttgaagggtaacaaagttctgtatgagacgtatcatggcgtgtttgtcaacattcagtatacactgcgctgtgacatgaagcggtctctgttggccaaggacttgacaaagacctgtgaatttatcgttcactccgctcctcagaaggggaagtttactcccagtcccgtggacttcacgattacacctgaaaccttacagaacgtcaaagagagagctttgcttcccaaatttctccttcgaggacatctcaactcaacaaactgtgtcatcacgcagccactaacgggagagctggtggtggagagctcggaagccgccatcagaagcgtggagctgcagctggtgcgcgtggagacgtgcgggtgtgcagaaggctatgcccgcgacgccacggagattcagaacattcagatcgccgacggggatgtgtgcaggggcctctctgtccccatctacatggtcttccctaggctgttcacctgccctacactggagaccaccaacttcaaagtggaatttgaggttaacatcgtggtgctgcttcaccctgaccacctcatcacggagaacttcccgctgaagctctgcaggatatagcccggaggagggaagcatagagaacgggagtggccatctggaaatccagctggttatccaaatcctaaggggagctacagccagcggcatatacttgtttttgtgattattctgtatcagaaatgaaacagaccctcaaattaactttccttcctcatttcttgaggcttctgcttccaacaggcacctctaatcagaccttttctttgaaattcaacaagatttcttaatgctatttgccaagaccatttcacagaaaacattgactgtggctcttgccttatctgttcctttttaggtacagtaaaacaattgtgacagcagtttgagcttgctggagagtggcatcatggggacaaaaggaaacctctgacttgctaatggatgtagccagggactccccatagcaaagggtctgtggccagttgacatccaggatggctgcaagcgcacttgatggtcaggaagtttgcagatactcgccaaggcagagcgcaaagtgctagccactggaaatgcatgacttccctccacccctactctattctgtagttttttggttttgtttctgagacggagtctcagtctgtcacccaggctggagtgatctcagctcactgcaacctccacctcccaggttcaagcgactctcctgcctcagcctcccgagtagttgggattacaggtgactgccaccgtgcccggctaatgtttgtatttttagtagagacggggcttcaccatcttggccaggctggtcttgaactcctgacctcgtgacccacccgccttggcctcccaaagtgctgggattacaggtgtgagccaccacacccagcctctgtagttctttttacaacatttttcattataactttaaattttttaagcaactggaaaagtgttccttgctctcttggggggatttggctggtgccgaagtgtttctgaagtctcaagaactgccataaaatctcacgctgccatttccctgaacagatacatacatagagagagacagttttccaaactgtgtcacgcaggctgagtgcactggcaggatcacagctcacggcagcctcaacctccctggctcaagcgatccctcccctcagcctcctgagtagctgagactacaggtgagtgccaccacactcagctaattttcaaattttttgtagacagggtctccctatgttgcccaggctggtcttgaactcctagactcaagtgatcctcctgtcttggcctcccaaagtgctgagattacaggtgtgagccactgtgcccagcagtttcccagaatatatttaaatgcaaagttacatgaggggaaaacatgtatgtttgctcctgttgttactgggtaggttctgaacagcagaaacccatgtgcagggtgggctggtgaaggcccctctccgcaaggtggtagcaggaaaaggtccttgacttgatgaatttggtctgcctctgagccactggaggaagctgttttgagccagggttttttggcctaaagccagcatttcctcagtctccctttgtggttcgaaggatatggactattgcaatacatttcttccttcaaatcctgccactgttttgttggcccacaactaataggacctcaaaataagccatgctgctttgcacacacactagccttcttttgtacttttcattctggatgggcttggccaaaacaggctcaggccaaagacctcccaagctgtatgtacttccagtatcctgaaacagtgtttggtgacataatgccaagggtaaacaagcctgatttaggcactgctttatccaggggcttcacccatgaaattaataaaacttatctgagtcacttgaaacttggttcccagaaaacacatttctggtttataatctccttttatgctcacctgacattaattatctatccttgatgatgtgtttaaactgagtagcagaaaacagaggccacactttctgggaaattttaaaggaagaaaccatttttaatgagatgaaaatatttaacgaatttaaaaagctaatgacaattttgagaaaaggtttgggatgtatattgctatgtaatttaataaactgattttatggatat

SEQ ID NO: 329 - DNA, 903 bp, Homo sapiens
cggcggcggcgacaggaccgaggggccttagttggtgggcaagtcggggatcccagaaagagaagcgtgacccggaagcggaaacgggtgtccgtcccagctccggcctgccagtgagcttctaccatcatggacctattgttcgggcgccggaagacgccagaggagctactgcggcagaaccagagggccctgaaccgtgccatgcgggagctggaccgcgagcgacagaaactagagacccaggagaagaaaatcattgcagacattaagaagatggccaagcaaggccagatggatgctgttcgcatcatggcaaaagacttggtgcgcacccggcgttatgtgcgcaagtttgtattgatgcgggccaacatccaggctgtgtccctcaagatccagacactcaagtccaacaactcgatggcacaagccatgaagggtgtcaccaaggccatgggcaccatgaacagacagctgaagttgccccagatccagaagatcatgatggagtttgagcggcaggcagagatcatggatatgaaggaggagatgatgaatgatgccattgatgatgccatgggtgatgaggaagatgaagaggagagtgatgctgtggtgtcccaggttctggatgagctgggacttagcctaacagatgagctgtcgaacctcccctcaactgggggctcgcttagtgtggctgctggtgggaaaaaagcagaggccgcagcctcagccctagctgatgctgatgcagacctggaggaacggcttaagaacctgcggagggactgagtgcccctgccactccgagataaccagtggatgcccaggatcttttaccacaacccctctgtaataaaagagatttgacactaaaaaaaaaaaaaaaaaaaaaaa

SEQ ID NO: 330 - DNA, 173354 bp, Homo sapiens
gatcatttaggtgatgccatccatctcataggtgccccggggcaggagtggaggtgattagctctgtgggtggatgttacgggcatctaggcttatgtggaagtcccaattcaaagcgggtggatttctagaaccctcctctctgggtttccatagcctcgttaccctgcccagcaaagatccatgtgtctgtgtctcccaccagatgggaggctccccaggggcagagatgaggtctgactcatcttctgtccccatcactgcccagcatggggcctggcgcacagcaggtgcttagccagaatgtgctgagtggatcagcgctctcggcggtgatggtggagaactcagggcgacagcctgtggaggcatcaaggagatgctcctggcattgtgcagggtgtgccctggctggggatcacgtcatgtccagggagttggagcctggactttgggttcctgcacccctgaggtcaaacgaggggttggtctcctcctggccatgtggcgcctgggcaccccccttccccactgtgagctttttctgcagctttttctgcagggggttaatcatacctgcctcccacgtggtgagagggagagtgcatgaaaacacttaacttggtacctgccctgtggtcagcctgagatgcgtccctgagtatttttgttacaggaatgaattctgtaagaaccaaccctgactggcattttcaaatccccagtgctccctgagacacagaggggctgtaccctgtgcttagcaagaagcttgcagcctgaacattgacacggatgagaacccccagccagaaggtaacccgcgcccatcagagaacttgaggggggaagccccaataaaaaccaaccaaccaaacaagaacaccccaaatcacacgcgcgcgcgcacacacacacacacacacacgcacattcaatattctgacacaaatagccccaaggggccgctattggagggagcaggggcaagggaagcttcggttttcaaccacaggtataactcacaggcctcaatcctcctggctggaatcagccagagttgctttgtcttggtcatcctgaggccacaatgagtcacctctcagaagccaccagcccaaaacaggactatcgcttgtggacaggtggctcagaatcccctcccctgcacccccagcccctacccctgagtttgctcgtaatcttagaagtccgcagaagggggctttgggcacaggcagcattcccttctctaccacctcggctgtccctggcatctctgtagaagttgtccttctcggaggctgcactgggtatttcagatctcatctcccccatcctgaggcacagcaaaagggttttctggaggaaatacaaggaaaaaaaatatcacatggtgtctcctcaatggggactcactggggacatttctctctggcctcagtgccagaagaatccaggtttcctctgaacacatgggttttgtcttctgaacgttgtgaaccatgtgactttaagactggaagcgagacaaaaatgtcgctatcattatagctccatatagtactagagctctggctcatgcaataaggcaagaaaaaaaagcatagactaggactggaatagaagaaccaaaattacagttaattgtggataacttacatagaaaatttaatagaatcaacaggttaattagtagaatggagagtgcatacatagaggtataatagtcaacctgtaagacatcagatcaatttataaaatgcaacagtgtgcattgacctcagcagttactagggtaattatatgtcatggcttgggacagtctcagttgacacttgttgttctgacataatttttaatgttgttccccttttaccctcaaaagtattctgatttggatgataaattatactgtcacccttgctataacaaactaaatattaaacacagatacagataccattcatactgacaaaaacgatcctgtattttggaatgacactaagatatgaccatgaccatgtcatacaaagctatagagaagataccaagatgctcctggaatagggaagagccaggagagcagtggaacaagatctacagtgtggaaacaggtctgctgggcacttatagctttgaatggcagagtcaagttgcaaacaagacaatgaggaaaagaaatacaaactccatctgtggcaggcagcatgaaccccactgccctgtgtctattacaagagcaattgcccagccacaactacttaccttcccagactcccttgcaagcaggggtggtcacatgacccagtctggccaatgtcatgtaagtgggagtctattgggaaggggacataaatccaggggaagatgaactatcttgcatgcatgagaatgaaggatgctcactaacacaggtggagtagaaggcagggagaaactgggttctggtggcagccctggactgccccctccacaccactgcagtcaaatttcctttacttgcataaattgcaactggtgacagttcttaactgataaaccatcttcaaccaaactacatgttttttgggcaaatggagaagtcaagggagtggctccgacaaagccagcaaagcccacctccccagagtgagagatacgccaagaaggagaacctactctccactctttgcatcagtgggaatgtgtacaggggctaagggtgagagattccgtggggccatctcctcagcttcacagaacaaagccaggtactctccatcaccgacttttttttctccatagcacacacctctatccagcataccacctattgtacttacttgaataatttattgtttgtcttccccacatagaaagttagctacaagagggttaaggtgattgtgtgttttacacattgctgcattgccagggcctaggacagtaactggcatactgtaggggcttaataatgtttatcaaataaatgaatgaaccaagaatttaaagcccaatgaaccatctttcaaatataaagtcaacagaaaaacatgttgaacatatttttgaattatagttcccatgaccccttcttaaaaaaattaaggacacccttaggcaaatcaagaatgattcagaaaagtttaatgtaaaaggatgggcagatgatttttttaaaagttctgtggatagatggcagtgatggctgctgtattaatccattttcatgctgctgataaagacatacccaagcaatttacaaaagaaagaggcttaactggacttacagttccacatggctggggaggcctcacaatcatggtgaaaggcaaggaggagcaagtcacgtcttatgtggatggtggcaggcaaagggacagagagagtgagcgagcttgtgcaggaaaattcccatcagacctcatgaaatttattcactatcatgaaaacagcatgggaaagacttgcccccatgattcaattacctcccactgggttcctcccatgacacatgggaattgtgggagttacaattcaagatgagctttgggtacagccacagccaaaccatatcagttgccctacagtgagaaggtacttaatgcccctgaactgtatacttaaaaatggttaaaatggttatatgttatgtgcattctaccacaattcataaaaaggatgagcagaagcataacaaatgcaaatgaagagaaatcaggggtcaagttgtaaatggagcactgccaagagtgccagcaatgagcacagaatttgtgtaactgcaggactattaaagccaatctaaagattatgaccatcacagagaagaatgaaacaaaacagaactggcataaataataaaaagtaggaggggtggaggtgagaaggagagaggtaatacaagtaaactatgtcatattcatatatagttggaggtctaaattattgcttagaagtctaagtaaaattagaggcatcaaggtaaacaaaaaataatcaactaaaataacttgatggaagggagacaagaagagggaaagtagaaatattctaattttgatattgttcacagtagggagaaaataagcgctgtctagagaaataaaaggattaaagatatcatgtcatattataattatgaagataaccatgggatcaaaaacgcagctttccaaattatcagaagacatacacacagaaaataaaacaaagacaacagagaccgtatggtgaaaactgacaacccccacaaaactataaaagcagaaagcctatcaaacaatgatgacagaactaagaccaaatgcatctgccatatctgtaaatgttagtgagccatacacacttgcttaaaaaaaaaaaaaaaaaaaaagagactggatcacaaacaagggcactgaaggtagaatgattcagcaaggtttcatagaaaaggatgggcagggccgggcatggtggctcacacctgtaatctcagcactttgggaggccaaggcaggtagatcacgaggtcaggagttcaagaccagcctggccaacatgatgaaaccccgtctctactaaaaatacaaataaattagccaggcatggtggtgggtgcatgcagtcccagctactcgggaggctgaagcaggagaatcgcttgaacccaggagactctgtctgaaaaaaaaaaaaaaaaagggcagatgatttttataaagttctgcaggtggatgatggtgatggttgcactacagtgagaagtacttaatacccctgaactgtatactttaaaaatagttaaaatggtaaatgttatgtgcattttaccataattttaaaaaaaggatgagcagaagcataacaaacaaatgcaaatgaagctaaatcaggggtcataatcttaatatcagacaaagctgaagtcagggcaaaacatattgaatgagaaaaaagaagggcactgtgtgagggtgaaggatgagagtcaccatgaagatctaacagtaatgaatgttcatgtaccaaatagcatagcctcaatattcatagagcaagactggaaatttagggagaaaaagcagagtatgctagcattagtgctttttttttactttttttaaagacagagtctcactctgttgcccaggctggagtgcaatggtatgatctcagctcactataacctctgcctcttgggttcaagccattctcctgcctcagcctcctgagtagctgggataacaggtgctcgccaccatgctcggctaatttttttttttttgactttttagtagaaatgagatttcaccatgttggccagtctggtctcgaactcctgaccacaggtgatccgcccacctcagcctcccaaagtgctgggattacaggcatgagccaccacgccctgcctagtgcattttaattcacctttctcaatccattccatatgcagttggcaaaaacaaaagtaaggagatagggagccaaataatctaattaacaactctgtgtgtgtgtgtgtgtgtgtgtgtgtgtaaaacacagtctaccttcattctattcaaatgctcttgaaagtgcatacacaaaagtgactatcaggccacaaagaaagtaaattccaaaaaatagaaaaaagacaacattctctgatcacaatatactagaatttgaaaatactaataatgaaaccacagaccaaaccaaactttgccaccaagaagtctataaacacttaaataaacttgagttacagacagcaaaaaataaaaactgcagaatatctagactataacaaaatatatatttaaggacctgtgggatgcagacgagccaatgctaagaggaacatatatagccttaaaacactgatcttattaataaattagaaagcatgaattgcccaactcaaaaagaaaagaaagacaaacctaagaaagacatacaatagcaataaatagatgaaaacagaaatggagttaacagcagaagaaaggaactcataaataactccatgttctttttttaatttttaaattattttatttttttagagacaggctcttgctctgtcaccctagctggagtgcaatggtgcaatcatagttccctgcaacctcaaactcctgggctcaagtgattcccctgcccctgcctcctgtgtagctaagactacaggtgtgcaccactacacccagctaattaaataaaaattctttgtagggatggggtcttgctgttttgcccaggctgatcttgatctcctggcctcaagcaatccccctgccttggcctcccaaaatgctggaattacaggcaagagccaccatccctggccccaactactcgttctttgaaaaatagtgagacatgttcctgctggggaatctaatgaagcaggagatataatacatagaaggtggaggtgactgcttggaaggattctctgcacttttgctctccagtttcacttctcaccatcccttagcccctcccaacaggcttttcttccaacttctctgcagaatttgcccttgtcaaggtcaccaaagacctccatgttaataaacccagtagtcaattctcagtccccctttcactcatcctcacagcagcattgactcaagtgatcactccacctgcttccaggacactgcactcccctctcctggtcctcctcctcctcccactgctcctgctccagccccttgttggtccgtccacatcttcctgacctcctcttcactctttctactcactcatggacctcatctcttcccaaggatttaaacagcatatgttgatttttttttttttgagatggagctggaatttcactctgtcacccaggctggagatacgctgatgacttttgagcctcaaactctcatctaaactccattctgatggccaacgtgtctactcgatgtcaccaaattgatatttaatagacacctcaaacttaatatatcccaaacgaaaatcccaaccttcctcccccatctagcttttcccacaatttttctgacctcaggaaatacaactccatcctgtcagttgctctcctcagaggcctggagtcatctttgacccctcttttcctctcacactccacatccaacccaggagcaaatcccattggcccttcctttggaatctcaacaagccttacacttcctgctgcctccaccactcctactgtggtccacactagcaggattcttgcagtgggtgtctgtgctggtcagccccttccatctgctctcaacacagcagccagagaagccctgtgaaaacctaagtccaattatgccacccctttcctcaaaaccctcagtggctcccagattcactaagagtagaagctaaagcccttcccaccccatcacctccctgtcctattcctcactcttttccttttcattctctccactccaacggtaatggtttgtttagtgtcaatttgactgggccacagggtgccctgatatttggtgggatatttttctgggtgtgttgtgaaggtgtttcatgatgagaggaacatgtgacctggcagatggaggaaaacagtgtcctcccctgtgcaggtggcctcatccaacctgctggagacctaaacagaaccaacaagtaagggggaattcacactctctgcctgcctttaagtggggacatcgttcttctcctccctttagactcagggtgggactgaaattcacaccattggctctcctggctctcaggcccttgactcatagtggaactcatgccatcagctctcctgggtctcaggtcctcgactcacactggaactcacaccatgggttctcctgggactcaggccctcgaccacactggaactcacaccatcagctctcttgggtctcaggccatcgactcacactggaactcacaccatcagctcttctgggtctcagaccctcaaatcaaacaggaactcacaccatcagctctcctgggtctcagaccttcaaatcaaactggaactctcaccattggctctcctgggtctcaggccctcgactgacactggaactcacatcatcggctcttttgggtccccagcttgctaactgcagacctttggattcctcaacctgcatagctgcaggagccaattacctacagtgtgtgtcttcatatgtgtctatatgcgattggttctgttcctctggagcacactgactaatacaccatctgtaccagcatgctcctgtctcttctcccagataaacccaaggctgaatccctgatctcctttaagtcacctttttagtgagcccttggccacatgtttaaaattatcctttacctcaaatgcattatcgctgtctaaaagtccatatatttcacataaacattttaaaaactgtctgcagtctccataaaagcaggctttttgctgcttttggcccatgactatatccccagggccaataacgatgcccagcacagggtcagcactcaattaagatgaactgaacaaacagaagaacaaaagcgactgcctgctcaactctacagaaaccaggaagcctccaagaaatggatcaatttccaagaaaagagaaattacccaaaggatccgggaagggagaatctaaacagaccagttgccaagaagaaagagagaaactgtcaaacagcaaatccaaactctaaaataagagaaatgcaaattaaagccataatgagagaggatttcagagcgcagacaaaagggagcatccgcattccttcacttgccaccctgacactgatcaaaagggctgagcacccaatgcatttgctggtttgggtttctgcttcactgctggtgggggggatgctggggtcatttctttggaaggcaatttgacacatgcctacggtacagatgcccacatcctctgacccagcagtctcacgtaacgattatcctacagacatgctcacaagggcaacataggtacaagcacattcatcacacaaaggtgggtcacagcagaagattaggatcagtgaagtctccatcagcaggatgccaggtcaaaaacaacagctcctgcacaatggagagccatgcagagaccaggcaggcttgggcagctgtcctcagccacctcccatgctctgctttcctttcctgggtgttagtcattgagattcatgatttgtggcattaatgccacttacacgctgagccctctgccctgaaccttagtcttgaattcccacccttcctcccctgggcaatttctgtactttccgctcaatttttctgtaaacctaaaactgctttaaaaaaaatctattcattacctagataacaaaattcgtaagacagtgagatgtcactttaaatccatcaaatcggccaaacttaggagatcagatgatttgaaaggtaagtgaacacccgcgaaggggactcaccaccatgctctgtggacgatccggcaacctctctctgtgtacttcccaaagaagcccgggagctggtcttcaggggcaacccgtcaccttcctagggaactgcattagcatgagctgcttctttttaagaaacgtttaaggccgggcacggtggctcacgcctataatcccagcattttgggaggccgaggcaggcggatcaccaggtcaggagttcaaaaccagcctgaccaacatgttgaaaccccatctctactaaaaacacaaaaataagctgggcatggtggcgtgcacctgtaatcccagctactcaggaggctgaggcagaagaactgcttgaacccaggaggcggaggttgcggtgagctgagatcgtgccattgcactccagcctgggcaataagaatgaaactccgtctctaaataaatacaaaacttagccaggcatggtgataggcacctgtagtcccagctacttgggaggctgaggcaggaaaatcactcgaatccagggggtggaggttgcagtgagctgagatcgcgccactgcactccagcctggatggcagagcgagactctgtctcaaaaacgaacacaaatcttttaagttcaggggtacacgtgcaggacgtgcaggtttgtgacacagctaaatgtgtgtcatgggggtttgttgtacagattatttcatcacccagacatgaaacctagtacccattagttattttttcctggtcctccccctcctcccaccttccgcccttcagtgggccccagtgtgtgtccttcccctctatgtatccatgtgttctcatcatttagctcccgcttataagtgagagcatgtggtattgggttttctgttcctgtgttagtttgctaagaataatggcttccagctccatgcatgtccctgcaaaggacatgatcttgttcttttttatggctgcatagtattccatggtgcctatacagtcttccatacagttctcagaagtgagggtgcaagagcgcctatggcagaatgcataggtcttgcacataaaacgttgggtcaaaggtgagaaatactatacatgacaagtgaaaacacttccatgttcccagcattgtgcataatttgggcatcacactcaattaagatgaaagagtggggtggacggagtaggcttggagggtgggagaatgggcaggtacagtaagggacccatcacagccactgatgttggagctagggaccaggaggtgtgaccagctcaacattctagacctaagggttggaaaccagaatgaagcctggctgactcgaccatgaggctgaaaagctgagaacatcacacaaggcaagtgaaaaagggaagcgcgtcctcacctgccctcctatgttcttaggtggaaacttacaacagggtggccacatggtagaaatggccagaagcaggccaggggcagtggctcacgcctgtaatcccagcactttgggaggctgaggtgggtggatcacgaggtcaggagttcgagaccagctcaaacatggtgaaaccccatctctactaaaaatacaaaaattagccagaggcaatggtgcacacctgtaatcccagctactcaggaggctgaggcaggaaaatcacttgaacccgggaggtgaaggttgcagttgagccaatattgcgccactgcactccagcctgggcaacagagcaagactctgtctcaaaaaaaaaaaaattattggaaaaaaaaaaagaaacagccagaggcccaagggagctgggaaagagcaggatgggggctgcttcctgggtggagccctcggttgcacaaatgggttctgagaagtgcttcctgcccctgggcttgtgcatggcatggctgtgtgtggggacaggcagatattctcacatgccaagggaagctgagaaggaagaggactttgggttgcattaatagaaatatatgtaccaaaatagagcagatgacccaaggttcttctgatctttgtggtggctggaccacaatgtcagaatttcagcttaggagggcttgcaaccaagtgtccaattttcctagaacttatctttaccttttttctttttccctgtgtgttcacctcttagctcttcaggaatgcaattgtaacatttacctcctctccaccaggcactccctgcactgcaagcgtatctaactatagttcgatttgcttagaaattctcaggacaaaatgttgaaccaaaccaggcaccctccgggattctcccccaccaggagattggctcgagacaacagcttacagcttagctctgtccaccatggcgccctccagactacccaattgagaagacacagaagcaagtcaggtggaccccgcacctcctcaccccctcccctgcatgcttttcacaccaagttcccttttaaagactccactttcctccccaaaagctgaagcaattcccttaagtcaggagcctgtatgttcccccttaaccaagctctgggataaagtccctttctttctaccagacctctctctgttcattggattctgcaagaggctggacatgggttcagttacggcctgacccaagagcccatctccaacctccatgctgcacaggaagggaagaatgtgacatggactcattctcagcccaggacctggtgactattcagtctctggccttggagaccctgtctgcaggcacggacggtgccattaggctggaaaaggttggaacagagggagcccaggggctgagggaagagggacaaagtcagaggaggcttggagaggaggtccaggtgatggtcgaggcctctgcttggtttcccccaggaatggtaagctcactcctttacaggccattcccttttaagctgctcagttccctggaaaacttttacaacgcagagccaaacccttgcctgtgggccacagtctggacttcctggcccatggtggcccttctgggataagggtggcagcagccatgcccctcctcactcctttttgctgctgcaggctgatatgttaaagaggttgtccattctggggtgggggcagcctcacccgactttggcagaggcctcccgatggctgcccctgtgtggcagtctttgcattccccagagcggtgtccctggagggcaaagcagctttggtcactccctggggatacacctccgtttgggaatgacaagcaccaaattcaggctggtggacccaggaggggaggtgtgccactggggcatgctgagggtcgctatggcattgacgcggctctatttctcatgccagtggtgaaaatgtggtgtttgcttcattactttttatacctcatatatatacatatatgtgtatacatatgtatgtgtatatatacacacatatatgtatatatatatacacacatatatacgtatatatactagattctcttgcagaaaatgaaatatttcaaaatcaatgactttttaaaaaaaacattctacttacagtttcttagagggtaaaattttgatgtcttagctgggcctcagggcctcttaccaacaggactcttaccgctttcagttttatggtctccactccaaaggagtctttccagaaagccccagtgtgttcttcacattactgggaacaccctcccctatctccacctagaaaactcctacacatccttcaagacctcactcactgggcgccccttcagcgcagcttgtctgactcccacaggcctttgtaacaccctgtaccacacagcaccgtagagtcccatggcagagatgtccacggcctcagtgtcagacaagcccgggttcaggtcccagctctgcccctcacaagctgtgtgaccctgggcaagtcattaacctctctgggccttaggcacccacctaataccactgtaggccatcctcaccgctgcccagcagggctatcactcctgtggacacagcccagcccatcagcccacagtagccccgggaacgcttccacattgcacagccttctggaaggaatctttggcaaatgtcaactcttgttctgctttcatggcaagcacgccttggtcacatgcggggctgtagcctgtgagtgcaggaagctgttcctgtgtggccatcgactcctgccacggagagcactcgcctgccctgatgcgggagtcacgtgtcctcctaggcactctgcaggtcgccttgcccctcattgccagtcccgtagaccccgaggcccaggcccaccagtgctcccctcactcagtgtcaactcttggcccctcgcactaggccttccaataagccaaaactgtggcgccttcgccaggcctgggctgggtgctgggggctcagaactgagtcaggtgcgggccctgccctcgagggctccaagctggtgggggagccacaccaggaccccaaaacaagagcagcagacccacgctgtgtcagtggtgagtgtctagcagtcttggggccctggccggggtggagattggggaaaaagtgatcgggagcagccacagagctgggccctggacaaggtttgttgggacgacaggtcactctgggcagatggaacagcctcagccaaggccattcagaggatcacaaggagcatggctgtcgcggcacaagatgctcccggcaggggtgagtatggagaggcagcagccacaaggccttcatctgccagaaggtgtctggacctgatcccgaggctgtggggagttgacatagaagatcattcctaattctcaaaccggcaagattagagctgcagggtcctgattatctcctctgcgccgggcactgtgccaagcacttcccatgcgtgtgtagcctcagttctctcagcagcctcaggggtggggaccactagtccctgcaacttgctgatgaggcaactgaagctcagagagacaatgtcactagcccaaaactgcctatctagctagcagtggagcttggcctgtgctgctgaccacagggccacacagccagcccctctcgtccagggcagtggcctgggcaggctggggagcagcaggctgccctgctggccctagtgagagaggagctgagcctggaatcggaagcagggcccacggggtgaggagggtctgcagctggcaggcctggtgggctggtacctgcaacctaagtgggaaggtaacagagcacctggcaatttgaataacaatgaaagcttccagaatgcagaccctctgtgacaataacccttcctgcagacaaaagcagaggagtcatgaggcacaacacgcctcattccaggtgaactggagacaatgtgttccccagcagcggcagcggcttctgatagttggcgctgactgtatgcacgtggggtatggggctgggagccttcacgtattttttttttttttttgagatggagtctctgtcgcccaggcaatggcacgatcttggctcactgcaatctctgccacccgagttcaagcgattctcctgcctcagcctcccaagtagtagggattacaggcacccaacaccatgcccagctagtttttttatttttagtagagacagtttcaccctgttggtcaggctggtctcaaactcctgacctcaggtgatccacccgcctcggcctctcaaagtgctgggattacagacatgagccactgtgcccggccaccttcataaatttttctaagggattctcacagggacctgaaaggaggagatgctattaatcctacttgtaaatgtgtccctgcaaacagtacagggacatcaaggaacctattcggggcaagatggccatcccaaggaacgctacctcaatacggagaaagagactctgctgacacgatagagttgagggttttgggagagggagatgaggctggattaactggctaggcctgctgccatcacagggtcctaagtgagaaaggcaggaggctcagagtcagcggaggggatgtggccacgggagcagaggtcggagagatgtccttgcatctggaaggggccaaaagccaaggaatgtgggtgcctctgggaactggagcaggcaaggaaatggactcacccccgcagcctccagcagggccccgtgctgctgataacttgacatgaggtgttcatgagtctcctttccaactgctgtcctccggatctgtacaagactaaatctatgttgttttaagctactgcatttgtgatagtttattacagcagctacgggacactcacataatacccaagagagatgtgtgcattcatttcaccaggagacctggatgcgaaggttcacagcagctttactgatgacggttagaaggtggaaacaacagaagtttcctcaaaaggtgatggagaaacatggcgtggtatgtccacacaatgcaatgggcacagatccaggctgatgactatcactgggcacagatccaggctggggccaagatgggaaccttcatcttttgcttcctggccagagtgctctgccccagcacctgccttgtcaaagccctggtggacccatgggatggcccagttcttgcaccttcactgggaggaaagcagagacaatgactccattttacagttgggtaaagagaggctcagggccatgctgcccagggaggagctgaagagagacccgaggcctgctggggaccagatcttctcaatggtggttccttttggcatcctctctccaagcccagtgcagagcctggcacgtgggagagctttatgggagtttgctgaataaatgacagagagcaggtgtggtgtgagctctggtggctggactcaccttcccatcccctgcagacctgtcctcctgacagggtccaatgtgcacgggtttgggacacagttgggagtgtcctgacggatgtagtcactctcaggggatgtcagtccacggacacagatgcagcaaggtccctggagccctgccggcctccctgcacaccctctgcactctgaggaatgctctctgccgggatggggcacctcgggcatggcatgggaggcctctaatgtggcccaagatgtttaaccagagtcctacaggccccagcctgaattgggcccagcaattcacaagctgtgtgaccttggaccaggtccccaacacatacaccagagccccagcaattcacaagccgtgtgaccttggacgacgtccccaacacacacaccagagcccccaacacacaaacacacacacaccagagcccccaaaacacacacaccagaccccagcacacacacaccaactgttgacttttcccttctgccctcagttcccccatctgtaaaatgtggctgctcacagccccctactctgattctacattgaggcctgtggtatgcagccctaagacagcctccaaagaatccacctgcagctactcacaccctcctttggtacccaaaggagaacaaaggatggggacagagccaagtggctcgcttgtaacaaatggatagaatagaagtgacaggcatgggatgtcccttccaaggttaggctccaaaaaagtgggttccactgggctttgcaccttgaactctctctcccagagccctctttttgggtggtcagctgtcatgccatgagctaccctgcggagaggcccacccagtgagcaactgacaacgccaaccaacacgtgaacctactaccagccacctgagtgagctgggaagtgtatcctccccagcagtgccttgagaatgaccatagtctcagccaatgctttgactgcagcctcctgagagaccccaagccaggagacccagcaaagccacaccctgacttacacctttctgactcacagaaagagttaaacgcttgttttaagctgctgacttgtggggtaccttgttacacagcaccagctagctaatacaaggcctcagggcagtgctagagattctgggagagggaggatcttggagattgtgcatctggacatccctctactctaccctcagggaacgagcctctgaccttggcctgcacaccccagtgatggggagctccctgcttactgaggccagcaaatctgctgtggagccaggctgcctgggaaggtcttccctctgcctcctgcttcctcttcctactggtgccagcatggctctgggggttccctagcaccagccccatccttcagggatgtgtgggttccgccagagtgagctggcgtctggatcaggcttctctgcatcacactttcatccccttttctgcttttttctgcttcaggggagagttgttgggaggcaactgagggctctggcccagccttgccattcagtgtgcacctggcagagaggaccccaggatgcaccaatcttcactcagccttagctcgaagtcaccatctccacccgcctcagtttactcatctgctacatggagatttctgtgaggacatgagacactgcatgtaacaacacttggcacacagaaaacactcaagaaatgtatgtctattgagtcgggagaaaacattcacagcggggccgcggacatgcttgagggaatttttactttgtctttagcaaaatatcttgctgggccatctagatggatgcagatggggaggggacgaggcagtgggggtgtgtgtgtgtttcttgggggggctctgtgtctgttgaggggctctggtgtgtgtgttgcgggctctggtgtgtgtcttgggggctctggtgtgtgtgttggctctggtgtgtgtgttggagggctctggggtgtgtgttgggggctctggtgtgtgtgtgttgggggctctggtgtgtgtgtgttgggggctctggtgtgtgttggggactctggtgtgtgtgtgttgggggctctggtgtgtgtgtgtgttgggggctctggtgtgtgtgttggaggctctggtgtgtgtgttggaggctctggtgtgtgtgttgggggctctggtgtgtgtgtgttgggggctctggtgtgtgtgtgttggaggctctggtgtgtatgtgttgggaggctctggtgtgtgtgttgggggctctggtgtgtgtgttgggggctctggtgtgtgtgtgttgggaggctctggtgtgtgtgttgggggctctggtgtgtgtgttgggggctctggtgtctgtgtgttgggggctctggtctgtgtgtgttgggggctctagagtgtgtgtgttggaggctctggtgtgtgtgtggggggctgtggtatgtgtgttggaggctctgatgtgtcaggggggctctgtgcgtattggggactctgttgtgtgtgtgttggagggctttggtatgtgtgttgggccctgtgtgtattgcgggctctggtgtatatgttggggtctctgtgttggggggctctggtgtgtgtgttggggggctctggtgtatatgttgggggctctgttgggggctctggtgtgtgtgttggggggctctggtgtatatgttgggggctctgtgttggggactggtgtgtgttgggggctctgtgtattggggctctggtgtgttggggggctctggtgtatatgttggggactctggaggctctggggtgtgtgtgtgtgtgtgttggaggctccactgtgtgttggctctggtgtgtatgtgttgggggctgtgtgtgtctgtgttgggggctctggtgtgtatgttttgggctctgtgtgtgttgggggctgtggtgtgtgtgtgtgtgtaggaaactgttgtgtcaggaagctctggtgtgtgtgttgggggctctgtattggggctctggtgtgtgtgttagggggctctggtgtgtgtgttgggggctctgtgtgtattgggggctctggtgtgtatgttgggggctcgtgtgtgtgttggaagctctggtgtatgtgttgggggctctggtgtgtgtgttgggggctctggtgtgtgttttgggaggctctggtgtgtgtgtgtgtgttgggggctctggtgtgtaggtgttggagggtctgctgtgtaggagtgttgggggctctcctgtgtgtgtgtgtgttggaggcctctggtgtgtatgtgttggaggctctggtgtgtgtgtgttgggggcactggtgtgtgtgttgggggctctggtgtgtgtgttgggggctctggtgtgtgtgtgtgttggaggctctggtgtgtgtgtgttggaggctctggtgtgtatgtgttgaaggctctggtgtgtgtgtgttggaggctcttgtgtgtgttcgaggctctggtgtgtctgtgtgttggaggctctggtgtgtgtgttggggggctctggtgtatgtgttgggggctctggtgtgtgtattgggggctgtgtgttgggggctgtgtgtgtgttggggcaccaaggcacattgtaggtgctctgggagagcctctccctggctgtttgactttggacacgtgctttggcctctctgagcctgagtttccagcaaaatggcaagaaaaacgccgctggcgagatggcggcacgggggaaatggccgtgctctgcaaactccctcgcgccccagtcagctcccctggtctccaggaaataccaaaataaagatcctgcttgaggacaatgagaattattttgtgctttatagggcgccgcataatctaaataatgacacacggaaactttgtttccttcaggaagaagctggcgggcaacccagctatagtaaaaggcaagcggtggggtggagatgacaaagctatttggtgccagctatgcccagcggcttctggcagacaggacagtgcctgctgtgttgctggagcccacggattgtacctgggatggggacgtgggcatgggaagcaagggacatcgcaggagcgacaggcggagggcaggacacgcagcccacatccgaggccagatcccatgcccctcggctgccctgatcctctcgcggcttccagaccccattcgccctggggttcctcctgccacgggtgggggctgctcctccccaggcccattgcagtggtctctcggggcatctcaaactcaagacactccatgctgctgagcccaaagccacatctgccccaaggtccccatcttggaaaatctcccaggctgctcagcccaggggcccagacatcctccttggacccccacctccttctcagcccccaccccaggccctggccaatcccatggactccactccctggtgccggcccctccccaccaccaccctcggccaagccgcagacatggctgcagctcgtgagacagtggcagcctctccggtggactcccagctcccttcccaaaggcaagtgcctcctgtcactctcctcgagggcacccttgtccctggactaagaagcccacatctcaccatggccctgcacagtcagacctacttgcatctgccacccgtcccctcctgcacttcctcccccacactcatgccacctgactgcccttcagatggatggatgtgcggctgtctctgcctcagtgcctctgcacatgctatttccagtgcctggaccacttacttcccacttcctcccctggtctcttccaactccgacaggctcattcctttccatcctacagatcccagctgccccgagaggcagggccaggccatggaaagctgtggatgcccagctgagggcctgtccttatcctgcgggccttctgggagtctctgaggggctgggagcctctgcagagacagggccggaggctgccctggcgttgggagtggggtcaacagggagctgtgtcagttttagaggcttccattattcacacctcacttgtagcctgccttcctgtcgctttaccctcctgacgttcagacacttctcggggaacttagggactttatacatccccatggtaaaggttaatttttaatactgctttggtaaatatttgatgccactgctttaacgggaggatgcattagacattaaataccacaaagtgctctgagatgctgtccttttcatcggcagcctctgtccgtaactcctgcctcccactctgcgaaaataaagactctttctcctttgcctcctgctatgaatttttcaaagcgtttttcaaatccattcttacccctgatcagcatctccattagccagatagaaagtcaaagaggttttaagctgagagatggcttagaagcctcagtcccttccctcatcttacacaaggggaaagtgaggccgaggagggacgtggcctgcccgaggttaaacagtgagtctgtgggtgtaggagtggaatgaggtgccgggactcccagcccaggactctgctctagcactggcaccccccccccagaagactcagaccagtcctgccctcacccagtccagtggaaacaggccacggggctctctgactgtgctggaagtgggcagcaggcagaggggtcttttagaggatggggagaggcctccggaaggagcatgacctcagtgaggttttgaggaatgagtaggagctcgccaaggggccagagtggggaaacctgtgaggtgaatgggtgtaggtaagcacctcagggcagggatggggactgatccactctgtatccccagtcctggcctggggcccagacttagcccatgctttttaatccttatgaaatgaatgtgtcctttacctccaaggctgtgtgcactgtggccctgatcatcggctcctggtcccacaggccctggtgcccttgcatctccgtgcttccttcagcccgggctctgacctgaccagcttccatgcattctgcattcctggcccgcccctgatgctggggctgcttccccaacgtcctttctactgcccaggacagtaaacatccacaatacacacacgtacaccatgccacacagacacccacaatacacataaacacacacaccatgccacacagatccacacaatatcacacacacacaccacatagaccctcacaatatacacacacacaccacagacacccacaatacacatacacacacaccccatgccacacaccatgctgcatacccacaacatacacatagacacacgtcacacaccatgctgcagacccacaatatacacacacaccatgcaacacagacacactacacacactacaccatgccagatacaccatgcacacacacacaccatgccacagactcacacaatatacacacactatgccagacaacacacacacacacatcacatagacccacacaatatacatatacacaccatgccagacaacacacacaccccatgccacacagacatcacacaatgcacacaccatgccacacagactcctgctcacctgtgacctgtcctagcccctcaggacccacctctgccctctccacctctcccctggtgctggcgtcccatggtggtaacaatgcacgaccctgtgcccagccccgcccctccagcactgtccttcctggtcagcagcaacaccacgtgtctcttggttcagaccctcgagttgtcctcgtcctcagtgtgcccctccaacatccaattcctctgtggctcctgcctgcactacctccaaaatactgccttgtgtccccccactgcctggggcacagtgatggcctccccccgggcctccctgcctccattcctgctggttggctgctgtgagctgtgtggtagtggcctctcaccaaaacccccacctgaccaagtccccgtgcttcgctggctccatgtttcccttaaacgaacggaaccactctcccatctcgacaaccctgcagactggagtcccgaagctccctccctcttggatgctgtcaacggtgagatgtcccagggattgaatcatggctttggggaggacgtcagcggcactccagtaagcgtacacactgatcgggggacacatctgggcttgaggccctgaagggtgacaaggacatgtcccttagaaacaagtgacaacagtattggtcagagtccaggcagggacacagcagccatggcttcatggaatagggcatttatgataaggacttgagtttccacacttgtaggaggagctgggcagtgaaggtccagaagggaccgtggaggctcagagaagggacgctccgcagtgctgggcagggagagagcggggccagctcgcatggaggctgaagccaggcccatcctgcctccaagagatcacagggagggtcacagggtctgccagcctagggtaggtggtcgggaaggagagccagacacagatggaaaacccaaggacactgggagccctgggacacccctgcagctgtgcttctctggctctgcccagtgagaccaccagcaccagtgacagccgcttccgcctcccacgtctcagacagctcaagccagctcaccgggaagcagatcctgggatacaacgagcccagagcaaccaggctggcaacagaaccacctagcacagtatctcctccttcttgtctggctagacaagctgtgagtaagccctgagcaacctcaaatgaggggtaagtgaaggaggcacgcttggcagggacctctttccacacacagagtggacagagacaagaaaagaggatagactttgggggttcttcctatgagcggagtacggagctaggccctccccacatcccctctgatttcatccccttgccaggtggagctcatttgctctctgtgcctacatccacatggcagcccagagaggtgatgcaacttgcccaaggacacacagctgggcagcacggagtccggtccaagcccagcccaggcggccccagagcccattgttcctgcctgcccccagctgcagcacccagcgattcctgaagccgtaggtcccagcacacagggtgtgacagactcaatcccagagctcacggctgaaggggtcaggtgacaagtccccctctcccccagcacctctgggaccccttagaagctacaggaagtccgatctggacggtgcttaggaggagcagggagcgagcatcctccagcccacgggcaagcctcggtttccatcattgtcacgggagccgaaatgcccgtgttgggagacgtctgcagttccaacaagcatctattcttggaagcaggtattttagcagttaagaccaggggtgaaatagtgggtgaaataaagtagaatccatagtcctccctgacccaggacaaaggaaataaattccttatccacttgccccaccctgcagtgcctgatctgggagctgggcccattaagggtcactgaactaaattggtttttgggaacattactgccaccggcccaaccacactcctctctgtaggatctcgcgtcttccacattactcttgctgcagctcagagggtgattaagtggaattcctgtcaaatcaacataaaggagcagcctctgagctggaggcgtattcacgagcccccagattcacctgggcctttgtggaagcgtctttttgttaattactcacgcaagctggcatctttgtttgcacagtagttgctgcgttaaggcattttaattaagattccaaactaaagattccaaactggctgggtggagccacgcgggtctcttccggggcaggattataggagccacctcccaggagggggcttgtaagatgcccgctgcaggcagcacgtccccagaaacaggtgtgccatgttgcctgttaggagcttgggctcctaatgggagctgtttcctttctcctgacagctgcaccctgggcccagagacacaaaatctccatctaaactccaaatagctgtgttaggtctagttcattctagaagtgcctcttcaaaatgacttttccaaaaccttccctaaggaatattcaccctttggctgaagacattgatttttccaagcaaagccagggcagggtcagaatggattttctacacatcactggacagagttccttaagggcaggggcctggccttttttgtctttctgttcccagaacttaacacgcggcatggcctacggccagccttcaataaatgcttgctgaataaatgagtaaattaatcttgtctgggctgcatccatacaatgaacacggattgttccagagaaagaaaagcaggacagggctggaagctttgcaaagaggatgcctaagacgtttccttggggggactaaagacccagatgtgtggcacggaggtcagatcagtctttcggcctcctcatctgctttctttgcctggggaagggccaggagctgcaaagggctgatgaattggcctcccaggaccaccttgcctcttgtcctggctatcatcgccctgggtgcctgtctgtgggtgtccctggaaacattaggttgctgttttcctgtgcacataagaaacacattggctgtaatcccagaactctgggaggccaaggcaggcggattgcctgggcttaggagttcaggaccagcctgggcaacgtggcaaaactctgtctctactaaaaatacagaaagttagctgggtgtggtgacacaggtctgtagtcccagctactcaggaggctaattcaagagaattgcttgaaccccggaggtggaggttgcagtgagctgagatcgcaccacggcactccagcctgggcaacagaacaagactgtctccaaaaagaaaaaaaagaaaagaaaaaagaaacacattggcttcccacagtagtgttcacagaccactggagcaagtgagattatgtgaggagataaatacactagcatttgaacacttatgcacaggggcaagctggtcaacatttaacaacctgttctccagagggagaaaactctgatttgtagcacgtgctgtcaatttcccgagcgtaaatactggtgctgtcactgaatcaaagacaggaagagatacaagtagtcaccacttaataaatttccaccatacagacacaacagatgcaaataaccttgccagcacagatgataggtaaatgtagcaaaagaactaagaagtgatacattttgagtatgtattacctctgttcaatacaatgtatttaattgcatgtttatataatttgcaatagtggctgtgtttaacaacaggctcccaaaattcctacagcttgaactctcttgagtcagtgtgatgcagccccatctcatactggatatgtttacttgttttaatgcaaattaggaaaaatacaactcttaaatcagcgatgatattgcttagagcaaatctgagttttctacaaatttgacttgatttcaagtcagttaaaaatgtattaagtaaacagaatgagggatgtacacagacaagaacaccaaggaactgaaacgtgggggataaatgttgcttcatgaaaatggcttcaaacctcaactgtcctgggggtggagtaaaataaatgggcaactcacgagaggaaatacagttaacaaatgaaagtggtttatctcaaaaaccatcaaagaaatgcaaacaggctggacgcggtgcctcacgcctgtagttctagcactttgggaggccgaggcaggtggattgcttgaggtcaggagttcggagaccagcctggctgacacagtgaacctcccccaccacccaccctgtctccactaaaaatacaaaaattagccaggcgtggtggtgggcgcctgtaatgccagctactcgggaagccaagaaaggagaatcacttgaacctgggaggcagagagaggctgtagtgagccaagatcacaccactgcactccagcctgggcgacagaatgagactccatctcaagaaatgcaaactgtatagaaatgggggcaccccatactggagagggtgccccgaatccagtgccctcaaaagctgcctcactccaccagccctttgggaatgaggctggtgctgaaatcgagacccataaaactgtcacccccttggactcaggaatctccctgcctggcatctatccagaggaaatcattccagaaaaggaaaggccacaaactcacaaaggtgtctgctgttttctggagtatgtctcctcctcctgcccccaggagagctgggattggtgttgtcatcgtattactaaaaagattacatgcagtataaatgccccgctgtagggaaatgactgcatgaatcccacacatggaatccggacaactcggtggccgctgaaatggtatttagaaaggtcaggtaaaatcgcagggtcatcgctgattcaataggagaataaaatcaaggcacatcattagagacgcgcaaaagcaggtgtgcattagaagggagaaaaacgcaaagcagtcgtagctgcgtgtgagtgggatccgtagcggcttttcttttcctattttttactcttcaaataatggtcgcaacaatcatcacagttagcatttcctgaggcatctgccacaggccgggctctgttccagtccttacaatcatctcacaacctaaaggctacttgtgtccattgtactgatgggaacactgagactcaggagagctactggcttacctgcagttgcccactggcccgtagacaggatctgaactcagctctgattcgaagactacgcagctcacccctctgcgggtttgctagagtagagtacagctaggaggtgttcgacgtaaactcatgaaaactaagcgtgggtgttgtgtttttaccttctgttccgccgggccctcctcttgtggggagtggtttgcagagggaggtggggagccaccaggtggaagagatgagtacacctgccgcctctggaaagattcaaggctgcgaaagaccttcacaaatggtgcaggggaaaagacaaaccccgagagcaaaaccaaccatgcaccccaacaaagactggcaccctcacctcgtttaaacccctgcctggtagcccacgaaggggccaatggcagatcagaagccaggctgagtttcaggaggctcctggacccagaccaggacttgtttcactgacacctgcgggccagatctcaggtgctttcggggacccccgaggttctgccctggggatgggtgagacctgccttgcacagagaacccacaaccacagggcagctatgcacccagcatagagtggcatcatctcaggtttagctctcacagggagagaagtaaaggcagagaagttgctcttcccagtagaaggatgtcggctttggagttcaccagaccttagttccaattccagctcagctgctgtgcgtttcccaggaatctctctccgagcctcctcggtgtctccttcataaaatgaggctcgggatggccaagctgcagtgcagctggggaggctaaatggcacaatttgttacagctgcttagctcagtgagccctcaacaaatgggagctactgttactaacggtactaatgcagttcattgatcggacactgtctaggtgccttctgtgcacaaggcactgggcaggaagattcattcatgcaacatggatgtactgagcacctactatgtgtcaggcactgttctatatgctggggtcacagctgagcacaagaaacaccaatcccaactctcttggggtttccatccagcagaggagacaggcacaaagccacaaagcaaacgttatgtcaggcggcgacgcacgtgacaaggcagctgaaggaggacaaagggagagtgacgggagtaggtggctgcttctattttgtaaaccttggtcagagaaggcccctttgatcgggtgaccctgagcaggggctgtggaagggaggcatgagccctgctggtatcccggaggggagaggtctggttggaggaacagcagcggggctggtgcggctgcagccaagtgccagtgtcgggagatgaggacagagggacagtggggtggggtggggtcagatcatgttgttggccaaggaaagcattttgattcctaagtgcaaaggagaccatcggcacgtcttgacttaatgtttttaaaagatcgccctgccactgtcggggacacaggctggcatcagggagacatgcggaggcggctgcctccatcctggccaaagacgacggacaaggagggctggtctcagtggaggggtgggtgcggatggattctggcttcattttcaaggtattgctgatggaacacgtgaaacaggaaagaaagagaggagccaatgagatggtaggaggcagcggggacgtggatgtgccagtctcccacgtctatggggtatccaagagctgctcttgaggactcaggctctgcaatgaacagctagtctggattcaagggagagagaccaggggagaaagactgggaggtggacaggattggagctgtgggtctgggtgggggtccccagggagtgggtggagatgagagagaagttaaagggaagagccctggtctctaagatcagggagatgaggatggagccgcaaagaggagcaagaagggcggccgtgaggggccaggagcctgtggggcagaggacccagggctccccagttcccctcagcccctccctcctccgaggctctgcctatgctgccctctctgccgggatgacctttccccactttggtgaactcctagctactcatccactgaaactctttgtgttggctcctcctcccctggctgaccagtgcttagtccagtggaccgtgaatcctgggacagcagagcactgtcttcaacagagccgtgaacagcggggaaggctcacggacgtgacgccggagagcatccttcaaaacctaccaaatgcttcttgccacaactgagtaattctgaagtcctatccgtggcctaaatggccccttatgttctgcccctgccaacctcttcatttcctacacttcttctgctaatgcactctgcctaacgctgcctttcttgctgttctccaaatacacccagcgtgttttcaactcatgccctttttacatttcactccctccacctgagtgaaccatgaaactatgtgagtaaagagcatattcaggtctctgcttaaattgcctctcgttagagagatctccctggatcgcttcattttctccccgacatttaacactacttgaaattttattgttattacaaaagcattttattttctttgtctccccaggcagaccgtaagctctgttcaccaatgtatcaccagtggctagtacagtccctggtatatgatacaaactcaaaccctatgtgctaaataaatggtagcaggaattagcataaaataaaactgaaaatggctaatgctacacaaatggctaatgctacacattataactaaaacatgaagtttgctttagatgtaagaactgacttgagaacctcttccttttgatttcaaagaacacaaaaaaatttgacccaggaaaaattagacctggtagaaacaacaccaagtaacattgtagaagcctaaaaccacacagaataaaatctgtaactaataatgatggaagaagcaaatcttgacaataatcaagatttgtaataactaatctatgtgaatgagacctggtagatataactatagagagaaaaaaaccactagcaggagctgaaatccacagactttaagataaacaaaaacaacccaaaatttctttgtgaaagttaataatcttaataaattaaaaatcaaaatagaagtacttagaatttacttctacttcatataaaattaatttaaaaattaagcttatttaagcaatacttagaagtaatttacttctacttcatatgaaattaatttaaaattaagcttatttaatagtgtccactggaaaatactttcccaataaaagttattcaatattataataattctgattcaaatctggattcccaaacatgccagctaacattctggagaggaaaacacccatcagaacaaaatggcatattcaaaattagagtcaaaaaatattcacttcaattaatacagagcatgagaaaactagctttttggctgctagatcacattgttgacaactgctatttccaagttttgtcttttttcccccaatccctgccatgtagccatggctcctgtacagttgagtatttaatcaaacacagaactgaaaaaatcatccctttcagatcttacatggttggttgttgaatacttctgtaatcctaaaacttgtttgtctttctcagcggccttctaatactctctcatgctttgctgcattctgaaggtgacaaaggtctttatgaccatgtcatctcaaactgtgaaataaactggtcacaactgtgacacttttggcaggtggtttcacacccccacaccttcctttttcctaaccatcttccagtttagaatgaatgtgtgccacggtgtgttctggccatagagacatagtcagaaatctgctagatggggcctttggggaagacactgctaacctgacagaaaaggacaatcagctgacatatctccttgcctttttcctccttagtccttttcccttgttcctatctggatggcagatgagatatgatggcagatggaggcatgatgagaaaaacaacacggtaaaagcaacactctaagaatcttccattttaagaaatggagaaaagtagggttgctgatggcatcacagagttgtcggctgccaacctccagactctatgctacatgaaaacataaatctctatttctcttagctactgttagttagattttcattgcttacatccataagcagtcttaacggataaactatcagctaatcttcatgcatagctactacatttttgtggtctctacccaaacttttcaaggctctgttgatgaacccaattatcaagtctgaggcagcactagataaattatcaattagaaaagcacattttaagtcatgcaaaataaaacaatgctaatacaacttttctacttcacctttgttcaatacacattttaaggagtgagtcagaagagaagcagaatcattccactggtttgttatattgaactcatccctggcattatagatctaataagtaagtctttagtgtatatctccacccacatcttaacctgtaggcttcgaacagttgtaagaaaatgcttagcaacataaataatgagactgtaaaaatgtgaacagaaaggagagatgatatcagtgatatctgtaagcgctatggcagtgagggtggatagaattcagcttgtgtgatagattaaagaaaacaggatgagaaggctagttttcaataggaagaaaagacatcgctgggttcaacgtgtgacattggatgagtcagtgtgatatccacaaagaaatgtcaggtttaaaggtcaaaagagacctttctgagccacatttgcctcagttcactcctgctgtgttttgtttttcattgcactagtttccagatagcattactgtagacacacacaaatataagaatacatacgcacatatactttgatgagccttctatttctcattccacatgtccccagctcttatttaaaccttaattaaaatcccttctaaaaatcttattcactaacaaagatgcaggaaagtatatgtttttatgtacacgtacataaagtttttattgcatctaagtaactgtctcttatgcgatattgacaagacataaatgctttcaatattaaatccatgtaaatatcctgcaaaaatatattaaaactagaaatgagattttcagtattctttttgtagcgattggcagattttaatattcaagaaaaattaatttcatcatacacattaaaaatataggaaatttcatgcagacatgaagcttccaattcagcttttatggcaacttttagaatgacagttacatataaatacagtatattttacagttaacaaacttcataattttatattgagattcatacagcttctccttatattgtacacattccccaccttgctcactgattagcgtaccctgtatctgcactgcttcagaatacggaaattaaagaaaaaaacccacaagaacaatggactatctcctcccatttcacaaagtatatgaaaatgtttgtgtatacagctaatttaagaaaaacattttaaactttaaggcttacatactttagtagctaggactaaaattaatacaaaattaaagaaatcctccagggatacttctattactgactgataaccacattttcaagtttagaatgtattaactgcaaaagctgtaagaaaaaaagtgaggcaaatttgtatagaacatttaaaaaacaatattcatgatatgagggataaattaacaaatgaagtaaccgatttcagaattaactaaaacatgtgctacaatttagaaatgtaacattattaaagaaaacctgatagaaaaagattaattaataaagccaacccaccagtgtcaacgtgtttttgcctgtgagaaaaacaaagatcatttcttttgatacaagttgtaaaaaagtgaatgttagtcagtgaataaaaagcacatctaagccattcagaaaacatcatgcattcctttctgttcaattgatttcttaaaaatacgtagtttgcaagtttttttctttaaaaacaataatttgagtcttttcttccttgccactaaattcaagcattcatgtaaataagaattcccaccaaatgaacatctgctaagtaatgagggacatgaaaaagagaaatcttaaaaaaataaaaacaaacacaaaaacaggttacagacttcccagttttgacatgtcaaattaactgcatcaaactctctattgcataatgagagtaaagggcacaaaagtcccatcactgtacacagaaaaggtccccccaactagtaagatgccaaatagggtagtgagtccccagcctaagtgacaacaaaggtctaaagatttacaagtaagttttcctgttaaaacatgacatttatgcgaccagcatgttactgagattaaatccgtctaatttaaattgccacagaggttatttaaagcaatcacaatcatctgtgaaaatattcaacaagagttcttccttttctccaagaaaaggctaaaacattagtcatctctactttccaagctactggaaacagaataacatacattaaaaaatacaaaggaaaactccctccaatacagatctgctagaggtagaaatttaaagcaggatatactgtttaagctccatctatcagggaacaaaattggtattaatctgaaattacatgatggctgcggcttacaatactgaagacacagaccataggcagcaatttatccctgaatttcataatcaatattgccaacattaataccattatgacagtttttcctagtacataattgttttaatgaaaaaagtgcttgctttcataatccagataatctaaagaaaagatattattgtcgctaccaatgactttcttcacagaattggaaaaaactactttaagttcatatgtaaccaaaaaagagcccacatcgccaagtcaatcctaagccaaaagaacaaagctggaggcatcacgctacctgacttcaaactatactacaaggctacagtaaccaaaacagcatggtactggtaccaaaacgagatatagaccaatggaacagaacagagccctcagaaataacgccacatatctgcaactatctgatctttgacaaacctgagaaaaacaagcaatggggaaaggattccttatttaataaatggtgctgggaaaactggctagccatatgtagaaagctgaaactggatcccttccttacaccttatacaaaaatcaattcaagatggattaaagacttaaacgttagacctaaaaccataaaaaccctagaagaaaacctaggcattaccattcaggacataggcatgggcaaggacttcatgtctaaaacaccaaaagcaatggcaacaaaagacaaaattgacaaatgggatctaattaaactaaagagcttctgcacagcaaaagaaactaccatcagagtgaacaggcaacctacaaaatgggagaaaattttcgcaacctactcatctgacaaagggctaatatccagaatctataatgaactcaaccacatttacaagaaaaaaacaaacaaccccatcaaaaagtgggcgaaggatatgaacagacacttctcaaaagaagacgtttatgcagccaaaagacacatgaaaaaatgctcatcatcactggccatcagataaatgcaaatcaaaatcacaatgagataccatctcacaccagtcagaatggcgatcattaaaaagtcaggaaacaacaggtgctggagaggatgtggagaaataggaacactttcacactgttggtgggactgtaaactagttcaaccattgtggaagtcagtgtggagattcctcacggatctagaactagaaataccatttgacccagccatcccattactgggtatatacccaaaggattataaatcatgctgctataaagacacatgcacacgtatgtttattgtggcactattaacaatagcaaagacttggaaccaacccaaatgtccaacaatgatagactggattaagaaaatgtgacacatatacaccatggaatactatgcagccataaaaaatgatgagttcatgtcctttgtagggacatggatgaagccggaaaccatcattctcagcaaactatcgcaaggacagaaaaccaaacaccacatgttctcactcatagatgggaactgaacaatgagaacacatggacacaggaaggggaacatcacacactggggactgttgtggggtggggggaggggggagggatagtattagaagatatacctaatgctaaatgacgagttaatgcgtgcagcacaccaacatggtacatgtatacacatgtaacaaacctgcatgttgtgcacatgtaccctaaaacttaaagtataataataataaaattaaaaaaagaaaatgaactcataactataaaattacccacaaaaaaaaaatcaatgcctattaaaaaacggttcaatttaaagaacagaattccagttctcagctccaacactgatcagcttcgacaaatctgttcccctctctggaccttgttttttggatacttcacatggggataataacagcattgacggctgggttgtggtgagaattaaggaagagagtctgcatagtaaatcctccataaacatgggcttctgtgacttagggtgagctcctggaggacagggaggtgtcccgttttttccaggacacctccagggccccaccccaggacttcgctctgtgccagacacgcagtagaaacacagattgctgaaggaactgagtctccatttctgtggctactggccaaagacccagagagccaaggcaggcttccagaatgccctccccacccaggccaactctcctgtgtgtatccatctcatttcctgggtaggtgagggcagagcagcagcccaggcctggccttctgtgctgagtctggtgggggccagcagcagctgctcctccaggggagtgcctcccagtggaggccaggaaggaggggagagctgggggtggtggtgttaccagaaaagggtcccgatccagaccccagagagagctcttggatttctcaaaagaaagaactcaatatgaaaccaaattttatttttacgttagtacatctttaatgttaaagctactttttaataataaaattttatgaatctatccagttttaattaatgactataaggtaagattttcgtaactatttataactctttataacattttttcttgttaaagaactgatcaatgttccaaaaaaccctattattttgacatatgggcccagattctggctctgtttcagtgccttctgttttaatatttaatttatggaagaactaaataatacccttttcattttggtcaacacgctcagacacacaattctttacaaagttaagtttcataaatgtcccataacttgcttaaattttattttctttcagctaaaaataatacttaaaatttctaagtttagacaaaactctttgttgttgttgtttttttaagacagagtcttgctctgtcgccaggctggactgcagtggtgcgattcggctcactgcaacctctgcctcccaggttcaagtgatttccctgcctcagcctcccgagtagctgggattacaggcgtgtgttaccagcctggctaattttttgtgtttttagtagagacagggtttcaccattttagccaggatagtctcgatctcctgacctcatgatccacccaccttggcctcccaaggtgctgggattacaggcgtgagccactgcgcccggccttcccacgccttttttaaaaaatcaaaaacaggtaatatttctttttagtataagcagttttaattacgtaccaggtgcagagtctaggatacaagacagaactgcagataaagtcaactctttctagcatagctaggaggcatggctaactccacctgtcccagggccttacatagaaatctaacagctccaaaccacataatctgaacaattttctaaagtcaaagaagtggtctatgacattaaagcacttagcaaatttaacctctgacttaatttacaccaaatgtctaaattttgaagacattttcattttaccaataacttttaaaagcctttattccccaaagattactgaaatcacatgaactaaaaggcattagagcttctatttttcttaagaagtatttgagagctttcattctctttaaagccagttaattagaactcctttatacaaacatcacacatacagcacttctagacaagattgagcagttctaagtttttctttcccatattatggctttctgacttgtcctatatttctctctttttctaaatagtcattctactttaggacaagaatttgtaatacaaaatcctccctcccataaaatctctttccttcataaccttctttaccataaatacaccttcttatccgcaactttctttagctctctttccccaactaatttctgatgcccgccctcaacaaaaaggtcagctaaagcaaggcaaaacaaagcagagccttccccaggttttgagagggacctgtctgcttacacttcttgggggtccatgaggaaaacagaggctcctcctaaaatggggtctctggcaccttctgtttttcccaaggactcccaggctgccagaaattaccttagctcctctcatgtggccatcaagagtgacagcaagacaaagactaccgaaataattcagtcaactgagaagaaaaacttaatactgcccccattgtaaagatggatacgcggaagtgccacgcagtttaaaaattcatgtacacatacagttaggctccaaagctcactcaaccatcctgtaaaagtctgctaacactacgcccagtcactgatgcacttggtatggtagctcatggcccccttagagcttagaacctgggtttcatgtcctcatctacagctatataatttaacaattttcctctgaatttgttggcttctacccctatatatctcaaattgtattaatattactcaatcttaaaggagactgtgatgcctttagtctgtagaaacattaatctgtaaacaaatgactacatgaggttaacggtattcaaattttttctatatgctttaaaacactaaggctatgtattgagaaacacacctaagaaactgcaaccgatctactctggacaaaaatttagacacgtcttcaaaataagctatatagtggtacttaggcatatttttacacatatcaacagtattttacatattcatgaccttaaaaataattttaaaagtgtaaaaattatagaccttatatatttgttggcttgaaaaaaatgatacaatatatattgtttccttaaagcagtcaatacaatgcataaatttctagagaaatcagtaaaaaaaaaaaaagttcataacaaaggtagtaacattaggaataaaagagggctcaacactgcaggttcttaaaggcaaaagttagtgaagcattgtttttggttgtgaatcttgccctaaaaacattataattccacatgatcctccccttccttttcctgttgcaacgatgtgatgaaccaaatttgcttatgcagatgacaatactctcagaaaatggtggcagagaaataaaatgaagggaatatggttctcttaatgatctcatacactggaacttattacctccatgcctcttgcctatctccagactaatatgggagagagagaaaatggctgtttgcaaccaatattttatttgacgcttcattttttgattccccaaataactacttacaacgaattaacaggatatgaaagcacagctactcaagaatctaaataattatccaactgattttttcctcatctctaaaacaataacggaccgatcatttttaaaatacaacacactgggccggcgaggtggctcacgcctgtaatccaagcactctgagaggctgagatgggaagatcacaaggtcaggagttcaataccagcctggccaacatggcgaaaccccatctctactaaaaatacaaaaattagccgggcacagcagtattcgcttgtaatcccagctactcaagaggctgaggcaggagaattgcttgaacctgggagacagaggttgcaatgagcagagatcaccactgcactccagcctgggcaacagagcaagattccgtcggggcgggggtggggggcgtggggggagggtgggggcggtggggggagggcggggggggggtgggcgggtggaatacaatgacaagtcgtctatttttaactcagttttggactgttgtttgttaaggccattgcttgtgataaagaaaacaaagggaggaggaggagaaacaagaaaggacacaagaaatagaagcagcagcataagaaaatgaacaggaacaagaaaatgatgataagcagaagaaaaaccaggctggaaaaaaagaaaaagaacaggtaagagaatcaaggagacctattatacattttgtccccttcctgattcatgaaatttaaaaaagtccaagaaaatgtggcacatatgcaccatggaatactacacagccataaaaaatgatgagttcatggcctttgtaaggacatggatgaagctggaaaccatcattctcagcaaactatcacaaggacaaaaaaccaaacatcgttatgttctcactcataggtgggaattgaacaatgagaacacttgtacacaggaagggggacatcacataccagggcctgttgtgggatggggggaggggggagggatagcattaggagatatacctaatgcaaatgacgagttaatgggtgcagcacaccaacatggcacatggatacatatgtaacaaacatgcacgttgtgctcatgtaccccagaaattaaaaaaaaaaaaagtccaagactaccctgacaaaaaaccaagcaaaatgatacacaaatagttaccccccaaacttctgttaataacataatggtgccactcacacctgactcaggtgccagcaggaggagggcgccctccagattctgcaggagatgcggggaagactcctccttcccctggctgcacctccaccgctgtcacagaggcccacagcttcctacccaccccaggccaggcagggctgccccccaacgctccgacctgccttcccggcccccaaacttgctgctgctgctgccacaactagcaccgatgctaatacaactactactgctgtcaccctcaacgcacaggcccaccctacaaggctcctaacacctgaccactgcactgcctgtgccctggcggcagccagccgccatcctaccgctctggtgctcttcagttttcattgccgccctcctaccactccagcgctgagtctttagtctccatggccgccaccaaccacagcgaggcgagcggtggtgccacaagctccagcctccagcaggcggctcctcctcctggcatgaaacaactgggcaggcaaagccaagaaagcctagaacaggatgcagagagtggtagcgttagagcctcaccttggcatgctggccactggatggcagaggccggtttcagcgaaggcactcacgcccaccctccaaagtccagcctctccttttggcccaagttggccaggaactagggcctggagtggggactggagacaccacagtgcccgggcttcctactctactagaaccgctgggcccaccctggctgcgttcctcgggaagcaggagcagcaaaaactgaaccccagccagccctcccaaccctagtgctggttcccgttcctgacgcctccacccacggggccctatcaccccgtagtgtcagctactgcgtgcccgggggtcccaggcagtttccgcaacacatagagggcgcgggcctgggaaccacggctggtctaggtgacggattgtgctcaggatccccgcggaaacgctgtgcatccgccgcgctccagcaggaggagatggccctctagagtctggagtccggggagacgaggaccgctcctctgaccacccgtcactgacaccaccagcaccaggggggcagcgcagcccccaacagcacccctaacccgccgccggcagtgtagcccccagatagcgcctccaacacctcacccccaaccaccggcagtgtagcatccaatggcgaccccaacctgcccttgcttcggacactgcagcacccaatggcgcccagaacccgccccctgccgcgggcagtgcagcccgggatagcgcccccaatccgctccctgccgtacacagtgtagccacgaatagtgcccccaaccagacccctgctgggggcagtaatgccctgatatggcacccaaaccgccccccaactgcgggaagtgcaaccccggatagtgccccaacctgctccccactgggagcagcaacccagggagacgccccaactcactccctgcctccggcagtacagccacagatagcgcacccaacccaccccctgcgcgggcaaggtagcccccgatagcgcacccaacccgccccgccggaaccaatgtggccccaggtagcacacccaccagctccctggcacgcagtacagacctctgatagcacccaacccgccccctcccaaaacgggcagtggatacgtccctcaatagcgcccccaaccagcctcccaccccctctacacgggcagtctggcccccagtagcactcccaataaatcctgctatctctgtctcagtgtaggccccagaaagcgccctcaacacccccctccctgctgccaacagtgtagcaccctgtaatgagcctaacccgtcccccaccacagcactgcagccccagatagtgctgccaacctgctccctgctgtgggcagtgcagctatggataatgcccccagccagcttctagacgcaggcaatgatgccctggatataacacgtcccgcccaccgcaggcagagtagcacccgatagcgcccccaacccgtgcctgacaagggcaatgcaacacccgatagttcttccaactcgcccgccggccacggccactgcatccccagatagtgcccccagaactccccactgccgctagcagtacagcttgggatagtgctccaacccacccccagccacgggcagcgcacacccgatagcacccccaacccactcccctctgtgggcagtgaggccccagataccacatccaaccagcctcctaacacgggcagtaacgccctggatagggcctccaacccaccccaccacgccacgccacaggcagtacggcctgggatggcgaacttttcccaccaccattttaccattctggctgcgctctagtctccctggcccgcaccaacggcagcagcgaggtgagccacggcaggctccagcctccactgtgctaatgaagttgctcctcctccttttcctctaagcttccagactccagtgtgctcaggaagtgactcgttttctttttcctctaagccagtactaaccagctacacaagctgacgcaggagagcttggaatgacaaaactccccccacttggcatcatttatatatgagaatttatgcaaatgaagttcctgggctacatgttctgattggatgaggaaaacctctaggcctactctgattggactttgttatcatgttctgattggttgtcctaagacttgctctcatccaatcagaacatgcaaataaagcccaatcagagtagatctagaggtttttcttctcatccaatcagaatatgtagtccaagaacctcatttgcataacctcggtaaggggaagtctcagttccaggctcttctaggctatgttctctgtctccacaccttcctctcagacagcagctggagccccagaacctgggagcctcacagagaaagtcctgatgtgggacctggttttccacccgagacccaggatccaataaagaagtgtttccataaatgatgcatcctccaaagaaggccagtgactttctgtgccaagtacctgacagaattgccatttcctagagctgccaggcagccctaggtgcacaggtcacctgtgcatgtgtcagagaccaaatcccatcaatattgaggccttggttaagacaggtacttgcttttagtcgtgaaaagatgcctggctttggcaggagaatcgcttgaacctgggaggcagaggttgcagtgagccaagattgtgccactacactccagcctggtgacacagcgagactttgtctcaaaaaaaaaaaaaaaaaaagaaagaaaagaaaagatggctggcttcaacactgagaaaaccaactctccttgagcaaatgctttgcatattctcatagaaataagggaacacctattaccctccttgcactgcttcctgcacagctgggatactacctttcacaagcatcctgagccacctgctggccttttgtgtgtgtttccttcctggcttcctcccatttttttttccatctctgaacctgctgtaaggtgaagaattgaggcgggccccaaatgtaagacctcatgaatttgacgatgcaacagtgtcctggacagcctggctctcagggctggggagctgggcagagagaaaagagggcattccaggggccagggagctccaggcccagagtaggatttcaaggctaaagaaacagaggctgtgggtgggtagagggtcttgactagggtagggacagagggtgcgtcttaaggctcagctagggacagcttcatccaggaagtagtcagcaattgggggccaagctgcaaggaggaagaggtggggagagagaatggagagagaggtgttcagtgatcaaatgcctggcctggcctgtttcctcaggagacacccctgggagtctgggagcctctcccccgggctgctatccaacagggtgcaagtaatccccccttacacacactaagaacccagggtgagtgtcaaattatatgttagctaagaaatgaagagagggagcaggatttctggttgacggtgaggatatttattaagggtttactggtacaaggagaggggctggatgatttggggtgggaggggatctctgttctgggatcctgcagctccaggcccccatgggtggggtgagggtcagggacctaagaacattcttcaggggccactgtcttctccacagtgctctcttgtgtgtgaccttacagctgtagctgctgcaggacctccactggtcgggtgtcaggctcaggtcgcttctggctgtgtgcttgttgctctgtttggaggtcttggtgacttccgtaccctgggtgacaggggtgctgtttgccttccaggccaccgtcacagctcccgggtagaagccactcatgagacacagcagtgtggccttttggcttggagctcctcagaggaggacgggaacagagtgaccaagggggtggccttgggctggcctgtgggtgggcgagcggcaggaggtcagcatcctgttgtgtacctgggagccccctgacctcagtgtatgaagaggggtcaggccccctcagtgccagtgtaggacccctcagacatggtccacagtgtctcagaagggtgtgacatgaggttcctaaaacaactctctgtcattcagggaacctccgagcctgtcccctgcccaccagtggtggcagttaatttggtattcatttccaaggctggagaaggatgtaattttttttcttttcttttcttttggtgagacagggtcttactgtgttgtccaggttggagtgacctggcgtggtctctgctcactgctaatttttgtattgtttgtagagatgaggtcttcctgtgttgtccagactcgtctcaaattcctgggctcaagggatcttcctgccttggcctcgcaaagtgctgggattacagatgtgagctactgcatccagcccccttttttttttttgagatggtgtctcactctgttgcccaggccggagtgcaatggcacaatcttggctcagtgcaacttctgcctcccaggttcaagcgattctcctgccaaagcctcccaagtatctgggattacaggcgtgtgccaccacgcctggctaattcttttgtattttcagtagagatggggtttcacccatcaggctggtctcgaacttttgatgacctcagatgatccacccaccttggcctcccgaagtgctgggattacaggcatgagccatcgtgcccagcctctcagctcctaattcttatgttcatcaatcagtctcttgctggggttcccctaggaggtggtgaaatgaccccagctcgctgttcctcacatgggtgctgccacgtcactggctcaggctcagctgctgggtcaccaggagaatggacccttcctccacctcagctcagagcacagtgatgattcgtgactttcccaatagaacttcaaatctctgaggacggggggtggggggatgtgcttgagtgtttgtactcatggtcttgttctcggagtgacaaagctggaacacaatacctctatgcatgaaaaggttgtcacttgtcacaactaacaggctttcacctcaaggaaattttcttcccttgtgtacttttcccctggcagtggacatggctgcactcttccaagaagcaagcagctgtcccgtctgctcagactatctggaaaaaccaatgtccctggagtgtggatgcaccgtctgcctcaagtgcatcaattcgctgcagaaggagccccatggggaggatctgctttgctgttgctgttccatggtctctcagaggaacaaaatcaggcccaatcggcagctagagaggctggtttcccacatcaaggaactggagcccaagctgaagaagattctacagatgaacccaaggatgcggaagttccaaggtaaggaatctgtataccctgcccccttcccaagaccagaccaggaaaaatcatctgtgcagttggcccctcattccacatggggattagctgctgtctggcacctaaaattgagatgcttcatcatcacattctcagccctgacaacacatagaatcacctggtgatgtcaaaaacaaaaacaaacaaaaacccgatgtctatgtcatgggttagacaagggattctctaaacttagtgtgctcagattacctggggatcttgttaaaatgcagatgctgaactgggaagtctcaggattgatcccgctggcttggggactttgctgagtagcaaaaacatagagcaactgaatttgaatttctctctagcaaaggttcccatgaatctgacattaagatgggcctggtatttctaatgcacagtgaatattggcacccattgtaccaaacaacctcaccccagggttgagaagagttgggaatggagcacctatggtgtttgtttctgtgagtggggagagttgcagatattggtctcctcatccatgcgccatgggctccaacagtggtcctggctacagaaaatactatcactctccataactctggggaaaagggacatttaaatgaaaaggttatggtcagcctgggcaaagaattacacctataaatggtggtgggcccctataatgtccctgacactggtagcttctgccctgacacccatgatctctactcatccatctacccatacctgactgtctctctgctgaactatggaggacagagattcaccctgtccaagtcatgtttggaaccctcttcctccttccttgtccatgtccattccctaattcaccattaaatagcaatcaatccctagtcttgactagggtagtcttactgtgatctataaaatctatattagtgatcatatcagttttttgacttgaaggataatatattttgtagatttttttttttcagaatgttctggacaattaattttctctaggccagatcacactgcctcctccatgagaattggcggcttcacctgtcagtcacatacccaatgccttaaattattgacctttgtattttctgcccttattctctacaatcagtcagttatgacagacaactttcaaatacctttctcttggctccaaaatttaccattgttttgcttaaggtctcaccttccatgtaggatagaaaacattctttcatctaaaaggtccccctcctccacctggccttagagcctcctaatgtccaggaccagcatctctgtcatcacattgtcagctgcagagataccctatctgctgtcagaactgtgcacaattaatttgtttacaaacatggaaaacaaaagcctggaatcatgctctatatactgaattggagcaataaaatgtggaagcagaaacatatttaatattgaccacttgcattgtcttaattatcatttatttgttcacacatcaaggtggtagaaaggggggcatggtgtctgccttcagagaccctccactctaaatgaagaaaagttcagtgaagcaaacacgtgacgtaaagtaaaataagaattgctactgtgaataagagtcacgtattgccacaaagcatacctatgaaaatttgaaatagggaagtttcctcatgaaaagttttgattttggaggaagaaacagaattaaagaaactaaagtcaggagatatttgggcctttgaagtagaagagaggcatggggttggcttctgtccacttgctgagcaacttgttttccttttcacagtggatatgaccttggatgccgacacagccaacaacttcctcctcatttctgacgacctcaggagcgtccgaagtgggctcatcacacagaatcggcaagaccttgccgagagatttgacgtgtccgtttgcatcctgggctcccctcgctttacctgtggccgccactactgggaggtggacgtgggaacaagcacagaatgggacctgggagtctgcagagaatctgttcactgcaaagggaagatccagctgaccacagagcttggattctggactgtgagtttgagggatggaagccgcctctctgccagcacggtgccgctgactttcctcttagtagaccgcaagttacagcgagtggggatttttctggatatgggcatgcagaacgtttccttttttgatgctgaaagtggttcccatgtctatacattcaggagcgtctctgctgaggagccactgcgcccatttttggctccttcaattccacctaatggtgatcaaggtgtcttgagcatctgtcctttgatgaactcaggcactactgatgctccagtccgtcctggggaggccaaataagccgccactgcaaaaaaaaacagggtcagaaaattacttgggtgggtagacttaggaattttctacttggtaaaagcattatacagtcataggagaaagatatgggacatttctataatctatattctaatttgattcgattattgagtcgtaagtattaattattgccaccatccaactcattgagtcttatggttcacatcttgtttcctatagaaatgttctgtattctcggatcaatttccaaatgctttactttttcatttctgtaagttcaaatcaatgtttaaattatagaagttatgaggtaaataaacatttggatatcacctaatgcatcatgtgattttctaaatgataggagtgcaatagattttattcatagtaaaaacatgagtgtgtgtgtatgtgtgtgcgtgtgtgggtgtgtgtgtatttgaacggagagctggataaatgcctatgtcctatccagaactgaaaagttatcgccatcattgctcagtgtgggtaacattttcctggatgtgtgttcctgcattaatgaaaattccccccaattagttattgcaattattaattgtaattgcaataaaattaataaattcattttattaatttattaaattaataaattaattaataattaaatctttatgcagagattaataaatatgcaggctaacaaagcaaaaaaagataacacacattactaatatcagaaataaaagaggggccatatctaccaaactgttggtcattaaaaggataatcaaggactattatgaatgactctattcccacagtttgataactaggtgaaatgtatcaattccttgagagacataatcttctcaaggtcacactaggaacacagacaatctgaacaagcctctgcctattaagtgaattaacattaagaacattccaaaaaagacaacaccagaaccaaatgatttctcttacgaaatccaccaaattcttacgaatcccaacatattttcacaatataatccgaaaattgcgctcttaggtacgtactcagttgagatgaaaagttacgtccacacaaagcctgcacaggaatgtttacagcagctttatctataaccacccaaactagaagcgagcaagatgtttaagaggtgaatgaaaaaacaaccatctataaaacacaatattattctgtgatttaaaggagttctccatcaaagcatagaaaagacaatggcatgtatcagaaagactgtgggggcatgcattcatgtggatgagaccacacaggcagcagagcagggtgactttaagtatattgatgagtgaagtaagttcagctgaaaaagctacataatattgggctggtgcaaaagtaattgtggtttttgccagttgaagaatggaaaaaccgcaattactttgcaccaatctaatatatgactccaactgtatgacattctggaaaaggcaaaacaaaggggatggtaaaaataccaatagttggcaaggtttctggagaaagaggacagagattcataagtaaagaagagggaatttttggagcggtgagagtattccttacgagatcgaaatggtaaacataacagtaaatatttcaaaattcatagaaatgtgtaacaggaaaaagaacactatgagaatgacagactttaggtactaatgtatcaatatttgcccattacttttagcaaatataacacagtaatgtaagatatgaatattaggtggaattataaggtagggtgagagaatagaatgatgtgggaactttgtgtattacatgctagatttttatgtcaatctaaaactcccttggttaaacattcagttttaaaattatagctccactgtttcagggagatcacaataatgttcaacaattgagtaacgtctagagattagtttgaaagattgtcttactattaaatgtgaatcaaaattgacttttaaatgtatatttaattttgtgatttcagcaatacctcttgattaggcaaataaaaattttggcacatttaaacatatggcttaacctcctctatagcttcttctaacatatgggacactgaatacaatccacaattgttattcttaaatcaacttaataaatttccacggtaccttcatgtgagtgcacccggtggtttgcccagagtccaggttgtgtcatgtgcctcttggtgtagaggctatatcttcttaaaatttctatcagagaagagcctggttaatctttttgcaatgcagagaactaatgacatgttactgacagaagaccagagggagaattgtgataattggttctaacttctgatcccattgtttactggcttccaagcagagccatctgaatcaaagttaggtctcaggaagatcgtggagttcagtgagcactttatacatggattagaaagactgcgtgggcgatggcttcacataggtgagacgatacagaaaggcagagggctggtgtagtgagggacctgcaccccaatcccactagagccacgtagacctgggaaggtcatgtaatccctcggccctcagatctctgcgctgtcatgttaaacttttcatagggcctacttattaatctcacagtatggggctagaaaaatcactaaatgcaggagaatattaagaaagagaatcagaacttcagtagtgatgtgtaagggtttactaaatgccagaaggaataagccggagacttagtagtggctgaacacagagaggctgcttgggtggctccaggccagtggagggtggttccctgttcatcttttacgtgggtgtgatgccttacaacttctggaggacatctcctattatctccgggactccccacatcagcccggcagggtgggcacaggaggggctgagtatcacttagagatggtgagagatttgcagaatcccattctaatgagtgaaggatctgggggttggaataaatttggttccctagagacagagattcctgaacaactgagacctctatatcgtgccctggaccactgatcaaagggaccctttcactctctttctccaatacttttattcccaaggtgtgtggaaagacagagttcgtgctcgggaagagtcgcctgagatgaagacaggtccctaattataaagcattcttttcctctgcctttcaaatcttccaccccaagtatgacacagtttcctttaaaggatgtcacctgtgggaccttgggaagcacaaatgcgtggccttcctcccccactcccttcaccctgtcagctgcctctcagtaactgtttcctccagtgatcacagtgagcgaccagtgtctgcctgtctccaagactgctcaggccttagaacaatgcaaaacatctatcacaagatgcttctgcaagtaacaacttctctcccacttatcaaacctgaataagtagctaatgcgaattaactgaaaaagaggccatctgggctggtgctttggtggtttaatgaatttagtctgccacccccactttctccttgactgctgatctgagccacctggaaaaaggtgtggctaagaatgggcagcaggtgcaccagcagggagtgtacaccttatcagctcattctttccccatcaaagatcactttctattttacaaactccacatccatttcttgaccttgccgtggcaggggacagtcctatctcctgtcagaaagacccctccggccaggcgcagtggctcatgcctgtaattccagcactttgggaggccgaggtgggcggatcatgaggtcaggagaccgagaccatcctggctaacatggtgaaaccccgtctcttctaaaaatacaaaaatttagccgggcatggtggcgggcgcctgtagtcccagctactcgggaggctgaggcaggagaatggcgtgaacccagggggtggagcttgcagtgagccgagatcgcgccactgcactccagtctgggagacagagcaagactctgtctcaaaaaaaaaaaaaaacaaaaaaccctccatagccacagcctggaaacctctgccccaggactctgccccaggactctcattcaaggttcactctgatccccctttccctctgactccagatgtcccttccattaacccaatggctctgcctcttctcccaatccttcaccagtgaaaatgccactgattctctctcgtgagccctctgaaagtcttctcataaaataccactcttcatcctatttttttaagtccacctctagatcactaacatttgttttcagattttgggttccacattcagaggaatgtttctgtccttccactttccagtcaagtctattattgcaggagtggaatcaagattctcctaaaatgataaagcactatggctgtgtttgctgtgtattctctggaagtgtgtgcccaggattgccagtctttattatttggtagaaataaaagtaagtcacatggtcctgatatttacattttgagttttaaaaatttttatattgttttcatcaaaactcactttagatattaatatgttcatcttggtattttcttctaaatgctataaacctgtgtttcccattatttgtttctcttagtgagctatatccttctgtgaacccctgcttgctctcagagggatcctaaatacagaaatggagatttgcattactgtttggaaagatctcattttccgttctcagagcctcctatgtgccttagagaccaccgtgtccctgctttaaccctatgtaatagaaacaaataagatctttattctcagaaaattcaacagtcttcagaggaacccacattcttacacaactctgtcatccaggtctcaggcaaagccctcataacttggcaaaatttaaggtatcacaactttacaagcttctatttgttattataaagatgtgcccacttttagtagagattttagcaacagttgcctagttaataaaacatagaaagttctagaagaaagcacataaagaacatactatgtaaaatttgacctaaaaatgaccaatctcacagggacacacagagctgaacaacacacacggggctatcggatgggggacggtgggaggagggaggatcaggaaaaataactaatgggcgctaggcttaaaacccaggtgacaagataatctgcacaagaaatccccatgacacaagttgacctatgtaacaaacctgcacatgcacccctgaacttaacagttaaaaaaactggtgggacaaaatgagataccatttcacaccagtcagaacggctattactaaaaagtcaaaaaacagcagatactggcaaagttgcagagaaaagggagcacttatatactcttagagactgtgtaaattagttcaaccattgtggaaagtagtgtggtgattcctcaaagagctaaaaacagaaatgtcattcaacccagccatcccattactggttatatgcccaaagaaatataaatcattgtaccctaaagacatccacacatatgttcacagcagcgctattcataatagcaaagacccaaatgcccatcaatgacatactggataaagaaaatgtggtacatatacaccatggaatactatgcagccataaaagagaatgagatgatgtcctttgcaggaacatggatggagctgggcgacagagtgagcctccatctcaaaaaaaaaaaaaaaaaaaattgtgccgggcgcggtggctcatgcttgtaatcccagcactttgggaagccaaggcaggtggatcatgaggtcaggagatcgagaccatcctggctaacacggtgaaaccccatctctactaaaaatacaaaaaattagccgggcatggtggtgggcgcctgtagtcccagctacttgggaagctgaggcagaagaatggtgtgaacccaggaggcggagcttgcagtgagccgagatcgtgccactgcactccagcttgggcaacagagcaagactccgtctcaaaaaataaataaataaaaaataaaataaaagttaaaaaataaatgacccgtcttattgactaacctcaccacggtcttatggattcaattaacctgttcaattcttttttgtgtttactccatcaacttcctgtgtaactgcactccacaaggcacataaccacactccacaaggcacataaaaccactgaagagaggaggcaaatgaggtcttttatcctccccttcaattgtcttacaaagctcatgcctgagtttagagcataagtcatcagtttagtcataagtcttataacttcccaaatgaatgctttaactgcagctacagtacatatcatgtgttgagtagcacttctcatgtgcttttaagcaactctttcaatattgagagacaagattcaatactagggaaatattctatggtattacatcattaattttatgttacagagaccatatattgaaaatgtataaataatgaagtccagtcttactttcaatactgtgtgtaagttcattgagtgtgcagaccccttaagcttgcactcacctgtgtgttagacacacattcacaaacacatcacacagacctacacatagacaccttctgccttggtgcacacaaatccaccccacctaaagtgaatatgcctgtttccagggattgcacataggtgacaagagtttgtcacctgaaaaaccagttttagttcaccccaaattctcgttctttccaggtgtcttggatcatggagatggtctagatgaaagtcagcaattaagttccacatttcttatacatacactttttttttttacacctggtgaatgattccagaatacataccatttactgtgttccttggggtcacctgcaattagaagaaagaaaacactctgaggatgagatcatactgtgggctgtttgcacaggtctttcgttctcttaggggctcttggtaaccaagatgggaaagaatgtttaagtctaaagccccaacatctagagtagagttcatctgtagaaagcacaatagcttttgttgaaaagtatctttgttggccgtgctcagtggctcacgcctgtaatcccagcactttggcaagccgagggaggtagatcacgaggtcaggagatcgagaccatcctggctaacatggtgaaaccctgtctctattaaaaatacaaaaaaaaaaaaaaattagccagatgtggtggcgggcacctgtagtcccagctactcaggaggctgagacaggagaatggcgtgaacccgggaggcggagcttgcagtgagccgagatcgtaccactgcactccagcctgggctacgcagcaagactccgtctcaaaaaaaaaaaaaaatctttgtcaagaccattttgaagtagcagttacaaaatacttaatctaaagtggaaagcttgttgcagaggaaagtgtcccctaacatgctgtgtgtgacccagccctgccaattccagatgtcctcttcaatcaggtgtcagtgggtggggtgcacccctccatccccaaggaaacatcatctaacacctataacgcacctgatcatttttctctatctgatatcaattgaaaaatgaaataaccaagaaaattacacacatgttaggcaaagacaggctactttaccttggtaacagagaaggggtcctcacttgcccactctttggaatccaccttccattgatcttctgggggaactgaaaggacacaacatgactgtcagttcattggtggtgacatgaacaaagggctagaacttatggatgtggttggttaacaagcatgaattgagcttctcctgggccatcctcttctatggaccaaggaaggcagagagacgggcagaaaggaaatgagaaatagagcctttgtctttccaggtaatagcagatgaaagcgacacgaaatactcaaacttcaaatgagcaactactaaaatgcatgctagaattcaaccacagagtcctgtcactccctcagcccattttaaagtccagcagaactgccactgactccttgatattgaccaactccctttcaacctccacagacccccatctgctgctgtaacatttaacatctggggtataggattcagcccctgtttatgtgtaaatttttattgaggaactaaattcaatatcaggtaccagggctaattatatttactcaattctttgttataaatcaattattaaaaactggaaaatactgaaatacatgttaaaatatccactgtaaatcaaagatcttccttttagtcttcccttcctatcccttgtgtttgcaatcattgcatgagggggcctagtttcagccaggtctagttcacctagccatatgaggtctagtttcagcccaagctacccacagtgaaggaaggcagagtgaggagatgaccccatgtgagcaccgaggctctttaacccagctgtacaggagagttgccacaagggtgacacctgaggctaattgtgaagtggtatcctgtgttctgtgattcttgtgccttagccacctgagtagctggaattacaggtgtgcaccaccacgcccagctaattttgcatttttagtagagatggggtttctccatgttggtcaggctggtcttgaactcctgacctcaggtgatctgcctgcctcggcctcccaaagtgctgggattacaggcatgagccaccgcgcccagctgccttatttattcttaacacatgtaagtgcctctaactttcgattgtttccaagtcatggaacgaacaacctccttagaaagaactctgaaggataggtcaggagaactaagtcacacaatccatcagaaacagtattaacagtttttcaaagttacactttatatgcaaacttgtacaattatcatcttattatttttaaatgtatctttacatatatgtatgtgacctacgtgtttcctggtgtgagtaaatctgtatgttcttggttaatagtgtttaccgattcatttcacttctctatctttgtatgttgaaatatgaactactctctggatgagaaaaaatgattacacttgattatatttacctttggaaaggtaagtggtttgggtgattgactataattgttatctctatcattttggataaaccccaatcataaaaataagtgtgttttgtttcacacactgacacatagacaatacacattcttacttcttttcaaaaagttaatatgtgaatataaatgacatattccaaatttactaaactgaatacacatttcatgaaaaaggagagaggaaagacatactaaaaacaggccagggcctggtgtggtggctcacgcctgtaacaccaccactttgggaggccgaggcaggtggatcacctgaggtcaggagttcaagaccagcctggccaacatggtaaaaccttgtctctacaaaaatacaaaaattagccgggcatgatggtgggtgcctgaaatcccagctattcgggaggctgaggcgagagaatcatttgaacccgggaggcggaggttgtagtgagccgagatcgcaccgttgcactccagcctgggcgacagagtgagactccatctcaaaaacaaacaaacaaacaaaaaaacaacaacaaaagacaaagatggacacacttcgttgtgttaaaagcctcaaagacatctgcatcattctagctttgctcctaatttttaaaattaatgattttaataggttcttaattaggtaaaaactgcattaaaacatactttgccatatttttcccagaaggatacctaattgggtggtttgaggggtgccagatgtaacaggaaataagacatgtcttttaaataaaggaaaagctcaaaggcatcctgcttgatactagaatcaaatatataaattgaggaataaaacataaccgggaaacacatttataactgcatatgaaaaatacagaggagaattttttaataaaatatatttttaaatattaactagtacatttgagaggacagcattcaacaggccaatgtgaacatacctttaatgcaggaactcaggttccccataagaaagaccagaatctgtgaaaatgacagcaagcatgttcaacctgctatgaactttgaaaaactcagcacagacagtggcagttaggaccgagggcaagatatacccaatcacataaccatggtgataggagcatcatcaacgtctcagggtaaagtcacaatgtgtattgtgaggtccgctttctgctgcaccaacaagagtgctttcacacgcacaggagggtcattaaagattaggccttttacggcagggagtggtggctcacacctgtaatcccagcactttgggaggccgaggtgggtggatcacgaggtcaggagatagagaccatcctggctaacatggtgaaaccccgtctgtactaaaaacacaaaaaattagccgggcgtggtggcgggagcccccagctactcgggaggctgacgcaggagaatggcgtgaacccgggaggcggagcttgcagtgagccgacatagcgccactgcactccagcctgggcgacagagcgagactccgtaaaaaaataaaataaaataaaataaaataaaagattaggcgttttacttaaaaaaaaaacaacaaaacccaagctcattaattactattctgtgcttattaaaataagttttaggaggagaaattgtgtaccccaaaatacactcaatggcaagaatttcaaactgagcaggggcaaaaccgatatgttagtaacaaccagaagttccattctcgattcgaaattccattgccaaatatttctaccattcctgagtcatctaatatttctagaaccaataagcaaactgttcagaattaaagacagcataaatggatattgttataaaagtcatgtttcttaaaaagtgacattttttaaagtcacattttaaaagtcatatttccctaaaaagtcatatttctaccattcctgagtgatctaatgtttctagaagcaataaactgttcagaattagaaaaaagtgttacttgatattataaaaatcatatttctctcacaatataattatgaaacttatttttccacttatctctatatattactatgcacttatttatctcccaaactttgtgaattcacagaggaatttgtctaccattgtgtatgtaaacggctggccattcactgagtatttaaaggaaaaaaaaatcactatattttcaccagtgcatcttctcggtggggtgaacactttgggtgaatacatataattttttatttgagacagggtctcactctgtcactcaggctggagtgcagtggcttgatcatggctcactgcagccttgacctcccaggctcaggtgatcctcccaactcagcctcccatgtagctgggactacaggttcttgccgccatgctcagctaatattttgtagagatggggtttttccatggtgcccaggctggtcttcaactcttggattcaagcaatccacccacctcgacctcccaaagtattgggattagaggcgtgaaccaccatgcccagcctaatacatataattaaagtgtttctgaatgcagaattttagataactttcaaaatgtataactacgtgtgtattctggctgatacataacacccaattgcaaatacttttatgatatgcccaagaaaacaagctgttgaaagtgacctgccctaaaataaatagaacaaatgaaaattttagggttaagatgagagagttgctatgtttcaaagagaataggtacccttcatgatataaatattacagtacaaatgtctatcattgctaagtacaaatttctagaacaaataaataggtcacaaatgatgtatacaatctgcattaatatagatgatgctatattttgtccagtgattataaaacagagggtgtaatggggtaggtgctgaaagaataggtcattctgtgttgttataaacagaaaatttcaatggcttccagattgaacaaatatatgtatatacacaaattatacacacacacacacgatactatagttatatgtgtatgtgtttgtatactcagaaatgcagcaaactaaaaaaaaactttaacaatccccacagattcatgcttctgaatgctcaaatggaggagaaaatttaaaaagaagtggaaaatatagtgagaaaatctactcatcctattggaggagctgatatctattttaagtttagagaggcaggcttaaataagtaaatgtttaggatttgaaatttaattgtacaagtatttttttcgttgaatttcctcccaactttgtaaaatcatcagatcaaaaacacatcatttgattagggtgcagttttatagtacctaacaatcaagattttggaaaaaaaaaaaaaagttgatgatggtgaattttgataaattctaacattgtcctagttgaaagaggtaaatatgtttttatatgtgctaagaattgtctaatttaagagtacaatgatgttgttatgactgttgataaatttcaatcgtttttgaaattataactaaaagaatgtttttatttggctattattccagttgatttcaacaatgctaagtgaaatacatgtatcagaacaaaatcatgatgatgtcacaaatgttaactatctaatagctactgtaggtcagacttttttttaatttgagtctaatttgtttcttccatcttaaaactctctaacatgaattaaagggctaaaaagatgtactgattagacatttttgattaaaggtttggtaaactaaacagtactttcatctagcattaggaatattgaaagcaagaaaatggattatttagtaactatgtaaaatgcattagtattagagttgcattacttagtattgtggttgtcatctagctttttttttttttttttttaaacggagtcttgctctgtcgcccaggctggagcgcagtgacgcgatctcagctcactgcaacctctgcctcccgggttcacgccattcttctgcctcagcctcccgagtagctgggactacaggcgcccgccaccacgcccggctaattttttgtatttttagtagagacgggttttcaccgtgttagccaggaagaaatgttagtgtagaaaggtaatatattccaaaagaatctgtttttcttaatgaagagtatccacacagacactcatagcaaaaaaaattataagatgcatcagagataaataaaataaagtgtagtcttcctagagctggatttagtttctggtttgatttattttaacgacagacataagagatcacttcgtaatgaagtacaatttcacactatagaaacagagtaaaaatatctttttgaagaaaatgccaaatctacctttaatctcaaggaaataggatcgctcaaatagatctgttagcatgttacatattaatagacaacctgctgtgtaaattacttaaaagccatcttttgcaaaaattttctcccattctgtaggttgcctgttcactctgattatcgtttcctttgctgtgcagaagctctttagtttaattagatcccatttgtcaattttggcttttgttgccattgcttttggtgttttactcatgaagtctttggccatgcctacgtcctgaatggtattgagttcatgtcctttgcagggacatggatgaagctggaaaccatcattcttagaaaactaacacagaaacagaaaaccaaacaccacatgttctcactcataagtgggagttgaacaatgagaacacatggacacagggaggggaacatcacacactggggcctgacgggggttgggggctaggggagggataacattaagagaaatacctaatgtagatgatgggttgatgggtgcagcaaaccaccatggcacgtgtatacctatgtaacaaacctgcacgttctgcacatgtatcccagaacttaaagtataataaaaaaataaataaaaatttaaaaaatggttaaaaagccatattttaaaaggtttttaaaattcacaacatactccatttttgatataacttctaatatttcttctctgtggtagaaatttgttcctgagaaataagaggccaaggatattacaagagcacaaaaagtttacataaatgtgttaacattttaaaggcaactatatatgaataacattaaaacattgttaaaaatttattagaatgaataataaaatcatcaagtttatacttaataagatcaaatatattgcttatataattttaaaagtagtgcagaatgtttattattctagtctcactaaaaatgataaacttcaaacatatctataggaaaataattacaaaactcagcaagtaatatgggagataatttgaagaaatgttgaaatagtttcttacataaagacactaggtatttctttcataaaggacactaggtaaaagttccagcaatgagtagggaggtgatctaggtacattttattattgattattgatacaggttttctcttgagaaagtgcacagttgggctcttctctctctctcctctctctctctctctctctgcaagacagttaacaacaataaaacccacctggtcaacccatcgacaacactcagctttatccctatccctctctcaccgttcctctagggacacagttaccctgtggtttctcctgggttctttctccttcctcctccagatccctgggatcagccatcaaccctcctgataccccctctcctgtttggctgccttcaggctctttgttgaacctgacaccaaaggatgtctttttaaactgtcagtttcatctattctgcctccagttcacaacccgaaacaatcccagataatgaatcaaaccaaacccctcactgacacacaaggacctctacagtctggattcaaatgtccttacctgacttgacacttacacttcacttgttcaatcttctcatcaatgatgtattctgtcatcccctcagcatatcattgcattgaaaatgtctcttttttttttccaaagccctatctttccaaagctagtaatgtgtgagtatttgttccagagcaggaccccacagcccagtgagacccaagtcacaatcacctctttccctggcctctgtggaaggagctgcccaggactttgctcccagagccctctgcagcctccccgcagcctcctttcattgggtggaggtgatattttgcccatgtccttctagtaatgcaagaaaaacgtattgaaaaatgctgtctttcttttagtatcagcaacttgggccatggcccagggcgtggccatagatacttctagactgacactcactaggctctcaggccgacaccactcacatgacttctactgagggaatgcagtctggcgagagagcagcaggagacactgtggatctcagggtctgtgcagtgggcagccacaactgtgccaaccccctcctaccccacaaattccgcagggctgggtgatggagcctgcactcactgaggctgacctggaagctgtgccctccctgggtgtggttccagcacccacttcttcccaggtctggcctgtcggacttcccctgtccaccagcccctaggacttgaataaatacatggggtaaagtagaggcaggcaatgtggggacacattggcatctgtaactcctcctctgtgaggtcagtggaagggataagagaggcctggagcagcccactccagctctggacctcagaagggctgtgtccaccatggctcctgtcctcctgctgctcctctctcacttcccaggtaaggacaggcctcccacgtccagggcaggtcccccaggcttcagcagtcccctctggctcagatcttccagcaacttcatgctggtaagtgagccagcagccatatccacctgtgtctgcaggttccctctcccagcctgtgctgactcagccgccctccctctctgcatctctggaagcaccagccgcacttccctgcatcctgagcactggcgtccatgctgatttctattggatatactggtaccagcataagccagggagccctccctggtatctcctgagccactaccaaaatgtacttcatgaccagggctccagggtcccgagctgctcctctggattgatggaaggctggtccaataaagggcttttgctcatatctaagctccagtctgaggacgaggctgactaattactgtgtgattgagcacagcagtccttcgcacactgacacacaggtggggaggcgggataaaacctcagcctgctcagagtcttgttctctgacaatgtttagatattaaaataactcacatatacaaacttcacaggaaagcactttctggctcaaaaaatactctcttctcaattctccatagaatgtttctgaagtctcaggaatgctgaaaacaaaaacaaaaacctcctgatacactgcggtgttgcccggttatctagatgagcaaaactcagagcctgtggagttgacttttttattattattattttttggaagaagagaaatgagcctttcctagttttcttttcggccagaggccggagaccattcaagcaggtagacagtcgctacagcatggactactgtctttgagggatcagagcagaaacctccttgtccctctccagtcacctccctccaaccccgatcatctgtgcttggggctgcctgaggctccccgtgacccagggatgaggcactaaggtgtgaaatgagtgaggacacaggtcccaggggagttccagcgaagatgtggccagagtcactcacaggtaggtacctgcaccttcagtgttcatgtcaggaggttgggggtatggatggggggaaatgagggcctgaggccagcaaacctctctgtggagcgtgagagggtgaaggcgaggctccaccattgctggaaaaacaccatgcctgctctggggaagttgggggatgttgatttcatggatgtgactttcctatagctgatcccactcaggaccacagggacccccatgggtgattttctcagagaccacagaaactatcttgtgttttctcctctcataccttaccattggagcttttcaacagtccaggtggcggggagggttgtgggacatcagggagtaggaactccgcaacctgtgcatgcagaattccccttgtaaagctcttgttgtgccccagaccctgaggtcaccttctcctgcacaaggggcagtagagacattgggagttaccatggcaactggtgccatggactctgaggcagagccactgtgtttgtcacctaggacagggaggatggaccttcagagatttgagcctcattatccagatgcaggtttgtcaatagaaaccctctgtccacctctggactccagcattatgggtaaggctgattgtctctgtcacatagctgaacacagcctcataaacagaaagagctcctgatccatggaaaaatggataaaaatgttgtccctctcatcttaccagaatgtacgttgggccaaatagtggccatggcactagctgtgtaggtggcagctgcagagccaggggcagtggatgggccagggggatacggcagggtgggtgcttgtggggtcaaggtagaagtggtgagtaatggccccccaaggttgaatgtgttttggtgcctggggctggctggcctccaggaggctggggctggactggagctggaggtggcaggcctccaaactggaaacagtggtcaaaggtggggatctgtgctgctgccccacaggggccccagatatgggctaagcagtggctccagggttagtggaaagtttcaaatttggggtggggccacagaaccccagtgcaggaaggtggtagtgtccttggctgaggctgtgctgccacctagggatgtgggaagggtctggaaagatggaaagtagttcccactggagccagcaggaggccctagaatgagaggctaggaaaggggagtggtgtccgtgggggtgacaatggtgtccactggggagccagtcctgcagatgtgctggctgagggcctggaactggctgcacatgcagcgaatggctgaccagggagagaggggccttaggatccatgaggagagagaggccctgagtgaagaagacaggagaatgcatacacatttttgttggggttgactacttcattatgggggtgctgcgagacatgaggaaggctgaactggcacctgctgcagctgtggctaaggccgtggggcaggcctcagatgtcttgagcagccaccagcctgggtcagtgccctctcttcctctctttgaagagctagacttgtatccttgctgcctcacccatgagcatctctgttcctggtttcctctccgagtatgcactgactcactcacctccctatctttatctctgagaacttcgagacttgcctgtgctctgagcagtggctttaatgttgatgactttgtgaccatgtggtatcagcagaagccagggaatcttctctgggttcaactgtactcctcaagtccactgtggggattagaaatccaggggcttggctgggcaccgtggctcacacctgtaatcccagcactttgggaagccgaggtgggtggatcacaaggtcaggagattgagaccatcctggctaacacagtgaaaccccatctctactaaaaatacaaaaaattagccgggcgtggtggtgggagcctatagtcccagctactcgggaagctgaggcaggagaatggtgtgaacccgggaggcagagcttgcagtgagctgagatcgtgctactgcactccagcctgggcaacagagcgagactccatctcaaaaaaaaaaaaaaaaaattactgtgaaaaatattccattacatattcccaagcaaatgagctgcatcttctttactgtattttacaatttagtaccacaattttaggcctcaatcttctcttcacatcactggtattttaaatttggcaataaatatgaaattccttttgacttacagactcattatattattactttgaaaacgcattaatttcttaggaaggttttgagcctctatctttttttgagttaatatttaaattctctgcttattttaatagcctgtactaagtgaaaatagtatttatgcaagtaaacaaatcactataggtgttcaagactttaattttaaattttgtcatcattgaggtttaaattttttacctgctgtccacttaaaatgtatattaacagcttgtgacgtaaaatagttttaagtatgatatacgatgcacctgcatataaatgaagatggcgtgcacaaagacactttgctatgggaactgtactggaagatttatgaaagcatgtgaaattgcacctaaaattgtgctattagtgactataagcagcaatgctaaatttattgtacttgatgaatgaatgtatttagtctagtgacaattactttggtttaaatgtgtaaatgtcttgagttttttttttaaagtgtaatttgtactattgtgggggtgtacttggactgcaggggttattgtcaatgtgtgatttgtgtttttattttatgtataatatatatttattttatatagtagatgatttcatagaatcatctaatgtgatatatcaatttttttttattttgagacggagtcttgctctgtcacccaggctagagtgcagtggcgcgatctcggctcactgcaagctccacctcccgggttcatgccattctcctgcctcagcctcctgagtagctgggattacacgtgcctgccaccacacccggctcatttttttttttgtatttttagtagagacggggtttcaccatgttggtcaggctggtcttgaactcctgacctcaggtgatccacccgcctcgtcctcccaaagtgctgggatcacaggcgtgagccacagcaactggccagtgtggatttctagagagggggaattcttctccacacttgttggggaagtaaactaatacatacactacggaaacaatgtgaggcttcctcaaaacattaaaactacaatgaccatttccgctagcaattgtactgctaggtatacattcaacccacatgaaattggtacatggaagagagaggtggtggactgcagcactattcacagcagtcagggaaatgaatcaacctaccgtccatatgcagatgaaaaaataaactcccatgtgtgtacacaaaggacgactcttcagccaggaaaattcgatgacatcacctcatggggagccctgtggttgtacctggaggatgtgatggtaaatgaaatgagccaggcagagaaagacaaaccttgtattatctcactcatacagaatctaaaaaaaaaaaacttgatctcaaagacctagagagtgtaacagcggttactagagcttgggggaagaagggaggatgataagggattggaaataggtgcataaaaaattaccactaaagtatgcaaatataaatatgtgggactaggtaaaactttaggatttctacagagcaaaggaaacaatgaaccaagagtcaaggcaccctaaaaactgagagagaattttggagaaaattctatctctgaaacggattctcatctaacatgtacaacaaactgacacgactaaggtgaaataaacagtatcaacaacaaaatgaaaaacccctgcaacctcaaatacccaatcctaaaggacctgaatagaccctgtctgaaaaggagacatgaaattgacacaaatgaaaagtttctcacaatcactaattctcacaaaaacataaatcaaaatcacactcagttactattttatttcactaaaaatgcatattaccaggccaggtgtggtggcttatgcctgtaaccccagcattttgggaggccaagggggggtggatcatgaggtcaggagttcaagaccagcctggccaacgtggtgaaacctcatctctattaaagatacaaaaaattagccagatgtggtgccacgtgcctgtaatcccagctactcaggaggctgaggcaggagaatcgcttgaacccgggaggtggaggttgcggtgagccgagatcatgccattgcactccagcctgggtgacagtgtaagactccatctcaaaaaaaaaaaaaaaaaagcatattacgaaaacaaaaacaataatttttgaaggggatggccagtgcagacgtgcagaaaggaaaactctcatacactataggtaggaattaaatcactctacacactgtgaaaaacagttggaagttcctcaaaacgctaaatacaactaccgtttcagctagcagtcctaccactgggtatacctttaaagcaagtgaaatcctcatgttcaaaagaggtatctgccttcccatggtgactgaaacactagtcacgacagccaaggtacagaataaacctatctgtccatcctcaggtgaagggataaagaaaatgccgtgtgtgtgtgtgtgtgtgtgtgtgtgtgtgtgtatgtatatatatatatatgtatatatatatgtgtgtatatatatatatatgtatatatgtatatatatatataatgaaatactcttcagccataacactccaggaaatcctatcacctctgcagccaggtggagaaagctggaagacattaggtaaactatgaaatgaccctggttggagagagatctacactgcatgatctcaggcatgcaggatccaaaaaatttatctcctagaagcagaaagttcaatagcggttaccagaggctgggaagaggaggaggcctaggcaaggaatggtgagccgaacgctccccactccaaatgtatttacttgtttagagacagagtcttgctttgacatccagactggaatgcagcggtgccatcatggctcactgcagcacccacctcccaggctcaagtggttcttctgtcctagcctcccaactgggaccacagaaatatgcgaacattttcagctaatatatatttttttaatttgtagggacaggggctccctattttgcccatgttgctctcaaactcctgggctcaggcaatcctctcaccttgacctcccaaagtgctgagattctaggctttagccaccatgcctgatcgtatgtttacatgttgaaattctaaccctcaatctcatggtatcaggaggtgggaggtaatgaggtcctgagggtggagcccgcatgaatgggattgctggcttattaaaaggaaccccagagagctctcttctccctctctctgccaggcgaagacacaacctgaagtctgcagtctgccacacagaagacagtcctcaccagggcccaaccaggctggcaccctgatatccgacttccagcctccagaactgggagaaatacaattctgtctgccctggggatgagctccccaggctatggctctttgctctaacagcctgaactagcatagaagtgctatcccatcatctgggttgtattctattcagaaaggcgtcactaacccctcagtgctgtgatccttgcggacgctgcccaccataggctgagatgaggcacagggtctggttctaaatagaatcagaaggcactggaaagtgcaatgtcagaggacgatgagggctgaatttcatataatctcagcctctactggtgcgcatggaaaacgaggcccagagcaaaaatgcctttctcgagatcacactgtggaccccaagcccattggagttgtattccatgctacctctcacccctcacttcttcttgaaattcttccatctctaagcgtgtgcagtatctacaggggacaccaaacaatgagttttataagatttatctcaaagacacctgatgagttcaccaggaaggagatgctagcaaaaccccattgtgcatgttgcagggctggggaggccccaaaacaccagaaaacttctctagggtcacagaactggtaagatcaaggaggtttggcccagcactgtctcctcaaacctagggccttagttgcctccaggtcttcccagggtgacgagggggcactttttttgcataatttggaacaggtaagaagttggtaggaacaggtaagaatagggggttggtgagtggtcagaagcccagtggggcctttgagtaggtcttatggacggaaggagcataggggattggacctggaagaagtgagtctcctctcagatcctgggccttgtgatgggctttctcccaccctggagtcttccggcattttccccctgccaagggctgaaatggccttagctgtttctccagactccctttgatgttaaaggatgaaatccaattatattcctttaagttaaagcattcttctaaagcatcttgtcctgtgcactgtctctaaaatgaggaggggacgaggcctccccaggccctttccctccatatcagaagtggagcttcaggtggcctagaggggatttcatgtagccctccctctggaaggtgctgagttcttttttttttttttttttttgagacagagtctcgctctgtcatccaggctggagtgcagtggcgtgacctcggctcactgcaagctccgcctcctgggtccacaccattctcctgcctcagcctcccaagtagctgggactacaggcgcccgccaccatgcctggctaattttctgtatttttagtagacacggtttcaccgtgttagccaggatggtgtcgatctcctgaccttgtgatccgcccacctcggcctcccaaagtgctgggattataggcgtgagccaccacgcccggccaggaaggtgctcagctctgacccaggtgctgctgcactgccatttgacatccaaaagcccgcgtctcctcatctctaccatgaggatgatttttgaggactcactgggatgatgctcttgtaggctactaatacagcaggtgccactgcttcacagctgacaaacaccgtgaggatgccttgaaggcactaatgtttttcattattctccacttttttttttttttgagtcttgttttttcacccaggctggagtccagtggtgcaatcttggctcactgcaacctccaactcccgggttcatgtgattcttctgcttcagcctctcgagtagctgggactacaggcacatgccgccaagcccagctaattttttttttttttttagtagagacagggtttcaccatattggccacgctggcctcaaattcctgatctcgtgatccgcccgcctcagcctcccaaagtgctgggattacaggcgtgagccaccacgccctattctccactcttatgtcaaattttaaagtctagaaccttttccaccatgggaacccatgtcctccacatccacaagtctccaaagggttggggattccttgtgtgagctccagatcccaatcctctggtggttcatggtgttgtcaatgacaggtctctccttgtcaccccagtatgaaaatgaggagacttacagggtgcgaacattccagataggtacaggggagaaactggtgaaggccctggttccagcctttctgggtagaaccatctcctcctatgccacctgtttgggcccctcctgggactttatcaccgtgccagacttcatggaggaactgtttaccaggtgaatgtccatcccctccaactcacagtggtgactgtctccgactagctgtgtcttgaggatgtcaccgaagccctctgagcctgtttgctcctttgtaaagcagtgagatgaacctcatagggttcttatgggaactaaatggcctaaggcatggcaagcaggtcccaagtgcctggctctgtgaaaaggctgctgagcatgctatagttcacatttattatctttcccttcaatggagctctgggcatgctgtctcaatggcccatatccctgtttggaaaagcacacagaaagcaaatctgtttttgcatttgtaaaggatgtctgtgattctttctaactggtctttgtccttgacagagaaagaacagtggtcccttgggtcctgaaggaggggccccaggctcactcaggtatctgtagaggttctggttgaggttcattcattcaacagatatatatgaaaaatgtaatttatgcagtcacttttccagtggcttggcataatttagtaaagaaagcagatgacaatgcctgggcctcaattctacttgaagtgtcagatacttccagtagagcgcataagcaggtcatatccacagaatgttagatgtgacagcctcatggcctcctctaggtatggtggcatcttcccaggttctgggactaggatgacatagcccaggaacaagtataaactgggtggatttagggttctgaagggtcttttgacttccaaacatacgtggaggaaatatgtggactgtagctgggaagagactgaaaaaaccctgggtctcatctctcttatgattcccatgagaaagttgagatctagggactttccctacaaaaggaaaggagagttgtagatggcaccttaggtccccagtaaaatataggggaggctatggccagggccgacccccaagagaaccattcccagcacaggggtttcctatctctgcctgtcctccatgccacatctgcctctcccaacccaagcaccaagtggcccagagctggagttttgatgggcaacctgctcacacatctgcctggagctgcagttgtgagtgcccaggtgctcagcactgtgtgccagggcctttgggaagagaatgtcagtaggaagccggggcccgcaagggtctgtatagccctgctgcatggccaggtctgcccctatcaagacagcacagatggctggggctggagtggggctgtcctctacacaggaagcaacaagccaggggcccagaaccacaataaaaagccccgcaagggccaggcgcggtggctcacgcctgtaatcccagcactttgggaggctgaggcgggcgaatcacgaggtcaggagatcaagaccatcctggctaacacggtgaaaccccatctctactgaaaatacaaaaaattagctgggcatggtagcgggcgcctgtagtcccagctactcgggaggctgaggcaggagaatggcgtgaacctgggaggcggagcttgcagtgagccgagattccgccactgtacttcagcctgggtgacagagcgagactcagtctcaaaaaaaaaaaaaaaaaaaaaagccctgcaaggcatgtgtaggagggaggccaggcctctggttctgctgtgccctccatcaccagcaccaccacctacctccattttgttcacccggccccatggatacaaaaactctgccgtgtatttagaataagaaaggtagtaaagctatgaagactttgtcttttgggccgctattccttaaacctccccatactccctcttcaatgtgttccactatccattcatctaacagcctgattacaactccctgggtgctctccaagtaagaggggtatttagggttttgctgagtgcaggggtgatgcctaaatgggtggatgaatggacaaactgacaaagcaacagacgaaaggaaacattccaaaaccttattgaacagaactttcttcatgacacctctcggaatgtaaacagagcttggtgtgaagaagatcaatctgatggctaaagatcagtatgactgcgtaaggcagtttgacatctacccatccctaacagattttcctaaaactctgtggaacaaccaaggagaaggcatattcctccctttccaaaggtgggcaatgtgcctcttcctggaaggttattttacaagcacgggcccctgaaagcagcagcctccccatcagccattttggcgtgagcagttacagctgcacactttgcaacttgtcccgccttgagtctgatgtcagaagagcatgtcagtccacttccacttcagagagggttggtggtgtcaggcagccctgctgtccaaggttctatcctttgatcacagcaattggtctcagtttaatggctttcttgctgattccagcatcatggcaggtatttaccacatctgtcacattcttataggactcaggagcctgcaggagaggaatttaaacattgtacaagtccactgaaaacacagtctttacaagcaccaaacttcacttgtgatgaaataaatgcacactaaaataatacagagagtttttttttgcctatgaaattagcaaaaatttaaaaaagaagtaagcctgatgttggtcagtgctgatttccaaaacactttcacctttttttttttctgtatttttcaaaatgtctttaaagaacatgtattacttgtataactaggaaatgtagtaaatgtaagtaaataaaacacacaccagaacctgattggaagaaacggcacccaaccatcatatgttagtgataattatctcttgatggtagaattactggcaattttaattttcttcctttatatatttctgcagttatcaaaatttctggaatgaacatgtagtaccttcacagtaagttataaaattcatatatgtataaaacaaagtaaaactgtgtgcacatgtatatgtgggtatctatgtgtacctacactcacagacaatttctgtgactttccagcaacattcccaccattccatcctacccacacagccttgccaccattagcactaatctcatcacacactcactttatcttcattcctgtcaatacaagcttaggccatccatgctgattcccgtacggttctgtacataatatccttttctatcccatctcccattcccttccagtttctgaaactttcccactgtggcctctggaactccttccagaaggagcaaaatcccctccctcccttcttctttgaatgttcccttcaccttcttgttttactgaaacacggatctttcccgaggataccactttcatctccaactttctgaatggtgactgctgttttccccaaatcaggtcatgccattggtcccagaagtgggacaggtgtgctcctggctttcatggttgtttctattctcccgttctccctaggcactcctagttttgaatcttgcagtcattacatcgtaccacaaactacctttggctgtagttatctgtgggagcctgaatcactccccagtactacttggcgatttctagctcctggcaatcagatgaaattccactgggccaatgactgtctctcccctagatgaatatttcataccttttctcagatcccactctcacttgctgaccttactatgtaatacactgaaaaaaatagaagcagccagaatattcataaacatgctaactttatcttccccacatatctgtatctataccttctctccttttatttttttactctgtcacccaaggttgagtccagtggcacaatcatagctcactgagactacaggcatgtgccactgtgcctaattttttttatttttgtagagatggggtcttgctttgtagctcaggctggtctcaaactcctggctttaagcgatactctcacctcagcctcccgaaagtgctgggattacaggtgtgagccactgtgctcagcttcttctctccttttataaaggatgaattatctgtgctcctagcaaagaccaaccccatccacttgtacatcagactctatctcctctcatctattcaaggacacttctccagcaatttcctccctcttttctgcatcattaatttctcttgtagattcttctcatcaacatgcaaacacatttgtcagatcacgtcactattctgctcaaaatcctccaaggttttttcattttaatcagagtaaaagcaaaagtccaaatgctctggcgccccctacctctctgacctcatctccctctggcttgctcttgtcatgcctggcctccttgctgtttcttgaacactccttcataacctcagctcacagattttgcgcttgctgttctctctgcctcgaaagctcacctccagatgcccaggtagcctgtttcctctctctcttcaggtctttgctctactgtcacctcactgaagtcttctccgaccacctgcttaaaactgtaccccttcccacctttccttaccacctttccctgctttttatttcatagaacttgcatggtcattaacacactgtatgttttattatttggaaagctccacaacgaagggactcgtgtttcttttgttcactgcagtatctctagcatatagaacagtacctaactatagcggatggttagtacgtgttagctgagtaagtgaatcaaataatcacgtgttgcaggtgaaaaaacaaaacaaaaccaaaaaaccaaaaatccaaattttaactgtaattatttctggctgattgaattctaaatgttttctgttttctcctttgtattttccaaatcctttttttttttttgagatggagtgttgctctgtcgcccaggctggagtgcagtagcgcgatctcggctcactgcaagctccgcctcccgcgttcacgccgttctcctgcctcagcctcccgagtagctagagctacaggcgcccgccaccacgcccggctaattttttgtatttttagtagagatggggtttcaccgtgttagccaggatggtcttgatctcctcaccttgtgatccacccgcctcagcctcccaaaatgctgggattacaggcctgagccactgcacctggccagtatattccaaatcttttaaattaaccatgtattcttaagatcaggggaaaaatgaattgttattaaaaaaaataagtctttgtcatactctgactcagtaattccactttttttccttatttttttttagagatagggtcttgctttgcaccaagtctggacaatcacatagcttactgtaacctcaaggtcctgggctcaagcaatcctccagcttcagtctcctgagttgctaggactacacctggctaatctttggccaaactaatcttgaactcctggcctcaagagatcttcctgcattggcctcccaaagtactgggattataggcatgagccaccatgtaactccacttttgagactttgttctaattactataacaactggaaaaaaccttcatgcatgaagacactcattacaatttaatttatagtagcaaaaatttggaagctacttaaatgtccactacaggcagaaagtaaggtactcagctggtggaatattcagcaatgattttaaaaagtgacacaaacaattttataataatgtgcaaaattttaaaaataactacagaatgtttcttaactataattaagactagctttaaaaaaagcatttaggaaaaaactatgacaataagtaaattttttttttttttttttgagacggagtcttactttgtcatctaggctggagtgcagtggcatgatcttggctcactgcaacctctgcctcccggattcaagtgattttcctgtctcggcctcctgagtagctgcgattatgggtgtccaccaccatgcccagctaatttttgtatttttagtaggggtttcaccatgttgatcaggctggtctcaaactcctgacctcatgtgatctgcccacctcggcctcccaaaatgctgtgattacaggcgtgagccaccacgcccggccgacaataataagtattctaaaagataaggtaataactgtgtcagggcattgagtttttggatgactgtttttcttttctcttaaatcattaaggaattatattgcttttaatttaaatatgtacatatatgtaaacatatatacagaatttaaacaaaatctgttctcctgtgaatcaaataaaactttctccaaacatttatgccttcctttttcaaatttgctttcaaattgaaacctaagtatacaattgtgcaaaaacaagagtcagctcaaactactcttgaaaagcttaatatgtagatggagactataaatgaacagtaaaaatcattcttaaggacttggctcgtaattttaaccaaaagaaatgaaaacataaaactgaaataagctaatccaaggaagataagccaaaattgaggtcataaaaaaaaataacccaaacaatttctgttagtaacaccctaaattgctgtctctgtagactggaacaaattacaaatggggaacaataaatattcatgtatttatcaaaatttcacttacctcttccataaccagtttgggtgaggcaacacggatcgcaattcccatatctgccaatttgtctaagacatcctggaaatctaaattacgtcgagattttgctcgggacaatgcacggccctagaatgggaaaggaatgaactttactttaaaccctaagatgataagccctttccctgattttctctcacactaaaaaggagcttaaaaaaacatcttttttactttatcgaattggtaacaggccttttaaacctcatcatatccttttagattttggaccggagaattctttgttgggaggctgtcctatgcagggtattcagcagcgcagcgcagtgtattcagcagcatccctcgcctctaagacccactaaatgccaatagcaactcccactaaaccatgacaataaaaaaagcctccagaaattgtcaatgtccccatggcggtagggggatctcctttgttgaaaactactgggttaaaattaggagttgggaggcagctagaaatgagaaacaatcagaaaaaaaagtaggattaaatacatttgtgaaggtctgtcctaggagaaggtactctagacagtttctctttcccatttcaacactggctcaacactctggatggcttagaaaaggggccggcaaactacggtgtatgggccaaatatggcccaccacctgctttttaaaataaactattttgttttttgagaaagggtctccctctgtcacccagactggagtgaagtgacataatcatagctcactgcagccttaatctcctgggctcaagcaatcctcctgccttagcctcctgagtagctatgactacaggtgtgccaccacacccggctaatttaaaaagtttttgtggagacggtgtcttgctaatgttgcccagtctagtcttgaattcccggcttcaagtgctcctcctgccctggcctcccaaagtgctgtaattacaagtgtgagcaaccatgcctggcctaaaatagttctattagaacacagcattgcccatttacacagtacttaaggttgcttctgcactgaaatggcatagctgaatagctggtacacagaccatctggtcccaaaagcctaaaatatttacggtctggccctttatgggaagagtttcctgacccctgggcttagaagatgagaggcagtgttttgaaatgggtgtgtgtgtagactgtacatgggctctaatttgcaaatagggcctatccttccaatcttgcgtggacctacacaataggaaggggcaaattaaacaaaggagcaggtccagtcagtcgctgagatcaactgtgatatttgcatcagttaaagttctatcacttataaaccagacagtaagctcagctagtgtgacaatttcccagtctggattttctggacttgcagagataagaaacggtccctaaccctaccagatctcactgaggcagagatactaggtgaccccagtcagttcactaaatagtatacattatggggaacaatttgaagtacaagacatgataggcccaagtctcaactctgttaatgttcaatcagctacatttaccagtcaaaatggaaaaccatagctaaactgaagagagcatttctaaggaagtttctgttttccttaccgctccatgacaggttgttccaaaggtctcagtcatgccctgttcagtgccagtaagaacataactacaggttcccatggtgccaccaatgagcactggctgtccagtgagctgaggatgcacataaatcaaacatgttaaaattcagaaaaacataggctttttatgcataaaatttaaattttctcttgcactgtaggattgtaggagaaacccagacttcttttttttttttttgagatgggagtcttgctctgtcgcccaggctggagtgcagtggcgggatctcggctcactgcaagctccgcctcctgggttcacgccattctcttgcctcagcctcccgagttgctgggaccacaggcgcctgctgccatgcccagctaattttttgtatttttagtagaggcggagtttcaccatgttagccaggatggtctcgatctcccgaactcgtgatttgcccgccttggcctccgaaagtgctgggattacaggcgtaagccaccacacccggccggagaaacccagacttctaaacgcgcggctagtaaactatattaagatagtactttgattctttgataaatcggaggggaaggaagaggacgagagtgaaaatctgaggaccagtaaaaatgcagaagagtcaaaataagagcaaagcaaaatccaaaagtgtagagaagtgttgctagaaccaccatcctgagcaaggtgcttgtcttctctgttttgggtttctcatctgtaaaaggagcaagcagactatggggtctttcgaactccaccacagccagacaccaagaggacaggaggaatgaaacagactgagtttactctgtcttctgtaactgagttactcctgtcttccactaattcaaaggcctcaattcacggtagtggagtaaaatacacttcctgcagcacttgctatagcacacggcaccaccgcaagcacaaatgatgggggaaggagttactgcttcagagaagattgggaatcactgttctcatgagtgacagagtattttcttttcacaattgctgcttttcgttttaaatgtaattcacatttgcaacaatctaaatcgtgcccccactgcttaaaactacaaacgtagagctacgtacttggtaatcaacagcaatgaggggatggtgaggagggaaagcgcgggtggatcccttcctgtgtactaacagtgtccgttcctttccgtccaccacatgctgctccactttggcaatgttgtgagaaacatcatagatcacatgtaggtccaagtcatcaggggttgtgttgaagaccttggcgaaagcctaggagaaaacacagaagataaaagcagccagaacttcaggacttatgttcagctcttcgtgactcatctcactggtttcaggtagtctgttctgaagggagtaaaagatttaaaagttcaaaagtagccgtaagattatcttcacgtaaaggacaaaagctgtcctttagaccacacaggaaatgccaccacatcattttcatctttagttgaaaagctgctgggcaacttttgatcccacctttcaaaattgcttcttctcagccttctgaatcttagtcagtggcacttttattctctatgctgttcaagacaaattctaggaataattttgattctctgctctcatttctcatgcctgatactctgatgatttagtttaagacaacaccaaaaccttggacacttctctggtattttgaaagttaactatgtgaatttccaaaaccaaacaccataggctttgactggactgcacgatgtttttttcttttggagacaggagtctcactctgtcacccaggctggagtgcagtggcacgatctcggctcactgcaagctccactttccaggttcacaccattctgctgcctcagcctcccgagtagctgggactacatgcacccgccacgacgaccagctaagctaattttttgtatttttagtagagacggggtttcaccgtgttagccaggatggtctggatctcctaaccttgtgatccgccccccctcggcctcccaaagtgttgggattacaggcatgagccaccgtgtccagcctggactgcactatgttttaaagcacttaacatcatcatgaatgactcggaacagaagagcaacttctactgtacctgacgggttaagaaggtcatggaagagcggttgacccaggcatagttcccagcagctgccattcccttcagatagtcttgaccctctggggaagcgattcgagcacaagccaactgccgatcattgactataatcttgtctctcttcatggccttctccatagctaccagcgcatctggaacaagagccacaaagtccaaaccagttagctttcccttaaatgaacagttcagatttactgcagaaaggtaggctacattcaaattcattccacaaaaaaacccaatgaaagccaactttccctttaatgtgtttctgagttcatctatttgctcagtcaagacgtacttgagaatctttcagagtgcagtgacagtttgtgggacacaaagtcaacatttgccctctaggaacttgaaagagaatgggatgtgtaaacaaatagccacaagatggtcttcattactcctttctcaatatgtgaatgcatgggaatagtagtagcaaaatacattttgttgccttcatgattaatcaaatccatgacaaaatgcagagaagtactcaggggaatgttctgaaacactagttgacacttcgtacatctgctaggttaaatagtctagagggtcaggctggcacaaattattaaattctcacacaataaaatggactagaggctgatctgtaacatggaattttaagcttataacaatttccaggcatctatataccttttcattgattcgctgttggaggccgaaagaatgagggtcgtgaacaactcagtataccactggaggctatgagtaaacagcaaactgttcttatgaatgcaagatgctggcaagctgacaactgcgtctgttgcccagaaggaatgctgagggcagccacgccccaggcacaagtgtttcttgtgacaggcacatgtgaagcctgttagcaataatatgaacctgggatcaatcaagcagctgaccaatagttacctcctcctccctgctctttctacccaataaatacaaagggctgtggaagctcactagaagcaagaagcccctgactccttctttaaaagtttcttttgttttttgttttcatttctgcgttcatcccgcttcattcagtcctgtagtaaccgtcacaattcatacattatttcacacaccctccaagctatccaaaaggacctatccaatatttcgctgcttcctgcttttgttcatgctgcctttgtcaccagtctttgtgtgtaattgtccaaactgtgagatccagctcaacactgggtccatgaagccatctccaaaatctttttcttaaatgtgttttgtttgactctcctatataattaattgctaccttttaatatttattttttcttttaaatggacatgacctttacttcatgagacaatttgagtgcaaagtatctgcctctttcatcagcaaatccaccatcacatctactgttgcagagcaggtatatgatacataatctgccaaatgaaagcctatttcataaattccactctttacacatttcttgctctttcttggccagatagtaactcataagagtaaacataacaataactgcaactaacatttattgagtgtttactaatgtcaaacattaagtgctttacatatattattaactttccatgataattctatatgaaataactattatactcatttttttagacaagaaagttatggcccagtgaatttgtccaagttatttaattgttgaggactcaggataaaacccatgcagtatatttcagagttttcgctcttaaatttctatctggttgcccataaaatgtacattttagcacaaagtctagaatatacctgtggctacttggtggcccaagcctctgcttccactgtggatcatcacacacacctgtcccttatggtcgatgcccatttttttagcagcatactcattgaaaatctcatccacaacctggatttctgcataatggttgcctgctcccagggtccccaactgcaaatgtaaaaatgtctggtaagatagtttttattccagttttttttttaatctatttaaaaaccaaaaagataaaaacaaactaacaacaaaataaacatacaaatagtgtttcagtaacaaaaaaattcctaagctatagaagtgtttcatttacaatattctacacaacaaaataacgtagactagctcctgaattttgttatatcattatatgcttggtatacacatataaaaaactaacacaggaacagaaaaccaaacaccacgggttctcactcataagtgggagctgaacaatgagaacacatggacacagggaggggaacatcacataccagagcctgtcgaggagtgggaggaaaggggagggagagcattaggacaaatacctaatgcacgtggggcttaaaacctagatgatggactgacaggtgcagcaaaccaccatggcaaatgtatacctatgtcacaaaccagcacatgtatcccagaacttaaagtaaataaattaattttttaaaaaaagcttcataaacaaaaaaaatcaagcttttaaatggttcatgggatattttaaacatcacaaagagtcaaattttgggataaatgttggtaaatgttgactcttagacaaggtccaagttcaaatgattttgaaacatctatgagttcatggacatccaccattatttataactgaaagaacatataccacaactacagctaatattaatagatgatttagagaactagagaatgtcagtgctggaagagtctttagaggttgcctagttttaaccatcccagttttccataagaaaatgagatccagagaagacagtcttgcccacgtgtcacactgaattagtggcaaagccttcacaactagctgtaatttcaaacatctagtatattcttatctcatggataccatctgtagactgtcaaaatatgtatatatgtaattttgacgtatgaacctgataaacatattctatttttctcccattcacttctaattcattatttcttattttatgaacatttgcaagctcctgattgctctgtcacccaggctggagtgcactggcgtgatcacagctcactgcagcctcaaactcctaggctcaagcagtcctcctgtcttagccttctgagtagctgggattacttgcatgtgccaccatgcctggctaattttttttttttttaatttttgtagagactaagtcttcttatgttgcccaggctggtctcgaactcctggcctcaagcgaaccttcctccttggcctctcaaagctggtgtgagccaccgcatccagccctgatagtttttttagaataaaaatgaagcataaacaaatttgtattttttgatataccataaaaaaacctgggaatatgtttgctaaatgtaagatatagatttttttcccccaataaaaacaaaatatgaaaaaaaaattaacatgttgcccctccaaagtgagttacctgaggaaggcctcttttcttcgcccttgcagaaactttattggggtcagcctgcagcatccttccgtactcctcgcagtgctccttgtcttcagcccaggcatacccttctcttaaggaccagtccacccccatctccaaggcctcctccaagtctctggataagtataaaaggtgctagtcatctcacagcaaaggcagatcaaaacctaaggatgaccacatccttaaagggcagagaaaaactcgacatttactatctcctgtgttccaagccttgagtcagatacaaagtttaagctctcagtaactggttttttgaggaatgcagtcatataaataattccaatataaaatgataaatgccctattagacatcattatagttctacttgacatttatactgctccttgttaattttcaaatcttttttatattcagttttgcctctctgatcctgaattccatgaggtagtgattaaacagacaaaaacaaaacaaaacaaaaaacaacaacaacaactctgtaaccttaatcagctatcactctctaacgactaattcaaccaggtacacaccttaatcatttatgaattacggtcaaataaatgaaggtatctagaattcctcaggcaacacaggttaaattttaagctgttttcccatcttcacagaagttctgagtggcttacggcacctccattttgaagctgaggtacacgtacattaaacccttagagggtacaagctttaatcttcatccaaggtccagctctcttctaaaacactgccaggaaaaactacacttttcaatgttctctccccactaccccagatgacagcccatttcactatcattatttcattttgttattattttttactgctccttgcagagcagggtcaccccataggcagtgtgcccagagtagacccatttcagtattagtagacaaaattcctatctaaaatgtttataaagatgtttggaatttgtgtgttccacgtatgcttttcaaattggggctgcatgtcagggatcatgtgaaatcacagaccacgcatcatccaagtatattgattttacttaggtattttttttggttagggggagttaaataacattacaagtaacagctaaaaacatttttttctattaattataatgcaaagttcacataaatttgaaggataaagcaaaatattaaagaaacatagctagcacactattctgctactgaagtactctgcaaagtttagggtgcactgctttgcataagctatgacacggtaaaatctatggccatctgagagatacactatagcattatatttaatcctctacttaccaaagaacacatccagtgctatcattcaaagaggaaggttggggttaaataggcttaatgacaaaaggcagtaggattcagaatacagcttctgaagtcaaaggatctttggtttgaatcctgatatcacctactaagtttttttttttttttttttaattgagacagggtcactctgttgcccacgctggggtgcagtactgagatctcagcacactgccgccttgaactcctggtctctcaagggatccttctgcttcagcctcctgagtaggtgggactacagtcacaagccatcatgcctagttaattttttttttttagagacgagatctatgttgcctaggttcatcttttactcctggactcaagtgatcctcctgccttggcctcccaaagtgttgggattctgtaaacccaaccacacctggcactaagcttattacctctctaaacctcagttttctttcttgtaagttagggaagataatagggttattgtctggatgaaatgatatgatgctcagcaccttacacatagaaagtgctcaataaacgttggtggatatgatgttattataaatactactctatgtcaaaggctgttataacatcggttgactaatgtctccaataaatgggctgtacctcatgcttaaaaaaacagttcttactacttcctgaaaagtaactgaacaatcctcatctctcaagtgtactgcactggaaaggaagctgaaggtcatgtggttattatccctcccataccatgtactggaaacgtgtgctcttacttggcattcattgggatgacaccttttgaccccaccccaacaggaatgtggtcaaacatagcttgggcaagttgctccttcacaggctggacatcactttcatctaaattggttcttagcaagcggacaccacagttgatgtcaaacccgacaccacctacaaaatagagaaaagttagcaaaaccagctggtaaggcactgttacctgcagtttctcgccattaatatggaactataaagatacccattcttttaaagataactatgttttaaagtagacaacaaagtggttctttgctgagtaaagcttgatgacaccaagataatctaaagtaacatacacactaaaggcactttatggacaagggaggcagcaatgaacattgagtaacatgtaaaacagagatcaaaatatgcctctcttttcttcttgaccactgttttcacaggttcatgaattttttcagtcttttcaaataaccaacttttgcgtttcttggtcctttctataacatatctttccatttcactaattttactcctaattattccatctttctacttttttagggtataatttgttgtgctttctagggtcactgatattccagcctttcttctttcccaatttgtgcatttaaggctgcatgtttccattcaaaaaggacattaacagtgacctcaaaattttagacataagtacttttatttttcatttttgagacggagtctcactctgtcgcccaggctggagtacagtggggtgatctcggctcactgcaacctccgcctcctgcattcaagtgattctcctgcctcagcctcccgaatagctgagattacaggcgtgcgccaccacacccagctaatttcttttatttttagtagagacggggtttcaccatgttggccaggatggtcttgaactcctgatctcatgatccacccacctcagcctcctaaagtgctgggattacaggcgtgagccaccacacctggctgacttttgtttttttgagacaggttcttgttctctcacccaggctgaagtgcagtggagtaatcatagctcacagcagcctcgacttcccggctccagcaatcctctcacctcagtctcctgagtagctgggactacaggtgtgtgccaccaggcctgattaacttttgtattatgcgtagggatggggtttcaccatgtttcctaggccagtctcaaactcctgggctcaagtgatcctcctgcctcggcctcccaagatgctggaattataggtatgagccaccgcatccagcctataagtattttttaaatcattttctcctcagcttgagagatgaccggcaaataaatggcaaataaaaactgtatatattggcagggtgcaggggctcgtgcctgtaatcccagcactttgggaggccgaggcgggcggatcatgaggtcaggagatcgagaacatcctggctaacgcagtgaaaccccgtctctactaaaaatacaaaaaaattagcggggtatggtggcgggtgcctgtagtcccagccactcaggaggctgaggcaggagaatggcgtgaacccagaaggcggagcttgcagtgagccaagattgcaccagtgcactccagcccgggcaacagagcgagactccgtctcaaaaaaaaaagaaaaaaaaacctgtatatatttaggtgtacacaatgtacatttacattgtgaagtaattatcacaatcaagctaattaacctatttatgatctcacagttacttccccttctgtttttctggtgagaacatttaagatttattttcttagaaaatgtcaagtacacaatattttattttagagacagggtcttgctttgttgcccaggctaggtcatagctcactgaagcctccaagtcctgggctcaagctatcctcccacctcagcctctgaattgcctgggactataggtattaggctggtgcaaaagtaattgtgctttttgccattaaaagtaatacaatacaatacattattattaactacagtcactatgttatacattagatttccagaactcattcatcttaaaactgaaattctgtatactctaacatccaccctgttagcaccattctactctctctgtgagtttaacatttttagattgcacatatgggcaaaatcatgtagtattttcgtttctgtgtctggcctatttctcagcatatcctctagtttcatccatgctgtagtaaatggcaggattccctgtcttttcccttcaattttaaaagattgatttctttctttattaaggttgaataatgcattcaggctgtttccgtatcttggctactgtgaacaatgctacaatgaacatgggagggcaggtatctctttggatactgatttcatttcctttggatatacacccagtgatgcaattgctggatcatatggtagttctattttcgattttttgaggaatctccatactgtttaccataatggctgtgccaatttacactccctccaatagcatagaagggtgtcctttacttaactcaatgtcaatttttagacacaagtattttctacttacattagttattttctcatttccatagttttgtttttgactcatgggttacttaaaagtatactacttaatttccaaatatatggattttcttttttgagatcatgccagactagagtgcagcggtgtgatcatagctcactgtagcctcaacttcctgggctcaggtggttctctggattcggccttcccagtagctagaactacagatgtgcgccaccatacccagctattctaaaactttttgtagagatgggggtctccctatgttgtgcaggctggtttcaaacttctggtctcatgtgatcctcctgctttggcctcccaaagtttttctagtttgtttgtttgtttttgagacagggtctcactctgtcgcccatgctggactgcagtggcgcaatctcagctcacggcaacctctgcctcctagacccaagtgatcctcccaccttggccctcccaagtaactggcactacaggcgcatgcccccatgcccggctaattttttgtatttttttttttttagagacggggttttgtcatgttgcccctggctgttctcaaactcctgagctcaagccatccgcccgccttggcctcccaaagtgctaggtctagtttttatttaaaccatttctaatttaattccactgtggtcagaaaatatcctcttatatgagtgggttctttagtatggtccagagaccctggggtgggggtgagggggaagaccatttcaggtgtgtaagattcattttataatactaagacattatttgtctattttattcatattctcccatgactgtacagtgagatttctcaaaagctatatgacataacatctttgttctaatggatgagacatgtacttatatattcttgtctttaaaaaatgtgttttaatttctaataaggtaaacattgataagagtctgagattaatcctcaataattattactaaagtggtcccgagtgcaaaaagtttgaggactgctggtctatatgatttcaatgctttgaaatttgatgcctgctttaccgctcagcatgtggtcagttttggtaaactgtgtgcatttgaaaaaaaatgtatactctgcactgcttggctgtactacaatgcaagtgcacatacacacacacaaccacacatgtatattagaggtcacgtgtcaagtttgttattggatcattcaaatcatgtatattcttactgactgaaatttgcagtcacctccaaacagccctacatgtagggctcacatatctggaactttttcttcttttcctctagatcttgacttcgcaaattcttactgccttagcagattttctgtgccttcaaacagatttaagaaaaaattttttacccagcctttctaattattttcagcaggggattggtctgaaacaacctagtccaccactgctagaaacagaactctcaagatgtcatttaaacttcatttctaaattcacactctttaacagcaaagatattacttctgatatagaatgtttattgaaagcaccccataaccacagcagaaggcgtatgcaaccttctgtatattcaatgttatcattgaataacaatgatagtattactgaatatgttctacctgcttagcactgttctaaatattttacacagctgaactcatctaagctactaatactgtgtggtcattaacattattagacgtgatctgtccacgaggtaactgatttacaaagataaaaaaaaattgccagtttgttttgtagccaaagtctgaataccatgatgtttggtaggagcctcccaaaattttcaataaaaatatgctttgcttgaagttgtaatagcctctcagtatccacaagcaatacttccagtaaatatcaaagaaaaatgacagaacatgatgagactgagtcatgcacatggagagaagtgctctgtttcacaaaggctatggtccatagagagaagctacacacatttttttttgagatggggtcttgctctgtcaccaggctggagtacagtggcacgaactcggctcactgcaacctccgcctcccgggttcaagtgattctcctgcctcagcctcccaagtagctgggagtacaggtgcgcgtcaccacccccagctaatttttctatttttaatagagacacggtttcaccatgttggccaagatggttttgatctcttgacctcatgatccacccgcctcggcctcccaaagtgctgggattacagacgtgagccaccgtgcccggccaatgctacacacttaacagcagatgtccacagtgatcttacctggggatactactgcttcagggtcattcatatcaaaggctgccatgttcccaatagcaaacccatatcctgaatggacatcaggaagcccaatagatcgctgaaaaagaattagaaaatgaaatacaagtgtcttgacctgctaccctggatgccctgatggacctgacactgattctcaaacaggttgcaggctgaagctttccctaaatcaagactgtgttttcacaaaatcttctatatgcatggaaatagtaagaactcctaatcacaaagctaaatacagtgagaaaaaaacttttttataagatctgaatgttaattaaggaaatacaaaacagaaaagcctcaaaataacatgatataggagtaacacatactaagtttaatgtactattacattttaaaaataatcttaagacactgacaaactttggtttgtcaggttaagaagaggaaaataactgatttatataggtcattagtttaagtaatcacagccaaatgtaatccatttgatggtataaatactgtagacttcctacatgtggagcctagaaaaggaccctgacccaggaagaatgcaggtcaaacacaggatatatggagatacccagacactaacaacttccttatatacacaagccataccatttcattccctctaccaagtgcccaacatggtaactggcataaagaagacctcaaaaatgtctgccgaatagatccattttcaacatctacctctgatagaatatgaatgttaaactgtggtgggggctatgctgtcctctcttcctccccctcagtgctaacccttaaacttcttgccatttcttcttcaatgatcctctgcataggaagtgaaacttacaaccaagcgaaacttacaatgaaacttacattgaaacagtgaagtgaaacttacaatgaaacttacaatggtggtgcactgatccaggaataatgttaccatgataagaaacaaaacacaaaaactacttcgaaggttcttaacacttacagattctagccaaatgcattcagaaactgaaataccatccagattcaattatttctttaggtccatggttatttccttttattttttatttttagggacagggtctcactctgccatccacgctaaaagtgcagtggcgtgatcatggctcagtgcagtgtggaactctgggctcaagcaatcctcccacttagcattctaagtagctgggacaacaagcatgtgacatcacacctgactaatttttttggtatagacagggtcttgccatgttgcccagactagtcttgaattcctgggctcatgcaatccttccatcttggtctctcaaagtgttgcgggtggcatgagccactgagcctggcttcatggttatgtctggctgtccaaaggtcattgtctaaatgacaccactatcaggcatggccattcatccattcaatggactttaagaaatataaatgattaaagttctgaactctgactcacatgaacaattccaggcagggctgccacattgccaatctgtttcatggctggcaggaagccaccaacacctgaagacaaaaattgggtattagaaaagacaacacacttgatttttagcatgaattatattcatgtttttagactgtataacgtgaagaggtagtcattagggctactaagacaacaaagcctagaaggatgtttgagatgcaagatggaagggagctccttttagagtcactgtaagtattgcatgagataatctctgcaaagcacctagtaacatgcctggaatatagtaagtgcaaaacaaatggtaggtcacttgctattattgttcaaggttagctgagaaacaagttctacccagcttcaaattccagatggagcttcaaatccgttctataacgccaactggctgacaatgtgatcacaaataagtaagtgcttttggtcttacttttaagttgtaatcactccttgacaatatttcagaattataattatttgagttgccactttttcaggccacagggaaggcactaccgtactaacacaagtgaaactctaatgtacttaccaccacctcgacaggcattccttaattcctcaaacatcaatttctccagagcatcattcacatagaaaacaccttcaacctagtaccaaggaaagtgaaaagcaatgtctgagtacatgcgcggcaagtgtaggcactggacagaatgcactgtatgcaatatttactgtgctttactctttaccaaacactttcacgttaccttaagcacacagaaaacttcctatcaaagactacgagctgctcccatcggaaaatataccttaagaaaaattctgcaatgttcacaaattgttttgtttattctcataccctcaaaaccacatttaagaattcaacagattcagcatctttttgtgataaagaaaaatcttccaactatactctcacaaagcccaaaggtcttaatcctcaagcttcaaaaatatcaatggttttttgaaaattaaaaaaaaaaaccaaatgaatcaaaaagtccaattctaaacataaaacgtagtcatctaacctagtatgtttattctgtgtttaagccaatagcaaattacattttattgtgctctagtggtgacttacaaatctctagttaggtaaatagtgagaagaaaaatttaacatgcagctacgtagttgtgtgctcagttctgaaagctatataattttttaaaaaatctataattttaaagcttgacaatagaggcagcacacagaaggcaatggacgacatacttatgtaacactaaagagcagaacatttttatcacaggtcaaatattgtgaaagagctgtccagtaatggagaaccaaagatttaacacttaatcaattgaatgtagtttttatcagaaagatgacttcatcaccattgcataaataacaatttaatacccactgatggaaaatatttccagtataatttcttaagggtcacatttattaattcaccaaacattaactgaggatttactatgcatgaagcactgtcctgggcactaggggagatagaaagaatataagatcttcctttcaaggagctcccagtacacaatacagctcttatatacttttgttttttttttttgagactgagtcttgctctgtcacccaggctggagtgcagtggcatgatctcggctcactgcaagctctgcctcctgggttcacgccattctcctgcctcagcctcccgagtagctgggactacaggtgcccgccaccacgcccagctaattttttgtatttttagtagagacgaagtttcacgtgttagccaggatggtctcgatctcctgacctcatgatccgcccatctcagcctcccaaagtgctgggattgcaggcgtgagccaccgcacccagccagtacagcccttatattctgataagaatatcagagtgcaatgaagcaagtgccataacattaagtacacagtgctatggaagaatctgatgaggaagtgcctcaacagtctagggagctgggagaggtttcacagagatcctgtagagctggttctttgaagacaagagacatcactggcgcagcagaacatctaggaactaaacgcaaaaatgacgtaaagatgggaagggagtgttttaagggaataaagagaaatttttagtccaacatgtgggtcttgggggagaaatggagatttagtaacagatgattatctgtgtgaaattcactgctctcatatggaagcacaattcacgcttagaagtcaatagcgttttaagagcaatgcattaacattccaagtctctattcccaaaggaaaggtggtagtaaagtgctgtatacaaacttaaaccagaactgcctagcaaaatgagacttgcccctagatagaatgagcagcagtgtgtgcatcaaaggctgagtcagaacacctgccagacaatgacagtctgtgttattagatcctacagataatcatgtcatggtgttttctttttcttttctttttttttttttttgagactcactctgtcacctaggctggagtgcagtttagaatgatcacgggtcactgcagccaagatctcccaggctcaagcgatccccctgcctcagcctcctgagtagctgtggtgcacaccaccccgcctggctaattaaattttttttgtagagacagggtcccactatattgcccaggcaggtctccaaagtcctaggcacaaaggatcttcccgccttggcctcccaaagcgttgggattacaggccatgaaccactgcgctctccctatgttagattttctattccttccttcagggtaacggtttccacacaaagaaagtggccaaacagcaaacagaacacagatttatccccgtgcgctttttcttccctcagtgtaagtgacttgccaacaagggaaactcagtaagctttgattctgaataaaagaatggagtgactattgggagctgtttaccaagacgtgagacgagacggtaaacctttgaagcatttacttggcaccttcagggatttcaaaaactatttaaaaatacgttgcaaaacttcataaacgttttcttttttcacattaataaaaatatgagcacagatggtgatgaaggccgagagatacagagcccaggctttcaaactatctgatgatcctgagccctcaagtctccatctgggacgtcaaagaagtaaaccggacatcaagtcctggctgagcttcttcctaggtgggtagaggaagctatgtcaccgacagatcctcgaggtccttctgtgaagtgaatattaaaatcaaacaggccctgccctgcgctactgcaagaaatgacatcgctttattaaaaaccaacatgcgatactgaatgctgaaaacctggtttagtgaacaaaggtttgtaaacgttatttaaataaccagcatgactcagaggaggtgaattccagtcccagcaaatgaacctggggctggctgttccaccctggaaaagatcactgaagtttctgtgaacgtaaaacagctcacgatacgtttatgagactgatctgtgaaaacgctttggaaaccccaatttcgtatttatttagattcccatatccaccgcacttagcttgtcctcgtggttcggggacctctcctggcgggaggtggtgccggaacaggttgggcggccccagaaccgtgaggggagaaggacgggatgagggaaactctgcaaggggccggggcggacccagtggtcaggggaggtccagagggcgcagtggacgccggccgggccggggacggagcacggaaggccccgccatttgctctcctgccttacctgcatgttgggcacgaagcccttcttgatcctccagcagtttttattgatcttctccaagaactgcagctcatcattatagctgcgactcatggtggcgaaaactgtagcaaaaactcccggctccgctttgaagagccgctgccgcgtagtccggcttctcagagcaccgccttccaagaaccaaagcgcaggcgcgaccagcgccgcagcagatgagcaacggcaagcgccgaggctcaaaattcttcaggccaatgtctttcctctggttaagttgtactgtcctgtagtgtataactttaggatctttattagtcgatttcctctaaactacagctaagcgaaatccagaagtttaaagtataatctagttatcttttgttttggaaatgcttttcagcagcttatgaaaacaccttgagtctgggtcaggttcggtgcattggcttggagtttacaccctcagctgggaggggaaaaagataacgccagcagctgagaaagaaaaacctgtttgagtaaataccatagctgaacatttatgtttcagaatgaatctggatatacaccaaataacttttttggtcagaaaggagcatcccaaagaatgaagcatggcagcttatcatttattctgacaaacacttgtgggtgcatctattgtggccagacatatactacaaaatgatcaaatcacagcccttatggatcgccaaaactccccagtctagccgcatttgatgatcaagacctctttaatcatgcttttatacgccgtgtctcttgttcatagtggtaagtgagctttaagtgatttcagtttccagttcggcctcatgtcaacaactgcaactttgggattagaaagacgcaagattcaatttctatctgtgccatttactgacttggtgtgattaacccctcttatctctgtttcgtcatctctaaaatgggatcataattctttcttgagtagaaggctaaatgaagtgacactggaggggtaatcagcacggggcttggcacacggcaagcactctataaacagctctcctctttccattcccccactagactgtaagtgctgcaaaaaacagtatgtagtttccattcatttgttgcattatctacactggttccgcttttcttctcttctgccccaatttctccccattgattaggtgctctgacacattaatatcattctcagttatgaattgtctgagtttagtactctgcactgccatttcattgaatctgtggtgggtgaaaaatcccaaagcttgaagtgatacaacttttagagtttcctgtggttaccctgttccttcttggaaagatttcagaggtaaagaattctcttttaaaatcaagccttgatgtctgtgcaaccttaggtctcttcccttttctatgtcttattttattttattatttttttgagttggagtcttgctctgtcgccaggctggagtgcagtggtgccatctcggctcactgcaacctccgcctcccaggttcaagcgattctcctgcctcagcctcccaagcagctgggactacaggtgcgtgccaccactcccagttaatttttgtatttttagtagagactgggtttcaccatgttggccaggatagtctcgacctcttgacctcatgatccgcccaccttggcctcctaaagtgctgggattacaggcatggcctactgtggctggcctcttattttattttttaaaaattcagggcaggccatttctcaaataaaaaaaccaagattgaagttgatagaaaacaattttaattaaacacagaagatagtaacagtgaatataaaacatgaaaaccaatatgcaggtaggggaaaaccactagagggcctaagggatttccactgagaatgaccaatacaaatacagacttagagttgcttacccacctggtcagaagtacatgcctagctcttgtcctagaatctttcttgccccaaacaaacaaacaaacataaacacagacacacgcagcatgcatacactcacattcagacacctctatttatccctttaacagagtctgccttattctgggttcctgaaggcttaagaaagaaaactttctgcctaagcaattcacaagggctttacaattccagtgtgtactgtctttcccttctgggtttacagtagttgtaggattaaggaccatttacttcctggggtgaattgcaaaccggcaatcaaggggctgacttccccctccactgtctgcttatcaggttcagaccttcccatacgtggaaacttggctgctgctttgaggatgtttcatacttcaggtcggtggaaatcaaaaggaaaccctggaaaggatgtgacaatgaagataacgtcaaaacttgggcatgtctgggtttgtctgaggcgtgaggaagagatggcttcttttttttattattttaattttgagatggagtctcaaaggctgtcgcccaggctggagtgtggtggtgcgatcttggctcactgcaagctccgtccctcggtttcaagtgattctcgtgcctcagtctcccaagcagctgggactacaggtgtgtgccaccacacccggctaatttttgtatttttagtagagacagggtttcaccattttggccaggctggtctcgaactcctgaccacctcagcctcccaaagtgctaggattacaagcatgagccaccatgcccagctgagagatggtttctttaccaggtcctacagagagtcaggccctcctctaccctggccctactttgtgaatgccccagagaaaggaaaggccattttggagtactgtcacccgatgtgacttagccattgtagaagcagtgggggagaagcagggaagtgggagagcatgcacggtagtgtagggcagcggtccccagcctttttggcattagcgactggtttcatggaagacaatttttccactgactgggattgggggatggtttcgggatgaaactgttccacctcagatcatcaggcattagttagattctcataaggagcgtgcaacctaaatcccttgcacaggcagttcacaatagggtttgtgctcctatgagaatctaatgttgctgctgatctggtaggaggtggagctcaggcagtaatgttcactcctcggccgctcacctccagctgtgcaaccaggttcctaacaggccacagaccgggacaggtcctgggcctgggtgttggggacccctggactgtacaggattggagaatttctttagaaacatatttccacctccccaaacaaacaacaatgccaaaaagaaagaaagaaaaaaaggtattctgaagtgaatgcataatgatgagccggaaaacgattcgatccctgaactcaaaggtgtgtgcctttggttcaggggaaagtcttctgactgggagaatcagaagagccagtcctgtcccagccatgctcctttccagctgcctgagccacttctctctgagtcctcctttcctcatctgtaaaatgggactaataattccagccttacagattgtcttgtggaataagtaaaataaagcgtgctaaggggcatcttcttatactgtggatttggctgctaagtgaaattgatcttggtctgatttttagactcaactctaaatattttctgttaattgtgatttaagaactaaacatgtttataagattccctggtctgggaaaaagcaaagcaggacaaaaacaaacaacaacaacaaaaacaagcaaaacaggaggaggcttagtctactataaaaagaaatgggtcagttaagaggtgagatttgcattcttacctcaagaacttcaatatctgaattgacgaataagaatttgtgtggattggacagaggaaatccttgctgcaattttgctaaaatatagaacaagacgtaaaacaattgggcacaagcacagaggttttagcaagctttttagtaagagactgactgacagcttgctttttttttttttttttgagatggagttttgctcttgttgcccaggctggaatgtaatggtgtgatcttggctcactgcaacctccacctcccaggtacaggtgattctcctgcctcagcctcccgagtagctgagattacagatgcccaccaccatgcctggctaagtttttttgtatttttagtagagacagggtttcaccatgttggccaggcgtgtctcgaactcctgacctcaggtgattcgcctgccttggcctcccaaagtgctgggattacaggcgtgagccactgagcccggcatggacagctttttaatagttgatcttttcattctccccggttccatgtttgcattctctctgatatgtccctagaattttcctggaagaattgctcattaatctgtgattaataaaaaatgcacctacaattatgttcatttggacagtagagaaatgctgtccatttttagcctacccgatgtatattttgaaaatacataattagtgggtcttgagaacattttggtgtctaatatactgggccagactccagatgctgcagtttatgaacaactgctgtgcaaggagaaggcccaggattgtcattcatgaaaactgtgtctatccagttagtggtcctggcataagaaccacggagatatcccgtagggaaaataatctcgtttccggttgactggaaggagattctttactgcctaaggagcatggtttcaatctccttaactcaaccagagttggccgatcttgctgagtttgcaaatagaattgctaacagggcttggacctagaataactaaatgtgccaccacagcattgatggtacaaactttgcaaattctgacgctggcctggattcatgataacatgatagaagtacaagcttcagggtggaaagtcccaaacaatccccagtgcagccgatgcagatgttaaatgttagccgatgttacagtcacattgttttccaataatcccttaccattggccagtgggaggactccaaagtgaagaatggacgatagaatattttcaaacctcaagacctaaaataaaagaggaaatagaatcaattggcagatcgggctttttttttttttttttgctttgttacccaggctggagtgcagtagtgtgatcatggctctctccagcctcgaactcctgggctcaagcaatcttcctgcctcagcctctcaagcagctgggactacaagtgtgcaccactacacctggctaagttaaaaaaattttttttagggacagagtctcactatgttgcccagtctcaaagtcctgggctcaagcaaacctccaatcttgaccttccaaagtgctaggattacaggtgggagccaccacacctggccaatcatgggtgcttcgaaagtaccatgcctggtttggatgtgtactttcccagaacttcttaggctagaaagcaataactaggatcttttcagagggataatagctttgtagaaaatcatattacagggttttctaactttttccctcttgaggacagacacttctgcttccctctacactggattttggtgatagcaaattcagagggactacatggtgccagcaaatgtggcagctcaggtatctaccaagacagtcaagaacaactattagatttcccaattagcaatcttccctttacttactgggaatctcggccacaggagttcccttgtgttacatcacgctccaaagctattgccatccccagaacacccaatttttcttttttttttatttaaaaattttttttttgagatggaggctcactctgtcgcccaggctggagtgcagtgggtatgtctttatcaccattgtgaaaatggacaatgggaattcacttttgcagttgggacctcagagtttatgtatgaaactattatgctacactgcctcttgacgtaaaaatgacaataactgaaataattaccgtaaatatgaaaacacagaagtgacaataactgaaacagttactgcgaatatgaaaatagtggccactgttcatttaatgccttctatgtggtcagtgtgctaagtgcatttcatatataatctcagctaatcctttcaacaaccccaaggttgtaatttcagctcccaactacttgcactgcctatcctgatttctttttctctatagtatttcttttagtaaacactatatttgtttgtttgttgtatgctactctcagcctgtcacacacacataagcacagtcacacacactctggaacagggtttcccaggagtggcactcttgacgttttgggatggatcattctttgctgttgggagctgtcctgtgcactgtgaatgtgtagcagcatccctggcctctacccaccaagtgtcattagtatgtctccttccatctcaggctgtgacaaccaaaaatgtcttcagacattgccagatgtccctagctgagaatcactagttgagaaccactgctttagaatgtaagcgccttgagggtagagattttatctgttttgtctagaacagttccgggctcaataagtatttatcagtaaatgaataccgttaatactaataattaacattatgtagtgctgcccatgaactaggcactattctacccgggcattctgacaccgaaacccacttaacttctctatgatagtgccatccatgaatgtatgagatagtgatttagctgatcttcctgaagcttgagggaagggggattccaagtcacatgttggggtatcatcttccaatcagaaagtcacaaggctgggaacccccctcccacaaaggtatccatacaagcagcattgacctaattttaggagatgggcagaaagtgttcaaagagtaaacctaatcatggcttaataatttacatattcctttgggatatgtaactctatatgtctcgtctataactctagaggattattttattgagaaaacaggcattccctgagaatgcctgtttttctagcattatacaatgtctcaacagtcttttgagtttttaaaaaagtatttctgcataaataaaagtaaactgtagagttcctctcgtgaatggttaatgggctcaattgatgagtagctacataaagaatttcaaagttaagtcctacaattatggaggaatcaaggactccaagtcacagaaaacaattaattcgctattatatatagtaggagaatcctcgttcttccagtgcttggtaaccccaagagctcagattcctacctcaatgttgctgcgattggactctggcaaagcaaggcggaatctaaaagaaaacaagaaaagtttaaaggatttgaaaacaacagccttagtagaaagaaaccaaaaagtaaaaggatattttcagttcaaaagtcactatttaaaaaaaaacacacaaggctgggcatggtggcccacgcctgtaatcccagcattttgggaggccaaggcaggcagataacttgaggtcaggaatttgagaccagcctggccaacatggtgaaaccctgactctactaaaaaaatgcaaaaattagccaggcatggtgacatgtgcctgtagtcccagctacttggaaggctgaagcaggagaattgcttgaacctgggaggtggaggctacagtgagccaagatcatgccactgcactccagcctgggtatcagagtgagaccctgtcaaaaaaaaaaaaaaaaaaaaacagataaaaataaaacacacacacacaaataaaactgggaagacatcgagttctattacatcttctacccctatattttgctgcttaagaagcagagcaggaatagtttagggcttggatttgtaaccagggtgggttccccaagggcgtttgctacacggaacttaatgttggcaacttggaatgtagaacaatcttaagaaacagttttggccgggcatggtggctcaagcctgtaatcccagcactttgggaggccgaggcgggcggatcatgaggtcaggagatcgagaccatcccggctaacacggtgaaaccccatctctactaaaaaatacaaaaaattagcaggacatggtggtgggcacctctagtcccagctactcgggaggctgaggcaggagaatggtgtgaacccgggaggcacagcttgcagtgagcagagatcgcgccactgcactccagcctgggtgacagagcaagactccgtctcaaaaaaaaaaaaaaaaaatagttttcaggtttctggctctgaactcagcctcagccttgtaacttccctgagcctttataatcccagtctacttgacactaaattctatgaccagtctaggccacacccatcagaaagccacatcactcacaccatttttttagctgttcaatcgttgcagataagggaagcattagctaagaaagctatctgatgtgaaaggtacagtataattgttagtaaccccatttctgcctcttcttaactctgtagatttacttaatctctctggatcttaattttctcaactatgaaatatgaataagaatatgtgaaatgactatagttaacaataatatattgtgtagtttcaaatagctagagggaagatagaacagcctcaacacaaataaatgacaaatgtttgagataatagacacgctaattgccttgatctgatcactatacattgatacacattgaaacatcactaggtactccatgaatgtaaaattacgatatgtccattaaacaatacaattaaaaaagaacaatacctgcctcgcagggctgtagtgaaaattgaatgaaatgatgcacataaaatgcttagaactgtgcctagcatatccttatcactctgaatatgagccatttttattaggaagagaaatgctaacagttataacagcacataatgtccttgatgttctttttcaaatatcaacagagcacttgctgtaggtccaagtagaagggagtcctcctccctgacccctctcccagcttggtaaggctgagtgacagcgtgtcctgttgcttgatattttatgggaattttcataagaaaactcaaggtcaacgttgtctgtttcccaattttgccaagagctgatccataagtagtcctcccaatatacacagttgatttttctatgcaataataatgatactatgaagaaatagtaatgaatagagaagactccttcattttgcagagggagaaactgaaggtcaaagaggagaaatattaacggcagatttgttactgggactcagatctcctgatgcccatcccagagctctctttttcgtatcttgcttttcctcttagctttctatggctcacttttgcccaggtctagagccctacttctgcatcagccttctaacaaatctccctgtttccactattgaccctttccaatccatcttctacaccatccccaggggaagctacgttacaggcatgtctgatagagatactctcctgatcaaaattcttgtattcctaggattgagtacagaggtacttaatgttcacttattcattgattgggtcatccagcaaatatttattatgtgtcagcactgggacaggtgctagagatagcagccttgtgagcaaaactagacacaaccactgttctcatgtagcttaccacctagtggggtggcaatcattaatcaaatcatcccactaattaaggtttaattacaattgagataaatgctcttaaggaaagaaacaatttcgtggagtcaaaatacaaagaggaacttgatttcatttggtagatgtaggaaggtttccaggggagggctgcttgagctgaaatatgaaggatgaataagattcaaaaggcagaatggggaacggagtggggagggttccaggcaggggttgcaaaagccccacggagggaactgagagctgggagagcacagcagggcgatgcgagaggcagacaggattgactaggctcagtgcctctggctgtgttacgattttcattttttatcctcagagcaagaaatccaatgaaggttttttaagaaaggagatgatgtctgtgttttataaagatcactctggctgcagcatggagaaaagaacagcaggccaacaggttacccaggtgctcattctgtgctcaggaatgtgcgaggcaatgtgaagaatttaacctctacctataattatgagggatggagagaagtcgtttgtagaaggtagagaacaacacaaagcaaggtatactcaggtgcttcttcatgggtttacacaccatacagacttgctgcagagactctaaaaagggtgtgaagctgggcgcggtggctcacacctgtaatcccagcactttgggaggctgagacgggtggatcacctgaagtcaggagttcgagaccagcctggccaacatagcaaaaccccatctctactaaaattacaaaaattagccaggcatggtggcacgtgccagtaatccccagctactcgggaggcagaggcaggagaattgcttaaaactgggaggcaggggttgcagtgagccaagatcataccgctgcatttcagtctgggcgacagagcaagactacgttttgaaaaaaaaaagagagtgcgaaaagatgaagaaaccagcgtaggctagagttgtgtgtgtgtatgtgtgtgtgtgagcatgcatgtgtatgtgatatggggcatatcatggggggaaaacaagtttccctttgagagaagactctgtacacatctctagcatgtccttggcacccagtactgtttctcccaccaggctgtggactgggaaaatagaaaccattgtccttctgtgttaaaaacagtgcaaagcacataataggttctcagtaaattcttactgaatggatgtgtggataaatgagcggatgaaggacatgggttggggagtgtttgttggaattggggtcactttgaaggtgagccagtctaaagcagaatgttcattttagtgagcttaggaagataaggttggccggcttgagaagtaggaccagtggatgaagagcttgaaaacctcagacggtggatttaatccaatgatgaaaagttttaaagggaagaatgtgttgaacccattccactattaaaggacccttttgatgagtaagagttatccaatgtttgaatttcattgtttcctgcagcctggaaattctggaagaagcttccatttggggtttcctcctctggcaggggctaccccactgtggcattcttctgccatggcttcaagagtagttcagaggaagggtggagttgggggggtcagcccaggtgccaagtctgagctccactgacttgtccatcattgggaattgtttatatgcccaagcttgaggagtagagttaggtagtgattccatctgcttgtagtcagctatatttgcattctctcgctatgttgcttgggaggagttgtagggtgtgggtgtgtgtgtgtgtgtgtgtgtgtgtgtgttgtggatgtgtgttgatggtggagttcaatttggagtgtccaaagtctcaatcaatgcaatgtcaaaaaaaaaacaaaaaaacctcctaagttatagatggctcaacagtaacgtacatctgattgccttgagctttgcatgggattaagaaaagagggttagaattaagtgatctggatgaagaccaaaaaagggaaagtgtcatttaacttggcctctgaagtaatctaaaatatgtctactatgtgggccaaactgtactgaggttgcctccaaagagaagtatgtttggaacaactctcaattgtaaatagagcagtgagtctggtttaaaactccacagctttaaaaaccatcctgacttgtcatgtctcttgggatcagtttctccctgttatttggtcaaaatttgatcttagaatggggaaaaagaatgaaatactagtactactaggaacaaatatttctggatcaatgactatatgctgactgttgtgctaagtgatttacatacattatctcatccacccatacaacaaccctatggaggggtgttctgttttgctaatgaggaaactgatacttaacgaggttaagtaacttgcttaaggtcactaggtagcaagtggcagaggtagaattcaaatccagatatgcctgactccagagactgtgctcttaactagacatgctcaaagagttcaagtgtattattagaattgctagttttttactttcttcaccattttctccccttgattccttgatgcggtgacaaaagtgctgtgtgtttttttctatttcagcacaaccagttccagtgttttctctttcttttatcaatgctgaatattgaaaaagggcatgctgcctgtttcaacttagcgtgactccatgcttatgggtttcctcttccaggcaagggtataaaggtatttatttcctaaatcttaagtgttattttctttcttcttcttcttcttcttcttcttctcctcctcctcctcctcctcctcctcctcttcttcttcttctcttcttcttcttcttcttcttcttcttcttcttcttcttcttcttcttcctcttcttcttcctcttcttcttcctcttcttcttcctcttcttcttcctcttcttcttcctcttcttcttcttcttcttcttcttcttcttcttcctttttttttgagacggagttttgctcttgtcgcccaggctagagtgcagtggtgtgatctcggctcactgcaacctccgcttcctgcattcaagcgattctcctgcctcagcctccagagtagctgggattacaggcatgcaccaccatgcccagctaatttttgtattattagtagagatggagtttcaccatgttggccaggctggtctcgaactcctgacctcagatgattcacctgcctcggcctcccaaagtgctgagattataggcgtgagccaccacgcctggccttgccttattttctaagtcaaagctcttcactacatcaaaggcagtatactgtggtaagtaaatactcactgctttgaaagcggactcacccaggttcaagttctggctcagccattcaatagctctgtgaccttcagtaagttatttaatctctacaaactgtaaaatggggataatagtacctacctctaggaccgttcatttaatctactgacatttattgagcactgtgccaggccctggagacacagagttgtaagatttaaaatgaaataatagaggtgttgggcttggcacaggacctagtagatgacaaagatccaataataaacaatagccatgaattatacaaaaaaggactatttcttagctatccatgggcaggatacaggggagcgaagtgtattctgaatcaggggactctggaaatgatcttgtacgattgagcacctccttgtcctggctgaggctatctctaaatttgaaatcatagtcaaagccaacagctaagaaatagtctttttttggtacagttcatgactattctttattattgggcctttaccgtctattaggtcccgtgccaagcccggtgcctctgtcatttcatttaaaccttacaactccgtgtctccagggcctggaacagtgcacaataatggtcaatagattaaatgaatggtcctggaggtaggtactattattcccgttttatgctttatggagattaaataacttacacccaagatcacagagctattgaatggcaaccacacactttacctgtattaactctcatacttctcacaaccttctcctgaagtagtctttattacaccattttacagaggaggaaatggagtccaagagaggttaagaaactcgcctgagatgccagagctaattagtggcagcactgggatcagaaccagaccagctagtctgactccaaagcctgtgatcctacagtctgtctagaccaccaacacggggtttgtctctgatttctgtatttgctgtctatgcagccagccccgagcagctccaggaagaggcacattcaggcaggggatagttagagaggccatgttgttctggggagagtaatttggagcccccgtgttccctggttcttctcagggatgttccactgatctccacccacttgatccttttcctgctgcatctctctgatatcacccaagaccaaaccagctcatcttgaaaagcctggggagcccaggagtggaggagccagctggggcagcctgcatgggaggcagggctagggatcctactgccagagcccagggctgtcatttcaacacagccttggctcctctgcaaagtcttgcctcctggtttggctgctttaaacctgagtgaggcccagcccacctgccttgcccccagcctgctcactgcctgaggtttgctataacaccccatgcaggagacaccctcacttgtgcttagaagccccctgtgcttggtttaatgccttgccatctctatcttaaaattcttgaccaggcacggtggctcacgcctgtaatcccagcactttgggaggccgaggcgggtggatcacctgaggtcaggagttcgagaccagcctggccaacatggcgaaaccccgtctctactaaaaatacaaaaatcagccatgtgtggtggcacacgcctgtaatcccagctacccaggaggctgaggcaggaggatcactggaacccggggtgcagaagctccagtgaaccaagatcgtgccactgcactccagccctggcaacagagcaagactctgtctgaaaaaaaaaaaagaaagaaagaaaaaagaaattcttaatccttttgaaaagaggctctgcattttcattttgcagtgggccctgcaaattatgtagccagccctgctcagacccagctaaggcatcagagcaccagaagtctgcccagcggagaatttccaggagactgctgggcaacagacaacaagccagaggtcctaatttcagggttcatgttcatgaggtcaaagaactctgtggactgtaggaagccaagagaatgaattcacacatttccgggatgatgtaaatttatcggcttaaaacagttttttctattactcccataaataaacataacagccattgaacgtgctgttgcttactagtattatagaaacattagagataaggctcagtttgatttaagcagaaaagtgaacctggtctccatgcttcttaaagtcttttgcaccttcttgccacaaccctgaagttgaatcatgattaaattcttccttgagatcctgccagtaaaccagacacctgctcagatgcaagtgttgtttctaccttctctaggaaccttctgcctcagttagcagccctgcccctgtgccccgccccgcatcactccccatttccagcctttcctttcctcctggttctttcctctttgtttcccaacagactgagcatcacggtcccgatgctcaggcaatgctatccagattctctccttccttccgctcgtggccgatctcagatgctgccaatttctcacctttggttccttcccccctcaccctcatgctctctggctttcatcctctgtattagaactgccaaatatcacacctgtaatcccagcactttgggaggccaaggtgggttgatcacgaggtcaaaagatcaagaccatcctggccaacatggtgaaaccccgtctctactaaaactacaaaaattagctgggcgtggtggcgtgcgcctgtagtcccacctgctcaggaggctgaggcaggagaatcacttgaacctgggaggcagaggttgcagtaagcccagatcgtgccactgcactccagcctgggtgacagagcgagattctgtctcaaaacaaaacagaacaaaacaaaacaaaaaagaactgccagataaagatcactcttcatggttcagagtttcatcagcctgattccctggaaatggggtcacctcatgacttctggaggcctgaggcacttttgtctttggggacctttcttctgttaaaaaaaatgaaaattatattttataactatttgatataaagataagtatgatcaagtctaaattgtattcatttttaaaaattattattttaaaatacattaaaacgtgtgtgtgtgtgtgtgtgcgcgcgcgtgtgtgtgtgtgtgtgtgcttttggacagggtcttgctctgtcgcccagattgagatcatagctcactgcagcctcgacttcttgggctcaggcaatccattcaccttggcctcccaaagtgctgggattacaggtgtgtgccaccctgcccggcctctcatgggcttttaaagtattgtggctctaggcactgtgcctattgtgcctaaaggaagctaatgaagaagtcaggactgctttgaagggcttggtaaatgcgagtaaaccttcgtaaaaccttttctttctgggaaaccatactactttaaacaaacaaacaaacaaacaaaacattgtatttctgggcatggtggctcacgcctgtaatcccagcactttgggaggccgaggccccagatcgcctgaggtcaggagtttgagaccagcctggccaacatggtgaaaccccatctctactaaaaaatacaaaaattagccaggtgtggtggcaggcgcctgtaatcccagctacttggcgggctgaggcaggagaatcacttgaacccgggaggcggaggttgtagtgagccgagatcgcacccctgcactccagcctgggtgacagagtaacactccatctcaaaaaaaaacaaaattatattccctttgttggaaaaacaatatacttacaaagaaaattttaatgaaaaaagaaccctctcataatcccatatcctaatacaactcttcattttcagttttgtgattcacttccttgtccagatgcaaagctattttcctcttccggatgcaaagctattttcctcttccagatgcaaagctattttatacaattaacagctgttgtgtttgtgcagttttgtattctgttttttccatttaacataattttcttgaaaacattttccatgtttcttttctttttttctttttcttttttttttctgagatggagtctcgctctgtcccccaggctggagtgcagtggcgccatctcggctcactgcaagctcggcctcccgagttcacgccattgtcttgcctcagcctcccaagcagctggagctacaggcgcccgccaccacgcccagctaattttttgcattttcagtagagacggggtttcaccatgttagccaggatggtctcgatctcctgacctcatgatccgctcgcctcagcctcccaaagtgctgggattacaggcgtgagccatggcaactggcctttgtttttttttttttttttttttttttttcatgaagtcccgctctgttgcccaggctggagtgcagtggcgcaatctctgctcaccacaacctccacctcccggcttcaagcaattcttctgtctcaggctcccgagtagctgggattacaggcacatgctaccatgcccggctaatttttgtatttttagtagagatggggtttcactatgttggccaggctggtctcgaactcctgacctcatcatctacttgtctcgtcctcccaaagtgctgggattacaggtgtgagcgaccgcgcctggccattttccatgtttccacaatagacttcataactaccacgttgacttgtgattgatttactccccctctgctggtttctcagatcttttctgactctgcttacgtctgtttcattgcttccttttcttccatacatttagtctatgccgtctaatctttctgtaaattctccccccaggtagtctgatggatgacttcaactaccagctttatagggctgaggaaaatgggctttgcagacggttctgccgaatggcacttagtggtcaatgatctgcgtctgtggcctgcacatggcctttcaccgtgtgtcacatgcatttgacagtcagacaggccatggggaagatcttgttaacttctctgttctagtaatgggatcagatggtcagagtctgaaggtaccttaggcatgatccagttcaacttccttatttgcagataaggaaactgaggctcaaggaggttaacagactggatcacagtcatagagcctgtgaataaggactggaaacttggttccttaactcccaaagctttatgctctttcctcactagcatgctctatgaatttgataaagaagaactgaagtttatattgctgtaccattagaatgtacacttctattacagaattatatatatattctttgtatgtttatataaaataaataaaaataaaatataggaaataaatataatatataaaacataatatattttataaaatgttttatataaatataaaaatatatttattacatatgtaatattttatgtatttaatttgtatatgtatataaaatatataatataaaatatgtgagagagatatatttttttgagagacaaggtctcattctattgctcaggttggagtgcagtggcacgatcatagctcactgtaatctcaaactcctgggctcaagcaattcttccctctcagcttcctgagtagttgggattacagcggtgcacaccacgcctagctaatttttaaaaaagcttttgtagagatgaggtctcactttgttgcccaggctgggctcaaactcctggcctcaagcaatcctcccactcccaaattgctgggattacaggtgagagcctgtaagatggcacctgaccatattacaaaattatatttataattattttgttccctattttatttttatgttactataatggaaaaaagaaaagcttgacagtaccatttttagtaaagtacatactttaaagttatctggcccattacaggagaggtgcttaactgactcatgttcacacaatggttaacgtccctttttttttttttttgagacagagtctcactgtcacccaggctggagtgcagtggtgtgatcttggcttactgcaacctctgcctcccgggttcaagcgattctcctgcctcagcctcctgagtagctgagattacagatcacttgttttcttaatggtcactttgtctctgatcagttgactcacttattactaaggtgccccaacagtcaaattgattgatcttacctgttcagagacaaggagcagaccagtctttgtcccaaaataaccaggccaacactggtactagcaacctatagacaataaaagcatttattattaagacgagtgagtgtcaattttggccatcagtataatttccaatagttgaaacattataagcccaacattcccccttagtgtaaagacattggaagtctaaaagacattggaaatacagacctctgaaaatcctgtcttgtagttagggaagctacctgcaaagactttttgtttgatgatctcctttgaattttttttttctcctaatcgctcttctttatgtatgtgtgtgtatgtgcctatgtgcgtatgacatttttgttaggtttattatgtccttctatcagattgcatttggccttcatttgctcaagtaaaaatgaattctaccttgattgacttatttagattaaaaaaaaagagagaattccagctgtccatgtaactgaggtaggtggtgggaagagcgtgcatgaagtagagactggagagattttacaatgtatgagagtgtgagtgcttacctcccatcctgccacacatacccttccctcaactctgacctcactgagacagggtcttaccctgttgcccagactggagtgcagtggtgcaatcatagctcactgtagcctcaaactcctgggttcagagcaacacttccacctcagcctcctgagtagctaggatgacaggtgcacaacaccaccacacctggctaattcaaacaatttttttttttttggagagatgaggtcttgctatgttacccaggctggtctctaactcctggcctcaagcaatcttcctgcttcagcctcccaagacactggaattataggcatgagccatcacgtccagcctccatcctcactcttaatcaatgtagcatccccaccctcttcaaacgtttaaaagctgctggccaacagtccacagcaggagcaggattggcatctacaggctgctccactgtctccccagacttacgaagtccatggaaacgatggtttcaactgtggagttcttgggttgggtgagcatcatgatggaggcagggatgtccagggtgaaattgcctggttgtagattgattatgggaggctctgtggccatgatcctcaccatgaagggctgggacaagatgtagatctctgcaatctgcccacattccgagaaagaaataaagattgtgaggcgtgagttggtgaagggagatcacaaggttaggatggcctgtggtgactaaatcttacattgtgcagttagaatagaaaaaaagctctttaataatcataattacacacaaaaatcaaacgatgataacagttggcagttactgaacataatacttgatactacccactgtgccaggggctttatatattatcacatttaatcttcagaaaatccctgtgaggcagattctatcagcatccctgtttcatagtggagaacgtgagtcttacagaggttaaatgatgttctcaaggttctaggggaataagtggtagaattgggattcaaatctaggtctgggctgggcacagtggctcatgcctgtaatcctagcacgttgggaggctgagatcggtggatcacttgaagccaggagtttgaaaccagccagggcaacatggagaaatcctgcctctacaaaaaatagaaaaattagctgggcatagtggcttgtgcctgtagtcccagctacttgggaggctgagttgggaggatcacttgagcaggggaggcggatattgcagtgagccaagatcgtgccactgcactccagcctggatgacagagcgagaccctgtctcaaaaaacaaacaaacaaaaacaaatctaggtctatctgactcaagatccttgctctagaaccaggatgctacatgaacatctctttgtcctcaagggcaatccctagcccgtaggttcattatgttcaatacttagtgtgctacgaaggcacaatattaacagttgctttttactacagttacaagtgtgggcactaatccttcatttaagaattgaatccttcatttccactaataaatcctttatttaaactaattatttcaagtatgatggaatattgtggaaggcacggtgatttattttgtgaacttacaattatactctcacttgtatgttaattgcactttaaactgtactgttcagtaaatatttgtagatattcgattacgagaaaaaactcccaataatagacagagggacttatccaaaaaggaatacgtagaacccacaagtcttccagaagtaattgcaatggagccaaatacactatcaagactcaaaccctgagcacttacccgggagagcacgttgccaaggccttgagagttttgaacaaaatggttggaaatctggaaaataaagcccattatgtcactgttaggattttacgtggattgtcttttcagggaaaatgtagtgttccctataatttgacgaattgtgaagctgttacaccataaaatattcagtgtttaaaggtgacctatcattttatagcccaatcatagggaatccgaggctcagagaagtaaagtgacttgcccaaggtcacacaggatgttatatttcttttaactctgggaacaatacagtctattgttaataactgtagaatgtttacacatgaattgtacgtatgtagtacaacaaagttttagttatatatatatatatctatatgtacatattctttatttttatatattacaacctatctatgtgtacatattctttatatatatattacaatctatctatgtgtacatattctttatttatgtatattacaatctaatgtgtacatattctttatttatatatattacaatctatgtgtacatattcttcatttatatattacactctatatgtacatagtctttatatatatattacactctgtgtacatattcttcatttatatatattacaatctatgtgtacatattctttatttatatatattacaatctatgtgtacatattctttatatatattacaatctatgtatacatattatttatatatattacatctatgtgtacatattcttcatttatatatattacaatctatatgtacatagtctttatttatatatatattacaatctatgtgtacatattcttcacttatatatattacaatctatctatgtatacatattctacagtcattaacgataagccttgtgttactgtcctcacttttagggattactgagatactggatgcttaaggaatttaccttcagagataaatgattttgaagtctgcagctagaagtgtctaattctcagtatcgtaagatagccactgctgccatacttaccattctgaacataagctttatacctacttatataattaaaacatatagaatgaggagattcaaaaagagatgctcaataaaagtttttggttgactggctagagacagtgctgtcattataaaagggaggtgcatgacagaggatcaatgaatatctgtattattactgatcattgtagataaaccagctgtaattacaaccaggataactttacgtcagcataatacagggaataatgatgacaatgatgataagcaacagttatatcgcacttattctgtgttggggattggtctgaatgcttgacatgtatttaaatcttttaatgcccatataaactctatgagtaaggaactattattatctgccttttccagatgaagaaattctggcccacagaagttatataaattgaaattacctctaaggtcacaggcaatacatgatggaaagggatcttgctattattggagattaatctagaacagtggtgagtggtgaggtattagcagaactggaaacttgacaactccccaactaatacaggttgaacattcctaatctgaatatccaaaattcaaagtgccccaaaatccaactattaaatgctgacatgatacacaacggaaatgcttattggagcattttagattttggattttcagattagggctgctcaaccggtaagtatatataatgcaaatatcccaaaatctgacaaaatccgaaatccagaacacttctggtcccaagcattttggataagggatgctcaacccgtaacaatgttcactccacaattccctcattccttcactgtcttgctgggagtgatagcctaaaaaggtcccagaatcgaaattgtggcataaaagttctacaataggatacttataaaaaggctgaatgatggtgaccattgacatcctcagttaactctcctcacctcttcggtggagagagtgacattgaaaaccccagctgtgaaatgagcaaaggacgcagatttaaagaaatactcggcgattccaatgtagagcatggagttgctgcgttctgggagcacaaaaggaactggtgagaagggggggtcggtgaggttttccagtgggtagaatacaccctgtgggaaaagagagagaaagaccagtgtatcaggtgaaaactcaaattctaagaagactaagaagatggaccctctgaagtcagaataagaattccagaagctcgggccaggtgtggtggctcacgcctataatcccaacactttgggaggctgaggcgggtgaatcactggaacactggagtttgaattgattgaatgactgtttttccatgatcaacctgggcaacatggcaggccccgtttctataaaaaatacaaaaattagccaggtgtggtggcgcgtacctgtagttccggctacttgggaggctgagtgaggtgaatcccttgaaccagggaggttgaagctgcagtgaattgtgactgtgccactgcacttcagcctccagcctgggtgacagagggggaccttgtccaaaagaagaagaggaagaggaagaagaagaagaagaaagaagaggaagaggaggaggaggaggaggaggaggaggaggaagaggaggaggaggaagaggaggaggaggagggaaaagaaggagaaggagaaggagaaggagaagaagaagcataagaagaagaagaaaaagaagaggaagaagaagaagaagaagaatcctagaaactcagtaatgatgaaaaactgttaaggctttctgactccttgaccagtgactatttttcaaagctcttaggattcttgagcatatttaggtgtgtctgtttcaccccagggtgtaacccaatgagaacccttgtttgaacttttctaagacaaagaaggaggtgtatttagctggaaggacaactctgagtaaaagcacttcctgaggtgccatgtagtggtgtcaaacacttgaccttcaaaatctgtgtctgctgagtacctggggaatcatagaaagaagacccaagactccaaatggtttaaggcatttttgtagcatttctagcactgctctcattagctatagggcgttattacaaaatattgtcttgtccaacactgaactgagttgaaagactctggtgagtgaaatatgagccaatatgcattttaaaagacaatgatattagctttggggcaaaatgaaacataaccacaatgattgtttttccatgatcagtgaacactaatgccacgtgcttatggccctgacagaggtcagcagccctcagttaaatccactaacctgaacacttaggaatggaagtgccaacgtgtaccagctactgatgtgtttagttccaataaatgcagactgctctacttgctgcctcctagcctcaaacctactcctaggggcaaagacatatgatccttctcctgaagagggcagacatatgttgtacaatacaatcatttgcttatcaataaaacgttcaagagtcttttgaaaaggtgtaaacatgaggcagttgcttgaaagaaaattaaattattccaagagcatgtatatagatttccttctgtacagaatcattgttttttgtttttgtttttgttttcattttgttttgtttttttgagatagagtcttgctctgtcacccaggctggaatgcagtggtatgatctcggctcactgcaacctctgccttccaggttcaagcaattctcctgcctcagcttcccaaacagctgggaatgcagctgtgtgccaccacactggctaattttttgtgtttttagtagagacggggtttcaccatgttggccagcctggtctcaaactcctggcctcaagtgatccacctgcctgggcctcccaaagtgctgggattacaggtgtgaggcaccgtgcccagtccataatcattgttttctaaatattggctgttgacagccaggctgaggattctgatgatgataaagttaccttcaagttcaggtcaaggtagttctcagtaatttctggagaactgattagggagtaatccagcagagtgtagttgtcaatcttggttaaaactaaataaccaacaaagaaaaaagaaaatccatattcattaaaggcatagtataatatatgaatgatgtctatctagaacaatataattttaaattctctgtttaaaagatcaattcctgcttttcagaagtaatacatgttatcttttgaaaacccaggaaaagtagataaatcaaaagaagaaagtgaacattttttccaagtgtattactctgagagaagcatcactaaaattttggtgtgcagtggtcccccttatctgcagggcatatgttccaagaccccagtggatgcctgaaagtgtggacagtaccaacccctacatacactgtaataaaaggaatgtgaatgtgaatgtgaatgtggtctctctctctctctctcaaattcacattgagatattaaatatttttaaaccacggttgaccacggataactgaaactgcagaaggcaaaactgcagataagggaggactactgtatatctttttaggtatacacacatacaaacacacaaaatgcatgtatagttttgttttttgttttttgttttttttgagacaaagtctcactctatcaccctgactggagtgcagtggtacaatctcagctcactgcaacctctgcctcctgggttcaagcaattttcatgcctcagccttcctagtagctgagattacaggcacccaccaccacacatggctaatttttgtatttttagtagagacagcgtttcaccatgttggccaggctggcttcgaactcctgacctcaagtcatccacccaccttggcctcccaaagtacggggattacaggagtgagccaccacacccagccctatatagttattttttaaaaaggaaattagtacaaacacaaaactcatatcaatatttagagatatgtattggcttggtataatgaaagactcttcagtttgatgttataaattgcagttagaacttttttttttttaacaaggagtatgctttactgttgtcattagaaatatttttagaaacagattgtgtgagagaaaataaagtccactaaattggagaggccaaggagattcttaggcacagtgctgctaatccaaataattttatgtattatcattttcagaataaagcagaagtcaaggggaccagggtgcagtggtgggtgaagttccagaaagcacagattgggctgggtgtggtgggtcacgcctgtaatcccagcactttgggaggctgaggtgggcggatcacctgaggtcaggagtttgagaccagcctgaccaacacggagaaaccccatctctactaaaaatacaaaattagcaaggtgtggtggcacgcgcctgtaatcccagctacttgggaggctgaggcaggagaatctcttgaacccaggaggcgcaggttgcggtgagccaagattgtgccattgcactccagcctgggtaacaagagcgaaactccgtctaaaaaaaaaaaaataaatgaaagcacagattttagtctctgaagctagttgtatgtgcagtgactcagggctcaggtttcccactcggctttggagagctgctttcctgaccaccattatgtgttctacaatatgaagacctactccctgttctagagaaagttacctgagcatcatgtcttctcttttcttgcatgtcatagatggagatgaaaagcaagaagagatgaagtatcttgctaagataaaggaataatattatcctaagccaccatagtttttattttttatttttcacttttttttttgagacagagtcttgctctgtcacccaggctggagtgcagtggcacaatcttggctcattgcaacctctgtctctcgggttcaagtgattctcctgactcagccacccaagtagctgggattacaggcctgcgccaccacctctggctaatttttgtatttttagtagagacagcatttcaccctgttggccaggctggtcttgaactcctgacctcaagcgagttgctcgcctcagcttcccaaagtgctgggattacaggtgtgggccactgtgcctggccattgccacagtttttaaaatactttcaagttgttactctgagggacagcaatcatttcacagatgtggtgagtgaggctcagaggtaaaggaacttgctcaaggaaagctagaacatggtgatccttggctacttctttcctcactacatcttgttttccttccctacatctccaatccattcattttctttcatccatctgcatccatttatcagtctaatatatatattttttgagacaagatctcactttgtcacctagactggatcttggctcactgcatgatcttggctcactgcagcctcaacctcctgggctcaagtaatcctcctacctcagcctccctgtagctgggactaaaggcgcacgccaccatgcctggctaattaaaaaaaaattttttttatatagaaacaaggtctcactatgttgcctaggcaggtcttgaactcctgacctcaagcaatcctcccaccttggcctcccaaagtgctaggattacaggagtgagccactgcgcctgatatttcttaatctaatgggctaggtgctgtgcctgacgctgggggcacagcggtgagtcaaagttcctgcacccaaggaactcatagtcttggggagtagacagatatatcaacaggaaattataatacaacacagcaaaggctgatctaaactgggctcctgatgatcctgctacaaacttgttcttaggttctttcccatctcaataaatgctaaatcccttcttccaattttccaattgcttagggttttacccaccaaagtcacccttcactcttctcctgacctacatttgatctgttgcacaaaaaccactgtcttgaccttcaaggtacatccagaatcccaacatgccttaccatcttcatcaccccaccctaggccggccaccatcattaattgtatgggtcactgcactcatctcttaagtagtctctttgcttttgcccttgacccccttccttcctgtctattttttttagcacagaagccagaccgatctccttaaactgtaagttaagtcatgccggccttactcttcaaaggcatcccatcttagattaagaggtggactttgcagtccctacacatccctgaagatcaaaccatcccctcttccccatctctggcctcattgcctgctctcccccaaccccctgctcctagtgtgtccttctcacagcctccccagcacacttgagatattcagcctcagggtttttgtgcctgcagtttcctcgatctggaatcttcatctagattgagcagcagctcactttctactccctttgggtttttctagtaatgccacctgctcagtggtggctttcctggtcactctatctagaatggaaattcctctccacctcctccactgctttatttttcttcttaccacttatcactgccataacttagattttacttgtttatcttgcttgctgtctgtctcctcccactactcccatgacggcaggtatgtctgttgcctgggaatactgctgcatccccagcaccaagaacagtgctcaggctatttcaggtgctcagcgcgccattggtgaatgaatggatggagtgcaaagtgagagagagatgtccaaagtgtcatgtgagcacagaggaggcataactttacggagtgggggctgtcaggtaaggtttcctggaagaggctatgtctgagctgggtcttaaatataaagaggagggaacacaacatataaagagagatagagaacggaaaggattaaatcctccagggtttagcacagtgctggctaaactctgcaggtttagaaatgggcactcaatatgtatctgttaaagcagcggtcctcaacctttttagcaccagggaccagtttaatggaagatgatttttccatggcctggggttgggggggatggtttcgggatgaaactgtttcacctcagatcatcaggcattagattcccataaggcacatgcaacctagatccctcgcatgcacggttcacaatagggttcgcactcctatgagaatctaatgctgccactgatctgacaggaggcagagctcaggcagtaatgctcagtcgcctgcccactgttcacctccggctgtgcagtccagtttctaacctgtctgtggcccagggactggggactcctgggttaaaggaatgaaaggatggaggagagaggaagctcttccaggcagagaaaacagcaaaagcaaaggcaaggggtgaggagggcagtggaaacagtttgattgctggggcagagaaaggtaaagagaaagatgaagcagagagaggtaagtaggagatggggtgtggtgaatcttgtagtccatgctaaggtgcgaggacttgatgctcagggcagccactgcaggctgagaaccccagaataacctggtcaagatcagtgttaatccctctgaagagaagggatgtaatgtcactgcttgggttcgtgctcgtgagggtttagttcctgaacctacatctcatccccctggagccacccctcttgtggcagtgaagttagttattagccaaagagtacatatgccctaagcacaaggcacatcctcccaagcaccttcccggggctctaatttgcagaatatgaagcaggatggatagctcaagctataccgccttgaaaagcaaacccaggcagtaccagcttttgaaggtaggaagacaaccatctggaaaagacagttctaagactcaccctccagtgtgctgaggttggcatttagcgctttgacttcacttgcaataatgggacagagctggccacaaaggaataaaaagaaaaaagcaagttaccatgttgtactggaaagccttattgatgggcctagaccctgcaaacaaaggccttctggttagcagtcattatccctttggtcatcgagacattctcttaaatttgttgatgtctatgggcctcgctttacgtagatacgggtggtatgtcactgaatgccagctgaactttgtagcaactagcactacatccaatcagccctgtaaagagtgagtgagcccttgtcgtttctttctgtgacatgatagggcatgcgtcccagtccatgctgttatacccgaggaacctgctgctggagctgctgtatctttcctgactgctgggggtgccgccagcttgccatctcctctaggagcggttgcatgccctacctggaatggttagagctggagctttttttttttttttttttgagacgaagtctcgctctgtcacccaggctggagtgcagtggcgcgatctcggctcactgcaagctccgcctccctggttcatgccattctcctgcctcagcctcctgcgtagctgggactacaggcgctcgccactatgcccggctaattttttgtatttttagtagagacggggtttcaccgtgttagccaggatggtctcgatctcctgacctcgtgattcacccgcctcggcctcccaaagtgctgggattacaggcgtgagccaccgcgcccggccccagagctagagcttttactttccccctgggctagttggagagcacattatatcagagatctacttagagatctattttgttgccacctttttggaatttgaaaattagtcttgagtcacattaatatttttaggaaggggcagaggtatcagcactgatgtgcctcttgtgtgctcattgatgtgcttggcatagtgggtacagcacaggcttggctgcctggggccgagggttgaatcccttggcaagttacttgtattctttgatctcagtttccacatctgcaacatttgcatggggatgataattgtgtccacctcatcacattgtgagtagaaatggaagtaatccatgtaaacttgcccagcttatagtaagcattgagtaagtgttagccgttgttagtttaactccatttcaccttcactacagccttgagagggaggcatgacggtcccctaattacagatgggaaaaccaaagcttagagaggttaagtgagttgccaggtgttgcatagccgggatttgaactcagtttacacagctagacagctgtggtctcagcattcttttctatcttccagtggcacagagagaatcacagaaacatctattatctttaagccataaatcaatttcaggcaaacttaattattggcttctgtgacataactcattcttcactggcctcctgtcagaggcaaaaggaccgtgcctcgtttcaaacaggggaatgatcaagtttggggtccttgaggatgacagtgcactttgccagggactctaatatgcacactcattggcactcagcatctgtcaggtaaggatggagaaggactataaggcttctgagtcctggacagctgcgccacctcctgggatgagctgcttgatgcttctgagtgttgatttccttacgactttcattaagcacctataatgtctgtcaagcaccgagctgagcactagagagatggacgtgaccagaccctgtctttgtcccttcttttccagaagagtcttccttcttttctattcctcctcatccctgtccttatctcccccaaaatacaggtaaacggttcagggaaggtgtggtcattattggaaagagagtgcatagacaattccatctttcccttcttcagacactgacttctgagactagaagccttatagctttggaaaggatcttaatatattctattttcttaacttattcctattgtatgtcctggaaatacctcttcttatccttcattccttacatatacaaatcctacctatatgttaagatctagttcaagttctgcatcctgtaaaaattatctcccaggacacttccaggccctatttcttcaaaattttccatttctctgaacctctcctgctcaatctaatgatcgtgtaactgtatactaaattcaagtactcagttagttattgtttcacaagcccgagtttgagcttttgaatacacaagtgtatccctctgtcctattcccaacagatcctagtccatggcagctgagcatgcaataggtacataataagtaaattcttgttggttgtttgcccaccctatggtaagaaatttgagagatgtgctgttgctttctttatctctgcatcccaagcacctaccacaatatttggcacatagtagggatttgagaaactgttattaagttgcaaaggatatttaatgtgtgtgaaagtgccttggatagtgcctagcacacagtagatgctcaataaaggtttcttgattaagaattaattaaaggattggccaggcgcggtggctcatgcctgtaatcccaacactttgggaggccaaggtgcgcggatcacgagttcaggagatcaagaccatcccggccaacacagtgaaaccccgtctctactaaaaatacaaaaaattagccgggcatggtggcgggcacctgtagtcccagctacttgggaggctgaggcaggagaatcccttgaacccaggaggcggagcttgcagtgagcggagatcgtgccactgcactccagcctgggcgacagagcgagactctgtctcaaaaaaacaaacaaacaaacaaaaaagaattaattaaaggatgatagaacttctactaatggcattttactgtggttgcctaacctctaaagactcaccatttcatttaagttctttaaaatgggtttctccatgggctcagcaaaggagttatacagaacactgaggaaaaaaatgaaaaaaaaaaaaaaaaaaaaaagaggttactcagagaccataatcagccatttgtaaaccttccctaggcgatgcctgagtatccagcccctaactagccactgcccaacccagggctctcattcacctgagttctccggaaaatgagacgtgggcatggctcagttgggcgtagcaatcttggagcttcagggtaggatgaccaaagtcatttcgggttaggataatgataccggtaaagtagactccggagagaaacagatcagcccctcctgtgtcttggctgtttaaagaagtgcaaggttatccaagcctgagtcaggcacagagatggatcttgtttctctgattacccagagactctaagctcctggactgcagtgactttgtcatgttcacctctgacttccttgcacctacaacaggtaggagcagagtgggtgctgattgaatattcccagaacagacgaagtactgaatatgtgaaagctaacagctattgggatattctaattatttcaccctgagtgctctggccctggcagcgagtgagcttgtattgagcacccttcatatacaatgtttgtttggggagagaaaagaaagggcaagactggcaacactttattcaggaagggcatagatgaaaaagtgatgcttagatgtagtctgtgaactccttgagggagtggattgtgtgttactcatttccatgtccccaagacttagcatgtggcctgacacagagtaagtactcagcatatggttgatgagtcattgaataaatgaatgaatacatgaatctatgttgctgtggggaacgtgtcatttctctacaatctacaagactggagttctttagatggggataaatgttacacagcaggcactcaataaatggttgttgactgacttagtggaagaatgaatgtgttatcctgtggcaccaaccaaggcagacctaaacattacacccagaacagtgatttacacattgcaactggcctgtaaaagtaccttgaatctgatttcctccttctacacgagggtgcaaaggccttccagttgggctcaggcttaagctgactaccattcttcaacctctgtgtgagggagaaagactccatttcccatcacttactcctgcagatggggaagtgtgttgaatggctggctcaagatcatgcagtgatttgtgggtgatcgaaaatgttgagcatgcatctgtttctctgatagtcagggacttctagttcttaagagaatcttaaatgacatttgatcatatgctctgcctttaagagaagaatgtttttcatcaaaaccccccagtaggatttcctaatttaagcctcacctggaaaaaaatgcttttgagaaagattgttaataatgagggaaagaagcctattgccaaaaacattggtgaatttctacattttccgtttttgctcacattctcccagaacagctgcagacatttcagtggaatactcacaaaagtggagactcgaacccccagtctgtgctgatgttggcagtgccatggttggttagcgctttgattcccactccaggcacaaaagccaatgaggtatttggaaatgaaaaggcactgatttttatactgtaaaaccagaaacaagaagttagggcgactcttccagcacatctcttcagtcaagcaaacttgggaacacagttgcagagctcttaccattgaggccattgtgaactcctacagagaaaagaacctcctgtctgcaaggctgtctctggggaactgcctcctaattctcctcaaactcttaccaggaagtcccttgaatccagttgatgagggaaatgagcaagtttagaaatatatatgtaatttttcttctctctcgctctctttttttttttttttttgagacagggtctcatttgtctcccaggttggagtgcagtggtgtgatcatagctcactgcagcctcgaactcctgggctcaggtaatcctcctgcctcagctttccaaacagctgggtctacaggcatgtgccatcacacttggctaatattttttattttttttgtagaggcaggatctcactgtgttgcccagactggtcttgaactcctggcctccagcaagcctcctgtttcagcctcccaaagtgttgggattacaggcatgagacacctcgcctggcctagaaatatatttgtaaataatcaaacaatctacttgtttagcttatttaaagacaaaaaaaaggcacaacattgccatcattatttttccttcagcagttccagtgtttcacgaaaggggtgatatttgtattttgcacggcccagctattttttttcttttttcttttttttttttgagacagagtctcgctctgtcacccaggctggagtgcagtggcacgatctcagctcactgcaatctccgcctcctgggttcaagggattctcctgcctcagcctcccaagtagctgggactacaggcgcatgccaccacacctggataattttttgtatttttagtagagacgggctttcaccatgttagccaggatggtcttgatctcctgacctgacctcgtgatctgcccgcctcggcctcccaaagtgctgggattataggcgtgagccactgtgtccagcccttggcacagctatttttgtagaggactatcatacacattacaggacatttggtgcatatgccagtagtgtccctccccacctgtcattgggacaatcagaaacgtgccttcctcctatttccaaatgtcctctatgtggacagtatctttgctagtggagaaacttagagagttgacttcccctaggattctctgggctgtcaaaagggtaactaggaggcagtgagttgcatgtaacctgcaaaggtagatggccacatgcattataagaaattattatgaacagctgggcgcggtggctcacgcctgtaatcccagcactttgggaggccgaggcgggcagatcacaaggtcaggagttcgagaccagcctggccaacatagtgaaaccccgtgtctactaaaaatataaaaattaaccgggtgtggtggcatgtgcctgtagtcccagctacttgggaggctgaggcaggagaatcccttgaacccaggagtggaggctgcagtgagccgagatcgccccactgcacaccagcccgggtgacagtgtgagacttcgtctcaaaaaaaaaaaaagaaattattatgaatatctattgagtggttgctacctgccaggcattgtggtaagtgcattacacgcattagctcattttaactctcacagtaatcctatgaggtggttgctgtttttgcaatccccatttcaaagataagaagataaaaaaagtggctgaagtcatatataagtggcagaaccagacctggaaccctcctcagtctgacttcagactcttcaccacgaggctatgccacttcacatattgtgcaaagagtgcttgacttggagccaagtttagtaccagctgtaaaaacttgggcaaggcgcttaaccagattcaatcactcaaaagaagtgctactcacaggtaggggcggggagacaaaatgacttcatttgtgtataattactgcacccaagaaagggattgttgtgaatgaagatgaagaaaaatttaaaacataaatgtgatagctgataagaaacaattatttgctaataatatttcctcttctatgcatcctttcctacctagtctctgtcacgcatcctgagtcccactgtgggaagaggatggcagagattcatttactatatcttggaaatattttcattttgatacatgcaggtctaaccaattctttataactgctgcagagtatttcaaactgtggatggatgtaccatttcaaaaaaatcattcctatgttggtggacatctaggttctttctagcacttctgtattatatacaatgtcacagtgaacatcctcatacatactgcttgtgtacatgtacttctctttttttcttttttgagatggagtttcactctgtcgcccgggctggagtgcagtggcatgatctcggctcactacaagctccgcctcccgggttcacgccattctcttgcctcagcctctggagtagctgggactataggcgcccaccaccatgcccggctaattttttgtacttttagtagagatggggtttcaccgtgttagccaggatggtctcgatctcctgaccttctgatccacccaccttggcctcccaaagtgctgggattacaagcgtgagccatcacgcccagccgtgtacatgtacttctctaaggaggatgctgagcagtggaattgttgggtcaaagagcatacacacacacacacacacacacacacacacacacacacacacacacacatatatacacatatatacacacatatatataagattatatactgtatttttactgtcccttttctatgactagatatgcttagatacaaaagtacttaccattgtattacaattgcttacagtattcagtgcagtctcatgttttacaggtttgtagcctaggagcaacaggctatgtcatatagcctaggtatgtagttagctataccatctaggttcgtgtaaatacaccgtataatgtttgcacaataatgaaatcacttaataaggcatttctcagaacatattcctgttgttaagcaatgcatgacagtaatttaaaatcttgtagtaatcacattttaaaaagggaaaagagaggtgaaattaattttcttaatatatttacttaagccaatatatgtaaaacattgtcatatgaatatgtaaccaatataaaaattactaatgagatattttctttttttaaaaaaataagttttcaaaatctcgtatgtatcttatactcatgatacacctcaattcaaacattggattttatgagagatactgacctatatatgtttagcatcccaaatccaaaatttttaagtgctgacatgatgctcaaaggaaatgccccttggagcattttggatttttggattagggatgataagtaagtataaagcaaatattccaaaattcaaaacaattaaaaatctgaaatacgtcttgttccaagcattttggataagggatactcaacctgtatttagatttgataagattttcagttgaaaaagtaaacttacaaaattgttccaaacatacttaaaagcttttcagtagtcaaactgagcatcagtttttataattaaaattaatgaaaatcaaataaataaaaatgcatttcctcagttgtactagctgcatttagtgtttaatagccacctgtggctagtggctactgtttagacagcacaggcctaaaacgattgtattggtttatccaccctgtctagcaatgcatgaaaatacctgtttccagcttcatccacgtccctacaaaggacatgaactcatcattttttatggctgcatagtattccatggtgtatatgtgccacattttcttaatccagtctatcatagttggacatttgggctggttccaagtctttgctattgtgagtagtgccacgataaacatacgtgtgcatgtgtctttacagcaatatgatttatactcctttgggtatatacccagtaatgggatggctgggtcaaatggtatttctagttctagatccctggcaaggacaaaaaaccaaacaccacatgttctcactcataggtgggaattgaacattgagaacacttggacacaggaaggggaatatcacacaccggggcctgttgtggggcaggttggggtagggtggagggatagcattaggagatatacctaatgtaaacgacgagttaatgggtgcagcacaccaacatggcacatgtatacatatgtaacaaacctgcacgtcgtgcacatgtaccctagaacttaaagtataataaatatatatataaataaatttttaaaaaaagaaaatacctgtttctccccatctccacctacacatgatattgtacaattcttcctgtactttctgctgtggcattattactgtaattaaataattagttttgtaaatatatatttaatgtccatctctcccactggactttaagggcaggtatgttgttcactacaatatcccctattgctttctctttttttgagacagggtctcactttgtccaggctggagtgcagtggcacaatcatggatcactgcaaccttgacctccagggctccagtgatcctcccacctcagcctcccatgtcactgggactacaggtgtgcaccatcatgcccagctaattttttgtatttttggtagagatgggttttcgtcatgttgcccaggctggtctcaaactcctgagctcaagtgatcctcccacctcggcctcccaaagggttgggattacacgtgtgagccactgagcccagcctaatatcccctgttcctaggacaaggcttgatatgtagcaggtgctcaataaatacttgttgaatggctaactttatacagatcagagcattagccagaaactttccctaagtcaccatctctcttcctccttgtcaaaacatcttggttttgggctgggcgtggtggctcacgcctgtaatcccagcactttgggaggccaaaggcggccgatcactaggtcaggagatcgagaccatcctggctaacacggtgaaaccccgtctctactaaaaatacaaaaaaaaattagccgggcgtggtggcgggtgcctgtagtcccagctacttgggaggctgaggcaggagaatggcatgaacctggaggcagagcttgcagtgagccgagatcgcgccactgcactccagcctaggcaacagagcaagactccgtctcaaaaaaaaaaaaaacacaaaaaacaaaaaacctcttggttttatagaatattatcattgacagcaggggaatgatcaccccaaagggttggagtagcagggaattatcactggatgggtaaaatctttaacaattggggcaaattgtgaatcacagtcacagagaaccccttagaagagcttgactctcccttgacctttaagactgagctccagatggacaaagctatcctctccttatactgcctttggggcttttgctggagactatggcagagattgtcagttgctgtctgaacttccaattcactttcttccctgaacattcctgattttattgggaacgacaaacttgtttggttggaaaactagttttccagtctcccttgctaataaatgtggccatataattaagttctgtccattgttggttaggcaggatcttattagggtagagcttcagaaaaactcattaaaaaagaagactgactcagcttttaagaacgcctttaccctcgtctcttcctccttttagctgcctgaaacatgatgatttgatggctggaaccgcagtggccatattgagccatgaggcaaacttgagaatagaaaccagagctaaggacagcagaacagaaaaagataagaaggctggattctgatgaaatcgtggggcttccatagaattcctccactgtttcctttgagcttcttataagaggcaaaatgctcttctttttacttactttgaaaaattgtagtttacataatcaacttttagaaattcaagagactcagaaccgcttaaatctgggagtttcttttcttttagcatttgctcaatcatcttcattccagcttgaacacctgtgaaggaaacaagaaagaatctgttgataatgacaaagataataatagcataataacattaaccacacaaatacaatttattgagtgagacatgcccttagatacttagaaaatggcaaccccacaaagtgggtattattgtctctggtttacagatgaaaactctggttctcagagaggctaaggaacttgtccaagaccacagagctaacatgagacattttcattacgtcaggaggactaaagagttttatcacagaacagtgtgagaagaaaagtataacattttcttcaggtcaggagcagtagctcatgcctgtaatcccagcactttgggaggttgaggcgggaggatcgcttgagccaaggagtttgaaaccagtctgggaaacattgagatcctgtctctacaaaaacaaacaacaacaacaacaacaaaaaaaaaaattaaaaaattagctgggcataatggtgcatgtctatagtaccagtgactcaggatgctgagttggaaggattgcttaggtcctggaggtcgaggctgcagtaagccatgattgcaccattgtactctaacctgggcagtagagtaagaccctgagcctcagagaagttcactgttgcccaaatcatacagctaagaactaggggagccagtggtcaaattcagacacttcggctccagaatctgtgtgctatggacagttccagaaggttattccacactcttttttcctttcagattctttaagctcaagaatttttggcctgtggttcttgggctgtaggaaactcctgaactacatgaaattctaataaaaaactgtgggtgagtcgtgtgtgcatatgtgtctcgtttttgaagggagagaatctacattttgaccagattgtcaaaggatcctgatatttttaaaaacttaataacgactgcttttgtttcatcctggaataactcatcagcttctttatatggaagcatcacacgacacatttctctgagctcattggggaaaagagacctctcccacattaaagagcttgagaaaagtaacctccatagttaatgaagaacatttactttcacccttttcaaggaggaaatattgcctttatccccttattttgcagtttaagttcctttccagttatcctatccttgttggggatgaagaagagcaggttttatcctctaaaatgccagaaaaaaatattgcaatatggtgatgcaaagacagatataaaggatgtgaagatagagccagaggcactaccagagagcttaggtttgaatcccaactttgccactgaatagcttgtgtgactctgcaagttacatagcttctctgtctcttactttcttcatctatgacaatagtaaccttggaggggtctgttcacacatgtgaaaatgacagtagctgatacttgttgggccatatttgctatggccagacagcattctaagcgctttacgtatgttaattcatttattttccacaacaatcctatgggtaggtactataattttcattttcatctccattttttttttttttttttgagacagagtctcgctctgtcaccaggctggagtgtagtggtgcgatctcagctcactgcaacctctgcctcctgggttcaagtgattctcctgcctcagcctcccaagtagctgggactacaggcgcatgccacaatgcccagttaatttttgtatttttagtagagatcgggtttcaccatgttgacctggatggtctcgatctcttgacctcgtgatcctcctgcctcggcctcccaaagcgttgggattacaggtatgagccaccacgcctggccttccatttaaaaaaatatcttgcagatattactaataacagacacatcagatctcttactagaaaatgtggaggcataaatcattgataaaattttaaaaatacctaatttgtattgagtgcctgtctatgctaggactccacatacgttctctcctctcttcttggatcctcacagcaacccagtgacgaggtgttattatccttgtttcacaaaggaggcagctgaggctcagggaggttcagtaacttgcccgagagcccacagctagtgagcagcattatccagagcttggaggaacagggagtagatgatagagtgcaggtttcaagctccggcagcacagacctgaattcatatttgcctgagtcccttactgctgtgagacttgggaaatgtcatattcctcctctataaaatgacaacagcttatttgtagggttgttggtggaattagatcaacacacagcccagaaagcacattcaaagaggccggccatggtagatgctcaagaaatgattctgaattcaaaggctgcccttctccactagcccatgctatatttcctgtgggtgggattatagcccatggatgatcccgtttgatcctcacctcacactaagtgtaggtaggtaggcaccatttttatcatcccattttccatatgagaaaatccactggcccaaggccatgtatcaaggaaagcaacagaactgacatttacagccatgtggatagacttcagatctgttcttttaatgactctgctccagaaggtgaagaaaagaactgcacaactttaatactgttacaagatatctgtttctgatatgtatttctttgcacatcagcacatcagtatagtaacaagatacacacacatgcatatacacatacatatattcctggtacgtatttctacacacaccattgtccacataacatttgtgcaagatggctcaattttagatctcctgcactagatgatgtactagcagaaaaacaaggagttgtctctaaatccttctttcttccctctctccctccctccctccttccctccctccctcaatccttctttctttctttcttccctccctccctccctcccttccctcatttatttattttattttttctggtatagtagaagaagcatttcttagttaggcttagttaggtatttcttggttagactagcagtgcttaggttgactgctttagttaaagaggactgagaaagctccatcatcaacctacccttagctaatctcaagtaaaatttcacaggagaaaacaggtccatatactttgatttttgcagtccattccctctccacaatctgctcccacctcatcttagcccaaggaaaatcacatcccaacgtttgtctctccctagtgtttataaatgttctctaaaggagtggcttttaacctttcagtgtttcagactccttcccacatccaataaatatgaaggagcctctcctcagaaaaatgcagtcacccatattacattttaacccaattttaggggattctaagtcccttttgaaaccaagccctttctgaagccccaaggtgttacttttactttcaaatttcctttcctgtatcctacaaatgtgtcttatttggaaccctcagatgttcattatgtgtatatatgggaaagagagagagacaatgagaatctgtgctgtgtttggacatgcctcccatcaagttgactattttttaggcaacgctttcttcgcagccatcttagcagtttctgcataaggtactggatcaccccacagtacggcgtttctcagtcaggagacagcccatgttatgagctgttcagtttgggtcacagaccccacctagtgggcctgaggtctggcttctgaaaacatccaactcaccatagtcaagtgccctctgagtaatccttgccttgattccagggtaaatggtctgagaggatgagacatagagattccacaggaggaaacatccccagaggactgggattgtctttgtacacatctgaaattaaccaacagttaaggttcctttattattcttgactttctctttggtcaattaaatccaacatttctagattttctcatttttactgtttacttccagaactcaatacatccatccaatccatccattcatccatccatccatccatccatccaaccatccatccgtccatccatccatccatccatccatccatccatccatccatgcgctctcccacccatccatccattcattcagcaatcatttattgaacacaccagcatgtgttctaggtgctaagggtgtagtgttgacctacacatggcccctgacctatgtttttcacagactagtagtgaatatgcatccttcagggccagctccatgtccctctctgtgaaaacttccctcaccaagtcattttaccctgggctcatcacattctactctgggatcccaccacactttacacagtgcatatgcgtccattagaacatctgatacacgatgttgtctgtttgcaggcaggacttctcctcttaccctggttcaagccagtaccatttcacatagatttttgtgatagcctccttactggtctctctgcttcggccattgctcctttctggccattctccacaccacagccagagtgagcctcttaaaatgaaagttagatcatgttactccccacccccattaaagcccttcagtggttccccttcttactcagtgtaaacgccgaagtcattttatcagctacaaggtgtagagggccttgtagctgatggaatgaccctatgcctccacttcctcattgacctctgtccttaacacacacacctggctctcatgatcccagcatcactggctaacttgatctttctttaatgatctaagtagcctgtacaccaggatctttgtatttgctgtttcctcttcctggcatagtcttcctcaaagaacccggtcttgcacttcttcagataactcaaatgtcgtctcagcaaagtctttcctagccactcaatgcagaacatggacaccttccctgtggccctgttattatgactccaccattgctttattttctccaaagcacttatcatcatctagtgtagtatccagttactgatgtgtgtattgtctatctcctctgctggaatttttaggcttcatggggaaggacttcatcacttcagcaccttgaatagtgactggcacacagcaggcattagggaactactgaatggcagatggaatgaatgaatgaatgaagtctctttcacaagctgtgaattgggccatgtgtgccttatgggttctccagcacctggggaagcccttaatcttagtatacaccatcccgtattgtgactgtctttttacttgtctatccctttgtcatggggattgtgtcttacttctataactctggagtccagtacaatacctggcacatagtaggcacacaacagatttttgatgaaataaacattctctgcaaagagtgggaccacatcttactcactgttatatcacccatacttggcatacatgaatgattaacgtatgcttgttgaattaatagaccaaacaaattaatggcatcccattttcttgatagatgaagcacaggtcccaaaagcagcagtaatttgggtttcttttaatgaaaatcaagtgagtaatatattcacaggccttctttctagtttggaagttacaatctgggtgagctatcactgctgcacttacacatgcaaaagactcacaggtggcaggtaccactgcgctaacacacaaacatgaaacaaatcaaggaaggcccaggaaggtgaccttgtggatgtggtcagagaggaagaagtaagccaggtgtggtggctcatacctataataccagcactttgggaggccaaggcaggaggactgcttgagcccaggagtttgagaccagcctgtggaacatggcaggaccccatctctacaaaaaataaaaaataaggctgggcacggtggctcatgcctgtaatcccagcactttgggaggccgaggcgggtggatcacgaggtcaggagattgagaccatcctggctaacgtggtgaaatcccatctctactaaaaatacaaaaaattagctgggtgtggtggcgggcgcttgtagtcccagctactcgggacgctgaggcaggagaatggcatgaatccgggaggcggagcttgcagtgagccgagatcatgccactgcactccagcctgggcgacagagtgagactccatttccaaaaataaaaaataaaaattaaaaaaaaaactaaaaaattagctgaggatggtggtacacacctgtaatcccagcaacttgggaggctgagatgggagaattgcttgagcctgggaggtggaggctgcagtgagctgtgatcatgccactgcactccagcttgggcaacggagcaagatcctgtctcaaaataaaataaaataaaataaaaaaagaggaaactgtgagagccatgtgtttagatagagggaggggtcaggccaggtggtcaggtaaggattcagagatgagtaggattcagaagcagcctgggtgaaggaaaagaggtcactgtaagaggtggagcccttggccgaagtaggtgagaggtttgattaaggggggtgagtaggctttaaggtgaggccatggaggtgggaatggggcaatgtatataaagggacttctagagaatttgcttgaaaagaacagagcagtctgattagggatggaagtgtccaggcaaggccactgctagcctatcttgggcttttgtgtgaaatgggaaaaggcgcccctctggagagatgccagcctcttggcacaaagtggagccagtggaaagcattttaggaaaaccccacaccagtgtacgcagctgggtgggaggtggaagggctatcctatgtatccattgggctggaattttgtctagtgcacaaactccccaacttacacagggggcctgtgctcagattagtgaatgcttatgtgggtattttgctggaggccaaaggtttagaaataaggtcttcacctgtctgtgggtaagttcatcttcaggtctgagaaggctggctgggtcaacctgcttacatctctcacctgatctcctaggagccccctctataccccaccatccagccaaactgaactactggtccctaaacacatgccacgttttctgcctaatgctattgcctatgtttttcccctctgcctatgcctgcagaaaccgtgcatatccctaaggcccatttaaagcaccatcttctttctaaagccatttatgacttccctgagttaatttcatttccttttaacccttgatcaaaatacatatttattcatgcgtgtatgtttcttttctggcttatgatttgccttccctaccagaatataagtgcctgaaggcagagactgcaactggtttggaggtcctaggtctggctcagtgcctgggatagagtgagtgactgttaagtgttggtagaatgaatcaatggtagaatgaataaatgaaggaatatcccttaccttactctatcatgtattacacttctttacagagatggttaacaaagtatttgtgtactagtaaactgcaggcatccatcgaaacagatgttggccacagtcctggagcaggggccaggaagttgagtgccagatcatggggaggacaggggatgtcttacaggaggggccagagtagttgggggcactgggaataggagggggacactcagagtattggctccttacccttagctattaaggcattttggtattttaccactgatatggccttatgaatccagcatgatatttcagccctaaagagctggtttgggttctacaggacaagttacagagggaaactggggagcagtgttgggagcagagctaagaaaggatgacttgagggtggtcagggtgcagacagcactaagggaagcacagggaaatgggagggttgagagctgaggggaagggatttgggtaggagaggaggatctctggccaagcaatgagtgatctgaaggttggaggaaatgtggtgagtgggataagggggtgtaaagccctccatgtcctgagaggcagagtgacagtaacagcatcttaacactctgaatggatgcatgtacctcctgcaggagctagatccagctgatcttctgctgtgctgggcctttcttgatcctttagttgcccttggaggttagtcaaggtgtcctggaaagggggataagtagagatgaactatgggagtgaggagaacacttctgggactcaggttagtggctgctgaccaactggtataggagcatttccacattttaacatatggcgaggccaaactgaaaagcagtcttgctaatatcactgccggctaaaaattgtaaatggatgtgttatgccaagacaggcattagagagatttttgttttaaaagagcaaaaataggccgggcgtggtggctcacgcctataatcctggcaccttggaaggccaaggtgggcggatcatgaggtcaagagatcaaggccatcctggctaacatggtgaaactgtctctactaaaaatacaaaaattaaccaggtgtggtggcgcacacctgtagtcccagctatgtgggaggctgaggcaggagaatcacttgaacccaggaggcagaggttgcagtgagccaagattgtgccactgcactccagtctggcgacagagcgagactccatctcaaaaaaaaaaaaaaaaaaaaaagaaaaaagaaaaaaaagaaaaaaaaaagaaaaatattttcatagcaatggaatgcaatgggaaagaatgttaagaccaaaatgtctgtacctattagactgtgtgcaaattaaggcagacatgatatctctccctggcacatggtaagacccaaattaatatgtgctaactgatcaactgactgacttaaaagattccagtcaactaagaaaggttctacaaatggttagaaaaaaaggaaaaaccaaactatcatatataatatagagctctccatttctatagtgaaaaaaacataataaaccagagaagaaatattacttgtgaatggaataacaactaaaataataaatttttatttctttaccctttacaaaactcacagttctttgaagtggatgttcttattatcttactcccattttagacacgtggacatggaggcttagagaatctgatgactcgtccaagatcccacagtaagtaaggcacctgggaacccaaccttgttcttctggttcctaattctagtgttgatgaatttatttttattgaatgactcgatacatgctagggttttcattttcatctgggaattttaaataggagttgcttgacaccattttcctttttgttgttgttgtttaaaagttactcaattttttttattacactttaagttctagggtacatgtgcacagaaaaccaaacaccattttcaaggtggaaaaattcaataagcatctagaaacgttcaagcatcacagtgcaaatcccttcttattttcttggacacaactggagttttaaattccctgccagcagtaaaacctgttttcccttcttggttaaaaaaagtttctgaagtggtacactttgatggagatccaggaatccaaaattacaggcaggaaaacatatttttcctctagaaattttatgagtgaaagaaattactggggtatgaaggggtgaattgtacataacttttcattgaattgttcagttacgatgataacttatgggcaggggaggaaaggaaccttgtcaagcaaggtgatgactactaaaaggttaagtaatttggctgacaagtgcaggcagggctagttgcctgttaaaaggatccaagatcacttaaaaaccccaccagcaagttatctattttgttgcttctggggaattgcttctttccaagattcaaaatctcagtagtcattatttttccatacaaatacacagacagaataatactcctaaattaaatggtccttgtgtgagtcatcctgacagctaagaaaatgccagtccaatttagaaaacacctgaaactcacagatggtcctactactactgctgcttggcaagagctttgactgactctggaaaaaccgattaagggagtaatgaatgagtaaaatgtagccttcaaaacagaggcgcaggttgaaaaattaagttcaacaggtttaaagaagtctaaactagaagggtattccgacatattggttaagacaaaatgaccgtacataagaagtctaaatcgacaggtatggaacgtgggcagaatatttcaagggatccactcctcacatctagttttatagcaacatctctaatgacaaggaccttgagaattcatagcatgtcttttccccaaaactctatgcctaacaccaacaagttcaacagtccaggcaagtgggtggctagttttgctctggcaggatctaggtcactgatgtgctttaagacctgccttgaaagcacagagattataacaactccttagtcctaaccatgctgattttgagagacaagatagaattttctgccactgtgctgggttcccctctgaaatggaggcaaaaataagtccagatcactgagcaaccctcttaacattgttccatgatgcaaaactaagtaggtggtttaaaccaactcttttctctcttatggctgtttagctgtcactaaagcttttgcctaagaagcctccaggtgcgcatatgtgacatcacacaaacaaacaaacaaagatacagaaaaatctaggcagacaataataataacccaggatatatgacagctgcctgttcaaagtgtcctaccaaatctgggacatctccagtttggagatcatggctggcagagacctgaagtttgttcatgagtcttacctcaagcagaggaagtgtccaaagctggagagcaccttcgattctctctgcctttgaagctgatgtgttctccaccttgcgccttaaactcagctgctaaaaagccaagataattaagtctgactcatctcagtggtgaatttttttaatgcctctttcaaaatgtgatacataattgcttcactacaattacccaatggcatgaatgagcactacagtatctacctagataaacagacagtgccacctatgcaataattatcttcctgcaaaacacacacacacacacacacacacacacacacacaccacttgtgaaattgtgatggctactttaccaaaatgattgaaaacggtgttaaactgcattggaagaggaagaattttcctgtctggaatcataagctggttccttctggtcagggtgcctgcggtggatggctctactactgcccagaatacctttgggacttgtggtggatcatcagattcagtctgaaagcatgaggcttgacaatcgggctgacctagttaccttatcactcagggtaggacctcagttggcatctctcagtgtccgtccgctccttttcagaatgttattaatgacttactgttccagcattccttaaacctaagttgggtgggtgggttcatcaactattatgcaacttaacattttcagattccaaactccagccctactctcatctccaataaattcattttagttaatgtgttttatctatttttatttttatttatttattttttgagatggagtctcactctgtcacccaggctggagtgcagtggagcgatcttggctcactgcaacctccgccccctgggttcaaacaattctcctgcctcagcctccctagtagctgggattacaggagtgcgctaccacgcccagctaattttttgtatttttagtacagacagggtttcgctgcattggccaggctggtctcgaactcctgacctcatgtgattgatccacccgtgttggcttcataagtgctgggattacagatgtgagccatcatacccggccattaatgtattttagatggccagggatttgattgtatgaagtttttttttttgttttttggtttttttttttttgagacagtctcactgtcacccaggctggagtgcagtggcatgatcttggctcactacaacctctgcctccagggtttaagcgattcttgtgccttagccctctgagtagctggaattacaggtgtgcaccaccaaacttggctaatttttgtatttttagtagtgatggggtttcaccatgttggccaggctggtcttgaactcttgacctcaagtgatccacctgccttggcctcccaaagtcctgggattacaggcatgatccaccgcacccagcctgattgcatgaagttcttatggcttatctacacttttctgggtaagacccggtgaccaactgtcctggtttcccaagaatgcaggattttcagtactaaaaccagaacagtcctgggaaaatcaggatgataagtcagtctgaaaggaaccacagacgctttcacttggcattgtccatacttctcacagcttctcaggggagttataccttgggttatacttactgatttgaactgagtttccttaaggtaaagtggggatagaaatagtaacttccttgattggttctggtgaagaaaaacataataacacatgagaatgcgctattaaaactgtaaactgctgtgaaattctactcattagcacgtggccgtatcaataatgatacggtgcagagacgctcttcatgggatcatttattgtcggtcatcatagatgaattcattcattcaatcaacagatttactgagcacctacaatgtgcaaagtcctcttcagcaaaaaagatgaaatttttgtccacgaggagtttatgttctagtcgatggagacaaaataaataagcaaacaataaaataaacaaaaatgtataaattgtgacatgtactgtgacggaactaagggaatgttgttggtaaggtggtcttgtaataggtagagcaatgcaactgggggaggtgggcttattttatcaggatacccacgtgggcgtctctgaggaggtgattatttgcgctgagatgtgaccgttggaagccaggcaggcaaagtgctgaaaggaaaaggtggagggaactgcaaaggtgagccagtttgtctgaaatggagttggggcagaagttatggtattcgagatgtaaatggtgatgtcaggtgggtagagttcagggaagaggtcaactggaaatatgaatgtctaagtcatcatccgaaaggtggagttaaagccacagaaatgaatgagatcattgcaggcagcttcccacgtgcatgtgctactgaaagtgtggaagatgagttcaggcgctatgcagagaagctcttgaaattgtactgtgcattagaaaaaatacagagctagacatggaagacgaaggacaacatggaagatgaaggacaacatcaaaagcactatatggaaaaaaaaaatcacaaaacacctctacatctttctaccttttcctcactattttccccgggtggcaacatcaatttcctcccccgccccctctctccctgtccttctccagggtccgaggtctcctctttcgtttctctcctctccagagcagcttcttggctccatcttcttcccctgctcccaccttcactgtctggcccctgcccagcccatcccctgctcattctcaattccttttctctgttagaaagaaaccaacaatcggctgggcgtggtggctcacgcctgtaatcccagcactttgggaggccgaggcgggcagatcacgaggtcaagagatcaagaccatcctggctaacacagtgaaaccccgtctctactaaaaacacaaaaaattagccgggcttggtggtgggcgcctgtagtcccagctactcaggaggctgaggcaggagaatggggtgaacctgggaggcagagcttgcagtgagccaagatctcgccactgcacttcagcctgggcaacagagcgagactccctctcaaaacaaacaaacaaacaaacaaacaaacaaccataaaataacagtatctttccatctttcctgatgcaaatactttttcttcctgttacaaaagacctgaaagtctaaccacatctttggtgaaaaccccagaatcattgctgtatattccaggagtctgccacaagatagaagagggaggttggcttgaatgagaatggtgaggagagacagtgcaaggtgtagagattcgccttgcagtcatgagggctctcgcctcccctggacctggacctgcgctacccattccaacgctgggtccttgaacaatttacttcacttccaggtctcagagccatcacctctaaaagtggagctcacatttactttgaagagtcattttgagaatgaaattagacgaggcagcacctatgtttttcacacagtgtcaataaattagatgcatttcatctatttttatttaaagttaataattacaaagatatcttaaacaaggtttgtttttaagaagtatacaaagttcagttttcatggtatttactttttacagttaccctctattaggaaatttaaaaagtttcccctttatataacttttcccttttaaataagattatatacattttaagaagtgggttgatttatgggaaaaaaaagtaaataacagtacagctcacatgggacatagaatacttttttttttttttttgagatttagtctcactctgttgcccaggctggagggcagtggcaccaactcggctcactgcaacctcccgctcctgggttaagcaattctcctgcctcagcctcctgagtagctgagattacaggcgccaccaccacgcctggctaatttttgaatttttggtacagatggggttttgccatgtttgccaggctgttctcgaattcctgaccttgtgatccacccgactcggcctcccaaagtgctggtattacaggcatgagccaccgtacccagccttaggacatagaataatttctgaaaaaggggctcaaataattagagtctaggaaacaaagatctaagaagagagtgtagctagtctgttgtcttttatttggaagaggccttagaaatcagctaattagccttcctaattagctgtttagggcacatttgccaaattcatctttaaaaacatcaacaacaaaagccagcagcaccctatccagtttcactgtttattttagctttccatatttaacagaagatttgctgggaatgcctgcttcttcagcctactcatgacggcaatctaaaatgcaagattaattattacactgtcaaatagctgacagtgtgtttgtctttgcagatcagggaacactcttaattaagactccaaaagaaaaatcataaataactggctagaaatacttgttcattaaaacgagatgtcaagagatagtgttagggaactgagcatccctgttcttggtttctagaatgtctgggctataaccatatagaaagagctaactaggccgggcgcggtggctcacacctgtaattctagcactttgggaggctgaggagggcagctcacgaggtcaggagatggagaccatcctggcaaacacggtgaaaccctgtctctactaaaaaaaaaaaaaaaatacataaaattagccgggcatggcggcgtgtgcctgtagtcccagctgctggggaggctgaggtaggaggatggtgtgaacccaggaggcagagcttgcagtgagccgagatcacgccactgcactccagcctgggcgacagagcgagactctgtctcaaaaaaaagaaaaaagaaaaaaagaaagagctaactgaagatcaaacatttttgagattggaggacaaattatattattcttgctaggagacaaaagtgggagggaagagggattatgtggatatggagggaggcgccacatagggcagtcttggggcaaaagacactgtgagttccaatcgctcattgcccccaatgtttgcgttggtgaaatctggttaaaaggaaaccctaaagaaggatacatagggtagagaaaaataagagctaacatttattgtttgttatgttctgggcaccatccatatatgaattcactaaatactcatcaagactgtataaagaactaatattatttccattcgctaggtgggacaacttgcctaagcttagacattacagctagtaagttgcggagccaggattcaggacccaggtgttccgttttcaaggatatgcctttttaccactatactatgctgactttttaggaaggtcactaaagggcaacacacaacccagggtacgcagaaggtggcaagagagaaggatgctgttgctaggcaacccatctggttttctgagctgctaattgaatctgtgtagcgcagatttatgtgtttgtttgaaatagctagtttatttctagccagaagaagctgcctggagttcatgtgattctgaaggtgatgagtcatcttacagttcatcctgggagggctggggagaagtctggcagaatcatcctatcacccagcagtagctcctcctcttgtccctgctctgtcgcaggccacactccattgatgtctgtgtaatgatgtttctgggtggacatcaatgactgactcagactgtgacttctcacaccagtcacgctctggaacggtttagagcagtgatgctctcttggttttgacaaatgaacctactcacgtcggttccttccattgttactagttatctagaagggagtcacattatcttactgcagttcaaaatgaacttaaattcatgctaaaatttaaattcatatgtgactttttgagatatgaagggtattatggaaccaaacaaacaagatagtgtgatattactctgaaacatctgggaatcgatggtgtgagcccaatccaagtagaccaggatttccttactttggccctgctggcattttgagctacataattcttggttgtagggggctgtcctgtctatactagaatgtttagcaggccaggtgcgggggctcatgcctgtaatcctagcactttgggaggccaaggcgggcagatcacttgaggtcaggagttcgagaccaccctggccaatgaagtaaaaccttgtctctaccacaaatacaaaaattagctgggcgtggtggcacacgcctgtaatctcagctacttgggaggctaaggcgggagaatggcttgaaccctggaagcggaggttgcagtgagctgagattgtgccaccgcactccagcctggcaacagagcaagactccttctaaaaaataaataaataaataaataatgtttagtagcatccctactattagatgccaatagcaccacaacctcctaccctagttgtgacaaaatgtttctatactatatcaaatatctcctgtcaggcaaagtcgccacagttgagagccactgaaatatggtatattcaagtattctgtttagcccttgcggcagaaaacagcattcctctctatgatcagatgctgatattcctaataacatttttcttaactatccaataaatatgtgaacacattcttgtgataaaggattcaaataattactgaagtttacagatcaaattgggaaaattaccgcaccccccgcctccaactttgtccctatccctccctctttttatttgtaatttttatttttcgagatagggtctcactctgtaacccaagctggagtgcagtggtgtgatcacggctcactgcagcctcaacctcccaggctccagcattctcccacctcagcctccctagttagctgggactgtaagtgggcaccaccatgcttggcagattttaaaaaaatcttctacagagacagagctggtctctaatccactggttctcaaggtggcatttcctcccagggaatagttggcatctttggttcttacaactggggagggagacggttctactagcattttgtggatagcgaccatggatgctgctaaacattctacacacagaaccgcctcttgcaacaaagacttaagtggtccaaaatgtcaatagtgctgaggctgagaaaccctaatctatcccccacatcctatcataatccctagtgatagattcacattacagatctgagcctgccctagtagttagtatacacctgtcagattcaaggcttcccaccatcttttgaatagccttccctttttcgggaggaaattccaatattctacgtcttgcctccccgaggaaggagttcagaccccaattcccagtctcctttgtagccaggacccaggtgtggggcccagacttcctcaatcagacatccctatgagcttttgatgtggaagtgagcaaggtgaagaaacaggctcttttggaagtttggcattatgcaggaggctgcaaaagcatgtgggatttgatgttaacagtggcagtggcagccattccccagtgaatcccagcagttgtgatggcgatttcctccagcagcaatcccagtcttagtattttcctcatcaggccagttttcagcttggttctgagcttcattcttggaagcttagcctggggccacttctccatcctccctagaattccctgagctgtacagcatccttttaatacacaccttttctgcttagtcagccagagtcagcttctactgctgaaaattaagaaccctgatagtaaagactccctgctaaaaactgtctagcggcttcccatacattctagaatatgtcccaaaccctgtgcttagcccaaggctcttctttatctgggatgtacctatgctgtccatcactctggtcacacagagtcatcctggtcctggcaccattcctcactgctcactactaaagaatcctacgggcatggcaaacctcctctatgtaccctcttaaaaccaaaatgtattcaaacacccatgctaacattcttaaatatctgctagccataataaaaaaatcaatgtactttacaatcttaactcccacaatttagcctaaatatttgccctaacatatttatactagttcaaacaaacattaagtcatagcctattcctcttccttaaaggggtgttgacctttctcaacattccacaagttacttcctccttgctttgttctcctctgcctttgcctcttttaaaaagttctaaattactagccaatcaagacaaatacaaaatataaagtcccattccagccaataaaaaccagacacaggccaggcgcggtggctcacgcctgtaatcccagcactttgggaggccgaggcgggcggatcaggtcaggagatcgagaccatcctggctaacacggtgaaaccccatctccactaaaataataataaaataataataataataataataataataataataataataatacaaaaattagccaggtgtggtggcgggtgcctgtagtcccagctactcgggaggctgaggcaggagaatggcgtgaacccaggaggcggagcttgcagtgagccgagatcacgccactgcactccagcctgggcgacagagcgcgactccatctcaaacaacaacaacaacaaaaaaaaacaaaaacaaacaaaaaaccagacacagcagtaaagtggacacatcaggttatatatgaccctgtctcctttgttcggtgtactctcgtgacaaaactgctggcgagtataccctttctacaaaaaataaaaatggccttgctaaaaaaattaaatttatattcaagtgctatttctttacaacatcaaaaaacaaacatttctaacaatcccattcctcaggtctgtatttatgtctatcataaagcagagactttttacactctactgaaagagctgattcactcaactgtaaactttgcatgggcagaaacatgtctttttggtctcttgagtctccagcatgtggggtatctgtcacaaagtaggcaatcaatacatatttatttgcagaatcaagggcaggatgtggacaagtgctgccacctattgggagaaactttatttgactctaaggatttggactatggttatcacacaaggacgaaacttgatactctctctcatctaagttatcattagttagaccctctatggtagccagcctccaggatggcccgcagcgatccctgtctgttggcattcatacctttggctggatcctctcacacatagggttggtttgtaaatatgacaaaagccgtatgtgacctctggagctaggtcataaaagacattgtggcttataccttggtctctctgggatcacctgctctgaaggaagccagctgccatgtcatggggacactcaaacagccctatggggaggttcacgtggtgaaaacaggtctctggccaacagtcatgactgtgccatcctggaggccgatcctccagccctagtcaataactgctgccctggcctacagtttgtaatctcatgggagacctggagacagaaccacccagccacgcatccccaaatccctttacctctaaaacctgtgggacaacaaatgtttattgcgttaaactttggggtgattgttatgcagccacagagttctaataaactgtcggacatagattactggctacaaatagttctactttttttttgagacagggtctcgttctgtggaaccaggctgaggtgcagtggtgcgatcacagctcattgaggcctcgacctccgggctcaatcgaccctcccgcctcagccacccaactagctgggactacaggcaggcgccaccacacctaattttttgtattttttgtagagatgggggggggggtttcaccatgttgcccaggctggtctcgaactcctgggctcaaacgatccacccgcctcggcctcccaaagtgctgggattacaggcgtgagccaccgcgcccggccaacctaaggattaacctaaggcttctcagagcagatgccgctggaactgagggccacggaagaaagggggtgacacttggtcctggggagtggcgactgtattgtctgtctgcagcatccctatcagcgctaccgttgttccacgcacacagggagtaagtactgggagtcccagccaccgccgcggaaaatctgggatgccagcgagcggccgcatctcggcgcctgcgcactgtgcccgcgctctcaggcagcgccgttgcgcgcggagtcatcgatcggccgaccccgagaggcccggttcctttaggccgcctgcccgcctccagctctcggggtcggctccaggaggcgccctcaggagaggggcgggcgctctattccagagaccgagtggcagggcggccactgtggcggggctctttccccgtttcgcctcagctacccctcagctccggtagtcgccagtccggggtcgtcgccgtttggggcgggagctgctcggccccgccgccgtccccgtcgccgcttccgggtccaggcccctcgggccgcctgccgccgtcatgaggctgcgggtgcggcttctgaagcggacctggccgctggaggtgcccgagacggagccgacgctggggcatttgcgctcgcacctgaggcagtccctgctgtgcacctgggggtacaggtacgctggggccggggctgggcggcccgcggggagtggggagtgcttggggtgggtgcagggcgggttggcgtcatctgtgggctgcaggcgcgggcgtggccgggcgataggccaagtgcggggacgccgggggggccttcacgggaggcccgggctcttccgggcgtcgcggagccggagggtgcaggcgacgggaagcgcgggtggtcggctggggtccggctcctggagaacatggcccggcctcccgggggctctggtcccctcctcggtgagtcatggcttctggttttgcagtaaacggaaccagggagaggagggaacgcacaatttccacaactggttagatttcaagttggaaatgatgagcttggcttgggttaaacctttctggactgtgaggggtccgagttaatttcttcagctgttggagtatttcaatgaaaaagtttggaaattgctagaagttaaaaatctgccctcaatccgaggccaccggtagcttgtatcgctgctgtgaagcggcaacaattttagattctgttgtgttcatgcgccgagcaccgcggtgagcgcttggacttcgccgccgaaaagttttagaaaggacagcgtgtaggcgtgtttcagaccatttcattttcttgggtgaaatgttgcttttttgctaaaactgaggcaaacgttgatcttgagagcttgcagtttgggggcagtaaagttgagaaaggatcatattctgttattggtttgtgggactgcaggtgaagctgctttgtttccctaaaagatactttttggggacaataatttgggagtaaagcggcaaggtaagagtggtcctcttcaaatactgagctagtgaatttgaaacttgagtgtgctaaggaaaaatgaaaaagatgttccctggggatttttaggtgaattcttcaaaacaaaagcaaaccttcctacgttttcaccttatttttagggaattgggtaaaatgaggccgttattctgaacttctcgccctttcattttcctggttaagacattattagattgaaagtaagcctgttttcttcctgattaaaaaaaaaaccctaaataagatactgacataactccttttaaacattatagtaagtgacatgcctactgttatttcttgttgttaaacctgtgtgttttacatactggcatcgttaccagtaggttacgagtagaagattgaataaatcttcaaacttattttttaaaggtattaccaagtatatatatattttattatttttaaattaggcagtcttgaaaggacgtgaaactcaatatgactgcccaaaagggcacgttggtttctctttcagatttctttttacagttgaggctggttacctggacagaatttaagcttcagcttgtgaaagtaaactcattttttctgaaagtatactcattttctaataaaggtgcagttttaaaatatgtccatgtgatattattttaaaaatatctttactgagcaagtggagctaggattgtcatgaaatgcttttatttgttttgtttttgttttttaagagaaaagtgaaagcaagtttattaagaaagtaaaggaataaaagaatggctactccataggcagagctgccatgaaatacttctaagaaggctggagtttctagaatttcatttcctggaattaaatactcctcttaacgccccaatttcagaggtagaatcctggaaaactatatattactttagaaatagcttttccctttttctaaagtgggaggaagagctggtatatttattaagcggaccatgaccttttctgcaaacagatacttgaacgtaccttgtactagatactgttttaaaaagcaaccttttgctgtgacaaatgacccataaacacatagttcatttgaggtgtttttgctttttctgccaaagttggggtggtgtttttgtgggcaaatggcagattttcaacgttttgtttatcaaagcattttgaaaagagaagcagggccacttgttttctagcaaacaggaatagcttctatttcagtaactttaatttctctaccaaggacacttcaatcagtaagaaaaaatatatttacgagtgaaataaaaacaagaattatttggagcacttttcaaaatgcagcattgtaagaataagtaaacaatataatttttaaaggacttcatcttttgttaacctctcaaaaaagtaatgaaattagcattgctgagtgtaaatgtttttaaaaatgttttataatgttttgttattgttcctcaccactgtgtgatgaaaaacattttattcttctaatgtcaaataatctgtgatgcagaaagaatgggagtttgttgcttccgggcttatttgaattctgagcttgtttaacgtgggcttttgggtttgcgctatgttccactaaaaggcatcataactgatgatcagtagaagggtgaatttagcttgtcatcatcagtaagagagatgaatttatactcagtcatatacataatactcctctaactttttgtgattatgaatatatggatctggtttttcggaaccattataagtaaactgtcctgtaaggatattgaatagacatccttgatttcacgctcatctcttgatcttcccaactagtgtttggtggttgcatttatttcacaagtactttatttgccagtgttgaagatatggtttgaactgttcagacaagatcgctgatcttatgaaacttaagttgtagtggcagaggtagggtagacagatcatagacaagtaaatacgatgttttcaagtagaacataacagaatagagagcgctggagtctgaatgaaaggcatctctgaagaggtgacatttgggctgagactggaatgatgaagaggagtcagtcatttgaagatctggaagaacaaacggagaggcccgaaggctgcaatgaagttgatctgctttttggaacggatggaaagctcatgtgaatagagaacagtgagagaggatggatggcacaggatgcagtaggagaaatgggaagaggtcagacgttgagctttggaagttaggttaaggattccaaatagaagctattggaagattttaagtgaaggaatgatgtgatctaatttgtattttaaaggtatttcactgaatcttagttgctgtcacttgtaagacatattgttttatgtaacagcaggggaaaatgctgtcaattgatatgtcattgattttaggaagtatcttaatttcaaagatgtcaaaaaaaatttgtgcatcttagaattgaggaaagcatggattagtgatagaggattactgtatcccgtcccccaggtggagagttttagccattagaaatctatagattaggcattcattgataaatacttttgataattttctcaaaactataagcttgatagggtaatgcgtgcctatagtcctagctcctctggaggctgaggtgagaggattgcttgagcccaggaatttgaggctgccatgagctgtgattgtgccacttcactccagcctgggcaacagagtgagactctgtctctaaaaacaaacgaaaacaaaaacaaaaatgtagctggacatggtggcttatacctgtaatcccagcaacccaggaggctgaggcaggaggattgcttgaggccaggagcttgagaccagcctggacaacatagtgagaccttgtctcttcatcacttagttcttctagggtcatactgtgtacttatgtatgcttcagatgtgctattgaaggtattagaagtaggtagttcttactatgcttatctgtctttcttggcagttctaatacccgatttacaattacattgaactacaaggatcccctcactggagatgaagagaccttggcttcatatgggattgtttctggggacttgatatgtttgattcttcaagatgacattccagcgcctaatataccttcatccacagattcagagcattcttcactccagaataatgagcaaccctctttggccaccagctccaatcagactagcatgcaggatgaacaaccaagtgattcattccaaggacaggcagcccagtctggtgtttggaatgacgacagtatggtgggtattaaacaccaatatatcaaatagagtaggtgataagtcatattgaacacctcagttgaattctgttccagtcaggataattatcatcgatagattgcacattttatatatatttttttctttttttttttttttgagacagagtctcactctgtcaccaggctggagtgcagtggcgcaatctctgctcactgcaacctctgcctcccagttcaagcgattctcctgcctcagcctcccgagtagctgggactagaggtgcacaccaccacgcccagctaatttttgtatttttagtagagacggggtttcagcatgttggtcaggatggtctcgatctcttgacctcgtgatctgccctcctcggcctcccaaagtgctgggattacaggcatgagccactgcgcctggctgcagattatatttttatagaatatattttttttaactgccaaatgcctgtaccaatatggggctggcatcccaaagtacctagtgtctgtctgttttgttcacatactctccttcagatcagttattccttgacttctattattgttcctaagctcatgattcctagccttgcttctctgatctggtccgctcattaaggctatagatgtggtctaattatttccagatgacttgcaggatatttatacctggattttaaattgtcattgcagactttagatgttgaacataaatttggaaatatgtgtgctcagttcccttctttgtcagtggcactgctggttttctgtgatttttgactccttaaatctagcccattaataagctttgtcagttcttcttttccatttcgggttccatggctttattcctcagtctgttttctggatttgccttcttcctacatggttctgatgctattgttcccttgctgtctttcataactctatctcataaacttgtgctcataatttttgagctgaaaaagacaatatatctctagttcaaccctgtcattttacagaagaggaaaatggtgtctgtcctcctgtacctagtgctcaaggctttctgaaaagttactccactcaacttttttagggctagtttctgttcttccttcctttaaactgtcatctccaatcagaacagacccatcattttcccccgcccccaccaaccagcacattcacctgcttgcatgcatgtgcacacacacaacctggtgactacttttgtgactttgctcttgctgttcacccagactggaacctgttacctttcctccctctctagtctatatttctacccatcttcctaagcccttgccaaccatagcccaatagttttctttaatttctttgtattgattatctgattatctttattgccttgtacatgcctcctcatttttcccaccttttttttttttggtgacaggatcccactccctcacccaggctggagtgcagtggcacaatctcagctcactgcaaccctacccttccggggtcaagcgattctcccacctcagcctcccgagtagttgggaccacagacaccaccacgcctggctaatttttgtatttttggtagagatggggtttcaccatgttgctcaggctggtcttgaactcctgacctcaagtgacctgcccaccttggccacccaaagtaatgggattacagatgtgagccaccgtgcctggcctttatccgcccttttaattttttgaatggtgcaaatgatcacctttatttttttaataccaatacacatgccttcttgttaattggtttttgtatgtatgcttatcacctcaatttaattgctggccttaaacatttttgagtataagtattcatggtaacttgtcatggcattaagtatagacatattaaaaaatactttttaatagattggtaaattgtgaaaattatgtccagatatgtggattttaatttatttttaaagttattgttttatctgtgtgtttctgcctcatagaggtaaactggggaatgagtaagaatatttcgctgtatatttaaattatatttctgagtcttttttgctgatagacttgttctgggatgacttagtaggggccattacttttacttctgtgtacttttaaagttgtctagtaagatgaagcttttcacagtatttgtgatagtttgctagtttccttttggaaaattttgagaaattaatgttgcctgaagttactaatttcagttctaagattttgcatattgttttgtattccaagacttgtaaagggtgacaggaaaatctttagagtatggaaactgagctcaagatctcataaataatgctttcaagtacatcacactctgtaatgtagaatggagcattagaaaaggaaaatagatgcgtaaaacttgaaaccataggaggtaaatttactcttgtaattaaatatcagttttcttatttcatcatatttgggaattcatcgagtgcctcttgagtctttaatgagaaacgggtagcaggtatcagaacctaatattagctctcatgcatcttagtcacttgttttagtcttttgtaaatgacatatggcaaaatgatctgtttagagaggtgtggtgctcaccttttttttttcatttttacacatgtgaagaatttgataaatattcatatcagaatagctcagagaatgtcagtggttcttatggagtagtagtaaggcttgacaagcccagcaggggattttgatatctccctctcatgtactcagcctagggtaccctttttcatttttcctcatatattctgtcccacacaactgccaataagtagtaaatggccaaaagttagacatagtggtaaagaagcaaaacctatgtttcatagtttagcttgatgttaagtggtttttaatgtagttgtttctgttttcttaggaaatatggaaatatttttgtgccatacctcctttttgggtaatgtgacttgtcattggcctttaggttttaacaggtgactttggatcttttccataagccctagggcttaggtcctcagagattttggaagaacagctgtcacctccggctcccctccatttctccaaccttttacatatactgtgtaattttaatttcctttgccccttctttaaacaaaccctaaaaagacgaaacgtatgctttgcattaagagttgggcatatgcctaggaaacaagctttctgagcaaacttaatataggtaacttagttttttttgaagccatgtattacatctcaaagccctgaactgcaagtttagagatctgggttcgtttcaaatttttattagctggtaaccttgattatgttatttaatctttctgatttataattataggatctataaaaaggcgatacctgccatgcctattttataggattgttataaagtgcaaataagaaaacattttgaaaataaagacattatgaagttgtaaggtattatccttcagcatttgttcagcaaacattgaatacctgctatgtgctaggtactttactggggttacaaaaatgggtgacatgtagtctggttttttataaacttgcagtcatggaaggatgcagatatgtaatcagaaaattgcaatacagtgcagtgtgataaggtgcagtaatcaagcccgttgcaaggcagagttgtggtctgtgttacctcttttgaagaagtggaaaatactgggatgagtaagaaggcactggcagaaagtgaacttgataatgagtcagagatcaggtaatgaaggactttgtatgctaagggatttagaagtttggtcttcatttgtagacctgcatttctcagtgtcctctgaaaatctagtttcatgagatggtgtcacagggatgttgactgctgaggacggaggatagtgttttttggtaaagtgttaggcacacactattattgttattagactcctcagtgcttatataatgcgaatagtgtattttgtgaatatggagggtgaagttaggtggctgcagcatgcagtattttccacacttattccgtgtgcaccaccttttttcctaagaacatctaaggcacaattgagggaaatgctgtttatgttggggaggtactggtgaattttaagctgcgacatagtacatgatcagatttttaattgtcaagaaaattctggcagcagggactggggtgtattggaagacaagaaagttgaagaagggatacttgcaacggaagctcttgctggatgtcgggaaataaatgatgagagtttgaagtgccaatagagcaggaaggggcaaattttagacatatttaggagttagtttcagggaactttgaagactgatcagatgtggaacaaggtttagttagggagggaggagtctaggatgatttccaggttcttgacataccagctagaattaacagaggtaaggaattcaggatggaagagtaggtcgcaggcttatttatttgtaaggactcacttaaaatgtctcccatttctgaacccaatgatgtactttgactttcagcacttagttcactttaggatacaaaaatgtatagtgtaaaaataagtctttaattaattcattgttttgttttcctttttcagttagggcctagtcaaaattttgaagctgagtcaattcaagataatgcgcatatggcagagggcacaggtttctatccctcagaacccatgctctgtagtgaatcggtggaagggcaagtgccacattcattagagaccttgtatcaatcagctgactgttctgatgccaatgatgccttgatagtgttgatacatcttctcatgttggagtcaggttacatacctcaggtaagtactgcaagcaaaacacagacatcttatgattgctcatacatgtggatggttcctgctctcaagttgcccgtagtctgagagtggcagagagagacaaaaatataaagcactgtgctatattggtgaagttctgggagaaacatactcatatataggatgccaggaattcatggaggagaacatttagaatattgcttctcaaactttaatgcgctttggaatacctggggaccttattaaaatgcagattctgatttagtaactgtagaatggaccgtgaacttcttcatactcctgcataataccaatgttgctggtctgtgagccatgttataagttacaaagatacagagtagttcggtgatcagtgcacacctgcagcatgccatgcactgacctagaaattaggatataaaaatattgggatatttcttgtcttcaaggagtccatacatagaggagagagatgaataaaaagatactcagaaataacacaggtaaacatagataataatacaattgaagtgtaatggaaatatgaatagaatgctaggggatgaaaggaaatggcaaacaatttttctttgaaaaaggctttacggaggaagtgatatttgagccggagttttaaataatcatatggctttgctaggagagaagtgagtctttgaagagagagatc

SEQ ID NO: 331 - DNA, 962 bp, Homo sapiens
  misc_feature (878)..(878): n is a, c, g, or t
gaattccgcccagacgcaggcttcttctcgggtcttggtcctgcatcctctctctcccagagcctccgttagggggtgggaaaggactttgccataggtcgctgaggccaccatctgctctcttactggccaagggcgtaaaaagatagtcttcccattagctagagagcaaaccccagaaagcctattggttgcgccgtccgcgggccttggtccgctttgaaggcgggctgcggctgcgagaggagggcgggcgggaggctagctgttgtcgtggttgctcggaggcacgtgtgcagtcccggaagcggcgaggggaaactgctccgcgcgcgcccgcgggaggaggaaccgcccggtcctttagggtccgggcccggccgggccatggattcaatgcctgagcccgcgtcccgctgtcttctgcttcttcccttgctgctgctgctgctgctgctgctgccggccccggagctgggcccgagccaggccggagctgaggagaacgactgggttcgcctgcccagcaaatgcgaagtgtgtaaatatgttgctgtggagctgaagtcagcctttgaggaaaccggcaagaccaaggaggtgattggcacgggctatggcatcctggaccagaaggcctctggagtcaaatacaccaagtcggacttgcggttaatcgaagtcactgagaccatttgcaagaggctcctgattatagcctgcacaaggagaggaccggcagcaatcgatttgccaagggcatgtcagagacctttgagacattacacaacctggtacacaaaggggtcaaggtggtgatggacatcccctatgagctgtggaacgagacttctgcagaggtggctgacctcaagaancagtgtgatgtgctggtggaagagtttgaggaggtgatcgaggactggtacaggaaccaccaggaggaagacctgactgaattc

SEQ ID NO: 332 - DNA, 123395 bp, Homo sapiens
gatcactttagtaatctacacctgtcattagcagtgttcatcagttgatctggacaactgatagtgtttccatcaatgtgcaatttgatgttcttcctggacttgttttggagagaatgtcactttttggtgttaagcgtggtgcctaacacatagtggatgcatagtaaatgtttgttgaaagaatgaattactttcccaaattccaaacatccagacatcattttcacatacatatttaaaattgattttgatataactaaacaggtcagattttgcttaaatcaaaatattttcaatgacttcttaggaattcttaggttaaattctaattcaggaaaacgagttttaatcaaacttctgcaaaaaatttatgcatatcattttaggtatttgaaatatgtattagtcacctcttagaaagatatgttaatgtgggtttcattttctggaggtatatgctatgcattttaaaggagtaatatatttgaactttgagtttgcactcaaatccaaaaaagtgagtgatcatttgattatattatttcctaagtcaaaatgaatctattatatatgaagttgctggaaattaaatcacttcaaatctatcagattaaatatgaatatttgggggatattttgctgtggtacattaggaggataataatccttctataagcaaaatgtttgccaccttgtaggcattaaatgaatgaacaatcaccaccaaaatacaagacattctctctctctctctctctctctctctatatatatatatatatacatatatatatacatatatatacacatatatatatacatatatatatacacatatatatatacacatatatatatatacacacatatatatatatacacatatatatatacacatatatatatatacacatatatatatatatatacacacacatatatatatatatatatatatatatatatatatatatatacacatatatatattcttttgagacgaagttaagtcttgttgcccaggctggagtgcaatggcacgatctcggcccaccgcaacttccgccttccgggttcaagtgattctactgcctcagcctcctgagtagctgggattacaggcatgcaccaccacgcccggctaattttgtatttttggtagagacagggtttctccatgttggtcaggctggtcttgaactcccaacctcaggcgacccgcccacctcagcctcccaaagtgttgggattacaggcgtgagccactgcgcccagcctaaaaatatttttaaatgttgattaagtgtgtacatcttggattatttttctttaataataagcacttttttaattattattatactttaagttttaggatacatgtgcacaacgtgcaggtaagcactggtttttaaaagagattacacatatttcaaccacatatgcatttttgttttgtttttaaatttggtcaagtcagagagggacattgcgttcttgggttttgtttaaatcagatactaatctttactttgctatttattcacagtcctattgatgtagagatttttctgacttattcaatttttaaataatttctcaacttagaatgacttaatccaaaggaagggaacttttttccctgacactcagagaatcacctccactttaggactaagtttgcactgcccattgtctacatgtggctattgaaatttaaatcacttcagattaatgaaaattataaagtcagttcctcagtttcactagccacatttcaagtgtttgataattctatttgggctactgaactggatggcgcagagatagaacatttccatcatcacaggaagttctgttggacagcactgtaagggtgagctcagaggttttaagtaatgtgcactaattgaatgatgtgacattttaaaaaggctcatctggaaatatataacttttagctctgaagcatatcatcactatatcatggttggacaatgtctgaaaaacatcttttcttcagaatttaattggttatggtgctaagaattgggaatctgggcaataaaatggcctggaggttttgctttgccaactgttacttatttacatgacaatgtgtagtacctcaaaaaatattgtctcactttaaaatttgaaattaccatcctaattccaaggtgatattattaaacttttgcagatttctaattagttacacatttatatatcttctatatttaaaatgttagaaatgtttgaatcagatttatattttccaaatccttgattttcattcacctctattctcatctgtgctataaatggcttcctgctgcactgagggatggcagagattgtgtctgtcatgttcattcttgtttccccagtgttcagcactgtttgtggcacaaaatgggtgctcaattgatatttgttgctaggctccacagcctcttccatggcttgacttgtgtgagtactgtgtgtactctgccatcaaacactttttccaagagtggtcttcaaagggggtttgtggggttttgtttattgttttgccttatctgttcataaattctcacccttaaccaatctcgtaacagatactgggtcccaaactagagaacaaaaattatggccaaataatatctctaaaatctctgtttttagggaataagtctgggaactttaagggctaccaaaaccccagttttatcctttttattttggacactttaaagacatttggaagtcatcatttaagcacggccagagatgtggctaacttccaggagaaatgaaatgggctctttgagggtgggagggaaccatctttctccagtgaagtttttgttggaaagattagctgctttctgaaagccaatttcctttttggaggaggcattatggaaaccaggaaagcatggggaggagaatattgggaagagggaaactgtatggagttaaaaagtgctgcatttttgtttgcattcaggcacttttcttaatttatcagtgcattggttgccatgtaaacagccagcttctggcaggaaagcagctggaccaggtgacctggctgtgacagagaacacagatattgaatccatgaaaccaagagtaatcagtacaacgattttttttcttttactttttaaaagtgtttgtcaatcctttaagttctttttgtctgactgctgtcattaagtaagaaaaatatgaaataaataagtctttgggtatgcaaaattgggaagatggacaggaattagtccctctatgcaatttcctctgaatctttcataatttctgtatcctcatcccttcaccctcaaccctccaacaccctctgttaccctgcaggcaactaggacagcatagagagcgtctcttgaacttgactttctcttccagtgcttgcctgccaatcccgtgacccatcctggagaacttttatagtcttcgacaatgcaatgcatagcaaccagttaataagataagacagtgactgtatagtgctccccaaagtgccatcacctaaaatagccctttggaaagtgctcatatagaactgagaattttagtgtagtggcaggctggatttgggtagggtgcccttcggtgggcctccaaatcctatggggagcttaattacttcatctttctgtaaggccaacagttctcaaaatttgtggtctcaggacaattttacactcttaaaaactgagggagatttctggtctggacatgtagtacagacctgtttttcattgttcctccctgctaagcacaagtataaaccctggaaataatgcaagagacaaccagggtagaactctggaaggttgtaaggagaaggcaaactggtttgagacccagggaaaaacaaagagcaagggtatcctatgtttcccacccagcagaagaaagaaacctagtcctggccattcctgatacccaactgaacaacagagggcagcccaggtaagcttactcctccctcagagtccctctgacaacatcaggtaggcccaacaccacaggtaaggggggatcttcagaaaccccaccaacaacagtggacaaaagaagcatttgccttctccccaggcctgagatgtcccactttcacctagagatatcgaggtgggagggtagaacagacacgaggcataaagtgatggcaagcggcccagtctgggaaggctctgtctcagtgggtgtatgactgtcctctcctacccatagagacaccaacagtgcagggcgccagtagaagtgtcccaccatacctaccccaactgagaggcacctggaagcctgacctagggaaacctttctgctccttcaggcgatatgatctgggacaaatgtcagcctcagtgatatccgataaaccaaacagagcaaaacaatactgaaaattaaactgctgttagaacaacagaccacaaaagtaagccaacacctgcttgcatgtgaagcataaataatgtgactgactgcaaaaataaaaaatgtaaatatgagtttcctaacatagtagacaaaatgttcaatcaaaaatcatctgtcataccaagaatcaagtaaatcacaacttgactgagaaaaggcaactactgccaacattaagatgagttcgatgttggaattatctgacaaggatttcaaagtagccatcataaaaatgcctcaacaatcaattaacattatcttaaaacaaataaagaaaaaaaaggaaacttgcagaaaagaaaaagaagttataaaaatataagaaagaaggaaattctgtcatttgctacagcatgaatgaacctgggggacattatgctaagtgaagcaagccagacacagaaagacaaacaccacataatctcacttatatgtgagatctaaaagagttgaactcagaattagagtagaatggttaccagggactgtggcttggagggagtgggaaatggggagaagttgaccaaagggtacaaagttccagttagacaagaggaataagtttttaagacctattttgcagcatgctcaccatagttgataataatgtatgtgcatttcaaaactgctaaaagcataagattttagtctacacattgggtacagtgtacactgttcgggtaatgggggcaccaaaatctcagaaatcaccactaatgaacttatccacgtaaccaaacatcacctgttccccaaaaaagtattcaaaaaaataatagattttaaatgttcctgctatgaaaaaaacaaaacgaaacaaaagataggtaggccagatgtggtggctcatgcctgtaatcccgccactttgggaggccaaggaaggtggatcacttgagctcaggatttcgagaagagcctgggccacgtggtgaaaccctatttctaccaaaaatacacacacacacacacacacaaaattagctgggcatggtggcatgtgcctgtggtcctagctactcgggatgctgagatgggagaattgcttaagcctgggaggcagaggttgccgtgagccgagatcacactactgcactccaacctgggtgacagagtgagaccctgtctgaaaacaaaacaaaacagaacaaaaaacaaaaaaaaggataaattacgtgaggtgatggatatgttaattagctcgatgtaattattccacagtgtatgcatatattaaaatatcacattgtatcccataaatatatgcaataattatttgttaattaattaaaataaaaattaagttaaaaacaagaatttaaaaaatacatactttgcaattatctactatttttctaaagacccttacaatctataggctctttctcagttttcttttttcccccttggaattattttttgaataaaactggcttgtttgtcccctccccccaaaaaacaaatataaattatagaactgtaaaataaaataacaaaaatgaaaaactggctgatggactcaatagaagagcagagatgacagaaaatagaatccatatctggtgaaactatccttcaggaattaaggggaaataattaaattctcagttgaaggaaaacaaaaagatttgttgctagcagacatactgttaaaaaatagctaaagggatttcttcaaacagagaataaatgataaagagcaatcaggaaggatgaaaggacaacagaaagagcagaaatgtaagtacataaagtagactatcttttaactcatgagttctataaatcatatttgataattgaagcaaaattataacaccattttatactctagacaatgatatttaaaagtggggaaggtaaaggaaactaaatggaagtgaggtttatacacttcaatcaaagtggtaaaatattgatatgagtagactgttatgactcacacatgaatgttgaatacccagagaaaccactgggaaaactctacaaagatatatattttaaaacactatgaataagtcaagatggaatcataaaaaatgctcaagtaactatcagaaaagcaagaaaagggaaacagaagaataagaactaaagggaacaaacaaaaaacaaataataaaatagcaaacaagaataatatatcaataattacattaaataattatattgaatgcgaataccactacagtagtccccttttatctgtggttttactttctgaggtttcagttacccatagtacagtataataagatattttgtgagaaagagtgtgagtgtgtgaacacaatcacataatttttactccagtacattggtataattgttctatttattagtagttatcattgttaatctcttactgtgcctaatttataaattaaactttatcataggtttgtgtgtatgggggaaaaatatatatagtatacatagagttcagtactatccatggtttcaggcatccactgggggtcttggaatatatctccctggaataagggggaactactctatatgctattcacaagaaactcacattaaatttgatgacataggaagattgcaagtaaaaatatagaaaaagatgtaccacataagtattaatttttcaaaaatctggagaagcttcattaatatctgataaaatagtcttcagagcaaagaaagttaaaagagataaacagagacattacctaatgataaatggatcaatccagcaggaggatacaatgatccttaatgggtacacaccaaacaactatgtctcaaaattcatgaacaaaaactgatcaagctaaaagaagaaagagacaaatccacaattatagttgggaaattcaataccccctctcagaaattgataaatctactagacagaacatcagtaaatatagggaagatctgaaaaagacagtcaattaacaggatccagttgaatatttttacgattttatattggtttttccatagtggttttaaattatatctctttgtatagaaaactccacccaacaacagcagaacacacttttttttggcacctacagaacattcaccaagatagataatgtgcttggccgtaaaacaaacctaaacaaatttaaaataattgaaatcatacagagtatattctctgactacaatgcaatgaaactagaaatctgtagcagaaaagtatctaaacacgtggaaattaaacaacactgttctaaataatccgtggatcaaagaggaaatctcaaaaggaatttttttaaaaatgcgtagaactgaatgcaaatgaaaacacaacatattgaaatatgtaccatgtagataaagcaattctgagagagaaatttctaacactaaatgtttacattggaaataaaggaaggtcttaagtcaataacctaaatttctacatcaaggatctagaaaagaagaccaaaataaacccaaagcaagcagaaggaagggaataataaagagctgaaatcaatgaatttgaaatagaaaaactatagggaaaaattaataacacaaaaatttgcttttctgaaaaaaaaatcagtaaaactgacaaacttctagcaagactaataaaaagagttaagacccaaatcactaatatcagaaatgaaatatggaatatcactatagatcctgcagtcattaaaaatataatgagagaatattatgaacaattatacattcatatatttgacaacttagaaaaaaattggccaatttatccaaagcagcaaactactagaactcacccaatatgaaatggataatctgaatagctctataaccattaaagaaattgaattcataattttaaaagctcctacaaaataaatctccaggcctagatagcttcagcaaataattctagcaaacatttaaagaattattaagatcagttttacacattctcttccaaaaaatagaacaggaggaaacacttccaactcattttatgaggccagtattatcctgataccaaaaccagacaaaaacagtacaaaaatagaaaactacaggccaatatctctctcatgaactttgacacaaaaatccttagcaaaacactagcaaattgaatccaacaatgtatgaaaagaattatacaccatgaccaaatgggatttatttcaggtttgtaaggctggttcaacattcaaaaagcattcagtgtaatccaccatatcaacaggctaaagaaaaaaaaatatgatcatatcaactgatgcagataaagcatttgacaaaatccaatacccattcatcattaaaactcagcaagttaggaatagagggtgtatttgtttcccagagcagctgtaacaaattgccacaaatggggtggcttaaagcaagagaaattaattctctcacagttctggaggccaaatgttttaaatcaaactgttggtttcttctgaggtctctgaaggagaatctgtgccataagtctctcttagatggctgctggcaattctcggtattctttggcttatagatgcatcattccagtctctgcttctgtcttcacagagcctttccctttgtgagtctctgtgttaagcctccctctccgttttcttataaggacaacagtcattgaatttagggtctgctctaaatcagtgattatctcatctcaggatccttaattacatctgcaaaaaccctatttctaaataaggtcacattcacatatactggaggttagaaattgaacttatctttttgagggacacaatttaaccccctacagaggagaattgcctcaacttgataaaaacacctacaagtaacctacagccaacattatacttcatggtgaaagactgaacgcttttgccctatgattggaaacaatgcaaggatgtccactctcatctctcttattcaacatagtactggaagttgtagccactgcaattaggcaataaaaataaataaaaggcctacaaattggaaatgaagaaataaaactctctatccccaaaagatttgcatctagattatatagagaactctcaaaactcaatcattaaaaaactaaacaatccaattagaaaatgagcaaaggatataaacagatattttgctgaagatgtacaaatggcaaataatcccattaaaagatatttagcatcgttatctatttgagaaatgcaaattaaaaccacgatgattatattacttcatacctgccagaatggctagagtagaaaactgtgacaacaccaaatgctggtaaggatgcaggaaaacggaatccttttatttggtggtggtgaggggaatgtataaaggtacagtcattctggaaaacagcctggctggttttttaaaataaaataaaatatgcaactggcgtatgatccagcaattgcactgttgggcatttgtgccagagaaataaaaatttatgttcatgcaaatctgtacctgaatgttcactggagttttatccaatacccaaaaactagaaacagcccagatgtccttaaatggatgaatggttaaacaaactgtattacatatatatcatcgggtactacaaatcaataaaaaacaacaaactactgatacacacagcaacttgggtgaaattttagataattatgctgagtaaaaagagtcatcaattccaaaaggttaccatgattccttgtatataacatttatgaagtgacagaattttagaaatgaaagacagattagtggttgtccatggttaggacaggaatgaggtgcaggatggaggtgagtgtgattataaaaatgtcaacatgagaggtctttgtggtgatggaactgttcaatatcttgactgtggtggtaaatacacgaatctacacatgataaaatagagaattaaatgtgcatgtgcacacacacagcagtacatgtaaaactggagaaatatgaataaggtcgataggttttatcaatgtcagtatcctggttgtgatattataccaccatcttgcagaatgctaccattgctgggaactgggtaaagtgtacatgagatctgtcttatttcctagaactgcatgtgaatctacaaatatataaataaaaattttaattaaaaattatcgaggaccccaaaaagaaactgatatgttttgcctgagatttacctgattttaaaactataagtcccacattcaaggaattcccatggtactgggaaaactgagtcagttgttctctatactaccagacagttttgggtccctggacaagactttaagaacctgtgtaaggccgcccttaacacagaagaaattctcagttcagtgttattaccacaccatcatctagaatttgagtatcttcatatgataatttgttagaaactctcctcccactaccccagtgagccccaagaaaactcaactttcttgtatggtttattctaccttcttcccctcaccttggattcctcaaataggatgtctttgtaagtgttctgtgatgaaacagtgttatcagaatttgagtatgtactattgatttttttatgattatcttttcaggtcaggttagtgtggtgcaagtgaccatcccagacggtttcgtgaacgtgactgttggatctaatgtcactctcatctgcatctacaccaccactgtggcctcccgagaacagctttccatccagtggtctttcttccataagaaggagatggagccaatttctgtaaggacactttttcctaaactcttccccttttgtagttctgactgaaaactgttggggtagaaaaaatgtgaaatgtgaaagaatggcatgccagtgacagtagtggcaggaatctcagatacaaaaagtttgaagacagctgtatagagaagatcatcatctaagtgacttgactcttgtcctctcttcatatttagttataacccattatctcggtctgtgtaggtccacatcaagtggatcatgtattttagagaagacagaaatggttcttctcataggtgaaattaatagtaattctgaaagggctccccctccacctttatctccctattatttccagaagaaactagttcaaatgcaagtcctgattgatctgcagatctctgccaaatttaatatctaggatctggctgtcaagtgaactagctcactgtgctagactgaggcctgacagaatgagactcttcagatggatgaagaagggccatagtagtgatgaaccctgcgtagttcatcaagaacagcatgaggatagaggacaggggatggagtgggtaggcatagggtcagggggaagaggttgccagaaaaggatgggttgaaagtcaagggaggagaatgatttcacatgcaagctgcctattcccaggtttccttcatcaggccttgagggaaattccttctttagcccaaagattcaaattgtatactcaaaggtgtgtgtgtgtgtgtgtgtgtgtgtgcgcatgcatatgcacgtgcgtgtgtgtgtttgtgtgttcatgcacatgtttatgtgagcacatatgccatgcatgcctacacatatcccttgatggaaaaggtctgtagctttcatcaggttctcaaaaggctgcatgacccaaagcagagtttagagaagagacaagtcggtgtggtttggaatagttggatgcagctgaattgggccttgaaggaaaagaaaggttttgattagtagaaagatagagggagagcaagttgaggaggctgggggaggcctagggacaggggtggagaagaaagaaggcattagtttagaggagccacacgttggccagtgtcacttcagccatcactagtccttcagaagtgctgagtcctctgtttacaaatcctgagcatttgtttagcaggaaatgccgtacagggggagattccatcaatgccactctctagtccaagttaaacaattttgctcaatactggttaccttggacaagtatctgaatcactctgcacctctctttaaaatatggtagatcagcaatacccatggggaatcaactgatataatgcatgtgaaaaatataaagctctgtaagttttatcccttgtaaacactattatgattatcatcatccacagcagcaccaccaccaacagtgcttctaccagtttccatcacccaagatgtccagacccaaggccttgtatgtaggagtcaactaagaaattattgccttcttttgcaggatgctctgttagattgtagatggcaataatcacatgacctttcttcctttttgaaattcaatttccggactagtcttgtcaacacattctttatctgtaggcttgaaatccttctcattttgccaggtggggctggatttagggagaccttgccaatgtattttgaaatattttctgcttgatattcaaatcaagatgttctcaactgcctgaaggatgggcaaggccacaaatttttatttatgcctcctctgacactgggatttacaaggctacctcttggttgaactgtgtgtctagtgaggaactgggagggagctgcagagccgaaggatcctgtgaccagcaatgagctttttctataccaggaaatgcaagggaagaagatatggtgattgaattgagtgtggcctgagcccagaacatctcttagaagcacttttaaaaaaaaatctgttaacaaataaatatttattgagtagcttatttacttgccatttgcttcattcttcaaaatgtcaggtacaggtggggcaagtgatttaagatatatactcttttggaatgtccacatcaaaggagggcctctgcactgagctgctggatcaggcaaaacatgctctctgatcttaaagctgcatgatacctgtgttacgcctgtgccttagctgcatagaagacaagcttttgtgtttttattgctcccacagcttgggagcaataacaaccatccccctaaaggcaaattttatcctccttctattttcctgtctttctttagcttaccctagccagatccccattacaaccatttttagctctctacttctaaagaaccggagtccttcccctgactccccatatcctgctggcatgggcttctcactgctttaccagatgagtagttttgaagtcctagtggaaatctcatgatgaatgtcaattcttcttgctctgccacttatttattgactgcgtgatcttagacaagtcgtttgacctttcagttgttccgtttccaatctttaaaatggggctacttacctatctcataggttgaatatgaagactaaatgggatgatgcttgtgaagcactacgaagccttctacccagtaagcattcagtgaatgcgagcttttattattggcatcatcacttacaaaatggcgattttgcaaaatccctgttccctccatacccctggtgatctagagggactgactcatgggcactagggagcctagctcaagaagatacacttgaacagggacagagctcttcagggccatactagcccaagatcagcttcgagttccactgcttaccaggtcactgtggctaaagggagggcccaggccctttctctacctgcttcttatccctgaactgacagcctgctcaaccaagaggttgcagacatcctgtgttgaggtggtatttttcaaaatgggatttggcctccatttcaagactgtttcctctttgaaaacattcaaaattctgtggagcatgttgtatgttaatctagggattgctggtggaacatttatgggaggataaaaagactgctgcactattagacaattatgtgatttatgggactaagatgttgccagacatcagtggtcacactgagagattcagttcaactcctgggttgatgtggcagtatactgtatagcattcagctctcagatccacccatttctgctcaaacacagcacagctcgtgcctcagtactgagggtatggaggaaaaggcagtcagtcagtgtctaaaaatgacgcacgcaagagacgctcggggaagatgtagctggacctctgaggtaagaacacttattggtgtactactggacttcttcattgtttggagactccagggcactggcaccagctttaggaatgggatgggagggtctgactttggtaacaatcaagatcagcacaagcccctgacaaaactgggacagtcttgagtttaccttctcacatccatgtctggagttcttctgcctcttcctaaaggctcaggaccctattgctgccctgatcagggcagtggccagctctttccatagtcccatcttccctttcctgaaatcattgtgttagattagcaattgactctgaggcctggtattcctcaatacctaggggctgatgttatctcttactgactatcccctttggagaacagagactgaagtatcccacaggtcttcccaccaagaaggccaggatattcattagcatggtccttctctcagagaaacattcctctcagaaaatatgaacagctttagatagtcaatccctcagcagggaatctcagctgaaaactctaggccaggtatgggcaggctaacatggaaatttggggtggtctggtgcctttctggtcacacagatggcttcatcttccatccagtctgttaatgctaacactacagagaccccacctgtccctgaacagaccatgccttgactctgcttagcatgaatctctcagacaatacttattcttcaagaatgttcatagtgaaaaaataccctttgccagtctcataaacaacttagacaacttctttcccaggacctagtgttcttatgttctctggcttctcaggttttacaacctgaaatacacaggacagagccacacaataaagagttgtctgcccaaaatgccagtgtcacccctactgagaaatactgcaagttcttccccaccccaccatcaaatttatgtattgtgtcccattcactttctgctaaatctgataaattaatctcatggtaaggtgttagggactagcgaaagcttattttattctcttctaaagaatgcattgaatgggaccttccatgccttcttccaaaaggagcaactcaaatggcagatacccaggcaaatggagggttggtaagagagttggtttggaagcaagagagtctttcttttggtatcccattccttccacatgccatccctgcaccacaatacagtccaaataaaattctgagcttgtgaccattgccaccttatacctgcacaccccttccctatcctatggctagcccctctatcagcagtacaagaaagcaagaagctggaaaggaaagaatgggtggtttgctgtggatgtccatgtcctccaccttcccagaaggaatctgcaaaagcagctctggaagctaactccaactcagattcaaacagaaagcagactgaattctttcaacccttcttgtttatactccatgcttctagttagagagcagtgtcactaagctgaggaaaaagtcttttaggacaaatctggttcccagctgcacggccttgtgtgaataggaacttggcacagtaggaagggaaaggttgctctgcaaagaactgaggggcctacaattgcagctggcaaatattgagggcatcatgtggtgaacatactcagcatgggaagcatcatgccaataaatagcaacaattggcaggagaaaggttgggctggagcagggaatggaatggtcccaaaaggagaaggttgcccaggaatcatctttctcatcttaagaagcactgtgagtgccatcttaatatattcagtgggaatcagaaggtctgaattccaggtctgactgtaaattgtgtgaccttgggaaaatggctccctctattgaggcctcggtgtcctttttttgtattagaaaaggatgaattcgagtttactaaccgcaggcctctgggtcagatttggccagtggatgtatttcagtcggcctgcccagtattttgtttgtttgtttcaacagttcgaatgccttgtttgcgttgacttttccgttccctgcagtccccatatctgttatgagcttaccactacttaccagcccctcccagccatttcccatatttccaatatccatcgggctcctgaaggccccttaaccttagaaaccacaaaccaaactatctcacagaggtcttataattaatgtgcaattatgactccacccatcagcctctagcgtcaccctgggggcaggcagagaggaccttgggagaaagcagggcagtctaccatgaacccaagcacaaagtgcaggtgggtaaaaaattaacaagcgccccttaagggaacactgggatggatttccttaaaaaaatcacctcctccccacctccacccaaagatgtggcccattgtacatccggggctttttctggatctccattgctttgacgtctaaattgataatattctttctttgaaaagtgtacaagccacacaggatcatgggccaggctttggccactgttcagctttgatttttaaaagagttattcttttatggaaagtggaatcaagttgtagcccttcctatatgattagataagcagtttcaggaaaacacttctttctttttttctttacaaggacagtgtgactgtgtggacttccccttaacagaaagcccctccatgtatgtgtctggctgctgctgtctacccctaggtactttacttcttacagagaactgtgaagccaaagccttggctcttttaggtctccattgttagccctcactacccccatttctgtctctaataccttttagtgtcaatcgtgagagggcaaaatgtattagactacagcatgaggagctagcatgtaagaggtagtaaaggtctttttcatgggtaaggttccagggcctcattgcttatatactcatttcaccttgactcatgcccaactatgggacttttacagtgggcatggacacatggatacagtggacacttttacttcttctcatatcctaattctggcctaaaacacaccattttggcctcaagatctctgcagaaataaggtccttttcacctggatcctctgggacttgctgtgggcctcaggcgtgactgatgttgtatctcattgtgatgtcatcaagcatcagtataaaacagggctgatgttttacactgtccacagtctccttgggaggaggggaagtggccagatgttgaggctgtgaagggcactcttgatggacagcaggctgaactccaggtaagaaacaacaagacctcaaactgtcaattagaaagtaaataagccccatgctgcctagtgaaattgaaagcctgatagcgtgggtgccaactcaaatgaaagtaatcctctgatgtattgaacctccttctgtcccacttgaatacctggagttaatcctggctttctggtttggaagtcaaacaagaccattctggggcaagagtttgtgatttcagtaggtgtgaatgaatgaattataaatggctgcatttataatgcaagcaagaaaacacgttgatgttagaaaaaacgggagagaaacaaatagttttctctgtaaatgtactcttttcctgggatttttccctcaaaatccagctttctgccttagttttaaaatatattgactttctgcttaaaggagaatacatttgaattcatctagacaatatcttttggttttctaattgctttccctcttttattggcctgttaaggtaaagcccacagtacaaggaattaggaaaattggattccagatctgtctcaaccgtcaattttgccttttattttttaacctctctgggctttggtttcttctgtaaactgagggaagtgaattaaatgaactgtaaggccttccagtagattttatgaaaaattagtctcaccagactaagacaatacagtttattgaacaataacaatcacttgaataatatacatttacatgaaaccaacaaaacatgtacatagaaggtgtgtattatgaagggacctcaggaattacctaatccagtgatttcccagcttcagtcattcatgtaccatctacatgatttttgtcatatttgtgtatcaccagcactatttgttatttaatgttattttctgtattgacttgttttcttaaaatcttaaaaaatatctaccttaatctaccctatgcaacaatattcaggaagtcatagatttaatgtgctagatttttctgtttctaatacacattgaaatttgtaagttttcatttatatactacctaaaatcaacttaaatgcctatacttggtaaatacatatcatactttggaaaacattactctcttttctcattcagatgtggaaagtaaaggttggagagattaaataactttgtttcttatctaaaaccaggctgccatggaggcatgactagaggccacctcccctaactatatcacagtgaggggcagagctgtgactaactcaagccacctgacccctagaccaggaccctttccaccacatcatgctgctcccacagttgccattatgatctaagtatctatgctctttaatagaaatgggactagaatccagatcttaagtttaataagttataataataataaatgagcccttgtggcttcagatgggtcacttaatctctctgggtctgagatgccttatttgtttaaatgacagaagaattccagttctgccttctgccacatggggagaaagatggtagctatcattggctgagcacttccgaggtcctttactagatttcttagtttcatcttcacaacaccactataaagggatgggaccagatgatttctaagatgcttttccgctttgcttctaataaacaaaacaaacccaagtttgtctatccaaaagagtaggtgtgtctaaaaggagcatgaacatttgaacatttaaggaaaccagatagtctcactgggtaaggtaaattcaaattttaagaagtttataaaatggtaaaaaaaaaaaaatgatggttttggtttcccatcagacatttgtgttctacataatgagtttctctcaggtggattcattaagtgagcatcttgatctcctagcccaagcttaggtgttgaatcctgtcagctccagctgcctcctcctctgtaagataggcatactaatccctgccctgatgacatcacagagctgctctgagggccaaatgcgcagctgtgagcaaactaaagtgccccactgagttgagaaaccttggccacagggacctgttcctggtggggggaagatgctgcttctttatcaaaggtaatgtgtttagaagaagctttcaggtagcttatcctagtcctggactctctccagttctcacttctgttatttttctgtctagatttacttttctcaaggtggacaagctgtagccatcgggcaatttaaagatcgaattacagggtccaacgatccaggtaatgcatctatcactatctcgcatatgcagccagcagacagtggaatttacatctgcgatgttaacaaccccccagactttctcggccaaaaccaaggcatcctcaacgtcagtgtgttaggtatgagcacttttttctgctttttcttttcttggaaaaagttaggacactgaatgagccaggacagtgagttatgatgccaattaagtctctgtaggtaaatatactccctaatattttcattatcagggaaatagagacaagccaccagcccaaccaaaacagtaacactgagaaatcactcataaaacatgcagaacaattgtgcaaacgggctgccaaaatgacagcagtagatgacccaacctccagtgatccctatctctgagggatggaatgagaacagatgagacaatccactgtcccacaaaatgatcactagcaactcttttagaggaaacctccatttacagccagatctacctgggggagactactgtcaacttattattccttttaagctcgacacaattcccaccattaaattattcttttaaataaagacaggagagtcccttttttaaaatgctaatgttatttggaaaaaggactgaaattaatctagtgttgagaatcaacatatttacatacaaatattcattatatgatattgggcaagccgtatctgctcttaaaatgaatttggaatctcatttgttcagtatttattgagttacagtgatggaggtgttgtttttgcccttgggaagctcccaattttggccatttctagaagtccttacaatctctgtctgagaggacaatgtgggctaaacttccatctgcaggctggtattgggaagtatcgaagcaagggatgaaagggctgccaatcctcaactcttacagacagaccagttgagatgagcattttcccacttctaggtagccccaaatgaagctgatctagtcattgctgctctcaagctgtgtgcacacatcacaagaaaggaggaactacatcaaatcagtgacttaatagttgagtagcttggaaaagcagcaattggtaacaaggtgcatacccaagagaactgtttacagttgtcctggcttgccactcaggtaatgccacaaaggaaccagctgacatttactgtgaggtttgccactgcatctacccacctgggaaagagggaaaggtacctaagagctattttttaagagtgggttagcttaatcaatcatatttttatcttactgagttctgtgccaggaattggggtacaggaacagacaagagaagtattactcaagcaaattcctgggagagtttctgtttcagtttggaagactagtgtattagtctattcttgcattgctgtaaagaaatacctgagactgggtaatttataagtaaaagaggtttaattgtctcacggttctgcaggctgtacaggaagcatagcagcttcttgggaagcctcaggaaactacaatcatggcagaaagcaaaggggaggcaagatgtctcacatggctggaacaggaggaaggggaggggaagatgccacacacttttaaacaaccaggtcttatgagcactcattcactatcacaagatcagcaccgagggggaaatccgcccccatgatccagtcacctctcaccaggccctatcgccaaaattagtgattacaatttgacatgaggtttgggtggggacacagatccaaaccatatcaactagttagttatatacatgggaactaagtgatgtgctataaatgccaaagcatcaaactggcactcagaagacctgagttttagatcttactctgtactcagtgaccttatacaagtcagtccacctttctctgaccattgtgagatggggttataatttctgccctgtcttctttacaggtttgttatgaacagttttgttattttacctataaaatgaaatactggagatcaaaggggtttttaaatgttcaaaaactggagggattagctaatgattttctgttgcttcctggttctgggatgttctgaccagaaacaatctaaagaagccaagtctcttcatctcagagcttggaaatagccctgagataaagttagacaagaaggttaatattcttaaatttaaagctcagaggatcccaaatcaatttccataagaagttgagggtcacttcatctcagaggtgttttttcccatgagtctttgtgtcagatagctctgtgtcatgacttttccttaagcagccaggatccagacaaggtaagaggcagaagggtctgtggatttccttgtttgtttaggaactctaaaaaatattgtttttgttaattgggcaaagaacaaaggcctcctccaaatgtaggctttttggaaaatttgagactgctaattttctctaaaaattgcagcgactatttgcaattctcaaatctcattgtatatgagtgacaattttgcttgccctgactgaaaggtgaggcaagatggggacaggtgggtaagagagacaggttaattgtggggagaggtgttgatatttccttaaagatgactctcatagcaatgtatctttcagatgttttgttacccagcagtgagcatcaatcccatgcatttactcgttcatgcatgaattcatttaacaaaccctgagcacacgtgccagttactgtgctaagcaatggacatggggaaatgtaaaagatagggtcttagccctctaaaattcagtctagtgaaggagacagacgcgtaacataaaagctttcagtggaggtatgagaggagagctatgagggcacaggggaaagggcaaaaagctgtatcaggaattggagaaggcttattgaggaaagtgacttttgtgctgaatgttgaaggatgtgcaagagtgtgtgatgaagaagaggggctgagatggcaaggcacagtttaggtgaaggaaacagcaatgggcaaagaaccaggtggtttggatggccattcatttgagagctttccattaggtatgacaaccttggaaaattaatctctgaaaaatacccagatcaagtttgaataattattttgtgtgcatttggaatgagcatcatctaccttccgcaatttggcacataaaaagaaaatgattgatttagggaaggtttaagaacctactgaagcactttgttttttcttttttctttttttttctgagctgagccttttcctcccaccccaattctgttgaaagcaataaagctaaatggtagatcaatggctttgccagtaaaatacccaagttccactggggactttaactggatgaaatttcagttcaatcctgggtcagtagttttagaaaatatataggtttgggacttggttcaaagtgattcactaaatgttttgttaataaaaaataaaaggagaaaaatattctaagcaaaaaaaatgcctatctgggtttgattctgggctcaagaaatgagtgcaagtcattccaggtttttgccataatttagttcaagtcctggtgtccaactttgtgatgaaacacccccatttaattttctgttcaaattgttctattctgctgtaaaggctatacaatagccatctttttaaaaaggcagtatctaaatctagtgatagctgcaatggacttctggttaaatagcttagtttaggataggcacatccaacaagttgttcctacctgagaaaatctttgataagaaagaataaagaactaagtagaaggatattcctttcaattaaaaagacacatgcttaaaagatagggctagtaaactgtttaagaattatagctatatgcatctgtcttctcgcacctgtgtacagatagtgagagtctgggaaggctgaactgagcggaagtcaatgggagagtaactttagtagcaggaattagtgctgctgtggccaacagaaattccaggttctaggccctatatttattattgtatttaatacttggatcagccagaggttagataatctcttagtcacgttttacagatgagtcagctgaggtttggctaagttaggtaacttgcctatacagatccagggtagagttacaaagcccgtattctgtgtggatccagagctgtgcccttaaccactgcgtctcaggtaagagctgtaggactgagtaatatgacacatttcatgtctaactcacctaaattagagaacctaagctttaaagggttctagagcaaaatgaagataagcaaggtgagttggaaagtatagaaatttacatcattgtctgtatataagatagatatataaggtgtataagatagatgtatagatataaaataaatatctaagataagagatataagatagatatgtagatatgatagatatataaatgtataagatatgtaagatagaataaaccgtgcaagtaagtaagatgaatgaggagattcagattcccagcttcccacaggacttctcccctgacatgttttcataagcagctaaaactctatgtcccggactgacctcattagtaccccttcctccttgtcaccccttcacctaaaacctgttcttcctgctgtggtcttggaggcctcttcccctctctaaagtcatctctcatccctctcccaccccactttagaactgtgtgaaagttacttttgaattcctggtgcctagtcccatgccaggcccacagaaggcatgggtgcttgctgagtgaaggatgaataaatatttcagtgctgagtagcgtgcaccccccaaatggacttcccctactgatgatgcacacaggcaaatttaaacctttcaactatttgtgtcacccacagatgaacaaatgcaaaaaaaaaaaaaaaaaagaaaataatcatgagagaaaagagaaatacagcattaaatattttaaaaagaataataggttatctcagagtatttaaggattctattttcctttaaaactgtgcttttaaagcataaactatattcctggtcatttagtatttgcttatatttggctgttttaataaaggcatattttaagacacaatgcggaaattcatggttataaatctgaggaggaggcagacagaggagtcactatttgaatcttaatggcctcttgactagaagggccctgcacctgaagtgctctactcccacctggtggtgcaagcagaaaactgccaacatacattttaataattttttttgtgtgtgtggagacccagtctcactttgttgctcaggatggagtgcagtggcgtgatcttggcttactgcaacctctgcctcccaggttcaagtgattctactgcctcaccctcccaagtagctgggattacaggcgcccaccaccacgcccagctaatttttgtatttttagtagagatggtgtttcatcacattggccaggctggtctcgaactcctgacctcaggtgatccacctacctcggccttccaaattgctgggattacaggcatgagccactgcgcctggccaagaattttttttaaaaataaataaacacacatattattcaaaatgaaagtgaggaagtgactgcaattgtcacagaatgccattcatcctaaagaatttttattctttgtcattgccttacagtgaaaccttctaagcccctttgtagcgttcaaggaagaccagaaactggccacactatttccctttcctgtctctctgcgcttggaacaccttcccctgtgtactactggcataaacttgagggaagagacatcgtgccagtgaaagaaaacttcagtaagtgtaacctgcagtagaccctggaaaggcctggtgtctgtggttggatgacagcaggagtgtgtggttggctgcttgaccttacagttcaatcttcttgttttctcagtggtggcgggtggaggggggcggctggtaatgtaaaaagaatgcctgtctcccaacacgatgattgtgttctggtctactccccaaattctaaaagccagctcagagatggtgaatatgtagggaacaggcatggtcccaggtgagttagcactggaacagtcctgaggggcctagttgaatcctgaacatctcaagaaagagaggccaatatgggggagtgggtggacattgagtgatctgttacactgatgttatctgtatgcacagaagagatctcaaaagtctattccctggtttcaacagacccaaccaccgggattttggtcattggaaatctgacaaattttgaacaaggttattaccagtgtactgccatcaacagacttggcaatagttcctgcgaaatcgatctcacttcttcacgtgagttgaccatacaactttaacggtttctccttaaatcaagtagtctgggcctgtcagacaaataaattagttaggatccccagttagtgcttcctgcttctctggagatttgtgtgctttatatacaggctgatatgatgaatgaccatcctaatatctaatgctcacataataatatatgccatatgctgccctaaatcctttacaaaaagcaatttgtttgcttcacaaaatcgctagaaggtaggtattactattcaatactaaaaaagaagcctttctgataacagcaggctgaatttctctttgtgatgctgttggtaaatccaggtgacactgtagctctgacaaacatataccttgcaaagatctgccactaataataatagtattataataataacactcgtacccacaatcacggtagctactatttgtggagcatgaattatgctgagtattatctcactctttcctcccaaccacccctatctagggaggcagactattgtcggcctcattttgctgaaaagaacactgaagctcagggaagtaaatgacttgcccaaggtcatccagttagtaactggcagagccaggatgcctctaaacctcaattttcctattcgaaggtgcttactcactctctgagtgtaagatttaagactcctggaattgtccaattgagctgacccaggggcaactcctcacaaggaatatctcaccaaacatctcaaggatcacttaataacacttaggatcttttttcaaacttactttgaatttgtgattttaatatatgccatatccagggatggcaagttccagtgggtttttgctcttcctatgcacctgaactttcttccttttatttctcctgaagtttgctcctttattctcatatcactttcagctatatttcctgcatcatttctgttatctttctttagaattccctcaatatctttttgccttctcagaggtacaatcatactgcagatgtagagatatgtaggatttggacttgagcattgcttcctttctagtcttttttccaatgatgtccagcactgccttcctctctccctcccacatcccttctttcttccttccttcctcaaatatttattgaatatctactgtgttccagggactgtcctaggtgataaagatacagagataaagaagatgtatgtcctatactcaaggagctcacagttcagctagagggacaaacacaactaaaacatgctaaatcctataatagaagtctgaacagggtctatagagcaccaagggaggaaaattatgcttatagaactgggatggctttaccaacaaagtgctatttgagcaggatcttgaaggaacttgcaaagcctcatcatctataaaatgggaaagctgaagcatgacggtagagcagcaggcttaggagagcaaccaggtcatgatgggggaagagaatggagggcttcacatggcatgtctctgagggaaaaatcacaagaaactgatatatcatctgatatgtttgaatcaattgaaagaagtttaatggttttgttggaaatttcgggatgagtgataatgcatttattaatccccaaatgaagcaattattaacctccgggaaaatttttgtaaatgttgtacaagaaagaatcatagtatactgtgttcctcagctgtgaacaatatttatatagccatactactgcaaacttggatttaactaaaacttgtgatataactattttggaagaacatggtgggtgtgaggggagtggtgtaaaagagctcaatctccaacttctagggtacgaagttgaaagaaaatgatggaatggaaaaaaggtaggacatatcagagcaaacataataaaaacatgggggcaagaagacttttaaaaagagttaagagtggttgcctttcgtgaatgggactcagaaacgggaaggagtcgggcagggaactgctgtttttgtgagacatgtagtagaactatttgactttttaaactatttacttatattctcttaatcataaaaagttaaaggaattattatcaggcagctcaaaatataaggtgtccatccttgtgtgaggggaggcagatggggttgggttggcttataacccagatgtggtcttccagagacaacacctcagggcttgaaggtctggtgctcagctggataatgtcccactcattaagtttgtccatagaccgagacaataaaccagatgcctgtttatcaaaatgggcatatcacttcccagtgaccagagtgcatgaggttccttcgtaagcattgacgccatgggggaggtttttagggaccaatttcacctgtgctctgggaaagcctagtgaaatgttcctgcctgtaacagaggcttatctctagtgaccagatcacaactccatggtgtctcaagactcttttctctaaatcccatttcaaaagcaaccccacctcctccaagttggccacattttattctttatgtgcacaaatgtcaatagtcttctcccactgtgagtccaaatgacagagttctaggggtttccatttccctagcctatacaagtcattttcccactatgtgaatggccctgatattccccactagtcacaaacacacattataaaatgacaatatattccactttattaaccagctgcttgtatccttcagatccagaagttggaatcattgttggggccttgattggtagcctggtaggtgccgccatcatcatctctgttgtgtgcttcgcaaggaataaggcaaaagcaaaggcaaaagaaagaaattctaagaccatcgcggaacttgagtaagccttcattttgttgtctttacttgaatacaaacatttctcaggcatgtctttttcagtcatcaattcctaagcactccttttagtataagatatcagaggtatctttctgtttactctcattgaatttaaaaaagaatgatgatggctgctatttattgagtgctgtgtgccaggctctgttctaagcactttatgtacatcaactcatttagctatcacaacagttttaggtccaagaaaacattttcatatataatactaacatacttgtcttaataccaacatagtcatgaaatataattttaaatttttttatggaacaagagacccacaaggacagtgcccagggaacacagaagttagaatgtggcccagcccacagctcatgctcttaatcactctatttctttcctagtgtgtatctcactcattcattttttttcatctccttgcttctacaactatctattgggtatcaaccaggtgccaagtattgtactagatggagtgagaaatagcgatacatcagagctatgaatttggaccttaaagaccttattagattcttagactctttcattctgacattattttcccaccttgaaacactgctctttcttaaactttcatgatattgttgagacctaacctttctgaatccaaaatgacctatggcctgacaatgagtcagaatatcagaaataacagatttcctgaagtctgggacctatggtcattgaagctacagaacatatggtttcacatgaaatttcaaagttagcatctccctaacttgttcttttctgggccttctttcttgcaggccaatgacaaagataaacccaaggggagaaagcgaagcaatgccaagagaagacgctacccaactagaagtaactctaccatcttccattcatgagactggccctgataccatccaagaaccagactatgagccaaagcctactcaggagcctgccccagagcctgccccaggatcagagcctatggcagtgcctgaccttgacatcgagctggagctggagccagaaacgcagtcggaattggagccagagccagagccagagccagagtcagagcctggggttgtagttgagcccttaagtgaagatgaaaagggagtggttaaggcataggctggtggcctaagtacagcattaatcattaaggaacccattactgccatttggaattcaaataacctaaccaacctccacctcctccttccattttgaccaaccttcttctaacaaggtgctcattcctactatgaatccagaataaacacgccaagataacagctaaatcagcaagggttcctgtattaccaatatagaatactaacaattttactaacacgtaagcataacaaatgacagggcaagtgatttctaacttagttgagttttgcaacagtacctgtgttgttatttcagaaaatattatttctctctttttaactactctttttttttattttagacagagtcttgctccgtcgcgcaggctgtgatcgtagtggtgcgatctcggctcactgcaacctccgctccctgggttcaagcgattctcctgcctgagcctcctgagtagctgggactacaggcacgtgccaccacgcccggctaattttttgtatttttagtagagatggggtttcacgttgttagccaggatggtctccatctcctgacctcatgatccgcccaccttggcctcccaaaatgctgggattacaggcatgagccactgcgcccggcctctttttagctactcttatgttccacatgcacatatgacaaggtggcattaattagattcaatattatttctaggaatagttcctcattcatttttatattgaccactaagaaaataattcatcagcattatctcatagattggaaaattttctccaaatacaatagaggagaatatgtaaagggtatacattaattggtacgtagcatttaaaatcaggtcttataattaatgcttcattcctcatattagatttcccaagaaatcaccctggtatccaatatctgagcatggcaaatttaaaaaataacacaatttcttgcctgtaaccctagcactttgggaggccgaggcaggtggatcacctgaggtcaggagttcgagaccagcctggccaacatggcgaaaccccttctctactaaaaatacaaaaattagctgggcgtggtagtgcatgcctgtaatcccagctacttgggaggctgaggcaggagaatcgcttgaacccaggaggtggaggttgcagtgagccgagattgtgccactgcactccaacctgggtgacagagtgagattccatctgaaaaacaaaaacaaaaacagaaaacaaacaaacaaaaaacaaaaaatccccacaactttgtcaaataatgtacaggcaaacactttcaaatataatttccttcagtgaatacaaaatgttgatatcataggtgatgtacaatttagttttgaatgagttattatgttatcactgtgtctgatgttatctactttgaaaggcagtccagaaaagtgttctaagtgaactcttaagatctattttagataatttcaactaattaaataacctgttttactgcctgtacattccacattaataaagcgataccaatcttatatgaatgctaatattactaaaatgcactgatatcacttcttcttcccctgttgaaaagctttctcatgatcatatttcacccacatctcaccttgaagaaacttacaggtagacttaccttttcacttgtggaattaatcatatttaaatcttactttaaggctcaataaataatactcataatgtctcattttagtgactcctaaggctagtccttttataaacaactttttctgacatagcatttatgtataataaaccagacatttaaagtgtacaatttgatgagttttgacagagcacatacccatgaaaccaccacacccatctagagagaaaacatttccatcagcccaaaatgtttcttcatgcccctttgtgcgatcccaccattgccctggacctaggaaatcactcattgttttccatcactagaggttaactttgccttttcttggccctcatacatatgggatgatacagtatgtactttttgtgtctcacttccttctaaggtgaatcctttttaaacaaagtagtgagtttctcatttatcactttcagattttcatgtaaaatattttcttaaactgcaaactcctttctatataaatcataaccatacacagattgaggtagagtctctgtaggttttaaggagagttaaaatggaaattaacattacacttatctagagccatggagagaagagatagcaagcgtttatttctgcattttcttcgatgcgtccattttcagaaaatgtcagggatttctgatgcatttataatttcattcatactaaatatgatagtatggtatatggtgtctgatggacacaagaagcaaaataatgaaggtcttaagaatgacctaatatttagagattaaaaagtaaacaacagtgtaaacatctcaattaccagaatgcccaagtagctggaattcatttttcctttccatttttattatagaggcaaatcgcaagagactgacatgtaatagtcaacaattacaccccaaaatttttgatggatcagtgcagtccaggaaagaaagcactactggtagtcttatagagctctgtccttattagcactgttctgttcaaaatactgatgaatagttggatcagtggcttgtaacctttttctgaggtcatggaacaccttgagaatctgctgaaaactctaaactcatcttcactgaaagatgcttatacacataaagtgtcacatatagtttcaggtgagttacagactccctgaatccaagatgaagaaacagttacttagatcaaaacacacaaagtacacttaataaatttgtggatgacttgctcctagggggaatggccactaggctataagaaagaatcacgattcagaatgatcttgatagctcaaaagtggagttgaaaccaacaaaatgaatttgacaggaataaatagaaaaatctggatttaaaaatatgaagtacatgttgcccaggcagaaaccctacatgggcaaggttaggaagcacatgagattaatctgaattcgtacctttggatctctcctttcagtgccatttctggccttgtggcatcttattttccaaacacccaggattctcatgctcccattagctcagtgaccctctcagttcttcttccctcgggcaagactcattgcgcaggacctaaagtagctgttctgtaacctgttcttgtccagtgaacatgatctttcatcattcagtgatctcattaggttgataaatgagttagtcttctttggagtatttaccttttaaagaggactcaagcacagataatccttaatctgaagagtctaaacaatccagaggagatatatttctgaaaaaaggaaacttctcagcccctctcaaatcaaaccaggtggtttaccacccattcaatctactctgggcaactcagttttgatcaactttgatcagagctagaagagtgctctgaaataaatagtattcaaactttttcaaccccagcacacctgagttataacacatacagtgggccactcctaacaatgatgaagctggaggtgggagatgatgtacaattaaattattggtgggggagacaggaaggggtaaatgttcttttaaaaagctggttcactcttatatattgccacccagcccctagaggagaatccctgagtgcagagaagtaaaataatctgcctgagattacgcaaagtcaaaactagatccacatcatctggatttcagggcaatgcttttcaactgcaccaaactactaatttcagtgaaacaaacccaagctttagtaataaaaagttgttttacaatgtctacctgctggaaaacacatcagtgggcctcataaaaggtttaaactaatcgataaagactcagtactcccacttgtctttgaaactttggtttaaaaacaaaacaaataattcagagatgataatgagggctccaggaaaccataaaaagatatgccaataaagaaaaactgttccactactcacaacacttcagaaagcaaatgtgtggggtttccacaccaagtaattctccaattctctgcagacactgactgggtgtcctgcaatttaattcaattctgacactacccagggttgggtctgacaagactgcccccaacttcagacacatcacaagtattgggtgcccagtgtacccacacttctgttagacttgggtacaaattgggggttcccgcaacctcaagtttgataatttgctgtaatggctcatagaactcaaggaaacactgttgtccaccagtttattataaaggacattataaaggatacagatgaatggccagctgaagaagtacatagggtgaggtccagaagggtcctgaacataggagcttctgttcccatggagtgggggtgtaccactcttctggcatgtgggtgtgtcaccaacctagatgctcaccaaaccctgtagtttatgaatttttatggaggcttcatcacataggtatgatcaactattaactcaatctccagcccctcttccctccctggaggatggggggttggggctgaaagttctaatcctctaatcatggcttggtcactaatagcccccgttctaaagctatccaggagcccactaagagttgcaacattagaacaaaaggcactcctatcacccaggaaatcccaaggggtttagaagctctatgtaagacactcctatcactcaggaactgtcaagggttttaggagctctgtttcaggtactgggggctgagaccaaatatgtatttcttattacgtcacagccaaattaaagaaaagcaccaggataggtgtttcaactaaccggttattttcaaaatgccagaataccttccatttggtccactgtctttgaagaggcagaaaagaaaatgaattagaatccaggaaagctagattttggtactggctgtttctctagctctgggtatattctcatctgtaaaatggagatgatttctgccttcttaaagactacagtgagaatagatgtgaaaacttataaattaaaaaactgtagtagaactatagttgtagaaatgaggtctcctgacaactgattcagtattcttttttgtctcaaccagggatttttaaccttttgggggaatcacagatgtccttgagaatttgatgaaagcaataaatcctcttcccagagaaattcacattacaaatttctgctttcaattttaggcagtcaatagaactgtgaagctggagccataaaccacaaagtcaagaatctttatactctatcagacttgccaacagattgatttggaggccttgtagtgtaacagaatatgggagcagaaagcagcagacgcagccatctaaggaattcattgtagttggtacagctgagaaattggggaatcaaacactagtgtcatacagttaaatgttaagtcaaagattatgaagaaaaacacagatttactttgaagttcccaaaacctcagtgaaattgtaattctctataacatatttaagaatgtaaatgttttcactattttcattggcctttttcttccatcgtatattctcagttaagctttaccattaaattatttatgtattttgagatgaattgtcgctctgtcacccaggctagactgcagtggcaccaactcggctcactgcaacctccacctcctgggttcaagcaattttcgtgcctcaacctcctgagtagctgggattacaggcgcccaccaccacacccggctaatttttttagtagagatggggtttcgccatgttgggcaggctggtcttgaactcctgacctcaggtaatctgcccgcctcgacctcccaatgtgctgggataacaggcatgagcgaccatgcccagccaaattatgttttgaaactgtaaaatctgctgaccttgaatcagcttcatctctaacacctttcctacagacacaggtaacaatctgatcaatatccgaggccactaatatctttattttatacaaatctgtgatctaaatattaacaagtcatgccatttaaaatgccaaaagcctacaaattacctgtggcttagctccatctgtattgcttattgaagaactcggatgaatttccttttacacccacgaaacctatcacctcagacaattaactcaatatttatgaagagtaaatgtcttcagttgtaacagacaaaactttactctgatcacactaaaaatactagaaatattatttcccctgctatcaagtctatctccagcattcaatagagttttgttctataagatgcttctctgattgttaaggttagcactcacaatacttctgtaaaaagtttctatatcagtaacacagttcgtgtttacgaaactcattttagctactgatcattaagactttgaccgaaaattaatgcaagtttgtaggttcacttggatcacttatttcgagcagtatttgcagcataaaattcaaataaaaaataatctgaaagtcacttggagttcattagattttatgactagtatcagttaagatgcttccctaaatggagctcaagtttatacttaataatttccttttgttctacatttaattagcaattcagaagatggctattttaaaagattttagctacaattcaagcttcactaattttattgacttagagctaccaaaaactgagaaatgtctttactaaggattctaaggcttaagtgaattctagctaatttgaaagaaaaattggaagattctttcaacattttattttttagtttctgaaatacaaatcaaaatacatttttgttacatgtcattttaacaagcttgacattcttttcaatacaggatgacacaaaataggtactttaaaacttccttttaagaaaaccatacattttatttcagagtaaacaacccatcaaaaacaaatacataggtatatgggctattgtttttcagtattttagagcacaccatccaacttaaaatgtggtccactaaaatatgtaaatatccctcctatcacaaaaataaattaaacctcatggttaaaaaaaacagaaacgtttggcgtaggcctgagtgagcttgaaaaacaagttaggatgttttaactgtatggaggaacattacagaatccacatagaaacatctggcagaacaactagcttgttgctattggagctgttctgtttcagagagggatataaggtacatgggagggtgctgaagactcacaacagccacagaattagttactccaaattaaccagaattcaatatagaagaatatacgacaacagtagaacaatctcaacagttattcgatgcctggaaaacaagctgtaagcttcgaacaagtaactcagcaggaacaagagtcaacatgtttataagactttgaaggtgagaaaacttcatcattcatagatgatgtcttgtgcacaaatacattagtttgtaggacactggggacaacaacacaacatacaaagtaagaataaatccaagctgtttaaccttccaccattctcttgagtattaaacccaggccacctttggccacttgcaggggtgtcttttcttctttattctcaatgtaaatacttgctccttgggacaccagcagttttgcttcttccactctctcctcatcacaggctaagtgtctgaaatcagggaccaccagagaccaattaatcactaccaattctatgtaatggttaggatttcttgctaggtagtctgaagtgcatatgattaagaaatggtaacattggaaagttatttaatcaggaaagaaacatcagtttgcatagggagactgtaagttaaaattctacaaaaaaagccttgtaataccagatcgtaaatcataattctggttctacttacaatagaagaagggatctaaatgctagcctaaggaacaactttctcattttacagagataagtagttgtttacctcaaacactacatgtaataattcagggttagaatttagaaaagcctcagttcataaactgttaatagtaattcgtgcagcttaaagtttgaaaaagcagtttaaaagattttatctcatttagtccatatatctatcttataagttagcaaagtattattatcatcattttacagttgaaatggtgacagaggttaaagttcctacctatgctgacatgtcttggcagtagactgagtggaagagggtaacaacttttgccatgcacttaagagtttgccaggagggtattaggaggcactttacatgttgctttacttaaacctcacaataatctagtgaggaaggaattattacccttatattacagatgaggaaattaagattcaaggaagattaagtaacttttataaattgtttaatacaagtatttaatattgttagtaagtggtagagtctgaattgggtgaacatcatctagctattcataaatcctatgttcgtcccagtactctatcttgtctgactcctagatttcctctaggccatcctgcctttctatttatggagaaaagaggtagggcatacaggtctttctaaacagggtctcttagaatgcaggaaagattttaaaaactaagagttaagaaaataatactttttaaaagttggcttaaagtcaaattggaaaaggctgaacctcactctggactaaaaagaagactcacagaacttctggttcaagaaaaagtcaccattcaacacagaagaaaagtggccaagtaccgtggaaaaatatcaaggtaaaggccagcttcagatcatacacataattcaattacagatggattttaagagttaaatgcaaaacaataacactaaccctcaatcaaaaccaatgaaacgttaaaataacctataataaaagacgggtgaatatttaactaatttcagggtaaggaagagctttctagtcatgaggaaagatgaatgggcttgactacgtagaaattttaaaacttctcttatgtaaaagaaattatgaacaaaatgaaaagataaactaggaaaaatattttcaactaacattgcagaaaattaatattttaccatgccaaatcaagagcacttaaaacccagtgaaaataaattaattccccaaaaggaaacagagaaagggacacaaaaagttacaattagataagaaatgtaattacctatggacattaaaaaaagttcaaattcactgataataaaaatataaattacctctatgaaatatcattttcacataacaaaaggataatttagtgttggtgagggggtaataggcactcttacactgctgttgggagggtaaaatgatacaactcctctggaagcaatttggcaacatatagcaagtcttaaaatgtgtgtatttgttgacgcagcaattccacttctaggagtctataagaaggtaatcatcagaaatgtggccaaaagttttctgtacaaagttggtcaactattttagagacaaggtcttgctctgttccccaggctggagtgcagtggtgtgatcacagctcactgtaacctggagctcctgggttcaagcaatcctcccacctcaacctcccgagtagttagtactacaggtgcatgccaccatgcctagctaagtttttaattttttctagagacggggggtcttgctgtgttgcccaggctggtcttgaactcctggcctcaagtgatcctcccgccttggctttacaaagtgctgggattacagacatgagccattatgcctggctcaatgtaccattatttataatagtgaaaaactcataaaagtttaaatatacagtaatagaggaatgattaaattatggcacatctatacagaattttatatacccattaaaaaggttttaaacatatttaatatatgcttatactatgaggtgaaaagaacaagagctaaaactacatacacagtatgaccccaattttgctaaaaaatatgtatgtataaaatatatacatttgaatataaaagaccaggaggaaatacacaagaatgtgatcagtagttatttctgagtggcaagataataggcaatttttatctttatattttgtgcaatttaacatttttgccattaacacgtattgcatttataagcagaataaaaaaagaaatgatgtataagaattattgcaagaaggctaatgtcaggtagaatacaaatgactgctacttgtcacttacagaggagtgttaccctcagtgtcttggatgtttgtggatgctttgtagtacagaaggatatgaatcatcttcaagttacccttggctgctgcccggtgcattgctgtagcctcataatggtccttagcatctggattagccccgccttccagtaacatgacagcgatctggaaagatggagaagaaagaagaaaacaatgcagaaatctatctgtgtttgtatacacgtttagaactcaacagaagtagcctaggatggaaccatacctcatgcctgtttttcgaagctgcataatgtaagggagtacagccattttgattgacagcattcacttgagcaccttttcccagaagggcttttacaatctcatcccggccagcagaagccgcaatatgaagaggagaccaacctgcctataaaagaagtaggtagtagaaataccaggggaaaaaggcacaaggattagtgctaacatttaggaagggttagcaaggagctttacaaaggcaaaaaaatatttgcctacaaaaaaggttccattcttactcttcacaaatctaatcctaatataaccatatcattagaataaatctctttatgtaacaaaaaagttatttaggtcctcattattcaggccatgttcaccaaaaaacaaaaaatccaacataatagaaagagtttatggtcttttagggttcaccataacaagccctgatctgtatgtttatttttgtttttttatttttagagacaaggtctcagtctgtcacccaggatagagtacaatggctcactgcagcctcaaactactaggctggagcaatcctcctacctcagcctctcctgtatgtttaccttaaatcacagagtatgagtggcaaacataacattgtaaaataatgcaaccatgagtctcatgcttgatcacaagggccatgatgtaactttccagtcataaaggttacaattttctttataagcttaatgcacaggcttcagtaaacaccagtctggagtacaaagataactgggaatttatcaactcaactttatcaaagtactcacatcgtctttatcattcactggcactccaagttgcaacaaaaattcaacaatttctgtatgtccagctgagcatgcccagtgcaatgcagttctgctgtcctacagagaagcagtaatagaaacattcttgaaatagaaggcaaaaaagcaagaaaaaaaatactggtgctggcaaatctatagtttgaaaatacgaaatgcagagcactggatcctcaggtaggtaaccttaaactatattacttactggtataagacagatgaaggtttaagtaacatggggagaatgacattgatgaacatacgtaattctgggcagaatacgacaaggaaagtagtagagcaagaaactgatttcaatgctttgacagaaatacatctttggttgttttactattacattatttacgtacttttatgtcaggcactgtgctgggagttttacatgtatagtatcatttaattcctaccattctacacagtgcttattatctccatttttcagatgaggaaactaaaactcctcagggtaagcaacttgtggacggtcatatggatactaaatggtgaagttggggcacaactgtcagtgaagttctgactctgaaatctctactaccacactgacctcaagttagatgctgtagaaggaacacatgaatctaatgggggaagaaatgttcattaaactagttgaaattatctagaatttaaaatcataaataaattagaaatataatttagaaaacacaacacacagaaaacaagaaaattactttttataaaaaataataagctatggccgggtgcggtggttcacgcctataatcccagcactttgggaggctgaggtgggcagatcacccgaggtcaggagttctagaccagcctggcaacatggtgaaactccgtctctactaaaaatacaaaagttagccaggcgtggtggcaggcgcctgtaatcccagctacttgggaggctgaggcaggggaatcgcttgaacccgggaggcagaggttgcagtgaggtgatacggcaccactgcactccagcctgggcaacaagagcgaaactctgtttcaaaaaataaataaataaaaataaataaaaattaaaaaagctatagtagtcattatttgtcaaagggaatccctatttgcagtgactgctatacttcttagccccacagaatagaaaatggtattttaaactctattacaaaaaaatttcaaacacaaaaatagagggaatagaatagaaacccacaggcctactgcttagatttaacaacaaacatcttgccctatttgctttaactagttttttccttgctgagctttccaaaaacaaatcctaaatatcatgacttttcacccttctctttcagtatgtaaaaaataaaggtatttcttatataactatgagaccattattacacttactaaaattaacactaactcctttagaatgtctaatatccggtctgtattcagattgcccccaactgtctcccaaatgtctttttgcagttggtttgtttaaatcaggaaccagacgagatccataaattgcatttcttcatgttttttacgtctcttgatgctgaatagttcctttccctttttaagccactgacttgactgaagaatggttaaatttccaatggagtattaaatcttaatataaagtattacatttaaatttaaatccttaaatatcaccagaccataatgaagtaaaccaggtaaagataaggccattttcaggttgagtaataaaggaaagttccagaaaagagaaaacagtctcttgatttctaattctctcccaaaagacacaaaatggagatctgtaagtatgggacagtctcactagtgcttacgacactgtctgcgaaacacaaggccatctataaatatttgtgggcttactaaaggcaccatgaatcctagaaactgaggatgaaagcacgagagtcctgtgagcaggagggcagaaagaaacacttctaaacttctgtctacctctgcttagaatgtccactcattcccccatggaaatcccactcatgcttcaaagtctaactaaccttcccttctttgcaaaaacttttccaattaacgacagtcatattcagcatcagatcctcctattaacgtgttctgaaagcaccatgtaaacttctctgccgagtatttaccacaatttgtaatcggacatgtttttgtgcttattttattgtctgcatcttccactccaccgtatccccagctcctagcaaactgcctggcacggaaggggcgttcaatttcacatgcgttactgaatacagttactagtaaaggtaaataaatccatataaaaagccttccttttcactgattgggagtttctgagaaatgcggtagacgttctagaactatccaaaaatcagggagcggagctccgggccaacgggaaaatatctgaggtctgtggggctagctcccgcaggcctatcgcgagtcccgaggtgacccagggggactgcttggggcggcgggggcggggttctgcttctctcagaaacggggcctccgctagggccgggccccgaaagccacgtagggcttcgccgacgtcgccgactgcggagagacctagcgttgctttacctggtcagttctagtagccagggatttatcggccagaatactctccttcaactcttccagcttcccgctgtaggccaggttgcagaccattaggttagacacacacccctccatttcgctgtcccagcaactacttgtcgcgcgagcaacgcccgcctcacgtcgccggctccggctacgccagtcaaaacagccgttagagcttcaccaatcaccggccttcctcgttcccttttcttttcccgtcgcgcggcgcctctgggagttgcagtttgagagcagttccgggcagggaggcgcctttgctgccctcacagacttggcccctagcagtgcagaactacaagtcccagggatcctagcgaccgtccgtccgtagtcaagttgccggtggaattggcccaggatgacagctggagaatggagtcaggtacggggagcggctttgagtggaaccgtgtgaaagagccggggtgggtagtcgctggcgggtcgttgagtcggccatatgaaacaggttcgggggcagggcaagagttatgagagcctaaaggtcctgtcccccggggttcctgacctgcagtggcaggcggaagggacaagggttggagctgagtactacctactgagctcgaaccggtgactgtggctaccctccccctccctgccaccgcctagggagtggaaagaagtgggggttaattactctgacatctcggcggtgtggcatcaggacagggttctaccacagcagtgatagcatatggcaccgtactgaggtgatgtgccagggtgatgccaaaggcagggtgtgatgccgtgggagccacctgatatctaagagacctcggtgagtccatagcctggtgacatcacagcttgatgagggtcatcttaaggataccgggctgtggtgttggcattttaatatcacgatattaactatgttgtcaaggctttgctacaactattaagctaatagtgtttctttttatagaaatcccaaatagtgccatagcagaagcaatgcaagactgatcctttatagggcatatccagaggacattatgccacaactaggtaacgataagaatacattcaagaaagagactcatgatgtttatgtttatcctgttatagtgtagaacaggagttgggaaactttctgtaaagagccagatagtaaatattttaggctttgtaggccaaaaggcaaaatcaagaatattttgttggtacttttatgacaaaagagaaaacaaatttcaacaaatttttattgatgaaattcaaaatataatagtaattgagtactttttttgtaatacaggaagactaccaatgagaagaatagaattctttttaggggataatattttgcttaattggggctcagaattagtgttccctattgtcaaaattgattttaagtgttcatctgttaatgctgatctgttaggaaatttttacctatttaatctttgaaaatgtcattttacatagataggtactgccaaatactgatatcaattcataaacatatacttttttatttttatttttatttaatttttcaaaaatttcagaatagttgtagatttatagaaaagttgcaaggttagtagagttcctgtataacactcactcaaaatgaggcacattttacatatcataaaattcactgatttcaagtgcataattaaatgatttttggtaactttactgaagtggggcaaccatcaccataaatcagttttagaactttttgatccctccagtaaggtccctcatgcctatttatagttaatcaatcctctgtcccattcccagccccagacaaccactaatctacttttttgtttctataaatttgcctattctggacattttatataaatgaaatcatacaatatgcagtctttgtgtctgatttctttcacttagcataatatttttgagattcatccatattgtagtatgtatcagtacttccttacttttttattgctgaatagtattccattttatggatataacacatttttatctgtctactcactattagataggcacatcagtttccaatttttggctactatgactagtgctgctaagaagattagtatgtaagtcttcgtgcggacatatttttttcatttctctttgatagatacttaagggtggagttactggatcacagggaaaatttatgcttaacttcttaagaaactgcaaaactgttttccaaaatggcagcaacattttgcacttccactagcaatgtatgagagttcctgtttctccacatccttgccaacatttgttatttactgtgttttttgttatagccattctaagtgggtgtgaagtggtgtctcattgtggttttaatttataaattataatttataatacggtgagcatattttcatgtgcttattagccattcatatatcttcttcagtgaagtgtctgttatatcttttgtctgtttttaaattgagttatttgtttttttagtgttgagttgtaaggatggtttatatattctagatcaagtccctgagagatatatgatatgcacatatattctcccagtctgttgcttgcctttttctttttttgatggtgtcttttgaagtgaaaacgttttgaatttgggtgaggttcaatttatcatttttttttctttcatggaccattcttttggtgttgtacttaagaagtctttgcctaattgcaaggtctcagtgattttctccaatgttttcttctaaaagctttattacttcatctcttacatttaagtctatgattcattttgagttcattttttctctgtgatgtgaggtgagagtctaaattcatctttttgcatgtggatgtagaaattgtcctagcaccatttgctgaatctcttatcattaacgtcttacattgctatgctatctatgtcacaactaataagcccacagtggtatattgctattaactataccccatgcttttttttttcaagtttcactagtttatctctagagatgctgtcccatccaggataccacattacgtttagtcattgtatctccttagcctcttctggtttgtgacactttctcacacttttcttgttttggtgaccttgatagttttaaggagtactggtcaggtattttgtagaaaacccctcaattttatgcttagactggcattatgtgtttggaagaaagtctgcagaggtcaagtaccacattcttatcatacactatcctcaaacatgattttaattgagcatattcattgcgtggaatagaattctgttcttctcttaatagtgccttttagcattatgtggcaggttaatcacttccaattgaaagtttggtgaaagctgctcaattgcacagttaaagggattttggaatatggaatatcctttgcacttgcttcagggttcaaaaactgctgctggaactgtagtctgaattcagaaaatatatatgctgcaaattcttatggaaatagatatcttgcttcttgttttaacttttatttcattttattttgagacagagtctcactctgtcacccaggctggaatgcagtggcacgatcttggcacactgctatctttgcctcccaggctcaagcgattctcctgcctcagcctcctgaggcgcatgccaccacgcctggctaagttttgtatttttagtagagacagggtttcgccatattggccaggctggtctctaactcctgacctcaggtgatcctcccaaagtgctgggattacaggcatgagccactgtgcccagcctattttattttttattgagacagggtcttcttctgttgcccaggctggagtgcagtggcacgatcacggctcactgcagcctccacctccctagcacaagcaatcctgtcatctcagcctctggagcagctggaactacaggcatgcaccaacacactcagccaatttatgattttttatagatacagggtctcactatgttgcccaggctgatctcgaactcctgggttcaagtgatcctcccacctaggtctcagaaaatgctgggattacaggtgtgagccaccatgtccagctgagatttcatttatttcttctgggtacttaactaggagtggaattgctgggtcatatcgtaactctgtttaagtttttgagaaactttcagactctttacaagagtggccgtaccattttaccttcccatcagcaatgttcgagggttcagatttatccacattttttttcttattttcttttctttcttttttttttttttttggagacaaagtctcactctgtcgcccaggctgaagtgcagtggcatgatctcagcccactgcaacctctgcctcccaggttctagtgattcttgtgcctcagcctcctgagtagctgggattacaggcatgtacctccgtgccggctaatttttgtatttttagtagagacggggttttgccgtgttggccaggctggtctggaactcctgtcctcaagtgatctgctcaccttggccttccaaaatgctgggattataggcgtgagccaccacatccagccaaatttctccatatctttaccaatacttattaatatctatctttttgattataggcattctagtgggtataaagtggtatttaattgtggttttattgttttgacttgtgacagcatgggaagtggataaagcatcttgacattacttgtgattcaaataatattgtcaaaatgactttactacagtttttttcatatataagcattgttttgccttgtaattttaggttgaattaattaataaacattatccagcctgcatcaaaagttaatttccaaagccattcagtgttccctaacagtgtttgaaggtggttcttccaaccatttaaaattatgagaatcattcgtaccttgcttgccacacaaaaacatgagatgggctgaatttagcctgccagtcatagttggtatagagcagaagtgccctgcatattcaataaatacttctctagttgattatggaggtacagtatccctgtgttgtggtattcacaaagtattgggtatagtgacctttcaccataaaaatgcatcaagtacttggatctgattggtagaaaagctggaaaaacaattccaagtgcctttcctactgagtgacttgtttgggtagtcttcttttataaacagtatattttattttattttattttattattttattttattttattgtatgttatgttatgttatgttatgttatttatgtgacatggtaattaactttcaattctgagtcctttaaggctaaggggaagttatcctttgactttttgaaagctgcaagataaataggtcttagaggagaaggtctcttctcttttgtggctggccccaagttatggaggaatgatgtggttgctgtttatgtccattaagagacaaatggggccctgttagggtctgactccctttctgctcttatgattgaacgttccctattgccttttccactgatcacctggattctagatactaaaacaagctaagttcatcttctaggcttgaagaataatgccaataataactagcatttatagatgacattgtcagttactgagcttatcttatgcaatcctcacatcagctctgtgaggtaggtactattatcctgcagctcctaccttttttaaaatgagaaaacaggcacagaggagagaagttacatgcccaaggtcacacagtttagttggagctataatagaaatccaggcaattctactccaaagtcctactacttaaccactgcaacatgctgctaaatattgctgaaaatggaattatgtgtaaatgataatcctaaatattgcaatacaaaatgctgtcagagttctttgggttgtaactctacctgtgattttggtgaaatgacaagattttaatgctctagagcagtgctgtccagtagaactttctgtgatgatggtaaacttctatatctacgctgttctagtatggtaaccataaccacatgtagctcttaaagacttgcaatgtgtctaggaactgaatttttaatgtcatttaattgtaattgttttacatgtaaatagttttgtgtgactcattattaatcatcttggacagtgcagagagagatcatttccccccacttgttcctttttaattacactaaatattttacccaatgcaaatattctttccatagcacaacaggaagtgaatatattctatactgaaaaacaacttgagggtatacgcaaatcaattaactgcatgacagttgcaggaacaggttctgggttatccaccatgaaacttctccattcccagcacttactaaataaggttccataactggctcaaaaaccttttgcaattgatttttcactgcttacaaatgtaatttatgtggcttattgcactttacagttgccagttgcttggtttaagatgagacatcttaatctgtggctctaatttttttttatatacaagtttttttatataaaagttctggggtacatgtgcacaacgtgcaggtttgttacataggtatacatgtgccatgtgggtttgctgcacccatcaactcgtcatttacattaggtatttctcctaatgctatccctcccccaggccttcgccccctgacaggccctggtgtgtgctgtggctctaattttttttaatcccgtgttttgatcccacatgttaaatgtccttggtgttatatgtcactgggctatacaaaccttccccatttaaaagcgattccttcacaaaactggcaaactgttacaggctgttataataaagcactttatatttactccctgagttttagcttccacactcttgttttaagttgtttgctttataagtggtttctttttttaaaagggttttattatgaataagagactcgcaataatttgcaaagatagtacagaaaggccccatataatcttcatctgagttacttcaatcattgcattttacataattataatacaatatcaaaaccaggaaattgatactggaatgatacgtgtgtataattctatgttattttatgatgtgtagatttgtttaaccattatcgcaatcaagaaatattccatctctcctgtgctacctctttatagtcacacccaccacctacccccaccattgataacccctgaaaaatactaatttgttctccttttctataactgtcattttaagaattttatatataattaaaatgatttaatttttagaatcataaagtatgtgaccttttccactatttttcactcagcataatacatttgagactcattcaaattggtatcaatagttcattccctcttattgctgagaaatattacacgacatggaggtaccacagtttttttaaccattcatctattaagggacatttttaaatgtccagtttttggctattacgaagagaactcttattaacattgagtacagtgttttgtgtagatggaaattttcatctctctgagataaatgcccaggagagcaattacaaggtgggacggtaaatatatgtttaattttaaaagaatctgacaaactagttttccaaagtgactgtaccattttgtattctcaccagcaatggtatgagagatccagtatctccacatcctttccagcatttggtattctcactattttttttttaagttttagccattgtgataagtgtgtagtgatatattactgatttaatttgcatttatctgatggctaataaagttcaacatcttttcatgtgtttatttgtcatccccatatcttcttcatttaaatatctctttatatctttggcccattttctaattgtattgtattgtttgttttactgttgagttttcagagtgctttatgtattctagataccagttctttgtcagatatgtagcttgcaaatattctcttccagtctgtggcttgtcttttcatcttaataggattttccacagagaaagagcttttaattttgatgacattcaacttattgatttttttccctattatagattgtgcttttgttgttacatctaagaagtcttcaccaagtcgtaggtctcaaatattttctcctagattttcttctgaaaatgttatagttttacattttacattcaagtccatgatccattttaagttaatatttggcataaaatgtgaagtttaggtcaaggttaatttttttggattattgatatctagttacttcagctccattgaattgcttttgcactgttgtaaaatataagtatgccgtacttgtgtatatctatttctgagttttctaatctgattcattgatctacgtatgtgtccctctgccataccacacagtgttgaatactgtagctctataataaatcttaaaatttgatagagtgattcctcctagtttattgttttcaatattgcctgttcctttaactttccctataaattttagaataaacttgcctatatctgaaaaaagttagctgagatattgataggaattgtattagacctgtgtatcagtttggggaaaactgacatctttactatgctgagtcttccaatccatgagcaccatatgtctctccctttatttagatcttcttttatttattttatcagcactgttcaattttcagcatagaaatcttgtatgttttgttagaattatacataaccatttcatttttggagtgactattaatggtattttattttgaattttggtttccatgtattcattgctagtatatagaaatataaatgatttttgtatgatagttttgcatattgaaaccttgctgaattcactgattagttctagggggttaaaaggtatttttctaattttttttcttttgttttcattgttttttaggactttctatgtagaccatcttgtcatctgcagagagggacagtgatatttcttcctttccactctgtgttttatgttgaatagcagtggtgagagctaaattcttgtcttgttcccagtcttagggaagaagaggtcagtctttcagcatcaactataatgtagttttttttgaagtttagatcgttccctcttgatttctagttgtctgagtgtttttatcatgaataactattgaattttgccaaatactttttgcatcaattgatatgatcttgtgatttttcttcttcagtttgctaatgcagtggattacactaatttattttcaaatgttgagctagccttgcatccttggataaaacacatttggatgcgatgtataatttatatgttatatttgctcatatttgctggggatatttgcttctattcatgaatgatattggcttgcaatttaattttttggtactgtctttgtctgattttggtatcagtgcaatattggccttataataagagttgggaagtagtccctcctcttctattttctagaagacattgtgtaatatgagtgttaattcttctttaagtatttggtagaatgctgcagtgaaatcattcaggcccagatggtttcaatgaagaatttttttttttgagttttaaaattatatgttcaattttcttaatagttaccaagctattcaaattatctaatttctattgagttgtggtggtttgtgcttttcaaggaatttatccagcttatcaaaattatcaactttatacatgcatatttgtttgtagtaatcccttttggtgtctgcaaggtctataataatatctcctgtttcattcctgatattaatgatttgtggcctatcttttttatttgtcagttttgcttaaggtttgtgaattttatgaggcttttcagagaactacctctttgtttcattgatgttgtctgttgattttgagttttcaatttcattgacttctgctctttatctccttacttctgcttgctttcagtttaatttgctcttacttttctagttccttagggtgggaaattagattattaatttcagacatttcttcttccctaagttaagcctttagtgcaatgaatttccatctcagcactgctttagctgcatgtcatgtattttttttatcacagtaaaaaaccatagcaggagatttagttcttaacaaactttaaagtgtacagtacaatattgttaactataagcacaatgttgtacagcagatctctagaaatttttcatcttgaatgactgaaactctatgcttattgagcagcaactccccatttcccaccccccaccaaccccctggcaactactattttcctttctgtttctatgaacataactaatttagatatataagtggaatcatgcagtatttacccttctgtgtctggcttatttcatttaacataatgtcttcaaggttcatccatattgtagcatatgacagggtttctttttatggctgaataagattccgttatatgtatataccacagtttcttcatttatctgtggatggacattaggttgtttccacctcttggctattgtgaataatactgcaatgaacataggagtacaaatatctcttcaagattctgatttcaattcttttggatacatccctagaagtgggattgttagatcatatgggaaattttaattttttaaggaacctccatactcttttccataccaaccgcaccattctacacgcacaccagcagtgcacaaggttccaatttctccacattcttgccagcacttactgttttttttaataatggccatcctaacagttatgaagtgatacttcattatggttttgatttgcatttccctgacaattagtgatgttgagcatcttttcgtatacctgttggtcatttgtatgtcttatttggagaaatgtctattcaagttctttgttcatattttaattgaattatttggtgagattttttgttattgagctaaataatttagatattgaaccctatcagatggtttgcaaatattttctcccattctgtaggttgcctttcattctgttgtttcctttgctctactgaagctttttagtttgaggtagtaccacttgtctctttttacttttattgcctatacttttggtgtcatatacaagaaatcattgccaagaccaatgccatgatgctttccccctatgttttcttctaggacttttacagttgcaggtcttatgtttaagtctttaatatattttgagttgattttatatgtagtgtgaaataaacatccaatttaatttttttgcatgtgggtataaagttttactagcaccatttttttttttcttgcgggggagttgggctggatctttgccccctttttttttcaaaaacttttaagttcctggttacatgtggaggatgtgcaggtttgttacataggtaaacgtgtgtcatggtgatttgctgtacagatcaacccatcacctaggtattaagcccagcatccattagttattcttcctgatgctctccctcctcctccccctactcccctgacaggccccagtgtgtgttgttccccctacccatgtgtcctcatcgttcagctcccacttataagtgagaagatgtggtgttaggttttctgttcctatgttagttagttgaggatgatggcttccagctctatccatgtccctgcaaaggacatgatctctttcctttttatggctgcacagtattgcatggtgcagatgtaccacattttctttatccagtctatcattgatgggcctttgggttgattccatgtctttgctattgtaaatagtgctgaaatggacatatgtgtgctagcaccatttgttgaagagactacccttttccccattgtgtatttttggaactatcattggagattagatgactgtatatgtatggatttatgatcaagctctctgttctgttccattaatctatatgtctgtctttatgactgtaccgtactgtttaatccacttatatttaaagtaattattgatagggaaggacttattattgcaattttgttcattgttttctgtcttgtagcttttttgtccttccttttctttctttctcttttcctttgggtttcattgatttttttgtagagacatgctttgattctcttcacacattcttttgtgtatcatttaaagggattttctttgacattaccatggaacttacagaaaacatcttataacaacctatattaagctgaaacaaacttaaacttcaattacatataatactttactcttttatattatccaccccacactttatgttatcgatgtcacaaattacatttttatattgtgtatccattaacatgtttgtatagttataggtatttttatacttttttttgagacagagtttctcttgttgcataggctggagtgcaatggtgcgatcttagctcactgcaacctccacctcctgggttcaagaaattctcctgcctcagcctcccgagtagctgggattataggtgcccgacaccatggctggctaatttctgtatttttagtagagatgggatttcaccatgttggctaggctggtctcgaactcctgacctcaggggatgcctcccaaaatgctgggattacaggcatgagctgccgcacccagccaatttttatacttttgttttttaacttctatactaaaattaaaagtgatttacccaccactattacagtgttacagtattctgtatttttctacatatttacctttaccagtaagatttatgctttcaagttgctgttgagcatcttattatttcaactcaaatgtctctctttagcatttcttgtaaggcagttctagtggtgaagaaattcttcagcttttggtcatgtgggaacgtttttattcctccttcattttgaaggctaattttgctagatgtaatattcctggttggcaggttttttttttttctttcagcactttgattattccattcccttttgtcctgcaaggtttctgctgagaaactcacagataatcttatggtgatttccttgtacatgataagctgcttttcttttgctgctttcaaaattctttctttgtcttggacttttgacaatctgattacaatgtttctcagtgtggatttctttgggttcatcctacatggagtctgttgggcttcttgaatccagatgtccatttcctttcccagatttgacacatttagagatgttatttctttaaataaactttctgtccctttaccccttctccttcttggaatcccataatgcatatatttgtttgatggtgtcccataaatcccttaggttttcttcactgattttttgttcctctgactatatcatttcaaataacttgtctctgagttcaccaattctttcttctgccctatcaagcctgctgtttaatacctgtcatgttttttttttttttcagttcagctgttatattcttcagctctaaatttctgtttggttctcttttatgttttctaaatctttattgatatttgtcattttttgaactcatagatggcatctttatgatggttattttgacttctttttcaggttattgatatacctctctttctttaggattggtttctggagatttattttgcttctttggaccatgtttctctgtttcttcatatgtctctaacgtttttgttgggatctgcacatctgaaacattggtaacttctttcagtcatcatggactggctttgtacagggaaagacccttaccagtcagcccagctagagattctgggggcctttgaaacctttttggaggatacttgacttctctgggcatgtgtaggtaatttctcaactagaagcttaccagtttcttttacaggagcttataatcacttgctccctctgtgtctacaacactgcaagttttctggttctatatcagtaagcctcctctctctctttttgttctcagtggtcatcaggtatccagtgtgtgctagcttcctaagtcagtgccccaagtcaggtgagacctatactagtaccttaggcagcctggtgaaaagtcaaaatgctgatgaatattccacttgtttccctccctcctgaggaagaagccttaagttgtgtatctcctcccaactgtgctgaactgtgctggccacagcaagttacccaccactttcctttgttctcagcagcctcaaggcagccaaagtatgctggttttgttagtgcttccagtggggcaaaatagaaacctcttcctggttccttgagcagccctccaaaaacacagaacattgaaaactttgtacagtctttgttccccccaccctgaaattgaaggctgggatgttatttcctggtgctgagctgtgccagcttgggagaggggctgatgcagataaggtgagattgcccttcctacccattttaatgtggttattcttgactttgtgcttacctagggtatgcaacttcttaactgaattctggaattctcataaaattattttactcaatatatcattgttaaattggtcttcctgtaggggaacaagggctggaacttcctattctgccatcttgctcctatgtcacatatttcgatatgttgtattttcattttcattcagttcaaggtattttttttttttacttcccttgagacttcctctttgaccaacggattatttagaggtatgttgtttaatttccaattgtttcaaaaactttcttgtttcctttctgttattgagttctagtttgattccgttgtagttagagaaatactttgctatagaaaccttacttccctttaagtctctttactttctcccatctataatataattttaaaaatatttttcccatatatttttagaatcacatcagacaatgttatgacttttgctttaactgtcaaatataatttagaaaactgaaaaaagaagcaaagtctgttgtatttggtactattttttactcttatttttctttcttccttcctgatacctaaagattccttcttttatctttcctttccaattcacaaatttcctttagccatccgttcctttaggtatgtctgctggcaacaaattcttagtgtttcttcacctgagactgtcttgattttcccctaaaagatattttcactggatatgcaaatttagattgacagttcttttatctcagcatttgaaaaatgtgccatttccctttggactccatggttcctcttaataaatctactctcattaaaagtgtttttcttctataagtaaggtatttcttctctctcactactttcaagatttttttctttttctttagttttcaggagtttgattatgatatgtcttactgtggaattcattggatttatcctattgggtttgctcagcttcttgaatctgtaggcttacgtcttttgccaaattggggagattttcatattaattagcttgatttagctattccacatgtatacacatatcaaaacatcatgttgtataccatagatatatacaattttatttgtcaattaacaaaattaattgattgttaaatatttgggagattttcacctatttttttttaatactcctttagtcccacactgtttctcctctcctcctggaactctgatgatatgaatgtttaatgtatcattaaagtcccgtgtgtccctgaagctctgtttacctttttcaatttattttctctctattgttcaatcgcataatttctattgttctgtcactagtttcactgattcttttttcagtctcctttttgctattcagcccattcagtgagtatttcattttggtgattgtgttttacagttctaaagcttccatttgcttctcctttatgtcttttatttctttgctgagactttctttttataaaaaaatttgttttcagcatgttcgtaattgcttgttgaaacatttttaagatgactgatttaaaatccttgtgggattaattccaatctgtgtcatatcaatgttggtgtctgttgaatgtcttttctcattcaagttgagatgtacctggttctttttatcatgagtgattttctactgtatcttgggcattttatgagactctggattttattttaatcttctgtttagtaggcctactctgacaccattctggtgggggaatgggagcacagttttattattcagggaaaggtgggagtcaaggttcctcactcaccatccattgatacccagggtaggggtagggatgccattattactaggaaggagtggaatttcaggatcctcactaggcctccagtgacaccactgacacctccctaggcctccattgacaggcctctacaaccatcatatgccgggggactcattactgcctggcaaggatgaaagtcccagatctccattcggtcatttctgaaaccacctcagggagaaggggatgtgtgactatttaaaaccagttgaaggtagaaatctaggctccctacttgatttttgctgagggcagtggagggaggagtatagttttttctgctgtggtgtttgccttggatagggaagttattacctaaaagttttctgtctctctaggctaccccttttctgttcctttggctagagatagccagttttttgaggcacttttttttttttttttttttgcacccatggcattgctgggttgctggcttctccatcaccaggtccaggatacattactcaaaaacaaatccagggaactcactgccatattgttacttgggtcttgagattcctagccaccaggaatagaagaagccacctgcctccttctatttacctgtcagagatgtatgagttatgtatatatatatatttatttatttataatgtccagtgtttttagatatagagggataaataggggaaagtgcatctagtctatcttttcttggaaccagaatataaaagtgataacttaatgaaaatatggatattgtgttagttatagcctttctcccagtaaaaatttagttaggaatggggaaaatcaccacgatcactaccttcactggtatacttctttatttttagcttttttttaaattgtggtgaaaaatataaaccataaattttaccgtcttgatcgtttttaagtgtacaattcagtaggattaagtatattcacatagttgtgaaacagatctctagaacttttttatcttggaaatctgaaactctatacccattaagctacaactttccatttcctcttccttccagtccctggcaaccacccttctaatttctctttctatgaatttgactactttagatacctcatataagtggaattacacagtattagtcttttttgtgactgagatatacattttttctttatccatttatctatcaatggacatttgggtcacttctactttttggctattatagtgctgctatgagcatgggtgtgcaaatatctctttgagaccttgctttcagtacttttggatacatatctggaagtaggattgctggatcacatggtagttctatttttaatttctttaggaacctccagactgttttccacagcacttgtaccattttacaatctcaccagtggtgcacaggggttctaatttctccatatccttatcaacccttattattttctatagtcatcctaatgggtgtgaggtgaaatctgattatggttttgatttgcatttctctgaaagttgatgttgagcatctttttatatgctttttggccatttgtatatcatctttagataactattcaattctttgcccatttttaatcaggttatttgattttttgttgttctttatatattctggatattaaccccttatcagatatgtgatttgcacatattttctcccattctggaagttgccttttcactctgttggttgcatcctttgatgcacaaaagatcttaagtttgatgtagtcccatttgtctatttttgttcttgttgcctgtgcttttgatgtcatatccaagaaatcatcaccaaatccaatgtcttgaagcttttctcatatgtgttcttctaggcattttacagttttaggtcttatgtttaggtctttaatctatattgagttaatttttgtatatggtatatgctaagggtccaacttcatacttctgtatgtggatatccattgtccccaaaatcatttgttaaagagattgttctttacccattgaatggtcttggcaccctgttgaagatcatttgaatatgacagggtttatgtgtgagctttctattctatttccttgagctatgtgtctacctttatgccagtaccatacttttttgattactgtaactttataattcttttgaaattgggaagtttgagtcctctaacaatgttctttttcaaaattgttttagcatttcaggatctcttgagatttcatatgagttttaggatgaattttccttttcttaaattttggttttattaattgacacacagaataattgtacatgtttatgggatacatggtgatgttttttataaatatgtgtagtgatctgagaccaggtatgtggctcagagctgtaatcccagcactttgggaggccaaggcgggggcggatcacaagagtttgagactagtctgggcagcatgatgaaaccctgtctccacaaaaaaaaaaaaaaaaaaattagctgggcgtgttggtgggtgcctgtagtcccagctacttgggaagctgaggcaagaggatcccttaagcccagaaagaggagggtgcagtgaaccgagattgtgccaccgtactccagcctgggtaacacaatgagaacctgtctcaagaaaaaaaaaaaaatgtatagtgatcagatcagggtaattagcatatccatcatctgaaatatttatcattttttttctgttgggagcattcaatatcctccttctagctatttgaaactatgttattgttaactatagtcatcctacaatggtatagaacactagaacttatttctcctatttagctgtaattttgtatcctttaacacagctctccctctcccttaccactacactcattagcctctagtattctctgttctactttttacttctatgaaattaacttttttcaactttcacatataaatgagaacatgtggtatttaactttctgtttctggattatttagaatgcattttttctatttctgcaaaagtgttaggattttgatagggattgtgttgaatgtgcgtattgcttcaagtagtatggacatcataacaatattaagtcttccagtccttctgtctctttgtttatttttgtcttctttaatttctttcaggaatattttgtagtttctcattggtatacttgggttttttgagacaggatcttgctctgtcacccaggctggagttcagtggcaccatcacggctcactgcagccttacccttccaggctcaagtgatcctctcatttcagcctcccgagtagcttggatcacaggcacgtgctaccacacccagctaatttttaaatatcttgtagagacagggtctccctatgttgcccaaactggtctcaaactcctgggctcaagcactcccacctcagcttcccaaagtgttgggattacaggtgtgagccatcatgcctggctctcattgctatccttctatatattaaattaaagtcaactataaagtaaagattctttgctaaatcttgcttttccaataatttcaggttacagaactatgattggggtacttttcattggtcctacaaattatttgctgcttggcaaaattgctgcccatgccagaggctctgcttatttagacattaagccttggctggctcctttacactgcaatagaatgggaccagagtctgcttcccatctttttctttattcattattatgaaattttcctgaagactagtcaccttcagtgactcttaacctgaggccctggcagtactgcataagggttgcaatcaagaaagggagcaccaggctttggatgaagaaactcaaattaaacccaattctgggccctgcttcctccatgaagccttctctgactatgcttcccatgttcatctcccttttctggcctcctataacacttgcctctactgtgcaagctaacactcatcgtgtctcaccaagtagagtaaaaccttggttacttgactctttctgggaaaagggcttctaaaaatttttatttcttttagagttgcattttcactgagtatattttattaattctttattttttaaacattcttaagcaattatttaaaaaaaatagagacatggtcttgctttgttgctcagactggtctcaaactcctggcctcaagcagtcctcacaccttggcctcctacagtgctgggattacagtcatgagccactacacctggccctattcattttttaataattttttaatttttaatgtcttgtgggcacatactagggatatctatttatggggtacatgagatattttgatataggcacacaatgcataataatcacatcatggagaatggggtatccatcctctcaagcatttatcctctgtgttacaaacaatccaattataatttattttaaaatgtataattgaattattattaactatagtcaccctgttgtgctatcaaatagtagatcttactcattctaatttttttgtacccattaacctccccacaaggacatttttaataaccagtttttcccaaatggctcatgatttgatcaatttaagcactgtgagcttttaacattttaaccatcctgaatagtattttctaaaacacaatctacttccctgacttttttttttttttgagacggagtcttgctctgtcgccctggctggagtgcagtggcgcaatctcggctcactgcaagctccgcctcccgggttcacgccattctcctgcctcagcctcctcagtagctgggattacaggcgcccggcactacgcccggctaatttttttttgtattttttagtagagacggggtttcaccatgttagccaggatggtcttcatctcctgacctcgtgatccgcccgcctccgcctcccaaagtgctaggattacaggcgtgagccaccacgcccggcccttccctgacttcttaaacagtatatagaatataaatttgttttgtgtaaggatcattattgtgactgttacttgttgtattatcctataatacactgatattctgaggcctattgaaatgttttttggtgtcttcccctgtactaaatggtccccgaacatttagtctgtgtatgtgtgtgtgtgggaaaccatactaggtttttatgatttttttttatctcttttcttgtcttttagcccttcttgcttctgtcaacctacttttgtaaaattgactccccatctcctagctctgtaggcttgtagtcgatcaaggcttcttcattggacttgatgcctgaagggaatgcttttcaagggtcctgagaggttcagtatttaccttctctagtccatttttttttctttatctacaatcatgttctagtttgaagagctaatttgtgggactaataactaaatctacagaaacaaaaactactgcagactttgaaaccaggtcaccctactttttccttctttcaagctccttgcacactgcagcgctctccaattggaggtttcttgctggggatactagaaagaatagttggtgacaggaagcattttaggcaactctggtgcacatcatttctcatcagagaaacaggcttcagaaggtgacacaagaaaagacactgtccattggggggcactggcaaggagtatttggggcactgacaaggagttcagagtgaggagtattttaaaattttgttatggggctcatgatggatggcagagggtagaaaggggagagcagttttcaggggcagttattgtgaaattcagaattgggagttggggactatggcactatgcatgtgtattagtctgttttcatgctgctgataaagacatacccgagactgcgaagaaaaacaggtttaattggacttatagttccacatggctggggaggtctcagaatcatggcaggaggcaaaaggcacgtcttacatggcggtggcaagagaaaatgaggaagaagcaaaagcagaaacccctgataaacccatcagctctcatgagacttattcactatcacgagaatagcacgggaaagactggcccccatgattctattacctccctctgggtccctaccacaacatgtgggaattctgggagatacaattcaagttgagatttaggtggggacacagccaaaccatatcagtgtaccacatgggtgttgcagatgcagttcaaagttctagattagggaactaaatctagaactttggctagagatgcatctaaaagttgtaattgcgaaaagcaggaaggatgttattaattgtacttctctttacatgtctgtttttagtatttattataatggcattgttttgacttctcagagatgttagaatttgagtatacttgctgatcctgactctttgttgaaagctagatatgtggaacttgaatacaagctttgaaattaaagtactttttttattggctacaccgaggcacaagctcttattaaacgcttagtttggggcatattaacatttcttgaaagtttacaaagcattttcatattcattttctcatttgatcctcactacggccctgtggagaaggtattatctctattttatggctgagggaaagaaatcctaaagagcttaaaagtctggcccaaagtgactttgcagtaaaaggcagagcagaaatagaactcagctctcctaattcataggccagcattctggtattccgtggcattctagtctactatgccctctttcaataagatttggggaacaaacttgttacaaaataaacttaggcacattaaaattttaaagagtttatttgagcagacagtgatttataaattgggtagcaccaaaccacaagtggttttgctccacagcagggatgtgaagggaaaacttataagattcttgcagaaataagacaaagaaactatttgattggttaaagtggaaagtccctagttagaggttagttggtggtttttaattggtaaagtctctagttagaggttagttgttggtttctaattggttaaaattaagtgtcattttgctatttacagtgacttgggtattggttggctcaagtaggaaccaaaggcactggagccatctcagcctaatgacctctcaattaatttttttaacagacttaatgtatttatgtgatgaagatcatctaatgctatagtagaaaagaacaattaatgaatttataaatttgtagtcaaagcaagtctgtaaatataggtagcattctgcagtgctataaatggaaaaatctaataaattagccttatagataatatctgaggcccctaactgcttgcatttagatttgatgtgtatgtgtgcatgtgtgcatgtatgcgtgtgtgtgtgtgtgtgtgtgtgtgtgtgtgtgtactgaggggtgggataaattcagaactatgtttctgcttctgttaaataagagattgtggttagtataatttttacagtctataccagaaataaatctagtatagagacttaccattttcttttttctttaattaaggtattcttaccagcagtaaaatgcacaaattttaagtgcatagttcagtgaaattttatgtatgtgtaaactccacactggaaagttatagacatttctggtccctcagaaggttctgtcttgcctcctcccaggtaataccacctcccaaatgtaacacctgttctgaccactgtcatcatagattcgttttgcctggtttcaaactttatgtaaattgagtcatactgtatctactattttgcatctggcttcttttgtttaacatgatgtctgtgagattcagttccttttcattgctatgtagcattccaaagtatggtacaccacaaattttttaatccatttccctgttgatggacatttgggttgtttctaggtttttaaaatcatgaatagaagttgctatggacatctttgatcatatctcttggtgaacataagcactcatttttattggatataaatctaggagtagactcactagagtaggtatgataaaaaaaagttttaacttagaaaagtcttaatgaaggaactgatggctaaccatcttataagaaaacccactttatgaagagccactattagagattaaaaatgggttcgtattttgtttagcaggacatattccctgtcagacattagagactatttttgcttcacacagtgggctgggtctttcacacttgtgagtagatatttattttcctggtgtctgctacatacggtgcacatcagggatgaggagccctttaattgcaagctgtatcttttttggatggggtcaaattgtcttttcttgggcgatgtggctcaaatgatcataaaataacattggaaaatcaagttcacattacagaaatgtgccttaggattaatttggaatacatcttttgttttgaaagtgaaggtacgtgtgtaattttatgtaatcccaaaacttaactctggcagtatacttttacattacttctaaggtaaagaatttttaaacatcatatgtctgctggcaacatttactaatgaggtgcgatgttgaaagggtatggggaaaattcctgtggtatgggaagagggtgaggtggttgtaaactgaggagaaaactgggaaggtgctccaaagagtactgtttctggaaaagactctgtacttctcccccggtgttgtaacacttcacatgctgtgagacagggaacctccatcctcctcaacagagagaatcacttccggtctttgttttttttaacagaatttaatttgatgatgaatgttcaaagagctaggatttgctttctaggtgactacttggtgcaccacttctattctgcaaattgcaggatacccagactggattttgggtgtatccgaaaccctttaggggccccatgaagtctggcttaagtccagaattctgaccaaggctgccaaggccagcatctcctggctccaccttcctctccagcctcaacccttgccagtccccgtacagcatcactaattccacagtctcttagccttctgcatttggtacaagctttctttgtctggaatgtcctttccctgatgaatttgcttaactctcactcattttctaaggtcgagtgctgccatcagctttctttccacagcctcctttatgcctcggattgacttagatgtccctcttctattcttccttagcctcctatacagatactcatcacatactgcatcaaaattaactcttccttctctttcttcccattagactcagaattactaagatatgttgctactgctaaggcctagcacagtactggttacatggtaggtactcagtaaaggattgttaaattgacatttggatggacatataaaccagcttttaggctttttttttttctgtacccatccattcaacaaacgttaaaccttaggagaggacttattgcaaggcactatgaccagagctgtaggggatagagagatgaacattacatggactgagactttaaggagttcatttcaatagcagagagataacatgtccacaaataacaataatctaaagtagaaagtgctcagtgtcataaaggaggtataaattaaggactgtggatgtttagaagaaggagcaagtactccttgttgggaaaactgaagaagaatgattcatcaagaaaggagcatttgaggtgggatttaagggcaagtagaacatgaatgagcaaagatagaatctcctccgtatcatgtgttttattttgactgaaaagagtagatattatgaaggagtaatgagtaatgggaaacaactggaaatttacgaagtgggccttattagagagggctttaagtgccacgttgatgagtttatatttgattcctgtcaggtggaacagtcttggaagcccatggaagatgtttagcattttattgtcaacagcagagagatcctgtaacattagtctggcaatggcatatcttagtaaatcattattaactaattaattgctaagcctatagttttgctaagtagtgtggaaaaaccctaaggcctttagctcttttacatttttgcacctgtcttttctcactggaaatctagatgaggtaacagattatatgaccaattagttctgaaaaatgaaaatagaaattgacaggggaaagaaacactaccaagacagaagtgcctcataataatgtatagacatataaagtgttgtttgcttaggaaccgtgtccaaaacattgctttcagctgtctggaaaaatccagacacagtatgtgaattatattgttaatatttattcctctgggagtagtttagatcactttcagttaaacataactataatgttctaacctcagactgtctgctcttattgtcccttataaacagtgggtattgcattgtcagtttgttttatagtgtgttatataaccagagcatctggtttcttgctgccttaggccgggccttcaacactttatgcctggattgttgcaacgactttctcattggtctccttatctcctgtgcttagaatccagctttttttttcataacagcaatgtatagtgggaagaatactggatgaagagtaatattaactgggtttgaatcttgattatactgctcactagctatatgatcttgggcaagtcatatcacctctctgagactcagttccctcaactctaaaatggaggtaatggtccctgccctgtccctctcaaggggctgtcaccagaatcatgtgaaagtgctctgaaaactgtcaatagctttaccaagagttggactccactggctggctttataccttccagaatctagtcccatgccacctctttcatctcatttgtcaatatcccccagaacctaccccactctccaatgcatgtaaatgtatggtgctgtcatctggaatattctctcctcttgtctctgctcacccaaattcaaggaataatttaaagaccagtccaaattctactcgctccttaaaatcttccctgatgactccagtgctcaatttcctccttttgtgcattttgacagcacttagttattattaacacttgtctgtacattaccctttattattaactcttttacataaggttcctatctttaattcgattatgatattatgatgccttcactggttcatttaacatccagtgaatgtttatgaggatgcttcctttgtattcctcatagaaccaagtttggaacttaataaataattgttggttcatttatttagaagttcacatacagactctcttaagagagacaagtgaacacatcttctcttcctagggctcggggtattcctcctaacaccccatcctgcctccacgtactacagaaccataaaaaactccttataataaaactgtccagtaaatttttctgagattctgaaactgttctgtatctgtgctatccaatacggtaaccaccaaccacacatggctattgagtgcttgaaatgtggctagtgtgactgaggaactgcatttttgtctttaattttaattaaacagctgcatgtgactagtggctactgtattggacagtgtaggtgtggaccggtggctttctaacttttttttttatcataacaacacaatgagaaatacattttacattgcaacgtggtttttatacacacaaacaagtttcatgaaacaatacttcttatctgcagtatactgatcttttctattctattcaatttcattttttaaaaatgctgattgcaaccccctatatagatttcaccacccactgataaattaggatgtgctgtttgaaaacacactgctcattttatagatggagaatctgaggtccagagaagtgcagtagattttctaaggtcatatattaagtggcagggcaggactagaacacaaattttggggctcctagaatagagctatttctaacagggatgtaggaatttcctccttttccctttccttttcctccttctcctcaccatgctggatattaaagaaaaataagtcgacacactattcattttgattaaatattttcatggtgtcttgattcctaaatgagccatgagctcagtatttgagtattgttgctttttagtttggttattgtccaaaatcaaagatacagtaccatggaagctttcttttaacccactgcatggcttggcagcggcactaatgtgaaactgtcctccttgggaattcaatcatgctttcctccaatttcccagtaacaactgaccagcaggttgattctaaacaacaaaacctgttgaagaatcaaggtgattctcacctcagtttgtgaaaaaggtgcctctagtcttgaattatattgccaaccaaatatttttcttcatcagtacatccagtgtgctaccctttttgtatgccttatcaacaaaaacgatagcctttacaaaggcggcatcctctgagcagcaccttgttatcacagaggcatctagactctcctttcaaagctagtctttttatccttctggaaatggcatctatcaaaaaagagcagagctatcttagcaaaggcaaaaagaggcagcaattcagaggtgcagtggtctatgtgttagtacattcctgaccagtttgtgtatggaatctcatttccccatagacgtttccaaatgcatttcactcagcagacagcaggcagcaatttatccctaagtgaaaacaacaagaaaaatacacttaaaaagggaataagattttcaaaagcctcactttaaaggaaacacagaaatagcccaattttgcattacatttgtcagtgggattaccattatgtcagtaggatgaattaactgaaatctgtaagaaatgtcatattttctggggccaaattatctatggcctgattaatttttctagctgaaaaccagagtcttatagcttaacaattgtcccttgctaaccagactggttactttgctgacttgccctgaaatttatcaggtgtagcctcctctgctccaccactgctaacaccagtcagttaaatagaatcccataaagtcctctctagctgaaggataactctttggttaagattctctaatgtaagtttgaaaatttcactgttgtcttaggaagtcaaagtttataccagtctgtagagaaatcattcatgtcttttgcattatttgacaacctagcattgctaggatgtgacttgctgagtaaattcaagaaaacttgctgttttgattgtgaaaatccacttgaaatgctaagaatttttgcccaatcttctgttttctaagttcttggttgtcagaaaagcaggtcacagggtggaagacaaatgaagatggggcaaggcctgtgcacaggtgagcagaagctggggactaacaggggagtaagtgaacccaggaggaaggggatgaaagcatgttgcaggctgggccagagccttggtcttctggctgtcttcctgctttcccaggccctgctaattaacctgccatctatcatgcctgttttcaaaagccctgtgcaggttgactttcccttcactgttttttaaacccctgtccacaaatccactgagtccaacagattctggctagaccaagcttattatctccctacccacccccatggttttctgccaccgtttcatcaccaacacttgaaaactacaagttatttttgactctctctcactctcccctgccccaccctacactcagttgcttgccaagccctttcggtgttccctcaatcaggaattccctcccgtcccccttaccacttatatcttatttccattaaggctcagctctgatgccaccttttctaggttgtagaaagcctattcacccccagttggaattaattactgtatttatttccttttctttccctgtcttccacatcactttcctttcacttattgcacttctgttagttgtttccagacctagcctctccactaaaaagcttttggaaggtggagactgtatctcactgatgttttaccctctatacttaacacatagtaggtatactctataaagtttatggaatgaaatatgaatgaatattcagctgttaccctacctatcccctgtggatgttgtcccaagttctttaagatgtgatttgatgtatgcattgctgagaaggctgttttagcaccagcagtgtcctggcatgctgttagaattgaaagacctataaggaggttatcctatatctcagacccctcctggccctgagattctatggccttttaatttcactttagagagtttgtggtgcttctttctttagcacaagctccacagaatctaagatgaattgactgaaattcatgtcatgaggtataagtgtttttgttaagccctgtcagaaaatttgtttttcaaagtgattttctcatttacttgcaattttccaaataacccttagaaatgtagtcaattgccggaagccatattattaaagtaagacattggcaaaaatggcagagtaagtacctctgaaaattctctccataatagcaatgaaaaaactggcagaaatagcatcaaatttttcagaactctagaactaaaggcttgcagcaatccagggaacatttactcaagaaaaatggctgcatgttgataagaccagtgagctttgtggcattagtattttcattcaccctattcccatccctttctccctggcttcaaaatcaatagccttcactcacagggaaaaccagcagcctggcagccaccagaggagacagaatagggttgggactcctttacagcctcatttctagagaattgtcattattcgatctgtctggagttcccccagaagaccccccacttgtaagactttatttatttggcctgacacagagctacagaaagccttttccccagggcctttcttttggaaaatgattagaggcagtcaattaacttctcagctgcctgaagcaatggataacatttccagctaaccacaaagctttgaagaaaaagctggggaatgagattccttggggctttggaaagcttgggcatattcctgggaatctacaagattacacgcatgcatagggctgtgcacatgctccggaaagacctcaataggtcctaagctctcactctggctgatcttgagcttggcataagcagaaagtgaagacaaaggcagaagacattgtgtggctgagtgttgaagacatgccccaacatgtacacagagtcccttggccaaaactgggaggctttttgtttccaggaatttaaggaaatctttgtctaattatgagctggccactaaactaacccagcagagacttcagtacaataattattattaaagtacagtggaacagggtgaagcctgttgtccctgagaccttgtagaaactaattcttggtccaccaagttatagatttgtagctctgcctgtatagtccctatctctttaaacagacagaaaaggcagggaactcatatcagcctgatatctggtttgtttatttttaaaggcaagacaaaggtagtttgtgaaaaatttaaaacaaaaagcattgctgttaatcagaagtaattgtattggaaatgatattttacttctgtacctcatccacttcccagattgctttttcatatgagttctccctatgtaggacctgttcctctttcctccctagacccccatgtacataatcttcccatctcactgcttcttgcttctgttaatttcattttctgttctttcatttgttctatacatgtagcctcgattcaaggatggctgtggcctcacatactgcattcggggtgtctatcttttaagagaagaatcaagaagaatagagactgtaatgaccttcttgctggcctagctaggcctgagagggggtgaagtgcaagagtaaaattctttggctgccattttgatcagagccatcccaaatgaagcaaggcagttgtcacaagctttaaagggctttactaatttgacgagataactggccagtgactcactgagacagggttggcaatagagaaatggtatttctttggccagtactaaaaaaagacccaaggcttatatgcatacatgctgtacattcatccaatgccatccatcctcacccctaccaaggcaatgccagagaggttgcccttttcctacagtctactcaagttacttattttctgattttctttctctttttaggctacactatatgttcatttaaacctgatttcttctgcctgtgaggggtagagggtagggtggggaggtgcacagtgtgatttgccctgcctcagtccaccacctcctggggatggcctgacctggataatcatttttagcctggtatttcctgggcatgggccaggggctgaggccagcagcagagaggctaagatggcacaggctccctgtcagatttggtagtgatgaattttcactggggaacaaaatggctgtttctaacttctttagatttgaaacactgcagagactatcatcttaataattaaaatatattgaggagaagggctacttaaatccttgaatgactggaattctgtaagatattttaagaaaggtaatatccctggttaacagtgtttctttttctttttctttttttttctttttttttgagatggaatcttactgtgtcaccaggctggagtgtagtggcgcgatcttggctcactgcaacctcggcctcctgggttcaagcgactctcctgcttcagcctcccgagtagctgggactacaggcatgcaccaccatgcccagctaatttttgtatttttagtagagatggggtttcaccatgttggccaggatggtcttgatctcagctgtgtttctaaaagtacttgtacaaattataatttcaacttccaacaaaatatttatatgatcagaacagactcattttttttttatcagaacagactcatttatatttaggagcatttatttctatgaaaacaacatgccctggccttagaaaacaaaaaataaaataaaacaatttatcctttcaagggatttcttttagagaatctctgcagctacttgtagttgtacaaatggccccctactttctctgtgttcccttcctcacaggggctgaggagcccccatgagttgagaggtgtatgttgaatatcttagctttgaacttgaaatatattttctcatagatatagcaccataaactgtgaaataaactatcaatttaaattttctagttacagattaaaataggttttgtggactagcttggaaatatatttactgtttataatataatttctctcagaaaattattattatttatttatttatttaaagagatgggggttggcactgaaagttccaagcttctgatcatggcttagtctttctggtaaccagcctccatccagaagcccaccaagagatacttcattagaacggaagatgctcttatcacccaggaaattcactaggagctctatgtcaggaaccagggagaaaggccaaatttcagaagaaaagatgcacgtagcatccctgtcactcaccataacaaaggttttaggagctctgtgccagaaaacagtgatagaaactaaatatatatttcttattatatcttaatagtcatctgtgaattccaagaacaagttatgtttactgttaacttcaagatccttctttgcagaagccatatgtgaataaaatggcaaataaaaatactgtgaaaacatctggcctttcagctaaaatattaccatatacacaggtgtacaaacattcaggcttgtcacagcaccttccaagccactggccactagaaacctcacaatacaaacctcatgatattccctgtgacatgggcaggagttaggtatgcaggtattgtatcacctcaacacactcagagtaggggaagctcgataattggctatttacaaagaaggccccatggtataaaatgttttgaagtaactgtggccaaatgattgtttagagatggtgttaaatgggaccttgagaaagggaaggtcaaaagagatggtcaagaggaaatccttcaactaaaggatttagaggtcttgtgagtgtgtttgttcctcaaggaaaaggaattgtttccattagattcaagctgctgacctttcaccttcagggtaaaggtaataatcagtcaaccacaaagataagccccttctattaaattttacttgtttctttccttttctttcagttttatccaagtatgaagatcagattactattttcactgactacctagaagaatatccagatacagatgagctggtatggatcttagggaagcagcatctccttaaaacaggtaagatttggtagcatttgtctgtaagaacccagatgaggtaggcacctgtggttcagggtttgtactttttcttcttgggttggcagagcattgtcttgctcaatgttaatgctactctgaggtggatttaacttgtagtcaaaggagcttaagcctcaggacttttgcttggacaggccccttccaaggccctgaaaggccctagtagtgtgtttacatggttataggtttttgcacaatttgcacaagtaatatatttttattcttttccttaaaggagaatccccaaattctagaagccttgggtttcaaaaaacacggacccactcctggtatcactaatcagtctctagcctttcgtgactggtctacatatttattactctcacatgcttgtctggctagataaaaacacccaaggacttctagacaacccatggacctcagaaacaatatcagacctaagtttttcttaagttttagatcttttgctgaccgtagcactgtctcagtttattctgattttgtatagaacttttagccactgcagctagatggaaaggaggcttgaatttttcttccttaccattacattcttatagattgggaaagaaagaccttttaacctgaaactgctaacagcccagcacccagataaagccagagcttggaaagaggcagctctgagatttgtgtctttctgaggagacatcctcttcagaggccctcacttagcgtggaggaaggaacaggaagaggctgatgaaaaggcaggagaggaagttaggcattgtggagctcctcctgagcctggcttcattattttgattggagaattctgaacagtggaaagcctggagctagcaattaggagaccttttgtattcagactcttctaactcaggtaagtcactgtctctttctggatcttaacttccttcagtggtacttaaaatgaggggatttgaggggatctcttctaattctgcattccatgacaacaggaatccccaggttgccaaatctactcgtattcaaatgttaaattgggaaacgcctcttaaaatgaaatcattgctaaaatgtccatacaactttcccagcgtaaagccacacaggaaggcataaagactgtcagaggcaggagtgagggtgtggacatttaagaggacgagcacataacagctaacatctgttataggttcactgcatactagtcaccatccaagcactttaagtgtattatcttttgaatactcacaactcaatgaagtaggtactataattctccccatttatggatgaggaaactgaagctcagagaggttaagttaaccaggttacacagctggtaagtagcagagtcagggttcaaacccaagcaaagtatgacttcgggtgtcttactcttaaccattatacatctgcttccctgaatatgctaggcaccggggcatggaagggagggaaaatacagatagctcaactttccgatttgctccaaagaaaaggaagacagaaaatagaaactattggctaaaagtagatttccctttgttctttttaagtgcagtgactataagttttatacagaatataatacagacatgttgagaagagggagagaggtgactaagaaagacagccacatctaagtacagataaaaatgtggaagccatatttgtggcccatcaaagtaaatttatgtcataaaatacaagaaagcatgctttgaaaaaagacacaaaaacatttgtgatattatatatgcatttagattataagtgccagttgcactagttgctatacatttcttacacacctaatttgcttagtaagacatttcctttttatttaaacatgcatgtgtgcatgaacagacacacatgcatccacacaaacaagccaacccctagtttttgttttgttttattttattttgttttgcttgagacagggtctctctgttacttaggctagagtacagtggtgatcatagctcactgcaatctcgaactcctgggttcaagtgatcctcatacctcattttttttgtagagatggggtctcactatgttgcccaggctggtcttgaattcctggcctgaagcgatctccctgtctcagcttcccaaagcactgggattacaggtgtgagtcgctgggcccagccaaacctctagttttagataagggatgatgggtgctgatgcaagatccaaccaaccatcattcaggctggagctgatagtcttgttagtgggttctctaggatccttaattttcttattccttgtcttttggcaatgatcccagtgtttgtaactgccaggactgtggaactcagtgaaaagatgacaggagctacccaaggtcattataccagtcaaatagctctggtcaaactataggttgggagaaatactgaaattatttggctaaaataagaatgggtttcctgtgaatttacctagccccataataatggaattgactggttatttgaaattaagttagtagctggctcagaagtaaaggtgggtatttttagatatggtgatttaattttaattttacatttaattacagaaaaatctaagctgttgtctgatataagtgctcgtctatggtttacatacagaaggaaattttcaccaattggtaggtaaatcatttgttttactgtgctttattccttgtggatagcttgcctgaggttatcagtgacttcatagaaacctcagaattaacagttcactatagcaaagaatttgattgaggagactaggtaaatcttacacttcatccaaaagtttcattgctaaagtatcctttcacatatggctctatttcattgagggattatgacagtatacttttgacaccacctccaagtgttcaggcaccagatgatattacttgttatacttttgagattaagggggaaaatcacataatcttttaatttgtataatatctgttaaattacaatccactgctttgtggaactacatgattattaatgaaaattgtgtcttgaaagaaagaaaataatttatttgttttttttcccccttatgacatgaaagcaccttgccattgagagacaaattacagtagtttccttggaactaattctaggctgttaccagctgtcaactagaaaaaaggacagctcaataggtgaagtgaatatgctgtcttcataaaggatatacaacacatttgcaagtagggtggccacttcctagtatcatggccctgtaggaaaagggcctacaaatggtgaaatctactcttctaagaggaaactagaatgaaatcaacctttctgttcagtgccaaaaatgaaggtcacacagacttttcttttctttctttttttttttttttttttgagacggagtctcgcactgtcacccaggctgcagtgcagtggcgccatctcggctcattgcaagctccgcctcctgggttcacgccattctcctgcctcagcctcccgagtagctgggactacaggcgcccgccaacacgcccggctaattttttgtatttttagtagagacagggtttcactgtgttagccaggatggtctcgatctcctgacctcgtgatccgcccacctcggcctcccaaagtgctgggattataggcgtgagccaccgctcccggccctttttttttttttttttttattgctctccccagaaataccccagtcactaacaaacaaaagaacaatctttagtaaccagtggttctgaactgttaactttctctggctgaggagctctttgcaaggctggaaaatatttctaattttactctgccaatattttggcaatagatgatctcttctttatgtgggcctcattgcatcttttccatactaatctggccaataatcccagcattagcaagagccaaaaggcaccccttccaggtcataaattggctccctccttcccatcttcttgtagtaactctccttcagtccccacaactaaaagaaaggggtgaccaccttgacccacttgtcctacaaggttgatgaccccctttgaagttagtcttctgagatcatgtttagcatatttttccacttccacactgggaaaagaaaacaatgaaaacaaaatatcctctctgccatacaagttatctgatttcattggccccttggaaaaggatattgagctcaccctggcctcaaatgtgggattttctttgcataaggtgttcttaaaatggaacctattgtcttatttcgtttattaactaattttataccttttaaagatacatttctaatttattaatatgggtttaaattatgatcatactcaaaacatcaagtatttgcatcatcctctatgggttctagaacactttcacagatattctctcagttcttacaatacccactgatagtaggcagagtatgtactattatgctcagcctataggtgagatttagattagataactagagactggtcttctgatgcctcatctagggatctttcccctattttacaatgtccttcttgctgttcagatcttcatagtgtatattcagaatagtcatgagccttccaaatctctttgaccattttgatgattgcctttggtagtatttgttctttatctaagtaagactggcttccctgagaatttcagggccatgcaagtgagctatgcaaggcaaggtttgggtctggcagatgatgacatggaatggactaagggttggtattcatacatggcagtcacctaccaaaattgcatgtatacctagaagtcttcaagcagaaaacataagggacacatttagttcatttgcttgttttatgtttggccatagaacctgttttggttgactcagcactatgtttgcaagttccaaccatatacccaaatcttgtttgatctgtgggtgtatctgtcacctcacttttcagagtatatatatttacctgtcttgtgtgagtcccaaatatgctgatgtttcaggaaagggcaatttgaggaacccatattaattcccttccattttgccaacaggtggaacgggcccttcatcagatgctggttggggatgtatgctacgctgtggacagatgatgctggctcaagcccttatctgtagacacttgggaaggggtgagttaaatttgttttataaactttctcagagacctctgcagtatcacttgctgctgttgatttagcttgatgctgagccttgggaacactcagtaacaaacttgagggtcttaaaatgctctctgcaagctcaagtggtggggctgacaagtcaacaaagcccctcataagaaggaaacagctaatgtttccttgtgagtcaccaagccagggagttattttcctgggacagaactgaacatcgagggaggtatgtcatttatcctttccatctttgctattgtttgagtaagtccttagaaatgcaagataacaaagggagcaggaagaagggtgtggtgattaagtctgtttcttgacctcatttaagatatctgcctggtgaaggatgtaagtgacctaaaggaagtgcatagagggagctggcgctattttggttttggttcactaaggatgtccagctgatgatgaaggaatctttaaatttgcttccttgggaggacatttaattaagaaagccttctgataatggttgttggaactattttttttttttgagtcggagtttcgctctgtctcccaggctgcagtgcagtggtgcgatctcggctcactgcaacctctgacccccgggttcaagcaattctccgcctcagcctcctgagtagctgggattataagtgcctgctaccacgcctggctgatttttgaatttttagtagagatggtgttttgccatgttggccaggctgatctcgaactcctgacctcagaggatccacccgcctcggcctcccaaagtgctaggattacaggcatgagctaccgcgcctggctggttgttggaactcttgagtcttgctttcttaagacatgtacatacttccctatgggcatctgaaggatggggttggctggatgccagttcaggcacttgggtgaaggtccagttggacttggggatgagagagcgaaaggacactttggatgagattgggctgctgaactcattggctgttgctaattgaggttcagaagtatagaaacatcgttttccttttcccactgtgcaaactcacagattttgctacagctttcagagaggattggagaagggcctagggaggtttcagggcttgttaccttctcttcagggtttgggatatcctgcttcccctggatagtataataatttccattttacagatgaggaaaccgaggctcagggaagtgatgtgatttacccagggtaaaacgcaagaaatcaaagatttggggataaaataaagatattccaactccttgtccagtgatttcccttgtttatacatgcttcttggtgtagatccattcttactatttaatttttttttcatttataacacacttcaaaatgattattttggaagtgagttctggaagtagggagcaaactggaaaaaaaaaaaaaaaactccacagtcagcaatctcaattgtttcaatacaaaatcaagtagcaggaagaagttggaaatagatcttgtagctaagatgagttaaaagagtaattttgtaaagatgtcttttggattgtttcctattcagctattttaaaattaaggtagagtattcacttgccattgtcgtcagtgaatatttagtgctatttagcagccagctaattaggatttccccagacttggacaatttggtagctaatgaaaagaagttggatgtggttcaccctctgagggctgtgctggatccaaagttaaaaactttggttttagaaacactagaagcaaaagacaactgaagagtctggagataatggcctttggcttcaagtgtagttcagtctttatttcaaactctttaaaacctcaggagaaaaatttgtcttggacgcaaactaagcctcaaaaatctgtcccattagacagcgtttctagagctgagaggattgcagtgattacatagggtttttgcagttgtcctcagcaagttacgaatggcctctgtaggatttagggggctgtgctgaaggcacagatggtatccgtacagatgcagttattttggcattggtcttagggaaacattgaacacctgatagcaaaggtatttgttttcccaaagctcagcatggactttttaaaaggtggtgtaaaaacgacagcatgcaatttttttaagcttccttagttgtgagctatgtatattcccctgtgaactgtcgtatatcagaatagcacttcttacccgtgagatccttttgtcaatgctgccaaaatataagagcaaaagccattgctgtctatgtggagatgagatgctatggcatctggcttatataccgatgtactgccgggctttgtggtgacctcctgttcactgagtaactggccagaaaggcctttgtgacattgtttttatgtaatatttatccagctccagcccttgggttaagtcagttccttggtcaactttttgttttgcttttactttatacccactgagtccttgaaagcaatcactttccagatgtctttgtcatcaaaatgaaagatacttagaaatgttctaacttggtcatccctgccttctagatgtggtgcctttgtttttcttctaactttgtagttacaataaaagtgcagagaggaataaacagttataaaaatgtttctaacccatttttttttcttaaaaagactggagctgggagaaacaaaaagaacaacccaaagaataccaacgcatcctacagtgcttcttagatagaaaagattgttgctactctatccatcaaatgggtaaggtcataaatcaatagtttaaaggcagtgcctattcctgttccttctcttcccttgccttatatgtggctccattaagttgtccatctgcttaattatttatgcaaaaaattaagattttgtggcttattggaagatcttttgctaacatgttatttttttccacattaaaaacagcacaaatgggtgtaggagaagggaaatcaattggagaatggtttggaccaaatacagttgcacaggtgttaaagtaagtaaaagagtctggcatctgccttattctgctgtctcctatgcttccctccctagacaactaaacctcccatcaaccgaggtattcttgcaatcccgctaagctactcctcccactaaaccatcaaatatctgccattttgctcagatggctctttgaaatgtgtaagcatggatatctgtgttggtgtatcagagttatattcactggtagcagtatatgtggctgtatcctaggactcattcagtgtctcatgctacagattgatgctcatgtgcctgggagccattggcctgagggtccctttgaagccaaaagtttcatactaagtggtagaggctaagccagcctaagcaagaaatggacccccacagggctcccacatgcactacataatatttaaaaaccctgttcattcagcattttctgtgtacctttactgtgctaagttctgggggtgcagaaataaacttgacacagtccttgcctcaaggaactcaccacctgttgggggcgacaaaccccagggaagtcttggaatcagtttgtcatctcatagcagactcaaggtgtcccagtgtggtatttttccagttgtcttgttaaattccagaattcacctcccacagcaagaggcaaggtggagaggtcaggaccaactttttgaaagcaaacagggtgagtgatgttagtacttacacctgcagaccaccttacctgttgtcactctccttcctaacaacctatcactggatggaaactccatgagggcagagattgtatttatcttgttcactctgtaacactagcacatagaactgcctggcatgcataagtactcaataagtgctcgatgaatacatgaaaatggccgccagaatctgaggccagatttagggatcagaagattgaaaccttctggcctcctttggtgtagaatattaagctcctgggcattatgggggaacctgttccatgcaaagtacagacaggaccctgtttccattactaaccagtcttcagtgaactagaatgctttgggaatgtgtctgtgaggacagtggcctggattttttggggacccaaggaaaatctgtattgactttactccttcctaacaatgtaacctctctgaggctgctctcttgccatagtcagagtgccttctgggcatcgctgactctgctgagtgaaaatctggtaggatttcaggaatcactgtatgaacgtagtgtggaaagtataagatattagaatggctgtgctgagcccaaaactcggcttgaaatggttggtgttaaaataacatccctcagaatttgcttctttcttctaaattttaagattaccaacaacaaagtggaaacctagattttttttttttttttaggacagagtctcactctgtcgcccaggctggagtgcagtggcacaatctccgctcactgcaacctccacctcccagggtcaagcattctcctgtctcagcctcccgagtagctgggattacaggtggctgctaccacacccagctaatttttgtatttttagtagagatggagtttcaccatgttagccaggctggtctcgaacttctgacctcgtgatccacccgtctcaacctcccaaagtgctgggattacaggcgtgagccaccacgcctggtgtagatttttttaaagaatgtaaatgggttccaattcatcatgatcattagcattaacaacaacatattattattattattatattattgttattattctggggaaagataatacatcaaaatgaatgaaatacaagggtgatggtagttaacctctttctgggagctacctggtagagagaatgtgttttctttggtccagtgagactgggttttacccacacatcccagacgtagccgggttaaacatggccttacttaactggcaaggaaagaagaaggaaagggagaaataggcagggtactttacatagacttcagatcatctctcttttaaaggggttttctttctaatacaccataaagtcctacagttcagcatggtggctctcttcagctgctgaccagtaaagcttggcacccgagtcaatctgcagcctatgtcacttgagaggcactctcagggcagctggggaacagtggaagtaatctctctctctctttcccctccacccactgtctctatctctgggtttacctggaacatattctccatattatctatgatcccaaacaaatatctattttttacggacagcttcctttttaaaagtttttttacagtttcccttttgtaaaataaaaattcagtaagtcagaatgtcttttatttaagaaaacaaagtctcttgggactttgagagcagatgcatgggtaacttttcttttttccccagtaggtgtcccgtcattttgtgaagtagacttctccaggttgtaaagcagaaacttctttttgaggttcagatacagtgactctgtggcattctcaaggtctctagacatggagcatcccagagctctggcaaagaagccagagctgacctgaacaccagcttttctatggctcagtgtttggtgactttaggaacactgggcataaattgtactgttttctgctgatatttccatcttcccaaattgtgacttcattatacattgctttgcagaaaacttgctttatttgacgaatggaattccttggctgtttatgtttcaatggataacacagtggtcattgaagatatcagtgagttaccagcctgtttaacttcccagctgatgggtgatgagttcctccctcaccattcagtattctggggctcaagagagtctctctggtcttccccaccagggcaggggagcttaggggagcacagggctctgattctctttcttttcagctttctgagagggagaacaccattagaggggccttgctcctcctcagtgaggtaccacactccttccctgcagaaaacacaaagtgtgtataataatttattcaaccaccaacagatctttcatggaggctcacccttgtccaggcgtgtgattcctgcactgaggagtgagagcaacctaaagatacagtccctgtctcaaaggccctggcagacttgagaaatgagattcttccaataagcccagaatccctattgggagctaaacaagtacccagtggccagaatgaagagcatgagccctagaggaatggcctgggctttgtgcaggcggggagtcagctgagccctggtggcagaggagagggccttctaggcagggtggggggcatgtgaggttccccttagttttgatattggaatatcttctagggctgaagactccttacttatccaatattctgttcttccatttctagaaaaaatgtgccgtgtccttcccttgagtgctgacacagctggtgacaggcctcccgattctttaactgcttcaaaccagagtaagggcacctctgcctactgctcagcctggaaacccctgctgctcattgtgccccttcgcctgggcataaaccaaatcaatcctgtctatgttgatgcattcaaagtaagtcacttctttccctgagcccattgctgcctgcccatcacaccgccatctcagcacagagatccgtgagcagcagtccacaagtgagttgagaatcttgcattgtctttctctccaggagtgttttaagatgccacagtctttaggggcattaggaggaaaaccaaataacgcgtattatttcataggattcttaggtaagaaaggaggaatcacaagtaagtcatcgtgggctaggggagggcgtggggacaaggtttgcatgggagaccaggcaattccagttagtgggttcccgtctagcccaggaatgccgtggcctctggtcagctccttctgtctccggcctaactgatggagagtgatgtttctgtgtgcctgatggaaagcaggtccaatttcaatgccttccttgcttcttgataagatggttccattgctttcccactggatagccccaaggtcatagcattgctccagcatgtctctctcctgcctgtggggcccagggtggtggaatttcaatcccttggctttgccaatatctctcttattagggcctgctggctcattgttcagagctgtgacaggttgggaattggaggaggcaaagacagaagtacccctttcccgagaatgggggctaagccttaaaaccactaacctcttaatgtggacccgagcaagcaacccaacattccctgcataggaaggcacctctggaaacccagtctctttactcactagctgtgaccagagacatctgaggtccttggtacacaaggtaagctagcctagtgcttctgaagctttagcatgcacatgaatcaccttgagagcctattggagtgcaggttcagtaggtcttgggtgcggcctgagtttctgcatttctaactaggtggtgctgatgctgctggtccacagaccacactttgcatacccagggcctaaacacctggttagtgttgaagagcataagttagagagtgatgtggccaggaaaagttggtacaggacacctgttgcaggggtggaatggtctgagacttggcctcaggaaagttatgaggtcagattggttgacagacaaaggagagctacaggagttacaagggaatggcatgagggcacgtgcaaaggacagggtggagatggccttagttatcctccccaacacatctcctcttggacattcagggaggtgaggtgggatgggaacagacacacgtggctttgcatgccaatcccccacttgctagctgtgtgacttcaggaaaaagatatcaatattcagtctcaggttccttttatgtaaaatagggctaatgcctgactcgccctgttgtcatcttacagtaaagtgttcatcaaagagccaggcatataggacagtcactgaaaggtggctgcaccttgctttaccccaatacctatttcctttgccagccccttcttcctctctttaggttggggggtgtggagcggggcgtggggattgcacagctgcctctgctctctctaatgctgccatctattggttgagcccaagaattacagctaaatggaaaacgtggagcctgtaaaggcttttatttttctaagtataaaacctagtgtttggagttctgcaaaatcagatgccctctgttcctaagcatttgggttcaaagaaaatgttgcaaaaaatagatttccagttgctcatgcatgacttagtctcttcaggcggctataacagaatagtatagactaggtggctttataaacaacagaaatttatgtctcactgttctggaggctggaggtccaagatccaggcactggcagatttggtgtctggtgagagcccacttccaggttcatagatggctgttttcttgctgcgtcctcaaatggtagaagaggcaaaggagctttctggagtctcttttatgagggcactaatacattcataggggctccaccctcatgactaaatcacctcccaaagaccccacttcctaataccatcatactgggggttaggatttcaacatatgaattttagggagacataaacattcagtccacaacagtgtttgaggacagctttgaaacagattagaaaataactttggaggaatctcagtgaatagtgtgtgtgattcctgggtgccctggcctccctatcccaagttacctacagagaatttctccaagttgatgtagccctcctgtttcttgaggccactgggtcagagtagcttttgtgaagtttgactactcattaaaaagatgtgggcaatcctcagttctttaataccccaagacagaggttcacatagtgcccatttgcctgttaacttttataagtcctttgtgcaaacttcacttgagggctttaagtccctctgactccccttttctgactcacacccttactgtttgaggttgagtggtccagattggcagaatgtctgaagggagggaagagatgcaaattgccattttctaaatagttgtcctgttccagagacttcgcaaagtatattatctctctgtctacacatatatacacacacacacacacacatttatacatatatatacatatatatacattatatatataaaatatatatataaaatgtattacatatacgtacatatacatatacaaagtattatatacattttacaaatatataaaatgtataaatgtatatataaaatacattgtatatataaataaatgtatatataaaatacattgtatatataaatgtatatataaaataatatataaatatataacataaatgtatatataaaatatatataaaatgtattacatatacatacacaaagtattacatatacattttatatatataatgtattacatatacaaatacatacacaaagtattacatgtacatatacatatatacatatatatacatatatatacacatatatacatatatacacatatatacacatatatatacgtatatatatacatatatatacgtatatatacacatatatatacatatatacatatatatacatatatacgtgtatatatatacatatatatatatatatatatatatatatatatatatatcactaaggaatggtgccatattgagggctcagtgttggtctgtgctgctggcaaattgggcactcagcaggggctgtagccaggtcagccttggtgagtggaagtccatgttgctgaacccatgtgtaacctctatccctgccaccatggccactttgttcatgggcccattgggtgatgacacgggtggctgaggaaaaaggctgagtggtgtccacagaatgggtcatcctatctacttgattattaatcaagaatacacacaatatttctgtgaggtagagactgttatttctgttttacatgcagtgaaactaagagctaaaattaagagagattaaaaagttatttcttcaaggtgattctgttagaaagtggtgaagccaagagtcgatcccaatttgatcatctctacctaccaccttccattgctcccccagggccctcctgcccagtgggaagctgagagagctctaggtgtgggaggatatggccaggatgacactctggccttcaaattttgcctgcttagagagaaggagatgttggttccttgcacttgggtataggtttccacctggagatccatagcattagccctgtctctgcaggtggttggtcagcctgccttttcactccaggtctcactggagacctttgtttagtccccagatcatttctagagctttttacatctattgtatatctttttttaaaaaattttgttccagattcaggaggtacatgtgtttgtttgttacatggctattacatgtgtaatggtgtggattgggcttctagtatacctgtcgcccaaatattgagcattgtaccccaatggatgatgattagataaataaaatgtgttatatacaccatggaatactatgtggccataaaaagtaatgaaatcatgtcctctgaagcaacatggatggagctggaggccattatcctaagtgtactatatctcttataagcactctcagaaatgatgcagcttgtggcagcttgtggccaggcgcagtggctcacacttgtaatcccagcactttaggaggccaaggcaggtggatcgcctgagctcaggagttcgagaccagcctgggcaacatggtgaaatgccgtctataccaaaaatacaaaaaattcgctggatgtggtggcgcatgcctatagacccagctacttggaaggctgggatggggatcgcttccaagcagatcgcttgagcccaggaggtcaaggctgcagtgagccaagattgtgccactgcactccagcctgggagacagattgtattagtcagggttctctagagggccagaactaatggaatatatatacatatatatgtgtgaatatatatatgtgtgtgtgtgtatataacatacatacacacacacacacacacatatatatgtaaaggggagtttattaagtattaactcacatgatcacaaagtcccacaataggccatctgcaggctgaggagcaaggagagccagtctgagttccaaaactgaagaacttggagtctgatgtttgagggcaggaagcatccagcatggagaaagatgtaggctgggaggctaggcccatctctctttttcacatttttctgcctgccaccctggcagctggttagattgtgcccacctgattaagagtgggtctgcctttcccagcccactgattcaaatattaatctgctttggcaacaccctcacaggcacacccaggatcagtactttgtctccttcaatccaatcaagttgacactcagtattagccatcacaagtccaccccttgtcaacttgaacccatatacatatcctgagatcatacatcatcttcagataaagacaataataaggtcataatttgcctaacataatacaactatccttcgtacaactggaaacgcaccaatccccaacccaaatactattacatgaacttaataatacttaaatgctgatgtgaagtcaataaatcttatgtcacatgataaaggagaaaggaaataaaatgagaatattttcttagtacaagtgtatacatgcacaaacatatttttaacaaaagaaggaggaaatgttcatgacaattgcagtcctcgtttctgtagctggtcacgtggtcgtagctagtattgatgactacctacttttactacctattctgtattccctttgccgtcagtaaacacttcagcaggtcatgttttttttcctggtggagtgacccaaaccttcattcctgaagggtctgggccgtttgtagtcctgcctggattgggctgttgtagtttcccattgaccttaatcacagggcatggtaatactaagagacacccaaatggatctcctgtattccatgcatactttttcttacctccattgtggggtagtagactgatttcatcttgatagtccaagtcagtcaccccaaccaacactgtaactcccttattagcctgttgatgtaaagggaagaggagcccaaagtgtccaggtggcaatcttaacttccagtttaatggaactgttgtgtctcctgatggcagcattccttcctctggaactaagaactctaggccagcagaacgtaatgtcgggggaacaggaagcaaaaattttgctggtggatcactggggctgatggtgagtggtgccacttccacttccactccttgattcctggacctgtgaatcctggctatgagagaaagagtaccatatattgaatgctaattcagagcttacacagccttctggaaaactttgccccagccctacaaagtattgtcacctagttggcattgtaattgtaacttcaaaatgaaattccaccattctatcaatccagctgcttcaggctgatggggaacatggtaagaccagtgaattccatgagaatgagctcactgccacactttcttagccataaagtgagtgccttggtcagagtctgtgtgggataccatgatgttggataaggctgatggggaacatggtaagaccagtgaattccatgagaatgagcccactgccacactttcttagccataaagtgagtgccttggtcagagctgtgtggaataccatgaaggtggataaggcattctgtgagtccatggatgggagtcttggcagaagcattgcatacaggataggtaaacccatatgtggactaagtgtttattccagtgaggataaatctctgccctttccgtgatggaagaagcccagtataatcaacctgccaccaggtagctggctgatcaccctgaggaatggtgctatattgagggctcagtgttggtctctgctgctggcaaattgggcactcagcaggggctgtagccaggtcagccttggtgagtggaagtccatgttgctgaacccgtgtgtaacctccatccctgccaccatggccactttgttcatgggcccattgggtgatgacatgggtggctggggaaagaggctgagtggtatccacagaatgggtcatcctatctacttgattattaaaattctcctctcctgaggtcacccattggtgagtactcacatggcatacaaatatcttcacagtttttgaccactcagagaggtccatccacatacctcttccccaaatttggcaccaatttcccaatcatgcttcttccaagtccctgaccatccagtcaaaccattgactatagtctatgaattagtatataatcgcacatatggccgtttctccttccatgcaaagtgcacaaccaggtgcactgctcgaagttatgcccactggaaagatttcccttcaatgggtcagagtaacacacccaaatgaggaatgtgttgcctccaaaatccaaataggcccaaaaggcattgtgcctctttcttggttgtaggaggggccaattgcagcaacttatccttcaccttagaaagaatatcttgacaggccccacaccactgacccctagaaattttactgaagtagaaggtccctgaattttagtcagatttatttcccatcctctggcatgcaaatgtcttaccaataagtccagtgtgtttgctactttttgctcactggatccagtcagcataatgtcatcaatgtaatggaccagtgtggaagtgaaaagcgatcaaggtctctccaaataagattatgacacaaagacggagagttcatatgcccctgaggtaggacagtaaagatatattgctggccttgccggctgaaggcaaattgcttctggtgggcctcatggacaggaatggacaaaaaggcatttgccaagtcaatagctgcataccaggtaccaggagatgtgttaatttgctcgagcaatgaagccacatctggtacagcagctgcaattggagtcaccacttggttaagcttacaataatccactgtcattctccaagatccatctgtcttctgcacaggccaaatgggaaagttgaactgggatgtggtgggaatcaccacctctgtgtctttcaggtccttgatggtggcactaatctctgcaatccctccagggatgcaatattgttttttatttactattttcctaggtagaggaagctctaatggcttccatttggcctttctcactgtaatagccctcaccctaccagtcagggagccaatgtaggggttctaccagctgctaagtatgtctatgccaattatgcattctggcactggggaaatgaccacgggatgagtctggggacccactgggcccattgtaagttgcacctgaactaaaactccattaattacctgacttacataagcccctactttaactggaggaccacaatgatattttgggttccctggaatcaatgtcagctcagagccagtgtccagtaggccctgaaatgtctgatcatttcccttcccccaatgcacagttaccctgctaaaaggccggaggtctccttggggaaggatgggagagcgattcactgcataaattgtcagtaatatagtgaggtccttcctcaaggggacccggcctccccttcattcaaggggttctgggtctgtaaactggctcaagtctggaaattgattgatgggctgtgattctctgtttctgtaattcaaattagtcttttgtgcattcgacctagaagttttctgcttatataaattaagtaggaatgcagtaggcttcctatcaatttcacttctaggaacaccatgattaattagcaaatgccagagctctacacgagtcagactattctgattgcagtagtctgaaagcaatagtcagactattgctttgcctctgctgtccattacggtagctatgcccaccttgcctttgatggttgagtgctgccacttggcccctgccacctcaggatccaattattcccattatatttaaattttgtagttgagtgatacagttcccactgttagatctgacatacagagaagagcaattacagtactcttcgaagatgcatgttctgccctcacaaatctattttgcaaggcattggtcaagggtatatcttctggaccctcccagctgggatgaataggtctgaagtgactaatccactccaccatcccaatctccctaagcctttggatcccttcctctacataaaaccaagggagatcaggcatttccatctcgttcacagtgggccatcttttaatccatatttcagctaaccaagcaaataagctattagaaccttttttaactccccgagctgcaacattaaatgcagagtctctaacatagtgggcccaaatcaataaattcagcctgatccaactctgtgttctttccaccattatcccacacccttaatatccgttcccatgcctgttctccaggtttctgtttatataaattagaaaactcaagcagttatttttgagtatagtgcacctcctcatgggtcacactctcaacctcacctccaggagcccaccaggactttagtctagttgaagtctggaagcaaacaggggtgttgggggtggctcctgaggagaatcaacattatcttgcctggcaactgcctcagaggaggccatcactgttgcttcaggcagcacagggtttatctcctcagtcaaaggtggaaaggctgatgacagcatgggccggggaggggatattgccactactggagatggggaagctgtttcttctggcaaaaaaagttcatcagagtttacaaactcagtgtccccagcttcatcagggtcctcccacacgttcccattccaagttgcagggtcccattcttttccaatcaatgccctcactttaacagtagacacctggcgaggctgtgcatgcaccttttgttggaggccagtcactcgcatgataagagcttgtgtctgtttttccacaatttcagctctttctctacaggagataagactctcacttagggcaatcttagcagattttaggttcaatatctgcttctgaagcctggagctagaatccctgagttcatcattttctttcatgactttgtccactgaacttaggagcaaccaactagcttcattatgttccttggttttccacgtatggtcaattgtattatgtatagtcactgaactccttgcctctcacgagcgatgattcaggtgtgtcaaatgcatttattttgcataactctctaaacagttcacaccaaggactatcagtgttccctatactattagaagtacagtccttagcatttttgggtctaatcatattaaatagccaactccagaaaccccaaaaccaatgaaagaacttcatccttaatattctgttcctctagaacaactcctggtaccaaaatctgtatcagtcaggattctctagagggacagaactaatggaaaatatatatatatatatatatatatatatatatatatatatatatatatatatatatgagtttattaagtattaactcacatgatcacaaggtcccacaataggccatttgcaggctgaggagcaaggacagccagtctgagttctaaaactgaagaacttggagtccaatgtttgagggcaggaagcatccagcatgggagaaagacgtaggctgggaggctagggctgtctctctttttcacatttttctgcttgccaccctggcagctggttagattgtgcccacccagattaaggaccggtctgcctttcccagcccactgactcaatgttaatctcctttggcaacacccttgcagacacacctgggatcagtactttgcatctgtcaatccagtcaagttgacactcagtattaaccatcacacagagggagaccctgtctcaaaaaaaaaaaaaaaatgatgcagcttgtaaagctccactccatgcacatacacacacacacacacacacacacacacaccacccatgggaaaaggtcctggtcagagtcagagaagatgttattattctcaacaccttaactccaaacatcccattagatgactcagttctaaccctgttttggctttctgttttcttgcctacaacttcctttccctcagacctttctgtggtcttaggtaggcttccttctagccatcttggttgctctttagtgtaatctgaggctttttcagtatcactgatcttgcccacctgtggtctaggggaaaaacatctaccttgactttcataaagcaagtcatatggggggattgatttctatatactcttaaacatgcatttgtaggaaaatactgttgatttgcagtaaaatatttctctggccactttctatttgtattgtgttttaaggatttcacagaggtgaaatcttctggtccttgtaatataccatgaggcaactagaacaggcccgatgaccctagtttaaaaacaagaaaattaagacagagtgaattaagtggtttgtccttggtttatgacagaaaaatgttaaacttttcatgagacttcagaaatgaacatattctttgctgacagaaacatgtagatgtgcccaacacaatcctggataccattccagagggagtctttggggcatccctccctaccccagtctttggcagcaggtagatctctccttgctcgcctgatatagctgagcacacagagaaccagatggccctcaggcccggacagtgaggctggggtacctcttaggcacttttgcctcctcagcctgtggctgatgaacattagagggactgtcagccctttgaataccaggtcaaagcagaaattttattatcctaaactcctcccatgttattttggggctagactttttcaatttaatgaagcatagcttatatctcttgtgtcaaggtcagtcatctcaaagtgaattttccaagtgagctgtatctgtactgatgtcaatgtgacaaaggcagtgctttctgacaggaacttactaacttgctaataagtactaacttgctagctaatcaggaccagaagtcagctcactggtttctcatccataaagagtcagcattcccattccataaaaagtcagcatttcttttgaaggtcaggacctcctcccttaccagaggtgctttctgagcatggggctgagaaccagcagtctagcctgagatgctttccaatgtcaaaagaggcagaaagctccctaatggtacctgggcccacgacctggtgactccacctaccgcctctttgctactgctgctcacagagcctgccatgccatctgtggtctctcattcccacattttctcaaacctgtcactttccattttgggacttggactttgaggagatgtaaatgctagggcacatcttctcattgaatgataagatttgggcgcaagtggcttcctttaagcatgctcaccctggcttcaggctttctgtcattccattctcattgtcaccaagggaggggttaagagaaccagagtgcctcctcccaacaacagcagtgggccaggaccggtaatcctttgaaggttaagcatatctccttcaaaacaggtgacgagctcatcttcttggaccctcatacaacccagacctttgttgacactgaagagaatggaacggttaatgaccagactttccattgcctgcagtccccacagcgaatgaacatcctaaacctggatccttcagttgcattggtgggtattcgtaggttgggtgggccaggagatacgatgtgtacagattggttccctgggagttatccagattgctaggtaggaaggcaagagtatgtttgctcactatccccattagaggcagtagagtgtagtggggaaggaatggaccctggagccaaactgctccagttggaatcttggctctgccacttactaactgtattagtctgttctcccactgctgataaagacatacctgaggctgggtaatttataaaggaaagatgtttagttaactcacagttccacatggctggggaggactcccaatcatggtggaagatgaaggaagagcaaagggatgtcttacatggtggcaggcaagagagcttatgcaggggaactcccatttataaaaccatcagatctcataagacttattcactaccacaaggatggtatgggggaaaccacccccatgattcagttatctctacctggtcccacccttgacacgtggggattattacaattcaagatgagatttgggtgaggacaccaccaaaccgtatcactaactacgcacttaggaggagtcacttaatctttctgagcctcagtcttctcatctctaaaatgaggaaaacaatagttcgttccttatggggttgtatgaggtgcaatgcatgtaaggcacttagcactgggcctggcacattgtaagcattctataaatgttagttactctttcccctgtttccttcttgtcctcaaattattgctacccaggcacagggaggaagatgggatatcactagggagagataagggagcaagatgccctgggtgcacacaatctaggaagctgcaggattttcccccagaagtatggctggtgtctacacacactgaaggggcatctgcctgtgaagtagctggtggttctgaggcctgtctgcatcctctcctctagtttaatccaattgtcagtataccagtgaccaggagctgcaagtcctcctcttgtgaaccattctttcactactctgggatggatttgaggttgagaaagcacagactgatggttctctctattctgatagataatttcctgaaggtcaatgccatcttcttaagtattgcctctagctaaaagtaccatttggcttttgtttgttggcttaattgaatgttctttggagatgtgtgtatttgtacactgaaagtaatggaattaaccctacactttgaagatgatcttcaagttaaaatatctcgcagcatgaggaaagagggaaagggacagagagcaagggtgagaatgagagcaagactgagagagtgatatgtatgtctgagtaaggcaatgagttaggagagagagaagcccaggcagtcttccttctttattgctgagaagtcacatccacagagactggcccacatcctaattctgggccaacagctccattgtgcaataccaaaggtaattctaagttgtgttcttttgctttcccccaagggatttttctgcaaagaagaaaaagactttgataactggtgtagccttgttcagaaggtaaagctatatgtttttcttagtctgaaaaatgaagttacccaattttattccttttcaagattgtttttcatagtaaaaaaaaatcctactctgatacgactttactgcaagagaaagaaactaaggcaacaaagaaactatcaggtgtggggaattgtgcataacttcggggaaactgaacaaaaattttggtttgaaatatgcttagcatgtcaagggagtgatatttttagtgatgaaacctaatgttttatctcattaatagacaattattttctaaaggcaatacttacattttagaatgcagcaaaactgtatttatgtcacatttaaaggtggaatgagaattttctgataagactatgccttttattttattttattattttttgagacaaaggctcgctccgtcacccaggctggagtgcagtggcgggatctgggtgcactgcaacctccgtctccaggttcaagcgattctcctccctcagcctcccgagtagctgggattacaggcgcccaccaccacgcccagctaatttttgtatttttagtagagacagggtttcaccacattggccaggctggtcttgaactgaccacaggtgatctgcccacctcggcctcccaaagtgctgggattacaggcatgagtcaccgtgcccagctaagactatgccatgtaaattaggatatataccatacatgttggactgccactgaaaccatgccaatatgtagcaatagtctcttggggcagatttaatttcactaactgacatttctttggagccagtgcttcaggaacatgtcacccctaaagtgagctggacccatgcgtctggcacaggcactatgcctcatgatggagaataggcagtgagtgctggccttcatcagatactccccgcaaagtccttccttcctggctaaacagtatctagaattgaagatggctgagtcttcagatggttcaagtagaggatgcatgtattttctaggcccctgttttcacctggaaaccagcagaccactgtctcagggtttggggtcaaagattgccaattagaaatgttgtgactctgaagtatttaaaactgttttgtcatctccccaggaaattctaaaggagaatttaaggatgtttgaattagttcagaaacatccatcacactggcctccctttgtacctccagccaagccagaagtgacaaccactggggcaggtaagctgttgttcaatggctctcagctagcagacccacatatagcagttgttttatgagaaagaagaattgtggcccatgctttctgtggacagtaaaatttctactcagctggagtgataaaaaaatggcacttctggttattttaatcttctgatgagctgatatttaccaatttcaaagaatgataatagaagaaaatgagctcattgcaaaagttctatgcaaaatcaagatgactaggattgctttttcatggtctggttcagaatagcaaattgaggccatcgataattcaaaggtatcttgaagggctttcagagccttggccacatcaccgtcgttaggtttatgtaacaagtctggctattttgagtctttatagataatttctaatacttggcagtagttctaattgtaagtctcctccacacaagtctttctttagtacagcaattaaaaatgcttagtcttaactactgagtaaagtatttactgaccacttcaacccaagtgtcaagcttttcttctttctcatttccgtattctgatagaattcattgactctactgagcaactggaggagtttgatctggaggaagattttgagattctgagtgtgtagaatcctgggaactcaacttgaaggtctgtcttccatctggcaccataaaaacatgaacttattgcataaaacttttctagtcagcaagtgcctgatatgccaatagcatacaaactcaatagcaatcatgactgagccaatcactgtttctcagaaaaacaaaacaaaacaaaacaaatgacagtaacccttccccggaaagaaatagaacaatcatggagcctaggagcagagagatgaggaggagttcattgcttcccagcttgtgttatatggctacagcaagtcttcagctgctgcaatgaggaaatgggcatctggaagacaaacagcaactctcagcttgcttcaagaaccagcagataagagatggttaagctgttcttcaccctttcagatgtgacctcttttggactaagcagcaatctgttctcttgctcaaataataaagtgactgaatcagggaggaaaaggttcttgttaaattatttgattgtgtagttgaagtaattataatttatatcaaaacgtttgtcaaagaaacgatgtcaaatatacacttcttgatctcccttctgtttgcggggatcttactatttgatgggtcactgtccccattcttactgatacttttgtcagatatcaccctgtccttaaatcatgatcacttaaatcaggggtcagcaaactttttctgtaaagggccagacgggaaatattttgggctttgcaggccatgcggcctctgtcacatctactcaactctgctgttgacatgcaaaagcagcaatagacaatatgcgtgtaaatgagtgtggctgtaatccaagaaaactttatttacaaaagcaggtggagggctgggtttggcctgcaggctgtagcttgccaatcagtgacttaaattgttgatttttgtttgataaattaaaaataaattgtgtttgaagtataccctacttggttgacagccatatttagaattattcatgtggtgaattacacattttatctgtgcatcatatacaattccaaaccatttgaggctagcaacataataggttttaaagcatgtattcatcaaattagctttgctaaccactttcctgtgaggatgaacctcaagccccagcagtaccttctcattttccttttcttgcttccttaacttgcctgcatttcacccccatccttaatcaagtcccgaggaaggccagcaactggaagctagcaccaaaccaatctgcttgtttccttagattccatgtttttctttttccccccgtatattccaatggttcaaaattcaaaagatgtaaaatgatattcagtgacttgtctctctctccgataggtcagttccctcccttggaaattcccaatggtattaatttcttgtttatcctctcagaggatatattttatacatatataaatatatgcacacacacacacacatatacacacacacactcatacacacacagcttggatttgattttaatgactttaacattctctacttttgttttatctacaaatgatcctaaggccacagaagtatgaaaatgcctttcttgaactctttttttattcaaaaaatttatttatttttatcaacctacatcatgctttgatatgttgaactctagcgtgtgacagggataaaagcaggcataggcttatcttgaagcagcttatgggtttgttgactgtttgttagaggactgtttcagctctttgactttgatcatcttctaattttttcctgcctcagtgttttgttacagagttcgacttggcagtagcagaaacctctcaggctctgagagggactcataaattgcagtgagatggacattagaaaagttttcataaaggaacatcaaaagagtcacatgttcagatttcatttattttatttgctatgtacaaaactgacaccatgcttattactcaggaggtaaagataacaataattcagattatattgattatgctttgtctgtattggcacagtttatataatacttaaggaaacagaatcacctggaaggaactgcctcatgtcaacatagctaagagtgttctggaaaactggtaattaaagaaaatggctaaaacaaattcccccaaacagaatacaatgtactgcatagccaattcaggcttgctttaggtctgctaactgctcaagagaagagtgtgctagatttttatgaggtttaaaaaaacatattaaaatagtttaataggctacctgtgaaagagcaattggataaccatttaacaaagtctttaacatcctcagaatacaaggaaaccaacactgtgcagcttcagtttgccacattgcacacatctggatggcatttggaataaacagggacttctgagaaactgggatgtgggatttacctttttgttcctggagtcaaaagcaaaactcacacatccttacgcacccacccctctacttctggcccaggaaaaaaggctgtcattctcatttcctttgataggcttggccacatttgttgcatcctctgctttactttgaaccaggccacatcctctgtctctggctggagggggagccggcaaggaggagatggtttgtctaggaccatatgccattaatgaccaccacccccaacccagctgctggccttcaagcctctctaagccatgtggggcccagtcttgctcattctagagagagctaaagctcactctgggctactgggtggcacctcatttcaattctcttgcctgcctagacacagtgggcctccttgaagagtgaggacttgctctgtgcagacttgagccatccatgaatattcggttagagaatttaagtgtggaaacactgggttctggtttaagccaaataatgtgtgctgacctctgtacatgaagaaatgactgattagcgattaggaagagctttccgatcaagacggtaaggagaaagctagcagtctaagacagttgtggcccatcaaatctttctgaggtagccatgaatagtcacacaatcatccaaatcaaacagtagcaccagcttgacagaaacaggacagcagatctcagcagggtgggctcatctctatggacccgagggctggggtgacgagtgtccggtagtctagcccaaatgagactccaatgtacaacttgacaggcaaaggggctcaggccttccttcttcagaccattcaggtttgtgaggtgactgttgtgaggggcaggggagggcaaggggcagagtggcaggtgccaccctacaggcttttcatacacacctggcagcgactgactcgagtgtggagctgcccagctttcagcgtttcagacacaggcaactccccaaactgctgcctctcctccactgtggtcaaccagaaactgtacttgtttgcaaagtagtggcaggtgcctcgggcaccactgcattcgatgaaaggagtggcccgaaagtcctctaggcaggagccaggtgagaccagggactggcctccaccctcggcaccagcggcagtgtgctgaaacagacaggagattagtgcatgagctgtgcctgccaagggttggtgtggggaggggatgggtgctccactgctacaggggcacatgagctccattcctaagccctggttccttgtctcagcccccagttcaagccagcataccaagagctgtgttttaggggcaggggctgcttgtcctccctcatagcagctttcagggccaagagtgcccccttccaagctccctagtgccctcctaacccattatgtgggcaatgactacatgtcaagcagcaattcccaaactgctactgtcccactgggttcagaggtgtgttaggtacccccttgcaaaatttcctcggacaaatggatctgagaaaagctgagtgaaggaaaattcaataggcttctggactgcggttctcagagccctctctcaaccatgcattgtactctaagaagggaaagaaggacagtccaaaacctactgaagttctccttaatttgttgtatttggcccaaataccctggccctcacctcagagggctctctcagtattcagtttcagggctacacatgagctggtggttttcagttactattcacatagacagcagctcctgtctctccacactcctgcctgtttctcttcactttagccgggctatcatctggaccacaaggagatagggaagaggcctaatacacaaccgtgtcagcaaatggccaatgagacaaatgcccaagttggcacacagggactccttactttgcagaactttgcaagagtgagagtctgcatgggacctttcaggtgacctttcctgacaaccgaagcatcaaaattttcctcactttgaccctgagaatcaaaaactttctaagatgcacaacacattttcctgctttgctaagtagcagacactaggttattttaaactttgcagatgaatcaggcttgtcattgtgaatgtcagtttttgtgggggatgattatgcaagagccccacaccaaggggtacggcccgtagaatccttgggcctcctttgaattattttctcctttttaataggtatgtctcattgcttcaagatgccttgctaggcagtccaacttctcacccttacatatcttcaggaataatattctagtatgttagaattaatgtgtaaaggaagagtaaagagattctgaataagggctaagagccctcccataagcagggcacatgagatttagtacacagcatttgtaccatttcctgtggaagctcaggggcctcttcttatttcctggtcagggtggtggacaggacagaaggacaggtgaggtgattctgtattacactgggataaactatccaatgtccaaagacacagcataacaaggaaaagtacctttccccaggtaggtacgctaatgttggggagcctgcagctttggtcatttttaaagacactctctcaccatctcacccttggcaattcaacagagaagctctggcaaggcagagtacttcaatgggtgccacagtggttttctctgggggatgtcctgaccctaaacctgaccttttatttgaagaaacatccccaggtattcacaggatattatgtgagggacttgatgcctctttgggcctgcagatattctttttcttagcaagacacacagcatggctggccgctgccttcacaccgaaatggagaggcagcaaaaataccagcaaggacatataaacacagcatgcactcatcaaagccttttgggaggagacagcagaggccagagggatctgggagggtggagagaagaggggacagtgccatggctggactgattagtgaaactgtgtcctggccccaagtggtgacagcctctccctcactgtcctcccagatcttagtgtgttttgctcttcccttgggtgtggcataactgaagcgggcatggagacggcggggcattgacctatgactcacagatattctagcccctgaaccactgggtgcaaactgctgtctttccgctacacccataactacctgccattcatgcagaactgggttctccattctttagccaagcccagtccaagcatttctcttcttttcaaactctatgctttctacctggtgtcccttgagcctgggaaccagtccaaggggccctttgcctccaactgggggaggagacagtgcaggaccttaccatgaggaaagagtacccaatccagaggctgcgccagcccagggggcactgcgggatggtgatgtcctggctgtgcacagcaatggcttgcgagggtgcctcacacacagagcagcggctgatgtactggggaatctgggtctggctgacgggcatcatggggataggggcggtagtggagagccagtaagatttatcattgcgcctggcatagtggcacacctcgttgatgttgcagtagatgaagggcatggtgctgaagcggggcagacaggagccagcaaagcctggaaggagagaaagtgggcaagggcaggggaggtctggctgaggggctttgacgagatggtggtttgggtttacatccaaccacttgcaccagactgaggcagccctctccttccaatcctgtaacattgtacatgtgctgaagtgtgttgagcaaattctattttaaatgcaccagggaaatttgataataacaagaatctttttataagctgtataattctgccctaattaatctgctttgaaagaaacagcgtttaatagactgagtctgcttttaagatttagcacacctgcagacaacaattaattctcaggtaatcatcattgccctgcaggtcatattattattattactactactaattgctaacatttaatggatgcttaaatgccaaatgttgctctaagcaatttacattgggtgattgattcatgcaatctttccaccagcgtgtgtgatagatactagaattagctttgttccattaaggaggaagccaaagcctagagaggttgaataactaatgcagtgtacacagctagtaagtgatagagccaggatttgaatccagatccacctgactccagagctgatgcttgtaactcactacacaacagtggacctagaaagggctgggagaagagaggggttggctgttggtgtttgtggggacaggtgaccagggctggctgtcagagctggtacctacccaggtcctggttgtgggctttctcttgcccctccacaaacagtaagctgtaccccacccacagctggctcatcccgatgggacacgggggcacctgttccgactggctgtgctttaccaacgtgtagcccactctcatgctctggccaggcattccaggcatcccgaaggggccttgctgccctggagctcctgagagagacagatcataaaaggtgagtgtggtgcagctaatgacaacatcagctactcacattgtaccacacattgtccaaggcatgttatacacatgtattatctcactcaatcctcacgatgaccctggaaaatggtattaccaccccaatttttagatgaagaaattgaggctcagatgtcctacagctagtaagtggtagagctacaactctatctcagatgtatccagctacagacgccccatttttcaaagtacattgttaggcttccttcccatagccacctggccttggggtctctctgagtggggattagggtgtggagagggatacttctcaggtccagccttgcaggccctcataggagataactatgtagctgctgaatcagagtcatcgaaagcagggttaggattagcagggtaaaatcttgccctcctctcctgcccatgacagacatgacaaatcaactgccacagtttcccaccgagcctctgaactgttctctactcaggacaactaatttgtcatccccaatataaagtgggacacaaatagaagaggtatatggacagccacgccttaactcaagtgttgttatcccttgaacatccccctctcatgtgtgtcagaatccctgggtagaaaaggggaggtaaagggcagggggccatctgtagtataaagtcagaccttttaagcactggaagagagcccagaaaaggatttggatttggaacagtcctttgccttccagaacgtagggtatcccttcacaggctcagagggtagtggggagtgaatggacttagagcccagtttttgagcatcttaggagtgtcaagctctaccactgggtttattaagtttcagacttgaagttttactcacccccagcctcaaaccctcccagaccaccatccccgccccgcccgcctcctaatgtggcatcatcagaccttcaaatcctggagggccttgcagtccaggcagaccaggatcaccaagagccccaggtgggcctgggagcccactggggccatctttaccggggatgccaggtaaacctttggagcctgcaggagagaaagcccaaaggagggtactcaatgtagagggtccccaggcaccttccccaggaaaggggacttatgtgtcatgcccaagactcactaggagacgatgcacttggctgtcgacttggtgtgcacactgcacatcaaggctgcagccgcctgggctagttcttagttcatgggggcatctctgccctggggcagtgccctcaacttagcctttctgagccccttcatgcccacttcctcctcccttcttctcatcctcctagcaacaatggaaattatgcagggcaacggcgagcatcccatatcagaaatgaggacaccgaggctgggcgcagtggctcatgcctgtaatcccagcactttgggaggccaaagcaggcagatcaccttaagtcaggagttcgagaccagcctggccaacatggggaaaccttgtctctatttaaaatacaaaaattagctgggtgtggtggtatgcacctgtagtccccgctactccggaggctgaggcgggagaatcacttgaattcgagaggtggaggttgcagtgaggtgagatggcaccaatgcactctcagcctcggtgacagagcaagactccatctcaaaaataaaaaaaaataaaaagaagaagaaggaggaggaggaagaagaaaagaagaagaagaagaggaagaagaagaggaggaggaagaggaagacgaagaagaaaagaagaagaagaagaagaagaggaagaagaagaggaagaaaatgaggacactgagacccagagagacttctaacttactccaattagaggccaggttttctgtcccccagccttggacttttttcattgtcttgtgtggccctttattcaccaccacactccctccatctctctgcagcacattagagaggggcgagtggtctggagtagcaaccttgctctgccctcacatcctctaaagccaagtaccaagtacaaccaccctgctggtcctgctggcccttcttctccccaacaggaagcttgggagctttgtgaaggaagagaggcaacgcttgatgaagacacacccttggaggtggacatccaagccagcctctcagccaaactgtctcaactccccaacaaatctcctttttctggcaccctcctcaccttgtaggcctacagggccttgagccccagggtccccagtgaggccagggatgccatcgatccctggtagacccaagggtccaggaggaacctggacagcttctgcagttggtgtttgtccaggatcaccttggaggccagaagagcctgtgggcaggtgggggaaataagaacatcaggctgaggcagagggaggtgacgggggccccagaagccttctttactaacttgcaatcaacagctttctatcctgtttgtccccacaggatacccgggtatctccaggatggcactgtgtgatattatacaatctttatccatctctctccccagtggttgggtagctccaagagggcaggaactgggtcatattcatcctgtctcctcagggcccagcattgtgcccagtgggtgacaggcagtccagaagcatttgctgctaatatggtgagctgagccttctctcagggctggggtggctggtttactcactggttagagcacagtgccaaggaggctgaggggacgcttctaaccccagaggttcagttggcatcccagcctaggaacccggcgccagccagctgcctttctaatagcataatttgcttagtaagtcattgaacaaatatttccccagtgcttattatatgccagggtcctggtagctctggggatagagcaatgaatatgacagacatttatggagattatggtctggtgatgaagatgaataatgcctaactcgacaaatactgttaatctgagtgtaagttgggagaagtgttgtggaggaaaggactaacacagggacactgggagggagcagagggtggtatggggtggaggcatctgttttagagaatgatcagtggccttttgcaagcaatgacatttaaactgagaccactaaaacattagaaggactttgctatttaaagagtagaggggcaagtgcactctgggaagtagaagtagcatgtgcaaaggccctgtggtaggccaggacttggtgtttttggataactgaaagaggccagtatggcaggagcacagtgagcagcaaaggggaagggctggccatgaggatgaagagggaggcatcacacagggctttgcgtgccacggtgagttcattcctacgccatgggaagccactggatgatttatgtttttataagctctttttggccactatgtggaaaagtgaccactagggtcgggggaggaagggtgctgcatgagaactattggtggcttggatctgggggtagcaaccaaggtactgcgaggtgaacagatgcaaggcacatttaggaggtacaagcctcagggcttgctactagattgcatgtgtgtgagtgagggtgggaaaggatgcaaaagacggttctttatttctgaattgagcaaacgggtgggtggtgatctgagtgcaaacccaatgcccactaatgcagagattaacacagagaggcagtcagtagcaggatccatggtggcaaggcagcagtggtcttcagtcctgggaggtgatagaggctgaaggatccccaaggtagagaaactgcctctctggggtaccttgatccagctgttttagacatccagactttcttggcgtggtgagcaatgatgcctgaaggaaccttaccaccaggcccctccctcgagctctggatcagcccagcacatgctctcaacttacctcttggccctgccttccccttcattccgggaaatcctgggtctccaggtggcccaaccttgcctggagtccccatgaagccaggctcacctctcatgcctgacaaagcccaaaggaagcaagtcaggtcccggcatggtaggggtggtaggggtggaggataggcaggggtgaggtagggaagaacatcagccaccggcctctcttcacaggactgcaggaaggagtcctggccgtggagtggggaagggcccagcagccagccgagcagccgtacctttcagtcctagctctccagggaggccagaaaaacctggaattccttggtctcccttaggccctttaggtccaggaattccagggaagccagggtctccggtgtcgccttgattcgaggatggcccagggggacctgggggtccagcggggcctgggcggcctagggataagatcggaagaggggcgaggggcaggtgaacaggtagtagccactgcagaaggcctagggactgacaggactccaaagcccattcccaggacagagaatgttccctcaccatcggtggggtcctagtgcccagactttcccaaaccattttagcaaaatgcacttggctcaagtcccctgtgtccccactcggggagggatgtgaagccaaacacgcccacatatgtccagcaacagggacttggctgcgctgtatacatgacttccccaaatgtcagacaaaaggtggtggctagccctcttttgggcttcctgtctttacctcgttctccatctaggcctggtcgcccggggtcaccaggctgtcctgctatgagtgagggcaaggagatgcctggggcaccggggagaccagcagggccctggagacctgggaaacctgtaaagaataaataaaaggggctggataggctctgtgtgcccagaagatggccaggctctttcagagaaaatggaagctcacacagagaaaatggaagcagttaggtaggagccagaccagagaacgccagcagagggctcttcttccctaatccttccttcccagaaagcagactaactgacaagggctcagagactccccttttccagctggagctgcattttattggaaagttctagctcccttacctcactggtaatggaaatattttaggccaacttcccccacaccagaaagaaaagaaggcatgactgagcacctggacttttaagtttccaaagtgattttaaacctgtctgtgtcaaaaaacacctcttaagttagccagttatgtctgatgctgcacaaaggttacagaacgtaggccacaggccccagccagtcagaacagacaccaggccgatcagaatggaggcagcaagaatgcggtgcctctgtgtcttctagggctatcttctgcaatttctaggcaaactggaaaacaatcttttataggtcattcatgatatgagccaagtgattgcttaattgcctatggaacaaatatctctgtactaaatccctcccccctttttggccaaagagaataaccacttattacaatagatacagaatactcatttgctctaattttaatactgctttacatgttttctgtttgtggaactatttctattgtaatatgttcaaaaccaaaactttcatctgatcacagaagatttatttaatgttcacatatcaaatacatagatggtaatcttgatgggaaaacacaaatgtaggtgttgatattatacatgtagcatggaagatatatatttattactttgggatattctagaagatattcaaatgaagataaatggattcaaactggttgataaactgttctggtggttgagattcttaatttttgtttgcgacaagaaaatccaaaaatgttaatatcgaattttatcttttgtgacaagaaaaatgcaaaaatatgctgaatttctcttattaaggtaaatccatgaaaatttataaaagtgatggtagatttgggtgtttttaaatagctcattaattaattgaatcttgaaatttagacaaagaaaaaataaattttgagaaaagtctctctaggtttcttaggtccggaaaaaagaaaaaacacaaaaagaaaactagtagctaagccacgtggtggtactcatagcattgttacttctggtttggtgaacctttgaaatatttttctttatccccagggtaaaaatctgaaaagaaagacatattgtatactttttttctgaaaatacagctctacacatatattatgtatatatacatataaagcatatatatgtatagcttatatatataaactgaaattatgcaaaactaataaacaagacaccacatgtgtaatagagtaggcagtggtgggcagtacacaaattataaaagttcccatggcagtttttggagactttttctccctttacctgtttcttaattttataattacacttacgtgttattaaacctgaaataaaggcactactgacttcaagtattgcaaaaagctcatgcatttctttaacaataaaacactttaaatgagcagatgaaaatgcaaaacagcccatttttccaactcagtccagtgtcaaagccttgaaaaaacaaaatacataaatgcagcctctacgtatttagtgcaaatatgaaaacaaatagtatcattgaaagttatttagataacagtactgtaatgagagggattgctctatgaagtttttttattggttagtttgtttgagatagggtcttgctctgttgcccaggctggtgtgcagtgatgtggtcaggactcactgcagcctcaacctcccaggctcaagcaatcctcccacctcagcccccgagtagctgggattacaggcgcacaccactatgccctgctaatttttgtattttttgtagaaacagggttttaccatgttacctaggctggtctccaactcctgggctcaagcaatctgcctgccatggcctcccaaagtgctaagattacaggcatgagtcactgcacccaaccactctgtgatgttttcttaggagtaaatcatcatattgcactgactcccgttgtcaaatcaaagataggttcctgtgggggtggggtggggcgtggtatgatatttcttgtattctttttaaagaaattgttttaattagatattgagaagatatgacataatatttataatatgcaaagaataattcagatacaatgaacacttgtgtttcaaccactcaacttaagaagatgtcacttgttttgaatttccttgtgtgccctccaccctcttccttcccttcctctcagaggcaatcactcctgaattttgttcatcatcctcttcctttttcttcagtttgaccatgtatatctctaaacaatgtattggttggtttcgcttatttttgaacatttattgatggaatcataccaaatgtattcctctgtgacatgtttgttttttgtttagtgctatgttgctgaaatgtatccttcttgacctgtgctgtttactacatgcataattgtgattttattatctcagatagctaaagaaaatgaataatctaatgaccatcaagatttgaaaacaaaagaaaatgtccctgtgtttttatccagtccccttttccctatatcccatgaaagaagacagtctctgggcaggctcggaccctgctttgagcccttcctctggagaagctgctggctttcagaaaagaacagtttggtccagatcaaagggaagaacaaacacagaaactgcagatgcatcaatttaaaatgcagcaggaaatgaattaatatatgaatatagtccctcggaaacatacacactgtacacaaacatgcacataaacaaaatgcggtgagacctcaagccccagagcagagagaaacaggaaattttgcaaatatgatttccccaggtaacatgcaataatattcttaagtatatactatgtgccaggcactgagcttttgtatatcttacctcgttcctcattgattcctcaaaaaacctatgaggtaggttctgttataatgttcattttatggaaaaggaaaactaagggctcatttgggattgaggaacaagtaacttccttgtttaaagtcatatagctagtgagaggtatagcttgaatttgaacccagctagtctgatttcagagcccatactcttaaccatgatgctatggtgaattcatttcctggttaacatggagtggaatgtacacgggtttttggaactttcctgaggaaaagttgaagaacacaagtcattcttactttctgagaggtggggaaagggagactcagaaagggacttcaggccatgtgatgagtcaggggccgagattagggtagaacctgctttctagtaaacccaacaaattctagttgagggtatgctgtggttctgtccggtggagacttgtatcatcttagtcttgggatccttcccgcagccacactgtcttcccagggccctgggagtgccatccacactggacgctgaggaaatgccagccaacctctcactaaatggacaagccctgtccctcaggaccaataattgcaagctctgaccaagcatgccagagaggcttgaggttagtaaggaggaacagaagagaatctggaggctaaaatggacttggtgaactgtgccctgacagtcttcactggaaaatgctaagcacagcctaacctctctttctcagcagtcattcccactgggttgtgagactcccagagatgtgaagacactcacagcccaaccctgtgagccacatggccctgctgtaccctaaacctgactctcccagcaaggcctcactcagcctctacaaggcctgacttggactcacctcgatcacctttttgccctctcaggcccggcttccctggagctccgatgccaattcctggatatcctttttctcctttgggtccagggagaccagcaggcccaggcacaccggtgatactaggtcctaggaggagatgcaggggtagggggcagacctcagtggaggtgaggccttcctgcctaactcactcgcctgtggcctgagaagcctgactgacagacaccagaggcagagtactgaagtaacaagaaagaaagttaatctgagtagaagaaaaaaacccatcctctttcttctccatatcaagggacctcaaattggaggttaataaggagagctatgagtccaaggatatgggatacaccacagtcgagaattcatggccagcccttgccaggcttctggaagagctgatgccctcctcttcaccctgagggtcttcctaacctggagtgccatgggtacccttggtgcccggaagcccattcagtccatgtaaaccaggaaatccagggaagcctgaggggagagaatgtcaaaaatggctccagcaactctgaatcatgaagcatcagcaagaggtagctacctgcccccaaaggcattgcgaggtccttattttaaagtcctggtcttttttgaggcatttacttaatgccctaagggagaagaaaacactcccaacctatatcctacaccacaggttctcatgactcttatcagagaccaatacagctttaggagtaagatggcagctcattaggtatcttgaagaagaactcagagtagcaatgtcaagaccttgagttgtcagctcccagagactggttccagaaactcactgcccaatctctaagtcagggaaaggctacacatgccagggcaattgccttccttgctagctcttctcttcatggatc

SEQ ID NO: 333 - DNA, 5976 bp, Homo sapiens
gctttcctttctaaagtagaagaggatgattatccctctgaagaactactagaggatgaaaacgctataaatgcaaaacggtctaaagaaaaaaaccctgggaatcagggcaggcagtttgatgttaatctgcaagtccctgacagagcagttttagggaccattcatccagatccagaaattgaagaaagcaagcaagaaactagtatgattttggatagtgaaaaaacaagtgagactgctgccaaaggggtcaacacaggaggcagggaaccaaatacaatggtggaaaaagaacgccctctggcagataagaaagcacagagaccatttgaacgaagtgacttttctgacagcataaaaattcagactccagaattaggtgaagtgtttcagaataaagattctgattatctgaagaacgacaaccctgaggaacatctgaagacctcagggcttgcaggggagcctgagggagaactctcaaaagaggaccatgggaacacagagaagtacatgggcacagaaagccaggggtctgctgctgcagaacctgaagatgactcgttccactggactccacatacaagtgtagagccagggcatagtgacaagagggaggacttacttatcataagcagcttctttaaagaacaacagtctttgcagcggttccagaagtactttaatgtccatgagctggaagccttgctacaagaaatgtcatcaaaactgaagtcagcgcagcaggagagcctgccctataatatggaaaaagtcctagataaggtcttccgtgcttctgagtcacaaattctgagcatagcagaaaaaatgcttgatactcgtgtggctgaaaatagagatctgggaatgaacgaaaataacatatttgaagaggctgcagtgcttgatgacattcaagacctcatctattttgtcaggtacaagcactccacagcagaggagacagccacactggtgatggcaccacctctagaggaaggcttgggtggagcaatggaagagatgcaaccactgcatgaagataatttctcacgagagaagacagcagaacttaatgtgcaggttcctgaagaacccacccacttggaccaacgtgtgattggggacactcatgcctcagaagtgtcacagaagccaaatactgagaaagacctggacccagggccagttacaacagaagacactcctatggatgctattgatgcaaacaagcaaccagagacagccgccgaagagccggcaagtgtcacacctttggaaaacgcaatccttctaatatattcattcatgttttatttaactaagtcgctagttgctacattgcctgatgatgttcagcctgggcctgatttttatggactgccatggaaacctgtatttatcactgccttcttgggaattgcttcgtttgccattttcttatggagaactgtccttgttgtgaaggatagagtatatcaagtcacggaacagcaaatttctgagaagttgaagactatcatgaaagaaaatacagaacttgtacaaaaattgtcaaattatgaacagaagatcaaggaatcaaagaaacatgttcaggaaaccaggaaacaaaatatgattctctctgatgaagcaattaaatataaggataaaatcaagacacttgaaaaaaatcaggaaattctggatgacacagctaaaaatcttcgtgttatgctagaatctgagagagaacagaatgtcaagaatcaggacttgatatcagaaaacaagaaatctatagagaagttaaaggatgttatttcaatgaatgcctcagaattttcagaggttcagattgcacttaatgaagctaagcttagtgaagagaaggtgaagtctgaatgccatcgggttcaagaagaaaatgctaggcttaagaagaaaaaagagcagttgcagcaggaaatcgaagactggagtaaattacatgctgagctcagtgagcaaatcaaatcatttgagaagtctcagaaagatttggaagtagctcttactcacaaggatgataatattaatgctttgactaactgcattacacagttgaatctgttagagtgtgaatctgaatctgagggtcaaaataaaggtggaaatgattcagatgaattagcaaatggagaagtgggaggtgaccggaatgagaagatgaaaaatcaaattaagcagatgatggatgtctctcggacacagactgcaatatcggtagttgaagaggatctaaagcttttacagcttaagctaagagcctccgtgtccactaaatgtaacctggaagaccaggtaaagaaattggaagatgaccgcaactcactacaagctgccaaagctggactggaagatgaatgcaaaaccttgaggcagaaagtggagattctgaatgagctctatcagcagaaggagatggctttgcaaaagaaactgagtcaagaagagtatgaacggcaagaaagagagcacaggctgtcagctgcagatgaaaaggcagtttcggctgcagaggaagtaaaaacttacaagcggagaattgaagaaatggaggatgaattacagaagacagagcggtcatttaaaaaccagatcgctacccatgagaagaaagctcatgaaaactggctcaaagctcgtgctgcagaaagagctatagctgaagagaaaagggaagctgccaatttgagacacaaattattagaattaacacaaaagatggcaatgctgcaagaagaacctgtgattgtaaaaccaatgccaggaaaaccaaatacacaaaaccctccacggagaggtcctctgagccagaatggctcttttggcccatcccctgtgagtggtggagaatgctcccctccattgacagtggagccacccgtgagacctctctctgctactctcaatcgaagagatatgcctagaagtgaatttggatcagtggacgggcctctacctcatcctcgatggtcagctgaggcatctgggaaaccctctccttctgatccaggatctggtacagctaccatgatgaacagcagctcaagaggctcttcccctaccagggtactcgatgaaggcaaggttaatatggctccaaaagggccccctcctttcccaggagtccctctcatgagcacccccatgggaggccctgtaccaccacccattcgatatggaccaccacctcagctctgcggaccttttgggcctcggccacttcctccaccctttggccctggtatgcgtccaccactaggcttaagagaatttgcaccaggcgttccaccaggaagacgggacctgcctctccaccctcggggatttttacctggacacgcaccatttagacctttaggttcacttggcccaagagagtactttattcctggtacccgattaccacccccaacccatggtccccaggaatacccaccaccacctgctgtaagagacttactgccgtcaggctctagagatgagcctccacctgcctctcagagcactagccaggactgttcacaggctttaaaacagagcccataaaactatgacctctgaggtttcattggaaagaaagtgtactgtgcattatccattacagtaaaggatttcattggcttcaaaatccaaaagtttattttaaaaggtttgttgttagaactaagctgccttggcagtgtgcatttttgagccaaacaattcaaaaatgtcatttcttccctaaataaaaatcaccttttaagctagagcgtccttacaactttgaaatgtgcaataaagaatacctgtgttttagctaatgtagcatatgtaattgcaaaatgatttagaatgtcatgaaaaatatgaacatttcctgtggaaatgctttaagaacatgtatttccattatcctatttttagtgtacaccagctgaatacggagcaatggtgtttataagcgtttttttaaactatctggtcacaaagactgttacgctaaaaatgtttactaaaagatcactaaactatctcccctcttgctgaagttctttgtagtaatagctcataaaaatttgtttattaatatttcccaagtgtctgttgactcattggactgttatgaggcttgtgccatttggggaacatgtaaactcaggctcccagaactgaagatggtggctggtggcacacttccggctgctcctccgtcacctgtgaactctacaagtgatgtctttttatttcaaagaagtttatttcccacttgtatagcattcacatgctttctttacgatcctcattgtctatttgagaatggttttctgagagtgagtttacattagtagcaagagttgtttgacctgatgttccattgtttttaccattcctgtagaaaaagggtgcacaacagaaaaatgaaaatgatgtgtcatggccataaaagtatagaaatctttaaaaattttaaaatgtacagtcccttatctatctttcccattccttgccactgatttttgaggaatataataaaaagattggaagagtataatgccatgagaaagaatgatttaggactgtgagggttataacatgccctaggtcagcaaccaagggttgaaatcagttctgttttagggggaaatggggggggcgacagatattattccaaaattaatattaattaatatttaaacgttggtgtttttatttaaaaatcagtaactaaccatctggaattgcaccatacttaaagtcttatccattactacactgtctttaaaacaatgtttctttaaatactctacaacgtttctaagaacgaacttcagacattttaattacagtaataatagcactccttttaaggagtttcagatccacactaaaactaaaatcataaaaggctgatacttttgtttgctgctaggctatattcttccattctttgaagtcctatgatgtaatatttttgaaacctagtgtatgtcttgtcactgttgtgatatttaatcgattaagaataccttgtaaaaaggagcaaaagcttcaatgtgaaacaattttctctctttatactaaacaactgaagatagatagtttagaaagataaggacctttgaaagaagacaactctgtcaaagttcataaggaatataaaaattcttcaggaaaagagaattcaatctatatgtcctcccgtttaatatcaagaatagaagaaattaagaggaaaactccacagaagagcataggccacttttagccatgtaaaaataagattaagtcacaaatacaacttttgaatttacctgtcaatatctctttaggacacaaaacaatgctgaagttaatataatttctaattttaaatgtcatttaagtgtagattatgccatctaggaaggtaagtaggaaaggtaaattaaatctatttttaaaattcaaaatattagagtatttttcccctctaaagccttttttggtgattattctgtatctgacataattgagaaactggtaagctgtaaagattccagtgtagcttctctgagaagttgtgagccagtccataactgcttcctcacatccatctgattgcaccatttctgcagcaaaccccaaagcagggtgccaatatgcagatggcatagggagtatcatccctcagccaaatcacttttccatctctaaagtttcatctattttggaagtcatctccaactaattgtgtctggatttagttgctaaaattgtcttatttatttatgaagcagcaatattcagcctgaaagcatttctgccatagttgttgtagttatatcgccaatggctgatttttttcattggaaagtaaatttaagtaattcgtgggatgtggtatattctgtgtcaacttcaagataatcactcattttctcgttatattcaggtctgaattaaagttaagttaatcac

SEQ ID NO: 334 - DNA, 2979 bp, Homo sapiens
atcttgacaggcactggacggggcctgcaggggtctccacagagaccatcaggatgtcgtattttggggagcatttttggggcgagaaaaatcatggctttgaggtcctgtaccacagcgtgaagcaggggcccatctccaccaaggagctggcggacttcatccgggagagggccaccatcgaggagacctactcgaaggcgatggcgaaactctccaagctggccagcaacgggacccccatggggaccttcgccccgctctgggaggtcttccgcgtctcctcggacaagctggcgctgtgccacctggaactgacacggaagttacaggatctcatcaaggacgttctccgctacggcgaggaacagctcaagacccacaagaagtgcaaggaggaagtggtgagcaccttggatgctgtgcaggtactctcgggcgtcagccagctcctgcccaagtcccgcgagaactacctgaaccgttgcatggaccaggagcggctgcggagggagagtaccagccagaaggagatggacaaggcggagactaaaaccaagaaggcggcagagagcctgcggcgctcagtggaaaaatacaactcagcccgagctgactttgagcagaagatgctggactcagccctgcgcttccaagccatggaggagacacacctgaggcacatgaaggcactgctgggctcatatgctcactcggtggaggacacgcacgtgcagattgggcaggtgcatgaggaatttaagcagaacatcgagaacgtcagcgtggagatgctactcaggaagtttgcagagagtaagggcacaggccgggagaagcctggacctctggacttcgaggcatacagtgcggctgccctgcaggaagcgatgaaacgtttgcggggagccaaggcctttcgccttccaggactaagccggcgggagcgggagccagagccacctgcagctgtagatttcctggagcctgattcagggacatgtccagaggtggatgaagaaggtttcactgtccggcctgatgtgacccagaacagcacggccgagccctcccgtttctcgtccagcgactccgacttcgacgatgaagagccccgcaagttctatgtgcacatcaagcctgccccggcccgggctccagcctgcagccccgaggcagcagcggcacagctcagggccaccgcgggcagcctcatccttcctcctggcccagggggcaccatgaaacgccattcttcacgggacgctgctgggaaaccccagagacctcggtctgcccccagaaccagcagctgtgcagagagattgcagtcagaggagcaggtgtccaagaacctctttgggccgcccctggagtcagcctttgaccacgaagattttacaggctctagcagcctgggcttcacctccagcccctcccctttctcctcctcgtcgcccgaaaacgtggaggattccggcctggactctccgtcccacgcggcacctggcccctccccagattcctgggtcccccgcccaggcaccccgcagagcccgcccagctgtagggcgccacccccagaggccaggggtatccgggcaccgcctctgccagactcgccgcagcccctcgcctcgtctccaggcccctgggggctggaggccttggccggaggagacctgatgcctgcacctgctgaccccacagccagggagggcctggcagccccacccaggagacttcgctctaggaaggtgtcctgccctctcacacgtagcaatggggacctgtctcgttccctgagcccctccccactgggctcttcagccgccagcactgccttggaacggcccagcttcttatcccagacaggacacggagtctcccggggtccgagccctgtggtcctgggctcccaggatgccctgcccatagccacagccttcacggagtatgtccacgcctacttccgtggccacagccccagctgcctggctcgagtaactggggagctgaccatgaccttccctgctggcatcgtgcgtgtgttcagcgggaccccaccaccacctgtcctcagcttccggcttgtacacacaaccgctattgagcacttccagcccaacgccgatctgctgttcagtgacccctcccagagtgaccctgagaccaaagacttctggctcaacatggcagctctgaccgaagccctgcagcgccaggcagagcagaaccccactgcctcctactacaacgtggtgctgctgcgataccagttctcccgcccgggtccccagtctgtgcctctgcagctcagtgcccactggcagtgtggagccaccctcacccaggtctcagtggagtacggctaccggcccggtgccacggctgtgcccacaccactcacgaacgtccagatcctgctgcctgtgggggagcctgtgaccaacgtccgcttgcagccggctgccacctggaacctggaggagaagcggctcacttggaggcttccagatgtgtccgaggcaggcggttctggccgcctctctgccagctgggagccgctctcagggcccagcacacccagccccgtggctgcacagttcaccagcgaggggaccactctgtcgggcgtggacttggaactggtgggcagcggttaccgcatgtcgctggtgaagaggaggtttgccacagggatgtacctggtgagctgctgaacccgcaaatgctgctgccccagctctacactgcgccctggtgctggctgaccaccccctgccctcctgccggaccctggggcctcccaccccagcctccctgaggcccatactccacggagaggagccccatgcccagcctggctgagcccgagattcgctcctccccctcatgccaaccccacacaggtcccggccttttaatgttctttgaataaacactttattttctaataaaataaaaaaggaaaccttt

SEQ ID NO: 335 - DNA, 4088 bp, Homo sapiens
gagattttggttacagtgtgggcctgaatcctccagaggaggaagctgtgacatccaagacctgctcggtgccccctagtgacaccgacacctacagagctggagcgactgcgtctaaggagccgcccctgtactatggggtgtgtccagtgtatgaggacgtcccagcgagaaatgaaaggatctatgtttatgaaaataaaaaggaagcattgcaagctgtcaagatgatcaaagggtcccgatttaaagctttttctaccagagaagacgctgagaaatttgctagaggaatttgtgattatttcccttctccaagcaaaacgtccttaccactgtctcctgtgaaaacagctccactctttagcaatgacaggttgaaagatggtttgtgcttgtcggaatcagaaacagtcaacaaagagcgagcgaacagttacaaaaatccccgcacgcaggacctcaccgccaagcttcggaaagctgtggagaagggagaggaggacaccttttctgaccttatctggagcaacccccggtatctgataggctcaggagacaaccccactatcgtgcaggaagggtgcaggtacaacgtgatgcatgttgctgccaaagagaaccaggcttccatctgccagctgactctggacgtcctggagaaccctgacttcatgaggctgatgtaccctgatgacgacgaggccatgctgcagaagcgtatccgttacgtggtggacctgtacctcaacacccccgacaagatgggctatgacacaccgttgcattttgcttgtaagtttggaaatgcagatgtagtcaacgtgctttcgtcacaccatttgattgtaaaaaactcaaggaataaatatgataaaacacctgaagatgtaatttgtgaaagaagcaaaaataaatctgtggaactgaaggagcggatcagagagtatttaaagggccactactacgtgcccctcctgagagcggaagagacttcttctccagtcatcggggagctgtggtccccagaccagacggctgaggcctctcacgtcagccgctatggaggcagccccagagacccggtactgaccctgagagccttcgcagggcccctgagtccagccaaggcagaagattttcgcaagctctggaaaactccacctcgagagaaagcaggcttccttcaccacgtcaagaagtcggacccggaaagaggctttgagagagtgggaagggagctagctcatgagctggggtatccctgggttgaatactgggaatttctgggctgttttgttgatctgtcttcccaggaaggcctgcaaagactagaagaatatctcacacagcaggaaataggcaaaaaggctcaacaagaaacaggagaacgggaagcctcctgccgagataaagccaccacgtctggcagcaattccatttccgtgagggcgtttctagatgaagatgacatgagcttggaagaaataaaaaatcggcaaaatgcagctcgaaataacagcccgcccacagtcggtgcttttggacatacgaggtgcagcgccttccccttggagcaggaggcagacctcatagaagccgccgagccgggaggtccacacagcagcagaaatgggctctgccatcctctgaatcacagcaggaccctggcgggcaagagaccaaaggccccccatggggaggaagcccatctgccacctgtctcggatttgactgttgagtttgataaactgaatttgcaaaatataggacgtagcgtttccaagacaccagatgaaagtacaaaaactaaagatcagatcctgacttcaagaatcaatgcagtagaaagagacttgttagagccttctcccgcagaccaactcgggaatggccacaggaggacagaaagtgaaatgtcagccaggatcgctaaaatgtccttgagtcccagcagccccaggcacgaggatcagctcgaggtcaccagggaaccggccaggcggctcttcctttttggagaggagccatcaaaactcgatcaggatgttttggccgctcttgaatgtgcagacgtcgacccccatcagttcccggccgtgcacagatggaagagtgctgtcctgtgctactcaccctcggacagacagagttggcccagtcccgcggtgaaaggaaggttcaagtctcagctgccagatctcagtggccctcacagctacagtccggggagaaacagcgtggctggaagcaaccccgcaaagccaggcctgggcagtcctgggcgctacagccccgtgcacgggagccagctccgcaggatggcgcgcctggctgagcttgccgccctgtaggcttggcgctgggctctcggtttgttcttcatttttaaagaaggaagggtcatatgtttattgctaaactgtcaaaaaggaatatattctgattaaattattactcctcactttgagggtgtgagaattttagaagatttaaatgttctatataacacttagatttctgatattttggaagaagttagaagttaatgaaagcaaactcagttaccaattttctggaaaatatccatgtggtaatgtagactttttaggtggcaatttctaggtctgaaatatagcagaggaaagggcgctgaggcagttgcaggcaggcagccctgtacttaccctgtactcacctcatccgacagacgctgtggatgaggaggggcttggcggaggcgtgagcaccgatgtccctttgataacctgcactcaccaagatgaactatttgccgccctgtcttttcctgggttggggggtggcatctgatggtggcagagtgcctgttggttcgcccgtgggtctcatggttcagacagagggaggtggacggcagggatcagggagccaggagcgcgcctcagacttgcagcaaccattgtgatttgggttgttcggaatatttaaattactgatcagaagatgaaagtagcttttctcttgggaagtcttgcagcccgtgggagtgataccaggagcaacacagagctcagcagcggcgccaaggtgttccctgtttcctcagcacgtgagccttcaccgcctgcttcattcaggagccagtgcagcagtaatacagtctatacattgttctgttttcaaatttatcctgaggctttgttgagcataaatgattatacgataaaggtatccgttattttggaactcatttcagttgggatctcctgtatgcagagtgttgcatttagaggtttgagtcccatcttggtttcttgccgtgctgactgtagccttcaccttgacttgaatgaaggtctgtggttggaatgtgtgaggagccgctgaggtgttcaggaggtgctgcctggaggtcggtttcttcctgggtgttacgggcaactgctcacacagttgtttctctgtgaacatttccagtgtttaatccaaaatgaaaacccaccaatgcttttgctaacttcagtgccttttataaatcatttttaaatttcctgaacttgctttttgaggatatacagggatattaagtagacgcaggattgtttttgtttgtaaaaattctgaattgaaactttgttttaaaaaaaggcttctttctttcatatgacaagagataggtcaggaatattggaatcaagatttaaatgttaaaattcgattttgttacacagggtgtgttcatttgttttgtagcagacaagatctagatcccagacagaaacaacacatgctattctaaaaagccgcattttaaaaggcaccttggttctcaaaagaaatcagaatatggatattcgtagtgatgatctgttttctctaaaatcttaccatattgtctgtatatggttgtaaattcaaatggaaagtaaaacgttttggccctgattttgtatgtggaccactgctcctgatttcccaggtcttaggccacctttgactgtttctccgtttgtttgtgggcagcgattccagtcccaacggaggcattctcgtgtgtcccggggggttatgtccttcacaaaacacttaatgaaatgaattacttc

SEQ ID NO: 336 - DNA, 3990 bp, Homo sapiens
cgccgcgtaagcggggccggctcagtgcggtgcggcaggcgcggctgtgcggcagcggaagtcctttgttgcagcacagtccctggcagagccagagcctctccgcgcagcccagcccgagcgccgagcgccgcgcgccgccgccactgcagctcgcggccccttcgccttcgcccgcctttcccgcggctgatttgccttaaactccctaaaatctccgcagctctggttcctgttgcggccggtctctaattaacagaagatggcaaagcccagccacagcagctatgtccttcagcagctaaacaaccaaagagaatggggttttctctgtgactgctgtattgcaattgatgacatttactttcaagcacacaaggcagttctagctgcctgtagctcctattttagaatgtttttcatgaaccatcagcatagtactgcacaactgaatctcagcaacatgaaaattagtgcagaatgttttgatctcattttgcagtttatgtatttaggaaaaattatgacagctccctccagttttgagcagtttaaagtggcaatgaactacctacagctatacaatgttcctgactgtttagaagacatccaggatgcagattgttctagttcaaaatgttcctcttctgcttccagcaaacagaacagcaaaatgatatttggggtaagaatgtatgaagatactgtggctcgaaatggcaatgaagccaacaggtggtgtgcagagccaagttcaacggtaaatacaccacataatagagaggctgatgaagagtctttacaattaggtaattttcctgagccactatttgatgtatgtaaaaaaagttccgtgtccaaattatctaatccaaaagaacgtgtgtcaagacgctttgggcggagttttacctgtgatagctgtggatttggctttagctgtgaaaaattattagatgagcatgtgctaacctgtactaacagacatttataccaaaacacaagatcttaccatagaatagtagatattagagatggaaaagacagtaacatcaaagctgaatttggtgaaaaagattcttccaaaacattttctgcacagacggacaaatacagaggagacacaagccaggctgctgatgattcagcttcaaccactggaagcagaaaaagtagcacagtggagtctgaaatagcaagcgaagagaaaagcagagctgctgagaggaaaaggattattattaagatggagccagaagatattcctacagatgaactgaaagactttaacattattaaagttactgataaagactgtaatgaatccactgacaatgatgaattagaagatgaacctgaagagccattttatagatactatgttgaagaagatgtcagcataaaaaaaagtggtaggaaaactctaaaacctcgaatgtcagtaagtgctgatgaaagaggtggtttagagaatatgaggccccctaacaacagcagtccagtacaagaggatgctgaaaatgcatcttgtgagctgtgtggacttacaataaccgaggaggacctgtcatctcattacttagccaaacacattgaaaatatctgtgcatgtggtaaatgtggacaaatacttgtaaagggtaggcagcttcaggaacatgctcaacgatgtggcgagccccaagatctgaccatgaatgggttaggaaatactgaggagaaaatggacttggaagagaatcctgatgagcagtccgaaataagagatatgtttgttgaaatgctggatgattttagggacaatcattaccagataaacagtatccaaaaaaagcagttatttaaacattctgcctgcccttttcgatgtcctaattgtggccagcgttttgaaactgaaaatctagtggttgaacatatgtctagctgcttagatcaagatatgtttaagagtgccatcatggaagaaaatgaaagagatcacagacgaaagcatttttgtaatctgtgtggaaaaggattttatcagcggtgtcacttaagagaacactatactgttcatactaaggaaaaacagtttgtttgtcaaacatgtggaaagcagtttttaagagagcgtcagttgcgactgcacaatgatatgcacaaaggcatggccagtggtgaaatagggccttctaaacctgtggagaagtgagagatctgaatttggagaggacatggggaagaatcaatcttcaacagataatctttaagtacagacccaggaatatcagatctgaagtggcaccatcttttctgtcttcctgacaaacttccatcaacccaaaaagttccagttgcaaagatccaagaaaactcagtaaagatcactttggaatcactttgttgtaacaaaattgattcatggtgactctaatatttgtgtaaatctgctgaagaaaagtaactagaaaattcatacaacatcagtggttacagctatactaaaataaaactttatatgctaattatcttcaagggtctttctaaaataaaaggggttgttaggctactgcaaatataaagagacataatcacaaatctatttatatagatataaataattctaaacttaaaatcactagaattatagcttaaatattatgaaatgtacttagtcaacttaaaaacttacaccaaaaatctgtagtttagagtgtaagaagtaatgggtacagagaaaaaaaatttaagaccaatattttaacaggataatttggttattactcactatagtaaaacacttgcccttcttccttttccactgtatatgccagtcacaatcttgatcatttatatgaatgaaactcccttttaaacctgttaacttgaaggagaacagaaatggtattacttcaatagtggtagatttccacaaatcagacacattattttcttctgaacttggcaatataacctaataaggcagaataagtttctgttaaaatacttattctcaatatttatgtataaaccatgcttctcagctttcaaatttcaagataaaatttaagtattcagtaaaatgatggttaacatgttttaaaaaatctttaatggagaagttaaatatttggtgagattttagtctggctataaatgctttgtttgatatatatatgtgcacatatatatattacttaaccatatgaattttatttccttattctgaatatacttgtagttttacttctttctgtttatgtacccaattccttatgattattttgtttcttctgcaatatcaagatgttatttattttgagaaatgcttatttttatgactatttattccaatgttttaacaagaagcacagagatttatagtattcttaatagtatgtgcagaagttacatcatttaaaaaacccttgctgtaaagtaggataacttgaatattcattctaataattagactaagtgaaaatctgagaaagagttaattgcaatgtgatagtgggtagaaaggagagaaaaacccactgaagggttcaaatacatgtgaattctactgctttaagagaaataaaacaaataagcctagggaaatattagagtctaaaaaaccctagagttactctcttttgggaacataaggaggtatacagaactgcagacctctaaacataagtaggaaaaagaaaaataaaagaatattaccaataattaaaggtgccagatcaaaatagtaataaatcaacaaataatttttgattgactggtggaattagatttactaaataaaaatggcttaaattttgactgtactaactataaatgtaatgaattataataattataaatggtataaatgcattctacaatgtgattattttctgtattttagtatatagtataaaatggaattattgggttaaagtacttttattacatttcttaatccattgtttttacctaataaaatttcctcctctatattccaaagtt

SEQ ID NO: 337 - DNA, 5341 bp, Homo sapiens
gcgagacgccctctctcttccagccgcagccgcgttgcgggttcttccctgtggaacagtagagacctagtctgccttctttcacaagataatccttcaattatttgaaggtgattattcagcatatatctcttgagtacctgtgcatgcaagacactgtcctggatattgtgagagatccaaagtttagtatgagatcattttcccttgcctgagttttgagctgattgagaaataagaacctacagatgaagaagcaagacagtacctttaaaaaaattagctttttattcagattctctttgtggccagatgggtttgtatggacaggcttgtccatctgtaacttcattaaggatgacatctgaactggagagcagcctaacgtctatggactggttaccacagctcaccatgagagcagccatccaaaaatctgatgctacacaaaatgcacatggaacaggaatttctaagaagaatgcactccttgacccaaatacaactctggaccaggaagaagtccaacagcacaaagatgggaaacctccatacagttatgccagcctcattacatttgcaattaatagctcacccaaaaagaaaatgactttaagtgaaatttatcagtggatttgtgataacttcccatattatagagaggctggcagtggttggaagaattccatacgacataatctgtcattgaacaaatgtttccttaaagtgcctcgatctaaggatgaccctggaaaggggtcctactgggcaatagacaccaatccgaaggaagatgcgctgcctactcggccaaagaagagggcacgatctgtagaacgggcctcaactccatatagcatagattcagattctttgggaatggagtgtattatttcgggaagtgcctctccaactctggcaatcaacactgtgactaacaaagtaacattgtataacactgatcaggatggtagtgatagcccacgcagtagccttaacaacagtctctcagaccagagtttggcatctgttaatttgaacagtgttggaagtgtgcatagttatacaccggtgacaagccatccagaatcagtctctcaatcattaactcctcagcagcaaccacagtacaaccttccagaaagagacaagcaactacttttctcagaatataattttgaagatcttagtgcctcatttcggagcctttataagtcagtttttgagcagtcacttagtcaacaaggtttgatgaacatcccttctgaatcttcccagcagtcccacacttcatgtacctatcagcactctcccagcagtacagtgagcactcacccacacagcaaccaaagcagcctgtccaacagtcatggcagtggcctcaacaccacaggcagtaattcggttgcacaggtctcactgtctcacccccagatgcacccacagccatctccacatcctccccatcgaccgcatggtttaccgcagcatccgcagcgttccccacacccagcaccacacccacagcaacacagccagctccagtcccctcacccccagcatccctctccacatcaacacatacagcaccatccgaaccatcagcatcagacgttaacacatcaggcacccccacccccacaacaggtatcctgtaattctggtgtttcaaatgattggtatgcgacacttgatatgctaaaagaaagctgtcgaattgccagcagtgttaattggtcagatgtagacctttcacagtttcaaggtctgatggagagtatgagacaggcagatctcaagaactggtctttagaccaggttcagtttgccgatctttgttcttctcttaatcagttctttacacaaactggccttatacattcacagagtaatgttcaacaaaatgtttgtcatggtgccatgcatccaacaaaaccttcccaacacattggaacaggaaatttgtacatagattctaggcaaaatctccctccttcagtgatgccaccccctggttatcctcatatcccacaggcactcagcactccaggaacaacgatggcaggccatcacagagccatgaaccagcagcacatgatgccttcccaagccttccagatgcggcgttccctgcctccagatgacatccaggatgactttgattgggattcaattgtgtagggcttgtttctgcaagacaccagaccctaacgttacctttctgtgcagtgaagggaaaggtttaagagaatccagttgagaaaacaaacttgctaatcactttaccaatgttatcaaaattacttttgaagacaatcagaaggattttagctggataacttactgcttttatctgacccaagcaagtactacatgtttgtctccctgccagctgccctatgtagctcctaactgttgtgtgatttggacggctttttgcatatttgtgtcagtttgatgttaaccacaagtgccagactgatttttcagacggagcctattttgctgcaagcagtttatataaagatacatatgtgtaaatatatgtacaaaaattactgaaaggcttcagttttttctaattggattattatgtcttgaaagttattgtcagtttttattccttgttaggctattttctgcaggatgcttttaactgatgtaggaaactgaaaggaaatagattttttccaaaacccagttccccttatttaatcttttttagaaatgtgggtaatgaattctatctaataagtcaaggaaaccagaatttgacacactccaacaatccaaaggggcatgttgctcctgagcagcatgaagaactgaccaaattggttttgatgcttgggggatcatagagtatttatgtctgcttttctaaatctgcattataatagctctaaaatttgttgattggtaagaaattgggcattgcttggctctttaaacacatcagtgcttccacattcacctatgtatttattattcaaaagtgtcattttaatatttattgctaccttctgtgaatgcttagctcctgtcgggttcattaaggagaaatgtgtctgaaagcacagaactattattatttttttctttttttgagatggagtcttgccctgttgcccaggctggagtgcagtggcacgatctcggctcactgcaacctccgcctcccgggttcaagcaattctcctgcctcagcctcccgagtagctgggagtgcaggtgcacaccgccatgcctggctgattttttgtattttagtagagatggggtttcaccatgttgcctgggctggttgcaaactcttgagctcaggcagtctgcctgcctcagcctcctagagtgctgggattacagacatgagccactgcgcctggcccagcgttacttttcttgataagaatttacagataagacactcagagagacattgtgtcattctctatcatcactccttttaccatgtgaatagatttctctgtcttggcattcttgctgattcagacttattagttaaatcggatttttctggaatttgaatcagatttcatttgggcaacaacagcagggcagggtttctaaagcaggtttccccactcatctaggttgtcttgaaaggaggatagagccacttacagttttatttgcttcagtgtttaatgtagatattatgtggcctgctgtttctgttgtcttgtatgtctgtgtatgcatgacatttggtccctttctttgaaatgcagcccctcttacgggttttttagtggtggtagtttgttttgtttcatatcatatcacagtttgcatggactgattatcttagttttatgataaaactagaagaaatgagggttttttttaatgaatagattttgaattgattctttagaccccccaaaaagtgtcagttctaatggggaaatatattccatcaagtcaaagagtaataactgctcactagttgctttttagcatctctggtcttatcagccatgctaaatcactttaattagccttagtgattctgtggttgagtaatctctacttgaactaaacaaacatcttttgtttctgtgtgtgtgtgctgtgtgtgagagtgtgcgcgcgcgtgtgtgtgtgtgtgttttaatggagtgttgccttgaatgaatcactgggaagccagccatggtaagggctggtgaggttggggagaaaggaagagctttatgtttctctgttgtttggaccctacttggcatgaaaaaggaagctcagttccagccccttggatcaacgaaaatcagaggattctggaaaggcagccaacttgcgcctcttagaaggatcagaggcaagatgagatggcagcctgcagagtaaatgcttgaaaaaagaggggtgattttcaatggtttgcttaagtcactgttttctagacaccaaaatagctgttttgaaactgttttaattgcttgggtagcaatgtgcactttaaacaatttggatattggaatgcagtctcatactgagtgatttgagtagaaccactgatgatgattttataaattgtgtgaagcgaatttcccatttggcaatcatttactgatttgcagtgatgaatatttttatgagaatttaaacttagcaagaatggccatggaggcaaagccttcacccagacccatcccactctcctgtgatccaggtggtccaggagcccaggacaggccttttctgtgggccctggccagacagggttacctggtgaggtgcagagagtccctctagtggccattttgtatggtagttgctaatgcagaacaagttctgtcttgggcttaaattgactgaagactttagggggaaagaatagtaaatgcatgtaaacaaatggggacactctgttcaggagaataatccgactggcatttgtggcagtttttgaaatgtaaatgtattcatgtgtgttcttgtaaatacgtgtcgctcagatgtcctttgaagtgggagggaatcaatccggggataatttcaaatggaatagagtattttgatattgttcattcagagggtgatgtgtacatatctatattgtatatatgtgatgaaaatgcattggctttttgtgcagatacaacctgctctctgtactgctgttggacagtcagtgttttaatgtttctacagttttgctattgcacgatttcatattttgcctctatgatgaacggcaaccattatttgtaactgtttagtgctgtaaagaaatattccaagtgtcattaggattgttgctgccagaactgatatgcatgaatggcacttaaaataaatatattatgttaactct

SEQ ID NO: 338 - DNA, 2336 bp, Homo sapiens
ggcacgaggaagaatcaggagcttaggatgtattaacaccaactcattaatatactaaccggacaatgttctacaaacaattctacattgtaaaggactggattggcacaaaataaaataattttattttattcagcttataatatgactcgatggaggaaaatttgataagcatgagagaagaccattcttttcatgttcgttacagaatggaagcttcttgcctagagctggccttggaaggggaacgtctatgtaaatcaggagactgccgcgctggcgtgtcattctttgaagctgcagttcaagttggaactgaagacctaaaaacacttagcgctatttacagccagttgggcaatgcttatttctatttgcatgattatgccaaagcattagaatatcaccatcatgatttaacccttgcaaggactattggagaccagctgggggaagcgaaagctagtggtaatctgggaaacaccttaaaagttcttgggaattttgacgaagccatagtttgttgtcagcgacacctagatatttccagagagcttaatgacaaggtgggagaagcaagagcactttacaatcttgggaatgtgtatcatgccaaagggaaaagttttggttgccctggtccccaggatgtaggagaatttccagaagaagtgagagatgctctgcaggcagccgtggatttttatgaggaaaacctatcattagtgactgctttgggtgaccgagcggcacaaggacgtgcctttggaaatcttggaaacacacattacctccttggcaacttcagggatgcagttatagctcatgagcagcgtctccttattgcaaaagaatttggagataaagcagctgaaagaagagcatatagcaaccttggaaatgcatatatatttcttggtgaatttgaaactgcctcggaatactacaagaagacactactgttggcccgacagcttaaagaccgagctgtagaagcacagtcttgttacagtcttggaaatacatatactttacttcaagactatgaaaaggccattgattatcatctgaagcacttagcaattgctcaagagctgaatgatagaattggtgaaggaagagcatgttggagcttaggaaatgcatacacagcactaggaaatcatgatcaagcaatgcattttgctgaaaagcacttggaaatttcaagagaggttggggataaaagtggtgaactaacagcacgacttaatctctcagaccttcaaatggttcttggtctgagctacagcacaaataactccataatgtctgaaaatactgaaattgatagcagtttgaatggtgtactccccaagttgggacgccggcatagtatggaaaatatggaacttatgaagttaacaccagaaaaggtacagaactggaacagtgaaattcttgctaagcaaaaacctcttattgccaaaccttctgcaaagctactctttgtcaacagactgaaggggaaaaaatacaaaacgaattcctccactaaagttctccaagatgccagtaattctattgaccaccgaattccaaattctcagaggaaaatcagtgcagatactattggagatgaagggttctttgacttattaagccgatttcaaagcaataggatggatgatcagagatgttgcttacaagaaaagaactgccatacagcttcaacaacaacttcttccactccccctaaaatgatgctaaaaacatcatctgttcctgtggtatcccccaacacggatgagtttttagatcttcttgccagctcacagagtcgccgtctggatgaccagagggctagtttcagtaatttgccagggcttcgtctaacacaaaacagccagtcggtacttagccacctgatgactaatgacaacaaagaggctgatgaagatttctttgacatccttgtaaaatgtcaaggatccagattagatgatcaaagatgtgctccaccacctgctaccacaaagggtccgacagtaccagatgaagactttttcagccttattttacggtcccagggaaagagaatggatgaacagagagttcttttacaaagagatcaaaacagagacactgactttgggctaaaggactttttgcaaaataatgctttgttggagtttaaaaattcagggaaaaaatcggcagaccattagttactatggatttattttttttcctttcaaacacggtaaggaaacaatctattacttttttccttaaaaggagaatttatagcactgtaatacagcttaaaatatttttagaatgatgtaaatagttaa

SEQ ID NO: 339 - DNA, 809 bp, Homo sapiens
tttttttttttttttttttttttttttggctctagagggggtagagggggtgctatagggagttgcttggaggttggcggccggggctgaaggtagcaaaccgagcgatcatgtcgcacaaacaaatttactattcggacaaatacgacgacgaggagtttgagtatcgacatgtcatgctgcccaaggacatagccaagctggtccctaaaacccatctgatgtctgaatctgaatggaggaatcttggcgttcagcagagtcagggatgggtccattatatgatccatgaaccagaacctcacatcttgctgttccggcgcccactacccaagaaaccaaagaaatgaagctggcaagctacttttcagcctcaagctttacacagctgtccttacttcctaacatctttctgataacattattatgttgccttctagtttctcactttgatatttaaaagatgttcaatacactgtatgaatgtgctggtaactgctttgcttcttgagtagagccacccacaccatagcccagccagaatgagtgctctgtggacccacagcctaagctgagtgtgaccccaaagccccgatgtgccccggaatccagaccaccttggcagatggagggaagcctccgaatttgaggaacatggctgtaacagggatcaggaaaactggcgttttggggtttatccccccggggttgaagtgagggggactgcggatttaaggttcaggtaacggaaaactttcacattattcaagaaacctggtcaggttaaaagccctgataaagagggagtt

SEQ ID NO: 340 - DNA, 5589 bp, Homo sapiens
ggggtcgcgggggacgcgggggacgcgggggacgcgggggacggcggggaacggcggggaacagcgggggacggcggggaacagcgggggacggcggggaacagcaggggactgcgggtcgcgtcctggccgccgaggagctccttcccttaacagagctgagagaggcatctggagctgcagcatggaccagcgagagcccctgcctcccgctcctgcagaaaatgaaatgaaatatgataccaataataatgaagaggaagagggagaacagttcgattttgacagtggagatgaaatcccagaagcggacagacaggccccatccgcccctgagacaggaggtgctggagccagtgaagcccctgcacccacaggaggtgaggatggagctggagcagaaaccaccccagtggcagagcctactaagctggtgctcccgatgaaagtcaacccatattctgtcatcgacatcacgccattccaggaggaccagccgcccacccccgtgcccagcgctgaggaggagaatgtgggtctccatgtgccctgcgggtacttggtgcctgtaccctgcggctatgcggtgccctccaacctgcccctcctgctgcccgcctactccagcccggtcatcatctgcgccacgtccctggacgaagaagaaacaccagaagtcacagaagatcgccagcccaattctctgagttccgaggagcctccaaccagtgaagatcaagtcggtcgagaggacagcgcacttgcccgctgggccgcagacccggccaacacagcctggatggagaatccagaggaagcaatttacgatgacgttccaagggaaaactcagactctgaaccagatgaaatgatttatgatgatgttgagaatggggatgaaggtggaaacagctccttggaatacggatggagttcgagtgaatttgaaagttacgaagagcagagtgactcggagtgcaagaatgggattcccaggtccttcctgcgcagcaaccacaaaaagcaactttctcatgacctaacccgtttaaaggagcactatgagaaaaagatgagagatttgatggcaagcacggtgggcgtggtggagattcagcagctcaggcagaagcatgaactgaagatgcagaagctcgtgaaggccgcgaaggacggcaccaaggacgggctggagaggaccagggcagccgtgaagaggggccgctccttcatcaggaccaagtctctcatcgcacaggatcacagatcttctcttgaggaagaacagaatttgttcattgatgttgactgcaagcacccggaagccatcttgaccccgatgcccgagggtttatctcagcagcaggttgtaagaagatatatactgggttcagttgtcgacagtgaaaagaactacgtagatgctcttaagaggattttggagcaatatgagaagccgctgtctgagatggagccaaaggttctgagtgagaggaagctgaagacggtgttctaccgagtcaaagagatcctgcagtgccactcgctatttcagatcgcgctggccagccgcgtttccgagtgggactccgtggaaatgataggcgatgtcttcgtggcttcgttttctaagtccatggtgctggatgcatacagtgaatatgtgaacaatttcagcacagccgtggcagtcctcaagaaaacatgtgccacaaagcccgcttttcttgaatttttaaagcaggaacaggaggccagccccgatcgaaccacgctctacagcctgatgatgaagcccatccagaggttcccacagttcatcctcctgctccaggacatgctgaagaacacctccaaaggccaccccgacaggctgcctcttcagatggccctgacagagctcgaaacactagcagagaagttaaatgaaagaaagagagatgctgatcaacgctgtgaagtgaagcaaatagccaaagccataaacgaaagatacctgaacaagcttctcagcagtggaagccgatacctcattcgatcagatgatatgatagaaacagtttacaacgacagaggagagattgttaaaaccaaagaacgccgagtcttcatgttaaatgatgtgttaatgtgtgccaccgtcagctcacgcccctctcatgacagccgtgtgatgagcagccagaggtacttgctgaagtggagcgttccactgggacatgtggacgccatcgagtatggcagcagcgcaggcacgggcgagcacagcaggcaccttgccgttcacccgccggagagcctggccgtggttgctaacgcgaaaccaaacaaagtttacatggggccaggacaactgtatcaagatttacaaaacttgttgcatgacttaaatgtaattggccaaatcactcagctgataggaaaccttaaaggaaactatcagaacttaaaccagtcagtagcccatgactggacatcaggtttacaaaggcttattttgaagaaagaagatgaaatcagagctgcggactgctgcagaattcagttacagcttcccgggaagcaggacaaatctgggcgaccgacgttctttacagctgtgttcaatacgttcacccctgccatcaaggagtcctgggtcaacagcttacagatggccaagctcgccctagaagaggagaaccacatgggctggttctgtgtggaagacgatgggaatcacattaaaaaggagaagcatcctctcctcgtcggacacatgcccgtgatggtggccaagcagcaggagttcaagattgaatgtgctgcttataaccctgaaccttacctaaataatgaaagccagccagattcattttccacggcacatggtttcctgtggatcggaagttgcacccatcaaatgggtcagattgccatcgtctcgtttcaaaattccactcccaaagtcattgagtgcttcaacgtggaatctcgcatcctgtgcatgctgtacgttcccgtcgaggagaagcgcagagagcctggggcacccccggaccccgagaccccggccgtgagagcttctgatgtccccacgatctgtgtagggacggaggagggaagcatttccatttataaaagcagtcaaggctccaagaaagtgagacttcagcactttttcactcctgagaagtccacagtcatgagcctggcttgcacgtctcagagcctgtacgctggcctggtcaacggggcagtcgccagctacgccagagccccagatggatcctgggattcagaacctcaaaaagtgatcaagttaggcgtcctaccagttagaagtctactcatgatggaagacacgttgtgggcggcttccggaggtcaagtcttcatcatcagtgtggagactcatgctgtagagggtcagctggaggcccaccaggaggaaggcatggtgatctcccacatggccgtgtccggcgtcgggatctggattgccttcacctcagggtccacgctccgcctttttcacacggaaactctcaagcacctgcaggacatcaacatcgccacccctgttcacaacatgctgccagggcaccagcggctgtcggtgacgagcctgctcgtctgccacggattgctgatggtcggcaccagcctgggagtcctcgtggccctgccggtcccacgtctgcaagggattcccaaagtgaccggaagaggcatggtctcctaccatgcacacaacagtcctgtcaaattcatcgtcctggccacggctctgcacgagaaagacaaggacaaatccagggacagcctggctcctggccccgagcctcaggacgaagaccagaaggacgcacttccgagtggaggagctggttcatctctgagccagggtgaccctgacgcagccatctggttgggagattcgctgggatcgatgactcagaaaagcgacctgtcctcctcatctgggtccctgagcttgtctcacggctccagctctctagagcacagatcagaggacagcaccatctatgatctcctgaaggatcctgtctcgctgagaagcaaagcacgccgggccaagaaagccaaggccagctcggcgctggtggtctgtggagggcagggccaccgccgggtgcacaggaaggcccggcagccccaccaggaagagctggcgccgaccgtcatggtctggcagatccctctgctgaatatataagcaggacggccgccttctgctgtcagaatttgcaatcaagggtgacttctcagctaatcctacagcctgagtggttaagctgtgtctacactggttgggaataaattaaaaacagtatttgggggagaaacgtgcaatagcgtaatggtggtgtccctgccaattccttccttctcttctgtacagcagaagtaattacaagcacttctcacgaaggcagaagactgatgcaattttcgagtaattgagtgcagttctgggaaaataccacattctttttgactgctgtagtccatatatgaatactaaatgttaaacttcatcagcgtcagacctattgtatcatattagagaatttgcagactaagaatttatgagaaaatatatgtattcagtagtgcaggcatttattaacaattcttaaaagttttacctgattcagattcacgacttttatttatattctatatttttgaatttcagagtaaaatttgttaacaattttaaaagccaggtaacacctaccagtccagttagcatgatttgctttcagaagtgagctgggttttccaaagtggtataatgtgtgtactgtatattttaacaaagtaatatttttgtattgcatttttctattaaaaaattaacagttaatgtttcagtcaatgtattatctgtagcatttcacaaataatgtttgctttgaaccaaaatgctcagtgcctatcaacatttggactcaagcatcaacaccaaattattcctcccttctcgtataaatagagtgactatccacaggagaaaagtgtgtgctttagtattagaggagataggcagagaagtcttgcttagttccttcgtgcagcttcttgcccctgttgacgtggaatgctgtgtctgctttagcacgcacgctccgaatgactcctggtgctaggccatgctggctgctgtcactgagcgggactcaggccaagaggcgtgacctcgggccagcctgtctgttgtgcagacgcctcctctgcagaacgcatcagtttctattctgcagttgcagagccagccccgcgtgagaacgtgcataatgagtgcacaccatcatgtcaaggtgcatacttagtgagcgccatcctgctgaacgtgtatttcagtgtttcacttactggacggataacaagaaaaaaatcctaacacaggcagtcaccagaaataaatgtctcagcactttacagatgactaaaaatgttaattttatgacttagccaaatatgttctaggttgcatatatcccccatgtgaaagtgatttcttcccaagcttctcaaactgttagctgctgtctgacttcatcaataaagtatttttatttt

SEQ ID NO: 341 - DNA, 2309 bp, Homo sapiens
ccccgggcgcaggaggcgggcggcccggccccaccggccccccatggacgcccccagcacggggcgctgagacccccgcgtcgctgcccagcccggtccggcgcgccacgccagggatctctggacaggacaagactccgaagctactcccccagcacacagcccgggacccacaaacccagcttgcccccagccctcccacctgccactccctggcccctcccaccgcccgccccccttggggcgcagggcatggtgtgaaaggccaagtgctgaggcgggtatcatgggtgctgtgccctagggcctgggtggcagggggtgggtggcctgtgggtgtgccgggggggccagtgtgcccaccccagtctcttggcgtgctggagggcatcctggatggaattgaagtgaatggaacagaagccaagcaaggtggagtgtgggtcagacccagaggagaacagtgccaggtcaccagatggaaagcgaaaaagaaagaacggccaatgttccctgaaaaccagcatgtcagggtatatccctagttacctggacaaagacgagcagtgtgtcgtgtgtggggacaaggcaactggttatcactaccgctgtatcacttgtgagggctgcaagggcttctttcgccgcacaatccagaagaacctccatcccacctattcctgcaaatatgacagctgctgtgtcattgacaagatcacccgcaatcagtgccagctgtgccgcttcaagaagtgcatcgccgtgggcatggccatggacttggttctagatgactcgaagcgggtggccaagcgtaagctgattgagcagaaccgggagcggcggcggaaggaggagatgatccgatcactgcagcagcgaccagagcccactcctgaagagtgggatctgatccacattgccacagaggcccatcgcagcaccaatgcccagggcagccattggaaacagaggcggaaattcctgcccgatgacattggccagtcacccattgtctccatgccggacggagacaaggtggacctggaagccttcagcgagtttaccaagatcatcaccccggccatcacccgtgtggtggactttgccaaaaaactgcccatgttctccgagctgccttgcgaagaccagatcatcctcctgaaggggtgctgcatggagatcatgtccctgcgggcggctgtccgctacgaccctgagagcgacaccctgacgctgagtggggagatggctgtcaagcgggagcagctcaagaatggcggcctgggcgtagtctccgacgccatctttgaactgggcaagtcactctctgcctttaacctggatgacacggaagtggctctgctgcaggctgtgctgctaatgtcaacagaccgctcgggcctgctgtgtgtggacaagatcgagaagagtcaggaggcgtacctgctggcgttcgagcactacgtcaaccaccgcaaacacaacattccgcacttctggcccaagctgctgatgaaggagagagaagtgcagagttcgattctgtacaagggggcagcggcagaaggccggccgggcgggtcactgggcgtccacccggaaggacagcagcttctcggaatgcatgttgttcagggtccgcaggtccggcagcttgagcagcagcttggtgaagcgggaagtctccaagggccggttcttcagcaccagagcccgaagagcccgcagcagcgtctcctggagctgctccaccgaagcggaattctccatgcccgagcggtctgtggggaagacgacagcagtgaggcggactccccgagctcctctgaggaggaaccggaggtctgcgaggacctggcaggcaatgcagcctctccctgaagccccccagaaggccgatggggaaggagaaggagtgccataccttctcccaggcctctgccccaagagcaggaggtgcctgaaagctgggagcgtgggctcagcagggctggtcacctcccatcccgtaagaccaccttcccttcctcagcaggccaaacatggccagactcccttgctttttgctgtgtagttccctctgcctgggatgcccttccccctttctctgcctggcaacatcttacttgtcctttgaggccccaactcaagtgtcacctccttccccagctcccccaggcagaaatagttgtctgtgcttccttggttcatgcttctactgtgacacttatctcactgttttataattagtcgggcatgagtctgtttcccaagctagactgtgtctgaatcatgtctgtatcccg

SEQ ID NO: 342 - DNA, 1069 bp, Homo sapiens; identical to SEQ ID NO: 226

SEQ ID NO: 343 - DNA, 2611 bp, Homo sapiens
cgcctctcccaaagtctagccgggcaggggaacgcggtgcattcctgaccggcacctggcgaggctcatgcgtcccgtgagggcggttcctcgagcctgggggcgctcagattgctttggagacgctgagagaacctttgcgagagcgccggttgacgtgcggagtgcggggctccgggggactgagcagcacgagaccccatcctcccctccgggttttcacactgggcgaagggaggactcctgagctctgcctcttccagtaacattgaggattactgtgttttgtgagagctcgctaggcgccctaagcaacagagttctgagaaatcgagaaacatgataaggaattggctgactatttttatcctttttcccctgaagctcgtagagaaatgtgagtcaagcgtcagcctcactgttcctcctgtcgtaaagctggagaacggcagctcgaccaacgtcagcctcaccctgcggccaccattaaatgcaaccctggtgatcacttttgaaatcacatttcgttccaaaaatattactatccttgagctccccgatgaagttgtggtgcctcctggagtgacaaactcctcttttcaagtgacatctcaaaatgttggacaacttactgtttatctacatggaaatcactccaatcagaccggcccgaggatacgctttcttgtgatccgcagcagcgccattagcatcataaaccaggtgattggctggatctactttgtggcctggtccatctccttctaccctcaggtgatcatgaattggaggcggaaaagtgtcattggtctgagcttcgacttcgtggctctgaacctgacaggcttcgtggcctacagtgtattcaacatcggcctcctctgggtgccctacatcaaggagcagtttctcctcaaataccccaacggagtgaaccccgtgaacagcaacgacgtcttcttcagcctgcacgcggttgtcctcacgctgatcatcatcgtgcagtgctgcctgtatgagcgcggtggccagcgcgtgtcctggcctgccatcggcttcctggtgctcgcgtggctcttcgcatttgtcaccatgatcgtggctgcagtgggagtgatcacgtggctgcagtttctcttctgcttctcctacatcaagctcgcagtcacgctggtcaagtattttccacaggcctacatgaacttttactacaaaagcactgagggctggagcattggcaacgtgctcctggacttcaccgggggcagcttcagcctcctgcagatgttcctccagtcctacaacaacgaccagtggacgctgatcttcggagacccaaccaagtttggactcggggtcttctccatcgtcttcgacgtcgtcttcttcatccagcacttctgtttgtacagaaagagaccggggtatgaccagctgaactagcacccagggacccagtgtacccagcctctggcctcgtgccctgctggggaaggcctcacccagcgaaggccggagaagcggttgggccctggcacacagggctggctcagtgtgcggacagaggagaccactctgctcctggggccagaggccattcaatagcctgccttcgtccgggcccctcctgggcctccccggccaggcacgtggcaccgtcgccttgacaccgccatctcttttctttaaggcttcaggcagcgcgcacaggctctggcagccgtctcaggcaggactgggcaccaagcttgcagccgaaggccttgccccaaactaccagcgtttctgcaagcagcttgaagggctgaccttgcagccgggtgagccaagggcactttgctgccaccgctgcattcccagagatcaagcagcccggtgccgtggccagtgaactcagaggtgctggtggacgggctaggactttggggttaggccatggggctctttctctgaaggccactttcctgacgtactctctgtacataactcagcgtccgtgactgcagtaacagccagccctacccagagtatttctgagccatgaggggcccaccagattggttctgaattggattcatgcccagcgcattagcatagtaactcctttcagattttttggagggacgtttggaagtggcttactctcttctgccctctctcctacctccaccttctcagatgagccccatctgagcacatccagctgctccttacccagcatctggagtacaggacatagctctctcctgctaccagtctgtgccttagaggtcgttaggcctgccaaacggcgaccagctcccctggagcgagggcaggccccttccctctctttccccagacacctacttgagactcaccaatttctggcctgttcaggagcctcagataagtatttgtacttgagaccacctcacacaatctgtatgggcccaaccctgatctcaaacctccttccctctgcccaaagctgtccttcctatggcaggaggggtgggggtcccaggacgtgcctcatacatgacttgagcttgtcagtccactgagtttccttctacgagatcaacgcgaggggcctgtatcttgaattaaagcctactcgcttcctttc

SEQ ID NO: 344 - DNA, 134292 bp, Homo sapiens
gatcatctggctcaaatatcagttcttccaaaatcctcatagtgccatcctcgagggccctgggagccctgcagcttctctctggggtgacaatagcatgtgtagcctcaacagggacactataagaataaaagagtgtgctattactatttatgccatgatcacaggaatacccaggactgtccctgacacactggacatagggtcaccctacttctccctaagttcaggtgacacaaggagtaggagtgaggtgggcagacagcaagtgagaaatggggtggacagggcacacagtggggtggccaggctggtgcatttgtggccctgtctatggggccagcaggaccagtggggtcagtagagcatatactgagcttgaagaggtggcatggagcacttagaagctctatctgctgcttgtcatctcttggcatgtggaaggccttctgcagagttacgctccagacatagcctcggagtcctgaatatcccccaggctcctggaatcaaggagtgtcttagacggcttgagctgctttaacaaaaataccataagctgggtggcttataaacagcaagcatctattactcacagttctggaggctggaagtccaagatcgtgacaccgacagatttggtgtctggtgaaggctgttgcttgttcatagatagagcgttctcgctgtgtcctcatgtggtggaagggcagaggaatctctctgggttccttttataaaggaagtaatcccattgatgagggcttcacccttacgacctactcacctcccaaagaccccacctccagataccatcgcattggaggttaggtatttagcacatgaaatctgggggcaacagacattcaggccacagcaagaagcttcaggagaaagctttcagtcttgtgaaatgtgaatgaggctttcccacagcctagacctgtcttcacgccccagccgcagcctcttgcattcacggtggcttttgagcatcctctgaccactgagtcacaaacctccctgttccctctctatctggctattttcttggtaggaccagaaaaacttttttttatagtcttgccaccatgccatgtagttttcgtacattgcagctatttcaaattactgcattaccacagaacactttttctgtaataacccagaatcaacagtttttttctagctgttaacctggcctcaaaatcttccctttatttgggccccctttttcttctgtccttaactctgactctggtagagcccatggaactgacagttcaaagcccgcgtggcttttctctccccaccacaacatcttcatctaaatagagtcttgtaacatttacctgccctctctcccttgaaaatcactgttccctggtccctgttggggagcctgggccttaagcccctttgtctttgccctagaagaacttcctctccagctgagtcaggttctcatgagattctaggggtggcttggcctcctatatccacttccctcaacattggcctgtagccacatatggcctggactttggcccagcttccagcatgcccaataatgtcagccctgtggggaagttcctggaggtgtacaaggacgtgacaattcagtggtagggacatcggggtgcttgttcatgtggaaactgactttaccattttcctcttttctgagtagtttatcatttctggattgctgtctgtcattttgggaagaaaatcaaacaagcatctggtgagtataggaacaacagtgcctcacttactaaaaagagactttagcggaacctcatccagttggatctttccaaggttcagacaaaggaactgaaccccaggttgctgacaagtgtcctttggtcagtggccctgtggaagtacacagggcccactgatctgggggacacctttcatgatcctcattttgaagagagtcctgtaccctctccaggctctgggtggctttatgggaaaattctgcctcatcatgacaccctttggtgttcactgaccaccggggttcaggtccttggtgagcacaggggaaagaggacagtgagagcatgggctgttagttgtgcaccacagcctgggtgagaaaagcatcaatcaaaagagatgagccttgctggtgggggccaggaagggtgcagagtgaaaagggggtgttcagtgatgggtgcacatctgattgacaaacttttgcagaatcatttccaggcctttcttaggaggctaagaggcatgggttgggggacagagatgggtatggtggagattctggtgacctgggatttgggggtctccctgtcctgacacagaagctgccaagaaactggcagccaagcctcaaggtggcagtgccaggtttggacactgtcattctctcagacctccctcaaaggatcagatgcccttcttcatccccaccctcagcctcccctgagccctccaggaaagcagcctgtgtggatcccctaaacaagggcaggagcaccagccctacagagcaagcagcagctgggtgaggcagacggcggcacaaggtggggaccacggtgttccagggccacttaggctcctaggaaattcacccgccaccatcctcagggacctcttctttgaaaaaaagggactttctcagaacattctgacaacacgagttgtgaatccctggggctgtatggagaaatggcccacgacctttttccatctcttcccccatcactgcccagctctgagattgagcccctgggaagagggcccggatctttgccagaggctgctgggcatacctgagcacacgtgccatgggctgcttgtgacgggctggaacacctagcccaggtgtcccagaagccaccacagacatcagcctattcctcccctggtgttggtctttgaaaagtgagtctggacaccgcaaaactggaatccaggtttcctactttcgaggggaggtagcaccccatggcgcagctgtgattctcagccctcctctgggccgtgccccagccgggatctgaacatccaccctcggccccaggtgctgttgcccccacactgagccctcgtaccccatgctccctggccctcctgccagggcacccttttcacaaagtggagtggatgaaaagaacaggaaagagcaccaaccctgctgctgtccccatatgacagaggctgctgtgggggcatctgttgtacttgggtgagcaggccccttggcctcgagctctaccatgcaggggtgctgcagacagagccaggtgataggaaagagcatgtctgggaacccacctgatgacagcctcagctcaggatgaggcaggaggcctctggctaggcttaggggagatggctggaggaacctcctcagggtgccagtggactgggtaaagccagcagggggcttggaggtcagggaagctgtgatttatcaagcactgtgggcattgcaatattttctctgttcggttcagtccaatgggacatcagttctatacatatcttcctcttcctctagccctgctcagtcctgggtggagaagctaccagaaccacatctcctgtctgtcccaccataagtctctgcttcattcacgctttcatgtgtcgtgcatcaagcaagcatttgcctgtaggcttggggagctctgagaggggttgagagtgaacaaaattaatcaaatcgtataacagaagaggaagtcccatcctgccgaggatcctggatgtgagaacctgctgctggcctggtgggatcgtggtgccccaggagcatgaactgctcaggagcagaccctgaccagatcccctgcaggcctggaacagcctgatcagcagcctcctaagccccatggctgccacagtgggcctcattgtccttccctatcacctagccggggtgttcccagctgccagacagtgccaactggtggtgcctgcccatcagtgccccaagacagccactacttttcgaagaatgagaccaccagctgctttgtggccagctccagcttactggtgagtatttttaggtagaatcttccagactagtgaagtctttgagattttctgcttcttgttcactgcttccttctgatgtggaccatgcggaaagaggcagaacacaggaacccacacatgggagaatagcaggcatttgactggactgtgccaaaagagttgttcaagtacaatatcaagcaagactgtagttgcaaaaagacataaccaacaacttggtttcaatttgagcaccttaataaacaaactgatttaactgtcatagtctcaagggatgggtttttccaagcaagaactctagggtcagggtagcgaattgctcaagaaaggccaagagctcagggagacataggaacctcataaacagggtggccacaggctggcagtgcccaggttcagccaggcaagagccacaggtcaagggaggctgcaagaggctaaatcctaattccatcacatgcacaaaaatggatgggatggccaaaaatgaccccaaaaaatcaggaaacaaatacggaatgggctttttaattgttgtttgcaatcagaactttatgaaaatgacagaatgtggtttcgcattctctgttgcattagagccagtctgagcatcagtatttgctctaaaatgtgtttagtcaataaagtcaagagaacatgtgtgtggaacactgagaaaagaaggcagaggaagtttgcattcctgcagccatagagggggatattctaggggtggagaggcagcaggcagggggaatgtgtgcacagcctggccgttgtcccatcccctcatcgctggcttcaggccatcctcccatagatggagcagctataatgggagtggagggttgaggggcaggggaggcatctgctgagcggctggatggggtttgtgtagtgggttaggatgagctcctcagaaaccagcctgagctctctggctcaggagcttctcaggaagagctgagaagcggcaacccctgcctgaggggtccttgtgttcatttcccatggccacaataacagaggaccacaaactggtgactgaaaacaacagaagtgaattccttcacagttctgaaagcaaagtccaagatcgaggagtcggcagggccgctctttctctgaaggctctaggaaaaaactctttcttgtctcttccagctttggggaactccaggcattctttggcttctggacacgtctttctaacctctgtctccatcctcatgagggcttcccctctgtttgtctctgtgtcctgttctcttcttataagaacaccagttattgcatttagggtccaccctaaatccaggatgatttcaccttgagatccttaactaattgcacctacacagaccatatttccagataaggtcatattctcaggttctatgtagacatgaatttgaggggggacactaacccactatagtcacagtctgtacaaataaattctagattctgcccacctgtggccttacctgttctacttggaagtcattgttccatggaaggtgacccagggaagcagaattgttctcctcctcaggcagatagctcctggggactggcgtgagaattagcaactgtgccagcacatcactttgattggtcaaggtgccccttgctgcctcccagccaagccaagcaggcccaccccagggagcataggtgggtagcaggtgctggcgctcagtttacaaaggaaggccttctgcctcaccacctctgtggacctgcaaaccgccctaaggggtgagtgggaagtccccatcttacagaagatgaaattgaaacccagacaggcggagactctccctggaggccagatgaatgaagagtcaggaggctcagctcaaccttgggtgtcacctgccacctgtactgctgtccctggagtggcccaggatactaggatatgacactgtctcccagatcatgagcaggttgagtcaggtatgagggaagaggagccagcagatgacactgtctaaacccatctggtcatctcaggaaggcagaagggttggccagtccagcacagacctcgtgcatcctgcatttcagaggatcctgtctgtgatgctcctcttcacggcattggagctcagtgtcgctatcctttcttctgtcctcttgtgaaaaaagacctgttcagatgtcctcagggtgaacctgctgtgccctgggctctggggcctgggtggtggcacagggcatggtcctggggccaatggcaggtggtactaaggtcgacccatgaatcttgaccttagtcgaagtcgacaggttttgttgagtgaggcagcagccggcagaacaggatgagagcaagtgcccagggtggaggaatcacaataggaagctatgggaccaaagagagcacatcacacatctgctcatttagcaaagcaggaaacaggctaaggtgcagaagccctctggtccctggaaccctcaagtttttatatttgtgtatcccttgtcttttgtttcaagatattttttaatttctctggtttgattttttggagataaaaggccttccactcagcgtacaaggcctgttcacttgctttgtcctctccagaatgtgtttcctgacccaaagtgacacagtgatcaccagcatgccccaggcagcatttgctgacaccgtcctggagatgaacaaggagtgcacccttagtgtgggggcagagagagagagagcacattgtctgcaggagtcagctgaatgatctcacagaccccacctgctgggctcttccattttatcacaattattccgcctgttcacgtgcagagagaacacttggggcagattttaagaccttagagagtaacttgtttacaaataaaatatctctttgatgatgtatttggattccatgtcattttgccacatttctcttaatttactggacaccaacaatgatataaaagttaagattttaggaaatgtagaaaatttctaaataaaaatcaaaaaagaaaataaaacaacaaaatgaagagctgcctgggagagatgaacccatggtccccgtcttcacgctaagatgcaaaagagcagagcttccagcttccaactggagctcccacacaaaatactggggaaatcttcctccttccaacaatggtcttcctattgatcctgagaccttgctggcaaccagccgtgtctctgcccctctttctgtgctctcgtgactcatcccagcttctctctctgtgcccctttcttgttcccctctgcccatttctctttttatctgaatccccagatgcccctgcacaatctgagtgtgcagagtggcccagccctccctaggaagggaaagcactggccccttgcttggagagaaggcagagactgctctcccacaagactgtagtgccctaaaaccccctgatcagctcacaccttgtttcctggtggccaggccaatgatgaggttcaccacagcctacctcagccagggaccttatgacttaataggggaagagccacagaatatagccacatatatgggcagaagtcctgagatatccatggggctggatactaaagggtctccatttccaagtagaacctaaggttagatgagagaggtttattatcaatgcaggaggatcctcacaggatacaggatttaacagcctaacagggattccagaagatagttcaaatcagattcaaggtaagctcctgtaagtatggaaaaagtgacaactccccacgaaagacagaggtgagaaggctcagagaagtggatatgctggggtggatacactctgtaaatccagaaaaatctacctgctgcctatttttcaattgttcaatttgcctgttaaatcatctgggcctggtcatgctaaatttttttaactaccaattttgatttacttaatgattgtaaatctggtttatccatttcttctgttttttaattcactctgcattgatatttatactacaactctccaaacactatttcacaaatcaagcttctatagcaaaagtaggaaaacgttttaagaaattttattttaccttgtcaatgaccaaaaacacacaagactggcatcctcacccaatttctctagactttgtttctgggatcatcagctatcacatgttgtattagtccgttctcacgctgctataagacagcctaagactgggtaatttataaaggaaagaggtttaattgactcccaggtctgcagggctggagtggccccagaaaacttacaatgccagcagaaggggaagcaaacaccttcttctttacatggtgtcagcaaggagaagggcagagtgaaaggggacagggggaagccccttttaaaaaaccatcagatctgataacaattcactatcacaagaacagcatggaggcaacctcccccatggttcaattacttcccaccaggtccctcccacaacatgtggggattatgggaacaacaattcaggatgagatttgggtgggacacagccaaaccatatcacatgtcttcaatttctgcctcctaaaaatgacatctttgccaggtgtggtggcgcacacctgtaatctcagcagtttagaaggctgaggcaggtgaatcacttgaggtcaggagtttgagaccagcctgaccaacatggtgaaaccccatctctactaaaaacacaaaaaacttagcctggtatggtggtgtgcacctgtagtcccagctactcaggaggctgaggcaggagaattgcttgaacccaggagatagaggttgcagtgagctgatatcacatcactgcactccagcctgggtgacacagcgagactccatctcaaaaaacaaaacaaaacaaaaaaatgacatgctcaaccttggtctttcctcaactgtcaactctgagtgctaagaacctaaaagatatctctgctttactgcacagcaaggtctttgttgtgagttgggttgtgtcctctcaaaatttgtatattgaagttctaacccccagtatctcagaatgtgactttctttggaaatagtgtctttatagaattaaaatgagatcattagggtgggccctaagaggatattagggcacggacactcacagagggacaactgtgtgaagacacagggagaagacagttatctacaaaccaacaagagaggcctcagaagaaatcaacactgcggacaccttaatgtcagaattttggcctccaggactatgagaaaataaatttttcttgttgaagcttcccagtctgtgatacttcgctattgcagctctagcagactaatacacccttcaaattcaccagggccaaattgaacccaccattctcctctaaaaatttcttttgctttcaccattttgtttaaggtcctcactcttcccatcactcaaactctgaaagttcttttcccatagtgaaaaggcctaatgaaggtgtttccccatggattctttccttttagttctgtcttgtggactgcagctgactcagccctgagggtgcccttgatgtccccgctcaattagcatctctaccatttcaccattgcttgcatgagacagtcgaagggtcatgaaagcttctgtgatctggaagacgtattctataacagtagcgtttcacagcagaagccagacttgcaacattgcaaagatcatgggatttggaagcagaaaacctgagtttctatttggactctgccacttaccaagtgtagaacttttggaaaaaccttggaaagtcttcctatctccattatggatcaagagtgtgaccttggttcaccctctcaccattctttccttaatttttttttcttataaataatagcttccaccttccaccctgcagagcaattgtaaacttcataacacatgcgaagcgcttgactcaaaaaacaggaagcactaaggactgttaatttaactggcatctcattacttttataagaaagcctagcataaagaaaaggtgtgtccactgttatgggttgaattgtgccctcccaagaaagatacattgaagctctactccccaaacctcagaatgtgcccttatttggaaatagcagcattgcagatgtcattagttaagacaaagttatactagagtagagcaggccctaatccaatacggcaggtgtctttacgaaaagatagcatgtgaagacacaaacatacaaagagaaggcaaccatgtggtgacaagaggagagactggagtgatgctcctgcaagccaagattgctggcaaaccaccagaagttaggaagaggcaaggtaggattcccttacaggtttcagagggagggtagccagctgacactttagactgctaacctccagagttatgagacaataagttcctgttgtttgaagccgcccagtttgtggtacattgttgcagcagccctaggaaactgatacatctacacaatgcaatgtccttcagccataaaaaggaatgaaacactgacattggctatcatgtggatgaaatgtgaaaacagcatgttcagtgaaagaagccaggcacagaagaccacatattatataattccatgtatgtaaagtgtccagaataggtgaatccatacagactaaacacagattaatggttgccaggggctgcaggaggggagaataggaactgacggctaatgagtataagctttctcttaagggtgatataagtgatctggaattagatagcaatgatagttccaaatcttgtgaatatatttaaaattaaattgtgtaacttaaaatggtgaattttatgtggaataatagcaataaaattcaatagaataaaacaaaatgaacgacatgaagcccaacacctcactggaacatgcaaaacccttcctttattctctggtggatcccatttctcgccattgttcagtgctctctatgccccaccatgctgtcctactctcttcatcctctgccttctcccatgctgtctgcctacctatagtccctctttccccacgccctgttttgttcctgtgctgcccctttctcaccctgtactctttcactttgaagtcactgccccagaaccttctctttcactccacgattgggttgtgttgacccacttgcacatcatatgtttctgagggcagaaatgttggcccataattacagttgtctggttatgtctctgtctccctcactaacatgcaagccctacagaagcaggagctgtgtccagcatgttcaccagggtatcttccaagtgtatcacatgatactaggtgctccgtagacacctgctcaatgtcatataggttcttggtcttctcttccaaataaggtagaatagttatttttcattttacaggtgagaacattcaagttgaaagaaatgaagagaatatttgatgtcccgcaatacaggggaaagccgttactgcatcccaggaatgtttgaccataaagcccttccttgcccactaggccaggtatgtcccatcatagagcccctcaccccacttgcaggttacccttccaaagtgctgttccaaaagagctcaccgagacaaggtgatattggagaagtgatagacacatagatctatggaagacattgggaagcttgggaataaacccacacaattatagctaattattgacaaaggaacagcagcaattcaacagagaaaggaaggtcttttcaacagtgttaaaacaattggacagtctttttttattttttagtttttggttttgtttttgtttttaagacggagtcttgctctgtcatccaggctggagtgcagtggcaatctcggttcactgcaacctccgcctcctgggttcaagcaattctctgcctcagcgtcccaagtagctgggattacaggcgcctgccaccaggcccggctaattttttggatttttagtagagatggggtttcaccatcttggccagtctggtcttgaactcctgacctcgtgatccaccagcctcggcctcccaaagtgctgggattacaggcgtgagccacggcacccagtcaacaattggacagtcttatccagaataatgaatcttgatctaaacctcctaatttacatgtaacaaattgcattagttacaatattaactcaaaatggatcgtagatctaagcataaaatatataaatatataatgcttagactaaaacataggagaaaaaatttttccaatctagttaggcaaagagttcatagatgtgacactgaaagcaaagtatagcaaaaggcaaaaataaattcaataagttgtacttcatcaaaattataacttttgttctgtaaaatacattgttaagtgaatgaaaagatgagctgtagatttggagaaaatattttaaaaaagcacacgtctgacaaggactcatattcagaacacttaagaatgctcaagccaacccaattaaaacaatcaattcaattcaaaaacaagaaaacaaaaccagtttcagaaatgagacaaagactcagacataaacttcagcaacgagggcacgcagcaggcagagcagcccagacaaggtactcaatactatgactcactaggggactacaaatcaaaaccacagtgagatcctgttacacacccattagaatgtctaaaataaaaaccacaaacactagtagtgccggcgaggatgtggagcaacaggactaacacatcgctgccaggaaagcaaaatggcacagctgcactggaaagcaatttgtttcttgtaagtttacacatatacttaccacgggaaccagcaatctcagccctggtatttctcctaaagacataaaagcttatgtccacacagacacccgtacacaaactgttataaaagctccagtcataataggcaaaacccagaagcaaactaaatgtcctttaacaggtgaacatgtaaacaaactatggtgcatccatacaatggagtactgttcagcaaaaaaaaaaaaaatactacactgtatacacacacaggtacacacacatatatctcctaatgttagcagaatttttttaatgtgtaatacagcattgtttactataggtaggatgttatgcatcgaatctctagaatttaatcatcttccatacccgaaattttacacaagctgaaaagcaactcctcatgtccctcttctcacctcccagtaacccccattctacattctgcttctatgagtttaactattttaggtactttatctcagtggaattatacagtatatgtctttttgtgactggcttgtctcacttagcacagcgtcttccaggttcatccatgttgcaaatggcaggatttccttcttttgcatggctggataatattccattgtgaggatagcctccatttcctttcatctctcaatggacatgaggttgtttccacatggctgtgtgggagcaagggggtttcttagccactggagcgtcccattgggatggggcactggtggtgacccctaagcagggatgtgccctaatggacttgcatctgatagggtctccaggccactatggccccatgcctgggtgaggttaagagttaaagagtagaaaacaggaggccagtgagggggcatttttgggcccatgggaaggtttctgaggagatggaagggctgcaggtataggttcccaatatgtccccaccccagttcaatttcaatgaccaagggagatagcagaggtaaagaaaacagataagagggggtcacctgacacctggtggacagaagctgacatccaagaggtgattccacccacctccctcctgagcttcctccttcctcaggtccagttaggcaggggacctggtcagtggtgcctagtcacctgccactgtgtgacctcagacaggagatttgtcctgggagcctccttcccttcatctataaaaggggaatggacacagcagcccagaaggcttcgaggaggaggaggacgtgagaaggtgtgctgaatcctgccctgctgagcatgtaggcctaaaattttacacacaaactgagtccctatgaggaaagggcaagccctctgccctctgcccttcctatgtctgcatatccagaactgcctcaggtggagagggcagagactagggagcacccatagatgctctgatgctggccacagcccttgggggtgacagtgatgaggacctgggtgcacatgtggtggagcagccaagaccagccagagaagagacacactcatgcacacacgtgttcacaacatacacattcacactcacacacaaacacattgaatgcatgcgtgttgacagttcaaggagtagaggacactggacctgggccctgctgacccaggcagggccccactctgatgggtgctgtaaccccagacgtcactgttgctgaacatctgcctgcctctgagttgtggagcagctggagacacacagtggtgtctgtgagtgtctctgtgtgcaggacccttttctaagtgagaggcacatctcagcacagctgactgatcattctcgggtaagtgtgacctgctgtctccccttcctgctgacatgggggcagatgctaccagatggcatcactggcctccggggcgctgtggagggtaatgtcgctgagctcccaccaggtgctttctcttcactgaccatgtattgcagccgtctcattcaccctcacactgacttcgtggaatgggtgctaatgtacccatttgaagatgagatgcctgaggtcagagcggaggcaactgacccagggacccagatgtgactctggactgtgatctcagccctgccttgtgctgtcctgcactcaactcctgacctctgcagccttcctgccttagatacaaaatctgctgaggattctggaccccagtgggggtagaacctggctctggaagagccacaggaatggggggccctgtgggtggggttagaggcatccctcagtccaagtctgtgcaagaaaaagttccccagaggcagggatcttatccattcagactttaagtgtgggctctgatggttactgtgggacccaccaggcactggagttttccagtttgggagcagagctgggagccctctgccctcgaatagttgtggaaaatgaagaaaccctggaggtctggccgaaaggtgacagtcattcctcctgttctctgaggcctggggacaggggtttaacctgcaaggccctctctctgacctgtcctccagacgtatcaccttccctttgtctcaggtattcccaggagagatggcccctctgggtgttctccagaacctgtccccaagagttcacttgttctttggtgacctgggaaaacaaagcctcttcctgtatcaactgctcaggactgtggaatctgccctccctccaccaaagggaggctgctttggagacaatagatcaagccttctccgaaccaaacatcctccttcttgactggtgttattcttcaaatggattcactggccacagtgagtaaagatttgagtggaacagaacactcatgagatttcttctttcctatagaaaactgggcatcttcatggtgtctgaacaatagcaggaggctgatcatatagagatttctggttcctggccctagtctgcctccaggtgtccattatagtcatcatggcccttcaccctgagcaggtagatgccgttcatcctgctgtggagtgtgtgcccatttcaggacatttagggacaacaagtcttgttgtctaggtctccttgttttaaagtcctcaggaaagggcccacctctggtcaggcccagggactccagaagtcctggcagaggtggggccatttggcttggtcccattgtcctgggggtgttggtgaaatgaagttcacccggctggcatctgggagcagatgtatggggtgttctctaaagctctcaggtgccatgtaattttgggagtattttgtcttatagggtggatatggacaaagacatggatatcctgctcgcccaggagtaaagggacatcattgccaagtataagcagacacaggtcaggctgctccctccagggaggcgggtctcacctctccctctgttccctggtctgatggtcctggactccttcgggatgcagggcaaggatgagctgcccacacgcccatacccaacaacttttattttggcctccctcaccctctctccctctgccttgcaggttgctgatccagggcaccagtggacacaggagatgaagatgtttacatctacaaggtcatcagtcagcttgagattccacagtgagtcagtcttctgtcctcccaaccaattgccaagaccagctcggtcgtggagaccctaacccagtggcgctagaggaattaaagacacagacacagaaatagagtgtagagtgggaatcaggggctgatagccttcagagctgagagccatgaatggagttagacccacatattaattgacagtaagccagtgataagcattgcttctatagattatatattagctaaaagcattccttatgggaaacaaagcattcttagcgaggagcagagaaacaggccctggctgatatctgcagcaaaagcatgttgttaaggcaaaaaagcatgttgttaaggaatccccctgcagatgtggagtcaggcatggtcactcctgctggacgttaagaaggtgaaggctgaaaacccaagtaagtaccaggtatggtccttccacactcagccacagcggaagaaacaggccaggccatgtcaggagcccgggtctctagctagaggaaaagtcaagcctgagtgatggtcagtcccatatcctaggcacagacgatggcatgggaaccacaagtgaactgggctctggtgaccctcagtggctttggaaataagatagagaaggatatttctgcaaaaaaaaaaaaaaaaaaaaaaatcttctttccttccagaagtgctgaatgattgctgtttgtggtagtgagccttttgtctgttatgaggctggttccttcctgaggaaccagccctttagccctgccctaaagaaaataaaggagcagggctcctatacagggctctcactgtaaagcaactgcgggagagtgagccccagggaaggaccagccccatcctcatccaccacaggttatcagtccaggtggccacttagggaagggaagagggtctttctatgggctcacactcaggagggcctaggatttgggagcagagggagcagaaaataaagcagcagggcaagatgtcctcagcgaaaataaaccagattgacctggacatgaagtgcaccttcagacaccatgtcatgttttgggagcactacagagtcaggtaaggcctatgggggatggagggtcccaggggagacggaggaattcagaggaataggggcatcccatgcaggagtccaagataggacgtgacagagccccccaagggctctcttggccagggagcagccagcatcacagagcatctactgagctccaaaccatgggccgagctggggcatgtgggtccagaacccaagtggctactgaggaaacaagcggtagcaaacacaatcatgctgcatggtgaaaagttctctctatgacccacaagtacctgaggtagagacccacaagaggggctcagacttcacaggcaacactgacaacaccaaacaccatagaggatgtggagccacaagaactctgtgcattgctgctgcaaaatgctgctgctgctgaatgcaaaatggtacagccgccttggaagacagttgggaattgctcacaaagctaaatgtacttgtaccacgtgaccacaagtgtcatagacgttgacctagctgacttgaaaatgtatgtacacctaaaacctacatgtcacattcactgccttattcattatcactaaaacctagaagctactgagatgaccttcaacacaggtcccaggggagatggaggaattcaggggaatgggcgcatcccatgaaatgaggttatacctgtttggtataataaaattacaggttaaatctataaatataaattataattatagattattaggttacatttatttggtataataaaattatacagtaggtattgtcaaatatgaaattaatatctaatgattgtattataccaaataaggcaaatatgtgtcttttggacttaaggggacctaatatcaaaaaaattaatgagtcaaaaggactgaatttagaatttaattttgaaaaaatcaaatatcaaaactttaaaacacctgctatcacaaaataggatcattggtcattggtcattgtaaaataagtcattcatttaaccaaagtgataactcaaagatttcaaaaaaaaaaagtcaaaagacaaaaccattactctttgagagaggagacttaattttccaaacaataagccctaataaagatagcatgaggccaatgaaatctgtttctcaaatcttataaacaaatctattaaattttaatgatcttcaccatactatataatttccaaaaacctttttgtaacattttataattttttaaatgaaaaagtgggttaatactccaagaaaaccttgttaatctgacacaggagctcagaggttagtcttgcatcagtgagcctttgatactaatctttacagagaaactgtaaccaagataaaaccaattttatctttcaaaataggctcttacaatcgcatgtacccacatcttccacaatagcccctggactttgaggggtaagatagtttcaatttctggccctgtgtttcatgagtgcagtttcttttgattatcatcttctcctggttctgaagatacggttttagaagctttcagtgtttaagatttagcaggacttggtgtcctttttagatacaggagtcaaagccctgtaactcaacagaacaaggactttaaaagcaatacagaacattgtatggatgttaataactttaattttttaaatctcagttttcctaggcaaataaaaaacttaatgacataggaattgtttcaataaaatataaaatctgtttgttaggccagttaccaaaaggcaaaaaataaataaaagacctgcagcaattgcttttccctagacttcaagtcaaaactaatgaaaatggtacttgaattagttagatataggaagggtgtgtcttgcatcataagtgaaaattttcagtttcatagaaaaacttcaaaccaagagcacagaatgttatattggaagaaaatatttcctttagacctttaagataaaacacttttagcatcatgtcacagtagcagttagaacctgaggaaaaaaaattatagaaactgacaagaaagttggagagagcgattatctcaggacttatgaaggggagagaaaggtgaaaacagtgagattcaataaaagttgaaatctggggtaaaaaaattaaaatatcttgtaatttgttaagagtaaattaatatcttaagaaaattttgttcttctagcccattcttgagtggattagcatatttttaatatacagtaagtgcaaaagcacagtctctagaaagactaatttccttttaattatagccaacttgatcaaataaattcttttctcataaagtctctttttacaaaccttactatgacttacacaagccacttatgacatgcctagacttcctgttttatcctaaacagccttctttcctaaataaccaatcattttatcttctttttcttttttttaagatttctttgttgttgctgctgttgttgctgctgttgtttccttgagacaaggtctctctctctgtgtcacccaggctggggtgtagtggcatgatcacagctcactgcagccttgacccacccaggctcaagcaatcctcccatttcaacctcccaggtagctgggactatagatgtgcaccagcatactcagttaattttctgtgttttttgtatagacagggttttaccatgttgcccaggctggtctggaactcccaggctcaagcaatctgctcacctcagccttacaaagtgctaggattacatgcatgagctatttgcatccagccattttattttagaacaaacatttaccatgcaagatttttttctcatataaaattttccttttaacctttcttaccaaaaatatctctttatatttttaactgtctttatatcgctcttatttagtggttccttttatcttgtttcataacctttaaataacctttgaattcaacaaaaattattttcctttaaataagaacatattcttagcaaaatgtttttctgtaatttttttaattgtgaatgacccagacatttaataaatgcctgttatgtaatataactttagattctaaattatattatgcttatttacaagcattccttccattacatttacctaagttatttttaatagtttacctagattacttatgaaaactgtgataatcaacatttaaaggtattttcctgttaatcatttatatagcctgtgaatttcaggtgtttacctaagtaagaagcttaaggttaaacaaatgagtttttcgccaataactcaggataaatgacttatttatcaaaaaaaattacacaaggataattatcttttgagttacatttataattttataaccgtcatgccaaattttgacaccttatgtatattagcatttaatcaagctgacttttaaccactgagctttaaaaatcctttaaaatctcattgctgtaaccgagtacacccattttcctgagacatcaattattattttttttctttccttttcttgttccttcagttccccactccctacttaggcttttaggaatgcaaatatagccttttacctccccattaccggactctccctacagtgcaagttcatctaactacacgctcaaactggaaagtcaacttgagaattaacagttgatttataaaccaatcatgcccactgtggaactctcactctttaggaggttgtctcaagagataacagcctgcccatgaaggtgccagcagtcacaagctgattgccccgtagataaggcacaagagctagcatggaccccccgccaccacccttgctcacttcctcccctgctttttaaaagtgaagccatatggaggacacctgcatttcttcccctaagctagttttggaaataaattactttctttataccagacttcacttttgttaattggactctgcaagcaacaagcgactaacctgcattttggttacattaccatgttttaggtgggacaaacttctaatatttcaaatgtaacacaaatatcaaaccagtaaagactttatttaggaaccaaacccaggctgccatggtggaaaaagggcagaaccttagctactgaactacagcatggggcaaccactattgctatttcagtttggcttggctagcaaagggttgttttgttatgtaaataaagcccttcaggtaattgaaatctttcttgtttcgatggctgatttttcttttttttctctttgtttttccagcttcaggaatttagccagttcagaggtcttgttccccataatttagaactttccttcaggtttgaccaagtcaactagagtggtcaaacccaatggaaaaaagactaaaacaacaaaaacggaaccaaacaaataaacaacaacaaaaaagtaaagcaaaacaaatgattgcacaatttataagattactgagcactctaatggtaaggaggaatcaagaccagctggtagttaatcttaactttcagagaatttccaagacaaaccccatttcagctacttatgtaggaataaggcccaggttgaagattgctctctatcatcctagaagcaggaaaaaactcaaaactcatcttccctgttggaagcaagctgaaactctggaaaggagttgcctgctttccattatcatggattcagaaaaactcatctttttggatgcaagtaaaactctagaaaaggagttgaacagcaaaataaaccttagatctcaacaacattttgagaaatcagggattctctggagatgatacctcccaggcctcagcaaatcgtcctgttggttttgttactggcagcaaatccatatgggtctgcagcaatctcaattcttgccttctcagaagaaagaattcgactgaggggcatacggcagagtgaaagattgaggcaagttttagagccaagagtgaaaatttattaaaaagctttagagcaggaactgaagaaagtaaagtccacttgaaagagggccgagtgggtgacttgagagatcaagttcatggtttgatctttgacttggggtttcatacattggcatgcctcttggggcgggggagtggtttgcatctcttctcccttgatttttcccttggggtgggctgtccacgtgcacagtggcctgccagcacttggaaggggcaacatacacattgtgtttaccaaaattgtacacatgctcacttaaggcattcttcccttaccagccgagtgttcctggagaaaggttatatactggttcaactctgccattttgcctgttagtgcacatgcttaagtccactagcccacctcctgagatcttattgggaagctgctgattaccaacttgaggtgtttctattgggaggctgcctttccctggcaccggctgcagccaattattattttcaagaggcagtttaacaacttcctgaccaccatctgatggttgcctgacattcctgggcgagggtccctctcctgacctattcatgtctgactaattacctattgtaacagtttgaacaataaagatagctcaaggccagacatggtggttcatgcctgtaatccccgctctttgggaggccttgcaaggccagaggatttcttgagcccaggagttcaagaccagcctgggcaacaaggcaaaaccctgtctctatgaaaattacaaaaattagcccggtgtggtggcacaagcctgtagtcccagctactcaggaggctgaggtggaaggatcacctgagcccgggaggtggaggctacagtgagcagggatcgtgccactgcacttcaacctgggtgacagagtgaaacactgtctcaaaattaaaacagataaaataaaaatatagctcatactggtaccatgcacaagtagatttgtcaaaggtcagggccaccttcactcagagtctcttccgttggttgccaacttgtaaacgaaaaagtatgtcagataggtctcaatcagtttagaattttcattttgccaaggttaaggacgcacccaggaaacaggtatatgtacctttctcaaagatgattgtgagggcttcaatatttaaaggtgagaagtgggctagatgggaaagagggtgtggttatccacatgttgcaagagaaaaggagtaggcaggaaaacagtcaattatggattcatctcacactcagtaataggccctttacataaggtgaacataagactagctacttgaggagctatttaaccttctatctgtagctatctgctgaggaacaaaaggaaagacagttttttgcatgactcagctttcagcttaattttttccatttggcatagtgaattggagtcctgagttttattttcctttcccacctcaaaccccacaagctttgcgttgttgcagattgtccctctcagaatattttacaagatggtgaagtgcctaatgaacatttcttttgtcataaagtgagtttggatcctgaagaagccatcatcttaatcaggctttgggatcaaagttccccttcacccgaaccctgaacagcacagcagacagggaaggacttactgagatggctgctcccactctccagcccccactttcctgaccattcctggcaggaagagctgctgagcagactccatgggctgcccacacagggtctggacctagctgtcttcctgtgcccagcagcctgtgagccatcccagtcccctatgtgcagtggtcagcacccacaagccagccttcatagggattcagttcatgggtgttgccctgagcctggcacagtggcctccccagcttagcatctgcagttcgggtcagggtgttcttaacggccctcacctatgccttttctggccacacatgagtttggatgaagcaggagtctcttccatagctccttttcatctgagatgtccatgactggctcaagtgaaccacagtgtcaggagaggggcacggaagctgcaccctaaattccccgggacctgtggcaggccttcctggtgacctctgccttctcaggtgacttctgccctcctgggtgacattagttctcccctctcaagtgatctgtgccctcctaggttacctcagctctcccaggtgacctctgcctttccagatgacttcagtcttttcaggtgacctcagccctcctaagtgacattagtcctccctggttatctctgccctccctggtgaactcaggtcttccaggggacctctgctttcccagatgatctctgccttctcaggtgacattagtcctcctaggggatattaactctcccaagtgacctcttcccttccaagtgacctgtttcctcaggtgacctcagctctgccaggggacttctgcctttccaggtaacctctgccctcttggtgacatagtgtgctcaggtgacattagccctctcaggtgacctcaaccctccaaggtgacgtcagccttggtgaagtctttccatgatgactttggcttttgccagaggtaggctactgcgggggcataagccatatcatgccatgagccactatcctgctcatgttccagaatgaggagacatctgggtgctggcccagctgctggccaatgagaggcttgccaagcatggtactctccaaggtgacctctgccctctcaggtgacacagtcctcccatgtgacattagctcacagtggacagctacccacgaggcatcacacagccaggacaggggacggccacactggctgggtaattgtgacttacagacaaggcaccttctgtcccctgctcattttgagcctccagggtatcccctgctgagagtcccacaggagcctgtgactggccagggacctgacaccccaagtcagatgcctcttgtccccatcagcaaatgggatcacagctgccctgtgaccaccttctgcatcctggtgtcacaaccttctggccctgaccttatgcaggggactcttacaaccctgctggtccttccacctcccagctggccaccctcccaaccaccctccctgcccatggctagaccaagcccagatgacagcttctctctgtcctgtgtcccctgccctgaccccacatccaggagaaggccacacaccctccagcacccctggtcaccccaccagctcccacctgtcctcactgcttcaaaggcaggcctgcccttctggagccatggccctggaagccactaagcagtgcctccagccaggccccaggggcattcccacccctcctctcctggccgagaccacatgatggggtcactggatgggacagtgaaaggccttggggtctggaagcaaccaccactgcccaactgccactgcccaaccgctgctgcccaactgccactgcccaactgccactgcccagcctgatggctccacatctcaggagtaggctctgattccttggggccccaggagcctctcaggagtctacatcccaagatgttctaacttccagagtctccaagcccatcaagagcaagttttgctaaaagtgttctgagagcttatgaagcacatggtgagtggtcagtccctcagctcttccccagaggccctgggtcccatggggttagcagggacaggggaagcctggggctggtgagaggccaacttccagccagggcttgatctggttttcaatggattcaaagtttggcctccttttccttacctggaggggacagaggcactgggaccaggccaagctctggctgagccagggctaggggaagtacatccactgggggcccatgccatggggaggtgttggggcacagccaccactgttctacctcttggggaagggtctgcagtggggtctggaatacagaggttttcacggaagcccaggggaccctgaacacttctattccttctatcaggacaaggaagggttgtgcatccggctttccaccttaaactggtttctatggtgcttcatcgatgagataaggatgcataggagaccccaggccaggtacctcctttccccacagtgctcagctcccccagcccaggggtctggcttccccaggaggacccagctcacccccaccccacaggaggcacaggcaggtctctgcagggcacacaagccaggacctgtatgatgggagctttacacaccagacaccagggaattctgggcagactgggccaagacccatcttggaagagccaaaggagccagggaagccacaagccctcaggaagccccttattctgggaaccacatttctgctgagatgagtccatccctatgaagagctgccggaccttgtctgacccagccttatggaagattgggtgggtctcttcccaagcagagggagcctcaggaagtccagactgaggctacagtgggccctgctcaagccaccagccccgaggttggaaaggccaggtcctcccacacctgctgttcccacagacttccttcatgctcatcctgtggctctgggatgtctacctactgggaggtgagtgtgtggtgacaactatggtatacatggccttcacagccacagaattaagtccctgggtggccaatggtgcccagaaggagcatgcaggacagaccctgggacctatagccaggacagattcctggcttctggtgtgtgatgacctgagagcagcatccacactgtccacatggctctctgctccagcctggaggtagggccagaccaggcctggtgggctgggcagggagtggacccaggtaccaaacccactcctgacacaacccagatgaaaggcaagagtgtgttgagcacttccctgcccaggccttcctccagctgtggttttctgtgaacatctggacccctggggcagccacagtaggatccagcaccgcccagtggtgggtgcctggggcaggaacaaggtgcagacactgactctcccacagacccctcccagcctcatagtcaccctgtccctagaacaccccctgaagctgttcctgtttggcttgcaggagttccttcaggacacactgtcctaggcctgggccctggaggaggacatggtgatgaggcaccctgaggcctccatgggggaactgagaagcatgcactgtgacctgcacacccaggtgggcttcagcaccaagtctcctcctgtgtcaccctgcggggcagtaaatagtgggaagtgcccagacctcaccagccctgctccctgggccttcctccagcccctcctctccctcctcctctaagaagcttctgaaaccaggctgcctgagcctagggcaaaagctgaccttgggtttactggacatgcctcagagacaatgagacgtgagcaagactcttccaagcccctcccctgtaccctcctgctctcactcctgaaagccccagaaggacactggaggggtcagatccatctgtgcaagcccacaaccacacctgtgagtaccagcagccctggagagcagcagggggtcttcactcctgagcacccctccaagggcctaaaatcagtgtcagagaccctaagagaatctagggagagggcataggtgaaaccctggcccagagccagaattgattgctcagccgagtgtgggaacagtccagccctggcatggagatcccccagaggagtggagggtgtctcatccactgtggagataagcccccatattgtgtggcaaaggggctaggtaacagttaaggccccatccatctgagctctgaatcaaggctaaagcccaggctaagcagccctggggcaagagtgtgaggcaggaagactgagtcagcctgaaccctgggggctgtccctggagtgacttgagcttccctgacagcttccccactctaggctgcacacacacctcgctctgggagtagcagcctgcaggagtgtcctcagcattagaccagggggaccacacggggaccctgaggactgcagggacccaggtctgtggggtccagcctggcaaaagcaagatgttctcaatggaaaagctgaccaaatctgctttcctttcagccaaacctgagcaagcacccccaccacccaggcctctgcagatatcccccagcattgagaccctccccaaggggatgggctgcttctccctggcccacagcccagctccagcagcccatgggtatagccctcctgaaacaggagcctcatcctccctcaccctcacctggctatgctgtacccaaggccaaagcccagaggcataagggagcttctgcagagcccaggacagcaggctgctctctgggggccctggggactcagagtgtggccagcccatccccagctcaggatagaccacagagtgcttggtgattcctgcattggaactccctctctaagctccccatggacctggacctcagaggcctgtggttttcacagtagagcttggagcagagatgctaggcccctatcacttccatatgtgccctggacacctctaagatcataggactggcctagcccccaataccagacactgcccagccccctgatagcccagaggtagggccagagacaactctcctgcatgtgatgcctacagctgatcacccttggcagacagtgaacatcacggcccagaaggagccagggcagcacttggcaagctgccccaaagccccagagagctccttagacatggaaagtcaatactgatggggaagctggacacttggaggccactggagggaggggtgagcatggtgtccccacagcccaggccacccagcagcatgccctgcatccatggtcccaacctgtagggcagaacccccctctcaacgcacaattcctagacccagagggccctagcccagactcaacctgagccctgaaagggaaggggcaccaggggtgccttggggcctccagcagcagccaagatacacaggagatggagccccctgtggccctggccagaactagtatttggcttaaggcggagcaagcccccttggagcactgcgtacatacccggggcctatgtgtgcctggcaaggccaagctgatgatgttaccaagctcaaactaccactggccaccttggtgagggtggggcagaaacacgtggaccagccaccaacctcatccattcaaggaagcagaaatggtcaggctcctgcaggataagtggccaccaccagaccaccaatggggcagagttctgaggcccaaggagatggcactggggccctgcttccagggtccacaatctgctccaggacacaagactgaagaaaactaagcaaatgagagtccaggaggctggatccctcatctgccattcttggcagttgcattttgtggtcagaaaaagtcaggaaacttggctctactcactgcaggaggctccaaggtgggaccagagcttccagcatagattcaacaatgcctaagaatgcctcttcttggggaaaaggaccccttccttggcctcaaagcccccacttattttgattaaagcacaataaagtctttgttgttatgtcctgcctgtttttgagttgcccagagctctctgcaggaagccctggacatactggggtggatgggaaatgaagatggcacagcccagaccctgaccagcctctcacagcctccccatcccaaaggccgcagcagggccaagcaccagaaaggccaaggttcccacacaactgtgagccacactgcactgcagcctcccactctcaggcagatgccagggttaagaccctccagtaatttcctgtaattcaaactgcacctgatagggacccccagagggctgggaagggagcaaaagttggagttccagtgacattgctcattcatgacagtctgtacaaagcatccctgagagggtctgctgtcacctgtgtctactgtccctgggtggctggtctccggcagccctcccttcctttcttccctccttccctccccacatccctccctccctctcttccttcttctcttgcttccctcatcctttccatctcatctcctctcagcatctggcaatcccaggtcctgagcctgtgccaaggcgggacacaaaggacaccactgacaacaaggcagatgactagcggggtcggggagccttgtggaatcagagtggatggggaggggctcatctgtgcagcccaggactgctgccccgggaacagtctagaacagtgcagaagtgtgtgtccctgtgtgtgcacatgtgcacgtgtatgtgtatgtgtgtgcgtgcctgtgcacacctgtttactcagttctgctctaagtccatgtccacgaccccagaagatcccaggtatgtcctcactgacgtctgctgaaatcaagcatggcccctgctggtagttattgcactgtgtaatgccatcgtcgggacctcagagcaatagaaaccagtggacccctttaggcttttctttccaatgggacataaagaagttatatggacagaagttatatcctgttttctttccattgattcttttaccacctttctcctcttactgattttgaatgaagggggtttttcatgagggtaaggtaactggcaagaaatgaaataacagccagatgcagtggctcacgcctgtaatcccaagattttcggaggccaaggagggtgggttgcctgagtccagaagttcaagaccagcctagacaacatggtgaaagcccatttctaccaaaacaaaaaaattagccaggtgtggtggcacgcgcctgtagttccagctactggtggggctgaggtgggagaatggcttaagcctggaagtcagagagtggagattgcagtgagctgagatcacgccattgcactgcagcctgggcagcagagcaagaacctgtctcaaaaaaagaaaaaaagaaaaggaaagaaatgagataccgagaaactagcaaagcttcacctggctgtctggagacagcccttgtgtggtccccagcccacctcacaggttctaggctggccaccctgtggcctctgtactgtgtatctggacccaggctctgtgggaagggtacctggtctgacaaacattcctccatttttctggctgcagcttggaataggcccagacagcatgtccaggagatgccagacaacctcactatatcctgtgagacaggcccagtgggccttgaaggaaggggtgagcatgaagctgggcacccagagcctgagaccaactgtccctccctgtgccctggaggaggggcctggcctgtcagtgtagatgtggggagagaagggtctgtggacccaggaagggacattggtaggggactttgagcaccactgctcaggggacatgaatgacagggtgggaggcatctcccatttctgccctgagcacagcacccctttgactcctgagggccacgaggagtccactccccagagctttttgtagaacctgcatatgagtccatcagaggtgagatttgcaaatacttcctccagcctggggcttgtcttttcattctcctcacagggtctttcagagtgcacacatcattttgatgaagtccaattgatcatttttttttccttttatgcatcatgcttttggtgcttatctaacaaatatttctctaatccaaagtcacactaatatctacctttttccttatgcaaattttaaagttttaggccttacattttggtttatgatacattttgaataatggtgccatgtatggactgaagtttttaatatgcatatctaattgttctaatagtatttgttgctaagattgtcttttctccactgaatttgctgtacaacttttgaaaaacaattgaacacatatgtgatggtctattctggactctgtattctgttctattgatccatttgtctagcctcttaccaataccataccgtctgaatttctgaacctttacgataggtcttgaagttaggtattgttagccatcttacttaattcttcttttttagagggttttttatttctaatctaggtccactgcattgccacacacagaaacccgtgcccttgagcatacatacatatgcaacacaagtataaatatatgcacagaacgacaaagtgaaatttatcccaagaatgcaaggctgcttcaacgttaaaaatgggccagtataactcaccatattaacagatgaaaagacaacagcacatcattatttcagtatatttggaaaaagcattagacaaaatccatcaaccttataaaaacttccagtctatttctattcctaaaaactaggaatagaagtgaattttcttaaactgataaaaggcacctacaaaaaccctgtagttgatgtttactggacgttattcttaatgatgaaagactggatagtttcaccccagaggaagaactaggtgaggatgtcagctctcactacttgtattcagcatcctatggagagtctagcagtgcaaagggctccttcctttagtagactcagatttccatctggagtcattattctcctgctagatggatgtcctttaccatttctcaatctgtacatctcctggtgatgatttctttcatcttttgtcaatctgaaaacctctttattctgcctttttattggaaaacaaaattttgactgtgtaaagaattctaggttggcatttttttctttaaaaaaaatactttcatacaacttgcaattttccaacaagaaatctgctttgtatctttgattctctgtacatatatgtctttttcttctctatctagctgcttgtaggaggactcagcttctcgcagatagacatgtatgataaagatgcagtaactacatcaagtgtggtattgtccatggatggataaatagactgatggaatagagcagagggcccacagacagacccacaagagtccaactgtgattgatcaccaaggaggagcgtgatggtgaaggactgtgcttgttataatgtgctggggcctttggataaccactgactaagtgggccaagtggccttttggcttaggctgaagcaggataataataacgttatctattcatagaattgttaaaattacctggttttatatttgcaaagtaattagagcagtattgagacaaagggaatcttcagtgaacatttcctctagtcatagttttttccaccacttgacttcctgccctattcagagtcttatgtttgccaggactcaagcacctccttatggggcagactccacagggcatgatatggtttggatctatgttccccacccaaatctcatgtccatttgtaatttccagtattggaggtcgggcctggtgggaggtgattgaatcatggaggcagattttcccctctgtgctgctctcattatagtgagtgagtgctcaccagatctgattgtttcaaagtgtatagcacctctcccattgctctattcctgctgttcctgccatgtgaagacgtacctgcttccccttcaccttctgccatgattgtaagtttcctgaggcctccccagccatgcttcctgtacagcctgtcaaactgtcagccaattaatcctcttttctttataaattacccagtctcagatatttctttatagcagtgtgagaatggaccaatacagggcatcatggtcagtcctggggaacagcttcctggagtgggaggagctcagtcctggtaacctgctgttcccttgcctgaaaccccttgtttcctccaccttccatctcattcaacaaagctcttgggagaacaactttaaggactccctatgcctcttccttcaaaggtagccagccaagaagtagatggctggttgagccatactgactaccatggacagcagcaacagaaggtcaaaggcaaaggtcaggtattcttttcctggcaggtacacaaggacaactaagggcaggccccaaaccaggaagctgatggccacaaagcggacaatgtggtagatccggatgggtgaacagttcttcaggcagtacaggctcctgatgatcaaagtcaggctggaaatgcccaccacaagacaaataagcatgtgaaatattataaagcctgcctgaaattggtcacatgccaggcccttctcccattactcacaaacctggctaaccacatgcaaagaaagggccagggcccagctcaggatgctcatcacagcagaggtgtgctttgggcggtggcagcaccaggtgggacagaggacacacagaaagctctcaatattcatggccaccaggagacagagactcactgtgtcagagaaataggacacaggctccagaaacatggccacctgcaatgtcacctggtgatacagcatgaggattttctccaacaggatcacagttacacaggagaggttgaccatatcagcagcggccaggttaaggacataggtcacgtaggggctgctcctgacctggaagcagaaaagccagcagaccacaccattgcccaccagcccacagaaggccaccagcactgtcaggatgaaaaccacctgtttgcccaccaaccactcgcctcccgtatgactcatgttcacttgtcctggggtctctgtcctgttgtcccaatccagcttcccagagaacactgagagaaactgggccatggtgggctgccttggctgcctgggcacaccctgcaaagacaaaggttggtaacttaccaggcctaggaaggagagtcagggttgccttctgacctgctgggcttcccaagagggtcctgctgggcctcccaagattggtgggaatctcacagagcaaagtcaaggagaggaatgagtctcctgcaagtgatccatccatcccatatcctccactgcagggtaccctctcctgcttgcccccatccctctctccacctcgttcaggtattcttgatgctgtgcccaacaccaggtgtgtatccatgcacctaggtgcccataaaggaaagaggtgcatttctttacctttgttctccaactctctcattgacacagacagttttcatggcatggttttggtggaggcaccaggcaattcctctgccctaaggttctgagatattctgagtcccacatggggcagttgcttttcagtgctctagggaaggtctacccaacctctctcctgctcacctcccctcaactcctcactttcagcacgagggcctcctggtaggacctttatgttgttctgctgcctggaagggcctctgcacatctgtaagctttgtatcctctttccaatctttgccccagtatcaacttccagagaagcttctgcttcctattaacattgcattcatcacatgctgagtgtctatgcaacttacttacttctgcagaaatccctctgtgggaatggaagatttatcaggttttttattctcttcacaatgttgttcaataacttctccagctcctggaacagggtttgacatagaggactcacttgggtatggcacctatggagagctttatgcagctcagttacacttggggaagtgctggtgacctcttcataaaagcaaactttgcttctgaatcacagaagcttctggaacaaagcttgttctgcaaactgatttaaaaaaaaaggcttcttggactcctgagggagactcacacctgaaccctgggctacgtccacaacaggagcaggcactctcctccacattgccaatcacaggtctttctttgtagaatcatgaggggagggtgaccaacttatcctgctttgcctaggactttcccagtttaagctctgaacatctcttgtcctgaaaatcctcatagccctaggaaaaccaaggtggtttgttgcccaacttgaaagttaaacaggagaaggtcagtaccccttctggaatcccacagcttggttaaacccagtgatctgaggagttcatgctgagactgtgagagctgacctcttgggggcaaatcccagctctttttcatagtagctgactctttctttgcctcagcatccccatctaagtaagggctgctgctatgggatgaattgtattcttctaaattcatatgttgaactatcccagtacctcagaatgtgactgaatttggagacagggacattaaaggggtaattatgtttagatgggtcattagggtaggccctaatccaataggggtagtgtcttcataagtaaaggagattaggacacagacacccacagggggatgaccatgagaagacacagggagaaggcagccatctacaagctaaggagagaggctttggaaagaaatgatcccggcaatctttggatctcagactttcagcctcctaaaactgagagaatgaacttctgctgtttaagccactcagtctgtgatctctgtcatgggagcctgaactgatgatcacatttatgatgaaaagtttacagacggaattatggaaagtctcagaacagtgagatctacctggttctacaaccctgagctgctgaagctttgcttctgaatcacagaagcttctagaacagagcttgttccacaaactaactgataaatgcctgcgatatgcctggaaatattccacaggtgaccttgtggcctgcagtcacatattggtgcatcagcagggtttaggagaatgctagggaccagctccaagtgagcccagtgtttgaatcttccctccttgctgggatgatggagtccccttcagttggcagctctcttgaaatggaagggtccagccccagcccctcccctccctgcacttgttacctagacactcttacctgaggccagggaggaccgcagatctggctcagatctaatctggtcataggatgagtcttggggcttggtaacattggtgcccatggaaacatcagggtgacctgcagttctgtgcctgggccagggtgtcagaactcgtgatgatgacagaagagaagctgcaaacagacctccgtggcccaccccaggccaccaaggcaccaagcaggagcagttgggctctggtccccaacaaagaaaggagatttatagataaaagagtttcaaggggagaggtgacttacccttcaacaaagagaaaatgcccattttggaggcagcatgtggcttcagggacagagccaggcttcccatccctgggctcactgagacctagctcatgcccagagaccactactgaggccagtgactaagcagcacattcttcctcatcacacaagaggaggacacagccctcctggggtgggaaggcttcagtgcctggtgcagccccagcactgggcacagagagatcctagcacctggaaatgtcatttccaagtcgggtcatgagccaagctccccaaggagcataaacaacaaacaggttggatcctgggattcagggagccagctctgatggaagtgctcaggttgatgcagccaaaatagccaagtaacctttgcattgggattgaagtacttgctctggttctgagttgagagcccaccctccccacttaatctttatttgaggtgaaatttacataacacaaattaactaatttaaagggcacagttctgcctcacttagcaccttcacaatgttgtgcaaccaccacctctatctggttccaaaatatttacatacccccataagaaagccttttacctgttagcagttactccccttgtcttcctcctcccagctcttggcaaccccatctaccttccatttctgcacattcacctattctggacatgtcctattagtggaatcagaccctctgtgattttttgtctgtttctttcactcagcctcttgttttcatggcttcttcacagggtagcatgcataagaacttcattccttgcgttagatacaaactaaatatgaatatagaagctgtgaaatcagaagacccaaaaggattttcctagaagtcatagactacacctcagtaatacagtggctcaaatcctacctttaacagaataacacaccctctgcccatctacacagctggggcatttgtgaaccaggggccagagcacagttgtggctcacctgctgggactaccctggaaccccgaatcctgctttctccaggaacctggtttctgtcctgtccccattttcctgagaaatgcaccttccccagtaaaaaatcatgaggtttcaaattccaggaaaatatgtctctgagttaaaatggtttgaaaatgaaagaaggaagagagatcttttctcatacctgggaagtcttggatagaattggtaccacagaggccaatgtcctgagagatgaaagttctgcccacaggtcaggaagcaatctaacgatgtctgatttgaactgggtcctgacaagaggttgtcaatttctctgtgtctgttgggtcttcctgtactggggcaaattgcatatcagggcccaggcctttatctgaaacattgtatctcagcatctcctgatatcccccatcccactgacacttttaattactccatcctgaacaataacttccctcaaaaaagaaggatctttaagacaagttgtcacctgcctccctgtgtgaatctcctagaatgacatccagcccagcccagcccatctgagacaggcaggagagggaactctggtgggcattttgtcaataaacttgagcatgccaggaactcaaatgtgctcctttcattttgctgtcaattgaattgcatttttttttttttgcaaaagatgtggaagttcttgtaaatctgtgtcagaaacttacattggattcaccaagcctagggagatttggctgtgctttgttggagccaatatttttcaccctggtttaccccaccactgacttgctttcttttttttttttttgagacggagtttcactcttgttgcctaggctgcagtgcaatggtgcaatctcggctcgctgcaacctcagcctcctgggttcaaacgattctcctgcctcagcctcctgagtagctgggattacaggcatgcaccacaacacctggctaattttgtatttttaatagagacagggtttctccatgttggtcagactggtctcaaactcccaacctcaggtgatccgcccaccttggcctcccaaagtgctgggattacaggggtgagccactgtacccggccttgacttgcttttatgaggcaagaaaagacatgtctccttgttgcactaatttcgatcaatcaataagtcaattagttcattttcattacatctctctgaatcaattgagagataaattgagaagtcaaaacaatgcccaacaacatagcatctttattcctccctcccctaatgacctgggaagcagtttgtgaccccaaagcacttgcttatatgttattctctccaggaattgaatttactcctcaaagtaataggcacaggcacccatggtcaacacctgtctcctgaagcttatcacttaatggagggaacccaggagtatgattcctccatgcagacagtcagattccaaggagaaaggaggaaaagtccttcaaatgccacattcagccccttcttctggatgccccactcagcaaagtcacttgtggctgatgctggtcagagaagcccttccaaatgggaacatgggtgtaggaaatatgtgcttctcacactcccaaaggatcacaaatggggccctgtgtctcttaacttccttatgtacaaaagtacatactcactagaatatgattttacaacatttccatcattcctatacaatgtgttgggaagtgatcctttctgatctatattttggaagagtttgtatagaattgtattatttttttctttaaatgtttggtagaattcaccagtagagacatctgggcctgggccttttttgtgggaagatatgcaatgacagttttaatgtctttacttcttgtaggcttatacagattttctatttcctcttgagtcaattttggtaattagtttttctagaaatttatccatttcatcgaaggtgtctagtatgttaggataaagttgttcataggatttctttataatcctttaaatttctataaagttggtaatgatgtgcccaatttcatttctgattttaggaatttgaggccatttttttttcttggtaagtctagctaaaggtttgtcaattgtgttgttattttccatgattcaacttttggtttcattacttttctctatagtgttttattttctattccatctactcttgctctcttctttattatttcctttcttctgcttgctttggggttagttttctcttcttttccttgcttcttaccatagaaagttgaattactgattagaggtatttttcttttccaatgtaggcatttacagctacagattttcctctaagcactggtttatctccatctcataaatgttgacatgttatggtttcatttcatttcatgcatattctttttaatttcccctgtgtttttttttctttcacctgttatttgtggattcctgaagtttccaactgttggtgattactcattcaattccattgtggttggaatacatatattgtattagttcaatttttttttaatttatagataatttgtgccctcccatctagtctatcctggagaatgttccatatgtgtttcaaaagcgtgtataattcatttgttgttgtcaagtaggtcaagttggttgataatgtttcaggctctgtatccttgctgattttctatctagttgttccatcaatgattgataatggagtgttgaaatcttcaactatttttaatgatttgtttatttatcccctcaattctgtcattttcatgttttatgtatttgggggatgtgttgctaattgtgtgtatgtttataatcctcatatcctcctgataaattgaaattttatcattatagaatatgcctctttatttctagtaacgctatttttctcaaggtctactttgtccaatattagtagagctgtctcagctctttcatcatagttttctacatggtatacttttttccaccctctttttttaacctattcattttaaaatcaaaactgcctctggtagactgcatataccagacattggacatactaggtgaacatattagacgaacaattttaaacacgttcaaagaactaaaggaaaccatgtcaaaagaactaaaggaatgcatgagaatgatatctcaccaaatacaaaacatcaataatgagatggaatgttaaaaaagaaacaaggccgggcgcggtggctcacgcctgtaatcccagcactttgggaggccgaggcaggcggatcacgagctcaggagatcgagaccatcccagctaaaacggtgaaaccccgtctctactaaaaatacaaaaaattagccgggcgtagtggcgggcgcctgtagtcccagctacttgggaggctgaggcaggagaatggcgtgaacccgggaggcggagcttgcagtgagccgagatcccgccactgcactccagcctgggcgacagagcgagactctgtctcaaaaaaaaaaaaaaaaaaaaaaaaaaaaaaaaaaaaaaagaaacaaataaaattcagtaattgataaataaaatcgtagaaataaaaacttcactagatagcctcaataacagatttgagaaggcagaagaaagaatcagtaaatttaaagataggtggggaaattatccagtatgaggaacatgaattaaaaagaagaagaatgaacagagtttcggagacctgtgggacacaatccagtgtaccaaaacacataaacgagaattttcaggagaggatagaataaaaggaacagaaggaatatttaaagaaatactagctgaaaaactccaaattcaatgaaaaaatgttaatctacactttcacaaagctcaacaaacttagataaaataaattcaaagagattcacacatagaaacattataatcaaactgccaagaagcaaagaaagaatcttgagggcaaaaagagggaagcaacttatcatgtacaagagattctcagtaagaataagaactaatttctcatgaaaaattacagagtcaggaggcaatgggatgacatattcaaagtagcaaaagtaaaatactgtcaatgaacaattctaaagccagcaaaactattcttcataaatgaactagaaattaaacattctcagattttgaaaactgagagaagctgtaattaccagacctgtcttatgggaaattataaaagcagtcttgcaggttgacatgaaaggacactacatagcaactcgaatccacatgaagaaatgaagaactccagtaaagataactacatgggtaaatataaaagacagtataaatgcaatttgtttgcgatttcctctctcatatgatttaaaagacaaatacataatgaaataattataaatctgtattgataagcctacaatgtataaagatgtaatttgtacggcaataaaaacacaaagaagcagaagagaatggagctgtatggaagcaaaggttttgtgtgctattgaaattaaattgctattaatctgactaaattgttataaattattaattgcaagatccagggcaatatttaaaaaatacctcaaaaagtatagtaaaagaaacaacaaggagaattaagtaaaacactaacaaaatttatttaacatacaaaggcagtaataatggaatagagcaataaaaaacacgatataaagaaaataagtagcaaaatgacaggtcaaaatcctatactatcagtaattacattaaatgtaaatatattaaacaccccctttaaatggcagagacatgaaaaaaaaaaagaaatcctgtcattcatggcaacatggatgaacctggaagacaccatgttaactgaaataagcaggcacagaaagataaagactgtgtgttctcactcacatatggaagctaaaaaatgttgagctcattagaaatagagagtggaattttgattattagagcacaggaaggatcgaagggaggagagagggaaggataggaagagattggttcatggatacaaaattacagctagataccaggggaggaggctggcaagatggtggaataggaatagctctggtctgcacctcccagcaagattgacccagaaggtggatgatttctgcatttccaactgaggtacccagttcatcttattgggactggttggacagcgggtgcagcccatggagggtgtgccaaagcagggtggggcatcgcctcacccggggagcacaagaggtcaaggaactccctctcctagccaagggaagccgaagccttgagggactgtgtggggaggaacggtgcactctggcacagatactgcgctttcctcacgtcttcgaaacctatagaccaggagattccctctggtgcctatgccaccagggccctgggtttcaagcacaaaactaggaggctgtttaggcagacaccaagctagctgcaggaggtttattttttctgattaagtcaagcagcagttctcaccgtggctaattaggcctcccactgggacatttggcaatgtctggagctggttttgattgtcacaattagagaggatgcactactatcacctagtgggtagagccccgagatggtgctaaacaccctacaatgcacaggacagcacccccaacaaaggatgatccagtcaaaatcgtcagtagtactgaggtggagggcactgatctttagatcttgtgactaggctttttctttctgagtaacatggaaactgctgaaagattttgagataagaagtggtatgatctgagttgttataaatgggttactctggcttccatgttgagaatatactaaaggttaagggaagaaccagaggattatttcaatcatccaagcaagagatgttgacaaggacagaccagagtggtggtcctaacagtgataacgacttgtcagtttcacaacatatttttgcaggtagagccaatagaatttgtgggtagattatatgtgagtgagatgaagaagagtcagtatcacaagatttttgtctgagaaactagaagaatggattttcattacgggagatgagaaaggctacagaagaagcacattgtgggggagagggtgggtagtaaggagctcagtttatggcatgttaaatctgagatgtgtattagataccaaaagctgctggtgggtagacaattggacataggaatctggaggttaggagaaaaatccagcctggaaatataaatttaggagtcatcagcatatagatggtgtacaatgtcataagactggatgacggaagtgcatgtaagaaaggaaagaggactgaaccctaggcacagcagggagaggaggagaaaccaataaaggagattcagaaggagcagctgggagactttggtgatttgaagctgtcagtcagctcagactgccataacaaaataccataaactgggtggcttcaacaacagaagttgatttctcacagttctggaggctgggaagttcaagatcaagatgctggctgattttgttcctggtgatggctctcctcctggcttgcagacaactccctacttgctgcctcctcacgtggcctttcctcttttataaggaaactaatcctatttggccctcacctttgtgacctcatttaactataattacctcctaaaatgcccatttcaaataccatcacattgaggattagattttcaacatatgaattttggggggggacacaattcagtccatagcagaagtgaaaggcatgttccaaaaaggaaagctaagtccactctattgaaaagcttctaacaggtcaagtaacatgaggactgaaaactactatatcaatgtggaggtcagtttgtgaccttcgatgaaaggtttccagtgcagaaaccttgttggagccaacccgaaagagaattcaaggacttggatggtagctagggggaagtgaagtcaagagaagattattttctgatgagtgaaatcaaagtatgtttatgtattgatggggatggtccactggaaggacaaattatattacaggaaagaggggaaagattagagtaatgtccctgaataagtggaaagggatggaatatagtgggcaagtgggggtactggcatcagacagatgcaaaatagtatattcctagcagtatcagaagaaaaggtggagtcccatatgtgagcacagatgcaagtaggtgaacaggtgggttagtaagaacttctctttttattgctttacattttttcagtaaaaaatgaagtaaaatttttatctgagaaagatgatattatttgagagagaggagtactggggatttgaggggagaccagaaagtatgcatgagttacgtaggagaggggaaagtgagtggactaggaaaatatgattatcaatgacattagccccttcctcttaaagtagtggtcatgaatgtaaagtgaaacctctcagtgtggctattggctttccttcggccacagtcagctgaacaaatatagggagagagtaggactatagttggatttaaataggaaagcaatttagctgaaagagtgtaacaagtgaaaagggcaggaacattgatgtatgcaaaggagtaatagtgattgacgagacagtctaagcttgatagagaactgaagatacaaggggcgtgaggggccacgatgaatttgcggacctctcactgaggaagaaactgagaggaaagtatagaaagataatctatgaggatactgaattcaccaagaatcatcacagtactggagagagtgagaggggatcagggacaaaaatcttcaaggacgaaggaggagcaaagggaaagagaatgatgagagccacaagtggggaggtggactttggagcaaagctgatgacataacagtcaaagctacattcaaaactaataatgacttcaacaaatctacaaaattcctgacagaaagggttattttccttgttttacagatgatgacattgagagtcactgaagttaaacaattagcttaaggtcactccatcagagaatgaaattctaaaccagttccaattgaatagtagaaatgttaatgagagggaattacgctgcctttggccttcatacactgccagaggcacactaccctaaagggactttccctccagaatttcctcttccccactcttggggactcctctccggacaccttcatgcaaagtactaatgataggagtgggacatctattccccagagctccatcctctcttctaaataacagggaacgttgagtcccctgttttttctctagtgagagcactcatcagcatgcttcctccttctctctaactgtgtcctttagatccaggagggatatttgctaccaccaccagctaatgctgatttgctaccagcacaaggcccaggtccttgtctggtctgtaccccattacaaggttctccaggaacagacatcaccacctctgcctagatcctgaaatttcacaaatgtaggttctttcttacccgttctttttattcctctatttacaagcacaatgacacccacccctcatcttcttcctgaaatacctggctctgatctcaggcatccattccagaaatcaacacagctatgcaattgcatcttttattaaatactcccaactccatttcaaatccagagaatccagagcaggagcaagagaccaacctatcatctggaaactcaaggtgtaaacattagtgccaaagattagtcatgaaggtaagttgggtattacagtgccctacaacaaaatggtcttgtgccgagagccacattctgaaataccaagtgaagtttgatgacacattatattatatatttcacaacagatttgtcttctagatgtgtgagggagatgatgggtttatgtgtacaggtgcacacatgcctatgttttggggaatttgtgcatacatgtaacaagaatgttatctgtgcagttttattattgtgtgcctgttttcatggtgtggcatatttgaagaggaatggtttagagcttgccaggctgaacagttatgtgtccgtgtaatcaccgcattaaagaatttgaccttttgtaactcaacatctctagccaccattggtctgtaagcctgaatgtcacctctcctactttattcatctctgatatgaccccaaattataaaatgatctataaatataggtaagactttgcatgtcctttcatactccacagtctctagcacagtggatcctggttgatcaaacaggaaggacctcgaagttagtcaaatataagtggaaaacctattaagcatttacaaataatgtggccttgggcaagtaatttaacttcagttactctcctaacatactctataaaataaggctattgcctaatattcaagtgagttaagattagagttaataaatgaaaagagctgtaaatgttcatagcagttgtatcactgcctagcataagaaccccttaaaaacctgtttcttaatttgggaaacagatatgacgatagttagcatttattaaaggatgacagttaacaactgctatgtgccaggccttgttctaacagcttttcatatttagcccacttaacatatttctattttcatatgaggaaactgaggcagagagaggctaagtaacatacccaagtttttccagctagaaaatggcagagccaggactcaaacccaggcagtctggctgctgagccctggttcttaattatgacattaatgcttattctgcccagtgaggataaaatgagtgaaacataaaatcaaacaggatgttttggtagggagcagtgttttttccctctgaaaaatgaaaaattaggttattgtgattttgtaatttacagcagtgaatatgatgtgaaaaataagttatccatataataatttatgtcaggagtcatgcagcagaaagatttctgtccatcacgtaaactttcatccattacataacccatatgtttctgtaccattaagacacttggttcaacaagacccttggagaatgaggttccttttgttccctggggttctctttttattttatttttggattaatatttgatagtaaagccaaggatttgggacaggaaacttagatgacatctagttcaaactccttgatttacatatgaaaaaattgagacagagggaaatgaagatttccccatatcatataactggctaaagggagctatgtaggtaaaaccaagatgtcctgatattctagtctaccagaaagtgttctttttttctacccaacttattcctgatttaaaggctagtatacgtgtgctgatctcccctcagtgggaggggcatggacgttgggagtagtctctattcacaacaaattaaaaatcagtaatcagccgtataatgggttgtgttagaaagtaaactaaggcccaataaaatatttaagagtttatttgagcagtgatccagaagtggctagggagctccccagagagaacatgaggaggaggctttttaggacaaatagataaaagcaaagataatatttcattggttacagttatacagttacacagttatacagttgccttatttggtctatcccatgaggaagtcctagttactaattacgtttttgttggctgcttctgattggttgagcttaagttctgtgtttctttaacataggcatttacaagaaataccacaaataaagtttcagacatgcttgcaaatcaagcaaggttaaggtcacttaggaggcccaactggctctgtctgctcaaggattcttctggcctcgtctccattttacatgaactgttgcataaataaacacagagtacctgaaacaacggaggtgatcattctgcctaccgagtgttggccaggccaagcttggagtgttgctcttattcttagggagtttatttttaagtaatctcatctgtaaatgggattacaatccacaaactgaccttgtatatgattccattccttctcccagcccagccccacactccaaggttttccctttgcttataaggggtagtcacccttttttatttcgaccttccaaacattctgggagttttcctcctttaggccaactacagcgcagaggagcgctttctcctgctgggtttctccgactggccttccctgcagccggtcctcttcgcccttgtcctcctgtgctacctcctgaccttgacgggcaactcggcgctggtgctgctggcggtgcgcgacccgcgcctgcacacgcccatgtactacttcctctgccacctggccttggtagacgcgggcttcactactagcgtggtgccgccgctgctggccaacctgcgcggaccagcgctctggctgccgcgcagccactgcacggcccagctgtgcgcatcgctggctctgggttccgccgaatgcgtcctcctggcggtgatggctctggaccgcgcggccgcagtgtgccgcccgctgcgctatgcggggctcgtctccccgcgcctatgtcgcacgctggccagcgcctcctggctaagtggcctcaccaactcggttgcgcaaaccgcgctcctggctgagcggccgctgtgcgcgccccgcctgctggaccacttcatctgtgagctgccggcgttgctcaagctggcctgcggaggcgacggagacactaccgagaaccagatgttcgccgcccgcgtggtcatcctgctgctgccgtttgccgtcatcctggcctcctacggtgccgtggcccgagctgtctgttgcatgcggttcagcggaggccggaggagggcggtgggcacgtgtgggtcccacctgacagccgtctgcctgttctacggctcggccatctacacctacctgcagcccgcgcagcgctacaaccaggcacggggcaagttcgtatcgctcttctacaccgtggtcacacctgctctcaacccgctcatctacaccctcaggaataagaaagtgaagggggcagcgaggaggctgctgcggagtctggggagaggccaggctgggcagtgagtagttggggaggggagaaagtattaagccagaacccaaggatggaaataccccttagtgagtcagtttagacttcaggctgttcatttttgtatgataatctgcaagatttgtcctaaggagtccaatgggggatatgttttcctcccgtgaggaaatgtttagttcttgagggaaaatccctaaatcctctatatactcaggtttagggaaggaaaacctacccctcacaactccacgcgcagggaaaatgatggacgtgatgctcgcctttagcttcctccctatctgatggaagaccatggaagacctcttggtctctgcaatcagaagtctcaagttgacaagaaaatcatagtccctaccctgcaggagagggtacatccagaaaaagcgaccatggactctattctcagaaatcagtccaacttagtgcagacctggccagatgaccagtgccctccccggggcatttcacccataaatgtgatgaggaaagcccataaatggtggtgaattttgctgagtggggttaagactggaaacccccctgcaggagttggttcttgagcaagttttaaagaaacaaggaactaggatgagtgtggaagaaggcgggcacgtctcagcccgtgaaaaaaactcacaggtgatcagtagtgagtcatgagagagagagcaagagagagagtcagagagaggagtaaatggagggaggaagatggaggaagggactcaagttctcaagacaggaacagggatctcctcatgaaaaaaagaagagaggaaaatgctcaatcagcagaacctgagcagaatattgaggtcaacccagaagccagctcctcacccaccctcacccagactggcgccctcatcctggagaagacctgctagaccctaaggcaggtaggagagagggtggtccacagtcccccagctttagaaagtttgttcgctcccaatgtccatctacccctaggaatccccactagttaaacagaattgctagatccctgtggaaaatacctttccttgcccaccatcatccccagaaataataactattttagttgggtgtgagacatagagaataaaagggggcatggtgccagacttcatttcatacaaatagctttaaaggagaagaggggggaaggagtttaatttagtttctaaaatgtttagtaatttgattgtgatcatgtcagagcaactaattcattttataaaatatcatttcactatgctctataagtagaaattcaatttggttcaaccattattgagtgatataaataaagcactggacttaacaaagacagaaatacagaaatcagtagaacatggatcccaacctaaaacttactctcttgtcataaaggaaaggagataggagtttttgcataaataacaaggtatcaagacagaattaaattccaagctggctttgaatgctctattttgccttaaaaatttatttactagtctcagtaatacattagtaaaaatcatgtcacttaattaattgtgttagaatcaaagaaacatagagttgggcaatatacttcatcctacccatcccacccaaatcttactctactcatctcattctcattaattttgggaaatcatcagaagatgtgttcgttgagtaagagattaaaagaaataagctttttgacccctgccaacaccccatgcccagggtggtcaccctccaatacaataagatgccaggaagagtaagttgccctttctgatgccgtaatctgccatcatcttcccatcttccagtctctttccattgcaagtcacaatctgggtctcagggattatacccgtcttagtctcgatcattgctttcacttgtgccactgagctggaccttcgcacctggaggaggtgcctctttgcctcatcacctgactccacaagaaacaagggcagctcctcatcactgggcttcaccactttcagggtaaggtggatggtcttctctttgtcaatgccgtaagatgagaggcttctccgtggctttaagatcttggagcccagcaaaagaacctggtcctgcacaggaaccttggtcttagaccggacatgttctttgatttttttcacgctgtcatatgggttggcatcaaaggtcattaaatcccattcctcggaacggacatgcacctgggaagtgaaagccacaagacagttacctaggatgcctgcctcctttacacttctactccccaccacaatggctccccctcttccactatctatctggtcctctagctcctattcagtagccagtgtccctctctttcttggaacttcttttttggaattaccaagttacaacacaaataagataatttgtcccattcctttataatcacacctttttttcgatcttgagaatggaaaataaaatcctgagcccccaaccaactgaacggacgctcttttgctcagggggaccctagagaaactttaaaaacttagtcattgggccaagggtggtggcttacacctgtaatcccagaactttgggaagctgaggcaggctgatcaattgatgctgggagttcgagaccagcctggtgaacttggtgaaactctgtctctactaaaaatacaaaaattagccagtagtggtggcaagtccctgtaatcccagctactcaggaggctgaggcaggagaatcatttgaatccaggaggcagaggttgcagtgagtggagatggcactactgcactccagccagggcaacagagtgagactctgtctcaaaaatataaataaataaaacattcagtcatgatggaacaggaggttggatatgcctcattgtatcttctcccttttgcagtttagacacaactgaccagcaaagttagagattataagactgagagaatggattctttgtggcaataagatagcaaattataaacaagaccgagggctataacaggcaaaagttaagtcatgcatcccttacacttaaagaataaactatgttctgccacaaagttttttcttttttctctagcagctaaacaagcactggccttgacaggaacaatattaaaacaattacagctcaccctgtgttggggaacacaggctaactgaccccgtgttccacaagccataactacagttttaattggacaaaagactgatttcagtaattttctcctgataagagaccactgaccatggactggttctggctagtttacagaagctgtgcatttgaatgcctttgtgtccctgcttcaccttttcatgtataaggcctaactgtaatgcaattaaatgttaagtctccacttcagagtgaccatgggtggtatgtaacatgcaagcttattcaatatgcatgcattaggaccccctccatgaatattcattgcctctgctataacctattggatatgtatacttagcaaaccccttcagcataaattcctgtgtcacctttcctcctgcaaagtgcttgcttttggttttcaatcagaagcaaaacttcccagcctgtcagaatggctaccttgcagactataacctttcataagaaataaactccccttctaaatttatgaattgtgtgattttttttagttgacaatctttacatttcgtttttctgtgcatttcaatggatgtaaaaaacatacctttatccatctcaaaatgtaattagtgattttccaccttatttacctgcctctcctatccagataaagtttgtcaaatgtcaacaagtaaatacgaggcttcaaaagatgtacatcagactctaaaaacaactctcaaagagaatttccaaaatatgacagcctcatgaagatactcatagccataggataccctctgtcaatacttcagaaggaaatcctgggtaggacacataatcactgaactgttagtttcttttcaaatatcccactgctttataataataactcacatactaccgtgacactatgttcagtgtttcttgttaatttatatttcttgtgtttttatttctatctaatgagagacaggactagctggatttcctaggccgactaagaatccctaagcctagctggggaggtgactgcatccacctttaaacacggggcttgcaacttagctcacacctgaccaatcaggtagtaaagagagctcactaaaatgctaattaggcaaaaacaggaggtaaagatatagccaatcatctattgcctgagatcacagcgggagggacaatgatcgggatataaacacaggcattcgagccagcaacgctaccctctttgggtcccctccctttgtatgggagctctgtcttcactctactaaatcttgcaactgcactcttctggtctatgtttcttacggctcgaggtgagctttcgcttgccatccaccactgccgtttgccaccgtcgcagacccgcggctgacttccatccctcggatctggcagggtgtccgctgtgcttctgaaccagtgaggcgcccattgccgctcctgattgggctaaaggcgtaccattgttctgcacggctaagtgcccaggttcttcctaatcgagctgaacactagtcactgggtccacagttctcttccgtgacccatggcttctaatagagctgtaacaaccaccacatgacccaagattccattccttggaatccatgaggccaagaaccccaggtcagagaacacgaggcttgccaccatcttggaagcggcctgcggccattttggaagcagcccaccaccatcttgagagctctgggagcaaagaccccctggtaacactaatatagaatgtgatctcctttgataagactagggcctcactcacagaaggtagggactatatctaagtcttacttcaatagctggaaaatcctaaaagatgggaaaactcacccctaatggccacttgaaagcctgagaagacctccctcatactccattcagaaatattttcccaatctagatattgcagacatttcttcactggaagatctgtgttaagcattgccttaattccaggttctctccatagtgcatattttcttatataatgtaatgtgttagatcattaacaacttcagatgaatgagttttgtgaagctctcctttgagaggagagggaagattaagtttaagaaccttaaaaaatgttaccataatttcaaatctcaccagccctgtggaacacaaagctcacccccactttttcttctaccatttatccctaagagtagctagtccaatgttttatttaaaaaagaacacagaagccagataaccagcttctcttcagacaatccctcttcccattctgcaaatgtcaatgccagcctcttctcctgaaggatgcctgcccagccccccagagccctgagtactgcccagcccccgtttctaagatctctccccaactcttgaaagtgcttttcctttccccatcccctttatcaaatcccaacttacacagaggcaggaagcattgggagccatctctgcagacaaggggccagaaaccagagacagaaaaaggactttgcatgcagcttatataccagagttgagttggaaatcccctgcctggattgctgtgtttgtccagctttgctgtgctctttgttcttgcatgctcccatgaattttctttcacttttgctgggcaggagttaatagacaaagaatgctttctgatcacatacttctctcctcaagcaatctatttgcaaacctcattccaaacatgggatggtctttctgtgttgaaaacttttcccttttctcaggaaagatctttgtctgttgaagccacctggatctatacccacagcccaaacctaagctgcagatctctatgtctagctgtgtctgtgtctatgggaattctcgttccttgaattcccggcatatccttgaacaccccaatctctctgccatctccacgccactgagcatgccttttcctccaactctatccccaccaccatgaatttataagaacacacggtgtaaacagtatcttcgtcaaaaagccttccctaactcttttcctccccatcctgggttatgtgtccatcttctatcctctacacttccttcaaatgcctctcagagcatgtttcttcaacaatagcatcgtctgcttgtctgtaatctttagaaaagagtaggaatcttgggggtcgtgattgtgtcttaattaacttgtatctttagcactgttccagcatgctgtcaggcacaggaaataatttataaatgtttactaaatgcacaaatgaattaataaatgaatgaaaagtaagtaaataacaaaaaaaggaaaagtaatatttggtgagtacttaaatttcaagaactgcacaacatattattaaatgttaccttatttactgtttcagcattttaatgaagtaagtacaggtgctccttcacttatgatggggttacatccctgtaaacccattgtacactgaaaatatccaaaatcagaaatgcatttaatacacctaacccaccaaacatcatagcttaacctaacctgccttaaacatgctcagaacacttacattagcatacagttggacaaaattatctaacaaaaagtgtatttactactgaagtgtgaaatatctcatttaagttattaaatactgtactgaaagtgaaaagcagatgattttatgggaacttgaagtaggtttctactgagtatgtattgctttggtatcactattaaataaaaaatcataaatggaatcattgtaaggaaccacctctattagtatccccgttaataagtaagaagctacctcatccacaatcatattagtagtagctggtaagcaagggttcaaacactaatctgtatttctatagtccttgtattcttcctatattattatgttatttcagtgggaaaaggcagggagaaaagtgctactggagttgggtatttccagcatggggttactgtgagggcaaatctaatatactctcagaaaaaactaattcaggggattccctacccagagatgacctggattctgggaaatagtgccctttcaagaaaacatatgaacaacaaacctggactctgacctctctctctctctttactcttcccttcctatgggaaattccctccctgcccaaagccagggccaggactgtcccagacaccttggtgcccctttgctgaccacaggcaggacttcatcttgggacctgacctccttgcttcttacccagtgtcaatctgacttttttctgtctctctctatgtcacaataagttctttcagagacagatctcttttcatttgctgttttagtctcttttgcatactataaaggaatacttgaggctgggtaatttataaggaaaaaaagtttaattgattcatagttcctccaactatacaagaagtatggcaccagcatctgcttctggtgaggcctcaagaagcttttactcatggtggaaggtgaaggagagcaggcgtgtcacatggcaagagagggaggtaagagacagtgggaaaaatgccaggctcttttaaacaaccagctctcttgtgagctaatggagtgagaactcatttattacaatgatgacagccccaggccattcatgagggatctgccaccacaacccaaacatctcccagtgggcccatttccaacactgggggtcacatttcaacatgagatctggagagtacaaacatccaaactacatcatttacccctctgacaaattcagaaaaccaactaaagtgtcagaggtgtttgaaccagagcaactccatcttgaataggggctggataaaataaggctgacatctactaggctgcattcccaggaagttaggcattctaagtcacaggatgagagaggagatcagcacaaagtacaggttataaagaccttgcaaataaaaggaagcagtaaagaagccagccaaaacccaccaaaaccaagatggcaacgaaagtgacttctggtcattctcactgctcattatatgctaaataaaacattaacatgctaaaaaatattcccaccagggccatggcagtttacagatgccatggcaatgtccagaagttactctatatggtctaaaaagaggaggaaccctcagttccaggaatttcccacttctttcctggaaaacttgtgaataagccaccccttgtttagtatataatcaagaaataaccataaaaatagtcaaccagcagccctcagggctgctctgcctataaagtagccattctttttttcctttactttcttaatacgcttgctttcagtttactctatggattcaccctgaattctttcttgtgcaagatccaataacgctctcttgggggctggatcaggatccctttccagtaacaaaagtaaaaagatgatggtatgaagatcttgccaagttataaaacaattgtggcggttatctacgagtgtcccaatgtggccctggctgacgggatgctcttgggcctgtcactgcccccattgaagcctacttgaagcctacttggaacagatgtctctttctagtctctttaataacgtccatgaaagagtttctaaactgctttgagatctagaatattgcttcaaaaatgccaaccaaactcagtcagaaagctagtgtgaattctcatttattggtgattgggaaaaaagtctacactcaaagaagaacagtttgaaaatacctaccaaaatttaacatggacataccaaaccaagacaaccaaatgcctatcagtattagggaaataggtaaccaaattgtagaatatcataagcagcataaatagaaggatcatacctgcaaacaacgatacagatgaatgtgctagaacctattgagtgaaaaaagtgttagaaacaaatgcttattccacggtgccgcaaagaaatagcactcagacataaattcaattttctcagcaaggaatttttacttctatagaagggtgtgactcgcggatggagtaatggcaagagcatacctggacaagggaggggaaggagttcttattcctgaggcaggtagcccctactgctgtgtcgttcccctattggctaggtttggaccacacaatctaagctaattccgattggctattttaaagagagcaggggtatgagccagagcggcagggtgggtagtttggtgggaagggtggttacagaacaggtgactcaggatgattcaaatcaaagcaggtggccgagggtgactccggatggagcaggtgaccaggggaacagatatgaaccactgattagaactgacaggaaagttgtttactgaaactagaggcaagagggtgaagagaacccggaagctcaactttcaaatggagaatcaaagaataagagagatgaatatgctgacatactgattctttgaagagaatcttggagttcactatatctaacaaaagcaagatgagtaagactacataaagtatgatactctccataaatctcaaaagcaagcaaaactacatagtgagacagagaaaaagaggaactacttgaaattcaggatatgtctgctttttaacaaaaatgaagcccaatctaaattttgatataagctacttgaaggagattttcaacaggaagtaagagggcattagaagccctgatattatttcatcttgccatattcagaatctgaagtttaaccaagagaacttaatgtttgttaaagcaatttattacttgagagacataccgtatattcactttattaaaggtaaagtaataatatctaaaacaaatgttccaaagaaaactaaacataagcaaaactgaatatagtatctagaactacatatgtaagcaataaggctcttataaaaatgtaaaaaccatgagtgttcattatgctactattatgttttatagtgttacattatattattctatatgggttacatttatttatctgtagtatcaaagattataataaaaatataatttaaaatttttcatgttcatatcctctagctcagcaattctgcttctaggaacttatcctattagtactcttttggtttttttttaaggagtatcactcttgcctcccagcctggaatgcaatggcgcgatctcggctcactgcaacctccgcctcctgggttcaagcgattctcctccctcagccttctgagcagctgggattgcagtcatgtgccaccatgcctggctattatttatttatttatttatttattatttttatttttagtagagatggggtttcagcatgctggccaggctggtctcgaactcctgacctcaggtgatccacctgcctccgcctcccaaagtgctggcattacaggtatgagccaccatgcctggccctattagtacacttatatatgtgtgaaataagccatgtacaagaatattcatgtgaaataattatttgcaactgaaataaatgggaacaacacttatcaatagacaactaaataagtgctggtgtatacagttgaattaaatttaaaagccaagttgcaaaatatatgtataatattttgttatttagaaaggaagaaaatatacacatatgctaaaatgtgcatacaacatctctgtgaggagacactgactctgcaagttgcctgaggagcaggaatgagaggtggactattcattatatgtcttatcttattattgttgctattttttagttttgcaactgtgcatgttttacacattcagataggcagatagtatgggaagggatagtatattttttatgtagtcatcagctcagaatggagctggctataagctatgcaccaatgggaaccagtttcagtgctcatcactagttgacaggcaaagggccatgaaaagttggtggctatagtaggttaactattgtgattctgtgccttccctactccccaaaatttattttccactaatcttttacatactgcaaaatttagaaacattgataatatagcccataatatatctgaaagcaaagaaatttataattagctaaaatcagagaccaaacctaatgaaaaaaaaaaagtaattctgagacaattgctgagcctggtacatgggactgatgtcaatgtgcaaaaattgtccaacctgacaaagcaactggaataactaatgcagtcataagtgcaggatgatgtgttgaccaatggcgcatttccactttgtagcagtcaggccatcttggagtgaatccaggctctgcctcctacttctcatgcaagttatttggtactttcttttgtcagctggggatttcggatttcacttaggattaggctctgctaccattaacagacatctgaaaataatgtgcctttaactaaaaccccaaaaggaccagatcttagaagtcaaaatgacaaccaaggcttaaggagttcaccctagaaccaagaaaaaactgcaatgatccattccagcaaaatgtaaagccagtttttcagaagttcaaagtgataagtgggtaatatatctgcttattaaacaagattcaatacgcttcagagaaagataatagaatacaaaatagataaaggtaatagaatacggaatctctgtaacatattactcacatcatcaagtgtaaaacaggaaatcaccaatcatgtgaagaaacagaaatattagacaaacagttttaaatcctcaataaaaacaaacccaaacgccaccgaaatgttagaattatcagatggagactttaaaatcactatagtattttaaagaatccacagggaaagatttatacaatgggtaaagaaatgatgaattttaggagacagatgtagaaactgccattttaaaaagccaaacggaaatgctggaactgaaaaatacaatatcgttgacccttgaacaacaagggtttgaactgcatgggtccattgaatgtagatttttttcagtaaatatactggaaaattttgtacctttgtgacaatttgaaaaaactcgcaaacttcatagcttagaaacatcaaaataattaagaaacaattaggcatatcataaatgcataaaacatacgtagatactagcatactttatcatttactataaaatatacacaaatctattataaaaagttaaaatttattaaaactcacacacaaatacttataaacaatcataaaatacagtattaaatcataactgcgtaaaattagtcatagtacattctgtcctactataataattatgtagccacctcctgttactattgggtgagctcaagtgttgggagtatgggattaaaatgtcatgtaatactaatcattcccacgtaagcagttcgtcttctctttaggaaaaagtgatgtctcacggttcttgcggttgtcctgtttttgttttgtttgtttgtttattacagagttttgctctgtcgtccaggctggagtgcagtggcacgatctcagctcactgcaacctctgcctcccgggttcaagtgattatcctgcctcagcctcccaagtagctgggattagaggcatgcaccaccacgcctggctaatttttgtatttttagtagaaacgttctttggttcaagacggccaggctggtcttgaactcctgacctcaagtgatccacccccctcggcctcccaaagtgctgggattacaggtgtgccaccgcgcccaggatcttgtgtatttttaattgtgtttagtgcaattccataaagcctgaataacaccacgagacccatatagtgatgctggaagttttccctggagacagagaaaagccataacattacaggaaaaagttgaattgcttgatatgtgctatagattgaggtctgctgctgcagtttcctgccatttctgactgatgtttcatctcttaacagatgacacaaacttacataattgataaatacggtattgtactgtcagtgtattttctcttccttataattttcttaataacattttcttttctctggctcatgttattgtaagaatacagtatataatacatacaacatacaaaatatgtgtcagtcaactgtatatatgatcagtaaggcttctggttaacagtagtttattagtagttaaggtttaggggagtcaaaagttattcatggatttccaaatgtatgagggggtcagcacctctaacccacgcattgttcaagggtcagctgtatacgactttctggtaaaaagaaccaggagtccttggagagatggttgatcccagacagaggaaagagaacatacaagataaccctggaatactgtatgatgccagaaactaaagaagtcattaaaaaaaaaaatgaggacacatcaaaaaactcacagtaatcacgttaaaggatttccccatagccaagtctgggaaaatgtaaacagcaaagtaaataatgagaataatgaagaaagaataaaataaacatccaggagtcattactggatatgaataaagaaaataaacagtaaacgaataggaggagagggacagctcttacaaaattcaaaataacaaacataggagaaatgatgaaagttatcattaggcaaacagcccaatagtaattgttacagtcaaaactcatttgtggatgctaaaattagtaggcaaaactataatgagaaaaagatacttgcataatctcaaagtattaccataaatacttattatgttacttatattattataagatatgactacagttttaataagacaacacagttaaaaaaatgaaaaataatttgaataaaagacacgtaaggaccaataaagcacatgataagatgtttaacaccattaaccatcacagagcaaattgaaacgacttgagggagcacttcacagccgatagaatgcctaaaaccaagagactgacaattccaagtattaccaaggatgtggaacatctggaactctcatcgctgtagggagtgtaaatggcacaatcactctggaaagcagtttagcagtttcttataaagataaacagacagcaaatgactcagaaattccaattctaggtatttacccaaaataaagaacacatgtgttcacacaaagaacgaagaaccatatacaacacaactaactgttctctccttcttcttcttcttcttcttcttcctcttcctcttcctcttcctcttcttcttcttcttcttcttcttcttcttcttcttcttcttcttcttcttcttcttcttcttctttttttcggacccaggctgttgtgcagtggcatgatcatggctcactgcagcctcaacttcctgggctcaagtgatcctcccacctcagccccccaagtagctgagactacaggatgcaccacgatgcccggccaatattttgtattattttgtagagacagggttatatcatgtttcccaggctggtctcaaactcctgggctcaagtatcctcccaccttggcctcccaaagttctgggattacaggtgtgagccaccatacccaacaattgtggcttctttcatagcagcccaaaactagaaacaacccaaatgcccatcaatgcatgaatggataaactgtggtatatttatacagtgaaatactattagcaataaaaaggagcaaattactaatatatgaaacactatgaatgaatttccataacaagccagataacagaagccagaaataaggcatgaagctaggcatggtggctcatgcctgtaattctagcattttgggagtccaaggtgggtgaatcacttgagcccaagaattcgagaccagtctgggcaacacagcgagaccctgtctctacaaaaagtacaaaacttagccgcgtgtggtggcctgcacctgtaatcccagctacttggggggttgagtccaggaggttgaggctgcagtgaactgtgatcacaccactgcactctagcctgggtgacaaagtaacaccttgtctcaaaaaacataaaaaaagtaaatttcattgaagtacaaattacgggtaataaaatgcacacattttaagtatattgttcaataagttttgacaagtgcatacacttggataaccaataccccattcaagatatagagcatgcattttcattattctagaaagttatcctatgccctgtcccagacaaccaatcatctgatttctatcttgctagatttgcttttcctgttgtaggaaagttatgtcagtgaaatcaggtggtatgaatgtatgaatgcttgcttgcttgctttttttttttttttttttttgagacagggtctcactctgtcacccaggctggagtgcagtagtgcagtggtgcaatcacggctccctacagccttgacctcctaagtatattgaacaatatacttaaaatgtgtgcattttattacatgtaaattctatcttaaagaagtttattttattttatgtttttttgagacaaggtctgactctgtcacccaggctagagtgcagtggcatgatcacagctcactgcagcctcaatctcctaggcgcaggttatcttcccagctcagccccccaaggagctgggactacagatgaaggccaccacacccggctaagtttttgtacttttcgtagagacaaggtcttgctatgttgcccagactggtctcgaactcctgggctcaggtgatccattcctcttggcctcttaaagtgctgggattacagatgtgagccaccatgcccagactgaagttgattttaaaagcagaaatgagctactgatacttgaaacaacatgaataaattgcaaaataattactcctagtgaaataattcttactcaaaggagtatatattattccatttgtatgaagtcctagaagaggcaaaactaagtatcaaggaaagaggcaagtggaaggtttgtaggatgatggaaatcttctgtttcttcattgaagtcatcaaaattcatcaaagcgtatatttcaaatctgtgcattttattgcatgtaaattatatccaaatgtctaccagtagagaagaaacaagaaataacgaagtcttacatgggttcaaatgagacttgagagaaaagaatgggacacactcaggagaggtggcaatgagaaaacatgaccttgtgctcctcaatgacacagaggagcagaagtgacctttttacttaccacagggagcaccaatgctggcacgtttcctctgaatcatctccttctttcttaatcatcattagcaccagtggctaattaattgtctgtgaactgtgacgctctggagtcttgggagaattaacaagccatttctctccatgggatgggagtcccgggatccctccctccatcacttcaccacgttttcttctctatctccactaccattaaaagacaggttaacttactaggttgaagaggagaggttgtgggcaaagagcaaccttcagccttacaggtccagaagaaggatggtggtggggtatagtttgtgcctgactctagagccaacccacctgggttcaagtctcagctctggctatataattctgagctaattatttaacctatgttttagtttcttcatctgaaaataaatatagaatatagaaatattatccaggtcatacagaggttgtgaagtgctttgaaaggtgtggcagcagcattagaagtcaacattactacctgagccctaatccaccaccctttcaaaggtgcccaacactcctgactttgcttgtagatttcattgtgaggattaactagaggctcactcagtctagaagctcgttgtcagggagaagctccggcagcaggcaatggggagattgtgacatgattgaggaaaagttataagtttattcttctcctactgtccattaatgtccacatatcgtcaatggtagagctaccccaggagcaccagatttggaatcaaacaggactcagactccaggcctggtcttcatcggctatgtaaccttgggcaagctacttaacctctctgcgaccatttcttcttctgtaaaaggaagatgatattaactacctcaaagagttatgagaaccaggtattcaggaaatgtttagcatggtgcctggtgtataggaagcacacaacagatggtagctgccaaagtattaacgtggttttcactaatgaattggagaaaagaattgatatttcattcccttgtagcacctagtacacaactaggtctttggtgattaataaagaaataaatacatccgtgaatatgaaattaataggaagagagtaaagttgtactggacttttgtgggtgtccaagaaaaattaaaaagaccagaagaaagagagtgagaacaaatacacgttgtgaaacacagaacaagagagaacagaaagagagtcaaagaactatgtaaattgaagagactgaaaaatgacatagagtgaagcaatgaattaccaagagtataagagtgtaagagagggatgcagaaagtgtattagaatgatggttgacagataaataaggaggagttggctattttttaccaacacaaagggtgtaatgttataagacaatataggaatgattttgtaaaagtaataattgaaatagtcattgcgtcttcaggagtaggtagtaggtatgattagggaagggcacgcagaaggcttttaagatttaaacaatcttttgttaaaatattcaacaatattttaaaggaaaaatttttctcagagtaaaaagaatataggaggaaggaaacgaaaaaagagacaaatataaacaggttgaacaaataaaaagatgagatggggcttttaaacacacaaaaaagagacactgcaatgggtagatgctgccaacctatagcctctccagccacctccccatcaacttgcccagttcctgcctctcaactgccagagtggctgccaccgtccacccatatctgagttggccctgtgtgctgaaactctcttcaccttctcaaaaacacagtcccctcctccaggaagcattccctgattcactcaaccaccctactcattttctttacagatctatctctcacctctagccccctaccccaatatttttgccttatttgcctgcaatgtttcaagttttctgctgatgttgaatgtactacccagggtttttcaaagccatgagactactctttcttccagcccataagctcctccgccttgaatgaccacattgttcaataatttgaagtagactccttacttcagtgacttaggataggctactaaagaggataaagtcagacctgacatctaagtacaatatgtgactctcaactggatcctacgtggaaaaaaaaaaatcctacaaagaacattattgggacatagagaaaataagaatatggactgtgtgttacataacaatactgtatcaattttaagtttattgaatttaattgctgtacagtgttaattaagatcatcttgttgtagaatatgaatactaagacaataaggagaaagaggcatgatgtccacaagttattcccaagtgactcagagtaaaaatgaaaatacataaacatattgagtataatgatagtgaaaatgagtaaaaatactaaaaattgatgaatttgataaaggttatatagaagttcttggaactacacttgcaacttttctgtaagtttcaacttatttcaaaatcaaaggtttttaattgcatgtgaataaaattaaccgagcattttcaaaagcaaaattctacttacatgtcccaaactcaacatggtatgtttttactactatattttatcttacatgaaaaggagaggatattgaaatctatttcagctttctaacaccaaacatcaattcttcaggatttttttgcagttacagaaccagaaaataatctttctgactgacattatattttttcttatttttacatattacacataatggaaaatttaggcaggacatttcatttgcaggagaaatgtttgttcttagtttaataagtcataattttttttgaaagacctaaatcacctgactgatctttctagcagttgagtcatttcacatacagaagaaatctccacagtccacatttctatcactggtcaaatctcttgcaaaagtgtaaagtagatagaatgtgaatgatttgagaaaatttatgcccaccactagaaaacatgatgaattctctagtaatgtttacaattaggaaactcactgaacacacatttctttgtatttccttccacacataacaaagggaaaattcagtagtagcatagcgatcagaacataataggtacttaataaatttttgcaaaattaataaaaactaactagttagctgatctatgcttcacatcagacgttttgcattcaaccaggaagtcagaggcaccagtgtgaggctcaatccgttgttgagcacattaatggtttcctcactcccactagacaatgtttgatcagaaggaacaggggatgagaaggagctgcttgatggtgatgagactgggaaaggaacgctgggcgagcagagacaaaagagaaacactcacctactgggacctcacaaacacccaggctgagttttaataagacaggttgaatcacactggggtgacagcctcatccttccagatacagagaggaacaggccatggttaaccaaagctccgcaccaggctttctccttctgggcttctctgaacacccagcactggaaaggactctctttgtagttgtcttcacttcctacctcctaaccccggtggactcatcatcctgctgtctgtgctggaccccaggctccactctccaatgtactttttcctctccaacctctccttcttggacctctgtttcaccataagttgtgtccccgggatgctggtcaacctctgggagccaaagaagaccatcatcttactgggctgctctgtccagttcttcatcttcctgtccctggggaccactgagtgcatcctcctgacggtgatggcctttgaccgctacatggctatcttcaagcccctgcgccatgccaccatcgtccacctctgcctgtgctggcagctggcatctgtggcctgggtcattgggctggtagagtcagtggtccagacaccatccaccctgcgcctgcctttctgcccccatcagcaggtggatgattttgtctgtgaggtcccagctctaattcgactctcctgtgaagacacctcctacaatgagatccagatggctgttgccagtgtcttcatcttggctgtgcctcagcctcatccttgtctcttatggagccattgcctgggcagtgctaaggactaactgcaaaagggcagaggaaagcttttgggacctgctcctcccatctcactgtggtcaccctcttctacagctcagtcattgctgtctacctccagcccaaaaatccctatgcccaagagaggggcaagttctttggtctcttctatgcagtgggcactccttcacttaaccctctcatatacaccctgaggaacaaggaggtaaccagggcattcaggagattgctggcgaaggaaatggggctcatacaaagttgagggagagctgtttaatgtgctttctaaattaagaagaaattatttatccttttgtgaacaagtttgagctcccaagtatactacctttcatacacccatcacagtgtttacaatgggtcacagtatatgagtgtgtgtgagagagagaaagagacagagaaagactaagagtcaggtaagaggaggtaggtatctttaattaacatctaaagctcaaaaagattatcatacctgcccatttttaatatttaatttctatatttttattttcttttcaatttggtttttaactctcttctcccctacaggttctccaaatgcaccatgcctatttctggttatgtaacccctctccgattgttacattatcatcatcattttaccatcacttgtgattcttttttttttttttttttttttttgagatggagtctcactctgtcgcccaggctggagtgcagtggtgcgatcttggctccctgcaacctccgcctcctgggttcaagtgattcttctgccccagcttcctgagtagctgggactacaggcacatgccaccatgcccagctaattttttatttttagtagagacggggtttcaccatgttggccaggctggtctcgaactcctgacctcaggtgatccacccgcctcggcctcccaaagtgctgggattataggagtgagccacatcacccagccacttctgattctgacaatgtcttctttcctttgtcatcaggatggttcatctccacttgcttgaggtggactgacaggaagctgacactcagagaatttagtaatttcacccaagaacacacagcaatttgttagacctaaattgagatgcatatctgttaacttaccaagtgcatgctgttggttttacaccattataaatataccaacatcattaggatttatacccaaatgggttatcaggcagaaaactctatttttccagtcctagtaagttttctgatcatccagctttccagggatcacaacactaatctcctgccaaatcctgaaaatgtgctcccattcctggagatgattttcctttacctcttctcaacctctgcatgacagtgaccatgaggagttgtgagtctgctcttcagtggctacacagtgctaacagctgtcctgcatccattttctagtgcagttctgaaattctgaccaacctctactagccaggcacaaacatgaaatccaattgtaagtaataaagtgctgcaatggagcctggatggagcaagggcctcagaaaaaagggagcagcagtgtaagccccaacttctatgaaatcttatttcctttttcaagttgatctacattcattacattctcaaagcctcacatgaatggaatggagagtgtgatggaaaaatctgtttagaactgaaccattctctcctctttcctgtcaggaaagaggttatgctgtgataacaataccaatcctcagtgacttgaaacagcataggtttatttcttgctgctgctgcatgcccattgtcatccaaccagaggttctgccttgtcatcttcacccaaagatgtggactgacagaacacccaccatctcaaacactcctaggtgctgggaaaggaggaaataataagcatgacaaatggcaaactagcacttagtttccaatcggaagtggcataacactttgactcattggtcatttgccaaagcaaatctcatggctacatataacttcaaggtgaggggaaataaaccaatcatgtggcaggaaagggaaccagaaatatttggtggatgatatgaatgactactaactggctctttgcctccagtcttgaccgattgaaattgattatccatgttgaaccagagtaatcattccaaaatacaaatttgaatatgttactcccttagccaaaaataatatatagaatccccctgcaataaaatgtggagcccaaactcctagatcgggttcctgttttccagactttaccatccccacctcctaaggctcaaccacctagaatcctgcaagttcacacaactacctgcaagtgcaagtgtatgaaccacaccaggctctctgccacctttagcctttgaacgtgctcctccctctctttggaagactctcccctccagctcctctctaccaccaacaaaaagcacttcccatgaagtaacaggatctttttaattgtctacctctcaaagtacacagtaaggaaagtgagggtcagggttttggctcacttatccttatactcttagtgcctggcatagtatctggcacagtaggtatgtaatgaatatttattacagtcacccctcagtatccccagggaattagttccaggacacccctcagataccaaaatctgcagatgctgaagtcccaaagttgaccttgcagaactcacaaatacaaaaagtcggttctcacatccatgagtttagcatcctgagaatattgtattttcaattcatgtttgcttgtggatgcagaacctgtgggaatggaggatagactatatttacagaaagaaatcctagggcctgcgtcctcacgaaagcattggcctccagcgtgggctaacagcagagcagggcggagctggcccatggttgcagacctctgtgccagcctcccctagacaagagcgccgtgtcgaggagaagaaatcggctcaagctctgggcccatgatgcctgctccttccaaagactgtggcagattacgccaactgggatccggcggtcgcaaggtctagaggagtcaagaaagccatcaccaacgtcgttcagcaggaagtaaaatccctttgtgtcttggaagcctcccaggttcctgcagaagaagctgtttctggagctagtgagccctatgacatcatcgacagcagtaacttgaagaagagcagacatggaagagaaatctgcttttcactttatatttttgcctgtcttttaaatgttacagctgtgtgtgctttacatattcaaaataaattgtgtgtatgtgtgtgtgtgtgtgtaaattttaagcagttaataggttcaaggcagaagtggctacaagtttatgccccagtaagaatcagttccagtgctcttcattaattgccaggcaaaatagccatagtaatgtagtaactagaataaaatttaaattaggttagttataaacaccctatccattatcgactcccaaagctgcttcatccatgaatatttaatatgccacaaaactatcagagattgctaatatatcccataatataatatgaaaccaaaagatttttcaaaaagctaaacttgggagagactcatagcaaaatgacatgtaattctgaggtcatcactgagtatggtacttgagtctatcgccacatgtgaaaagcatctgaatataatccaaaaagctattgcagtcatgggctgcagaataatgcggtggccaagaggctgtaatattgtgatataataagatatacatatttggcctttgatcccagttcctggcacagagttcctaaggcccttgtaattccctgagcaataggggtgctaggagagtcttttgttctaatatttggtctttgaccaaatatgtcagttcctaacattgagctctaatcccttggaatttcctgggtaacaggagcatcttttgttctaatgaggtgaccccttgggggacccctgaatggggactctgactagaaggaccaagccatgattagaagtttgaaactttcagctctaccctcatcttccagaaaatcgagagtggctagacattgagttaataatcaactatatctatttgatgaagcctccacaaaaatccctgaactacagagctccgagaacttccaggctggtgcacacacagaaatgctgagagggcagcatgccccagaagctctgtaacccttcccacacaccttttcctgtacatctcttctattttgttgttcatttgtatcctttggaatatcctctataataaactggtaaattgaactaaagagctttcatgtattctgtgaactgctctaataaatcatcaaacccaaggaggggattgtgggaacccccagtagggttcccagtaggtcagaagttccagaagcttggacttgtgattggcatctgaagtggggagcagccttataggatcctttaacctgtgggatctcactgtatctccaggtgaataatgtcagaagtgaattgaattgaattataggacaccaagttggtgtccactgaagaatgtattggtcagtctggaagaaaaaccaacatgttggccgggcgtggtggctcagccctgtaatcccagcactttgggaggctgaggcgggcggatcacaaggtcaggagatcaagaccatcctggctaacaaggtgaaaccccgtctctactaaaaatacaaaaaatcagccaggcatggtggcagatgcctgtagtcccagctactcgggaggctgaggcaggagaatggcatgaacccaggaggcagagcttgcagtgagccgagatcgcgctactgcactccaacctgggcaacagagcaagacttccatctcaaaaaataataaaataaaacaaaacaaaataaaataaaataaaaacgaacatgttttggtgactagaagtgttgaatgttgagaatatagtaggagaaaatggtcagtttgggggttttctacaaatacacagagccctttcgcattgcgcagcatccaatttgaatcctggacctgcaaactcatgcccaggatatagtgccatatcaagggcagcatttgcatgtttctggcaggccggacgttcagtagctgcaggagttagatcagtgttggtgagtgaaagccatgctgttgaacacatacagacctgcatcctgccaccatagttactgccttcataagtccatttttaccagcactagggtggcctgtggagaagactgcttagtgtgaactggcctatagtcactgtttacttggtttagaagaggtttagagcctcttctattgtggatgctttctagtgggcattagcatgtaacacaaagatattcacaattttcccaatttcataaataaaaagatttcccattttcataaacctatccaagtgcctcttcctcaaatttcattgttcttcatcttctaaacctcctccttccaagcacttgaccaaccaaccaagccatttgccactgcccatgtattcacaaatattcttccattaggccattattctttctacacaaaatagataatcaggtgcactactcaaagctttgcccattgggaagatttacaatttctactgtcttccagaactactcttgagtgtggctataatgcagcagcagtccattttcagctcacaccaatgtgttgagcagatacatccatgaaccaaggtcatcttatttttcctccattaaccaatcataaagtacccctccccccccatgacagattaaagatggctgcaaactatcggacaatcatcccatcaggagggctatctatttcccctccccttgaatctgtgctagtctatgactgttttgacaaaaacagcgtggcagaagtgacaccatgccagctctggggccagcctgtaagagaactggctgttcctccttgctatcctggagtcctgaatttccaagtaaaaagtctatcatgctgggcagaccatgtagaaaggccctgagatagcatgaagacagagaaaatgagcccaaacttacagtgaacccaccaaggtgccaggcatgtgagtgaagctgtctcggaccctctagagcagtccatctgccagctgaatacttccaagggatcccagctgatgcaacatggaatataaggaaacccagccaatttcgttccaaattcttggcccacaacatgtgagatacaataaggtttgtgttcatttaagccattaaatttggggagactttgttatgcagcaataaataactagaacactcccatgagccactggtatgagcaagttgggaagtaccaaggccacagcgtggaggacatgggaatctgggccccccacttcagcaccttgcatttaccctccagttctgcccatgactgatgcaggatatacgacttctctcttacaactgatgatgttgcaaccactagacctcatcacttgattgatttgacaggacccagctcatgatggacagttgtagcctaatagccatttgatgtctcatgatcaggagctctgtctctagtaaggcccaagagcaagctaggacttgtttcctaatggggtttactttcctgcagcagacagcatagatttgatgaagaaccccagggatctatgttgtgattttcctttcaaggcttgcccaaaatgccacactgtatcttttcccaccactgatacctttagtgccccagagtctattgagtcacatgaccaaagcactaccacacggctgatatgacagcttagaacagctgcggaccccaggtctgctctgggcttcagtcagtcgctagtaaactgttccatgtggtattcccatgagtgtggaatatgtttcctctagatcctaaataggacaaccaagcattctctaccctggagaagaggaaggagaagaccaagattcactgctggaagaagaaaacagcctatgaggctacagaaacaggcagaaaagaacgtggagaagaaaactgacaaatacacacagttctcctcaagacctatggactcctggtctgagcctaataaagactgtttattccaaaaaacacctctgtattataaattcttctgtgtaatagtgtgttactgtgcatctctttccaattctgcattactggtgttaagtgtgaaatgcaataatgtgttcttactttagagggatgtcctggcacaaagtctaaaaacttcaaagatgtggaggatgctgaatcttcacagggtgtatttcccactctctggagtgcatttgtcttacgagtgccgccaatatgcttgccctcatggctcattctgtttggttaataagatattgttgatacagtggaacgatgtcatgttttgtggaatgtccagaaggtccacgtccagtggtgtgctgcatgcagctagctcatactgcctcatggagccaactgttaaattttcagaaattgtgcaaaccagttgttaaacatgactattattttaaaataagttattttaaggcataggtaacaaatccctaagctcttcattttctaggtatttaactatcttatcatattttccatactcttctggttatttatatctgttatgtctatataataaagatactaaataatgttgtctgtataataaaaatattctggattggtgatgagcaacaatcaccatctttcgtttgagtctcatggccatgagaccaaccccatgcactgctctgagacctgccagccactcccattcctggggtgcggtcctcctggttcagaagtgattttccattaggctatcttttaatttaaacatgaactctgctgtgcccatcactgtctgtgtgcagtcacaggtagagggagagccttcagatggcaccctcagcacttcccaaccctttccttccctctaggccagaaggtggtggtcgtacaatgcgagagcatcaacatttctggcaagttctacagaaacaagttgaagtacctgggctttctccgcaagcggatgaacaccttctggaggccctgccatttctcggccctagccgcatcttctggtggatggtgcaaggcccactgccccacaagactcaccaaggccaggccgccctcaaccacctcaaggtgtctgacggcattccaccgccccatgacaagaaaaagctttggtggttcctgctgccctcaagcttgtgtgtctgaagcctacaagaaaatttgtccgcctggacaccgagcttatgaagttagctggaagtaccaggcagtgacagccaccctgaagaagaggaaggagaaggccaagatccactaccagaagaagaaacagcttatgaggctacagaaataggtggaaaagaacatgaaaaagaaaactgacaaatacacacaggtctcctcaagatccatggacttctggtctgagcctaataaagactgtttgtttattcctcaaaaacaaacaaacaaaaaaaaaccctctgtattataaattattctgtgtaatggtgtgttaccatacatttctctacaactctgcattttcagtaatctcacattgacagtttaaaattggccatggtgagaatatttacactgcagaaatcagcaaatgatgtaaatcaaggcttttttgcctggacttgcagcacatccatgtcccattggaccctattatgacgggagagttttaacatggtactgaagcaaaaatgtaaatgtaaatgtacacttatatccatacctgtaaattcaaactgcctttggtctttcttcctgatagtatttgaaaagaacacattcagccaggcacggtggctcacgtctgtaatcccagcattttgggaggctgaggcaggcagatcacgaggtcaggagttaaagaccagtctgatcaatatggtgaaaccctgtctctactaaaaatacaaaaattagccaggcgtggtggcattcgcctgtagtcccagctactcaggaggctgaggcaggagaatcgctcgaacccgggagggggaggttgcagtgagccaagatcatgccattgcactccagcctgggcaacagtgagattccatctcaaaaagaaaagaaaagaacacattattcaccagattaatagccatataacatggacctgaaaccgtgctaatcaggcacaacagctgtaattacagctatttcttggttgagtttgtgctagtctggtcatctttcaagttgcatctgatatttgtagtgaccagactggtgaattaaatgtgaaatatgatagaaacaaacccccgcaccctttaaaggtggcctcaatcagccatttcccttgaattgtgatattgttcttgattcactgtctttgcggtaagaggtgtagattcagggcttccacttcaatctgtagctcgtactccacagactaaagaactatgtggggattctgccaatggccaagcatgtgcattccagttacagatttagagactgcagaaatgactactgggtagatccatggacctagtacatgccatttattagctgatctcataggctccctttctaatggaagagaagcataacgattcagttatatgaagattggctaaatgttctaagtactctccaaacccagagctttataattctctgttactacagtgtgctccatctcagaataactaaatagaaaaggaggaagctgagaactttaaaaactgaggtcctgaatagatgaatcataagcctgagaggactatcaggatgcccgggactcactggaggtgggagtagagacactgtcctttttcttcctgttgacagaaagaagcaatgagtgacctcttttacctaccacagtgatgactattgttggcatatttcctatagatattcccctgccccttttaccataatttgtggctaatgaattgtctgtgggctatggaccctagagtctcagcagaattaatgagctctttccctccgtgggatccctctaccaccataccatgtcaacatttctacctccaatgccactaaaacagaggcacacctctgcctagactgagggggaaaattgttggcaaagaactcaatggcaaagaactcgatggcaaagaactcgatggcaaagaactcaatggcaaagttctgaccttggcttcatcctccctgcagagatttggtgggctttggttggtgcaaaccctctacagttagcagatttgggttcaaacatcagctctggtgcttactaactatactgccttgggaaagttatttatatttctttgtttcaacttcttcatattggaaggaagagaataatatgtagagttgtgaaggataatcagcagtgtagagtaaatgtttaataaacaacttggttggtggcagatggggagagccctaatttgtagtgtttgccaattttcatagtgtaaatattcctgccatggctgtctcaagccactgatggtttaataactgtctcacaaaattcctaaaaatttactaatcaagagataatctgagccagctccagctcatcacacacatgtgtgcttagaaaagtgccagatggtcagcattagcaatccctattgtgaccagagatgcagttgcccattcaaggatgcccattcctttttatttttttgtttcttcctgatgtacaagtggaggctgggcaccagttaagagctctgtcatggggaattgctggtaccagaagagatttttatttgattgaaggtaagcagaacctttgctctttggctgtgagatatcagtttccgcctatcctcaacactggaggaccagatttggagttaaacttactctaaaatcctagtcctagcacttattgactaggtaaccttctacaagtctcttgtcccgtctgtgactgttcactttttggtaaaattgggataattttatctctttgtagggtcactgtgagaaccagatgttcagggagttgtttatcaccatgctttgatggtagctactaacagcaagggtagctcatggtcactagactatcataaacccctttcaaaggacctcccaactccttccccagctcctaacacaatgctggcactttggggctcaagaaatgaataaatgcgtagaccaatgcatgaatatttcagaaggaaaaggagtaggagaaaaataatgagagtggaaaagacagagaacaaagagggaaagggaaacagtcactaagaaaggtgtaatctaaagagattcagcgatatagcagagaaaggaaaggaatgaaatgccaagataatgacaaagttagaaatgtagaaaattaattaggatgacacatgatggataaataagaaacaattggctattgtttaaggttacatgcaaagaattttatattacaaagaaaacaaaggagggggcggcagccaatgagcatgaggtttcttttgggagtaatgaaatattctggaagtaaatggtgttggttgcacaacttgtgaatatactttaaaccactaaattacacacttcaaaagggcgaattttatggtacgttaaatacatctcaaaaaatgaaagcgaaggcataattaaaaatttagaggccaggcacagtgactcatgcctgtaatcccagcactttgggaggccgaggcaggcagatcacctgaggtcaggagtctgagaccagcctggccaacatggcgaaaccccgtctctactaaaaatacaaaaattagctaggcatggtcttgagtgcctgtaatccccgctacttgggaggctgaggcaggagaatagcttgagcccaggaggtggaagttgcagtgagcagagatcgtgccattgcactccagcctgggctataaaacgtgactctaaaaaaaaaaaaaaaaaaaaaaaattagaatggtggtgacatcttgaggggtgacaaattgagaaaattgagagatcagggaggggcacacagaagcttctaagatacttgaaacatttgctcagttccttaacctagttgtttaaatatgtaacaatattttgaaaattaaaaatatattttaagtgagaaaagaataatgggaaaaacaggaagaagacagagacaatggcagagagtcctggcaaaaagggagatgtgatagagcttaatacaagatggggaccctgtaagaggaagacattcctgccatcctctgagctccatggcacgtttgtggtgtggcccaccatctcatctcctcccctcatggccttcctaaggtcctgtaagaccctgagtccttgtctctgacctgccagagtggcttcagtctcccacccccagccctcaactgaccttctatgccccaatacatctctattttaaggaaaaagtccagtcacctcctctaggaagctttccctgatatacccaaccaaattggtcagtcatcctacagaacctttactctcattcacccagtacattggtgttactggcctttaaattttggactctctttttggtggtgtctgaaagactacaagatttagggagagtgattcttggagtctttcgataatgttcctgtgaaccctggtgattttaacatgcttgtggccactcttgcctcctacttgtaagctactcatggcaaggacgaagcatgtggaccaatttccacccctccctgaaagtcagttggttcagaaacttaggttgctaaaaaggccagggcaaccaacctgatctctctataagtagggatatcttaaaacaaaacaaaatctctctcatagataaaacactgtctctgataagcttacttgcaaatgaaaaaatacaaaataaatggaatgtacagagttctataaaattcattcaaccaatagagcaataattgagcctacagagacaacttatcagaaaattcattcaatataccttacgagatcatccaatagataagagacaactctagaacagcattcagaacatagtggcactcaataaatttcccctgaatgaatgaattaatgaattagtgcatattttaatcagcctcctttgccctcacccaggaagtcagaggcaccagtgtgagtatccatctgctgtccagtacattcatggattcctcactctcactagacaatgtttgaccaggaagaacagggaatgagaaggagctgctggatggtgatgagccttggaaagggaggctgggcgagcagagacagaagagaaacacctacctgctgtgacctcacaaacacccaggctgagttttgataagacaggttgaatcacactggggtgacagcctcatccctccaggtacaaacaagaacaggccatggttaaccaaagctccacaccgggcttcctccttctgggcttctctgaacacccagggctggaaaggactctcttcgtggttgtcttcacttcctacctcctaaccctagtgggcaacacactcatcatcctgctgtctgcgctggaccccaagctccactctccaatgtactttttcctctccaacctctccttcttggacctctgtttcaccacgagttgtgttccccaaatgctggtcaacctctggggcccaaagaagaccatcagcttcctggactgctctgtccagatcttcatcttcctgtccctggggacaactgagtgcatcctcttgacagtgatggcttttgatcgctacgtggctgtctgccagcccctccactatgccaccatcatccacccccgcctgtgctggcagctggcatctgtggcctgggtcattgggctagtggagtcagtggtccagacaccatccaccctgcacctgcccttctgccccgatcggcaggtggatgattttgtctgtgaggtcccagctctaattcgactctcctgtgaagacacctcctacaatgagatccaggtggctgttgccagtgtcttcatcttggttgtgcctctcagcctcatccttgtctcttacggagccattacctgggcagtgctgaggattaactctgcaaaagggcggaggaaagcttttgggacctgctcctcccatctcactgtggtcaccctcttctacagctcagtcattgctgtctacctccagcccaaaaatccctatgcccaagagaggggcaagttctttggtctcttctatgcagtgggcactccttcacttaaccctctcatatacaccctgaggaacaaggaggtaaccagggcattcaggagattgctggggaaggaaatggggctcacacaaagctgagggagagctgcttaatgtgctttaaaagagaggagattctatgtgcttttatcagaaagtttgagttccctgcccctctgccttcttcacacccattacattgtgggaatggatgaaagccacatgtctgtgtgtgtgcatgtatgtgtgcaagagacagcgactgaaatgtagtaaagggaggtatctttatgcgaaaaattataggcatcaagtatattttatatttttttctactttaagtcttcgcctccatagtcatgttcctacctttatcacttccatttttaattcccctcccttgccatatccccactattccttcacctccaattctaattcctaccatatcttctttgcttctccctcatgtttttcccacttcactatatgtctgttttgtattctcattctattttattcctcaaataacagcaaaagagaaggggaagctgaagcccagctaagttcggaaactcacccaagaacacacagtgtccacagcatcagaactaaaatccaggccccataattttcagtcaggcaactctcaaatacacactgttgctttcacaccataatcaaatatcccagtatttcaggcttgagccttacaaaggaaacttagcttcttcagtcctatttcttctcttacaatgcccacaaatcgcaggtaaaggagcagccaaaaagacacaaaaatatcttcatgtttaggctggcacattgtggaccttggtgtcatctaccggccaaatatggtattgcatgtgacatcccagacttctgctccagggtcatccgaactgtactttgctcaaagacatagatatggttatgatactataagcatttatgtaattgttatgttaacccaagtaacacttaaagtacagatgctccttgacttataatgatgttacctcccaaaaaacctatcatatactgaaaatattgtaagttgaatatgcatttcatacacctaacctaccaaacatcatagcttagcctagcctaccttaaacatactcagaacacttacattagcctacagttcagcaaaatcctcaatacaaagtctattttataataaagttttgaatatctcatgtaatttactgaatactgtactaaaagtgaaaaaacagaatggttatattggtactcaaagtacggtttctactgaatgtatctcttttgcattattataaagtcaaaaaatggtcaaagtcaggaaccccctgcaatttacacatattgacttatttaacccttataacaacactatgaagcagataatattattatcctttttcagaggtaaaaactaaaacacagaatttatgttaccacttgcaaatgtgcaagacaggatttgaacccaggaaaactggctccagactccttgctcttaaccttgccttttggtaaaaataatgcctcccaggcccaggtgaaaagcttcaacttctcaacaagctttgaggaaatcatttcaatctaaaactatatctaaatgatcccccagccgaaggggtttcacttccttaaaataagagtttttcaaatacttcaaagcataagaaacaacagaacaataaaacttttggaaaaagttgtgttacagttcattgtgtgtgtgtttctggcttagttcacccactagatttcaggctctcagaaggcaaggaccagaattttgcataaaattggcacccagttttataaatgtataagtgaatgaatgaatgaatgaatgaatcttactctccaaagagaatatataaaaggttctggggttccaatcccacatacgctgtctcccagcttttccctggcaagggcagcaataccaaattcccttttgagtacacgccgataaaataagaaaaaggaaaatcttagttttatttctagttccaacataaaatgattttgattcaacatttatcctggcatcagcacagaacagcaacattaattctattataatcctaatctttatcctagccatccttgtgttaatcttattgtctccttgacctcgttattagagcatattctaatcttaatgtagagcccccattttatatttaataatcctaatcagtcaggcgcagtggctcacacctataatcccagcactttaggaggccaaggcgggcggatcacgaggtcaggagttcgagaccagcctgaccaacatggtgaaaccctgtctctactaaaaatacaaaaaaaaaactagcctggcgtggtggcgtgctcctgtaatcccagctacttaggaggctaaggcaggagaacctgggaggcggaggttgcagtgagccgagatcatgccactgcactccagccagggcgacacagtgagactctatctcaaataatcataatcataatcataatctcagccctacaggtaaggctaagcttaattccacttttcaaatcactgtagtaagacctttttttcatgaccccctctatctgctttctcttactggcacctagaaatgtctacacttttctcctgtttatcatctccctacagccagaggctataatgtttgtatacagtaaaatcgtttctagactgactctaggggaaatgcaacagagaattaaataaagcagtctaaaagaatctgctttgttgaataaatggtttaacataggacttaggactaacatctcttatcctaaattcattgtttccatgtgacagtcatctattggatactctgtgagaaaatccaatataaagttactcagtcacaacccccacaatgtccagtgaaaatagggatggtcaggcacatagtgccagcatacatgacagttacacaactgaattggagcaaataagagtctacaggaatacagaattaaagaataatgtgtgtgagtgcttggagcggcagtgatcatggaagcctcttagaggtttgaaccacagaagagtaaacaaaataagaagtatttgctgactgtgtagaaatgagatgatgcaaagaccccctttttaggggcttggggactcctaagcatggaaataaagcaaaatcctgtgtttcttcaaggaaaattccaggcacctagctggctctgagaaataagtagcaacttgaaaagcaacaaggtaatagcagcctaagacaatagccaaggaagttaagcgttctgaataggtttgctttcctcatagaaactaaagataacctcttaacatatgtctctgcgttgtctctcagaaactcggaaccccaccaaatgaatctgctggcatagacctcagaggacaggaaaatgactgaactttataaccatcatcctttgttctaagtttcttcctgaggagcttggagaaagtaacaccttctaggcagttaacatttttctactggaccccaaatttttaaacaaaggttctcttccttaactaattgcaaatttggggtttttttgtttttgtttgagacaggcttttgctctgttacttaggccagaatgcagttgcagtcgtagctcactgcagcttaaccacccaggctcaagcaattctcctgcctcagcctctaattaaaaaaaattttgtgtgtgtagatacagagtcttgttatgtttcgcaggctggtctcaaactcttggccttaagggatcctctctccttggcctcccaaagtgctgggattacaagcatgacccacacctggccagaaaaatctttgaatctacctataacctgtaagtccctgattcaagatatcccacccttttagatcaaaaccaatgtggaggccgggcacggtggctcacggctgtaatcccagccctttgggaagcaatgtgggcggatcatgaggtcagatcaagaccatcctggctaacacggtgaaaccccatctctacaaaaaatacaaaaaaaaaaattagccaggcgtggtggtgggtgcctatagtcctagctactcgggaggctgaggcaggagaatggcatgatcctgggaggcagagcttgcagtgagccaagatcacacagctgcactccagcctgggcaaccgagcaagactccatctcaaaaaaaaatgtggaacctctatgcactgatttccaatgttccttgtagcttctgcttttctgaaatttacccctgcctttttttgtttcctgttttttgagacagggtcttgccgtgttgtccaggctggagtgcagtggcataatcatggctcagtgcagcctcaacctcctggattcaagggatcctctcacctcagccttctgagtggctgggagtacaggcatatgccaccatatttggctaatttttttatttcttgtagagttggggtctcactttgttgcccaggctgttcttgaactcctaggttcaagtgatcttcctgcctcagcctctcaaagtgctgggattacaggtgtgagccactgcacactgccttacccctgcctttaaaaacccatgttacaatagttagtcagacacgagcagggcaggaaagggcctccttccccaccaggaatgtcaggcaaccatcaggtgataggcggttgttaagctgtctctctaaaataatcattggtcacagcctgtgccagggaaaaacagtctcccaataaatagaaaaacctgaaactaagatctcaggagttgggcaagtgggctcatgcatgggcactaagggagaaatgacagcatttaactggtttataaccttataggaacactccctggtaagggaagaatgcctcaagtcagcatgcatactactccagtaaacataccgtgcatgcagcccctcccaagcactagcaggccactgtacatgcagacagcccaccccaagggaagattcaggggagaagggaccctggaaccctgccaacatataaaaccctaagtcaaggtcaaaaccacgcacttgatctctcaagttgcctgcttggcccccttccaagttggctttactttattttgttcctgctgtaaagctttttaataaacttttactcctgttctaaaatttgcttcggtctcttactctgctttatgcccctcagtcagattctttcttctgaggaggcaaaaattgaggttgctgcagacctgtacagattcgcagctgctaacatattttcatgccatgtaactctgatacattctgccgctaatacccttgcctgcaagacatcagggaggccaggacttgagtgtttagctgcctggtcctccctgcgtagtgtcctgcaacaaatgcctttctttctattggtgcaatccttggtgtaagtatctggttttattgcaccaggcaagcagaccccagtttggttctataacagaaaaggctaaagacaaaaataagcatgttgtgcattaagatagggagatgtgggggaaggagttacaccgaggagcaaaatgattaagcaggaaggtagagattatttcagaaagatacagaagctactgaattgaatacaaccagaaaaaaaaaaaaaaaaaaggatcccttacagatgtttcaaacctacatgatttaggtctcctgagggcaggcacttaactattcattctaacatgacatgtgagttggaagccttaaaggaacattattcaagaacctcgtctctactaaaaatatgaagtctctaataaaaattaaaaagtctctactaaaaatacaaataataataataataataatagccagggctggtggcaggtgcctgtaaaccccttgcttgggaagctgaggtaggagaaccacttgaacccaggaggcggaggtttcggtgaaccgagatcacgccactgcattccagcctgggagttagagtgagactccatctcaaaaaaataataataaaataaaataaacctcaaacgtctgaagggctcaccgaatcatgaatagatgcttatgtgtagggcccagccctgtcttatccttctatctcccagggaaggggaaaccttctggctcctcctatgcagaattaatcgctcacccttgaagggtaccagtatatgccacctcaaactatctttagcatgtggattattttgagctaacaattgaaaatcatcagactagtgaatgctgtaaaacaggatacaagttttccttttgtaaataaattcacatctgtaaaggtacaactcttactaatggagaagacatcagtttaaatctacataacaaaccttttctatctgtaaaggtacaactctactaatggagaagacagtttaaatccacataacaaaccttactaaaccactttgttccatattttcctggtcactttcccataacttgcctgcccatctaccactcacccagaagccccaaactccttttcctttacctagccaagatgttatacagttgctaagaacaacacgatttgaactccatggattcactcacacatgatttttttcagtaagtatattgaaaatttttggagatttgtgacaatttgaaaaaactcacaaaccacatagcttagaagcactggaaaaattaatgggccaggtgctgtggcacatgcctgtaatctcagaactttgggaggccaagatggatgcattgcttgagctcaggagttggagaccagcctgggtaacatggggaaaccccatctctgcaaaaaaaaaaaaaattaactgggcatggtggcacgcacctgtagtcccagttactagggaggctgaggtgggaggatctcttgagcccaggtggttgaggctgcagtgagctgtgattgcaccacctcactccagcctcaattaaaaaaataaatagggctgggcacggtggctcacgcctgtaatcccagcactttgggaggccgaggcaggtgaatcacgaggtcaggcaatcgagaccatcctggctaacacggtgaaaccccgtctctacttaaaaaatacaaaaaattagccaggcgtggtggcacacacctgtgatctcagctacttgggaggctgaggcaggagaaacgcttaaactcaggaggcggaggttgcagtgagccgagatggtgccactgcactccaacctgggcgacaaagactccatctcaaataaataaataaataaataagagaaaagtatgtcatgtgtaaaccaaaaataaaattctaagccccctaactgacaggaagaaaggtaagacatgccaatgataccctccttcctctggagtttagggacaactgaccagcattaacattacaatagagatcataagactgacaaaagattctctgtagcaataaaatagtcaactccaacctgactctgatacagcatcacaccacagatagcaggccctgaaggaaatcaaagtattttaccccaaaatatacttatttgacattttgaaatgactctgcaaagccatttcttgtcatggggatttgcattttgtagagaatccccttccccttccaggtctttttctgatccaggagggattttactaatgagtctgacatcttttaaggtgcgataagaaacatttaccatctattctttctgaggcctggaagcttcatctacgtaacaagaatctttgcttccacaaacatctcccccaacgccacctccacgcccccttaactcaagcatttctttctgctgacttcaactctttaggcagggcttaactttttcaaccaattggcaatcagaaaatctgaatccccctatgacctgtgagctcccttgcttcgagatgtcccgcctttctgagctgaaccaatatataccttacatgtattgatttatgtctttgtcagcaacttctggctccctaaaatgtatgaaaccaagctgtaacccaaccaccttgggcacatgttctcaggaactcctcagaatggctcagaataaacctcttcaaatattttacaaattttacttttttcatcaacaaataaatgtataaaatatatgtagatactaccaaaaaatatacacaaatctactataaaaaccaaaaatttggccaggcacttagggaggctaggtgggcagattgcttgaatccaggagttcatgaccaatccgagcaatatggtaaaaccccatctctactaaaaatacaaaaaatttgtccggcatggtggcatgtatctgcagtcccagctacccaggaggctgaggtaggaggatcacctgagcctaggaggttgaggctgaagtgagccaagatcacgccactgcactccagcctgggcaacagagtgagaccatgtctcaaaaaataaataaaatttatcaaaacttacgcacacacttacagaccatacataagccactcaaagtcaagagaaagcttaacaaaagatgcagaattaaatcataacggcataaaattaactgtagtgtatactgttctactgtaatttgatagccacctcctcttactattgcaaagagctcaactgttgcaagtatctgcctaaaatgccaagtgacactaatcatctctgcatgagcagttcatctatccagtaaattgtgtatagcagtaaagagtggtctctcaagattcttgcatatatttcatcatgtctagagcaatactgtgaaccttaaataacaccatagggcccatatgaagtgccaacagtgatgctggaagttctcccaagaagcaaagtcatgactctataaaaagttgaattgcttgatatacaccatagatcaaggtctgttgctggggttgctgccatttcagacagacgattcatcatgtaaatgatgtaaacttaaggcatcaataaatacagtatagtaccctatatgtattttccttacaattttcttgataacatttccttttctctagcttactttattataagaatacatatataagatgtatagcatacaaaatatgtgttgatcaactgtttacactactagtaaggctttcagtcaacagtaagctattagtagctaagtttggagagagtcaacagttatgtgcagattttcgtttgtgtgtggggtcagtaaccctaaaccccaagttgttcaaggggcaactatatgagctccaaattcttttttttttttttttgagtcagagtctcgctctgtcaaccaggatggagtgcaatggcgcgatctctgctcactgcaacctccgcctcccaggttcaagcaattctcctgccttaccctaccgagtagctggaattacaggtgcctgccaccacacccggctaatttttgtatttttagtagagacagggtttcaccatgttgcccaggctggtgtcaaactcttgacctgaagtgatcccccagcttcagcctcccaaagtgctggcattacaggcatgagccaccacacccagccatgagcccaaattctaactgcccctttgcattgttcaccactgggtactcccatgtgtacatgcatgaagcaaatgttaataaacttctatttgtttttctctcattaatctgtcttatgccactctaatttacacagccacggctggagaacctaagacaggaagaggaaaaggattttctttcctacactccctacacacacctggggaatgcactctgcaggccacatgacgttgcttctgcatctgtctccctagctttgctgcatcagtcccagtgtccagcccacacaggcctcagtacgtgtccctatcacagctgctgctggtgctgaactcaccttccaggagagtctccagcatatccttccacactccagggagccatgtaagtggatgccatactggttaaatattttgagtagcatcccatttgagggaagctgtcacttaacatgaacccaccataaggtggctaatgaatagcacctttctgcctgccttcaagtgacagcctcccttaacatgaagcctaccttttggtaagcttcatgtcaagtgatagcttccctcaagggcaaagtcacagaattatctgtttcaaaagcctgagtggataaacaaactgttgcctatccagggtgtcctaaaactaccaaggactgtgggaggagcaattggcaggaccatcttcaacacttcccattttctgctggggtgagatcacagctggcccccaagcatccagaggaatccagggcctggtaagaggctgtatgacagcaaatatacaaggctagggtgctcagctcagagggcggacaaagaacatgttaaagtgaagtgaacactggctttgcagcaggcagaccagatgcagcagactgcttttaccaaagcagcctgcaacacacatttgtcccattccacatgttctctttacagtgtgacttacgctcatcccaccaacaggtgaagtgtttcctctcctgaacctaggcatggccttgtgactgcttggaccagtggaatatctcagaagtgatgctacgtgactttcaaggctttgtcagggaaaaaaaaaatacagcttaaacctggctgactctctacaactgcctccacttgcctttggaactgtcattaggtcatgaggaataccaggccacatggaaaggtcatgtgtaggggtctcagctgacagccaatacctcctttagatgctgagtgaaggatcttttggacaacaaccctcagacttcagatcttccagatgctgtggagcagggtgaaccctccccactgtaccctatctgaatttctagcccacaaaaaccatgatggataataaatgattattgttgtctgaagccatttagggtaacaggttttgtggcaatagataataatatatgcagtttgaatactggctttgctccttagttttgtgaccccagaaaatgaacacacagtccccttgcttttagatttgtccttcacaccagagctaatggctgtgagatgcccaacactcctggttgctctcttaagtgatctcgtttgtttttctgcttactggtcatcttcccacgtcgagaaggtacaacgcttgaaagccatcttactcaccattttgcctcagtgccaaaaaaagcacctgccacagcaactcaccatcaacacttgttgaagatcacctaactaatgtagcagccaagtgcacacaaagtgctctctactggtagacaaccaacaggagggcagggaggcaacaggctaagtcagggaaaagcaggggacatggaagcctgcaggcagtctacattctaggacattccagagttagaaagtgatctgaaccctacccaaaggcaggtctgaaaggcaaagcctgcctcacagtgcacagggagcaagtcctcccagaactgccaagcggtagcctctccacctggcaacacatctcctttgcaccccttggggtacaattatatattaattatatatcattgtgtgtgtgtatatgtatatatgtgtgtgtgtatgtgtgtgtatatctcattgtaattatatataatgtactaataattagtattagtgctaatcaatagcaccattcaccctgaaaagacactttcagaaatgaatacatgaagtctcattgtagataagcattgacagatgaacatttgcaactgatcttaatcatcaggaacattaactgtgaactcaaataagtagttatctcaaaattgtttttcttattagtaggaggcctgtatgaaaaatagtgctcagtcatgttttaaatttggccagtaaaaatcttacaagttctcttctaagtacctttttaatattctcaatctcactccttcccacccctttgcactgggcactctgctagccgcaccgtttggctctcgactcctgcactcctgctagcagagtgtctggcttacctttggccacagtagaacttttcaccctttgtttataatttacagcccacttaagtgcaatgcaagtttgagatgataatttgggtcttttaggttctacccagggctgttctatagctcctgctactgttgtttcttttttttttttctttttttttttttttgagacagtctcactctgtcgcccaggctggagtgcagtggcacaaactcactgcaaccttcatctcctgggttcaagcaattatctgcctcagcctcccgagtagctgagattacaggcacccaccatcacgcccagctaatttttgtatttttagtagagacagggtttcgccatcttggccaggctggtcttgaactcctgacctcgtgatccacccacctcagcctcccaaagtgctgggattacaggcgtgagccaccacacccagcctcctgctgctgttctgatgccaactattcattttccaaactgcaggcttatctactccatagacttcttctcttttcctagcggatatttcactgtgggaagaagagagactcaaattaagtccaactggtccaaggtggataatcacagtggaaagtttttcaagtactggtctaagattcaaccagcccatgctttagtggaagttcagaaattggctcttaacaggtcagtgaatgacagggcccatccaacccttgcagctgtcttacaaaaatctgagaatcactttaaaaatcagtgccaaaataaaagaaaatttgagcttcaaaaaagcactctccaagatgacacaaaaaatgtttaaagtctcaggcaaatgtttttgcccttgtccattcaagattttttttcagtttgatagcaaattatttccaagatgctcagagttcctaaacaaagatgtttaaggttggaagcactcagcagccatctcatccattaccttctagcagtcatcattcttttactcttcttagttcctgggaaggagcgtccctagaggggatgcttaggcacttgctccaggctcccaatacatgcccactactgtcaaggaactcattaaacagcagggacagaggctaacattcacgcaacatataccatggcccaagggccaacctaggcacctgaatgcacaatttataatagtctttgtacccaacctatggaggaatgtattactgttattctcattttcataaatgaggacatggggaatagagactaagaaaatgtttgcatgtggttggatctgataccctggcagtctgactccagagcccacacttttaaccagtagtgtcctcactcactaatctcagacttaatcatgtcctgcttcattctgctaagccctcaatggatcaataaaacacctcttttcaccctccgctttaatgccttttcatgaacttggagtcctctgagcctcccttcttggattgaagcccattctgttcacaggaagactgcaaggtgccgagtcacactgttcactggtttattgagattcggggagatccttccccaagagacaccacagtgtgaaagggacaccacctcccaccccataggtccatctgtctatcccaacagtcaagggtgccttcctttggtcaggattctcatcaactatccactggaagcagctctccaaacctgcccccacttatttttccttaattcccctcaaaaaaacacaaaacaaaagggagcagtcttgggagaagatgattgtgagtgtagactgagggtagtacatgaatgcaatggagatggggggaatctgagcagaaatggagattctgtgacaaggagagggtgtggatggccccaccaaacatgaattggggaaaagtgcataacaatgtgcagggtagggtacatatggctctgtcagaagaataccatgatttaagggaagaaagtacacaaggtacatggagggtacacagggaaagtacatggataaacatggacgtgtgcaaataggaaagacatgactcagcatgctagacaaattgcacatgcctacccaaacacgctcaagggcagacccatgaccatgagaggggcacacgtagctgtgaatgcagggcacccgagagcacatgtgactgaacatgaagaaagcatacgggaaaagcgtgtgtacacatgagcatgttcagtgggcacacgcaggagaggggaggatgcatgtgtgctgagcgtgagtgcacagagcagaggcaaggagcatgtgagccttggcgaaaagaatgagctcccaaaggaagcaaaattcagggggagccacatgtgagaaagtatagaagggcaagtaagatggaaagagattatgacagtggagaaaaggagaggcccctttggggtggaaagagcacttgttgggagacccctgctggacaggaacagagcacaaaggcagaggagctgcaggggttgccgtggtaactagaagagggtgttgcatgggaagagaaagatgcagtgaggctgctgaggaggcagcgtgtgagcagtgagcagcttcaagccaggtacgaactaaattgtgaagaggtgatacaaaattacatgaagcagtaagagagaaaaaggtctgtttcccagaggtatgagagacccaaatcagcccagaactcacagggggacatgtatttacaagagatgagattggatagcatgttcttcccagctggggatggggaccccctgcttcctgagtcccctgcccttcccctctccctttccctccccctactggcctgtcctccctcaccctaccctcacttataaagcaaatgcactcgactcccatcacagctaagccggtcggggggctcagggggtcccctgggcaggcccccagagggttctgggggtgtcggtgggtggcgccgggagcggagctgctgccgagactggagttgatggcgcagttcagagacacgctcctctttctggaggaagaagcacaattgggatagtaggagaagaggaggtgatgaaggagtggggaggagggaaagagaggaagggcacagggaaagagaggaagggcacagaaaaatgtagggggaggacgtagggtaagtggacagaataaattaaaaggagaaatcaaaacagaacaagaaaagccagagaacataaggataccgatagaaaaaatgcgatcagggaaataagagagaatttaaaaacaaaaggaaaaagtggggaaggagagaaaagtcagtgcacagagcttccaataaatcagagagatgtgtcaacccagttggaacatccctctctttggcattgcaccagcccctaatgacagcctggggcacagtgaacgcctgcccaggtcctttatgctggggctgcatgctacacccagctgctgtgagtgttgactactagaggctcacagctgcctctctccagttgtcacctacagccaacagccatcctcttgccttaaggaggctgagtcaaccacatagctcccactccagagcccttccacctgccaggccaacactggattttgcctgagatagaatcttgctcagccctttcccctcccctatgctgctccattcactccttacaggttgtctcctaggaccctccctccatgagccaagaacatctgaccctgtatctcaggcttggcttcagacaacccaagctaagacgcaagcctcctggaccactccaacaccctaccctgacacccacccccgcacctcagcaatgatcttttccagttcacggttctccttctccaacagccgggacttctcctcctcgttgttgttggtcgatgaccctgtcttcatggtgtcctgcgcctccgactgccattcccctcgggtgatcagcctgcgcatctgggggcaaatgtttgggcgtggggtggcccagcaaggactgtactagtgactggctgatggaaggttggaggtggaaggaatgctgataagagttgggcccaaaacaaggggaggagtgagaggagggtgaacggaagggcagaggaactcagtaatataggaaggagggatggagggaacatgggaacaaagagggtgggagaaaagccagatccttaccttgggcacaaagagcacaacaagagtgatataggaggagaaaactatggcaagagaggcaaaggcaaaggctgcatcctgctggctggacagaatcatggtgacaggagcagtgatgaggcacaggacctagagggaaagacacattgagggagtctcaggtctgcaggctcagacaagatccagagtttacttcccatgggagggagtctatgcagacagtttcctggtgaactttccctttgaaaaggatccaaattcaggatcatcctcaaatatagattgagaaaaatctcaaactgtcccaaaccagttttcactcttggttaacccctcccctcaaggcaggaactcccaggatctctatgcacagattccgggtcctccagagtcggtccctggcaggaaatgtcaatagagtccagcccattaaccacagacaagcaatttaacgtctctgtgtttctgtttcctcacctataaagtggggatactaatatctacttcactgggtagttgcaagattaatgatacaatgtctgtagtgagctttgtaaactgtaaagtgctttatagacctgaagaattaacaaactttttaagacttctaagcaaccgatcccagatctagcattgattcttcctagtcctctatatctgggctgctgtggtcagcctacagggtcaatgccatggggtcagtgctcactgccacattgtagatagccatgcccacagcccggtgatcattgatcttctcagtggacacactcttggtctcataagcaaggaagattcccagcagcagcagcagccccttgtaaccatagaaaatgcctaggatggcaggagagagtcacttgagcaacaaggaccacaatgctcctcactcaatccccatcccctctctgcccttcacctactctgaaatggaaagggggccctcctctccaatccaacccctctgacctagcaaacctcaccctgtgtcccctatcccttatgtccacccaacttgcccagaccacatcactttttcctgggattcacacaggaaagcaatggtggcaagctgctgtcagtcaggcaagggcttgttgaatatctagaaataggccagtctgggccacacatgcctcacccttaccctacaggtgggaaggtggctttccaggcagagggtaggtttgcaatttgtgaccatgaatcgaacaatgctaataaggccaagggggatctaaaagataatgtcaagtctggaggtggggttacccccacttgttcctctgctgaacacaagttcttcatctgtgctttctgtgctttgggccctaagctcctcatagcaaaagagcaactctcccctattctcagaaaagattagtgcaataacaaagagtagggtgttcaaactgggttgacaagctctctacctcctcttccaaagacccctctccctccaagccctctacccctgccttccctcctgcctttgtgcatccctgccctcctttgcccacatcccacacaccaagccatgtattcatcttcctggagctgcaatgctccagctggggcagaatagagacgtcaatatcttccttaggttcctccttggcaaatgtctagggcagaaacaaggtcacaagaaagatggttgccagcctcccctcctctcctcaacgcttctcagtctctggcttccaactgttttcctatgagaccctcaatgctgatgccaaatctcattctaggcctaagaatgttttcctgaacccttggaggtgcttgttccccactttccctgatgcctggaagttctacacacccttcccagattcccaccccttcctttcttcagctgaatctggaggcctatgaggggctccttctaggaaggaaaggaagagcttccaatacgaggaaggcactctctccaagtagcttcatccctcaagacacacacagccccagggccctgatggccactgagccctgctcattctcctgaccatagcacctcctctccagtggtacctcaatggtccggtgcagagggtccacgatctgccagatggcgagagtgaggacatccatgcccaccagcaggcccactgtggcatacagcttccagggttccagagtctggataaatatgtggggagaacaggcacgtcaggggaaaatgctctgtgccccaggagccaaggatctgggggctgaggattgggcagcagctcaccttcctccactccttcttttcttccttctttgtgaagaccgtgtggacccaccaaatcttggtgaacatggaaccgtagcccagactaaagcccaggcccaggagccagaggcgggcctagaaaggaagagagggcacaggcagaacagggtagagtagtagccgggactgcagtaaggatgggcagaaccctaagggagagtgggcagggagcacgggcagggagctcatggtggcacagggaggatgcgaaaatgtgagcaggacggggagcggcaggaggagagcagtctccccaccttgaacaattcctcccatccaccctctacttccacaccaccagggtgatcttgctaaaacctcctggctttagtggccaaaaacctccaaccactccccaatatctataagttatagcctgaacacttctggatatgacacagacccttcacaacatgctcccatccacctgtccagctaggctcatctcccagccccacacctaccccacgctccagccatgctgaactactcactttctcttcatctactctctttcatgtattttctagccacacgatgctccctatgcccctgaagtagccttcctctatttctctagctgataaaatcctatttgtccttcagtattcaaatgccacctcttcagtgaggtccacccaatcacgccagcagtgaactgtgttcccttctttgcccccaaagcactttgtgcagatccctactctggaacctctcctattgcactacagctaattgtctgcttctccagctgcactctggcctcactgggaacagaggattcctgatgaactgcatgtgcatgtgcatggaaatgccatgtgcacagatgtatgatcaggacagcacagagcagaggaaaaagagagagcaaggacaggcaggcagatcaggagaaagagtgggtgtttccaccagtggaaaagagaaccactcaactatcactgttgaagctggcctctccccacagcactagaaccttccatgtaccaacagtcccagagcccctcctccctgtgtggcagtggtcccttccccccaactctctgctgtgtttccatctctgcttctatccttccaaacccaacaaaggctcccaaaaaaagtccacagttctgattctcagcccccataccacagacaagccaccattgttcaggagacctttgagcagatccccttcctttgccttcaatggctccctcctcttctctgcaaggcctgccatggcaaccttggaactgacaagtaaactacagaatgaaaatggcctgcagacacagaaagaagggacagagccaaacagagaacagaggggtgatgctagaaggaaagaacagggacaagagtcagggaaagctgaggaggaagggcagagaatcataaatcatggaaggtgctcctgagacgggtgggagagtcacatcctgtaaggaatttgcccaccacctcctcacctggcagacgaaaggaaactggttcctcccaatgtggtaaccatcgagccccagggggaagacagcagctaaagccagtgagcagcccacagcagtcaggttgttcaggttgggctgtgagttctggatataactagggcagaggtggagagggtgagagggagagagaattacccctcttctccagggaggctgagctctccaaataccacgcaatggcatgaccctaatttcagggccaggggctaaaggaagacaggattggagaagacagtggagccttgagaggcagagcaatgcagtcatggggctgaagatggagttgcagagggcttcccaagcacaggcccccactagaatacaggctatttatgtagagtccaagactgtgagacctggccccaaaggttgtttttttctcttcttttcttttttcctcccgttagctactttggagtaggagtgggggttatatctggtttccctgttttcattctcaacaagtcagaatgaaaaactccatgatacatggccatgggagttacacaggttttattctcatcctgtccaggaacatgatcagtatctcagagaggcagacaaggaaaacgtcagaagagaaacttaccggacatgtgagttgtagatgttaaaggacagacagacaacagctaggacaatgcccaggctggagagaactgagacggagataaagagtttctgtgacaggaagcggaatgtcttgatgaccagggtctggtcagctgggggggaccctcctgcatggcacaggggaggaagaggggaagggaaaagagaagggaaggaggacaaaggaatgaagacgggataggagaaaagggcaaagaactagattgctgatggacattcagtcattggctggggacatgaggccctaactgcactggacagaggttactgcaggcagaatgctcagtgccactggggccgttaggaagcaaccagaaatgagatgagaagatggagtgaatggtctatccataggttgggaaatgctgaggcatgtccccaaagttgtagtctttgtttttgtttgttctttaagtttttctgtctttcttacagcaaaggaaaatgggaggagaaagaaggggatcattaaaaaatgttataaggtttcttataacccaaatcaaagttttaaatgacaattatggaatcataaagctaaaaaggccttgaagtatctagtgtggacacctattcttaagacaaacaaaaaaagaaggaaagctaatctgaaattttaatcctggcagggtaatattcccaaatatgttttccagttattattagggggaagttcaaatttgtcagagttcaccaaaaaaaactaatttcaatttgcttagttttttttttaaagaataatttaggccatgcagcatttatagcaatccagaacattgtcctaaattcgaattgtaaaaaaaaaaaaaaaagggcaaaactccagcagtgctgggaatgactggatatctgctgggcagggcagacggcagccatcttcaatggttgagcctccccttcattctcaaggaggctttcttttatcagtaggtccttccttttgtccaccttcagtttctctcctatgtcctatcatttagaccaagtacacaaagaataactgcttgctttctctctttaaaaagtatattttgagggatgtaatactacctattaggtacaaggtgcactgttcgggtgacaggcacactaaacgcccggacttcaccactatgcaatatattcatgtaacacaactgcacgtctacctctaaattacataaaaataggaaaatttttaaaaatacatataaaaataaaaagcacattttggcagatgacaattacatgaggttttccctcctcctccatagtttaagcaaccgttttcctgacagagacagacaaagagacagctctgggcttgaagtagctggttcaaatatatcaagacaccaggacatctgggaaacccaaatggagtttccatttcccgccctctgcccaccccctgcctctaatccccagttaccccagcaatgcaccattaaaaatagtactaaccaccgcctattccctctccaaatacaccagtctcccctacccacgccttaggggttgtattcactctcacttaaccctttctcctggcccagctgccagccacattccaacctaacagtctctaccattccatcctcactcaaaggcatgactttttcccttgactgtcgagaggggctgaaggaaaatacaaacaagatccactcaccaatccatttatctgttttggaccaggaaagatcatccttggtgctgtcatagtagccaatcttcttgtagctgccacctgggcagacgacaataaaaggagtgaccacaggtagccaaagagctgatcctaggcattttcaacttcccacttccctagagctttgcatggttgtatctgattttattttcacctgaggccctaaggatgcttggaaggacctacgagactcttgaatcagcaacatgacttaaaagcaatataaggtggttcccaagacaactcaaataaataagaatatctatgtttaaaagtcttcagtgaggaggctccacaacatgtctgccacctattccattcctcacacctctctcggcgagatgtctctcactttgattttggcttctaaagctttacacatatttctgcttattcttcctctcatgatgggcaggctctattttcccagtggctttcattttaattttagaacattctcttctgttggcttgggttttaattccttggataagttatatctgcctcttaaagcgccattgagtaaaatttggtcatttctaagatttctgttctagaactgtttccgttaccataacttttccttcaaaagccaactcacactcctttcaccatggctgaagtccatttcctcttgtcctggatacaaagaggagctgaaaggatgtggaggtggggagaaaggaagaaagaaacttttcacaggaggccaagaaatagctctcttggccatgccgtaaaagactgagagccgagtggagcagaaaaattaactcctagaagttctgcaaatacctgtgtgctaagtttcaagaaaatacaatctacaaaagccaagctatacacattgaagctttacacagcaaggaaatttggcagattcccttaaaaaaaaaatagcggttctcctagattcagctttcttgagtctaactgacaggtcatcaacctctcaacccaagccactcaaggggaaattcctgaaattaatggaagccactgggaaagagagtagctgtttttaatttgcatgtctcttttcttttcttttttctttgagacagagtcttactctatcacccaggctggagtgcagtggcgtgatctcagctcactgcaacctctgcctcctgggttcaagtgattctcctgcctcagcctcccaagtagctgggactacaggcacctgccaccacacccagctaatttttttttttttttttgtatttttggtagagacaggtttcaccatgttggtctggctggtctcaaactcctgaccatgatcatgatctgcctgccttggcctcccaaaagtgctgggattacaggggtgagccaccacacccagcctgcacacctcttttcaagagcaaaaccagtgcaactcaaagacatcaatcttcttgtagttaagcttattattattattatttacaagcttgatgaacagagttaaaagagaagggcagaagttgggaggtgccagggcaatcttgtgatgtctctggcattcttccccagggggcatcccagcccagccccagcctagcccccatgtccggtcccctcctgcccctgtactaaccctgaagctgctcgataagcgtccatgccatccgagagccgctggcatcaaacaccacatggccctgagggaaggaacatgtggagcaaggcaaaggagacaaaagcaagagtgaaagagaacatcagggactctttaaatccttctgtttttgatgtaattgagcctctgaatgaatgctatttatggcatttgcctgcatataggacataccccagatgcccataccctagattttagaaacattattctttggagaaggagcttcacttatgagatttgaatgggaaaaaatccccagacagaacaccagcaggcttctggttgtgtggcctaagcaagtcagcaaatctctctggaaactaatcttttcattttaaaaggaataagaagatgacctttcagactgttttgtctttcaaaatcctatagttctcatctgactcatgaatacttggtctagtttgaaaagaaatgaggggaggggtttaaaaaaatggaatacatcattttttttcctctagtctttgatgggttcttctaatttgaaggtccctacttctctggtcggagactgattctgcaaagaagtaactgagaaaaacagagaatgcatgtttgtagaaggtgcctcttgggagtctctctcaagattgggaagacaggggagtatgaaggaagttttaactcacagagacaccctcaaaggacgaagagttcattgcccggtagatttggtcggtaatggtctggttgttgtagttgaagtcctccaggcgcacaccagaacggccgcctcctccagatgtcttgttcagggccagtgccaaggcccagatggcatcataggccagcggtgcctcctggaagcctcctgtctcctcagggtgtcttttcagtcgcttggttagtttctccacaaattcctgggatgtcttgggaggaaaaaatcatgaggaaagaactgaaatgtgtgtgggtgtgggggaaggggtgcaatccaattctgactcaatcacttctacttgaatggatggtttgtgttactgttgtcagattggacacatgtacattcaaaatctttaactatacccatgtgtctgccttagatcggaagctactagactagagtaggtattagctgtgtctgatggtgttagtgtgtacagttgctagctcagaactgcaaacagagaattttgacaaacactctggataattagtggcaaaggatggaaggtagagcagagtaaaggaggagacatggatattccaatgaagagctgtgacactgatgttctctgatccttctgactttcttcatagagttaacccaggatctaacagctcctacaattccaaaagattctagaaaaggtgatagcagtcttctcactctgcttgccagccaggaggatatttcttcagcatgctaacttcttgccattcttgtgtgcttttggttcactgcctcttagaaggctttcagaagaatgaaaactacagaaatacccttcacatttttgaagtccattatcaatcctacccacacccctcccaacactcaaccttctttttccatgaaagctaaaaagaatgatagttcctttaactctctcatgaactgggtcaagagacctgacttcatataccttgcagtaaccttgtttggctaaataactgtaagtaaattacttaacctcttggaactgcattctacatactggagaaaatcacatcattccttccttacctcacagaaaccatacaaggaaaagcttagcaactacttcttgggaaaccacaagtaatacacaggggaccatacaaataattgtttgggtttggaatgttttaacacaaacggtaatgaaagaataaatagatgaatgaagaataaataaataactttgttcctcatgccttgctcacttttctctccaactttctagagagatagaggagtgagatacgcaaagggcacaggcaaggtacagcagttgctactacactgggctttgaaggagcctgggctttgaagatgcaatgggcctaggttctacccttgaggacaagaccaaatcccatgccctctcttaatcatcagcatctagcactgtgcccaaccataatgaagtaacaataaatgtccattggattaggccagtgaaaatactctgtaaagtatttaatagtagatacgtctcattatacatttgtccaaacccatagaatatataacaccaagggtgaactctaatgtaaactatggactttgggtgattatgatgtatcaatgtaggttcatcagttgtaacaaatgtaccactctggcggaggatgtcgataatgtagaaggctatgcatgtgggaagcatatgggaagtttctgtaccttcatctcaattctgctgggaaactaaaactgctcaaaaaaaaaaaaaaaaaaaaaaaggccaggcacagtggctcacacctttaatcctagcactttgggaggccaaggtaagcagactgcctgagctcaggagttaaagaccagctgggcaacatggtgaaaccccatctctactaaaatacaaaaaattagctgggcatggtggtgtgcacttgcagtcccaactactcaggaggctgagggctgaggtgagaaaatcacttcaacccaggaggtggaggttacagtgagctgagatgacgccactacactccagcctgggcgacagagcaagactccgtctcaaaaaaaaaaaaaaaaggcattataaaaaacaagtcaggctgggcacagtggctcacacttgtaatcccagctctttgggaggccaaggagggtggatcacctgaggtcaggaattccagacagcctggccaacctggtgaaacccgtctctactaaaaatacaaaaattagctgggtgtgttggtgggctcccgtaatcccagctacttgggaagctgaggtagaagaatcgcttgaactcaagaggcagaggttgcagtgagcagagatcacgccactgcacttcagcctgggcgatggagtgagactctgcctttaaaaaaaaaaaaaaaaaaaggcagccaggcacagggggctcacgcctgtaatcccaacattttcattttcagaggccaacgcaggaggattccttgagcccaggagtttgagacaagactgggcaaaacagagaggacccaactctacaaaatttttttaaaaattagccagacttggcctgggcacggaggctcacatctgtaatctcaggactttgggaggtcaaggcgggcagatcatgaggtcaggagttcaagaccagcctggccaacatggtgaaaccctgtctctatgaaaaatacaaaaattagctgggcacggtggctcacgcctgtaatcccagcactttgggaggctgaggcgggtggatcacctgaggtccggagttcgagaccagcctgagcaacatggagaaaccctgtctctactaaaaatacaaaattagccgggtgtggtggcgcatgcctgtaatcccagctactccggaggctgaggcaggagaatggcttgaacctgggaggcggaggttgctgtgagccaagatcgcgccattgcactcaagcctgggcaataagaatgaaactctgtctcaaaaaaaaaaatacaaaaattagctgggtgtgatggtgggctcccgtaatcccagctactcaggaggctgaggcaggagaatcggagaatcgcttgaacccaggaggcggaggttgcagtgagccaagatcatgccattgcactccagcctgggcaacagagcaagactccatctcagaaaaaaaaaaaattagccggacttggcttggagcagtggctcacgcctgtaatcccagcacttcaggaggctgaggagggtgaatcatgaggttaggtgttcgagaccaacctgaccaacatggtgaaaccccatgtccactaaaaatacaaaaacttatctgggcatggtggcacgcacctgtaatcccagctattcagaaggctgaggcaggagaatcactggaacccaggaggcagaggttgcagtgagccgagatcacaccattgtgctccagcctaggcaacagagcaagactctatctcgagaaaaaaaaaaaaagttagccagacttggtggcatatgtctgtgatcccagcttacttgggaggggctgaggtgggtggatgacttgagcccaggaggtcaaggctgcagcgattgtaccactgcactcctgcctgggcagcagagggatactctacctcaaaaaaaaaaaaaaaaaaaggctgggcgcggtggctcacgcctgtaatcccagcattttgggaggccgaggcgggcggatcacgaggtcaggagatcgagaccatcctggctaacacggtgaaaccccgtctctactaaaaaaaaaaaaaaaaaaaaaaaagtctgttggatagataaatggatgaattcatattctaatcattttacctgctatgaaatctcaaacaagttattaaacctcactagttggttattcagctttaaaatgagaataatactatctaaaatagtatgaaatgaaattagaacatgtataaaaatgctgggtatgaagtaagttacattttctctacgtgaatttccttgactctcaacctcatctttgttattgatactcagatctataatttcagcccaatatttcaagtccatatttcttttctttctttctttctttttttttttttttttttgagatggagtcttgctctgttgccaggctggagtgcagtagtgcgatcttggctcactgcaacctctgcctcctgggttcaagcgattcttgtgtctcagcctcccaagtagctgggattacaggcacacgacaccacacccagctgatttgtgtatttttagcagagacggggtttcaccatgttagccaggctggtcttgaactcctggccttgtgatccacctgcctcagcctcccaaagtgctgggattataggcgtgagccaccgcgcccagcctcaagtccatatttctaactgactctgaggcatttttaatgtatgatgaataatctcaaaatcaaaatatccaagatgaagctcaattttttcttactcccaaacagctcccagtaaatgagactgaagccttggaattacatcagaccctttcaaatcactgagtcctcttaactcttttgttgaaatgtttcattgatatcgatccctccttacacaggatgatgatgataatgataacgatgatggtggctaacatgtatacagtccttaggacgtatcgagcattttcctgaggaaactatattaccttatttaatcctcaaacaatccaatgaggtgttattatccccattttagagataagaaaactgaggcacagaaaagttatataacttgcctataaaaaagttatactattaatgagtagcagagctaatccatactcttaccagccaccctacacagtctctgtacatgagactgcctctctctaagagcacctgcacaaatagcagctaggctaatactttgagtagtcttttggcttcaaattgaaagattggtctatccaatcttcagttcaaggtaaatatggcatcaaaaaaatcacccagaaagaaagggattaatctgctcagcacgatgcggtcccctgctcaggtggtcagaccctgtgctcacgccaggtcactaccactaacacgcctaaccactgggggcaccactgctcctgccaccccaagagtaaagaagagtagaatgcttcccccttgagtcagtaaagatacagttatagattgtcaaagagacactctactctgcagcttaaggaaatctgaacaataaagacccctcaacccacagcaattagttaatcaaccaagtgcaaatttatacctaatttttttaacagccttgtctggctctcaagaatggatgcttgacagtgggctaaaatgtatatcttgaggtagctttttagtttgtactggtcctaggtctgatgggatctctaccccaatcaagatttcctcacaatcttatctccaggatgccacctcccacattcccctctagcccacagctacatttctctaaaaccactctaacccactctccatttccacatattgcccctaaagatgttttctctaaactagggtttctcattctctgcactattaacattttgagcaagataattctttgttgccaggggctgtgctttgtaggatatttagaatcatctttggcttctacacattagatatcaggagcatgtatccctccccatcccctacccccaactgtaacaaccaaaaatgcctccagatagtatagcgtctgagtctagggtagtagttgaaaaccactaccctaactaatagttctcgaggtgtgatccccagaccagtacatctgcatccccagggacttgctagaaatgtcagttctcaggccctagcccagatctactgaatcagaatttccaggggaagggcctgataacctgtgaactaactacctttccaggtggttctgacggatgttaaagtttgagaactattgatctaaacataaggccatccttagggaataaaagcaactctgcttcttttctaagtctccatggctccggccccctaggtccaacccttgctttgatccacttctatttgtgctgtttgattaatctataatctcttttgcccctaacctattgttaagactgctctatcctcttcagaaaacattggcttccccactggcattttaggctggtcccactggaagccctatggcctcaaaagcaggaaccatctttctctagacacaaagtcagaaagggaccttccaagtcttcccaccccaatgctcaggtgtccctctatgtccctaaccatctctctgttctctctctctctctttttgtttagagctgggggtctcactatattgcccaggctggtcttgaactcctgggctccagtgatcctctgccttggcctcccaaggtgctggggactacaggtgtgagccactagatccagccaaatccctgttttctgtcagcctcctctagctccctgctataagacagaagcaacgattggcaagtcctgggctcagggcaccaacaagtctttctggctttggtagccagttccaatactttcccaggttttatggatgactcacctcttgggtactctacaggaaagtgatcttccaaaattttttcattgtatttttcaactaacataccttaaaacatagagtccatttagaatgtcccaaaacagtgtgtatcatcagagtccatgtggcagcagatctttcatcacaacacaccaccagagtcaacttcctaaatcttatttctcctttgctcagcaattgccagtagctaaacagtgttagcagataaaagtacaaactttttagtcaggcttcatggttttccatgggaagtgatgagcagagcagtttggagccagatttaactaggattcaattccagctggactgctgagtagctgcatgacctgagacaagtcattaaaccactctgagtctcattttcctggtctacaaaatgtagataagtccacatcagagttttgctgttagaatccctgaaatcatgaatctaagtaccacacaaatgccactgttagtaaaactttttaaatcaagctattttggggctttacaaccattaactcacccctaacatgctctccaaagcaggtacacacttggtgtaataagcagacacataggtggccgtatcgagcttacccaaaattcctgtactctttacaatgtagtgctgagcaacaaagaagcctcttcccctgtgcccacacccacactcacttctgcccctcagctgcagggctgccccagccctctcaaatcagagaatgcgcctcctcgctccaagtctgtcattaaccagctgtctggggctaaatgatttcaaaagccccttctccacataaaattctaaaaaaagaatcattaaaaaaagcaacaggatccaagctaattgcatatcaatcatgagtgaatattaagcaactctaaaacactaacataaatcaccaagaaaatgaaatgcaattctgcccagacacagtgctcctgtaaaggtgtgcttgagtatacaagcatccatattatcattaatgccggttcctcctgacttctcaccaactgctcctcgtctccatggtaacagcccttccactcatcaggaacctactgaacatacaactccatcgtttttttttttttctctctctacccaaggaagtcagagcaaaggtaggatccacaggaaacataatgcagacaagttcagggtgggcacagccccctcttctcctttatatccaaattccgcaccctctccctgccaccctttcccctgcaaggccccctcagtcctctccaccctcccaggtgccagactgcaagtccccacactctcaccatgttggaaatgctgcgggtattggcaggattcagcatgacaatctcagttgtgatgtggccctccaccgcctcagtcatctcatccactgtgcagttgatagaagggtcgtagatcttgaaccaattgtcagcataccacccaatgaggaaccagacgtacttcttcccaaagagacgctccttgtacacctgaatacagaggagaatggctgagtttttgtttgctcatttgtttgtttttgtcttatctcacttgatactatttagcctcttgggaatcagggaagagcagtagaactaaaaagagaaatctacaagtcttggggatagtaggaaaggctgacaattcttccttctaagtttctccccagcccctgtatttctgagtggccttttccagccagtcaggacagatggaattcatgggcttctcaggaaacacaaagcagtagaaaaatgagatctgaagaaagtatcatgtgtgtgcagacaagggatgcagtcagagccaacagacagagacatcctatgaatcgtcacctcagatcatatgctatcaactcaggcacagatgccaagaggaggccccacaagaaaaccaagggaaactcccacccagtgcccctccctcttcagatccaactccacctcacaaaaaactttccgggcttcagtctcatagaaaagtcccacgatgattcgggcatcctggcgctacaacagagaaagaaacagctcctgagggatgcccgggaatgcctgaggggctaagccagatgtcttcacagctttgatttcccatcccaaagtgcttagtgcagggtaacgctcaacgtatagtgaataaacgtcaactggaagatggagctaaacttccccaggagatgctattgcctcagagaatcaaaacctgcccccgcctggctttcctctccaaccagtcactgtcccccagcttggtccctccgtaaacagagcccaccactcccagccatctgaccttcaggtttttgacgggcacagctggatctgagaagaaactctggcggaaagtaatctcaattccagcctccttcactcgttcctccaggtcgtccagagtcttgggtgggaataaaaaacaagttggaaaaacacggggtgcatgagggaataaagaccagagaggttaactggggatttcagagcaatactcagatagagcaaagaagcagccattctgaaccttccttcaacagcttctgtccctgaagtgaggagttcgggaaggcatctggtcttaggatgtggattccaagtgggaaggtgaatggtgagcccctgctgaggctctgtgtgggggaagccactccattcacccactcctaccactgaaggcaaagatggggtaaagaaacataaaggaaccaggaaaagacaaggcaaggactgggacagacagcatgatgtcaacctcaagaggcaaatgggcagacagacaaaggatcagagaagaatggtctgaatcagagtgaaagtgggggaggattaaagggccactgaacacagtggatagaagacccaaagaatagaataaaagggagggagcagactgccttcttcagatgtagagcctgtatttcctctctacctccccaaatctccctcttccccctcaacctctccttgtctgtcggcttctctctcttagtaccaactaccagatccatgcagctgcctttctgcccctctctctcctctccctcattcctctctctctctctctttcctctccctctctcctctgtaatccactggctccatcccctctgttcccattcacacccacccaccaccccccttgaaagcctctggaatctgctgccttcctggattcctatctcatcttcgctcccatctcttgcccccactttggattgaacctactttaacagaactgagtcattctgggtctatatgtctggggaacagggcatcaaacaggggaaaaaaatcataaaatcataaagacagagaggatcccaaaaactcaactcattctttcccctggctacagaaagaactgcacttaatccacatggaatgcgttctctttcaatgaagaatcaagttcttgcccctaaaagtgactctcacgtcacatctcctggtgctggaatttgagcttatgtccctttaccccttgcccaacccctcctcaccgaagtgaagacctcagtggtctgctggatggtagcaatcttcttccagccccacttttcaaagagtttcacgcgggtagggttgtggagtgtggctgatgggtgcgttcggaagaaagtggggaaacgctgccggtttgacagggctggtgagctggagccataggaaagctgtggggcagggagagtgagtgcaacagggtctgttcactgaggacaccaagagtggccaagagttcctttaaccctcttcctgcctttgggtttctcttccttactctctccaaacctccccacctctggtctgcctaaggaaaagagattctcaaaggcccacacacccctcacaaccgggatgctctttcactgatctaatttcaattccttctgaagaaggaggtcagctgcagcactgtcaggccactgttgctaggaggctgcctagctcaggtctgcagaggactctgaatcttagtagcaggtcctccacactccttttcaatacaaacccacaatcgccatcgtcccttcagtagagctcaaaagggaatgaccccatcttctgacccccatagccctgcttaccacaatgaggttccacatcctagcagcctcagccaccagcgtggagacagagctgcagccaggcataaggatgatcttgatagggtcgttgtagagcagctcatataggtacttggtggcttggcctggatcacactgaaagacaagaggagatgagggcaagctctcctggggcccctcccctgtctgcaattcctgctcttatctttctcgaacaaattagttcctttctcaattactcactttcatcattaattaccgttttcttctcctttctggcatctcttcctgtcaagtgccttttttctcctctttcattaaacttccttctctgtcttccatctggagccttacccatcacctctcctgcacacccctcctttggtattaatgaacataccaccttacctcctttcagctcaccctcagacatcccccttccctctgtcaccaagccctttaccccatgtttctatgcttcaaacaccagtgggtggaagaagtcagtaggaatacggtaaactctttccacatccccagatagcttgctcaaagccatattatgaaaattccttcctcacctctgcaaaccccttctccccaccttccatttgtttcctccctcttctcttttcagagctagtgataagtaaagagagaacaggaacaagaccagtagggggtcccgctcagtgatccatccctcctgctgggcgctgacatttgacaggtccattagaaaaaaagacactggggggtggaagtagggaagaatgtaggatgaggaaagaacagagagaatgaatagaatggaactctcaagaaaccagacaatttgagaggtgccttaaagagaggcttggagctagggaaagtaaacaagcagaaagctggagaagaaaggaagcttgggaggaggggaaatgggggaggaagagccagccttgggtctcccactgcctgttcccctcccactgatatatgacatttcagaagctgctggaaccccaatgcatgtgaagacgaaatggcagccagtggggagccagggcagaggggacacagacagggggctcaggggactaaggagggtgaaatgttgccaggaggggaggataagtagaaaggaaataaagaaagcactctggagcctgcttacctcccactgaggcctgacatttgggacacggtgggaagttggagaagggggagccaggggaagctgttggaatctgaagaaccagcagtcactgagaattctctgttgcccaccctaccctcactctggccaagggcagtgctcaacaacattggaaggttttctctttatgcctcccactagggcaactttgtaaatctttaccattctcaggacccaccttcctgcactctccccacatctattactccagatcctgctcccagcttctcccacagcccctcagtgcccctccacttctctaaagacagggttaataggaacaatgaggacatacaagaacatataagatacatatcaacagggcaaggcatgccccccattttgtttcctgatttcttatctaccttttcttgcaaccgtttccctcttccacacactattcatcactgcagattctctccaccacgtgattctctccccctccccaatagatttccttagttctcctccctctctttgctcttgcaaggatctggatttgcaggcaggaaaccgactcattccaattgacacattctggttcttctgccttcccatcccaccccgcttgatgcctctgatgttctccagttcccttctcccaggtcccacgtctgctccccgccacctccagggaatcacctgtcatggtggatgagtttgagctcacagccaggcctcccctatctcctgtgatcccctatcataaagcctgcacccatctctccctgtcattttcttcacactccactccccaaaaccaatgatctctctgactgtcccaagtctgaccctctaccagatctgatcctctacttctcttcctgcctcccgtaccctaatacctaattattttcctgtaccctgctgctcttcccataggcattctggggttagcttacagctcaggaatccaccaagataggatgtctattagtaaaaatacagataaatacttgggattcatccctgaccaaggagctagaatctgtatttttaacaaactcctctggtgattcttatgtacactgaaggctgagaaccacgagaaagtaacagtcaaaaaggattttaagttctcttgccaagctcctgataatccttgtgctctcttctcttcaagcaccctaccttcaacctcacttctgtcccctcacacacctatcccagacacacacctatttctaggtgtatagtgatgttctaaaaatgaatataaatccttggatcaccccaaggttgatatttggtaagatcaccaaattctcaccttgtgtactctatttcaccctaacccaattccttaagtctctggggccacatgtcagtgaagataaatttgagatcttaaatctccttccctgtgtcacatccttccctgcacccccaattattcatgtaggggagaggggtgggaaaaaaaacctcattataagctatcccctaatacccctggacccaaatttgcttaccttctctctctccctcaactcacctccctaatccctacatcccatttcccttctcacatcctagaggccacaatgctataagggaagggaaggtcaggacccaagttccataaggtgccccaagatctctcattatccccacgctacctccttgcccctctcccccactgccattcttttctgttctcttctccttgtatgttgactcttcttcatccccatgctattgtgggggttcccatgtggatccccaatccaattcattttcccagtgcctctgcccacctcttgatcattagccttccccaatcaccatatgccatctatcccacagtctgggaatgctcaacagggttgggaatagaaggatgagaaggagtcaggtagggctcaccactaccttgctgttttgttaagataaataaactagagctctcaagtctctcaaaattttcctcattctgtccctattccttccagctccaacctacgccaagattttaccttgttaccatggtaaatgtaaacccccaatccagctccccacctctgacattccctccacccccaacccattccagggttagtttactccctcagaggatcagtgtctcctaataccttaaatccaccaccagtttctccaaaccccgacacttctgcgagactcccgcagcggggcagaagggtctgccttgcagcatgcttaaccatcttgagcccctagaccctcatcttggacctccagcccctgcgactctccccaagctcctgcacccccagcccatctcctgccagtcacacaagggaggggtctgcctcgcaatcccagagacgactcagacagatgggggcgcgtgcagctggctggccccctgccccgcaagcccccacctcccacccacccccatgtccagggctaccttgctgtcgtggtggatgagcttgagctcatagtccggcaggatgtccctgcggctattcacgtcctccagcgccatctccaccgcgggctggcaggcctggccccctggccagcccccgctcatgggaaacagtgccccgatgtacactgcgcgccgttctgaggaggggtgcggggggacccgcgagtgaggccgcgggagatggggggagtgggaggcccacaccggagccacccctgccgccatcacaaccagaagcggcagtggccaccccacccgggcaaaaggggccccgggccccatggcgtggggggcaggggtagctgttggggagcgttaggagctcaggggggacacttttcctggggagggctgctaagagggtgccggggaggcgcctccatccctgattttgtggggaggagggggcgagggccccggagaagcagggaaggttggcttcctacggcccccgcggctctcgccaccgtcgccgccaccgcggactctcctcgcggactgactgaccgacggaggggaggaggaggagcaggagggagatgtggggctgggagggggctctgacgtcacgggcggcgcgcggcagcggggggtgggggggcgggcgggagctggggaggcaggaagggggcggggagggaagcgagcgccgaggtgggagcgacagtcggaggggcggggaggggaggggggatgcaacctcgaggaggaaaggaacgaaagaggaagggagggatctcacttaaggggacccgaggggaggagaaatggggacggggcgtgccaggagggcggggtgggcggagggagccgcgggaggctgaagcacggaggaaccagggtaggaagggaaggatgcgagtgggacgggagagaaacggggctggcgcctgaggtctgaagtgggagtatgagtcgatacagtgaagcactgaggatgtgggggagaggaaacggttttggagggaacgagttgggtacggaagggaggctggtttgagggagtggtggggtcgtggaagggagcctggggctgggtagacagaagcctaagaaagggagacaggacatggaattgagaaaagacgagggaaggggtacacggaaggaaaagatgtggggaagagcgcgagaggcctggccagggttgggatgggtgggacaggctgagaaagtccattaggtgaaatcctaggaggcagcaggctggaaaaggttccagcgaaggtcgcaaggaaccccacaggggaaaacgtggtgggagctcagggtctcccagcaccctgccgccctctgctgggctctgcctgacaccggcgaggctcagtctgggaggaggtggagcccagggaagtgtagccaagcagggacaaggagagaccgcagcctcgtggaaaaccgggactggaggcaggaaacaggtagggagggaagggggtggccgcaaactggggtgggttggggaaggtgcgaaaggacgacgccccgtagcctaagggcagaatttcaggggggtggagggtgcagagtgaaggggagggcattgcagtgcgcgcggtaagggtttctcatctcacctgagtgtggcgttcgattcactggcagcaggaaagacggggatcagagaagagttaccactggcgcccagcttccctggcctgatccccagccccctcccacacctgtccatgctgaagaccggggagagcagaagcctgcgtttctgaggggagggtgcctggggataagaacaaggtgggtctgggggtaagggggtcaggacttattttcttcttcgatttttcataggacaacagaatttgagacgggaatgccaatagctaagtttggggcagatcttggttctgtggtgcctgaatattacaaaattgggagtctttaagaaaaaaaattacacatacaattggctttaagcaattgctgttaaaatcttatttctgcaatttttacaaaagcctgttaccatatgaacacatatccatcgagccctctatattattagagcacaggaagagggccctgtaggtgaggaaccttgaagtctaagtttcagtagtgtcataagtccacccctggatgggactctcaatttccagaataaaatggtaaactagaagcagaataactgagttatgtgaggaaagtaaagcccaaggatcttgaaagaatctaccagggtagaggaagtatgaggcatacaaatgggatgactgcatcccaggagagaagatggcagagagttcgggtgcctagaaaagggagagtttgtaaaattacgtggcaaaaaaaaaaaaaaaaaagtagacagacacaacactgattcccttagggaataatggaggttgtctaggaagtacagaaaaggacctgtcttcttcccaccccatccctgagttgttcttcatcttctgataatgctgcctccaattttaagtcttttaccctaatatgtttccacccccagagctccccttctcaatttttcttagtagaatgtttgatttatttctgagtctttacaataaatcaattatataaggaatggtgagggatgaattctagaagagggtgatgcatggaaatttctaagtttagagaaagggaaaattggagtatttaaacctgaagaaggtgagagaggtgagattcataaaggaaaagagaaaacgtgaggtctaagaatcgggagcaggaagatttttttaaaaggtaaaggaaggaagcccccaacctacagaggataccggggactgcaagaggaagtttgaggcaggtgatggaggaaaaagggactttcatctcccctttccagtgtcctcccccacatttttatagctctccattctttcccattatccattcccaccccactcccatcctcacacaagcgtcctcatcagctgcatgcaggcagctgttcccctcaccctggcagtggggcttgggggtgctccactggccctgactacagatgctccgggagctgcccaccagatggaagtcggggtcacaccggaaatccacccgggctccgtccagagctgggaggtccccacccgtcaggaaaaccttcccattttccagggtcaaataagacttggagcagattcggactgtggagagataggaaaataagaagagaggcgagttgaagaaggctctttccctttaaagagcaggggactcaggtgcaggtttgggtccacaagcatcctgctctaaagaaaatcacatgtgaaaaggatttgcctacctatcttccaatcctcccttacctgtgcaagcatccacacattcccaaaagaaaaaaaaaattaccattttaggaacccaagatggggctataagcacacaaaatgggatctcttcaaagtcagctacagtgggcggttctctggctttgaaatatgtagatgtatataactttggatgcacaatcagatttgcttttcttattatagttggcttctattaatattaaactggcttttgtttcttgggcatatggtctctgggttggtgacagaggtattcaaaaatgtgatgaaatcattttagaatttttttgtcatcatctgccactaatgatcctcaaagagaataactgacaagatgaattatcaatgttataggccaatgatcagtggcctaatgaagggaggatgaaatgaactgtgcaggctgctagctctactacctccaaccgcacagagcaaaattgctcttatgtagtagtcattcaataaatgtatttgtgaattttggtatactggatttaaagtgctgacttgcaagcagtaatgctaagtttgcggcaggaaaaggaatagtcttgaagaggggaggggcttccgaggctactcaccacagcggctgggtgtgtccatatctgtccaggagccgttggccaggcacttgcggaccttgggccccaccacctcgcgctccccccggcacacatactcaatctcatagtccactggcaggaagttgatagccttcacctggtcccgagtcaggccccggtacctgatgcccccttcccagggcgggtgtatgatctggcaacctaaggggtgagtcggggaggcatacagagaggaatggtgggaaagaggaaaaggcaggctccccagtgggaggaaggggagagtagggcgtggtctgtgggcaggctggggacagaggaagagggatggggcactagagggtgggagtggggacaggtacagatcccctggctaaaggacagagagtaaagggccagggttaaagctgatgagagaacccacaagtggggagggaagggtgctgggtggaggtaagaaagaaaagtaattaagaaatcatgaagggtatgatatgtgggtggagcttttctttaaaaaaaaaggctaaatgaggatattcgagttgaattaggataggaggataaagggaggctaataagatcatctggacagcaaagtgggaccaagaaaagggagtaattgaggtagtaatgtggggctgggaaaggggattgaggcggagaaaatgcacaggaaggtggtatagtgtagcaatgtgggcagagaaaagaggtgctggatagtaacgtggggtgacagaaggaggtcagcagtagtaaagtcgggccgagcagaaggggttgccagaccgggatgatatgtgggactgatgggatagtgatgaggaccagaaatgaggagatgcagggaaagggaagtggagcgaaggagggccggaggtcgtcgaagaaggatgcaccttctgaggtggcgttgggggtctgcgccccgcccgcgcccggggggcggaggaagagtggcgccagtagcagcagcagcaacatctaagtgagaggcggccatgaggactggaccgagccccgccggcgcggcccgcacccggagactactcgacctcttgccggttgcctcgcaggctccgaccgggctcagcctggggaccaagagagcgccccgcggaggaggcgggggcggagccccgcgcggggtggggggagaggaggagagaaagcctgtccccaccctcctcctgcctccctcggcccccaaccctcccgggactccacctctcaccacctcctctcccccggcccccgcggctcgcagaagcctggcttacccacgctcccggcatcggccgcctcagcgctccccgattccatccccgcggttcctcctctcccccagccccgcttcccccagctgggccctgcgcccactgccccctcccccaccacgccgcgcgccccctctccgagccctgctaacccggggccctggctcttacctcggcgcgcgggcccggctccccggctctccccgggcctcaaggccccaggcccggccgctcctccccgctcccccctcccttctcctccacctttctcctcctcccgtccctcctcccctcgaatccaggctccagcctggccagggtctctcccctcctctctcgcttcccccaaaccccacccctgtctcttcttccccggggcggcggcagccacgggagcggggagcggggagccgggagggaaggaggcggcgccggggaccagggagagctcccgggcggagggaagaaggagggtgcaagggaaggcagggcggggggaagagaggggaagaccggggagagggcgcctcccacaacccgagccccgggagccgccccggatcccagccccgccctggaccgcccacagcgcggtggggcgggcggtggagaggcgcggggctgagaggtgggggagagggaggtgccctggtgcacacgcactcgtcggggggcgccggtcactgccgagggacctgcgggccaaacaactggaagctggggtgggggagagggaacccgagccaaaggcagaggagctggcgctgagacagggagtctgggatgaaggtggagaaagacggctgcacaaagagaaggcagccctagatccgggtgagaggagagaggcagaggcagatgcccaggagaactgcgaccggagggcgagaaagaagcctgggtcagaaggaggtgggggagggggactgaggaccacctaagcgcaagaagggttgggtgtagaagagatttctgggagactagagcagctccatggtccagcagcattgctactcgcctgctctgcagggaacgcgcagaacggattggaggcaaaaaacaaaacagggagggggacatcaaggagagaaattgaagtacgaagggagtaaaaggacaagagaaaagaacctcagggtggtttagaagccagtattacctgatgtactccagcagagcctagcaaacagtatttcttgaccaagggcaaactggaagctctaaagacagcaggtacagacctttttgacggctccagaagctcttggctataccttgaagtggaggggtgtgtgtgtgtgtgtgtgtgtgtgtgtgtgtgtgtgtgtgttgtgctgttgttgttcgtaggcctgagtttgggctgggagaggaaacagtgggctccttgttgggggggacaaaaaaaaagctgctttctggctggtcctagggggaaaaatggtaggaagaaaccaaacactgagagactgactagaattgagattctcaacctccaacccttttttacaataaatattttgtaatgacacttttactgtcctaaattgagattcatagatgaggctcacgcctgaaatcccagaactttgggaggccgaggcggactgatcacttgagctcaggagtttgagaccagcctggcctggccagcatggcgaaaccccatctctactaaaaatagaaaaattagcgtggtgtgatggtgtgcgcctgtaatcccagctgagacaccagaatcgcttgaacccgggaggcagaggttgcagtgagccaagatcgcaccactgcactccagcctgggtgacagagcaagactccatctcaaacaaaaagaaagggaaggagggagagaaagtcatagatgatataacctacctacatacacaactttaaacagaaagcaaaatgcttccctttctgtaacgtaaaggggaaatgaaagaaaagtaacttgcaataaaataacataaacagtattttaatgtgtgagtgccaaggcccgactaccctagaagtcctgatggagtaagcagatgcttccacctattcacagaaccacggggatgaaactgctaccaacacaggctgatccaggtgctgagttggtgactcaactacctccagcatgttgccatcaatgaagtgatttaacaaaatgttgaacaactcttggtagcaaagttaattttccctaattttacacacaactataattgcattcctagaaagttcactgtatatttaaaaaaaaattttaaaactgtattaagttataggctcagataattaaacacaggttttcactacgtgaatgtcctgggggacttttgagaatctgggtgaggaacaattcttcaacatgtaggtagtgctttgaagaatatcttacacctctgccccaaccataaatgtcaatagtgccccttcccttatcacctgaggttgggagttcgagaccagcctgaccagtgtggagaagccccaactctactaaaaatacaaaattagccaggcatggtggtgcatgcccgtaatcctagctactcaggaggctgaggcaggagaatcacttgaacccgggaggcggaggttgcagtgagccaagatcatgccatgccattgcacttcagcctgggtgacaagagtcaaactcagtcaaaaaaaaaaaaaaaaaaaaaaaacagctaaaagatgcatcaaaatgttaacaaggattgcctctgggccattaattgttgcataacttttcttttttacttttttttttttttaaacaagaagtttatttaaacaacaagacgcttgacttgaagggaaaactatctaggattcttttttgttttagagtaatttatccctacttaaagacagattgctctgcatgtaacagctaagtacaaaaaagttataaaattgtccttggttttacaatgataaatgaaaaacattaaaattctccaattgaacaaggtatgcaaggatttttatgttgttgtttttttgttgttgttgttaaaacagtgagagcaaaataacttactggaatataaagataagagctgaatgagcatgccactaatggagaaagggggtattttcacagaatcagtatttttccgccccgtctccacttgatgtcaatcaaaacataccattggctgtttagttttaaaaaaaaaaagtaatatgcttgtgcacatataccagttactttatgtacagtaaaggaatggggaagggggaaatgaaagaatagagaaaactatacggtagtagtcaggatgtggtggaagcaaattgcagttttctaattgagaatgtaatcttggtctttaaagaacagagttctggagtaaagaagcaggttcccttttcagtagacacctcccgtctgctgttggaacacatcaattgtatcttcatcctccatttccaactgtgcaggtgtgtctgtttcattggttgcccgtcgaatcggaatctgatctgcctcattgacaatccctgtcgttcacaataggctttcattagtttactaagtggtgtatgcctcttaatcttaaactgcaccacagaaccatcctgccccgccaccttcaaattaatatgatcgttgttctcagtcttgactccttccttgggcttttcttcggccatggcgagcgccggagtctcctcagctgccgcttcacaaaagaggtaccaggtccgctccaaacgagcacacaagcagcaccaggagcggcagaagaaggaggcggcagcagtggacaaggggagagggtgcgcgcacgtcgtgctctccctccctccaccctcacttttctttttttttctttcttttttttggtggggggacggagtttcactcttgtcacccaggctggagtgcaatggcgtgatctcgactgacggcgacttccgcctcccggattcaagcgattctcctgtctcagcctcccgagtagctgagactacaggtgcacaccaccatggctggctaaattttgtatttttagtagagacagggtttcacaatattggtcaggctggtctcgaactcctgacctcaggtgatccacctgcctcagcctcccaaagtgctgggattacaggcataagccactgtgcggggcctgcacacttttctttcgtcatatttgttgttcaacttttattcaaatgttttacaagtgtctcctctataaatcatttttaattgatttataaaggtttaaagaaaaccttcctagcaagttgcatcagtatagctaaaatctgttacttgtttgggaggcagaggcatttgagggtacagacaagggctccaattatgttcattatacaaaccactcacctttttccaccagtagctacaacttccccctttcacatcttttcatattccaatgtcactgccaggattcctggccatatttttcaggatatttgtagaggtccttccagaaccactacttgagtatcctaatttcatcctccccacaatcaatctacttccttcttttccttttacatcaagcacaaaacttctttcctctggaaggatccccaggcttgatcccatccttctctcacttctgtacaatttgtgcctttggcaatgccatctccttttgtagtttttgacggtttttcatagagatagtggagttcctactcagattactggaaaatgacaaatcttattcattttagttcccatactttctttttttttaataatttttattttttattcttatttatttatttttattttatttatttatttattttttgagacagtctcacactgtcgcccgggctggagtgcagtggcgcgatctcgctcactgcaacctctgcctcctgggttcaagcaattctcttgcctcagcctcctgagtagctgggaattaccggcgccccaccaccacgcccagctaattttttgtatttttagtagagacggggtttcaccatgttggccaggctggtctcaaactcctgacctcatgatctgcccgcctcagcctcccaaagtgctgggattacaggcatgagccacggggcctggcctcccatactttctttctacttccttttctctcttctgcctcatcttccatccatccctgagagcatatagcccagaatttaacactctgggagccctgaaaacatattaaccaacgtagttcacttgattgatgatc

SEQ ID NO: 345 - DNA, 4776 bp, Homo sapiens
tagagcataggtggaagcagagaagccatgaggatggaactgtactagaccagcagggagccagtggtggctaaagcaggatggagggagcgggtggtaaatcaggatggagggagtgggtggggagaagtgtttgaatactggggacatttccaaagtattcaacacattggagttagcattgccaacagcatgaccctgagaggtgaacaacccctaatgcctgtgattccttcactcccccacccccaggcctctccatattgctgtggtgcagggtaacctgccagctgtgcaccggctggtcaacctcttccagcaggggggccgggagctcgacatctacaacaacctacggcaggtgaggctcggtctgagggaggagggctggggcctggactcctgggtctgacagaggaggggctgggggcctgaactcctgggtctgagggaggggggctggggcctggacccctgggtctgagggaggagggactggtgcctggactcctgggtctgatggaggagggctgcgggcctgggatccggggtctgatggaggagggctgggtcctgggctcctgagtctgagggaggagggctggggatctggactcctgggtctgagggaggagggctgggggtctggactcctgggtctgagggaggagggctggggtctggactctaagtagcgaggtgctccaggctcctggttcctggggaagaagggctctggggcctcggactggttgttcctgagagggagggggcctaaagacctcctagtgaggagggagggggctggggacccagaattcaggtactagggaaagaggaggttggaggcccagtcttctgggtcctggggaaggaggagcatggggcccggactcttgaatctgagacaggaggtgtctcaggtttctgttcctggggaagactgcaggatgaggaataagggttcagaaaacctgggggaggcaggactagagagcagggctggacacaggtccctcacagtcactgttccccagacaccgctccacctggctgtgatcaccacattaccgtctgtggtccggctcctggtgacagctggtgccagccccatggcgctggaccgccatggccagacggccgctcacctggcgtgcgagcaccgcagcccgacctgcctgcgagccctgctggacagcgcagctccgggcacgttggacctggaggcccgcaattatgacggtaagcatttaccgcggggcaccgctgggctgtccagcggacctggagtccatcagcggccgcaaagcccgggcctaggtttcaccgagccctcctctccctcagggctcaccgccctgcacgtggcagtgaacaccgagtgccaagaaaccgtgcagctcttgctagagcgcggtgccgacatcgacgcagtggtgagcgtgcactaggagctgggagggagcggggccttagcaggggcggggtcttggcgggggcggggccagtgtggggctggcgtgggagagcacccgggtggggtggggcttggagtatcagacccaagagagaggctggaccccgcgaatgggatgtggacgggatgcgggtcgccggctgctggagcagagcttggagaaactaagaccttccctccccgccgcaggacattaagagcggccgctccccgctcatccacgccgtggaaaacaacagccttagcatggtgcagctgctgctgcaggtgcgtacagcccccctgagcctcgcgcccaccctatcctctgaccccaacccggctctggcctcagcccctagctctgaccccgccttccacttctggctccggctcctgctccgcgtccagctctgatcctttaaggcctagttttctcgaccctcgggctccacgcccctggctacgaacttgtcccattcctcctctgccacctcaacggcctaggccccgccctgcgatggcctggctgaccccgccttccagctaggccctgtccacgcattgtccttcccccctccagctcccccgactccttggggcgcgggcctcggtgtccagctccggttaattcatcgccgccaacgcagtcccgcttggcctgcccttggctctcgctcctaccttcctgtgaccccaccccgatccggtgccgccccacgtgccggccacccacccgggcctccagcctctgttcccttaccccgggtggcccgcgcgccctcctgacccggccctcccgtcccgcagcacggcgccaacgtgaacgcgcaaatgtactccggcagctccgccctgcactcagcgtccggccgcgggctcctcccgctggtgcgcacgctggtccgcagcggcgctgacagcagcctcaagaactgccacaacgacacgccgctcatggtggcgcgcagccgcagggtgagccggggcagctgtggacatgccccttgcacacgtgtgtccgcgggctggttgcaggcgagtgtgccagagcgcagaggagtgagggtgtctgtgccgttgcgtggaggggagtgggtgagcctctgaaagcgcgggtgtgagttccagaaatgaggagagactggcaccaagaaaaaaagtgccttgcccatcttttcatactgagaagtggagaggccaccacctggatccagtgagctaggagggtcgggagagaggactgtgaggcatgggtggctctatggtcacgcccatcttcctacaggtcatcgacatcctgagggggaaggccacccggcctgcttccacctcccagccagacccctcccctgaccggagcgccaacacctcccccgagagcagcagccgcctcagctccaatggtgagaaaccgttcccaacctccagccctggcgcctcctccctcagacccaggaatcccaacccacagcccctcctccctcagatccaggagtccaggcccctagcctcctccctctgacccaggaatcccaacccatagcccctcctccctcagacccctggcccctcctccctcagaccccagcccctcctccttcagacccccagcccctcctccctcagacctcagcccctcctccctcatacccccagccctcttatctcaaacctcagcccctcctccctcagacccaggagtccagatttccagaccctcctccctcagacctcagcccctcctccctcacacccccagcccctcctccttctgacccccggcccctcttccttcagacccaggagtctaggtccccagatgcctctttcctcagacccgggagtttaaatccccagcccctcctccctcagacccgagtccagacccccagcccctcctccctcagacccccagcccctcctccctcagacccagatctaggccccagcccctgctctctgggtctagcctctcacctcccacccctctgtctctcttccttcctcaggtcttctctccgcatcaccatcctcctcaccctcccagtctccccccagggacccccctggattccccatggctcctcccaatttcttccttccttccccatctccacccgccttcctgccctttgctggggtcctccgaggccctggccggccggtgcccccctccccagctccaggaggcagctgagggggatgggggggcagatcttggactcatgaggaggggcccccctgcccagaggggtcaacccttctggaaactgtgaagatctgacttcgcccccccccccccccatcttcgggaccaggatttgcacagaagcacatgcacctacccatacaccccctcttctgagcgtccctgttcccccatctcgctccctcccaggactctgaccccagcattctcaggcaccagtccctgtccggaatgccacccacatcttccatttccatgtcccctcccagagctggtggacccagggaacagccactcccctccactctctaccagataactgaggaggggagaggtgggccgtaacgggcacggatcacgatgtaaattattaagcattttggttggatttcttttgtaataaactatttttgtaccatatcccttgggtgcatgggcctctttcatgagatggacctggcggaagtgccttcgtgtgtgtgcacacccgtgcactgaatccagttgactcccagagtgatgttgtgagtctcagacagacaatctcctgtgtgtcactctgggacttctggtgtgtttggttgtgaatgttgccatcattgtcactgtaccattgtttctaaggaggacgtggtgtgtgatatcttttttttttttttttcaagacagagtctgctctgtcgcccaagctgggagtgcagtggcacgatctcggctcactgcaacctccgcctccccggttcaagcgattctcctgcctcagcctcccgagtagctgggattacagtgtgcaccaccacacctggctaatttttgtaattttagtagagacggggtttcaccatgttggtcaggctggtcttgagctcctgacctcatgatcctcctgtgtcggcctcccaaagtgctgggattacaggcatgagccactgcacctggccggtgtgtgatatctttccagggcaccctgttggattccgtagtgaccctgggcatgtgtgtttctgtagtgtgggggtcctggtgataacccacagctgacttcagccccaatcgtctctggctgtccgagtgcgtggtgcttgggagtgttcctaacattgagatc

SEQ ID NO: 346 - DNA, 1548 bp, Homo sapiens; identical to SEQ ID NO: 171

SEQ ID NO: 347 - DNA, 597 bp, Homo sapiens
agctgaagttgaggatctcttactctctaagccacggaattaacccgagcaggcatggaggcctctgctctcacctcatcagcagtgaccagtgtggccaaagtggtcagggtggcctctggctctgccgtagttttgcccctggccaggattgctacagttgtgattggaggagttgtggccatggcggctgtgcccatggtgctcagtgccatgggcttcactgcggcgggaatcgcctcgtcctccatagcagccaagatgatgtccgcggcggccattgccaatgggggtggagttgcctcgggcagccttgtgggtactctgcagtcactgggagcaactggactctccggattgaccaagttcatcctgggctccattgggtctgccattgcggctgtcattgcgaggttctactagctccctgcccctcgccctgcagagaagagaaccatgccaggggagaaggcacccagccatcctgacccagcgaggagccaactatcccaaatatacctgggtgaaatataccaaattctgcatctccagaggaaaataagaaataaagatgaattgttgcaactcttaaaaaaa

SEQ ID NO: 348 - DNA, 1675 bp, Homo sapiens
gtgagacagagacaaatgaacccccctctaaagtcatttaactaatagccagcacatcccttccccaaactgtcaattgaaatcttaactgaaagttttactgaataataccaagctaattgctgttgggcacacctggatggctttgcacctggtgttgaacctgctgaagcaggtggatgctcaagattacgtgcaaggaatccctcccatctggtactaaaatttcagtgtgttctgagtgtcttttaaaccaaaatggaaatacagatacagggctgtagtattcagtaatgtgtctgctccttgttgggcagacaccagcggtgtgcagggagagaccaagtaccatctttatctacacttgggctggcttgtggagaagggctgctttttttcagtcctacattccttcattttttttttcattcttgaattcattgttttgtgggatctaagacccaggggtcatttgagaggtttgacagtatcttttctgaccagttgccacatgacttgcttgaccctgagcctgtggaaatggcatagggaccagtctactacccactgggcctggtgtgtagagggggagagggtagcaaggtgcttctctacgcccatgacttgggagcaggtcttggcctccttcatgagagtctagtgccatgtcctgtcccatgatctggaccctgggactgtcttggcatcttaactgcagtttcaatgaggcagagggcaaagagagaccaagatcagaggggttcattatacccctggctagagaacccagctactgacatgcaagcagcttggggctggctggacacaggtactaggcccattgtttccaggtgaagctttcatcacagaacagtgttgtctccacctggccttagatggcacgccatgattcgggcctggatagactgcctgcgtccttaccactgatctggccaagaatgaggccctcccaacactttcactccctctccaagccttgatgggacctccacttatttaggcctcatgtgctttgaagaagctttgagagccaatgtgtcttccacgggtctcttttttgctacaagtaatcagccccatgtgttctcttaaactgagaattgcacctgggcaattcctgttttctaaggtggtctctgctgctatttaacaacccagagtaggcctctgtgaggcttcagtggcctcagaaaccagagggtccagatagggggcctgcttgggccctctgctgccaactgctcaaacctgctttagctccagccacttgtggcaaacaacctcgtttccttacaaattccagcatgtgactttggtgccgttacttgtgaaaaatctattctgttgtctttgatgtgtccaagaaaattcgtgtagtttacgtaaaaatatctgactcacaagaaagccaactgtatgtcttgtgatgggacagttcataatgtagttgctagaccactttacaaattgttcttgtcaccagatgtgttcagacattgctgtgcaattgttggggagggtagggggaaaggcgagaggagatacttattggtctttttgtttaataccttccccaagaggggacagtctggccaacttgctccagtaatgcaataaagacattgcaataaagtaaaaaaaaaaaaaaaaaaaa

SEQ ID NO: 349 - DNA, 1568 bp, Homo sapiens
  misc_feature (1424)..(1424): n is a, c, g, or t
ggcggccgggccacgtcgtagcgaggtcagagtgccatctaaggtaattatagagacagtaaaattcttttactctgggaaaaataaaatgctgggtgtctcacaaaatttcagaacctgatttcaaacggatcataacaaagaggagatcaaatttagcatggtggactgctcgacaggatatatttgtcaatggaatgtttccacatattataccaccaacatgagaaaaaaatgatcattgtttatttgaagcttgatgatattctaacgctgccttttctcttctcattttagagaaaaatgagcaggcggaattgttggatttgtaagatgtgcagagatgaatctaagaggcccccttcaaaccttactttggaggaagtattacagtgggcccagtcttttgaaaatttaatggctacaaaatatggtccagtagtctatgcagcatatttaaaaatggagcacagtgacgagaatattcaattctggatggcatgtgaaacctataagaaaattgcctcacggtggagcagaatttctagggcaaagaagctttataagatttacatccagccacagtcccctagagagattaacattgacagttcgacaagagagactatcatcaggaacattcaggaacccactgaaacatgttttgaagaagctcagaaaatagtctatatgcatatggaaagggattcctaccccagatttctaaagtcagaaatgtaccaaaaacttttgaaaactatgcagtccaacaacagtttctgactacaactcaaaagtttaaatagaaaacagtatattgaaagtggtgggtttgatctttttatttagaaacccacaaaatcagaaacacagtacaaataaaacagaaatcaaactataagttgacttttagttcctaaaaagaaacatatttcaaaagcaatggaatctagaattcttataacatgaataacaaaatgtacagcaagcctatgtagttcaattaatatataaggaaaaggaaggtctttcttcatgatacaagcattataaagtttttactgtagtagtcaattaatggatatttccttgttaataaaattttgtgtcataatttacaaattagttctttaaaaattgttgttatatgaattgtgtttctagcatgaatgttctatagagtactctaaataacttgaatttatagacaaatgctactcacagtacaatcaattgtattataccatgagaaaatcaaaaaggtgttcttcagagacattttatctataaaattttcctactattatgttcattaacaaacttctttatcacatgtatcttctacgtgtaaaacatttctgatgattttttaacaaaaaatatatgaatttcttcatttgctcttgcatctacattgctataanggatataaaatgtggtttctatattttgagatgttttttccttacaatgtgaactcatcgtgatcttggaaatcaataaagtcaaatatcaactgaaaaaaaaaaaaaaaaaaaaaaaaaaaaaaaaagcggccgctgaattct

SEQ ID NO: 350 - DNA, 115478 bp, Homo sapiens
gatcttcttgctttttttcttagtctggctaaaggtttgtaaattttgtttaacttttcaaaaagccaactttttgtttcattgatcctttgtgttgttttatttccatttcattgatttctgttgtgattttttttttttttttgaggcggagtctctctcagttgcccaggctggagtccagtggcatgatctcggctcactgcaacctccgcctcctgggttcaagtgattctcctgcctcagcctcccgagtagctgggattacaggcacccaccaccacgtccagctaatttttgtatttttagtagagatggtgtttcaccatgttggccaggcttgtctcaaactcctgacctcagataatctgctcgccttggcctcccaaagtgctgggactacaggtgtgagccaccacgcctgacctctgctgtgatctttattatttcttttcttctactaattttggatttggtttgctctttctttttcagttaagatgcatcattaggttgtttatttgaagtttttcttcttttttgatgtaggcactaatggctataaactttaatactgcttttgctatatcaagtttttgtatgttgtgtttccattatcatttctttcaatatatttttcaatttctttcttactttcttcattgacccactggttattctggagcatattatttaacttccaagtatttgtatagtttcctaaattcctctgttattaacttctagttttactccattgtggtcagagaagatacttgatattatttcaattttttgaatgttttaagacttgttttgtgacctaatatgtctattcttgagaatgacccatgtgctgagaaaaaaagagtattctgcagctgttggataaaatgttctgtaaatatctgttagatccattggatctatagtgtacattatgtccgatgtttcgttgctgattttttgtctggaagatctgtccagtgctgaaagtggggttttcacatcttcaactattgttgcactgggcctttctctctctttagctttagtaatatttgctttatatatctgggtgctccagtgttgggtgcatatgcatttaaaattgttatatcttcttgttgtattgacccctttatcatcacatagtgagctttgtcttttcagtctacacgtgtctttagaggtgaaatggatttcttgtaggcaacaaatcattgggcttttttttttttttttttttttttttttttttttaggtgttatctcactctgtcacccaggctggagtacagtggcatgatcttgaatcactgcaacctccgcctcccgggttcaagcaattctcccgcctcagcctcctgagtagctgggattacaggcgcctgccaccacgcctggccaaaagtgctgggattacaggtatgagtcactgtgcctggcaggcctttttttttttttttaaatccattaagccactctgtgtcttttgactggagagtttttagtccatttacattcaatgttattgataagtaaggacttactcctgccattttgttatttgttttttggttgttttgtagttttctctttcttctttctttccttcctgtcttttttttttgtgggtgaagatgagcttttctggttatatggtttagtttcttaatttttattttttgtgtatctgttgtatattttttggtttgaggtttccacgaggcttgcaaatactattttgtaacccattttaaagctataacagcattgtttgcataaacaaacagaaagaaaattaatcaagactttatgccttaacttctccccaccccatttttaactttttgttgcttctaactacatttattgtaccatgtcttgaaaagtttttgtagttattatttttgattggttcaccatttagtctttctattaatatcagagtagcatatataccacagttacagtgttacaatattcagtatttttctgtgtacttactattaccaccgggttttataccttcagatgattcctcattgctcattaacattcttttttttttctgattgaagtactcctttaacatttcttgtaggatgggtgtggtgttgatgaattccctcagcttctgcttgtctgggaaagtctttatttctccttcatatttgaaggatattttcaccagatgtactattctacagtaaaagctttttttccttcagcactttaaatatgtcatgccactgtctcctagcctgttagatttcccctgaaaaatctgctgccagatgtattggtggtctattgaatgtcattttttcttttctcttgctgcttttaggatcctttctttacctttagataaagtttgattattaagtgtctttgggagtttgattattaaatgattattaagagaagacttgaggtattcttctttgggttaaatcttcttggtgttctataaccttcttgtacttggatattgatatctttctctaggtttggggtgttctctcttattatccctttgaaaaaactttcgaccccatctccttctctacctcctctttaaggccaataactcttagatttgccttttggaggctattttctagagcatgtaggaatgctatattgtttttcattctttttttgtctcttctgactgtgtattttcaaataatctgtcctcaggctcactaattctttcttctacttgatcaattctgctattaaaagacactgatgcattcttcaatatgctaatggcatttttcacctccagatttccgcttgattctttttaactatttcagtctctttgttaaatttattgatataattctgaactccttctctgtgttgtcttgaatttctttgagtttccccaaaacagctattttgaattatctgtctgaaaggtcacatatctcctttctccaggatgggtcccaggtttcttatttagttcatttggtgaggtcatgttttcttggatggtgttgatgcttgtaaatgcatcttcggtgtctgggcattaaagagttaggtatttattgcagtcttcttagtctgagcttgtttgtatccatccttcttgggaaggctttccagatattaaaaaagacttggtgttgtaattgcatctatttctgctttaagaggcactccaagcccagtaacactctggttcttgcagaccaatagagatactttcttgataacttcttttggacaagatccaaaagagttctctggattaccaggcagagactcttgttctcttcccttattttctcccaaatgaatggtgtctctctatctgttttgggtcacccggagctgggagtggagtgaaacagcagcctgtggccaccaccgctaggactgtgctgggtcagacttgaagccagaacagtactgagtcccaaggcctgctgtaaccactccctagctgtggcctatgttcactcaatgccttggggctctataatcagaaggtggcaaagccagccagacctgtgttctttctttcaggatggcaagttcccctcaggctctgggcatgtccagaggtgccatctgggagccaagaactagagtaaaaagccttagaaatctatctggcattctatcgtactgtggctgagctggcactcaaactacaagatccagttcttcccactcttttctcttttccaaatgcagaggagtctcaccccatgaccaacaccaccacaagcctatagggagtattgccagactaccgccaatgttcctttaaggcccaagggctcttcagtcagcttgtggtgaatgctgcctggcccggaactcacccttcagggcagtgggcttccctctggcccaggataggtctagaaatgctattcaccagcaaagtcctggaactggggaccccaaaaaaccacttaatgctccaccccactgtggctgtgctggtacctaacgtgcaagacaaagtccttcatattttttccctctgtttttctcaagtggaaggagccttgcctcatagccaccacgactgagtggtgagtcatgtgctgagtctcacctgaaccagaaagtctcacccaagtccctcaacgtagtacccgggtattgctgctggttattcagggcacaatgtctctttagttagcaggtgatgaatgcttccaggagtgggatctttccttcaaggcagtgggttcccttgtggcccagagtgtgtcaagaaatatcatcctggagctaggacctgaaaaggggcctcacggtgccctatcctgctgtggttgagctgatatccatgtgggatatgatgaggtttctcttcaaatagcctgatcaatcctttattctttaattcatagtacctccccacccctttttcacttttctcttttttcttcctttctgtctttgtcacatgcccagacacgccacagtaccaggtgttatcagtaccagctcacattcctttccttatttggcaagaagacttgctctctagctcactgcagacaccccttcccctttcgcctctcttccttacataccctccttatccgaaaaaaagttcaaatgtttagccaaccagggttaatttagattgtactgcctgaccatggccaatggggaaagggtacaggggcaggacttgcttcaggaataaaggctcttgttcaagtgtgctctcatggtgactggccaaggagaagcacccctctgtgcagaagtaaaattgctttgctaagaatccttgtttgagtgttcaatttccttaggattttgagcattattcccaacatccaagatgcaagacaaagtcctcctcattcttccctctcctctcctcaagtggagggaagaggcctctttcgtgagctgtgcagcctggggttaggggaagggtgatgccagcaccttcttagctgccctggcttgtgtctcagtaggttgcatgttccctcagtccactgtctctgggcccagttcagcactagaacttgcctaggagttgtagctcttggagcctagactgcctttcaagtttatttagagccccagagtactttagcccacagtggtaaggcttgcaggaactgaagttcagaccactgagattggattagcaattcccctctggctaaggctgtttaaatgctccctctttgggtgggtaacagctgagtttggtcccattttgttttcttttataatagggcagcactgagttcaatgcttcacaactgctgtgatctccctttccccagtgcacagaaatgctctccacaccatgctgccactgccaggggttaggagaggggtggtgttggctattcaagactttttttctacctcttcggtgcctctttcagtgatatgaagtaaaaccaggtattgtaactgctcatttgatttttagttcttatgaaggctcttttatttgtgtgtacacagttgttaaattagtgtccttcctgggggagatgattgctggaggcttctattccatcatcttgctctgttgtttttatgttttctcatttatctcttttaactgaggtatttatttgcctttaaagtaattactgacatggaaggacttactattttcgttttgttacttgtctatatatatggataatacattcaatatattttaatatgtcttgtccagtggtttttgctccttttctcctttgctgccttcttgtatgttttgtactgacatattttgattctcttttcaattctgtttgtgtatacagacagtacctgaatgtaagcccagcataagataaaaagttcctatgatttacaatggggttatggtttctactaaatgtgtattattttgcataattgtagagttgaaaatttgtaagttgaacataagtcagggacagtatgctgtgttgccagcatcaaatgcaattttgacttacaatatttttgacttctgatgggtttattcttatgttatcccatcataagttgaagagcattggtattctattcatattttatttgtcatcaccattgcaactacacaaagagacttaaagttatagcaagatattttaaaccgataacaacttaacttaaattgcatataaaaactctacttctttacttctctgccctctttatgttactgtaacaaaacaaattacctctttttatattgtgtattcatcaacatagatttttagttacttcccatgctttcgcttttaaaattctataccaaattcaaaagtgatttatacagctatgttacaatacttccagattttatatttgtctctatgtttatgtttacctggtagatttatacttttgtatggctttgtgttgccattcatcatcttttcatttcaacttgaaggattcctttcagcacttctttcagggcaggtctaatggtgatgaattccctcagttttgtttatccaggaaagtcttcatttccccttcattttgaaggcagtttagtactatatagtattctttgttggcagttattttttctctcatcacatcccactccttctagcctacaagggttctgttgagactttagctgatgatttaataggagctcctttgtatgtgacaagttgcttttctcttgctgctttcaagattcactctttgtcattttttttttaaaacaaagtttccctctgtcacccaggctggagtgcagtggcgtgatcacatcttgctgtagccacaaattcctgggctcaagtgatcctcccacttcagcctcttttctatttttgacagtttaattgtgtcttagtgtaaatgctgttagattcgtcctggttggagcttgttgagctttttgaatttgtatgtctactttttccctcagattagaaaaatttccagccatcattttttttaaaagtctctgtggtgccttctctttttcttgtctgtcttagattctcatagtgtgtaggttgttccataatgttacacatagtgtcccataagtttcttatgctccttttacttttcttagttctttttttctcctttgcttcagtaatttcaaaactcctgtctttgaatttgctgattctttcttctcttggtaacatctgttcctaagcccctctagtggatttttaaatttagttattgtattctgcagttccagaatttctgtgtggttcttcttcatagcttctatctcttttttgatattttctttttgttcatccattgttttcctgatttcatttagttgtctgtctgtactctcttttaattcattgaaaattcttatgattattattttgcatttttttggtcagataattcgtgtatttttttggggtcagtttctagagatgtaatgtgtttctttgaataggccatgttttcctgtccctttatatgtcttcttatcttctcttggtactttggcatttgaaaactcagctaccccgtgcagtctttgtggtctggttttctacagggaggactttctccaatcagcctggctagagaatctggagacctgtcaacccttctctgggaatgcacccttttgggacttagtgtgtaatcacgtaacggaagaggtctttctattgaagcgctccctctagtgtctgcctatgatgctgcggtctggctggtgctgcagtaagccacggtactgaagttccacctagtttctgtctgtgatactgcagactgatgctagaacaaactaatagctccacctattatttatctgtgatactgcatattttggtgctagaccaagtcatgttgatcatcttcgttttcagtggcctcaaacctggtcctcattcccgtcagcatttaaattcaggcaagatggaaactagtcctttggcagcaccccaaaaagtcaaaatattggatcaatgttccactcctttcccctcccaaagagaagtcaggagttggggtttcttcccagtttgcatgattattaatgctactgagcaccttataatatttaacaaagttttttttttttcccaataaaatagtgcactttctcagggccatgctgggtactttcattaaattaatacttcattttttacttcactactcaacgtagctgagcagtttccagtgtacaacacagtgacacaggtttcccttgtccaggacttagaaattggagctagatccctccgtcttgctccttggatctatcttccaccccaggtcctatgtagcccggctccacttggagtgggatttctttcaatcaccctggttgtataccctggtcaaggtcagccttagtcttaggtcttttatcagtaaggaagcaagtcctcttctgtccgattttctacgtgatgtaattgatctgagctgtgctgtttcgtgagcatttatctggtagtctcccaacatcccgggaagcaacacctccctaaagcagcctgaacacctggattccgactattttttgtgtctgttaaatatttttaggcttccttttgacatgcctatgtatgcagcgcttttgttctcaccaaatattcaggcatcattatttcggcagcagaatgtctagctaggaaggacctaaacgccttccccacaccgtgtgtgtgtgtgtgtgtgtgtgagagagagagagagagagagagagagggagagagatacgtgtgttatggcgagtgtgtgttatagagagggaaagagagataaatgtgttatagctgcagtggagcagaaagacctctgcttctggtcagggggatctgggtttaaatcctgcccttggcctgatgaggtggcaagaatatgggcaagtcataaatcaccccagccttagtccttagtttcccctttcctctgctccagaggtggcagtgagagaaaagaagaatggaagagcaaggtggaaaatagccaagaagcccaccatcactcatattgaatgagagattgcaatttttattacctgaataataggtaccattactgcctcttaggaggaataatttggcagatttgaaagggcagtggtgaagaagaatgaagcagctttctgcttcaaccctactgagtccagcttgttcaataaactgggtacagggacaggaacacaaagggagactgttcaacaagtttgggtaaacttgacttggaaagaaattggggaaggttgttgttattttgtatgggcttttcctttctcgctcgtcttggtctgccatgttagtagcctttgggttcagcctcccagcaccttgttctgtgtgctttatcctatacacaggagcatcccacaagtagggttggcagtaaagttggccaggggccaccgatgtgggtggactggatgtggccagtcatggtgcctggggcctcaggctctgttaactggatttatcctaagaagggaggggcagggcaggagagtgcttggagccagagagaagatagagaatttcaaccctgttactcagaagaggtgaagcaaagggcagctctttcttcactttccctccctggaacctggtaatgacacatgacaatgctccacatcagagaatgcatctttcaggagccagggaaatggtagacattgatcagccctgggtttgaggccagaacaagcacacaaactccttcttactatccagtattcattgctaccttcccaaagagtgattttcataaatattgtgataacttctagccacagatcatgggacaagctattagagctggcaggactaaggaatgttctctgcagccctagacctaggggctctctcttctttctccccctctgtctcctgctgtctattcatccttctcttcatttctgctctcaccccaatatgagagattgtagggtgtagtcactgattcattcaacaaatattagcatgcgctatgtaccagaactattcttggtgcttaggatacatcagtgaataaggcagacaaaactcactgtccttattaactgaagtacacatcccaattggggaggcaggcaatacacaataataaataaagtaaataagtaaatgatatagtatcttagaaagtgataaggcctgtggaaagaaatatagaccagggaaagggggttggggtaagcaggtggtgaggggctgtgagggccaaggtaagaactttggctttacttgcagtgagatgagcagctgtagcaagttttgggaagaggtgggacatgatctggcctttgtttgaaaggattcctatgctggctatagggagaccagtgaggggctaatggcagcaatccaggaacgagaggatgaagggtgaaatctggcaatggggatagtgagaaatagtcagattctgaatatattttaaagctaatgtaatttcctgacataaagggagcgggataagagaggagaggaatcaagcatacctcctaggtttttggctcatcagctggagagatggagttcttatcagccgaaatgggggagtctgtgggtggagcagagttttgggggataagcagaaggccagattttgggatgtaagctttgagatattattgggcagacaaatggagctgttgagtagacagatggacatgaaattcatgggggaagtcccagctggagaaataaatttgagtccttgagctatatttcaatgatatataaggccattggactggacaaaagtatcagaagagagtatgtggtagttaggaacaagggagtttgaaccagactgcctgggttcaaactccagccaggcacttaggagctgtgcaaccttggacaagtcaataaaattttgtgtctcattttttctcatttgcaaaattaaggtaagtataggttatacctcatctggttgttatgagagtaacgcagtttataacacggaaagtactcagaacagtctggcacacagcacgctttcagtgtatgtcagctacctatctgttttgcagcagatatgaattgctccataatacctgaatattacttaattacagtttttttggaaacaatcttcatctggtagaaaagttacaagtgtgggataaagagcctcttttcagaaacatctgtgaataaattgctggcatattgccttatcgtccctggttatggcttggatgttggtatctccccaaatccacatgttagcacctaatagccaatgtgatggtagtaagaggtagggcctttggggagtgattaagtcatgaggaatccaccctcatgaatgggattagtacccttagaaaagaggctcaagagagctcctcagccatcttttgtcatgtgagtacacagcgtttatcccctctgccatgtgaggacagggagcaaggtgacatcttggaagtgagggcaaaccctcaccagatggtgaacctgctggtgccttgaccctggacttcctagcctccagaaatgtgagaaatgagcttttgttgtttataaattacccagctaatggcattttgttatagcagcccaaacggactaagacacccctgaatatctcagtgcgtatttcctacaaataagaacattttcctgcatgaccaccagaccatcaaaatcaggaaattaacataggcacattattaccatcttatctttagattccctacaagttttgccaattgtttcaataacatgtttttatagagaaaggatccagttacatttagttgccatacctctctagttttccttaatatagaaaaaaaatctcctttcctttactttatgaccctgacactttttaaaagtataggccagttattgtgtagaatgcccctaattttgtatttttctaacacttcctcatgatgagagtcaggttttggcacctttggcaggaatatctggaagtgatgctgtgttctcattgcttccaatcagaaggcacacaatcggtcccattactagtcatgttcactttgattactttgtgatgtcttccaggcatttccactgtattcttttttcctttgtaataagcatgtaatgttaagatttttttttcttaatcctatgaaatccagtttgagcatgtgcctctaccatggttggagagaaagtgaatagcagctattttccatagctccccactccactcttggattggatcagggcaccggggctgttgccttccaagacaaaggagatgaattctggttctcagtctttatgggtcactatggccattgctctttgtccaggcctaactggacaaagtcccatttgaagttggccggttctactacctgctgcagtctctctatgacaagctcttccttggggatatttgatgaagctcccaaagttctggttcttgaagccaaaatcttctctggcatgaattcagcacctcacaggcctggaaatgtctagggctttgcatcctaggagggtgcagttttccatagctcactgaattcaccatccattttggaagatacccttgtttgggcctctgcacagccaaatgtccctcctgccttgctaacagaatagccattccacccagcaacagtttcagggaaacctaggcccttccccagccccaggagatgaatcatcattggtccaaggcagttatggcagccagtcccctgaggctgggacacatgttgagatgtgaaggggagttgtctggaggcttctggggaaaaaattcaagtagctcactgtctctgtgcacagagaatgaatatggtaaaacagacaaacacacaaataaacaaacaaaaaacacttgtatatggatgagtccaatatcacctttattaaagcatcacagaaactacaggttgtggattttgagctttagtttctgagaacaaggtaaataaataataaataagtctgaactttccttctatctgacttttttgctttttcttgccaagcctgagatcacttacatcagggactctggaaaaaaaatgagggttccgaatggttttcatgaaactcattcttttctctcttcccaccttttactaatggaagagtattagaaatttatagggataaggcacacagggaattggtgtgttttgcgtggttaatgcagacatctttttttttcttttctagctttgctgaggtataactcacgcataaaaaatgtatagtttgaagattcgagtatgttcacagggttaagattcactcgactttagcgtgtagaggattctgacgcatcgttataaaacatgcctgctggtgtcactgcagagctctggcagtgctgttttcaccaatgcctttccttcagtattgtatgtttgacagtggccaaattaggcagcagaaaaatgtgatgcatctgcctcatgggaggctgtcaccgcagaaacagagagcaaatgcacctttaagttgcaaaagctgagatccagatggaagatgcaaacgtttggaaaaatatgggctctgcagagccagccccttcctcaccacttacccctgacccaacctccatcttgattacctgagggggcattgcccagtttgtgggagaggggaggagtgcttgagagaaccaacattgatgggcccctgacaagagtactacaacctgctcccgcaaaccccaggtcaaatttggaggagctggggagttaggaggacttgtgtcttccttcctggtgacatggttcctggagttccagctcccagcctggcctggcagcagaagagcagaatgggatctatgctcaacttagggggagaggacctgagaccatcctgcagaatcttctgggggtgccagagtagtcacattttccagtgtgcttaagaagattatgggtggagctgaaatccaatggtgtggagaagctctgggatcagaaagaagttattgctagaagcccctgtgtggatctactgccaggagcttcacagggggcagacatcttagcagatacctgcatggactgatgtcaccaaggcaccttagacaccactggggatgcggaggctgggggaccccgttttgatggaggagatcctaaattgaccatgattaagctcatgggtagggtgtttaaaatataaattatgtaacaaacctgcacgttgtgcacatgtaccctaaaacttaaagcataataataataaaatttaaaaaaaagattatggagaagttttaaaaagtaatacttttgcacacctggaattgtggcttgagagttgtgttgttttattttgatcatatcacctaatacctttaggacacaatttccacatttgtgaactaggactggggagaagagattgtacaaagtggtaccaaaagctttaccagctcagattggctatgatgctaaaggtgcagtgggtcttagatgtctcattgctcaccttgaatgctttctgtctctgttactctctttgcaggaccttctcccagtttccattgaggttactgaagattaccaagacagaccagggtgacagggaacaagggggcatttccagcccctgcagatatcagatccttttcaccactagttcagaccatattttattatttttaaagtgatttgttgaagaaatatgccaacaactctcagtagatatgaaaatagaaaggaaaaatatatctataatcatgccgtcttgacaaatgaaagcattctgtctttctgctttctcttccagtccatgcctgcataagtattaatacttgttttgcaccagagcgtggagactgcattgtatcaaagggcttttgggagaccagaaggatggaaaaggaaaatctggatattttagctctgctgattggctgccctggcaacagaccaaatgactccaaaaataactctccagctctgacccgtctcctgaacttcagatgcatctgtccgtgtgcctacttaacagctccactttgatgacgaaccaacattatatttaacatgtttaaaatggaactgttaattcagttccattccaccaccaaacccatccctccacctgtcttcctcatctcatccattgctcaaccttgtcatgaagtcatctccaatcctccctctccattgcctttcacattcagtccccaagcaagtcctgtcacttccaattttaggctcacctcccgttagtcaatttctctccatctctgctggcaccacctagcttagattacccattgactctgggtttactgcaataacctcacatctgaattttctgattatttgctttccccttgtctacttgctccacggaagtcattgtgatttcttaaaatgtaaatcttgtatttgcttggtgtaatttgcaatctgggcagtgagacatctgagagtctctacctctgcaatgtcgtcccattgtttaaataaatcccaaagtctccactgtgaccagtatccctgtgtaatctgtctcctgcccatacctccagcattgtcccatgtcccattgctcacactctccagccccactggttccctaccatttcctgaaccttccatgctccttcataccttaaagtttggcataataggttccctccaacaagaaggtatttcccaggctctttgaaacttccagatgtcagcccaaatgttcctgtttcagaaaggctactagcttaccattctgtctagctagcagcacttcattattaactctgtgaagatctctatcctagcaatccccattatttgtgcactgtttttattttcttcagagcactcatcacatttgaaattctttcttccttcctccctccctccctcccctgtatcactcccacctttctttcctttctatctgtcctcatcagactgtaccctcaccacaagggtgaggaccacttttaccaatgcttactaatgtttgctcagtgcccacacagtgcttgaaatatagtgtgcgctcaggaatatgtgtggaataaacaaaggcatagccttctttgaaatgaacaaatgttcatctggaaactctggactgggcttccttaggatatgggtggtttccttaaaaggataggcaatctttatgttcaagttgtgacttttctggcagcttcatttttcctctggcttcaaggtatgcaacacctgggatatcctctatgtccttcttgatgtatgatttggggacatcctctatgtcctttttgaagtatgattgggggaatgaggaactagctaaagtttttgagaaaatgttacatgtatatatcacacacacacacacgtttttgagacagggtcttgctctgtccctcaggctggagtgcaatggcgccatcacagctcactgtagactcttcctcttgggctcaagtgattctcacatttcagcctcctgagtacttaacaggtatgtgttatcacacccagctaattaaaaaaaatttttttttgtagagaccaagtctcattacgttgccaaggcaatatatacccaggtcttgaattcttgttctcaagtggtcttcctgccttgcacccccaaagtattagggtaacatgtgtgagtcactggaaccccaagaaaatgttttaagaggccattttgatgtaaaggatggatgcgaggctccagagcaagacctggaaggaggctgttggagtgacctaggtaagtattgacaagggtctgggtgaccatgcagatgaacaggagaggacaggattaatgagacttggaaacttagggcacctagggcacaaaatgtagagacaagatgtattagtccattcttatgctgctaataaagacaacccgagactgtaatttataaggaaagaggtttaattgacttacagttcagcatggctgggaaggcctcaggaaacttacagtcaaggcagaagagaaagcaaacatgtccttcttcacatgacagcagcaaggagaagtgcagagtgaaggtgggggaaaccccttataaaatcatcaggtctcgtgagaactcactcactatcatgaaaatagcatgaaggtaactaccaccatgattcaattcaatcacttcccaccaggtccctcccatgatacatggggattatggcaactacaattcaagatgagatttgggtggggatacagccaaaccatatcacaaggtgttatacatgctgacactgcgcttgctcaggcctcagaatgagtgtcttactttttgtttcctaggaactttgcctcatcctagtcctggctctgcttcaagggggaggtaaattataattcttgtttcatgataccctcatcattgaagaaggccaagacatcctcaaggtcctcaacattggagcccaggaatgggaatattgaagctgaagcacctctattgtgagtagaaaattttgaaaaggagatgcatatctgagggagaatatctctgtttctgtgactataaaggttcaaagtcacagtaaaactacataataaaaatagagcaggatgtttatctcctctgggcatacttacccttttacaaaaagccttttctgtaaaaggcttttctggactacgtcatcttccaaagtcttcacagggccattttggtgcttataatgaaccctcgatctactccagggacacatttcaaacctgggaaagggcacacatgtgttcttccctttccctcaccacccataggcatcaggttggctttactgtagaaccgttggcctgacaggccaggaagcaatagattgaggatgggtgaagatcacccatctgtgtctagaatgctgggcaatgtggctccttggaaagcagtgacaagagttgggtttgaatctggatttcttggttctaccacttgttatctaagtgacattgggcaggtcccctcatctgcaaaatggagcatggtgcccaccttgtaagactggtatgaggatgaaatgagataaaaccacacatgaagtcccaggcccatggtggcacccagtaactgtttttcttccttatatggaactgtagaatgtcacaataggaagggaacttggggttctctagataatgtccctccatttatttttttcctttgaatcttaagtacacagaattgtacctatcataattcatgttgcatgatactataattattgacaatgcatgaccctttttattaatttgtttacctaccccttcatctatatagctgccctttggtcatttgttcacccatctgtctacccatccatccatccgtccatctgtccatccattcatccatccatccatctatcttccctcactccctctctcccttccaatcaaccatgcatctatctatttacctgcatacctatatcaattttatattgttaatctgtccatttaaaaaaaatcttaatataaacatttgtgaagccaccatccatcatgaaagctagaaccttcacgataatttccacctatctttatgtaccccaaattctcatccttctgccctcctacatccaaggtcactgctatttttaatcttgtgttcattgttccttttaaaaaatgggtttcattgtatttctatgtattcctaaaaactaatgttagctgttttcagctttattaaaagaccatcatttttcatgaaatctctgggacttacttacccccatcaatattgtattactaaaatttatccatgttactgtgtgcggctgtagttaattaattttgctttctatagaatatcccattctgtgagtgtactaagtttatcacacattgtactgcagatgggcatttggattgttctcaggttttgctaattttaaacaatgtctccatgtacatatttgtacatatctcctggtgcacatgtgcaagtttcttttgagtgtaacctgagagtggaagtgccaggttatagggtatgtgagtgtttaacacaacaaaattttccaatctgtttcccaaaacagctgtgtccatttatgtgcccactagcaatgcaaaaaagatccagtggcttctttacttttgctatttgaacagggacaaaatgacatctcagtgtggttttgccgtggcttttcctgattactaatgaggttggccatttcttcatatgtttattggccataagtgtttcatttaactcagttttaatgatggggctgtagaggtttcatggcagagcttgggtttcatggcagagcaatgggctttccttgatgagccaggaaggagccatcagaaatgcaggcatctattttcctcagggttggagcctatcctgcctctgctgggtttcctggtcagtatcatggactctgaggtcagacttgccacagaaaattcattcctgggtaaggcatgagaatctccctctcactgttgacctttccagtctaggtgctcccttcctctggtggctgcaggagacagggagggatggccagtgctgttcaggtctcagaaggctgatgaggcaagagaagctgagggagcagctacagacatcatggcaggtcctcctctaagtccagtcctcctaaataagacaggagggactgagggtcctatgtcactgtggaggactgcctttgcggggtctatgacctgtagaggaagcaggggctgaggcacagcccatgattttctcacacctctccttagagtctacctcaagggtgctgtcttcataccagctctctctgtttcttcctccttaagtgccccctctcctgccctgaccagggaacctgcctctttgtacatcctcaggctgaatgagagacagaggaaggtcaaggggatagcggtgcaactctcggggaccctatggatcaacacccattcaaggtacaggagaaatgggagggctccacagccttcttctcacagtgcccctgtcagctggagtcccacccttgggagcctaatcccatctagggtccccccttacctggaagaaaggctcctcctaaggacacagatggcagaaagttccagcaaaggagcaggaaggagttgcacacaggggtacctggtgacagaacaatgtcaggatgaggctagatcctgtttccactagacccccaagcaggctcagccccacccctgactcaggtcccaagactataccctggtcttggggagagtcacctcacctatataagcctcagtttccttcatctgtaaagtggggattataacacgcatttcagaatgtttttgtatcaaatgggagcacccaaagtacctaataggtgctcagtaattgttaaatctgaatggcttttggaggatgggtgggaactggggaaagatatttcagattagcttagttattcaaaggagtatctggtaaaatgagtgggtggtcaggattcagctgatgaaagcagcacttactgcaatttggtactggagacgtaatgctctaaagaggttgccataattgctgttccattttatagataattcagaaagaggtgaagtgacttttccaaggtcacacatggtgagaacagcaaagcctgcatttgaacctggcctgtctgtctctaggtctgagcccttacctgcttggttattccggtcctactctcccagactcgcttgctcttctttgggcctgctcagctgcctactggcctggaccagagcctggttattctgccacacttggcaggtgaactgttttttatcctttcactctgaagtgttgaccaggatatgattgtcttgggtgaatgtgccatctgggttcttggtggggccaagtgcctcacaggtcttgaagtatccatttctctttagccaggcaatttgtgtgactttggggtgaaacctttgtatatggcaggtgagaatggcagtctggagtcctgggacatggtgtgctgagatattcactgtgggcacaactgaaacaatagcactgccttcgttagtttcttcctttatgcaaagcgtgctcaaggggtgtctacaccttcctaggcagtgtgcagggttcttggaatacagcattgaccaagacaggcatgttccttgccttatggagctcccgctctggtgaggaggacgggaaggaaacaaagcagtcacatgactcctacaggagttccaagagcctacaatagggacaattgacctggtctgcaggagggcaggttaggaaagggtctccagaggaagtaacctttgtgtggaaatctttgaatttgaaagattcaaatatgaaattcaaatatgaaagacgaattaagagttaactctatgtggcagattgcattttccaaaaattatggcagccacatactcttccagaactttgctactccgcattagaggaggagtctatttctgctcccctggactttgtaactgctttgatgaatagaatgtagcagggacaacactgtgtgacttctgtggctgggtaatgaaagttggtatggcttctacctagctctttcttgggacacacccttgggacacagccaccaagctattactagcctatgtggaaatgttggggaagcaggagcctaggagagccagactaatgctactttaagttcaactctgtcttggaactaacaaggcacattccttgctggttacgaccgacagttataagatatttacaacggaagaaaagcctaaagattcctacaaagacacatttctataacagtggaaagtcaggatgtcccaatacccataaaaatatatgttttcaagatcattatattctttgatgtactcaaactctagaatgtcaaggatagttttctttaaatcaatagaataataaattttgtcacgctgtctgctcacatgagtgtagacacagcttagcttagcttttacatggacaagacacctttataagaaaaacttaaagaagaggctttcctctgctttctttctgaggacaccccaccctgtaagtgagtaactttcaataaattatctcttctcactgtactctgtgacttgcctttaacttcttcctgtatcagatccaacaaccccctcttggggcctgaatagggaccctttttctggcaacagaaagataataaggaaaagcccatgccaagaagaacaaaggccccaagccaacagccaggaccaatggtcaggcatgttagtgaaggagcctttaggtgattccagcctctgaattgtccagctgaggctcaaccatcatagaacacagcaagctgtccttgcccagccctgctggaattcctaacccacagcatctaacagcatagtcatttaagggaatatggagtaaatttggaatactggaataaatttggggataatttgttatatatccctaataattgtgaaacattaggcaaaagggtttgtggggcaggagaaggggggtgctgggagaggttgggggtgggaatggcatctcagcagacagatggacctgggcagaggccctgagtttccatggactttagaaagaagatcaaagtgaatgagagagaggatgggtgagtgaggctgaattcatagccaatctggaggctggctacacttaaaggtggcctgggggcacttaaagacattctaaggcatacgaacattattttaatacaattaatttccagatcctgaaccctcataagactgtttacttagattgatctgcctgagaatgagcatcagggccattttcttttcttacctccggtttctcaattttccttctcccatatcacaaaagaaaggccttcctcccacacttcctgaagtggggcattgtccttggtgtaaagactttgggatgcaaaataaaaggacatttcaaatactgctggccaggaagcctgctttaaccaaagcaccatccactcccccatctaccttgccaaactgcatttccaataccaagttaatggctattttaataattacttatcaaacatttttatatatttagattgtttggatctattgtgcaattcaatccaaaagaatgttttttgacactgagagccttatggtcataaaaattttattttaaatttcaacttacagatgtagttttgcttgagttctgtgttctcatagttctctgtgatatgatctgtatgattttatagtgaagaaaagattttccacaataaaatatgttacattaaggtaaaattcttcatgggagttagaatggaaatacaactttaagaagtaaaaggaatgatataagatgcctgattattaaagaagagcttctttatgtatgtttaaatggatcatggtggaaattaaattatgatgatgttatttttttcactgaatatgttttggagtgatgcaacatttgtaatactccaggagttatgttctgtgcaaccatttaagcttaaaatgaaaaattttagagtcaactttaaaatttatgatacactacatagttcttcacaattattttagggaaatatacacaaaaatgcttgaatatcacatttgaacatcccagtaataattttttttttccctaagagaagtgatgagctactgtaggattttaagcaaaggagagacatgatctggtttcctttataaaatccccttggctgctgggagttttggggaaggactgtggagggcaatggtggatattagcgatcaattaggaggctcttgcaattgctcatggatgttggcttgagcttaactatgaacttaagtagtggcagtggaaaagaatgtatgagttcaggaaatatttgggagtgaaatctgatagaacttggtgatgggttgtgtgagaagaggtttcaggcttggatgacttggtcgatggggagtgtcttcttcacttatatgggtaggatggaaggagcagcagttctgagagggttgggggagcagcgcaacaccaatctctgggctgaccatgactgaaccaccactcctggggaaggtgggggtgggtattgcctttctctggtatctctgaataggtggttcttacaggaggcagatcagaggtagttatctgaagaggtgtaacactgggttcaaattccagcatgcttactgaagaaccctgtgaccttgggcaagtcacttcacttttctgggcctcagtttcctcatctgaatgaagcaaggacacaaagctgcctctagtttctttgagatgattgatgtggaggctagaattcactttccaggctggagctctcttgtggtatcttttggttaagcaagacacacttctattttgggctggaggcatttgagtaatgaggagctaaattcttgacaatgataccataaattatctcccttatggggttgctgtggagactatggtgctattaatgggtctccttggttttctctggctggagctggagagaaggaaagagggagttctggaaccctggaaggaacttcacccatctgcaggaggtaactgagactactctatgctgaggttggttgggggcaaaggacagtacaggcccctggggaaagcccctatgaaggcaaaggcagatggacttgaagtaagagccagaaagggcatgtgtgtgtagcctgctttgctggttctcctgatgccagggtgagtttaagaagcatgtttcaaaggtggtgactggtggcaaggcagtggtggcatggtggtttgaacaatggtgttaggagttcccatggagagttcaagtgggagaaacttctttgctgtgaagccctaggtgatcaggtccctgcccctctcttgccagcctcttccttttccatgcactcgtcctctcactaagcctcagccacactggcttcgtctctgcttctcagacatgtcttgctccccgctgcatcacagggccttttcacgctctgtttcctgtgcctggaacactctgcactttgcttggctgactccttttcattcttcatgccttggctcaaacatcagttcttcaaaaagacatttcctgagtaaactggatttctctccttttcatatatttcagcaatctgttctttctcttcatagcaaatgtgatgaatataaccatatagttgtttgtgtcttggttgatcgggttcacatgactgtaaactcagcaaggcagaaccaggtctgcttggtttaccatggaatccccagcaccgagaataatgccaccacatagcagatgctcaacaaaacctgttgaatgggtgaatgaagttccacctcccaaagacgctagagggaagggagctctgaaagagaagaactcgatcatagcattatgcagaaggaggatggtcatataaaacagggaaccttatcaccacctcactgagggttttgtgaggaatgaatgggaggatgcaggtgacatgcttcaagcagggagcctacagtggtcacaaaaggttggccctgtttgtgtggggggcttaccttggagaaattgggagatgttcacgtgccctctgaggggactctgcaattcactgtgagccacttggcaggtgacctgggagtggagtgaggagaagccaagggtcactgtagcagtgctgatgacggtgtaggaggaagcatctgcatgcgggaagacctgggtctgaaaggctggaagctctatgccatttttgagccatttcacatatatgttttcggcaaagaagccagttgaggtgcaggtgagattcactagttggcctgggctagccctgttggaagggccagaaatctttggaagagagagcttagctttgatcagggcaagggtgaagagaagaaggagagagaagagagaaaaatgaagagggagagttactctctagcccaatactcaccctcatggttcactctgcttgacttcctgccccaatcgcccatctccagttttctcctcttcataaactttatcattactcttcttgttataacggcctatcaactgacctcactgactttacctctcagctcttccaacctacacttggaaatcagaccatggtgatcttgctaaaatggagatctgaccatgttattcccttgctcaccttcctcctgtcccctctcatccctatcttcttcccaaagtacattgtttaaaaagtcacataaggtatatcccgaaaaacagcagacccctggtttcctctccttgcaaatattatagaccaacacgttttaactattttagtggattctttgggcatatttctctgtgtttctatgttgatactaacatacttatactgttattttcatattttctcatctttttcagttttatatattatggatctacctactgctatggaagatgatgctctagctctcttacagctccttctacctgccatccatatttctccgcctcacatcctcctattaaagacacatcataattttttgttttatcagtattcagcatttatattattatgaccaaatgagcattattcataattgggccatgtaatatatcataatcatatttcctgtcttgtacagctttttgttttccgtggaggtttttaatatatattttttaatttttaatttttgtgggtatgtagtaggtgtatatatttacagggtacatgagatgttttgacataggcatgcaatgtgtaacaatcacatcatggaaaatggggtatccaacccctcgaacatttatccttcatgttacaaataatccaattacactcttttagctattttaaaatgtacaattaaattattgttgactgtcatcatgctgttcttttaatggtgtcattattttcatttgcttcattttctatgaacttatgacaaactcatccccaagctttctgccagatttccttcatgtttgaaactactaagtactgcactggacttcactttagggtacatgtgtattcaggagtgcacaaagatttttcaggggattgtataggcttgaattaaaaaatctttttattatgataaatttgtaaacatacataaaaacagagagaaagtattcacaatggcattttaacagctacaaacaaatggctgatcctgtttcgtctacacttctcccatcaactgctgggttagtattttttattgtatacatttaaagtgtacgacatgatgtgtagctatacatacacttagtgaaatgattactacagtcaagaaaattagtatatccagtatctcacatagttaccattttcgtgtgtgtggtaaaagtatctaaaatcctccctcttagcaaatttccagtatacagtacaatactattaactgtagtcctcacactgtacattagatctctgggcttattcatcctacataacaaattttgtactcgtggacttccatctgtctccccattttttcaacttcccatcccaggtaaccattgtcctactctgtttctatatattcgagttgttttgttttttatattttacatgtaagtgagagaaattaaaaataaaactaccatataacccagcaaggtttttttcaggtatatacccaaagaaaatgaattcaccaccttgtaaatgtatctgcatgcccatgtttattgcagcattactcacagtagctaagatatagaaacaacgtaaatgtttgtcaatgtatgaatggataaagaaattgtggcatatgtatacaatggaatattattcagccttaaaaataaggagatcttgccatttgtgacaacatggatgaacctagtaagcattatgctaagtgaaataagccatacactggatggttttaaggtaaataccagacatgatattatttcattcttaactacttcagcatgtagaagagttaagaattctttttttaaacaataaaatgtcattattatacttaaaatttaatagtaattccttaatatcatctaacatttgtcaacagtcaaatttttctgcttgtctcataaatataactttacagttggtttgtttgaatgaggatgcaaattaaagccatatgttacattttgttgatgccttttaaacctctattaatctaaaggagttccacttcctctttgttctcttgccatttatttgctgaaaaaaccaggttgttgactctgataaattgcccacatccggtactatttcccagtttcccaactgtattcagctgcagtcgcgcgcagtggtagtgggcttgataacatgccctttattgactggcttcaccactccttactgttgttaattgcactgaaatccttgtcttacagttggcttctcactgaacctatctctgtgttttaaagtccctcgaaataattagtctttgtctagttaagccatcaatatatagttagattaattagttttactttagatttagtaatttagatttttaggattttttttcattttggaatttattaattatttaaaaattcatgtgcttagaaagtcaaaacgtaagtcacagcacattcagagaagtctggcttcccccttgtctcttccattctgttccctttctcctttacatgtaaatttttaaattatgattttagtttattcctctttttctaaaaaaacaagacacaaggccgggagcggtggctcactcctgtaatcccagcactttgggaggccgaggcgggtggatcacgaggtcaggagatcgagaccatcctggctaacacggtgaaaccccgtctctactgaaaatacaaaaaaaaattagccagacgtggtggcgggcgcctgtagtcccagctactcgggaggctgaggcaggagaatggcgtgaacccaggaggcggagcttgcagtgagccgagatcgagccactgcactccagcctgggcgacagagcaagactccatctcaaaaaaaggaaaacacacacacacacacacacacacacacacacacacacacacacacacacacaaaaccacaagagacaatatacacatgcttgtatttctcactcttgtaaacataaaaggtagtgtgctccacacactcttctatatattttcctgtttaatgatatgctgtgggtcactctgaagtggtgtgctgagttcctccttacgcccttttaaagtcacataatacccagtgtgcggctgtaccataatttagtaggcagctcagcttttgctcttaccaatagtgttgtgatgaagagcctaaggataagtcatcctgcacttgtgttagtagatctttgggatacatttctggaagttgaattgttgggtcacgaggtaattttgctagatattgccaagttcacctctttatgagttatatggttttgcattcctaacagcaaaatatggagtaattgtttcgccttagcttccccaacagaacgtgctgttgaacttttggatttttggtcaagcagataggtgagaaaccgtgtctcagtgtagtttttaatttgcatttcttcctatacaagggtggttgagcgtatttttatatgtttgaaacatttgtatttcattttctataacttgtcttttcccatttattgcccataattctaaaaggttgactgtcttctaaaattttagaagctttctctatattagggattattttttgtctacgatgtaaatcgcaaaatagtacacacacctatacacaagtttctttttgtacaatgcgatcaaaattataatcttttaaatctttctgcattttgagttacagttgggaaggttttctccatttctaggttataaaagaatatatatatatatatgttttcttctagtacttaaatagtttcgtttcttacatttaaatctctgatccacttggaatttattttggtgtatggtgggaggaactagatagatacacttctggatttttctatgctgttccattggtctattaactcttcaaatgatccaacaccacagttgaaaagtctcttctttttccactgacttgccttcatactttttttttaagcaatcaattgaccatatgtatgagtctatttctagaatctctattctgttccattgatccacttgtcttttttttcttttctttttttattttttaatttattttattttattattattatactttaagttttagggtacatgtgcacaatgtgcaggtttgttacatatgtatacatgtgccatgttggtgtgctgcacccattaactcatcatttagcattaggtatatctcctaatgctatccctcccccccacttgtctatcttgatgccaataccacactgtatgattactatagctctataataattttctgttcatgagggatattgatctatagttttgcttttctatgattctttatctgtaatgctggcctcacagaatgggaagcctcacttcctctttaattttctgaaataatttgagtaaaattgttagtacttcttcctcaattgtttgatagaattcctcagtgaagtcatctgggtctgaattattctttgtcagaggctttttaaactacaaatttaatttctttaatagatatagcgataattagcctatttatttcttcttgagtgagctttagcagtctatgtctttcaaagaatttgtccatttcatcaaagttgttaagtttattggtataaagtttttcataaagttccattataatctttttaatatctgtggagtctgtagtagtgtcacctctctcattattgatattggtaatttgtatcttctttcttttttcctgattaactgtgtggatatggatttattaattttatgaattttctcaaggaaccagcttttgctcttattgattttttctatattttttcattttatgtttctgatttctgctgtgttccttattatttcctttcttcattttttcctactttttgaagtctctgaaaaaaacctttcttctgtcctaatatagggatttagtgctatgaatttcctgctaagtactcttttggctgcatgccacaaatttggtatgctatgctttcattttcattcagttaaaaatattttctaagccaggagtggtggctcatgcctgtaaccccagcattttgggaggctgaagcaggcagatcacttgagctcaggagtttgagatcaacctgggcaacacagcaaaactcagtctctacaaaaaaatacaaaaattagctgggcagggtggagtgcacctgtagtcccagctactcaggaggcttaggtgggaggatcacccaagcccgagaggttgagactacagtgagccgtgattgtgccactgcactccagcctgtgggacagagtgagaccctgtctcaaataaataaataaatacatacatacatacatatacaaaatactttctaatttttcttccgatttctttttcaataatgtattattcagaagtatatttagttttaaaatgtttggagattttctagagatgtttgctttttaaatttaatttctatgactactgagggttaaattaaataaaattaaaaataaataaataaatttaattccattgtggtcagaaaacacacttctcatgacttgatttatttcaaacttactgagacttatttatggctgagaatacaatctatgttggtaaatgtttcttttgtagttaaaaagaatgtgtattctcttgttttgggatggagcattctataagtatcagttagctcaagttggcttatagtgctgttcaagtcttctacatctttactgattttctgcctcctttttttaccaattattgaaagagaggttttgagatctgactataattgtagatttttctatatattcttgcaattccatgagttttgttttatgtattttgaaactctattattatatgcatcaacatttagaattggtatattttattaattgataagcttattataaatgatattctatgttctcataatttctttgttctaaatacactttgatattaatgtaggcattccatatttaaaaaattattgttgatgttgcatatatttttctgtccttttatttttaatctatttgtgcctttatttttgaagagaatcaattctctgcaggcagcaaatagtggatcctactttaaaaaatataatgcaaaaatcactttattttaattggtgtgtttaaaccatttacatttaatatgattatttatatgactaggtctaaatctatgatcttgctacttactagcctcatctcttttccagtgtacctcattttctgtcttcttttggattgatttttatgattctgatttatgtcttttgtcagtttattagctattactctttgttgtgttattttactggttgttttgggatttctggcatacattattaactcatcattatttaccatgagtgataaggtatcacttcacacatagcataaaattcttacagtaatatatttctgtgtctctcttcctggtctttgtgctatttttctcacacattttacttccatgtatgttataatttgtcaaatatattattattgtatttgctttgaacagctatgttttaagtacatttaaatatacttttaaaatattttcccacattgttactatttctcttgcttttaatttctttgtatatatccaggtttccatctggtatcatttcactactgttggaaggacttctttttaacatttcttgtagtgcagatctgttgatgatgaattctttcagcttttgtatgattgataaaatctttattcttcacttcaaaaattgtggtaaagtacacataagatctgccatcttaaccattttttagtgtacagttcagtggcattgagtacacatttagagtacagtttcagtggcatgagtcacattgttgtgcaaccatcaccactatacatctctagaatgctttccatctagcaaaactgggaaaatatatggaatgcatcacaaatttgcattccatccgtgtacacaggccatactaatctctgtatcatttcactcttagtatctgtgctgccaaagtgagtacttaactccagcctggatggcagagcaagactggctcaaaaaatagataaataaattaaatgcttaattttatgtatttattttaaaagatatttttgctaggtaaaaattctagaatgactaattaattattgttttctttttaaaaatgctttaaatagccaggcatcgtggggcatgcctgtaatcccagcattttgggaggccgaggagggtggatcacctgaggtcaggagttcgagaccagcttggtcaatatggtgaaaccttgtctctactaaaagtacgaaaattagccaggcatgatggcaggtgcctgtaatcccagctactcgggagggtgaggcaggagaattgcttgaatctgggaggcggaggttgcagtgagtcgagatcgcgccgctgcactccagtctgggtgatgagggtgaaactctgtctcaaaaaaaaaagaaaaaaagctttaaagatgtatccccactgtcttaagcttgcattatttttgatgaaaagtctcctgtattttttgttcttttgtatttaatatttctttttggggggctgcttttaagatattttctttattggtttgtgcaacttggtttgtgcttggggttcatcgagtttttggatctgtgggtctacagttttcatcatatttggaacatatgtgaccattatttcttcaaatattctttctgtcccctcttccactggtgtctccaatacatatctattaggccacttgaaatttccccatagctgctgattgatgctctgtttatcttttttttttgagatggagtctcgctctgtcgcccaggctggagtgcagtggtgccatctcggctcactgcaagctccacctcctgggttcacgccattctcctgcctcagcctcccaagtagctgggactacaggcgcccgccaccacgcccgactaatgttttgttttttttttagcagagatgggatttcaccgtgttagccaggatggtctcgatctcctgacctcgtgatccacccgccttggcctcccaatgtgctgggattacaggcgtgagccactgcatctggctgctctgtttatcttttatacagtttttaatttttttggtcttatatttggatgtggctttatatattccatttttatctctctgtgtcattttgaatagtttctgttgttgtgtctttaagttcattaatctattttcttcaacatcttaactgctattaatcctactcagtctatttttcatcttagatattgcagctttcatctctaaaagttcaatatggatcttttaaatattttccgtgcatctacttcacatattcagtttttcttctagcttcctgaacatacagagtatacttataataactttaatttctttgtgtactaattttatcacctgtcttttctggttagtttcaaatgattaatttttcttattatgaatcacattttcctgccattttcatgcctggtaattttttattggataacagatattgtgacttttacttcaatgggtagtgggtattttgcctttctataaatatgcttgagcttgttttgggacatggttaaattacctggaagcggtttgaacttttcatgttttggacttaagctttgcaaggcatgcctccagcatcatttggtctagggctaattctttttcctttactgaggcagaactcttctgtgtattctaccagatgtcccatgaattataagtttttttcactcaggttgtaaagatcaggcactattcttagccttgcgtaagctccagaaatttttctcctctggcctcatgtacttttctcatgtacataatacacttttcaatacttcactgaatattcaatggggaccttttacagatatttggagttctctttctgtgaaacgacctgctctttggtgccctaccctgaaaactctagtcacttggcctctgtggacatccaggtccttcttaacaactcagggagaacttcgggctccacctgagttatctcgttctgcatggtggtcttaaagccttctcagagagtactcttagggcagccttagggctcgcttcatttatgtcccatttcacagggatcactgtcctttgttgcctggtatccaatgtcttgtctaccatgttttaaataatttgcccagatttttagcaagagagtaaatccagtccccatcactattttggtagaagttgccccaattatttaatttaatttaattttgctattgtactatgtgtttgtcttttttcactgtatgttctaactggtttttctttgtatatgtgaaggttgttgatttctgtttgttgattttataacttactatgttacttaaattatcttgttttttatagcagtttaatgttgattctattaagttttccagataccatatcatctacaaagagagatagttttcccacttcctttgcaattaatatgctttttattgttctctccttctaaaagcattgacaaatacttcaacgtaatgttaaatactattagaaatggtgggcatgagtttgaagactgcttaagtattctactgattctatcttttggagatgtccctagtaatgctgcaagtcctcctgttctggaatggcccagtggccatttctatgcctcctgcacaactgttatcttagggtttccaatcccctattcctagttctcattcttacctttttttttttgtatgactcctattttagttaagcataagagggtgtaaaaagcaattcttgataatcttgcaaactccatagattgtctgggtaaatgattttagctttgaaataattttccctaagaattgtgaaggcactattccttgtattcctgggtctaatattgtccttaggcatctcatgctggtgtcactcacagtgctttgtgcataactttttagtttcaattctttaaaattgtatgacattctctttgtccccaaagactgcctaccattctccttgtttctccatggctgtaagctaaaatgtgaaagtcccctaaattatcttgatgtatgtttctatggttctgttacagtaaattatcacactcatttttttaaaaaagaatcataataattaattcaccaatacaagtacatctgaactaactgttgggcttcccaggctttcctttaatgggtgctgtttagagtcttgcaaggtttgtcttcagccatgattgaatcagccaggaccaaactcgagaatacacagaacttatagaaacaaaggacaaaattcaagaaatgtaggaattacatattctatatcaataatctacatgtgattcttataactttctgcctcaataaatttatcattcatatcttatgggaatctatggttccatgcttttaagattatgtttttaagtttaattggttgtaatatcctgagtattaatgatgtatagtaatataataattattatacagcaggcactcttctaagtgttttccatttataagcccattcacatttataattcttataacaaatctgtgaagtggatactattgttatccctaccttaaacacaagggaattgaggcacagagaatttaacattttgaattaagaatcttaattaagaattaaggtcacataggctgggcatggtggctcatgcctgtaatcccagccctttgggaggccgaggtgggaggatcacttgaggtcaggagttcgagaccaggctggccaacgtggcgtaatcaggtctctactaaaaaaaatccaaaaaaattagccgggcatgatggtacatgcctataatcccagctactcaagaggctgtggcacgagaatcacgtgaacctgggaggcagaggttgcagtgagctgggatcacgccactgcactccagcctgggcaacacagagagaccttgtaaaaaaaaaaaatagaattaatgtcacatagcatgtaaatggcagagcaagaagttgatcccaggccatctggcgctgtagtctacttttacccactgtgctttgtgggcctttggaagctgtaagattctaaagagttaggagtctactgatagatggcgctggggttacatttcaccctgttccttcactgtgacctctcactatccccatcttctattcataatcttggcacaagggctaacaaagggggagccttaggctaggctcccagggattgtaatttgttttagaacaatgcgctggatttctagggatctgtactccaccatgcacaaacatctgggtgccttgtccagacttaatcttcatgtaggcttcctttctggaatttcacacagtagtaggtgccggctctgctggtgtgatgcttctgatacagatggaatagtttgtgctctttctatttgtgatgtctgaaacagttcttatccaggggaagttgccttctttttgactgtagattaattcccggcctggtccagctcctctgaaccactggatgggccctacggggatcagggaggtcacagtgcagtgtagagtggccgcttctccagctgcgactgacacggacttctcaggctgaattacccgcagctcctcctcacccgccactcctggaagaacacacgtcagctccaagctccagctggggatgaggctgcggtccaggtgcctgggttcagattgcatttgaagccccattcattctttctttccatatcatgtattagcttttaggatgggcacattccttaactgggtatcaagagagacatagagacaagatagacagacagcccttgctaaggacacagtcaggaagtcaaaagagaagaaatacttctagaaaagatgttcaacaacaccagtaatccagtgaagtgcatagttaaaccacacacaaattgctaacgtccatgacagactagctggaaaagtttttaaaaaaaatgtacgcaggtttcagcatatgaaagttagagcacattttcaggctgcaataaatagtagaggcaggttggtaccaaggcaagcagagaggtcgatgaaacagaagagagaacctggaattggacccaggtaaatagacagatttattgtacgatcaagctggcattttatgtcagtggaagaaagctctcttgaagaaggcaaatgaaactcctaaaaagtagctgtctccagggagtcagaagagtatgggggcttttgttatttacttgtacgttccttccctgtttggattattttgacagcaagcctgaaatacaataaaaataaaataaaataaaacatttctccctcctgcaagctaagagcagacacaatttttagaatattagcttagcaaacatgaaaaagattgccaattttctgtgttgctaaggttgtggtgaggcaggcgctcccacatactgctggtgggaataacaatggacacgatctctctagatggcaatacagcatcacagtcatgatcttatgatctatgtccacgtgacaaacccatatttaaacaagtaaagtggagatactttaaccaaatctgttttggtcccaaatgttcaaaataccccctgtccattgctgctgcttctgtgctgggtgtggtgagataatatattactgatattgagacactcacgtttcattgggaaatggcttttgaaaccaaaaaacacttttgaaatgcaatttcccaataaaactcataccctttgatttagtaattcctctttgacggccttattcaaaagaaacaatcagacaagggtgaatatgatttgtaaaggaatggtaatcatagtatttacaatatagaaaagtttgatgcatggcccatgtccaagaataggagtgagttagataaatgatggtacaaccacaaaatggaaaactatgtagagattgaaatgatagtgttgatgtatatattggggatgtattgatgatgttgcagacacatatatatttacatagaaaagggtccccaatttatcattgagtaaaagaacaaataaaccaccatattttgtgtaatcttatttttgttaaaagttcgatgtatctagaagcagcacagtgaagaggtcaaagtaagagctagtggagtcccattgacccaggtttcaatgcctcctctattgcttgattgctatagtttaaatatttgtcccctccaaaattcatgttgaaattcaatcctcaatgtgcagtattgagaggtagggtctttaagaggtgattgggtcataaggactctgcgttatttcacaaattagtggattaatgggttatcatgggaggggaactgttggttttataagaagagagagagagacccaagtatagtatgctagcatgctcagtcccctcaccatgtgataccctgtgctgcctcaggactctttagagagtccccaccagcaagaaagctctcaccaaatatggccccttgaccttgaacatctcagcctttacaactataagaaataggttctttttctttataaataatccagtttcatgtattctattctaagcaacagaaaaaggactgacattggtgttttactttgcgaaaataacctccctgaggctctgttttcttatctatgtaatgtatacaatgtggaaagtaaaacttcctcttgcaattttgttgtgatactgaaacctgaaaatctttgagaaacactcaggactgtgctcatagaaggacttctgtgaaatgggctttccattcttaactgcaagtccagtaggccaggctccagccctgacaacctggtgattctaggaagcgcacaccattgcttggctttcagttccttcttctaccaagcctgatggacctttctcagttcccatgacttctgtgagttctaagtgaagacatagacttgccaaagacacagagtgagagttgcaatggccggatgcagcaggactattttcgtgggctcatatttgcacttattaagccctaaaaggctgtaacaaccagagctcacataggtggttctgtgtgctacacattactccaaaaacttaactatattaattaactagtttgattctcaccacaactgtattggaaaggcattattatttatcccgatttcacagacaagaaaacagaggcacagagaagttgagtaacttatccatagtcaaacagcctacaaatgatgaaacttgcatttgaaccccggcctgtcgtttttttttttttttttaatgcctgtgcttttaaccactttattagttggactctaaattgagatgttaacaccactgggagaagaatggttgcctctcctgactgtgcagatcatctttggagagaagagagtagacaggcaggagaaacacccgcatcaagaacgtaatcctaggtttctgagattctgggagacttactagtctaaaaaggaccatttagcaattttttctaatagttctacattgcatgtgtagtacttgttgttatctatctacctatctatctatctaatctatctattaatcacctatgcatccatgtgtactcatcttaatgacagcatccctgtctccctcctggggaccaaggggtcaaatgctgctcctctacttcttctctcaggatggcatcaggtcctgcaggtcaggcctagggggtcgtggaaccttcacaggacatcaggggtgtgggaagtgagagggactgggcacccctgtcatggggaaacgcctggatgggagagaaagcaacccctccaagcaagaagaattctggaaggatttgttttggagacactagttataaaacaaactatttagggaagtgtcttaaagaggaaggggtggcaaagaaagaggccctaggacaacagagattcatccgccccactgcaggtggcgaaatggtaccgccgccaaactcaggagagcatccctgcatcatggtacctgagggtgggggcactcacctgtgagtcccagcagccggaggcagcagcagggttggacgaaatagtttgtgctgtttctctcaggcagggccgagaggcaggtatgggcatcatggtgggccctggagcctgctctgcctgcaggtctgttcttgggaggtcttggattctgctctgctgagagaggcaaaactatgtgttccatgatataagaggaagttactatgatgggaggaaagggctgtaggattatgaccgttccagtttctagattgtgaaataggaatcagacacaagctaataagttactgatataagggtcccaaggtgcttggaggggccctggcagacacccttagtgcctaggctgtgtcctttgggcccctcactttgtgtcaggtgtgctggtgacccttcctcatccaggagcccaggaacagggtctgccatagagaacggtgtgtccagcctcctgtgatagtccaagacctgggctcagatgagctgtgcagctagtcaggaggagggctcccgggaatggggcttcacaggtgtggatccctgtttttccccactccagaggtgtcagttgtaaaaatgatcctgaagccatatctgatgggaggctttggctcttcaaagtacgcttacaggggaagtgactttgagtgagcaaggagttcgatcttgggaggaggaggatagtttctgttttagagaaaaggggaagaagcctgtgtgtgtcaagcggggggtgcagggccttagtgtgctcatactgcaggaacagtgacatgcagaaacgcagctgggaggaggaggggtatctcttttttctgtccctagtctggggccacctcttgggagaagggagtggaggagatgtagaaacactcacaccaagaatacatctcctctcctccttctgagcagcagccacctgcacatgaaatcacattcagagcctctagccatgagctcatcacttctgtggacccagtgccagacactgcctcctgtgactcagtttccccactgctccccacccctgcctccttaccagtggctgaccggatgttggtgatgagaatggtgatgagaaggggtggaatgaaaggggccaatcagcgatgagatttgattgctctgtagcatgatgagtgtccctctcccctcgacaccttattctagcttgttaaacattttttctgagagggatttcttgacaaggaactggccagagtgttccgtttagcactctttgttctaactctaatccctgtcttcactgatgacagattctattttctagagctgactgcaacaaggtccctcttcactcatgctcttcgacactcttcccatggagatgtaggcatatgttccctccccctgagtttgggcaggtctgtgactgcaacagaagggatgtgatgtgacttctgaggctagaccataataattccctgcatttctacctggctttcttgggatgctaatttttggaaccttgccaccatgctatgaggaagcccaaactagcatgcatgaagagatcacattgcagggacacatgtaagagttctaactgacatcccagctaagatgcagccaatatccattatcaatcatcagacatgtaaaagaagaagcttccagatgacccagcagttgagtcatccccaggtgagtttcccaactgagaccccaggcaacatatagcagagataagtcattcttgtaccctgtctgaattccttacccacagtgtcattgatcataataagatggttgtttttttgaccttgtgttttggggtgttttgctatgcagcagtagtaactagacagcacccttggcaacatcttccccacccccactgaccacactaaaattaaacctttgtcattgttttagtaaattgttgtaatggatgctttcattactgggtttcaatcatttttatttttctgatatagggatttaaggctataaattccaagtacagcagtaactacatgcctcaagtttaatgtgcagtattttaattattatttagtccaaaatattttctagtatctgtggtaatttcttttttgataaatcagttatttagattatttcccaaattcctaatatatgaggattttctaatgatctttttgtaaatatttatagtttaattccacaatgatcagaaaacatacttatataattttgatatttcaagatttgttgagacttgcttcttgaccaagcttatgattaattttagttaatatctcacatgggcttgaaaaggagctgtgtttttcagttgttgggtgcagtgctcaattacatcaaatttgttaatcaccttgatcaaatcttttgtatccttactgacattttgtctgcatgtcctcctagttactgagagaactgctgtggtagtcagcctttgagattatctccagctcctggcattcaccccactatgtaatcccttcctctggatctagtgattcacttctaatgaaaaagtaaaagtaacaggatgtcacttctgaaattagcttataaagaaattgtgacttgtatcttcttcttcccctctctcctgcttcttgaggagaagcagctgccatgttgtgagctgtcctatggagaagcccatgtagcagatatctgatgtcttcagccagttgcccgcaaggatctgaggcctgccaatagccatgggagtgagcttgaagtggattcttctccagttgagcctttggattattgcattattggcagacaccttgattgcagccttaaaagagaccttaaaccaagatcactcaacctaaactatgtctagaatcctgactcacagacactgggagacagtaagtgtttgttgtttgaaatcactaagttttgggtaatttgttatgcagcatagatgactaatacagatttgttaagaatctggtagcttaattgtgagaaggcaatgtgaaaatggaacacagagagatttaaagacactggccttgaagatttattctatgctgctgacaggccagggatgctggcagcaaaccagaagccaaaagagaaagggaatatgttctctcctagaacctccagaaggagcagttctgctgatgccttgatttcagtccagagatgcagatttcagacttctggcttctagaactgtaagagactaaatttggtttttaaacaactttattgagatgtacttcatacaccatacaatttacacatttaaaatgtacaattcaatatttgcagatatttgtctgtagatatgtgcaatcataaccacagtcattttgaacatttttatcatctcaaaaaagactccatgcctttcatgtaataacctccattttccctatctttccaccatcccccaaatcataagaaatgttctgtctttaatctactttctgtctctatagatttgcctattctgagtatgtcatatacatggaattatttaaaaaattgattttttaaattatactttaagttctgggatacatgtgcagaacctgcaggtttgttacacagttatacatgtgccatggtcatttgctgcacccatcaacccaacatctacattaggtatttctcctaatgctgtctctcctcttgtcccccaccacccaacaggccttggtgtgtgatgttctcctccctgtgcccatatgtcctcgttgttcaactcccacttataagtgagaatatgtggtgtttatttttttgttcttgtgttagtttgctgagaatgatggtttcagcttcatccatgtccctggaaaggacataaactcattcttttttatggctgcatagtattccatggtgtatatgtgccacattttctttatctatcctatcattgatgggcatttggggtggtttcaagtctttgctattgtgaatactgctgcaataaacatacatgtgcatgtgtctttatagtagaatgattataatcctttcggtatatacccagtaatgggattgctgggtcaaatggtatttctagttctagatccttgaggaatcactgcactgtcttccacaatggttgaagtaatttacactcccaccaacagtgtaaaagcattcctatttctccacatcctctccagtatctgttgtttcctgactttttaatgatcaccattctaactggcctgagatggtatctcactgtggctttgatttgcatttctcaaatgaccagtgatgatgagctgtttttcatttgtttgttggctgcataaatgtcttcttttgaaaagtgtctgctcatatccttcgcccactttttgatggggttgcttgtttttttcttgtacatttgttcatgttccttgtagattctggatgttagccctttgccagatggatagattgcaaaaattttctcccattctgtagcttgcctgttcactctgataatagtttcttttgctgtgcagaagctctttagtttacttagatcccatttgtcaattttggcatttgttgcaattgcttttggtgttttagtcataaagtctttgcccatgcctatgtcctgaatggtattgtctaggttttcttctagggttgttatggttttaggtcttacatttacatctttaattcatattgagttaatttttgtataaggggtaaggaaggggtccagttttagttttctgcatatggctagccagttttcccaacaccatttattaaatagggaatcctttccccattgcttatttttgtcaggtttctcaaagatcagatggttgtagatgtgtggtgttatttctgaggcctcagttctgttccattggtctatatatctgttttcatatcagtaccatgctgttttggttactgtagcactgtagtacagtttgaagtcaggtagcatgatgcctctagctttgctcttttttgcttaggattgtcttggctatacgagctgttttttggttccatatgaaatttaaagtcatttttttctaattctgtgaaaaaagtcaatggtagctcgatgggaatagcattgattctataaattactttgggcagtgtggccattttcacgatattgattattcctatccatgagagtggaatgttttttgtttgtgtcctctctcttatttccttgagcagtggttcgtagttctcctcaaagaggtccttcacatcccttgtaagttgtattcctaggtattttattctcttagtagcaattgtgaatgggagttcactcatgatttggctttctgattgtcgattattgatgtataggaatgcttgtgatttttgcatattgattttgtatcctgagactttgtcgaatttgcttattagcttaaggagttttggggctgagatgatgaggttttctaaatatacaatcatgtcatctgtaaacagaaacaatttgacttcctctcttcctatttgaataccctttatttctttctcttgcctgattgccccagcctgtacttcccatactatgttgaatagaagtggtgagagagggcattcttgtcttgctctggttttcaaagagaatgcttccagcttttgtccattcagtatgatactggctgtgtcataaatagctcttactattttgagctacatttcatcaatacctagtttattgagtgtttttagcatgaagggtgttgaattttattgaaggccttttctgcatctattgagataattgtggtttttgtcattggttctgtttatgtgatggattacgtttattgatttccatatgttgaaccagccttgcatcccagggatgaagctgacttgatcatggtggataagatttttaatgtgctgctgcattcggttagccagtattttattgaggatttttgcatcgatgtgttcatcagggatattgaactgaaattttctttttttgttgtgtctctgccaggttttggtatcaggatgatgctggcctcataaaatgagttagggaggagtccctctttttctattgtttggaatagttttagaaggaatggtatcagctcctcttgtacctctggtagaattcggctgtgaatccatctggtccttggcttttttgggttggcaggctattaattactgcctcaatttcggaacttgttattggtctattcagggattcaacttcttcctggactagacttgggagggtgtatgtgtccaagaatttatccatttcttctagattttctagtttattcgcatggaggtgtttatagtattcgctgatggtagtttgtatttctgtgggatcagggtattcccttcttcattttttattgtgtctatttgattcttctctcttttcttctttattaatctactctatctgttttgttaatgttttaaaaaaaacagctccttgattcactgattttttgaagggtgttttgtgtctctatttccttcagttctgctctgatcttagttacttcttgtcttctgctatcttttgaatttgtttgctctagcttctctagttcttttgtgattttagggtgtctattttagatctttcctgctgtctcctgtgggcattagtgctataaatttccctctaaacactgctttaaatgtgtcccagagattctgtaaattgtgtctttgttctcattggtttcaaaaacttatttatttctgccttaatttcattatttacccagtagtcattcaggagcaggttgttcagtttccatgtagatgtgcagttttgagtgagtttcttaatcctgagttctaatttgattgcactgtgatctgagagactgttatgatttccattcttttgcatttgctgaggagtgttttacttccaattatgtggtcagtttgagaataagtgagatatggtgctgagaagaatgtatattctgttgatttggggtggagagttctgtagatgtctattaggtctgcttggtccagagctgagttcaagtcctgaatatccttgttaattttctgtctcattgatgtatcaaatattgacagtgggatattaaagtctcccactattattgtgtgggtgtctaaatgtctttgtaggtctctaagaacttgctttatgaatctgggtgctcttgtattgagggcatatatatttaggatagttagctctttttgttttattgatgcctttaccattatgcaatgcccttctttgtcttttttgatctttgttggtttaaagtctgttttatcagagactaggattgcaacaactgctttttttttttttttgctttccatttgcttggtagatcttcctccatccctttattttgagcctatgtgtatcttttcatgtgagatgggtctcctgaatacaacacaccgatgggtcttgactctttatccaatttgccagtctgtgtcttttaattggggcatttagcccatttacatttaaggttaatattgttatgtgtgaattcgatcctgtcattatgatgctagctggttatgttgcccattagttgatgcagtttcttcatagtgtcaatagtttttacattttggcgtgtttttgctgtgtctggtaccagtttttcctttccatatttagtacttccttcaggagctcttgtaaggcaggcctggtggtgacaaaatatctgcatttgcttgtctgtaaaggattttatttatcttcatttatgaagctttttttggctggatatgaaattctgggttgaaaattcttttctttaagaatgttgaatgttggtcctcactctcttctggcttgtacggtttctgaagagagatctgctgttagtctgatgggcttctctttgtgggtaacccaatctttctctctggctgccttaacatttttcacttcatttcaaccttggtgaatctggcgattgtgtgtcttggggttgctcttctcgaggagtatctttgtggtgctctctgtatttcctgaatttgaatattggcctgtctttctaagttggggaagttctcctggataatatcctgaagtgtgttttccaacttggttccattctccccatcactttaggtacaccaatcaaacgtaggtttggtcttttcaacatagtcccatatttcttggagggtttgttcattctttttcactcttttttctctaatcttgtcttcatactttatttcattaagttgatcttcaatctctgaaatcctttcttctggttgattgattcagctcttgatacttctgtatgcttcatgaagttctcgtgttgtgtttttcagctccatcaggtcatttatgttcttctctaaactggttattctagttagcagttcctgcaaccttttatcaagtttcttagctttcttgcattgggttagaacatgctcttttagcatggaggagtttgttattacccgccatctgaagcctacttctgtcaattcgtcaaactcattctccatccagttttgttgccttgctggcgaggagatgtcattctttggaggagaagagacattctggtttttggagttttcagcttttttgcgctgttttttcctcattttcatggatttatctaccttgatcttggatgttggtgaccttctgatgggatttttgcatgctcatcctttttgttgatgttgatcctgttgctttctgtttgttagttttccttttgacagtcaggccactcttctgcaggtctgctggagtttgctggaggtccactccagatcctgttttcgtgggtatcaccagtggagactgcagaacagcaaagattgctgcctgctccttcctctggaagcttcatcccagaggggcacctgccagatgccagccagagctctcctgtatgaggtgtctgtcgacccctgctgggaggtgtctccccatcaggaggcacgggggtcagcgacccacttgaggaggcagtctgtcccttagcagagctcaagcgctgtgctgggagatccactgctctcttcagagccggcaggcaggaatgtttaagtctgctgaagctgtgcccacagctgccccttccccccggtgctctgtcccagggagatgggagttttatctataagcccctgactggggctgctgtctttctttcagagatgtcctgcacagagaggaagaatctagagagaataagtgaccttttgtgattttattctttaacttagcatatgctttcaaggtttatccatgttgctgcatgtcttagtatgtcattcctcttcatagcctaataatattccactgtatgtatagatcataccttgcttttccattcatcagttgatagatgtttggattgtttctacctttcagatagtgtgaatgctgttataaacatttgtgcacaaatttttgtgtgaacatatgttttcatttctcttgagtaaatacctaggagtggaatagctgggtcatatagtaacttatgtttgactgtttgaggagctgcctatctattttccaaagtggcttcaccattttgcatttccacctgcagtgtatgaggtttacaattcctctacattctcataaacatttgttatctgatttttgattttagctatccttatgagtgcaaagttgtatttcattatagttttgatttgcatttccctgaggataaattatgctgagctccttttgatgtgcttattggcaatttgaatatctgctttggagaaattctttatatattctaaactcaaggcccttatcagatatgtaatttgcaaatatttttcccattctgtgggttatctttttactttcttgataatgtcctttgaagcataaaaggttttaatttttatgaagtccaatatatctattttttcttttgtttctcatgcttttgatactatgcttaagaagccaatgcaaaatctgatgtcattaagatttatccctatgttttattataaaagctttataggtatttttaggctttcaaaccattttgagttaatttttgtatatggtgtgaagtagggttcaacttcattgttttctgtgtgtggctatccagttgtttcagcattatttgttgaaaagatgcttctttcctcattatcacacttgttgaaaatcagttgaccacagatacatgggcttgtttctggactctctcttttccattggtctataggtctatcctgttccagtaccacattatcttgattgatgtggacttgtagtgaacttttatttttattttatttatttatttttagagatgagatttcactgtgttcaccaggctggcctcaaactcctgtcctcaagcgatcctcccatctcagcctcccaaagtgctgggattacaggcgtgagccattgcgtccagcctgtagtaagttttgaaagaaaaacgtgtgttctcctactttatttttcaggattgttttggctattctggatccttcatatttccacatgaatgttaagatcagcttgtcaatttctacaaaaaagtaggttgggattctgataaggattgtgttggatctgtagaccagtttgggggaatagtgccatcttaagaatgttaaatcttctggtccatgaaaatgggaaaattttcaatttgtttagatcttctttcatttaacatttttttgtagttttcagagtataaatttgcacttcttttgttaaatttatttttatttttagtgttcattccaagtgtgtggaaatgtaatagatttttgtatattgaactgtactctcaagcttgctgaacttgctcagtagtttgaatagttttttagtgggttccttaggattttctatgtacaagaacatgccatttgtcaatagagatagttttacttcattctttccaatttggattgtttttattacttaattgtcctgactaaaaattttagtacaacgttgagtagaaatggtgataggagatatccttgtgttattcttgatctactggggacagcatctaaccatcctcattaattgtgacattggctgtggctttcggttttgctaaatatgatgttagctatgggttttgcatccatgctctttatcaggttgataaagttccctactattcctagttttttgagtacctttttaaataaaagaattttagattttaccaaattcctttttttttatcatcttgagaggattatgtggttttcttttttattttattgatattgtgttgtattaaattaattgacattcagatattaaaccaaccttgtattcatgggataaatcccacttggtcaacatgaataatgctttctatatgttgctggtttcagtttgctagtattttcttaagggatttttgtgtccatatacgtaagatatatttgatctgtgtttttttcttgtgatgtctttgtctggtgtcgatatcagggtaattttttattactaatttaatctgtttagttgttataggtatcttgaaatgctccattatttttgggccagttttggtaatttttatgtcttctaggagtttgtctttttcatcatataaacctagtttataggcacacattttttcatagtattctttaatattcctttttatttctataaagttgctagtaatgttccttccttcatttctgattctagtaatttgagtttcctttttcagtctccggtccagctgactaaatagacttgagaagttttcagctattctttctttgaatatttttttctgctgttttctctttctcctctccttctgctatccctattacatgtatgcggtgtgcttaatgatggcttacatttctctgaggctctgttcattttttaaatgttattttcatttaatttttctctgttcttcagattccataatttatattaatctattttcaaatttgctaaatctgcttcttcaaatctactgttaatcccctctagggtaatttttctttcaattgttgtacttttgaataataaaatttccatttggttctttttaataatttctgtttattgatatcttctatttgatgcaacattatcatgttactttcttgtacttatttaatcatggtttgtttaatcatgtttctttgaacatatttgtaatggttacaccaaatgctttgcctgttaagtttgacatctgatggccataacaagcagtttctgatacctttttttttttggtttgtttttggtatacttgtcatagttttctgttctattgcatgtctcactttttttgaaactggacatcttagataatacattgtagaaactctggatattggtcttcctcacaaccaccgaggcttgttattgtcatctgcttgtacagttgttgagtgactggatggattattttggtgcagttgattcctcttctttgccatggggtatagcctttgacagggaaaaggtgggttttggttcaaatatcagacttttacttttcttccccagttttagtagtttaaaaattatttcttcatttatgatatgcccttaatactatttccagagcctctaaatattttttaaaaataattttcaccagtttccatggagtgggcccttggaactccttgtgctgttatgccacccatagtggtctatttctgttgttttaagccatcaaatttgtatccattagttacaccaactacaagaaacgaatacatagctaagtattttaaaaacatatgtatacatttttatttattaagaaatggcataaatttggtacatttctgactcagaacatttgaatgttaataaagatattgaactcattcacagtattctccctctaaacagctgtcatgcactcctatatctccactctaactagagacttcttactaagaaggaggcaaagccataaacccaaagggttccgagaagagtctacctgggttccagtacccataacctggaagacaagcccattaacctttcagaggctcaacttcctcatctgataaggtagggtgtggaccatgtggtggatgaacatattttgttttcaacctgcttagcatttgttccattgggttgattggttatctcccatggacctcctctccctagcaacaacgaataaaatgttgacaacatggcatacaaaaggctaatgtggatagttccctagaactcatttgtgaaggttggtaggaagaagctgtctttccaccttggttgtaagatgggggaatgaatatcaacattttctgcatttattttcgctatcatatactgaaggtttatatgcagcaggaaagattaaagccatgaagagatgagagaatttcagagagccacagtcttggtaacattaagccctaaatccaatcctttagtccctggttccaaaagttctgccttgaatactgtgaggaacccagaatcctctgcaggtacagaatcaatcaactcatatttttggttgaaattaatgcatttgatcttctttcttgtaagtaaatgttcttcactaatatagaacatactggactgggcccagaccaaccccacctctttattccctactatgtacactcctgaaatctccctgagttaggttcctcatctgtacagtgagtacaagcatccagcaattcaaatgttgctgtgtagataatatagatgaaatgtttggaatatagtagatgcccaataaatgttagcattattgtattaccaatttaataatttctcaggctggatattgcccaaatttcacagggcaccacaagtagcaaaacactaagaaaaaggctttggatgcagggaaacatagatttgtacttgcagttcaacacactacaacacactgtgggatgtgcgacttttatcattcttgtagcccttaggacattgttgatttaagcaaattggcttagcaaggagatgttttctttcacattattagaggtccagaggtgagattggaacaaggagcagtatggttgtgcagattgtcaatccacacttgttacatatctgcattcatctagactttttctcaaccttattcccctcatggtcataagatgcctgcttaaagcacctggagcaacacagttgcttgtttccagccaacaaagggaagaattactttagattaccagatttttctgcaagcctgtctttttctctgatagacccaaactggccaagttcagcccatatttgagtaaacctctagcagggaacatggaattatcctagttggcttaggttagtcatgggggtggattaaatattgagaaatcaaccaaaatagctcttatcactcatcactcaaccttttcaagtctttttttcttcctgtaaaatacctaactcacagcttgctgagagaattaaaaagatcaaatgtatgttgtaccttcaataatatttggcacatagcaattattgaatgaatagaagacataactgctgagatgatattatacaccagggggtatggggtataggagacatactcaccagtaacaaacacctgagtgccccgacctgattggtactccttgatagctcttccttttatgaacttcacgcagtaataggtgccagcatcagcaagagagatttcacggatgcgggtggaaaagtctgtgttgccaggcttggtggtgtctccaatctcttttactctgggaaagttaccttgtttgaaattgtagattaatttccggtttggccctgttcccttgaaccacaagacaggtccatttggtaaggtattgggtacgctgcaactcaagatgattgactccccagttgatacagtctgtgacatctccgtttgttgcacatggaacacatgtgtgactcctggaaaaaagctgaaaatcatttctcatttcccctgttctggcttaagcatgggtacgggtcacggttgggcctcattcattaattcttttaatgacatgcgcaaatgcccatgcattgagtaaagagaggcctttgcacatggaggcagcttctccctagagtgctgaaggaagggagttagtccagaagaccagatgtattcctcctcagttccattcctcagccctcaaccgtggtaagaggaggacagggagagagaaggggcaattatcaatgggtaatgttcttggagaaagactagtttccctatccatctaattgcctagagtcactcggtacatttggaactgggttcaagtcctgtccttcaaccctacatctccactgagtttggggttggccttcctctctcctctgaagggtgattagcctctgaatttgtacagaaattcatgctgagagatgcacagaagaagttaaaacaattaaagaatgaggtggtcttggcaacagcatatggttccactacttatctcttcaagagagagaagggagagggtttcctctcctcaacaaaaagagattagaacctcaagggccctctacaattttggaggttctcaccagccaccctttaccctcctacacagtcatcatcactaccctacaatgtgtcaggtcctggtaataatctctcctattaagcttggttgtcaaaaccacagactgcctaaggagcaggttagagagaaagggaactcctggctggcagggccaggaggtaatggtaggaaggcagcctgcattgacattatgtaacttaagggaaacctgtggattttccattgccattttggcattatggaatgtgtctggattcaagggaaacattactgggaaggtcagttctcctggtagaactgagggacacctaataccactgtatttcatgacgttaattcagagggtggtgaggagaaggaaatactggttatcctgggaataaaaatactgggaattaaagaacagtggggctgggcatggaagtctcaggacagacctgggaaagttcaagtgtcagggaatgactcaacccctatgggaaggctttttgcaaaaaagactttggagagattgatacacaagacccctcattctggtctaagaattccctaacaacagtgccaggccatggtaggagatcacatccactcattgacttgtatggggaatgggagtgtgatctcagactggactgtggtgaccactcaggtacttgctatcaggtccccatcacattccagttggtaatgggaaggtgactgggatcatggaggcatgtagagattctacctgcctgaagagccctttgttttggcccaggagatactgggcattttggggaaaacttcacctatgttgagattccatcagaagctaagatgtggctactagcatctgtgactggaagttcagggtcatggaataagtcataatatacacaatgcatatacctgggcccaggtttcttcgtaaaaccttagaagtcagtcagccttctaggacccagttttcttaccatttaggccatgcagtgcacacatgtagttgcaccttgcatatccagtatctttttatttgtaaatgtctcctatgtcattgggttctggtggggttggcatcagagaaggatgtggcttgtcaacatagcttgattcagtatttggcacaggttgtccagaatggcttactagaaaggctattagaagaaacctagtctacagggtagttcgtggataaaggagcatggtgttcagtatgtagtgatgatttggtacatggtgaagggttttaaagattcatcttcataaacccagggaataaagtgcatcaggctgtgctcaccattcacatacacggtggtgcctggaccagagaaaaactccatgtcagggtgtcctacccttaacttcacacagtagtaggtgccagcatcctctggcaacacgtcactgatgcgaatggaatagtcagtttgatcaaccattgtgttttccactggagttactctggggaagtggcttccattgcaactaaagattaattgttgtcctggcccaatgctcttgaaccacaagacaggcccttctggggacagagcagacatattgcaggccagggttaggacatctccgggattgactgacactaaagtctgaggctatttcacctggaactcttcttctggagttcctggaaataaacatggaatcatctcttatgttctctgtcttggctcaagatgctctgagggtctggttataggtcaaggtgggatctcagtatgatagctttatttcagcatcatgtgatggcaccagtcatataaaaattacaatgctgggtgccatgtgaggtgaaggggaggtaccagtgtacaaataggagaatgacactttccttctgcatcgggatatgaggatggcctgcaatatattaggcactaaataaacatattttaaataaatatatgagtatatttttattaaatgagaaaatgcaaaatagaatttgggtcagatttttctaattgtctcaaaatcagggatactgccccaagctaaggacagtatgttgataaccaacatactgcatatggagtgacctgcatatggaggcagctccctcccataccgggtgttctgtggtgtgaaaggccactcattcacctctcccagagtaaacactgaggcatgcattctcaatgaagttgctattttccataaaaggtcacaactggtttttggagtgtaggattatcttagatattacaatggttggtttgtcaatgatcaattctaccaaacaaaatcttattccttagtacttaattgctcttgtgtattcttgggtagcacacaagccacactgacattgagttcatggcagatacacaaaatgtctacaagataagttctacaaaattgcagttattcacaatagccaaaatatagaaacaactgaagtgcccatcaatgtataaaggaataaaaatgtgattatacacacacatacacacacacaaacatgcagtagaatactatttagcttttgaaaatcagaaaattctgtcacttatgacaccatggatattatggtgtgaaataagccaggcacagaaagacaaataccacatgatcttgcttatatgtggaatgtcgcttatatgtggaatccaaaaaagtcaaactcaaagaagtaaagaatagaatgttgttaccagggtctggggtggtggagagttggacaaggaaatgggagatgctggtcaaagcctataaagttgtagttagacatgaggaataggttctggtgatctattgcacagcatggtgactatagttaatgcatacttcaaactagctaaaagagtagattttaaatgttcttaccacaaagaagtgataagtatgtgaggtgatggatatgttaattagcctgatttgatcatttcactgtgtagacatgtataagaacatcacattataccacataaatatatacaattattatttgtcaattaaaaccaagataaaatttaaaaaaccatcaagttgtacacctttaaaaacaaataagttctacaaaacaatggaggactttattttgaatggttttgccatcttactcggtatattccttttctatcgctgaataacaaattacgacaaacttagaggctgaatacaacacatattaattatttcacaatttttgtccatttgtaattcagatatagcttagctgggttctctgcttcaaggtctcaccaagctccactcaaggtgccagctgggctgtgttctcatctgggggtttgactggggaagtgttcattctaagttcactcaggttgttggcagaattcaggtctttgtggttgtaggactgaggccctcaacttctaggggcttccctcagttcattgccatgtgggccttctcacaggcagtttgcaacatggctccttgcttctttaaggccagaagttgcaaaaaaactctagtgtgatagatcttacacaacctaacatactcaagggggagacagtgcatcactttggccatattctatcagatagaagcatgtcacacacaactgagattacataagggtgggatagttgggagtcaccttacagtctgtgtacctcacccaataagtacagttaaaaattcaagtgagttttactagctttaagtatcttaagttagcttttacctaaatatttttagtcatccttaactctccattgaataaaaagaggaagctttatagttacccttcctatgtataaagcacagacagatataaatgcagtacataaaccaacaaagaatatatctaagttattaaaatttcatgttgaggctattatgagttgaattgtatgcctccgaaatatatgttgaagtcttaaccacaagtagctcagaatgtgaccttacttggaaatagagttacagaggaaatcaagttaaaatgaggtcattgaggtgggtgctaatccaatatggtggatgtttttataggaagtggaaatttggacacagagacagacatacatgggagtaagatgatgtgaggatacagggagggtggtgccacctgccatccaacaaatgtttgaggctaccactgctagaagctcagagacagacatggaacagattcaacctcacagtcctcagaaagaaccaaccctgcccacacttcgattttgaatatctagtctccagacctgtgagaaaattaatttctgtaatttaaaccacccagtttgcagtactttttaagagcagccaaatgcagtggcaacagagaaataaaaaactgaatttcacagaaagaagtgtaaaatctgccaggggccaggtgtggtggctcacgcctataatgcgagcactttgggaggccgaggcaggtggaactcttgagctcataagtttgagaccagcctgggcaacatggtgaaaccccatctctacaaaaaagacaaaaattagctgggcatggtggcgcgtgcttgtagtcccagctacttgggagttggaggcacgagaatcacttgagcccaggaggtggaagttgtagtgagccaagatcgcaccactgcactccagcctaggtgacagagtgagaccctgtctcaaaaaaataagtaaaggtaaaaataaaataaaataaattacaccctccagaggctggagggtgagagctgtgatggatgctgtgccccgccctgtgaccataggtgtgagtcgtttacctgagcaaagagatttgcaacagacatggccaccgggagactttgtcagaattggggaccatcccagtgtagtcttctgagttctgcctgttctgggataagatggagaaaaccctcccaaaagaaattctatgggaacaggtgagggagagttcactaaacaggcagaggggagaacccaccacacacatacactgaggccccactcacctgccagttcaagcagcagatacagcagtaaggaaggcagaggtgggtggagtggggaggcagggatgggcattgtggtgaaacctggagcttgctctgcctgaatgcctgtcctggagatgccctcgactcagtgctccgagcagagaagacagttcttgcctctgtgatgtcagaggaaggggattgtgatgagaggaaaggccaggggactgggacactttttcctttgtgattataaaattgaacagacaaggttgcttcaagctaggaagttgctgctggaagtatttagctttgctggggctggggggcttgacacccacagccttatactccttcctgagtttcatcccatctcacaggttctccccaacttcatggcctttgcctatctaggagcctcagacacataggctagacaaaggcctcatccacatgatgcgcaggtatgggtctagctcctgcatgagctcaacatctgggcctgtctgagctgcacagctgaagaaagagacaagatgtctatagcctcacccacttggtaagagttggactttacaatggatgccctttcttgcactccagagtagttagaggtaaaaaacaagcaatatctgctgtgggctcttggcttttctgtgggtccctccatacactaccaggaactgcttcctttttccttcctgcagaggaatcaggcatggctgagaaagacattcgagttgtgcaggtggtgatgatttgtgctttagaggatggaggaggcctgcagggaaggcggagctgcggggaacactctctaggagggagagtaacatgcctacaaacacctgggaaggtgagggctgcctctcctgcttgggctggacctgggaccagctctcagagatgggattggaggggcagaagaaatgcccccagaaagagggaggaagcagcatgttggcatccttctctctcagctctggaatgggttcttcctaagcacaaatgttgtgttcagggacactcagcccacactcagctggtgaccctttaatgtccaagcatccacaggcaggcactggctgccatggctgtttccccattgcctcctcatgacttctgcctcctcctcaggaaccagctagatgtcagggccgggagaggtgttagaccctctaggaaaagaaagcagagccaggctggcacgttctctctgagacgacaagagtccccatccccttgtgatgtcatcatcctatcccgttgttctgaaatgatgaattccacaaaggaattcctatccatggcccctgcttggaactagacaggaacattcctccagcctccatcatcctccccttcccctactctgaggaatcttctcacctttcattagactctaagttccttggagagtcagtactcacgggtcagtatccaagagtgccagctttggaatcagatataatctaggctagaatcctgaacgcacctcctaagagctgagtaatcttgggcccatgatacagacctgtatattctgcaaccttcttgacatcttcatttgtatatatatatatatatgtattttttttttcgagacagagtttcgctcttgttgcccaggctggagtgcaatggtatgacctcggctcactgcaacctctgcctcccgagttcaagtgattctcctgcctcagcctcccgagtagctgagactacaggcgcccaccaccacgcctggctaatttttgtatttttaatagagacagggtttcaccatattggttaggctggtctcgaacttctgacctcagatgatccacctgcctcagcctcccaaagtgctgggatttcaggtgtgagccactgagcctggcctctttgtataccttaaatattcaagtttgagtttcagatctgcactcacaaaccttatcttctcccacaccatgcctgttttgtatatggtaccatcatctaagcagtttgtcaaaccaggaagggactcatgttctataccctcacttatccacttgttaccaagtgaaagggggttgctgcctgatgtgctagaagccaatactgtgacaccaggcttttgagaaaagaaaagctttttattgcaagttgactaacaggaagacagaagtctacctcaaatctagctccatgtgctggcttcaaggcagtagttttattagcaaaagtttaggggttggattctgggattagtatgtgatttgtgaaaggaaaggggaggtctggaaagtccttgggcatgtacagttatctctctatgcctcttcacggctcccatgtgcaaaaccctggggcgtcatcatgaaatacgtggtagaaactcaggctgtgacatcagcaagctcattctgagcaaactccagttggccatattggttccaacagattttagtcagttttgttatcctacaagtggaggaagtttcggcagtttagcaattttttttttttcttatctgctatcctgtaaactcaagaatttcttagtgactggtttctttaactctttgggggcatagtttcacactcctatcttgcccctaccaggccctattggatttacctcctaaatcccttctgaattaatctctttctccatctctatcatcatctcttgcctgaataagaacaattgccttctcactagggtacccccatttttatttgccccctataatctctttctccttcttcagccagactggtctttttacaacatagatttaattatgtccctctcttgaataaacatttttgtggattctcattaatctggaggtactataaacaaggctttcttctgtgactgacttgctcccttagagatgaagggatccccacctttctgatacgtagcatagcttcactgtcccaggttgggttccctgggagacagactctggggtgaagatgaacaagcaggttatctttcagggagtacttttaggatcaacacttgtggacgggagaagatggaagcaggactgggtagaagaagaagctgggctgcaatgaagtcccattgaagacctcagctgaccttgcatggagcctggtactaggatattcctccagagttgctctgagttaggataagagagctgggcctttatacgactaggttgatgagtccaatgagatgtggtttgttaccagatacgacctaagcaagggcactcccttcagctgagacaatcgcaaatagagctgatgctgaggaccatctccacagccaggtgcctctcagcatccattacacaattcatgggaacaacttgttcctgtgaagacttgggctcaggacattattcactcactcatagtcaggtcctcaaagctatcccagctcacccacataacccaaagttttctgatcccacttggtctgacctggattttactaatgggaaaagtttagggtgagcatcacgggggattgagaagccacttcctctgggatctgagtgcctagatctggggtgagctctggtagtggacagaggaaggacgagaggaaaggaaacctcaggcttttgaagtgagataaaactttggaatatcaacaaagtctccctaccgcacatttccttgcattgttccccacggggtacaagaggcaaataaaacctagctgaggacaagacgttaattttttctaatagacttaattttttaaggacagctttagatttacagaaaaattgagccctatcattagcatcttacattgatatgatacattattataatcaatgaaccaatattgatacattatgattaatcaaagttcatagtttatttagatcttttctttttacctaatgtcgtttttctcttccagcatcccatccaggatacctgttacatttacttgtcatatctcctcaagcttctcttggctatgacagttttttagactttccttgattttgatgaccttgacagttttgaggagttctgggcccgatgttgcagaatgcctccttattgaaatttgtctgatgttttcctcatgattagattggggttgtgagttttggggggaaggtaatagaggaaaagtgtcatcttcatcacatcatattaaaggtacatattagtgacatgatttatgattcttgatgttgatttataactgttgatgaactcttgatcacctggctgaagctgtatttgtcagatttttccactgtaaagttattttttctccttttttccatgctgtactctttgcaaagaagtcgcagtgcacagcccacacttcaggagtggaagttatgttccacctcctttagagtggagtgtataaataaattatctgggactcttctgcactggagattcttctcttctttcccattaatttattcaatcatttatttatatcagtatggactcagatatttattttatactttggactataactcattactactttacttatttttttgctgaaagtgttccagctttggcctttgggagctctttcagttggttcctgcgcctctttgatgtactccagtcactgtgggttttggttttggggttgacttttttttcttgttagcactttcttactttctagaggatgttgaatttttgatggaatgttttaaacagaaagaagagagagtagtctttaaagaaagagcttgagaatacagcacacaagccaagtgatcaaatgaagagaagttttcttttgaaatccaacacctagtagaaaccaatgacctcaatgatgtattcactcatttaaaaaaattgacagcctattatatggcagacacagttctggcaactgaggatacagataatcctcccccacccccaaccccccacgatataactgacattccatttgcgtaacatagataaatacaggcagttctcactttggtgatgacatgcatgcatttctcttaccatagtttagttaagtaacatcagtcccacaacacaagtctcaaaatttaggtgccatagtaaatttaatgtaatttgcatagagtacaaacttctgggctagctcttcagtccacaaatcaccatggtaataaaagctcgtcatgatcagtaaccagtcatgttgtgtctttcaaagtctgttggtgattggtccctatggctctcctactcaaacagcaaatcctatagttgggttgcctccttgcctcccagtgatgagcccatatgacattttacagaaatgaataattgaaagaggaattttgcaaccaagatgaaagtgcagtgaagaaatgagaagtgaaaatgctgcaagtgaggttcaaattgaatgtgagtggaattctagaagtacaaatagttgactgtggcaatgtagaccctgatgcaggaacttcagataggcagccagagggaggtagtaaacgcaaactgccacaaatgggagaggagtggtaataaaagggctgaagatgtcccaaaggttgaaatgccagcaaaaaacttcacatgaaaggatcttctggagtgattccacaatattgaaaattcaagggataagatgttggaagctagtccaaacttagaaagatggcaaaacaccaaggtataatagaaatgatgcttgctggctaggcatggtggctcatgcctgtaatcccagcactttgggaggccaagacaggtggatcacctgaggtcgggagttcaagactagtctgatcaacatggagaaaccccatctctactaaaaatacaaaattagctgggtgtggtggtacatgcctgtaatcccagctactcaggaggctgaggcaggagaatcacttgaaccctggaggcgggggttgcagtgagccaagatcacgacattgcactccagcctgggcaataagggtgaaactccatctcaaaaaaataaaaataaaataaacaaatgaaaagaaacaatgcttgctccgtgtattagcccattctcacactgctataaagaactaccagaaactggatattttatgaataaaagaggtttaattggactcacagttccacaggcttaacaggaagcatgactgggaggcctcaggaaacttacaaccatggtggaaggagaaaaggaagcaggcaccttcttcacatggtggcaggagggagagagagagagagagcgaagggggacttgccacacactttcaaaaaaccagatctcatgagaactcactgagatcttatgagaactcactatcacaagaacagcaagggggaagtccgcccccatgattcagtcacctcctaccaggcccatcccacaacacatgcagattacaatttaagatgagatttggatggagacacagagccaaactatatcactccatattagaaatatacaaaaaaaggcaagcactcttccaactactctggatacatttttacaaagaaacagcacttgaactctcaatgtttctaatgctttgaattgtagtgcacaaataaatatttatttcattatattttcattgtcctctacatttgtaactgagagtgtgagagtttctaatattttgacaaaaaatggtaaaggtcacagaatgatcattgtttttctgattgactatggagactgctttcctgggtttcaggttgcacagtcatttttgcaatcttgcactgccatgaaaagtgagggctgcctgtattcggcataatactcatcaaaataagggctaaagaaaaattaattaggataagagaaattagaatgccgggatagagaaaataaataatattttatacaaggtagtttatagaaggtgcctttaatgaagtgacattgagcagagacttgaaggagggagagcgggagccatgcagctgtgttggggaagaagcagagaagtgatatgatttgacttttccaaagaatcactgtggctgaaaaatgaaagccagaggagtggtccccaaagagatgatgctggctgggacagggaggggtggtggaggtgagaggtgtggagaatagggatttaactctgaggtttccagcagcaggcttggactgggccctgaaaaccaattgttaaatttcaggaatcttgcaatctggttgtttaactgttggcagtgtgaaattggtcaggttgggagttattacactagagaaattggcaagcactgcaaaacagcttttggtttttccctttcagaaagtccattgttaaacatttaccatctcatgtaagtggacacatgcattttggaggcagaactgaatatgagttgtaaagggcagtcatcgagggctcctcaatgttgggctgtggcagcatttctaccacaagcagcaggactgggaaggctgcaggatactagaagaaatactgtctccatcacagagagagaagggagagcttctttctttttgggtttgagggataggatgcttggacaaagaggaaagagaatcatttttttcttaaaattggtataggggttcatgtgtattcaggaggcagtagagaacctcaacaaggctgggggagttggggtaggcaggaatccagaagacaggataactcttgagagcctggagagagtctgtggtttatggccagtcccaaggcgacggatgggagaagtcctggtgtgtttagatttggagtgtttctcaccttctagggaggtgccatgagtcagtgcccagagcccaatcccatggcccctgctcaggaccgtgaatagagacactgctttggggcatcatggtcttgtgaaggtggaacaggagcgtgtgggcaggcagatgacctgggagaggaggcgtttggagctgagtgtggggaaggttctcgccagctccttctctcaggctgagcttctcaagaaaggaggaggcagcagagactgagggtcctacatggcagggaaggaaggaaggagctgttggaaaacacatccacattcattcatctgctcatcatttaagaaatgtttcctgagagcctgatatgtccctagtgctggtctcctcttgggatgcctgttatgggtggacaggcagacctgagataggactctgccagctcagcacttcttccaagtcctgatgctccctcttccccgctttccactcaagcacacagaaggtcagagcaggaacagccctcagagcagcctatctgggaattctcaacactacggtggggattactttgaacccatggagtcccagcagtggcctccaagggaccacccactcagttggccctcacttagacccctctgtccaccttttccatgggactcctaggccactggggacaactttgaacccccttgaagcatcccacctcctgtaatacccttgaccatcccaactcctgcacactccctgggggttgggagccccatacagggttccctgagactcctgagtatcctgagggagccctgtcaccttctgtaaactccactgaccctgaagctgcatggcatgtgagctgggccctcctgctggccttgcctttctggaggagcccttggtcagtcctccctctcctaaacttacagtcaggccttctgtttccagcagatgtagatggcagagacaccaaccaccagtagcagcttggggcccaggaggagagctacgaggagtggagcagtaggagccagcgctgcttctggaaatcagggaagaggaggagccatgagaggggccacctgggagctcatcccaggggcctccacttaccccatctgaggctacctgggcccatcaatcctctgaagcttttgaacttgcatcctgctctggctttcctgactccagccgaaagcaaaggccagggaaagtggctcctcattctcactcaccctgtcccaggctgccagtttatcctcctggagggaaaaggtggagagagtgtgtgctcaggtattcatatatgtggcaactgggttcctcacttgatcctcacacgcccatggggcagggattattattccattctgatggggaaactgaggccagagagtttagggagtgtcaggagattagtaggatccaaacctagggaagcccatcattatgtccccaagggtgactcctgagtccaagacaagtccaacactccaggatcatgagaatgattagtaaagggtgggcaggtggtgtgaggatggattcagagtgagagagttgcatgctgcccttcttagccccaggggcagggagaggaccccatattctcatgatctcagggagccctccagggacaagacccaattaaacctgctggctggaaaattccctggtgagtcagggaatgtgcctcgggcttggaagggcctcagacatcatctctcctacctcaaccccagtgcagatgtcatctgaaatctttctgttggacacagagagtcagatctacggaagctcatgttgggactgtttgcattttttaaataaggggttttggatgttaaaagtaacaaaggtattaaaaaaaattttttttaaaataaaatggtgctggtgggtccttaaggaaggaatggagacctcagcatctatagccgctggagtgttggagtgttgcaggccggcagttctcagatgggtggctctctggggctttctctcctttgaggagagctgcactgcccaagtttattccttctaaggggcagcccacatgagagatagactgcattgggaatatgaagggccagcccttcccctcaatttgaaaaaaatctacaggaccctccggccttttgcctctctgcaagagcagctgcatctttgtactgcctgcactgtggctcagcacctccctcctcctacactcctgcctcctcattcctgaggcatgttgaccctgacagcactctaggatgcctcctgcattgctttatgcatcctcaggtggcctcccagagaaactgtccttgggaagtggtctggaaagaagactctaaaatataagttgggaatctgattactcatcagctagcaatgaggaccccagggctggtggtgaatgggactggagaagccgtgacttgctgttgtgttgcgattgataacactttcactggcactaaactgggatagtgttaccacaggaaggaaattccttgccattagccttttgaaaacagattgggaaatggtcgttataagaactaaggtgttagctgttgctgggcatgaactcttgggaggaaggcaatgagaaactaagagtgattcatcatgagttaaagttcagctggaagccagaggacttcttggcagcactgcagattcttatttcttggagccacagggcagaaggaatagagaattgggtcctgggcatcatagaagagtagcagaatcacagcggagcatgaatctcagtttcaatggctgctatgctgggatagggccctgatggggaagttgtgggaccctgaaatgtggaaggagacatttgggtcaaaccactcaaagattgtcagttgacttcagagttactggggacaattgcagtggcatcgctacttgtcgctataaatatcctccccaagccaaaagaagaaacagaaaaggaaaagtaaattctacacaatccaggccctaaatattgcttgaagagagaatgccaaactgcaaaatggctgagtcaaaagggaacactcacctaaccctagggcacagtctctcactaggctcccatgccactgatgcagcacgtcacagaaggcatcctgcagtttgcctgccagcctagacaacctaaaatgcatttccagacttagcatatgtgccaggatgccatgtcagacacactgaaagaacccaaaaatggcagccctctctcagccccagtgggtggttggaagtctaagaaaagactcaaccttgtccagatggtacagactcatctcatcctgtgcctccttgagaagtacaactatgaacccaagaaatatcatgaggagcaggcataggagaacttccaaggtggaagagcgaggtaagaacctgaggactgaggaacagcccagcagccaaacagcagggactctatgcccaaataccagcccccagccacagaaagtgatgaagggaggacatagaaaagaggaggtctcaagtcaataaatataaatcccgcacttaaagaaactacaaaaagtagggcaaagtaaacccaaagaaagcaggagataggaattaatttaaaaaaaaaaagagagaagagagcagataattaatgaaactgaaaacacaaaaacaatacaaaaacccattgaaacaaagagtcaatcttttgaaaacaccaataaaatgggaaaaaactctagcatgactgatgaaaaagaaaagagaaatgacacatttttagtatcaggatgaaacgtgggataccattgcagaccctgcagacaccaaaagggttatgagaggatattatgaacaactctacacacataaatatgacaacttagatgaaatggaccaaaagttatgcaaaacacaacttaccagggctcactcaataggaaacgaaaaatgtgaataaccctaaactattaacgacattgaatctatgattataaaatatccaaaaatatccctggggcccagatctttcaaaggaaaacacaagcatttaaagataaattaaaaccaaatttaacacacaggaaaatggttctaaaaaatttggtaaaatgtgaatgtatgctccattttagatgatatgaggaaattattttaataactttatgaaatttagtgatttgaacacttaaaatttaagtggacaatgacactggttttgtgaaaaatgtccttgatcacatgatccctcaatgtgcaactgcaggtgcatgcgtgagcaagttttcagtggacgtgactatgcaccttccacacatctctgatgattggggacattgtttgtcttctatttcgtgtctttcctcttctggcaggcagggacatgaacaaatccgtgactcagcactgacccaggagatgacgcaaacatcatagggtgttttggaaggaacctgagtccttattcttatttcctggagcctcagggcagaaagaatagaagattgggccccagccatcattagaagagtagcagaatcacaaaggatgttgaatgtcagctttaatggcttctatgctggggttgggccctgatggggaagttgtgggaccctgagatgtgggaggatgtattcgggtcaaagcactcaaagattgtctttcgactggagtagagggacccctcctggtattaaaagagagggaaataagacatattttggttatagagagggggaacactggccaaatttgggtccttgggacaaagcgcagcagaaagggaaagtttctctaattagcacaaattcccattatagcctggtagtgagcctgtcctcagggactagatttaccttcattactttggaccaataacctggtctaatgacaagaagtcttcaacaacatccctcattacttcctaagtcctggtttcccctttggtaaaactccaagctcactgggtgtttgaagcaggaaaggagatcagagatgaacagaaatttgcatatagtaaatgtgcagagtggttgtgattattgttggtcaaatatcaccatcagaacacaaaagaagcctgtgctgtgaccaggtcacctgggggtctgtccaggcttaaacttcacttgtctttctgaaatttatagagcagatgctggagactggtggctgaggtcacagatgcggatggaaaagtttaggatagaatagggacaaggtagaggttagaaagtgtaaaaggcaaggtgctgtgctggcgagaaatgcagaagaaggcgagacacaggacttcataaacaaacggatcacctccctctctcttttttcctttaatgtatatttatgtcaaaatatctatcaagttgtgcatcagacttgacgcacagtttctcctggtagatggggcttaagggtgtctacaaatggccaattgttaccttgaaccttctaagtagtggtgacccatggagtgtaggattttaatgtagacgttaaaattctactttatatttatagacttctagcttattttatgacaagcatgaatattgcttttaacattaaagaaaaagacaaaatttaaaaatgggaagtaaccgcaccatgggtgatatctgagccgtgctccttctggtgcgctgagatctccagggcatagcttttgctgactgcttgctgcccatcatgctccacctgacaggtgagcaccacatcgtccctgtgggcacaggtgttcaccaggagccagctcatccagttgtaggtgccatccttgttctctatgagggtcgaagctgtttctgtccgggacacatttccattctccaaccaggtcagctgtagtccccgggggtagaaattgctcacctggcaggtgacgtttgcctggttctctgccctcatgggctgttgagtaacctccaaggtgggtggaactgaaacagcacagggcagaagctctgatcttgtggcacagacagatcacagggagggctaaataacgtagctcccaccaacacagtgagggcatcaccaggacagtgctaggcaggcagcaggtgctcagacattgagggcactcgttgcatatgagtgaaattactaagcacagtgcctggcgcacagtaggtgcccaaggactgttagctgctgctaggctaaggatgagtgaaatctacaagcacaacccctggcatgcagttggaatgtaagaactgtagcaaaatcagtgaaatcgccgagcacatagtgatttggctcctagtaggtgctcactaattgtagttgctcttggtgaaataaatgaaactctgtagcccagagcttggcacatggttgctggtcccctgacagctgccattaaaatgatagtaagtgaccggctcacctaggtgcatgggaggtggacaacacagttaggaattagattccaggcctttcaagctctggagcctggggagaggggagtgggcttggcagccaggtgtgggcttgggctgggtgtgagggtcttctacctcggatggcctcagacaagttggcagtcccacgaagagggtccccctgcaaggtgatgtgggctatctcgcagatgacttgagagtgaacgtccccacgggtcagcaccaccctggctgtgctgtggatgctgtaggacacactgtctcctgcggggtccacgttggtctggaagtctgagagctcattcccatttttgaaccatttcagggtgatgtctctgggagagaagccatgggactcgcaggtgaagctcactgtgtgctcaggtgtggccctcaccgcagggcccgataccacgggggcagagggtttggctacaaaaggaccatcgataatcaggagacatgactcagatgaccatcactgatgataagcgtttgacatgttaagaaccttctgagacgttagtttttaatctttctaataatgtcgtgaaggcagtgtccttattctcattttacagatcaggacacaacagctcttagaggtgagaaccaggccatggtcagacagtgagtaggggcagggcccagagggaagtccaggcctgagttcaaagtcctctccacacagggagacttccaccaatctgggcataggaacaaaattactgattggtctccctccatgttattaactggtcctagctgtcctcccccggaaggctcactaacctcagagagggcatttatagaagccaatacagggatcaatggcaaagtggcaccaccgtgagagctgcaaccaggctgctcagcccaggacaggggtgggctgacaaccccagctcctcatccgcaaaacaggaggacggaggacggcgtttctacttcctgggatgtcgccaggattcaatggggcaatggaagcagttttgctctggatcaaacacagaagatgcttcccccaaaaaacacagatctatctttaacccagactttacagatacacagaggtctctctttaggtattataaaaatatgaaacattccgtatttttcttttcacaaatatttcgttctgtcaaataaaaggcattaattaaggataaagctttaacgtagagccaagagtttgtaagagcattggaatcacacctgctaaaggtcaagccacaggatgttgcagtagatagacctggataacaactgaagccagggtccgtgggattttgatctctttcacctggagtactttaatgaaataaccaatgagagtgggtttgcagttgaggattttcaaccagctaatgaactgtttccaaaaacaaccttttgtgaaaatcccctataaaaaacctgtcctgtattgccatacgggacactattcagggtttcactgactcagtgtacccaaattgcacctctttatctttcagataaatgctatttcctttggccttcctaacaatcattttgctgttgttgttagttgttctaatctgctggaagtcctaaatttgaaaagaggaaatttttgggaatctgaatcttcagttaggacaggtttgggtgaaaaacaaggatcactgagtactaagaaagccaaaggtggttagctttttcatcgttaattaattacaagagacaaagacccaggccacaccaacagacagaaacctattctgggccttgaaagcaaacacattggagaatcagaacaacgagtgcagtttctccatgtagatgaattttaagggtgtctgcaaattgctaattgttaccttgaaccttctgccgtcctcttagaaagcacatattatacgtttgactttgccaatattaacttgctccctgatatgcgtgaaataatgtgagagcacagtaaggagggtgtcacttgaagatgtcaagtctttgagacaccagcagcatgggtgtccctagaaggctgagaggctgtcttcagttccgattttttgagggcttcttggcagcctgatgctggctgctctctctgtacctctcagcacttcaatcctccttctatttgtcagagggggtcctcatgtgagcccttgtgtagggcgagactctgagaggatccttggtggccaagggccaaaagtagatagaaaccccaccctgggaagatgagtgagggtaagtgcaagggcatagcctggcatgtagtaggtgcttaataaataacccctgtgactgtaatcatgaggtttggtcattactgcttctggagctgcatagctattctttaggcaacagaacaaagaggcacacaaacaccaaggaaaggctcaaaccctactcaccgcagctgccagaaaaaacccaaatgataaaaggagcagcaaccaccatgtttggcgaactggctttcaagtaagatcacaggggaagctggaagcattttggaagaaggagggaaaagatacctcagtgacatctgggagtgctgagggagggaggcttctggggctgaggagtgaggatttgctgggactccagcacgtgtttagatacaaatgttttcaagacagaaggttccccagccctgaggctgcatctgagccaggctttgtcccagtctcctatcttgggccctgaggccagtagcatgggaggggtcctgttcaggcttctggggcctcccagaatgtttccagaatggctgttttgaagcacccatgacccaaaaagctgttctcaaagccccaaaacctggggcaccgcttttgctagggggctgtgtatgagaatcttctggagccattaagaactttagatatccaggcccaaattagatgcaattaaattggcattttaggggggttcctgggtccagctttgcaaactttttttttgatagttttcccaatgattctaatgagcagccaaggttgaaagccactggactccaacccaaaccccatttatacttggggcctagagatgccctgacctgtctgaggtcacacagcttcaccctaacacaactcacctttattgagcatttactgtgtgcttgttgatgccctaagcattttacacaatatcactccttcagactcggcccagtctgtgaggtcagtgttaccatcaaagggtgaggacatcgaggcctatggtggtgaagcaccttgtcccaggtcacagagccaggaagtggcagagccgggaagaggcccaggcagctgggatactgcctgtgttctcctaacgacagttctgcagaagctcagtaataacctgaatgacaccaccattaggggctctgtgcacatcctctccaatcctcacagaacccagaataggccatgataatcagcatctcaccgatggggaaaccgaggactcaagggaaggcaagactggcccaagatcacacgatcttgaaataacacctcactttgggggtgcctacagtgtgctaggtgatttacagagagaaccttacgcttacgactttcctaaaggagtccatgattgtctctattctacagatgaagatgccgtggctgaacaaaatgaaggcactgtctcccgattctccatgtgtcccagtgggcatttcctgtgtcccaccaagcacttatgtccattaacagagcaagtgttctaacttcttgagctccaacactgactgccacctcaattgtccctttgagattctagacttcatgcaatgttagggagaagcctccctcctgggtgcccaggcctggttaccctgcagccataagcaaaagacagtgggctcctgacagccggaggggagaatctcaactcttgctcacatgggccccaaacactctctaggaaatgcctcatctcctcatccttagtcctcagcaccatgaacgggcagatacgtgctctgctgggctgcaggaggctcgactctgctcattggacgctgctgagtgaagaggaaacaacacaacatgggggaagagtcctaaatgcctcatgtgtgttgagacctgtcctttaggaaccggcttggcatatcatgagacatgcgcagggcctttctgatgggagtgtgaagacaggccctcctacccctacagggttcttgttttgtttttaatgctttttgctgtagaactgaacaatgcaagagtttagaaagagaaggttggagcatttctccactcttgaaaaaccacagttgagtgtcacaaagacaaaggctgtgagtcaggctgcggggttccagccttggctccctgacctgctcccaagtcaggtctcctctctgagcttcagtgtcctcatctttaaaggaggtagcaaatggcttctccctcatagcactggttataaggagactctggcacagttgctgctctctggcccccttccccacctccctcctttctcatgtagctcatcatttaggccgagagcatggcaaagaggagtgagtacttcactaggagtgagcagatctgagtcacacctgagccaccactggctgtggctgcctgggctggggaggcaccacctgggcatttcagtgtctttgccaatattatctgcacaatcaggataaagccaccttccttgtctaagttcaagggttgtggggagctgatttcagtcattactgagcaatgtacattttcatgtacatacatgtacatgaaagcatcatgttttaggctttacatatacacatttttttaaaaagctgttagtaaagctatgtgtcttctggaggttctgtttttttgcctttccaaattccagaggctgcccacattcctttctcacagttacatcttcccatcactctaacctcttgcttatatcctcacaagtccttctctgagaattaatctccttcctctgtcttgtaaggacctttcttatgtattgtgtccaccctgatgctagagccagatgttaaaaccactgtcttaaaaatgtttgaagtggggccaggcatggtggctcacgcctgtaatcccagcagtttgggaggctgaggcgggtggatcacctgagtttgggagttcgagaccagcctgaacaacatggagaaaccctgtctctacaaaatacaaaattagccaggcatggtagctcaagtctgtaatctctgattgctacatcatctagaagggaaattaggcaatattctcaaatatgaaaacacactatcctctgacctagaaacaccacttccagtgggaatctcccacctgagtagggtgacacatgtacaaggtcatccactgcatgattgttgtagtagctcaatgttgggaataacttacatatccatcaacagaagactgtaaaataaattttggtatttccataaattggagtatttttcagctgtaaaaaaactggagcagttctctatgtcctgatgtggaatctcgatatgaaatgacagggcttacatttgggagaagttttctagtcaccaatgagctttagtatctgaatgtgaggtgcattcttaacatttgggaaactgatgaaaagagaaatgctggctctctgacacctggctctgtttggggaacttttatctagcacctatgatgcaccaggctcttctatggagacagcgtctaatgctggggaaggaaggagactgccacgattcagatatggactctggctccaattctgtcactaactggccctgtgaccatggacaaggcccctgtcatgtcttggcttcagtctcccatctgtaaagggggttgggctggatggtctgaaggtccttcctgtgctgacatgccagaattcagcagttaagacgaggcttttggggctctggcaggaaaccccacataagcattgttgctaccttatatggggaacccctaagtcacccacttgtgggacctctttcctgaggtgagggacattctgagatgatgcagctctgctcggagcccatggtaactctgtgactcagtccccaaatcacagaagggtttcccaaatagacccacagcaaatgccaaacatattggcatctcctcccaccaagccatcagattcaaccgtgaatgtgcctccgagaaatcttccccgtggggtgtttctgaagattaaattaaaaaaaaaaacaaccacgatttaccctctccatgccctggacggatttctcctcattagaagggaagagaatgtaagcttggtgggggagcgctttaggctgtttcattcactgctgtttgcgcagcatccagggcagagcctggcacacagtggggtctcagtgactgcctgttgcataaagaagggacttggccaccctgagggggaagcattctctggaggcagaaggcaaggtccagccctgtgcctggacaagtcactcaaattgtgagttccctcatctgtggaaccaaagggctgggtcagctttggaaacacaagagctgtagagccgcagactggggatgccttctgtcccatcatttacaagccgtggagcctcgagcgactgccatgacatctccaagcctcaactcatgtgatctggagaaagggtgacatcagttcatgaaagggtggctgctcagccaccaccacacctggctgttgctccaagaatggataatgtaattattgagttattgtcacacaccaggggacaaaggaggcccacgctgtactcaccgcgcacagacagctcagtgcctgctccagacttaaactccacgtcgtcagggctccctttccggaacttcacacagtagtaggtgccggcgtctgctggggtgatgttactgatgctgatggaaaagtccaggttgtttctctttgtgagttctgaaacagttgttacccgtgggaagtggccttctttctgattgtagattaattcccggcctgctccagctcctctaaaccacatgatgggccccacagggatcagggacgtcatagcacagcgcagagtggccgactctccagctgcaactgatacggacttttcaggctgaatcacctgtagctcgtcctcacctgccactcctggaaaggagcacaaagcagtcatttcttcatccttacctgattctctgtgtttcctcaagtgtttatcaatggctttcattgactgggtgcacaccaggaaaaggccttgagctcagcccactacatgtattatctcatttaaccctcacaactggcctgtgacgtaagactgtaatacaagcgagaacactgaggcacagagaggttcaatttccttttccttactttcttctgttctttctgtttgctttcttttcttttcttttttgagacggggtcttgctctgtctgctgcccaggctggagtgcagtggtgcaatcacagctcactgtagcctcaatcttccaggctcaagagatcctttctccttggcctgccaagtagctgggaccacaggtgcattccaccatacctggccaatttttgtattttttctagagacacagtttcaccatgttgcccacagtggtctctaactcttgggctcaagcaaaccatctgccttggcctttcaaattgctgggattataggtgtcagccaccgcgcctggccaagaggttcaatttcaatgtagagctttgggttgaggacctgagtagaactattgagccctcctcggaagtgccatgttttgccaattatggcctccactctgtggtacatggagtgtggcactttttgtatcactggattgggtggggccctgtgacttctttagacccttgagttatgagcagaatgatgggtataatttgtgggctgtgcatttaactgcaagagcctctgtggatcaatttctcccttccggagaccacgaggctctgatagggcctgctccatcgcctggatgcgtgaatgaccgttgcatgcagaactgccaatccacactgaatatgtagcttccagtagaaatataaccttgttttaagcccctggtaatttttcacccatagcataatcacattacctaagtttcctaatgctgatgtgacaaattaccaaaacttagtgtgttaaaagaaatgtaacattttatagttctggaggttagaagtccaaaatagtgttactggggtacaatgaagaagaaatgatgaacgtcaaatacacaaagatagagaataaaacagtggtgactaggggtgaacttgggggagttgatggggaggtcaaaagacacaaaattgtgataagtctgaggaagaagtccagagaatgaatgtgcaatctgaggattttagttaataatgttgtattgaattcagtatttttgcttaagaagcacattttaggtgctgttgacatacaacacatgcagcataactatgggagatgatggatgtgtccatttgcttaactttaataaccatttcactacgtatatgtacatgtatacatatatgaaagcaccatgttttacaccttccatgtctacattttttaaggcgctttcagcagagctgtgtgtcttctggaggctctgttttttgcctttccaaattctagaggtttctcccatccctttctcacagttacatcttcccaccactctaacctcttgcatcttcacctgcaaacatcctggaatacaaggatgtttcaatgtccttctccaagaattaatcttcctccttcttataagcacccttgtgatgtattagctccaccctgatactagacccagatattaaaatcactgccttaaaaatgctgagaggtaaaggaaataacggaccaagaactaaaggaatataaatgtcttaacaaaatgagaatgtaaagaaagagaaattataggaagaaatcaaacagaaacttaggaattgaaagtacaataactaaaagttcactagaggggtccccccaatgggtataagccggtggaagaataatcagaaaactggaagatggaataattgaaattattgagactgaggtgtgggtggaaaatagaataaagtatagagcacagaatctaagggaattgtgagacattatcaaatgtatcaacatacaccttactagagttccagggggaaaaaagagaaagagagaaaggaatagaagattatatgaaaacagagtggacaaaaatcttcacaaacttgttaaaatacaggaatctacaaattgaagacacagaagaaacgcaagttgaacccacaaataaactcagagacccacactaagacacattataatccaaatgttgacacctaaagtccaggtgagactccttaaagcagcaagacagaagcgatttcttccatacaagagaccctcaataagattttcagctcagctcttatgcaatgcaccgaaggccagaagatagggggatggtaagttcaaaatgttgaaagaggaaaaacatgtcaatcatgaattctatacctggcaaagtgtccttcaaatacaagggagaaattatgatattctcagataaacaaaagctaacagagttcatgaccattaaaccttgcctacaagaaatgctaaagggagtgcttcaggtggaaatgaaaggatgctatatggcaactcaaagttgtatgaagaaataaagatatccagttatgtgtacattttttaaaaatcatgcttcaatatcccacaaacaagctgtgagcaccctgcccaggtgaccaggtaaccagtattttaaagctggtccctgccacaattcctcttcttgtcttcccctactgtgacctagtgacattgaaacactctagtaaaagtgtttttgcttgtgtcctccaccttgactcccagtaaaggcacttgcccagggatcccatctctcttgcctacccatctgcttgattgagcctgctccttgggagctccttccacatggcttcctgcatggcctgccctacttctgtctctaggaactgtgagtatgcctcttcatatgaacttttcatggccatgttagagtgatcctctaagattcaaccagcaggagtcactctaacattttctatagtaatggcaatgaggatgggatcattctaaactcaggtggaaagttcctagggaatgcctttgactcatgacttactgatttgctactctgattggctccacaatttgagaaggctttttaccctgatgactttcttgtgctatgctatgtacagctttgtgttgccttttggagtgctgccatggctctccatcctgaagcgaggatcctgttccaatatcaataatgacatccacctttctccaagagcacaagatgatataacattggtaacacctcttcaaagaagattcatgtgatatgcatattaatgtcacataatccagcacctgtaagttttttttgggatgcctgtggcaacatattcttcatttacaaattttacttacaaattaaaatcaacagacactcctgttagtgtcattaaatgaattaaacaaaaatatctctcctctgtaaagactttggctgtgtctttcatgcctcttggagtctctagaccactcatgatggctatatatttcctcagggccttgatgcaaaaataatgctctttatggcctacgctgtactccattaaaacaactgactggttacccactagaatctcctgatttggattccagatttgaagataataccctcctgtttcaatcattaaccataaattgccccacaggccaggctctgctcatctgaaatgacacccatcggaatttaaacttccactgcaacacaaaattaaaattgctgccaggtacagctgcacacctttctgttgacagttggcattattactacttggtttgttgatgcaacaatcctcaaccaaatactagcaaactgaattgaacagcatattagaagaattatacaacacgagcaagtgatatttatttctggaatacaaggatgtttccatgcacaaatgacaaacaatgtaatatatcatatttatagaagaaagacaagaaacacatgattagctcatttgatacagaagacgatttgacaaatttggggatctttttatgacaaaaaccatcaataaaaggaatatatgaaaacttctataaaataataaaagtcgtaaacacacacttgattttcacttatcgctgtctaatatactattttatttgcctatttatcatgtgtattgattactgtcattctccccagtggagataagcaacaaaagggcaactactttttgtcttttattcaacaatgttctttgttaggtcctggcacatagcaggtattcatcaaatatgtgtataatgtgtgaattgcttagtggaacactttctcaggagactaaatattgtattttaagtgaattgctttcatgaaatttgccagaaaatgtgtttcccatgtgaattggtgaaaaaaaatcgacttgtatacatgcagaaatcagaagagtcaaggagaagaaaaccacaaatcctcttctccccaccacatcacctccctgccctcatgagcagcatctgcggaaatttcatggaataagatcaagggcaaaagtgtttgagaagagtaatggtgaaacctgtgatctctagagtcaaagtgcctgagttcaaatcgtagctctaccagttaccaatgagtaacctaggagcactttgtgcttctgtttccttatttgtgagggagggtgaacttggatataatggttacctgatgtcagaaatgtaagtgatttcctacagtatctggcacacggtgggtattcaaaaattgtaaagtgattacttggcagatttcctgaggattggaggcttcaatggatattagatgatgatatggttatggatatggatatgaatataactatagatatagataatataggcagggttctctgttacttttatctccttctttcttcctcaaccctaccattaatggaagagagaactcaaagagaggaatgcgcaaaagttctgttttgaggaaaagtgcattttactaagaagtctgcttacctgttgctttgcttaacagattgggggattttcaggggtaaatgactgaagtagaaaggagggagaatgactgggcaacagagaaaatcaaacatctctttaatgtgtttttcctgtagactaaaaaatgagttgaagactgtagtaagggaagtcttactactactactactactactactactactactactactactactgctgctgctgctgctgtgtgtttccacatggtcaagtaagatttatcccaggaattcaaggatggtacaacattcataaatctctaaatgtggtacagtgtttcaacagaaagagggacaaaaaccatatgaccttacaacacaggcaaagaaagcatttgacaatatttaacattttttaatcataaaagctctcaagaaattagataccaaataaatgttcctcaacacaataagggccatacaggacatatccatagctaacatcatacccaatggtgaaaagttgtcaccttttactctaagatcaggaacaagacaatgatgcccactctcaagttttctattcaacatatagtatcagaagttctatccagaataattgcacaaaagaagtaaataaaaggcattcaaatcacaaaggaagaagataaattttccctgtttgcatatgacactatcttatatggagaaaatcttaaaaatctctaaaaacttttagaatcaacaaacaaataggccacagatataagatataaaattaattggtaaaaatcagtagtttcatacacttatagcaaattagtgggaaaagaaatcagtaaaacaattttacttacaattgctaccaaaaaaggtaaagcagctaggaataaacttaatcaaggagctgaaatacctacacactgaaaactataaaacttggatgaaaaaaatagaaaacaaataacagaaagatacctatgtttgtggattggagaattactattgtaaaatgtacatactacccaaagagatctacagattcaattcaatgtcagtaaaatttcaatgaaattccacagaaatggacaaaacaatccttaagttcatattagccatagaaaaccatgaatagctaaggcaagctttagcaaaaagaacaaagctggaggtatcacactgcttgatttaaaaatcttctacagtgccacagtaatcaaaacagcatggcactggcacaaaaagagacacatagaccaatggatcagaccagagagcccagcaataaactcacacatttgcactcaattgacctttgacaaaagggtcaagaagacacaatggggaaatgtcagtctcttgaaaaaggggtgttgggaaacctgaatatccatgtgtagagaaatgaaattagacctctgtctcataccacatacaaaaatcaactccaaatgtattaaagacttaaatgtaagatctgaaactgtaaaagtactagaagaaaagttccatgacattggtccgggcaatgaatttttggatatgagccccaaagcacaggcaacaaaagcagaaataaataaatggcactacaacaaactaaaaagtttctacacagccaaggaaacaatcaacagagtgaagagacagcctacaaaatgggagaagatattttcaaaccatacatctgatgaagagttaatatgcaaaatatataaggaagtcaaacaactcactcataagaaaacaacccaagtaaaatatgagccaaatagccatttctcaaaagaagacatcaaaatggccagtcaacatataaataatatccaacctcatcattcttaagataaatgcaaattaaaaccacagtgagctatcatctcacgcttgttagaataactattatcaaaaagatgataatgactatcatcaaaaagatgttggagagtatgtggagaacaggaaaccctgttcccacacagttggtgggaatgtaaattaggccatccattagcgaaaacagtatggagtgtcctcaaaattcaaaaatagaattatcatatgatccagcaatctcactactgagcgtatatccaaaggaaatgacatcagcgtgtcacagagatatccgcacccccatgtccattgcagcattatttacaatagccaagatatggaatcaacctaggtgcgtatcaacagataaatggataaagaaaatgtggtgtatacatacacaatggaattctaatcagttgtacaaaagaaggaaatcctgtcatttgcaacaatatgaattaaccaagatggtattatgctaagtgaaacaagccaggcacagaaagacaaacaccgcatgatctctctcatatgtggaatctaaaaaagttgaactcaaagaactagagtagaatgacggtttccagggctagacaaggggtgcagttcggtaagtattagtcaaaggacacaaaatttttgtttagatgggagaaattagctccagatatctattgtacaatatggagtctatagttaataagatgatttatatccttcaaaattgcgaagtgcatagattttaggagttctcgccatacaaaattgtcaatatgtaagattatgcatatgttaattagctgaagttagtcattcagaaatgtacacatatgtcataatatgttgtacatgagaagtatactgttctcaaattagaagtattttcttaagctttaattgaaattaaagttggagaaactgataaaaaatgaaatctcatgtgtgtgcgtgtacacacttacactcacttatatgcacacatgcagggatctctaatccccaggttgtggttgggtacaggtccgtggcctgttatgaactgggccgcacagccggaggtgagcagccagtgagtgagcgttatcgcctgagttctgcctcctgtcagatcagtggcagcattagattctcataggagtgccaaccctattgtgaactgtgcatgcgagggatctaggttgtgtgctccttatgagaatctaactaatgcctgatgatctgaggtggaacagtttcatcctgaaaccaacctccccacccacccactctgggtccttggaaaaattatcttccatgaaaccagtcccaggtgccaaaaagattggggaccactgcacacgtgtgtgtgcgtgtgtgtgtacacattcacaaatatatataaaactgtgacctataatatttgtcacatagaaatcatccaacagattaacaaaactttcggaatacaaacatataccagggttttaactctgttgctgactggtgtaatgggtgatgattaatcctgtgtctgctttcctgcattttctagtatttctgcaggtagcataagaaggctaaaagtaggaactctgaagctggtcgacctggacttgaatcccatctgctccactgattgaggtagggaacgatagacaagttcctctctcagcctgcctccccatttgcaaatagggaatatgagttgtagctttcacacagggatgttgtgaggattagtggagttaaaacacacagaatgctaagaacagtttttgcgttataggaagatctcaattgctgaactattactgctgtcatttgaatacagtgtatggtaagaaaaatgatttggaaagtgaaatttctgccctctaggacttgtgaggtggcatcacagcagggcccagtggggagctgagaggctgctgtgcccagcgctgtgaccctggtgtcagctccatggcctgagtaaggagtgaggacaggaagcctatctgggagctgggagcaaagactttccaacctgcccctcctgaggaagggaaaataaattctccatggcaaagtcaagagacccaagggagattatggtacctgttatgggctgaatgtgtcccctaaaaggcatgtgttgaagctccaaccctagcaacacagaatgtgactgtatttggagacagagtttttaagaagcaattcagttaaatgagttcattggggtgggccttaatccaatacgattgatggtctcataagaagaggagatgaggacacagacacacacacagagggaagaccatgggttgagacacagggtggagactgtcttctacaagccaaggataaagacctcagtagaaattaaccctgctgacactttgatcttggacttcggcttccataactgcaaggaagtaaatgtctagtttcagccacccagtctgtggttctttactatggaagccctaggaaatgaatataggccccaataagcagcaaatgcagaacttgttaaagaggaagaggtgaccaaaaaaatgggtgttaagactcaagtcacaggggagggaggatcatgggggaacacaggacaaaataaggagcacccttagggaggacggtggctgaacatccctgggaaacactgcacccctgtccaactcaagcaggcaccatttcagacttcacttcctctgggtattgaatacagaaggctgggcctggagccacacagccctctcaggctgtctctgagctcactctgtccttgggtaggttgtttagccccagagtctcaagactggtaaggatttaaatagtgattgttctgtgttagtcaaatgaaatagatcaaaatgtaagtaattgtggtggtgagtcaatcatcctgtgacttgatgcctctggtagccagctgctgatccacagagaaagtgctcagctccatgatgtcctgctcttaggccccatctctggccttccttggcagcacttgtggttgtctggaatccccaaaggtccagggacaggatatagccctgccagcggagagaaagggttctagcccaaggcaatgcttacctgtgagtcccagcaatagagtcagcagcaggaaaggacaaggagggtggggccaggaggctgggacaggcatcctggagacctcaggagcctgctctgttcaaacgtctgtggtggggagatgtcaggctctgctctgaggagagaagacaagccctgcctccctcagttcaagaggaagtggctatgatggattgcgacagcaacttgcttctagattgtaacttagaaatcaggcacagcaggcagctacaaagcacagagttactcatactccattttcaggagaatcagacaggctgagcaaaaataatgcttcctcttcaactgaggcctgtgttctgtccacgtggcccccttccccatcttcaggtcttcttgatgatttgccagttgagggtcttgggccaagaaggtctgtggttgtgagttgtgtcctaaactcttcatctcaggaccctaggatgtggttggcttgttgcttcgttctgcaccagcctcaaccaagtgctactcagcagggggcaacaggagggatcgcaggagcctcttgatgttggagaggaaacaggtatgctcttgaaatgattccttattcaaaccttttaatgatataactggcaaaacgtagctcaaattcagtctgatctgaactttggtactttcatgggcctgaatccagcagaagaaatcatttcccaacttcttccaggagagggagtagttttagtttagtaaggatctgttttgtcgggtgaagtgaggatcatgggttatggaaaagggatagggttatgattcgggcagaatgtggcggacaggttcctgaggtcatcacatcaactttaatatcctttgttctgcacagaggacctacttcattcaccactgtgttcagatgggaaatgaggagagaggaagtatatatgccctgaccaacaaggtgtgctaaggagttggggaaatcattgcagccatctacgctcaattttgttctctaaactgggggttataagtatttcattgcagtgttttagtggagattaaaggagataatgattgtaccatgcctgaaacccagtaggtcattattgatgctaatgacaccaggtgaagagcgggaactcgagtggtgcttttgaatgaatccctactacatggtgaattgcccaccagtggctttctcccagcaacccaggcctcctgagacccagattatatgatgtgcttggactacccctgccactctgagatcaattgctttctcttgaattctctgcatcctgctccttataatccacaaattaatttgttctctcacaatttccagctgtgtgactttcaagaagacacttgacttctctgagccttattttgatggtatgtaaatggaagttataacatgcaccaacatgcaccttgtagagatggggtaggaataatataaaccataatgaatgcttgactcataattaattttaaccaaaaaatgtggctataatttttttttatgagaagggctcactgctttcctgccacagttgtgctttagaaaaaccaccttgttaggagaaatgtttgtatcatctatgacttagaaaggcctgtctggaagcttccctgtcacatgctaggttttaggtccttcatctgttattgtcaaatgaaatgtaaaggttatcatattctcattcaaagttctgttcaatgtggcaaatgtgcacagggtgaaatcttcccctcctactccacacccacaaaaatgaaaatgaaaaaggataaaattatattattccgtgtcaaattacacttaaaaacaagacaatagtctttatgtgacatgaaggaatagcagcagttatcatttattgcagaagtcctgtgccccagatatggtgtcaagcattttatgtcagttacctcattaattcatcactctgactctatcaagtaagcactgctattaacctacctccttttacaggcgaggaaacctgaggcacacagagagtaatggatttgctcaagatcactaagcttttagaactagagcataggttgccacacaccacagacttcacttttaatgtttgcactatgacatctgtcattggaaaggagagacatccctcaggaggaagcagagaagaagccatagcctcagttaggaacagcccgcacagtgaggctgtggcaggtgccatgctccaggaggccctgataactccatcacgtggggtggggctttatttctggaaagatggcagtgcaggaaggaatcactgaagatgtggggaacagcagcaccatgagagatagctaaccaattcaagaaaaacaataactcaaaaacaagaacagcaatcaagaggacttcacaactgagaaaatatgaaaaaataaaatataaaaaggtctttaaaattagcatacacagtaaccttataaagatagcaaaagggaagtgaatccataaaataacatcaggcatgtgtgaaacaggaatagtcaggcatgaagtaacaggtatcttggaaaaataaccaaaaaaagagactttggaaatgaaaacataattactgaggacagttttaaaaaatgtaataggttgactaggggactatatatatataagtagtaagttattgggttgggggatcatgtggggaaatcccttaggattcagcacagagacacacctaaacagagtaaggtaaataggtgtaaatataggaataacaaaagatatctcacaaaacatgtcaaaaaatttcccagaaacagctgaggagctgagcacttgcagagagggtggtggtgcccagggttggctctgaaggcacagtgatgatgatactgaagatatttcactgtttgatttagaagggagggcagacaactaatagaccaaagaaatttaaactcagagatccagtggcctcacttttcctttaattatttcaagtcagtgcaatcgccacctattttctctatgaaccgcccagcagttgctttcttgcctgtgtggcctgtgtggtgacaatgatctcgttgtcaggtggcttttgggcagtgaagaatgtcaccggtagagtaatgattggactatgttggtggaatcacattgatgacaatggaaagggccattgggcatttgagtcctgggagacatcctcttaagagagtaaaactgtcttagaggctgaaagaagaatcttctggttgggactaatggcctgtccagtgctgtgagtgatatgtgcttttagtgcctgatttgatttggctctgtgtccccacccaaatctcatctcaaattacaatccccatgtgtcaagggagtgacctggtgggaggtgattggatcacatgggtggttcctgcatgctgttctcatgatagtgagtgagttatcaagatctgatggtttaaaagcgtttggcagttcccgccttgctctttctctctcctgctgccatgtaagacattccttgtttccccttcaccttctgccatgattgtaagtttcctcaggcctccccagccatgcagaactgtgagtcaattacacctcttttatttataaattacccagtctcaggcagttttgtttgtttgtttgtttgtttgtttgtttttgacacggagtctcactctgtcacccaggctggagtgcaatggcatgatctcggctcactgcaacctctgcctcctgggttcaagcgattctcccacctcagcctcctgagtagctgggattacaggcacccaccatcatgcccagctaatttttgtattttagtagagctggggtttcaccatgttggccaggctggtcttgaactcctgacctcaggtgatccgcccgcctcagcctctcaaagttctggaattacaagcatgagccattgcgcccggcctcaggtagttctttatagtagtatgagaatggactaatacagtgccctcttctccttcagagtaaagtggttgaacgctagacatgatcagacttctcaaatagagggagaaaatttatgtgttttacgatgttggggggcaacctaagagattcttgactctgaaccttttagatctcagtttatgttgcaacagaaagtgttggcttttttccccccacttaataactttatttaaaacaaacaaaagtagttttcatattaagtttttattttctctccagcacttggggctagaaagtgtgttgtcactacaaacgtccaaatttatttaatggtatacagaggtatgcacaaggtcatgtaatatcagtatatcccaaattaaccaaagtgtgtttattgatatatgtaatgaaggcctttgctatttgatccatagaacatagtatgttcttagtctatttcaaagctctatgtgtttacatattatttctgtagattattttcagaagcaagttttgtttccacagtatgagtgagcacgttggctaatgtgtaagttagaaataattgataatttttaatatgtacttcatggtaaaatttcttagacatacataaatgagtaaaaacgaaatttagggaattggtattagtttctaaagttttgtttattttcatttgtaagaagtcatttacttaaggtccaattattataaatgaattatcatagtttatgtttaaggaatacccagaaattgtgctgttctacttattttataagaggatagccagattttactttggagcctcctggagctcttcaatgctctttggcctaatgatatctatcttttattactaaaaacgcattatttttatgttttaatgagaataatcatttacatacttcacataatgggtaaagacattttgttttatgaatctatattttttcttactataatgagaatgttatagattatgcatttgtattaatggcatttcttaaagcagtagatttaattataaactaaagcaacctagaaactactgtaggtatctgtaaattgtgttgtaggtactatagacttagtggagtctcttaatcagattatgttgtgaatacatttgtacattattaaaatatatttcaagatgttttgctgattttaataggtgtctttattggagtgataactttaaaggtacaaaactttatatttgtataagagtctactgtttacgaaggaaaaaggaaaaaaaacccagaaatattaatatctaaagatttataatttaaggtaaaacataccagtggttgaaagaggaatatttccttccatgaaaatagcaattggcttggaaggtgtgagacataaagtttcatgcctccaaaaatcatagtttggaatacaggactccaaaattgatgcaataggccaggtgcggtggctcacacttgtaaccccaacattttgggaggctgaggcaggtggatcacctgaggtcaggagttcaagatcagcctgaccaacatggagaaaccgtggctctactaaaaatacaaaattagccaggtgtggtggcgagtgcctgtaatcccagctactcgggggctgaggcaggagagtcacttgaacccgggaggtggaggttgcagtgagctgagattgcgccattgcactccagcctgggcaacaagagcgaaactccgtctcaaaaaaacaaacaaacaaacaaaaaattattttaactgatgcaatagtgtcaggaagatggcaggatccgtgcttggagcagcaagttgccttcccaaggaaggaactgtcaaggagttctcaaggaactccaatccttcaatgaagatatgctagatgcatagatgcttattcaagtaaaaaatttttgtagaaatcacgtgcagaattcattttcaactttagattgacttggtgcaacatggataaaattggaatatttgaaagaacggggagcctggaagtccatgagctaaaactccccccttcatctaccatatttcgcccccactcacgacattagatgcagatgacgagggaagactttgggacacatgaggaactgggagcccatggatgcctctccagaagactaaagattaggcctgtgggcttaggattaaaacttcctagtctgaaatcaagctctaccagctcccaagtgtgtgaccctggggacactattaacttctctgtttcttgagtttcctcaactgtaaaatggacataataatcacaccaacctcataagattgttatgggaattaaatgaactgatatatgcaaagtgcctaatagtatctgactgtatcctcaaacctagatattcagttttactattattattatacatattagctagacattattgttgttaggtagaattttagtaatagcaacaattttaaaaaacagatcctctgccctcaaggatttatgatgttatgtgacaacctcggccaatgtctgggggaggtgggggtaccatggtgatgagctgaggtcatgtgcttagccctagaatcatgggtgctgagatcatgtgctcagcaccaaggtcatggtgcagccatggcctctggggagaatcactatgactagggcaaggtgcatcctaattagggtctacacagatgctcatagaaaaagtgctccaaatcttgcctcatgctgggataggagacaagaaaatgctcccaagtggaaatccagaggaacaggagagatggactgagagggagaggagacatcacatagaaatacacctgtatagagcaggctgcacacaactgtgagtcctatgagcagagaaggtggcagggcctgtccaggtgagctgggacacagggctggggatatctgtctgaatgactctcatgaagagacctcagactctatgctctgcaggggaggagaagccccaccttgccatgatgtcccaggagggaagttgctgtgggaggaaggggccatgagactggggccatcttccattgtgaaagaggaagtggacacagttgccactgctaggaagttgctgacgtctgtgcttggggttcccagacctgggagccttggacagtactggagagaggttgactgacatagagcctgctctatgtcccagagactcttacctcatgccaggggtcccatgacccttcctaatttgagagttcagacctatagggttctgtagccaaggattgagcttgcagcttcagagaccataattccaggtgtggcacatttgagggcttgtggctacagaagcctttgggggtggaaccaaatctcctgggtgacccctacaagaagtctctcaaaccaacaccaactaacaagctgagcaaatcaaaaaacaacaactgctcttagatctgtcggagaaatgaggtcatagggcaaaattagagagacagcagggtgatatggagaattacaacttcctgaattagaaacctccatgggaaagagtgctggggtcagaaaacctgcaccatgaatggtgaattgctataagttcagtgaggaccagtctgagctaaaaactcaggaggacccagtcatgggaactcccacacttctgtgaattttacctacagcagcttgattggtcctcatagtgggtatgagagaaatattcagtagtgcttcctgaagaggaaggagaaaggggaccatttcaaattataccagagtgttctcatcatcttatgcttgttccatatcagaaatatacaagaagacaagcactgttccaactatccttgctatgttttacaaagaaataataatttaatcctcaatgtttctaatcctttgaattaccataaactaaatatttttcccttctgtccacatttgcaactgataatattatattttctaatattttgacaaaaattatgaggaccacagagtagtcattatattcccctttggatgtagagttgctttccagggtttcagtattttcacagtcgtttttgtaatcttgcactaccatgcaaagtgaggactgccctgtatttagtataatatatgtagtaatataatacagtgctaaggagaaaagctaatcaaattaagagacattggaatgctagggtggagaggaaaatggatattttacatagggaggtttacataagttgcctttaataaactgaaggacagaagagtgagccacgcagctgttgcggggaagaagccgaggaatgacaggatttgacttttccaaaaaataactgaggctggaaaaatgcaatccatcagaggctctataagcggtccaggaggagatgatgctagctgggaccatggaggagtggtggaggtgagagatgtgcaggttatgagtacaactcctttgtgtgccggagcaggcttggactggctcaggagaaccaactgttaaattttcaggaattgtgtattctagttgttaaagtgttagaagcttgaaatgggccatgttggggatattcaccccatagaaattgacaaacactacaattcagccttctgttttctttcaaacatttaccatctatctcaccaggggacataagcattttgaagcagaactgaatatgagatataaacaaagaagaaatcaagaaggacttcacagctttagggctgtcacagtatttttaccatgagcaacagagttgggaaggttgcaggatgatagaaaaactagtgtttccatcacagagagaggagggagagatgctttctttctaggtgtgaggagtaggacactgtcttagtccatgtatgttgctataaaagaatacatgaggctgggtaatttataaagagaggtttatttggcttttggttctgcagactgtacaagaagcatggtacttgcatctgctgctgagggcctcagagtgcttctgctcacagtggacagtgaagtggagttggcataacatggggagagaggaagagaaaaagagaagagggagctgctaggcacttttaaacaatcagatcttgtgggtgctaatagaccaagataacaccaagtcattcatgatgaatccatccccatgacccaaacacctcccacctgaccccacctccaacataggggatgaaatttcacattgagatttgtagggaaaaaatatccaaattatatcatacgtataaacaaagaggaaggataatcatttttctccttaaaaccaggatgagtgttaatttgtattcaggaggcaatagagaatctcaacaaggctgggtaattgggtaggcaggaatccagaaggcagaataactcttgagaatctggactgcagtttgtggcttacggagagtccaagacgatggaggagaggtgtcctgatgtgtttagatttggcgtgtttcccacatcctagggaggtgtcatgagtcactccccagagccccatcccatggcctctgctcaggaccatgaatgaagactgctctggagaatcaaggactctgcaaaggagcaacaggagcctgtgggcaggaagatgtcctgggaggggaggtgtttggagctcagtctggggaagcttctcaccagccccttctctcagtcagagccattcaaggaaggaagtaggcaggagagactgggggttccatgtggcaggggaggagggaaggagctgtgggtaacatgtccatatttaatcatctgctcatcatttaagaaacatttcctgggaggctgttgtattcctggtgctggtctccttctgggatgcctgttgcaagtggagaggcagccctgagataggactctgctggctcagccctcctcctgagtcttgatgcctctctcctcattgcttccactcaggcacacagagggtcagaatgggtacagccctaagagctgcccatctgtggtttctcaacatgacttgacagtgaggattcttttgggcccatggagatcagcatcaaataatctagagatggcctgcaagggaccacccactcagtagcccctgatgcatgctcctcttctcacctcctcatgcgaccccttgggtgctgtaaaaacctttaaacaccctggctatagctcacctcctcaagcactcacacacttcctggggttgggagactcttagagtcctgactcttagagaccctgagagtcctgaggatgctgagggagctctgtcaccttctctaaactccactgaccctgatgctgcatgatatgtgggctgggccctcctcctggccctgcccttttggagcagcccttggtcaggcatccatcccccacacttacagtcaggccttctgcttccagtagacatagatgacagagacaccaaccaccagcagcaccttggggcccaggaggaaagctatgagaagtggagcagcagaagccagtgctgggcctggaaatcaggagacaggagaagttaggaaggggctacccaggatgccatcccagaggcccccacttaccccacctgaggctacctgggaccatcaatgctccaaagcttttgaaactgcatcttaccctggctaccctagctccaacccaaggcagaagccagggaaagaggttcctcattcccttaccctgtcccaggctgccaggttgtcctcccggagggacgaagtggagagaatgtgtactcatgcattcatgtgtggcacctgagtccctcacttgatcctcacaagcctgtagggcagggattattattccattctgatggggaaattgaggctcagagaatttagggagggtcacaaggttgctcgcatccaaacttagggaagcccatcattatgtcccttaggatgattcctgagactgcgtccttttgaacaagacaagtccaatttcccagggtcataggaagaattacaaaagggaaagtaggtgtcatgagtataactgagtacccccagtttgctaaaaaacagtttattttctttgttttctttcccctttccccctgctcccagtttcctacttagcccttcagaaatgcaaatataacctttcacctccccctcaccagacattccctgcagggcaagttcttctgtatactccaagacagatctctcctggagagctggcacaccaaagcatacccaccatagaaacttcacctccaggggtagcctccagactttcatccaccaggagggcatatggaaagcatgcccccttggccacgtttgcaacttacttctgctcaggatgacgccacctcaactgtcaggtagctaagtcaccaggctagtagagggacccctgcccttgttcccatccccattaccttataaaagtgtctgctttcttctccaaaggggaagcagcacatttgaaagcaggacacgttgtgtcccttccccaacctagctttggaataaattcacttttttttgtatcagacctcgcgctccttgattggattctacatgcagcaagcaactaacatgctttttggttatatgaagatggcttcagagtgagagagttgcaggctgctctgtttagccccagtggtgagggttgaccccatgttcttgagagctggggaggcccttgaggggctgggcctaatgtactgtggtggatagaaaacaccctggcatgactgtcatgcttgggagggactcagacatcaagctcacatcaaccccagagcaggtgccatctgaaatctctctgttggacacacagtcagatctggggaagcacacatttggattctttgcatttttacaatgagcatttttttgctgttaaaagcaaacaaatgaagatatgtttacttctgttttcatgtacgttttctgggaaataaaatggtgctgatgggtccttaaggaaggaatggagatctcagcatatgtggctggaaggttggaggccggcagttctcagctggggggctctctaggactttgtctcccctgaggagagctgcactctccaagtgcactcctccttctagggggcagcccatagaaagattggctgaattgaaaataggaaggccacgcctctctactcaattagcagaactctaagggactctctcagcccttggcttctctgcagaatcagctgggtctttgtcctgcctgcactgtggctcagcacgtccctctcctacacttctgcctcactccctcaggcatattgaccctgacagcactctagcatgcttcctgaactcctgtatccacctccagttggcctcctagcaaaattgacagtggaaatggtctgaaaagcagactctaaaatgcaagtttggaaactgaccactcatcaagatcagctggcaatgaggaccccagggctggtagtgaatggagctgggcaggccctggcttgcagctatggtgcaattaataaaactttcactgtcagtgaagcgggaaggaaattccttggcatcaggcatttgaaaccggattgggaaatgatagttatgaggactaacgtgtttgatggctgttgctgggcatcaattctttggggaaagacgatgagaagctaagagtaacttatcatgaattaaggctcggtgtaaaaaccagaggacttcttggcagcagtgtagattgttatctcctggagccagagggcagaaagaatagaagattgggttccagaacattataagagtagcagaaccacagagatggatgaatctcagcttcaatgggctgctatgctgggctagggccctgatggggaagttgtgggaccctgagatgtgggagggaatgtttgggtcaaagcacttacagatcatcagccatcttctgagtttctggggacagttgcagcagcataactaattatctctataactaacctccccaaaccaaaagaagaaacaaaaaaggaaaagtaaattttgcacaaacctgactctgagtatcacttggacaaagaatgccaaactgcaaaatgactgtgggtcaaaagagaaccttcaccacaccctagtgcacaatctcactaggctgccacgctgctggtgcagtatgtcacataaggcatcttgcatgttgtgtaccagcctagacaacctaaaacgcatttcctgccatagcacatgagcaaggatgctacatccagcacactgaaagcacccaaaaatggcagccctggtcggagctctagtgagtggatggaagtctaaaaagcaaattcagcttcagatagatggtgcagattcatctcttccggctcctccttgagaagtacaactaagaactctggaaatatgaggagcaggcataggagaacttccaaggtgaaaaaggaaggcagactggctagggatctgaggactgaggaacagccgtgaggccaggcacctgggacccacccccacaatatgagctcccagccatagaacatgacaaaaaaaatgacacagaaaagagaaaaagtctgtattcaataatataaatccccacttcaagaaactacaagaagtagagcaaaataaacccgaagcaagctgcagataggaattaataaaaaagagaagagagcagaaaattaatgaaattaaaatataaaaaacaatgcaaaaaccaactgaagcagctgatcctttgaaaggatcaataaaatgggaaaaaattatagcaagtctgatgatgaagaaaaaagaaatggcacattttaaatatcaggatgaagcgagggctatcactacagaccctgcagacatcaaaaggatcataagggatattatgaacaactctacacacagaaatatgacgacatagataaaatggaccaaaaactctttgaaaagcacaagttgccagatctcacccaatatgaaatgaataatgtgaatagccctaaactattgaggaaagtgaattcataattttaaagtaccccaaaatattcttgaggtacagatatttcatagaaaaatactaccaaacatttacagataaattaataccaaatctggtgcacagaaaaacgtttacaaaagaaatttggggaaatttgaatgtatgctccattttaggtgatgtgagataattattttaacaattttatgaaatttaatggtataaaattttaaattttatgaagtttataatgatattgtttttgtaaaaaatgtcctctattatcagatcacccaattgcggactcctcttgcaactgcgtgggcgcataactgggtgagcagtggatgtgacgatgcactttccatacatctctgattataggggacattgttgtcctccacttcctgtcttcactcttccagcagacaaatcagcgacccagcactgacccagtagataaagccaacgccgtagagtctgtggctgggccttctaaaagtcttctggaatagacacccctcctggtattatatgagagggaaataagatatattttggtcatagatgggggaacactggccaaattgacatccttgggacgatgcccagcagaaagagacgtttctcaaattagcataaatttgcattataggctggtagtgaccctgtcctcaggacctcagacttaccttaattagtttgggccagtcatctggtctaatgccttgatctaattgtcttcaacaatatcccccattgcttcccaagtcctggtttccccttctgtaaaactccagactcactggatggttgaagcaggaaaggagatcatagatgaacagaaacttgcacataataaatctgcagagagccattgtgattattattggtcaaatatcaccatcgggacccaaaggaggcccttgctttgaccactcatggtcacctgggggcgtggtccaggcttaaactccacatgtctttctgaaattcacacagcagatgcaggagtctgcagggggcaggtcacagatatgaatggaaaagtttaggaaggaacagacaaggcagaggtcagaaggagtaggaaggagacagggtggctgatgagaaacgggaatgtaacaactgtcaggggtaaaaagcaagatgcagaacgtgaggaacacatgatccccttgcctcctttcttcctcattcagcacacatttatgtcaaaaaatctgtcaggttgtacctcaaacttttaatagtgatgactcttggagggtgagatttgggagaatgatgctgactttaaaattctactttatacttatagacttctagcttattttatgacaaacataaataattttaacatgaaagaaaaagataaaatttaaaaatttgaagtaaccttaccaggagcagtatttgagccctgctccttcgggtgggctgagaccttcaggtcatggcttttgctgaccgctggctgcccgtcatgctccacctggcaggtgagcttcacatcatccctgtgggcagatacattcaccaggagccagctcatccagttgtaggtaccatccttgttttctgtaagggttgaggccgtttctgtcctggacacgtttccattctccaaccaggtcagctgtagtctctgggggtagaacttcctcacctggcaggtgacattcacctggttctctgccctcacgggctgttgagtaacctccaaggtgggtggaactgaaacagcacagggcagaagctctgaccttgtggcacagacagatccagggagggctccataacgtagctcccccaccacggtgagggcatcaccaggacagtgctaggcatgcagcaggtgctcagacattgagggtgctctttgcatatgaatgaaattactaagcacaacgcccagcacacagtaggtgctcaaggactggtagctcctactaggctaagaatgagggaaatctataagcaccacccctggcatgcagttggaatgctgtaactgtagcaaaataaagaaaatcaccaagcacatagaggcttagctcatagtaggtactcattaactgtgtttgctatcagtgaaataaatgaaacggctagcacagtccttggcacctggtgggtggtgtggtcacccagccactgccattaaaatgttagtaagtggctggcacatctaggggcatgggaggtgggcagttaggaatttaggttccaggcatttcaagccctggagcaagagtagagctggatgagtggagggtggtggggggtgggcttggtggtcaggtgtgggcttgggctgggtgagggtcctctacctcggatggtctcagacaagttggcagtcccacgaagagggtccccctgcaaggtgacgtgggccacctcgcagatgacttgagagtgaacgtcctcgcgggtcagcaccaccttggctgtgctgtggatgctgtaggacacactgtctcctgcggggtccacgttggtctggaagtctgagagctcattcccatttttgaaccatttcagggtgatgtctctgggtgagaagccgtgggactcgcaggtgaagctcactgtgtgctgaggtgtggccctcgccgcagggcccgataccacgggggcagagggtttggctacaaaaggaccatcgataatcaggagacatgactcagatgacaatcactaacgataagtgtgtgagatgttaagaaccttctgagacattattttttatccttccaataatgtggaaagattaatgagggtggtgtccttattgtcattttacagagcaggatgcaaaggttgggagaggtgaggacccatgtgaggtgagacagtgtaggggcagggcccagagggaagtccaggcctgagttcaaagtcctctccacacagggagacttccaccaatctgggcataggaacaaaattactgattggtctccctccatgttattaactggtcctagctgtcctcccccggaaggctcactaacctcagagagggcatttatagaagccaatacagggatcaatggcaaagtggcaccaccgtgagagctgcaaccaggctgctcagcccaggacaggggtgggctgacacccccagctcctcatccgcaaaacaggaggacggaggacggcgtttctacttcctgggatgtcgccaggattcaatggggcaatggaagcagttttgctctggatcaaacacagaagatgcttccccgaaaaaacacagatctatctttaacccagactttacagatacacagaggtctctctttaggtattataaaaatatgaaacattccgtatttttcttttcacaaatatttcgttctgtcaaataaaaggcattaattaaggataaagctttaacgtagagccaagagtttgtaagagcattggaatcacacctgctagaggtcaagccacaggatgttgcagtagatagacctggataacaactgaagccagggtccgtgggattttgatctctttcacctggagtactttaatgaaataaccaatgagagtgggtttgcagttgaggattttcaaccagctaatgaactgtttccaaaaacaacctttagtgaaaatcccctataaaaaaccggtcctgtattgccatacgggacactattcagggtttcactgactcagtgtacccaaattgcacctctttatctttcagataaatgctatttcctttggccttcctaacaatcattttgctgttgttgttagttgttctaatctgctggaagtcctaaatttgaaaagaggaaatttttgggaatctgaatcttcagttaggacaggtttgggtgaaaaacaaggatcactgagtactaagaaagccaaaggtggttagctttttcatcgttaattaattacaagagacaaagacccaggccacaccaacagacagaaacctattctgggccttgaaagcaaacacattggagaatcagaacaacgagtgcagtttctccatgtagatgaattttaagggtgtctgcaaattgctaattgttaccttgaaccttctgccgtcctcttagaaagcacatattatacgtttgactttgccaatattaacttgctccctgatatgcgtgaaataatgtgagagcacagtaaggagggtgtcacttgaagatgtcaagtctttgagacaccagcagcatgggtgtccctagaaggctgagaggctgtcttcagttccgattttttgagggcttcttggcagcctgatgctggctgctctctctgtacctctcaacacttcaatcctccctctatttgtcagagggggtcctcatgtgagcccttgtgtagggcgagactctgagaggatccttggtggccaagggccaaaagtagatagaaaccccaccctgggaagatgagtgagggtaagtgcaagggcatagcctggcatgtagtaggtgcttaataaatagcccctgtgactgtaatcatgaggtttggtcattactgcttctggagctgcatagctattctttaggcaacagaacaaagaggcacacaaacaccaaggaaaggctcaaaccctactcaccgcagctgccagaaaaacccaaatgataaaaggagcagcaaccaccatgtttggcgaactggctttcaagtaagatcacaggggaagctggaagcattttggaagaaggagggaaaagatacctcagtgacatctgggagtgctgagggagggaggcttctggggctgaggagtgaggatttgctgggactccagcacgtgtttagatacaaatgttttcaagacagaaggttccccagccctgaggctgcatctgagccaggctttgtcccagtctcctatcttgggccctgaggccagtagcatgggaggggtcctgttcaggcttctggggcctcccagaatgtttccagaatggctgttttgaagcacccatgacccaaaaagctgttctcaaagccccaaaacctggggcaccgcttttgctagggggctgtgtatgagaatcttctggagccattaagaactttagatatccaggcccaaattagatgcaattaaattggcattttaggggggttcctgggtccagctttgcaaactttttttttgatagttttcccaatgattctaatgagcagccaaggttgaaagccactggactccaacccaaaccccatttatacttggggcctacagaagccctgacctgtctgaggtcacacagcttcaccctaacacaactcacctttattgagcatttactgtgtgcttgttgatgccctaagcattttacacaatatcactccttcagactcggcccagtctgtgaggtcagtgttaccatcaaagggtgaggacatcgaggcctatggtggtgaagcaccttgtcccaggtcacagagccaggaagtggcagagccgggaagaggcccaggcagctgggatactgcctgtgttctcctaacgacagttctgcagaagctcagtaataacctgaatgacaccaccattaggggctctgtgcacatcctctccaatcctcacagaacccagaataggccatgataatcagcatctcaccgatggggaaaccgaggactcaagggaaggcaagactggcccaagatcacacgatcttgaaataacacctcactttgggggtgcctacagtgcgctaggtgatttacagagagaaccttacgcttacgactttcctaaaggagtccatgattgtctctattctacagatgaagatgccgtggctgaacaaaatgaaggcactgtctcccgattctccatgtgtcccagtgggcatttcctgtgtcccaccaagcacttatgtccattaacagagcaagtgttctaacttcttgagctccaacactgactgccacctcaattgtccctttgagattctagacttcatgcaatgttagggagaagcctccctcctgggtgcccaggcctggttaccctgcagccataagcaaaagacagtgggctcctgacagccggaggggagaatctcaactcttgctcacatgggccccaaacactctctaggaaatgcctcatctcctcatccttagtcctcagcaccatgaacgggcagatacgtgctctgctgggctgcaggaggctcgactctgctcattggacgctgctgagtgaagaggaaacaacacaacatgggggaagagtcctaaatgcctcatgtgtgttgagacctgtcctttaggaaccggcttggcatatcatgagacacgcgcagggcctttctgatgggagtgtgaagacaggccctcctacccctacagggttcttgttttgtttttaatgctttttgctgtagaactgaacaatgcaagagtttagaaagagaaggttggagcatttctccactcttgaaaaaccacagttgagtgtcacaaagacaaaggctgtgagtcaggctgcggggttccagccttggctccctgacctgctcccaagtcaggtctcctctctgagcttcagtgtcctcatctttaaaggaggtagcaaatggcttctccctcatagcactggttataaggagactctggcacagttgctgctctctggcccccttccccacctccctcctttctcatgtagctcatcatttaggccgagagcatggcaaagaggagtgagtacttcactaggagtgagcagatctgagtcacacctgagccaccactggctgtgactgcctgggctggggaggcaccacctgggcatttcagtgtctttgccaatattatctgcacaatcaggaaaaagccaccttccttgtctaagttcaagggttgtggggagctgatttcagtcattactgggcaatgtacattttcatatacatacatgtacatgaaagcatcatgttttacgctttacatatacacatttttttaaaaagctgttagtaaagctatgtgtcttctggagattccgttttttgcctttccaaattccagaggctgcccacattcctttctcacagttacatcttcccatcactctaacctcttgcttgcaccctcacaaatccttctctaagaattaatctccttcctccttcttgtaaggacctttcttatgtattgtgtccaccccgatgctagaggcagatgttaaaaccactgtattaaaaatgtttgaagtggggctgggcacggtggcttatgcctgtaatctgagcactctgggaggctaaagtgggtggatcacctgaggttgagagtttgagaccagcctgagcaacaaggagaaaccctgtctctacaaaatacaaaattagccaggcgtggtggcctatgcctgtaatctctgattgctacatcatctaggagggaaatcaggcaatattctcaaatatgaaaacacactatcctgtgacctaggaacgccacttccagtgggtgtctcccgcctgagtagggtgacacatgtacaaggtcatccattgcatgattgctttagtagctaaggttgggaataacttacatatccatcaacagaagactgtaaaataaattttgatatttccatagattggagtatttttcagctgtaaacacactggagcagctctctatgtcctgacgtggaatctcgatatggaatgacagggcttacatttgggagaagttttccaatcacaaacaagctttagtatctgaatgtgaggtgcattcttaacatttgggaaactgatgaaaagagaaatgctggctctctgacacctggctctgtttgaggagcttttatctagcacctatgatgcaccaggctcttctatggagacagcgtctaacgctggggaaggaaggagactgccacgattcagatatggactctggctccaattctgccactaactggccctgtgaccatggacaaggcccctgtcatgtcttggcttcagtctcccatctgtaaagggggttgggctggatggtctgaaggtccttcctgtgctgacattccataattcaggacttaggacgaagctcttgggcctctgggaggaaaccccagataagcattgttgcagccttatatgggaaacccctaagtcacccacttgtgggacctctttcctgaggtgagggacattctgagatgatgcagctctgctcggagcccatggtaactgtgtgactcagtccccaaatcgcagaagggtttcccaaatagacccacagcaaatgccaaacgtattggcatctcctcccaccaggccatcagattcaacagtgaatgtgcctcccagaaatcttgcccgtggggtgtttctgaggatgaaataaagaaaaacacaatttaccctcttcatgagctggacagatttctcctcattagaagggaagagaatgtaagcttggtggggaagagctttgggctgtttcattcactgctgtttgcacagcatctagggcagagcctggcacacagtggggtctcagtgagtgcctgctgcataaagaagagacttggccaccctgagggggaagcgttctctggaggcagaaggcaaggtccagccctgtgcctgggcaagtcactcaaattgtcagttccctcatctgtggaaccaaagggctggatcagctttggaaacacaagagctgtagagccgcaagctggggatgccttctgtcccatcatttccaagccgtggagcctcgagcgactgccatgacatctccaagcctcaactcatgtgatctggagaaggggtgacatcagttcatgaaagggtggctgctcagccaccaccacacctgactgttgctctaagaatggataatgtaattattgagttattgtcacacactaggggatgaaggaagcccacgctgtactcaccacgcacagacagctcggtgcctgctccagacttaaactccacgtggtcggggctccctttccggaacttcacacagtagtaggtgccggcatctgctggggtgatgttactgatgcggatggaaaagtccatgttgtttctctttgtgaggtctgaaacagttgttacccgtgggaagtggccttctttctgattgtagattaattcccggcctggtccagctcctctgaaccactggatgggccccacagggatc

SEQ ID NO: 351 - DNA, 1417 bp, Homo sapiens
ccgtgccccgccgtcctccttcccgcggccgtgagggagaccgcggctcggccgtagcggagctgcgagttacagaatgtctgaaggggacagtgtgggagaatccgtccatgggaaaccttcggtggtgtacagatttttcacaagacttggacagatttatcagtcctggctagacaagtccacaccctacacggctgtgcgatgggtcgtgacactgggcctgagctttgtctacatgattcgagtttacctgctgcagggttggtacattgtgacctatgccttggggatctaccatctaaatcttttcatagcttttctttctcccaaagtggatccttccttaatggaagactcagatgacggtccttcgctacccaccaaacagaacgaggaattccgccccttcattcgaaggctcccagagtttaaattttgggatgcttctgtttgcggggacggtcggtgcagctgcaaggctggaggcggccggcagtgcccggtgctggctgcagatgcggcgctaaccttctctccccacttgaaggcatgcggctaccaagggcatccttgtggctatggtctgtactttcttcgacgctttcaacgtcccggtgttctggccgattctggtgatgtacttcatcatgctcttctgtatcacgatgaagaggcaaatcaagcacatgattaagtaccggtacatcccgttcacacatgggaagagaaggtacagaggcaaggaggatgccggcaaggccttcgccagctagaagcgggactgaggctgcctcacgtgttgcaagaacagttttgagccattgttaacaatgccttttttcttcacataaagtagttgattacgagggagtcaaattttctttttaaaaaggagcttcaatgatttgtaactgaaatatcaggttctagaagaaactggcgcttaaaccaaatcgcatggatttctttttcagtgacgttaagtgtttctcacggatggaattctagtcagctgcaggcgggaagccaggcgggtggagcccatgggagcaagggcgagtggccggtccccgctgtgccaggtgggcaggcaggagcaaggcctgcgagggaggaacgggccgctccccgccagccgccttccccagcagccgcaggtggtgccagccactccacagagcccgagggatgatctagcctgattcctgcgtgtccgaaagaacttaacgttttaaaggtgattgtcaagtaactgtgtggggttctaatgccagtttcctaattccatctcactggagatgtttaaagttggcctctatcctaatgactcaaaacttggttcttaactaccatgattgcttttgagggcccggaattataaatatatattatattttaaaaaaaaaaaaaaaaa

SEQ ID NO: 352 - DNA, 2248 bp, Homo sapiens
  misc_feature (2084)..(2084): n is a, c, g, or t
cggcacgaggtgacttccttgttgtgagccccggcccggcagtgtcccgactcgtagccccgctgttcttaatccgggccgctagcctgagtctaggtcgcagccgcagccccaccccgtcggtcaccttttcagcgcaggtcctttccccgcacgccctgcgctccctaacatgcccaaccccagcagcacctcctctccctaccccctccctgaggaaattaggaacctgttggcagatgttgaaacatttgtagcagatatactgaaaggagaaaatttatccaagaaagcaaaggaaaagagagaatcccttattaagaagataaaagatgtaaagtctatctatcttcaggaatttcaagacaaaggtgatgcagaagatggggaagaatatgatgacccttttgctgggcctccagacactatttcattagcctcagaacgatatgataaagacgatgaagccccctctgatggagcccagtttcctccaattgcagcacaagaccttccttttgttctaaaggctggctaccttgaaaaacgcagaaaagatcacagctttctgggatttgaatggcagaaacggtggtgtgctctcagtaaaacggtattctattattatggaagtgataaagacaaacaacagaaaggtgaatttgcaatagatggctacagtgtcagaatgaataacactctaagaaaggatggaaagaaagattgctgttttgaaatctctgctcctgataaacgtatatatcagtttacagcatcttctcccaaagatgctgaagaatgggtacagcagctgaaatttgtattgcaagatatggaatctgatattattcctgaggattatgatgagagaggagaattatatgatgatgttgatcatcctctaccaataagcaatccactaacaagcagtcaaccaatagatgatgaaatttatgaagaacttccagaagaagaagaggacagtgctccagtgaaagtggaagaacaaaggaagatgagtcaggatagtgtccatcacacctcaggggataagagcactgattatgctaatttttaccagggattgtgggattgtactggagctttttctgatgagttgtcatttaagcgtggtgatgtgatttacattcttagcaaggaatacaatagatatggctggtgggtaggagaaatgaagggagccattggcttggtgcctaaagcctacataatggagatgtatgatatttgagagtcctggaaaaggaaaattcttctgcttgtctgcaaatgctttggatttagaagcgtcatgaaagcacgagtgacagctcctaacctctccttgttttattaaacattacttatctttgactgttattttatgcagtcgctcattaaaatattcctctgatgtgaaattaaatgaaggatattaatgtaaattagatgcaaccagttaagttatacctgttgctattttgcaaagaaataattatagtttttatttacccatttgatttgtgtgaagaattcatcactattttatacgtaacatatagtctactatagcatagtatgctactattgctacttctggtgtgatttgtaatgtttcttaatcattggacatcaattatttttagagagtaatgtataatttcatagcattttaaatttacgtgtatcatgcgagttttttttggtagatgctgaagaatgtggttgctaaacaaagaatgctaaagaatgttcaaactttatagataactttattgttattatttattttcacacatttaattcctattaagtacagccgcaagaaagaaaaaatgatgaagttgcaaatggcagtgtgctgtcacctgcaacagaagtgcgtaccagaagtatgactcatgcaaagcattttaccgtacaaatatcctggtgcgatgatgggcctggcaacattttctactgtacttttgtttaaatttaatgaaacaaaaaattcctaagaaataccaccctaccactaacaaaatggtataaagaatctcccagccaggccaacatggtgaaaccctgtctctactaanaattagccaagtgtggtaatgttcacctgcagtcccagctacttgggaggccaaggcacgagaattgcttgaacaaggtaggcagaggttgcagtgagccaagatcgcgccactgcactccagcctgggcgacagagtgagactccatctcagaaaaaaaaaaa

SEQ ID NO: 353 - DNA, 1745 bp, Homo sapiens
tggaagcagcgtaaaggatggacaggaatgcagaggtaggcaggaggaccagcagtgtgactgctgaaacccaggggagggccccgcggctctgaggttgctcgcgcgcccccgccgatcgccatggatcggatgaagaagatcaaacggcagctgtcaatgacactccgaggtggccgaggcatagacaagaccaatggtgcccctgagcagataggcctggatgagagtggtggtggtggcggcagtgaccctggagaggcccccacacgtgctgctcctggggaacttcgttctgcacggggcccactcagctctgcaccagagattgtgcacgaggacttgaagatggggtctgatggggagagtgaccaggcttcagccacgtcctcggatgaggtgcagtctccagtgagagtgcgtatgcgcaaccatcccccacgcaagatctccactgaggacatcaacaagcgcctatcactaccagctgacatccggctgcctgagggctacctggagaagctgaccctcaatagccccatctttgacaagcccctcagccgccgcctccgtcgtgtcagcctatctgagattggctttgggaaactggagacctacattaagctggacaaactgggcgagggtacctatgccaccgtctacaaaggcaaaagcaagctcacagacaaccttgtggcactcaaggagatcagactggaacatgaagagggggcaccctgcaccgccatccgggaagtgtccctgctcaaggacctcaaacacgccaacatcgttacgctacatgacattatccacacggagaagtccctcacccttgtctttgagtacctggacaaggacctgaagcagtacctggatgactgtgggaacatcatcaacatgcacaacgtgaaactgttcctgttccagctgctccgtggcctggcctactgccaccggcagaaggtgctacaccgagacctcaagccccagaacctgctcatcaacgagaggggagagctcaagctggctgactttggcctggcccgagccaagtcaatcccaacaaagacatactccaatgaggtggtgacactgtggtaccggccccctgacatcctgcttgggtccacggactactccactcagattgacatgtggggtgtgggctgcatcttctatgagatggccacaggccgtcccctctttccgggctccacggtggaggaacagctacacttcatcttccgtatcttaggaaccccaactgaggagacgtggccaggcatcctgtccaacgaggagttcaagacatacaactaccccaagtaccgagccgaggcccttttgagccacgcaccccgacttgatagcgacggggccgacctcctcaccaagctgttgcagtttgagggtcgaaatcggatctccgcagaggatgccatgaaacatccattcttcctcagtctgggggagcggatccacaaacttcctgacactacttccatatttgcactaaaggagattcagctacaaaaggaggccagccttcggtcttcgtcgatgcctgactcaggcaggccagctttccgcgtggtggacaccgagttctaagccacagaccgaggccccagcaggcagcggctggagggatgccacacccctcacagggcagcccccaactacatcttccctgcttactctctgcctacctgcctgagccatgttcacctgcccacttgtcc

SEQ ID NO: 354 - DNA, 4450 bp, Homo sapiens
gcaccatgtcatcatgtgtctctagccagcccagcagcaaccgggccgccccccaggatgagctggggggcaggggcagcagcagcagcgaaagccagaagccctgtgaggccctgcggggcctctcatccttgagcatccacctgggcatggagtccttcattgtggtcaccgagtgtgagccgggctgtgctgtggacctcggcttggcgcgggaccggcccctggaggccgatggccaagaggtcccccttgactcctccgggtcccaggcccggccccacctctccggtcgcaagctgtctctgcaagagcggtcccagggtgggctggcagccggtggcagcctggacatgaacggacgctgcatctgcccgtccctgccctactcacccgtcagctccccgcagtcctcgcctcggctgccccggcggccgacagtggagtctcaccacgtctccatcacgggtatgcaggactgtgtgcagctgaatcagtataccctgaaggatgaaattggaaagggctcctatggtgtcgtcaagttggcctacaatgaaaatgacaatacctactatgcaatgaaggtgctgtccaaaaagaagctgatccggcaggccggctttccacgtcgccctccaccccgaggcacccggccagctcctggaggctgcatccagcccaggggccccattgagcaggtgtaccaggaaattgccatcctcaagaagctggaccaccccaatgtggtgaagctggtggaggtcctggatgaccccaatgaggaccatctgtacatggtgttcgaactggtcaaccaagggcccgtgatggaagtgcccaccctcaaaccactctctgaagaccaggcccgtttctacttccaggatctgatcaaaggcatcgagtacttacactaccagaagatcatccaccgtgacatcaaaccttccaacctcctggtcggagaagatgggcacatcaagatcgctgactttggtgtgagcaatgaattcaagggcagtgacgcgctcctctccaacaccgtgggcacgcccgccttcatggcacccgagtcgctctctgagacccgcaagatcttctctgggaaggccttggatgtttgggccatgggtgtgacactatactgctttgtctttggccagtgcccattcatggacgagcggatcatgtgtttacacagtaagatcaagagtcaggccctggaatttccagaccagcccgacatagctgaggacttgaaggacctgatcacccgtatgctggacaagaaccccgagtcgaggatcgtggtgccggaaatcaagctgcacccctgggtcacgaggcatggggcggagccgttgccgtcggaggatgagaactgcacgctggtcgaagtgactgaagaggaggtcgagaactcagtcaaacacattcccagcttggcaaccgtgatcctggtgaagaccatgatacgtaaacgctcctttgggaacccattcgagggcagccggcgggaggaacgctcactgtcagcgcctggaaacttgctcaccaaaaaaccaaccagggaatgtgagtccctgtctgagctcaaggggacaaaaaaaaaaaaaggacttgactccatgacgtcgaccgtggccgctggctggctggacaggcgggtgtgaggagttgcagacccaaacccacgtgcattttgggacaattgctttttaaaacgtttttatgccaaaaatccttcattgtgattttcagaaccacgtcagatataccaagtgactgtgtgtggggtttgacaactgtggaaaggcgagcagaaaactccggcggtctgaggccatggaggtggttgctgcatttgagagggagtagggggctagatgtggctcctagtgcaaaccggaaaccatggcaccttccagagccgtggtctcaaggagtcagagcagggctggccctcagtagctgcagggagctttgatgcaacttatttgtaagaaggatttttaaattttttatgggtagaattgtagtcaggaaaacagaaagggcttgaaatttaataagtgctgctggaaggggattttccaagcctggaagggtattcagcagctgtggtggggaaacatttctcctgaaagactgaacgtgtttcttcatgacagctgctcaaagcaggtttctgagatagctgaccgagctctggtaaatctctttgtcaaattacgaaaacttcagggtgaaatcctatgcttccatgtacattacatggcttaagattaaacaaaaacatttttcaagtctctaactagagtgaactctagagcacagtagttcagaaactatttagagcttccaggatatatttcacagcttcaggcatgtgatcagttagagccgatgaaacctatgcccgcctgtatatatattagcagcttagctagttcataacctgtatattctaaagactgctaaggttttgttttcattttaaatcctagctgattgttgtggtcaatgaaatacccagtttctggagggccaggtgggaaatgctttcactggaccaacacacaaatgatcatcctgaggatctgagcttccctagactccacacaataacgttggggcacccttttagagaagactgttgaaacccacagcactcgttggggtatgaggaaaccagggcttggcacaggaagttcccctttgtagctaaaagtccagaaagaaagggttcatctttttgacttccaactgatattgggaagtttggttgaggttcaagtgtgactccttccagagccacaggtaggggagtgtgaagttgagggggaggaaagctggaaggactctgccttgggagattcccagctctgctttccagcgcttggtggaatctgggctggggaaagacggcaccgggaaactctgcttccccattgtttccatctgatcagctgtggtgtgaggacttctcagacaaaggcaaggcctcgtgcccctgcccagcccattcatggagccctgggccttcttggcttccatagatcctaagctcttgactgtagtttagccagacttgttttgctatcttataagcagttcagaattagggaatgctggttttgaagagcaaaggacaggtagtctagagagggtcgtctggcctgcttgctgggtctttgtaacccagcacttcctcttgccctcctggctttatgtttatggggagaggactcaatagctccaccccttctggcaccagatggggcttggttagtttgcaataagcaccttgcagaggttaaagccagcgggtccctagtcttaggcccagcctgcttgtgtgggctctggcctggcctggtggctggcccagggggcagcagtgcttagagcttctgcagggcttctcttgtttacacagctgcatcagacaatgccatttctccccaccacggaaccttccatctaagatttcttccagggaatgccagcaatcaggcagcacccagctgtgggggcagtggggtgggggagacccacattgatgactttttttttttcttttaatgaagaaacaccaaagaaagctgtggaaaggacctgccccacatgaaaaggataagccaagatggctgtaaacacagagcatttgagctgccactcttggagcacattgatttttcaaaagccagctctgtcaggaaaggaggtgctgttatgagcagctcttccagtgggcaaagaggacgcccataatttcttccattgctagctcatctgtgggaccaatttggtgtaagcaacctgtggcctgcacttgtggcctcgaaggaagcacaaaccctccatccacttcccatttcctctgcccttttccacctcccccttccatcccaccagctgccagtggctcccagaaagccttattgagccccttgttgacacttggggctgcggaggcctctccctactggtctggcctttcctgagaggcaggtcttccgtcctcagagcctttctggaacaaggagaatgcctgtgcaggtggacacacaggcctggcctgtcgctctcacttgtcttccagcggggagcttcacgttgccgagtggaagaaccatgacctccacttgcttccaaggtgctagggaagtttcagggtacgctggttcccctctccagctggaggccgagtttctggggactgcagatttttctactctgtgatcgattcaatgcccgatgcttctgtttcattcccgaccctttctactatgcattttccttttatcaggtgtataaagttaaatactgtgtatttatcactaaaaagtacatgaacttaagagacaactaagcctttcgtgtttttccacaggtgtttaagcttctctgtacagttgaaataaacagacagcaaaatggtgcc

SEQ ID NO: 355 - DNA, 3791 bp, Homo sapiens
cgaccactgtgagcccgcggcgtgaggcgtcgggaggaagcgcggctgctgtcgcccagcgccgccccgtcgtcgtctgccttcgcttcacggcgccgagccgcggtccgagcagaactggggctcccttgcatcttccagttacaaattcagtgccttctgcagtttccccagagctcctcaagaataacggaagggagaatatgacagatacctagcatctagcaaaataatggcagctgcttaccttgaccccaacttgaatcacacaccaaattcgagtactaagactcacctgggtactggtatggaacgttctcctggtgcaatggagcgagtattaaaggtctttcattattttgaaagcaatagtgagccaaccacctgggccagtattatcaggcatggagatgctactgatgtcaggggcatcattcagaagatagtggacagtcacaaagtaaagcatgtggcctgctatggattccgcctcagtcacctgcggtcagaggaggttcactggcttcacgtggatatgggcgtctccagtgtgagggagaagtatgagcttgctcacccaccagaggagtggaaatatgaattgagaattcgttatttgccaaaaggatttctaaaccagtttactgaagataagccaactttgaatttcttctatcaacaggtgaagagcgattatatgttagagatagctgatcaagtggaccaggaaattgctttgaagttgggttgtctagaaatacggcgatcatactgggagatgcggggcaatgcactagaaaagaagtctaactatgaagtattagaaaaagatgttggtttaaagcgattttttcctaagagtttactggattctgtcaaggccaaaacactaagaaaactgatccaacaaacatttagacaatttgccaaccttaatagagaagaaagtattctgaaattctttgagatcctgtctccagtctacagatttgataaggaatgcttcaagtgtgctcttggttcaagctggattatttcagtggaactggcaatcggcccagaagaaggaatcagttacctaacggacaagggctgcaatcccacacatcttgctgacttcactcaagtgcaaaccattcagtattcaaacagtgaagacaaggacagaaaaggaatgctacaactaaaaatagcaggtgcacccgagcctctgacagtgacggcaccatccctaaccattgcggagaatatggctgacctaatagatgggtactgccggctggtgaatggaacctcgcagtcatttatcatcagacctcagaaagaaggtgaacgggctttgccatcaataccaaagttggccaacagcgaaaagcaaggcatgcggacacacgccgtctctgtgtcagaaacagatgattatgctgagattatagatgaagaagatacttacaccatgccctcaaccagggattatgagattcaaagagaaagaatagaacttggacgatgtattggagaaggccaatttggagatgtacatcaaggcatttatatgagtccagagaatccagctttggcggttgcaattaaaacatgtaaaaactgtacttcggacagcgtgagagagaaatttcttcaagaagccttaacaatgcgtcagtttgaccatcctcatattgtgaagctgattggagtcatcacagagaatcctgtctggataatcatggagctgtgcacacttggagagctgaggtcatttttgcaagtaaggaaatacagtttggatctagcatctttgatcctgtatgcctatcagcttagtacagctcttgcatatctagagagcaaaagatttgtacacagggacattgctgctcggaatgttctggtgtcctcaaatgattgtgtaaaattaggagactttggattatcccgatatatggaagatagtacttactacaaagcttccaaaggaaaattgcctattaaatggatggctccagagtcaatcaattttcgacgttttacctcagctagtgacgtatggatgtttggtgtgtgtatgtgggagatactgatgcatggtgtgaagccttttcaaggagtgaagaacaatgatgtaatcggtcgaattgaaaatggggaaagattaccaatgcctccaaattgtcctcctaccctctacagccttatgacgaaatgctgggcctatgaccccagcaggcggcccaggtttactgaacttaaagctcagctcagcacaatcctggaggaagagaaggctcagcaagaagagcgcatgaggatggagtccagaagacaggccacagtgtcctgggactccggagggtctgatgaagcaccgcccaagcccagcagaccgggttatcccagtccgaggtccagcgaaggattttatcccagcccacagcacatggtacaaaccaatcattaccaggtttctggctaccctggttcacatggaatcacagccatggctggcagcatctatccaggtcaggcatctcttttggaccaaacagattcatggaatcatagacctcaggagatagcaatgtggcagcccaatgtggaggactctacagtattggacctgcgagggattgggcaagtgttgccaacccatctgatggaagagcgtctaatccgacagcaacaggaaatggaagaagatcagcgctggctggaaaaagaggaaagatttctgaaacctgatgtgagactctctcgaggcagtattgacagggaggatggaagtcttcagggtccgattggaaaccaacatatatatcagcctgtgggtaaaccagatcctgcagctccaccaaagaaaccgcctcgccctggagctcccggtcatctgggaagccttgccagcctcagcagccctgctgacagctacaacgagggtgtcaagcttcagccccaggaaatcagcccccctcctactgccaacctggaccggtcgaatgataaggtgtacgagaatgtgacgggcctggtgaaagctgtcatcgagatgtccagtaaaatccagccagccccaccagaggagtatgtccctatggtgaaggaagtcggcttggccctgaggacattattggccactgtggatgagaccattcccctcctaccagccagcacccaccgagagattgagatggcacagaagctattgaactctgacctgggtgagctcatcaacaagatgaaactggcccagcagtatgtcatgaccagcctccagcaagagtacaaaaagcaaatgctgactgctgctcacgccctggctgtggatgccaaaaacttactcgatgtcattgaccaagcaagactgaaaatgcttgggcagacgagaccacactgagcctcccctaggagcacgtcttgctaccctcttttgaagatgttctctagccttccaccagcagcgaggaattaaccctgtgtcctcagtcgccagcacttacagctccaacttttttgaatgaccatctggttgaaaaatctttctcatataagtttaaccacactttgatttgggttcattttttgttttgtttttttcaatcatgatattcagaaaaatccaggatccaaaatgtggcgtttttctaagaatgaaaattatatgtaagcttttaagcatcatgaagaacaatttatgttcacattaagatacgttctaaagggggatggccaaggggtgacatcttaattcctaaactaccttagctgcatagtggaagaggagagctagaagcaaa

SEQ ID NO: 356 - DNA, 1087 bp, Homo sapiens
agtgtacacgtcggttgcctaacaaccggcagcggactcctttggctatggcctccaactttaagaaggcaaacatggcatcaagttctcagcgaaaaagaatgagccctaagcctgagcttactgaagagcaaaagcaggagatccgggaagcttttgatcttttcgatgcggatggaactggcaccatagatgttaaagaactgaaggtggcaatgagggccctgggctttgaacccaagaaagaagaaattaagaaaatgataagtgaaattgataaggaagggacaggaaaaatgaactttggtgactttttaactgtgatgacccagaaaatgtctgagaaagatactaaagaagaaatcctgaaagctttcaagctctttgatgatgatgaaactgggaagatttcgttcaaaaatctgaaacgcgtggccaaggagttgggtgagaacctgactgatgaggagctgcaggaaatgattgatgaagctgatcgagatggagatggagaggtcagtgagcaagagttcctgcgcatcatgaaaaagaccagcctctattaagatcagtgtcttctttttctactgcaagcacatgtaactagatttagtgcctgccatggtgtgaaatctggcttttgagaacacaaacttttcccccacggacctccctttatcactttaatagtgaccttgagcctattttagccgtttggaagtgttctttgatattacagttctttgtaaaatgacctgcgaattaccctaattctcaaaagcaaaacaagagcacacaagcgtgaagaaaaggatcttaaagctttgagcacctgccattttgccttgcatcgtttccctcgtcatgcatttccacatatccacaaacacagaacgactttagacaagcacatgttacacctgtgttgccacaagcagtcattcttgacggctccagtttttatttgacacttgagtttagttttctcttttataaacccagtgaactcctgcactggcatttggatgtgtgttaatgctatttgttttgtcttaaaagtaaaacctttctcagtttgaaaaaaaaa

SEQ ID NO: 357 - DNA, 1822 bp, Homo sapiens
gaattccggggtctggatcaatatataataaaacgctttgatggaaagaaaatttcccaggaacgagaaaaatttgctgatgaaggcagtatattttacacccttggagaatgtgggctcatatccttttcagactacattttcctcacaactgttctttccactcctcagagaaattttgaaattgccttcaagatgtttgatttgaatggagatggagaagtagatatggaagaatttgaacaggttcagagcatcattcgctcccaaaccagtatgggtatgcgccacagagatcgtccaactactggcaacaccctcaagtctggcttgtgttcagccctcacaacctacttttttggagctgatctgaagggaaagctgacaatcaaaaacttcctcgaatttcagcgtaaactgcagcatgatgttctgaagcttgagtttgaacgccatgaccctgtggatgggagaattactgagaggcagtttggtggcatgctacttgcctacagtggggtgcagtccaagaagctgaccgccatgcagaggcagctcaagaagcacttcaaagaaggaaagggtctgacatttcaggaggtggagaacttctttactttcctaaagaacattaatgatgtggacactgcattgagtttttaccatatggctggagcatctcttgataaagtgaccatgcagcaggtggccaggacagtggctaaagtggagctctcagaccacgtgtgtgatgtggtgtttgcactctttgactgtgatggcaatggcgaactgagcaataaggaatttgtttccatcatgaagcaacggctgatgagaggcctggaaaagcccaaagacatgggtttcactcgcctcatgcaggccatgtggaaatgtgcacaggaaactgcctgggacttcgctttacccaaacagtaaccccacactgcaagaggggacccctccacccccagtaccctggaccccctccgcagagtctcggcagagccctttgtgctgctgcttctggaagtagtcccccttcctcccgggatgacctcaggactctgtcggtttcccctctttacccttccccgtccccgtgttctgctgggctctgattctgcccaatgagtatccccataggttctcaaaaacatgaacaagtcgtgtaaagctcagacatttgtcagcctcaacagcaccacccattcaagcatcctgtggataaagaattcagggaaccatccacacacctgccaaccctgggaagcatccagttctcaaatcgtttttgctatggatttatactaacaagaacattccttgacttccctcctgctggtgttttaaagccacaagtagggaagatatctggcaggcagaaagaagtctgtgatgataaacaatgatgaggatgacctaggcaccctacgctagtgtgagaagcctgcgccccaggaaggatctgtgttagtccctgggatggctccaaggcctgctctaggaaggcagcatgctcagtgggaacacagcaagattcagaatttaaagtagttgcttcatggctctgtgcactcccttttcttcctcgcagcctccctaagatgactccagtgtgaccctgtgcttagtgagcaatagtgattgagctcatgttccctgcaatgtgccatttcctctccaggatgggcctctaaagctgaggcctggctcagagcctgtttgccctctgtcttaaacaattgtaaatatcacttaaattataaccatttgcaataaacatccccaaagttaaaaaaaaaaaaaaaacgaattc

SEQ ID NO: 358 - DNA, 641 bp, Homo sapiens
gaattcccgtgatagacagactgtccaccatctgaaccttcattcaccaccattcgataacccttcttccgagcctctcctctggtcgcgcggggaggagaggcgagatggcagatgagattgccaaggctcaggtcgctcggcctggtggcgacacgatctttgggaagatcatccgcaaggaaataccagccaaaatcatttttgaggatgaccggtgccttgctttccatgacatttcccctcaagcaccaacacattttctggtgatacccaagaaacatatatcccagatttctgtggcagaagatgatgatgaaagtcttcttggacacttaatgattgttggcaagaaatgtgctgctgatctgggcctgaataagggttatcgaatggtggtgaatgaaggttcagatggtggacagtctgtctatcacgttcatctccatgttcttggaggtcggcaaatgcattggcctcctggttaagcacgttttggggataattttctcttctttagcatgataagttaggcaatttccagtatgttaagtaacacacttatttttcctgtgtatggagagattcaagaaataattttaaacccgctacataataaaagacattgttgcatggaattc

SEQ ID NO: 359 - DNA, 1367 bp, Homo sapiens
gatctcaggctcggctccccgcccgccgcagcccactgttgacccggcccgtactgcggccccgtggccaccatgtccctgcacggcaaacggaaggagatctacaagtatgaagcgccctggacagtctacgcgatgaactggagtgtgcggcccgataagcgctttcgcttggcgctgggcagcttcgtggaggagtacaacaacaaggttcagcttgttggtttagatgaggagagttcagagtttatttgcagaaacacctttgaccacccataccccaccacaaagctcatgtggatccctgacacaaaaggcgtctatccagacctactggcaacaagcggtgactatctccgtgtgtggagggttggtgaaacagagaccaggctggagtgtttgctaaacaataataagaactctgatttctgtgctcccctgacctcctttgactggaatgaggtggatccttatcttttaggtacctcaagcattgatacgacatgcaccatctgggggctggagacagggcaggtgttagggcgagtgaatctcgtgtctggccacgtgaagacccagctgatcgcccatgacaaagaggtctatgatattgcatttagccgggccgggggtggcagggacatgtttgcctctgtgggtgctgatggctcggtgcggatgtttgacctccgccatctagaacacagcaccatcatttacgaagacccacagcatcacccactgcttcgcctctgctggaacaagcaggaccctaactacctggccaccatggccatggatggaatggaggtggtgattctagatgtccgggttccctgcacacctgtcgccaggttaaacaaccatcgagcatgtgtcaatggcattgcttgggccccacattcatcctgccacatctgcactgcagcggatgaccaccaggctctcatctgggacatccagcaaatgccccgagccattgaggaccctatcctggcctacacagctgaaggagagatcaacaatgtgcagtgggcatcaactcagcccgactggatcgccatctgctacaacaactgcctggagatactcagagtgtagtgttggtggcgctgtgcccacgaggcaggggcttttgtatttcctgcctctgccccacccccaaagtaagaagaaacatgtttccagtggccagtatgtctttcattgctttgcacccactgttaccagaagctgctctaggagttcctggccagtcaccccatcgccctctgtggcagactcagtgctgtgtggcgccctcctagcccagggctgagttttaagattttctctcctttcctcttctcctttggttcctcaattaa

SEQ ID NO: 360 - DNA, 1128 bp, Homo sapiens
acaaggtcatcagaagtactttgactttgaggatcaaccattttgcggaataatcgtgtccaaaattatatacacaaccttttaatttctgtaaatttttaatgcagtgtacctaaacatagccattttccctgcctgtggacttgaatttcataatcattttcctgtattcttttaaacagaaggcagacggtaacaagtactccttgctggattgaacttcatctgaatggacctctacagtggttggacaaagtattaactcagatgggatccccttcagtgcgttgctcaagcatgtcataaagcttcaccaatcaagtcccatggaaaagacttaatgtaaacaactctctctcggtcaatagcattgtgtgtggtccctatggactgtttactatccaaaagttcaagagagaaaacagcacttgaggtctcatcaattaaagcaccttgtggaatctgtttcctatatttgaatattagatgggaaaattagtgtctagaaatactctcccattaaagaggaagagaagattttaaagacttaatgatgtcttattgggcataaaactgagtgtcccaaaggtttattaataacagtagtagttatgtgtacaggtaatgtatcatgatccagtatcacagtattgtgctgtttatatacatttttagtttgcatagatgaggtgtgtgtgtgcgctgcttcttgatctaggcaaacctttataaagttgcagtacctaatctgttattcccacttctctgttatttttgtgtgtcttttttaatatataatatatatcaagattttcaaattatttagaagcagattttcctgtagaaaaactaatttttctgccttttaccaaaaataaactcttgggggaagaaaagtggattaacttttgaaatccttgaccttaatgtgttcagtggggcttaaacagtcattctttttgtggttttttgtttttttttgtttttttttttaactgctaaatcttattataaggaaaccataccgaaaacctttccaagcctcttttttccattcccatttttgtcctcataatcaaaacagcataacatgacatcatcaccagtaatagttgcattgatactgct

SEQ ID NO: 361 - DNA, 36991 bp, Homo sapiens
gatcttggctcactgcaacctccgcctccaaggttcaagcgatcctcccacctcagcctcccaagtagctgggattacaagcgtgtgctatcacacctggctaatttttatatttttggtagagatggggtttcaccttgttggttaggctggtcttgaactcctgacctcaggtgatctgcctgcctcagcctcccaaagtgctgggattacaggtgtgagccaccgcgcccagcctgaccctttctttctctactggcaaaactcctgctcctttttaaagccaagctcatgtcacctcctctgtgaagtcctcgctgactccccaagcggtcagtgtctctctcgtatgggctccccggcccctgcactgctctccatcacaccctgaccactctgggcagtggcccccctccccacccactgactatgggctccttgaaggcagggcctgggtctgccccatctctgtgtccccagcaatgctgggcatgagtcagcctcagaagacatctgctgaatggctgcaaaccagaggaaatatctccagcctcaggctgggacccctcccctctctcctcccacctctgacttcataccactcaccctccagagtcttcaatgcccactattacttcacacagttggcctgtgacaggcaatcaggtcatcgtccacggctaccaggtgtttcatgtctactgtgacttccaggaccacaagcccttttgcgcccaccatgtcttcacctaagagatcttcaaagcccagtatgtctctggcacccagtggatcctccatgcccactgcggatcccaagcctcctgcctccttgaagtccaccaaatcagcaacacccaacagatccttagtgcccaccaaaccagcgacatcccgtaactcagtcatgagcccaagcagttccaagtccaccaaatcgaccagtacaaaaagagccccttctaaccggcccagcagcaggtcccgagtccgcagcaaagcaagaacacccagcagggtgagcaccgacaccaggaccagcaaagccagcaaggccagcgacgtgagatgccaccagcggaggggcacacacagccggggtaggacacctggcagaaggggaagccgcagctccaagaggtcacccagcagggccagcactcctggcaggataagaactcatggtgccagaccaggcatggccagcagggtgagaactcccacttcacagcaaaaagggagccggggaaagagttacggccggcctagaaccagcaacagggaaaggagtgacagccagcctagaaatctgagcaagaagagttaccgcccaccaggaggctcaggtatagggaggagttccgagctggctgtaactcccagtacagccaagtgtcaaaccccgactggaattccctccaaggagaagagtgacaacccatctccatcctcatcaaggaaggtgaagagctacggtcagatgatcatccccagtagggaaaagagttacagccccactgaaatgtccagcagggtcaagagttataaccaggccagcacccgcagcaggccgcaaagtcacagccaatctagaagccccagaaggtcaagaagtggcagtcagaagaggacgcacagcagagtgagaagtcacagttggaagagaaaccatagcagggcaagaagtcgcacccggaagggaattctgagccagatgggaagacacagccagtctagaagccacagcaaggggaaaagtcaaaaccaatctagaacccccagaagaggaagaagtcacaactggtctagaaaccccagcaaggaaagaagtcatagccattccagaagctccagcaaagagagagatcacaggggatctagcagccccaggaaggagagtggtcgcagtcaatcaggaagccccaacaagcagagagatcacagccgatctagaagtcccaacaaggcgagagatcgcagccgatctagaagtccctacaaggcgagagatcgcagccgatctagaagtcccaacaaggcgagagattgcagccgatctagaagtccctacaaggcgagagatcgcagccgatctagaagtcccaacaaggcaagagatcatagccgatctagaagtcccaacaaggcgagagatcgcagccgatctagaagccccagcaaggaaagagatcacagccaacttggaagccccagcaaagagagagatcacagacgatctagaagccccagcaaggagagacagtgcagacaatctagaagctccagcaaagagagagatcacagacgatctagaagccccagcaaggagagacagcgcagacaatctagaagccccaacaaggagagagatcgcagccaatctagaagccccagcgaggagagagagcacagacaatccagaagccccagcaaagagagagatcgcagacgatggagaagccccagcaaggagagagagcgcagacaatctagaagctccagcgaggagagagatcacagccgatctagaagccccaataagcagagtggttacagtcgacctagagcctccagcaaggagaaagctcatagccgatctagaacccccagcaaagaaggaaatcatagccaatctagaacctctagcaaggagagcgaccccagtcaatctacagtccccagaagtcccgactggaagagatcccctactaggacaagcagtctcagtcagaatagaacccctagcaagacaagcagccactccccatcaacatttcccagtgggggccaaaccctaagccaggatgacagtcaagccgacgccaccacctctaaggccaccttacctggggaaaggtcttcatcatcttcttccaagctggcgtagcccccagtctcagctggctcacgggtctctgtcatgaccgggggaggggacaggagacaggagcagagcagcagctgagcagcgtccctccccggccagctctccacagccacacctccggccacaagttctctaatacaggatgttggcaggtagagagggatgctggatagggggaaaggaaagacctgtgatgattcaataaatttttacatagcacccatccccaccaagcccaactgtgtgctcactgctggcatggggcacagaggaccccagctctgtccctgactgtctacagggtcttgactgcaagccctgcccctctctaggtcttttttttttttgagacagagtctctctctgttgcccaggctggagtgcagtggtgtgatctcagctcactgcaacctccacctcccaggctcaagcaattctcctacctcagcttcccgagtagctggaactacaagtgtgcgtcctcacgcccggctaattttgtatttttagtagagatggggcttcaccatgttggccaggctgggctcgaactcctgacctcaggtgatccacatgcctcaacctcgcaaagtgctgggattataggcatgagccaccgcacccgtccccctctctaggtcttaatttccgcatgtgggcaacaaggctgccttctggttcttattcagtggggtagggagaggtgacactccaaatattcaacagtggggactggtgtgggcaccaatcagaactgagagtggagcgggacggataccaggccttaaccctttagttgctggaccatggggaggtctggggttggggaagtgttatggggaaaaaaaaccctcaaactgtgtttttcctctactctcacactatcacaacaatcatcaacacagaattctgtgaccaaatgtgtggggctttttccccacacactacacagcagacaacagctaggtgtcccctccgattccattccaacgctgtccccacacccagctaatttttgtatttttggaagagacagggtttcaccatgttgcccagagctcaagcaatctgcccacttcagccctccaaagtgctgggattacaggcgtgagccaccacacccgacttttttaaaaaaataaaaataaggccgggcgcagtgacccatgcctgtaatcccagcactttgggaggccgaggtgggcagatcacctgagctcaggagtttgacaccagcctaggcaacatggcaaacttgtctctaaaaaaaaaaaaaaaattacaaaagttagccggtgtggtggcatgtgcttatagtcccagctacctgagaggctgaggcaggaggataaattgagcctggaaggtcaaggctgcagtgagccgtgaccttgccactgcactcaagcctggatgacccatcttacaaaaaaaaaatttttgctggagctgctcacagaactcaaggaaatgcttacttagatttactggtttattatagaggatattgcaaagaacaaagatgaagagatgtgtagggcaaggtataagggaaggggcagggagcttcacgccctccctggggtgctaccctacaggaaccctcaggtggttagctatgcggaagctctccaaacccagtcctcttgggtttttacggaggctttaagacagcagcattgggcatggacttctctgaaaagtgtcttaagaccaacaatcaagaaggtggggaagattagagtcttgccctggggcaggaaatggagggcaggaggaggtcagagagattctgtttcttcagacctgccccaggcctaaggtacacaacattataacaagagactgtaacaaaggctgtaggagttaccagccaggaactgtggatgaaaaccaatatatttatatatataataccacaaggggggtccaaagtggcagttagggacagggagtacttgtgtagcagtgacacaccaacccatctggaagtattttaatatttaaacaattggtatggctatactagtttgtgattatcagccttagttctgtatcaattggcaagatagtgtctaggtttgccacactctagctgtgtagcaccaagcaaagaacttaacttctctagcctgtttccttctctggaagaaaggggcttccaggccttaactcacgtactccccataactagactgggaattatctcctttgtacagatgaggaaacagacacagaggtgataagtgagtagcccaaggtcaccatctggtaagtggatgaactaggattggaagccagacctttcataaaatgatttctcagctcaaaaggtttttctgaagattcagtaggctcactgatagaaattgctggtgtgtggctggtattccatcaagagtggccattactactcccacccctgcccctctataaactccagatgttccagacctctcatctctccctgtgcacacaaggccttttcacatctgtgggtcttagtacacccactgttgctgtcaagaatgtcctcctcctcctttttttttttttttttgagatggagtctcactttgttgcccaggctggagtacagtagcgcgatctcagctcactgcaacctctaccctgcatcagcctccctagtagctgggattacaggcagccaccaccaccatgcccggctaattttttggtatttttagtagagacagggtttcattatgtcagccaggctggtctcaaactcctgacctcaggtgatccatttaccttggcctcccagagtgctgggattacaggcaagagccaccacgcccagccctccttccccctttttggcctggagaactccttttcacccttcaaagcccaccacaaacataagaacctctatacttcttgcccgctgaaatactgcctctgccaggaagccttctgtgacttctctctctccctcttcaccaacggaccgcccccgccccccaccaaccccaccacacacacacaccactactgtcttccactgtactccctgacagtagagaaccaagcagggccagttgatgcagcctcagctatatctcttacatgccaaggcccatgcactggggatacaatggtggaaaatacatggtcccttcaaagtctggatgtcaagtttaatgctggggactaaagagaaaagcttcagattgaaacctggaggtggctggggcaaaggaccattggcatcattggcagggcaacttcctaaagaaagcacctaaatcttggcttttaaagacagatttcataattggcagaggagaattctaatgataccctattgcctacagggccccatctaatttgggaattctactttataccaagataagattgccagatttagcaaataaaaacagaagacatccaattaatttttttgtttgtttttgggtttttgttgcggagatggtgtctcactatgttgcgaaggctgctgtcaaattcctggctcaaacaatcctcctgccttggcctcccacttcccaaagtgctgggattacaggcatgagctaccacacctggcccttatttatttatttatttaattttcttttttgggacggagtgtcactctgtcgcccaggttggagcgcagtagcgcgatctcggctcactgcaacctctgcctcctgggttcaagcgattatcctgccccagcctcccaagtagctgggactacaggcgcgtgccaccatgcccggctttttttttttttttttttttttttttgagacggagtcttgctctgtcgcccaggctggagtgcagtggcacgatctcggctcactgcaagctccgcctcctgggttcacgccattctcctgcctcagccttccgagtagctgggactacaggcgcctgccaccacgcccgactattttttgtatttttagtagagatggggtttcaccgtgttagccaggatgatctcgatctcctgacctcgtgatccacccgcctcggcctcccaaagtgctgggattacaggcgtgagccaccgcgcccagcctacttatttatattttttaagagacagggtctcgctcagttgcccaggctggagtgcagtagggtgatctgtaggaaaggggcttccaggccttaactcatgtactcccccataaccaggttgggaggttagctcactgtaacctcaaactcctgtgctcaaggtaccctactagcccctaggagagcagctgggactacaggtatgcgccaccatgccaggcttaatttttactttttttttttttttttttttttgtagagacgggggtctcactatattgcccaggctggtcttgaactcctggtctcaagcgatcctcctgccttagcctcccaaagtattggtatcactgcaactagcccaaagaattaatatagctatgttccatgtgatatttgggacatacttttctaaaaggttgtatcttttggatataattgtttatctgaaattcaaatttaactagacattgtatattttatacggcaaccacacacctgggacaatcaagacattccctgaagttaccaggagacaatgcccatcagcctacacttttccaagcccacgtcacacaaggccccttccagagtattccagacgtcaggtagggccatcccttggttcacaagtcccactcctaccacgcctatggcagccaaactgaaaggcaaacacagtgctggagaccccacaatgccctgggcctatagcagtcaattcccaagatgccccgcgtgaacacaataggcacccgttccaatgctcgagcaaagagaccagggcaaaaccttccactacgggacaataacggccagttcccacaattcgttgtggcagttcttcccaggatgccttaggcctatagcgaccaccttcccagactccccgtgtggaagcgctccaagcctccaggacggtcagcggcaggtgtgggataaaaggaaccggtctcgacaaggatctgggacactctttcccaggatgcaccaggcctacgactagcggaccgactcccacagcgcttcaaggcggagcgctcggttctcccaggatgccccagggcggcacaaacgcgtagggggagaaaaagaagccctcgggtcaccacggccccagaccgccggctccccggtgacgggagtcgtcgctcccatcatgcagcggggccgtagcgcccgcttcccggcatgcctcgcgcacccctgcccgggacactcaccggcgccggcggcccccgctccggctctgcggcggcggctgcacgcccagcctctgcgcctgcgtcgcaagtagggtaggacagcgcgcagggggcgtgaagagcctagggcgcttgcgcggcgagacggactagtcctgtagcgctgtgggaagaggggctatgcgcgtcgggccgtcgacgagacccgcgcggggggcgccgtgctttgcccctcgctgcctgggtttacttggtacagcccgcggcccaaaggaacaagaagctgaagggttcgcgcgtgcgtgtgcggggcaggaacgcgccttacaaaactgggatgcgctgggggtggagggcgctagttcggactggatcctgggcccgaggcctgcttatttgcataatcctagcgcgggacaatgaaaggcctcccgcactggaaggagtgatttgcatattccccggaggggccttactccagagcgcagtgattagcatatggcgggggcaacctgagcaaagcgcatgcgcgcagggactgcagactgacgcgaagtgggtagccttgtcttcgtaggggatcagtttgcatcctgagagagggcacgagggccaggacccctcccaaccaggataaaggtttattgatctcctaggtgtcaggccccatgctggcggattctgtggtttctgcagtgaaccatactcctgtactcacggcaccccagtcgaaggagatacgcacctaattagacaactactacccagaaggtcagacctggagtgaggaacacagggggctgtgggagcctaagaggcgcttgccccggcctctggttctagaaagacttccaggaggtggtgatccttaagccaagtacgaataggagccaactagaatgggaatgggtctggcagaatgaactgcaagcgccaaggcccagaggccaaaaaaaaaaaaaaaaaaatagaagcgcatgttttgattgaggaagcaagagcagcttagtatgcctagaacctaactggagacgggaaatggttctatagacgatgttagagttcaactatggctacattccagtcttcctgtaagtgactttgtcacattctggcttaaaactcccccaaagggatcccattaggaaaaaaaaaaaatccaaaaatctttatcatggcctcagggctatacacctggtctggccgtgcttatctttctgaccccacctacttcctcctccctccatttctgtccagctccaccttaccccaaactctttaccagctcgggcctctgctcttgccgttccctccgcctgaaaatgcttttccctctgacctttgaatacctactcttgtgctcaccattcatatcttggtacagatgtcaatctgagaggcttttcctgatctctccataatagcacttacacatttgactggagttatggataaatcgggattggccatgagttggtggtggttgtaactggcatgaagagtacatggggctgggcgcggtggctcacgcccgtaatcccagcactttgggaggccgaggctggtgtatcacctgaggtcaggagcttgagaccagcctgggcaacatggtgaaaccctgcctctattaaaactacaaaaattagccaggggttatggggggtgcctgtaatccttgctacttgggaggctgaggcacgaagatcacttgaaccctggaggcagaggttgcattgagtcgagattgagccactgcactccagcctgggccacccagcgagactctgggtctcgcctgtaatcccagcactttgggaggccgaggcgggcggatcacgtcagaagatcgagaccatcctggccatcctagaccatttctactaaaaatacaaaaaaaaaaaaaaaaaaattagccgggcgtggtggcaggcgcctgtagtcccagctactcgggaggctgaggcaggagaatggcgtgaacacgggaggcggagcttgcagtgatccgagatggcgctactgcactccagcctgggcgacagagcgagacttggtctcaaaaaaaagagtacatgggacgttattgtcctgtctactcctgtgggtttgaagttttccataatgacaatggcataccacatcaccatactctgcatttatattaatagttcttatcacaatctgaactttctttgcttccttgttttgagtgttttcctcatgaaagcttcatgagggtaagaatggagtcgccctttttcactttgggttctcaatgcttagagcaggatcagatttcagattagtgtagcgctgtctttaacacttaacatttgcctgttttattcaccatggactctagaactttgagcagcacctggcacatcgtaagaggttattttttaaagttagaataatacatctaaaatgtacatgaatgaatgagaggcctgggatgccagactaaagagctttgacttggtctaaaggtgatggggagctaggcaaaggttttgagagtttaactttaattcaaagttcccttggagactaatgtctggggtagggggaagccagggtaagggtccgggccatggaatggggtagctcagtcgctatcaaaaagacaagactgtgactatttggctgaagaaatggccaaacccaggtttctggggaggtcgaggtaccctcagtgaggtcaggaccttctcctggcctatactgtccaccagcaaccatcacactcctccctcccctctcccttagttcccctcccaatggtacagcccttgacagcaggacagacacacagccaccccaaacacttgttctctcctcagtttaatggtggttagtgagattgccaaaccccctccccattcccctccccaccccgtacaaaatgtgtgtgtggttttttgttttttgttttttgttttttaacaagaaaaagggggcaaaagccaggaatggggagaggggggtgcaatctgatattttcatacagacttttgattttttaatatattatatataaaaccatgaagaccacgaatcctccccaaactcctttccccctccccggggggcctggaggagagatggggaaggcccccccaggagtgggtggacagagagacaaatatggatgggacagacgttgggggagaaggtagagagaaggggagcccaggaacctggggaagggggattggagaaaagggttggggctgtctccctcactgcccccatcaaagttatgacacaaagacacagaatccctatttccacgccctccccccacccatccccccaccgtgcaaacatggctttgcaaagaagtgcccagagctctgtggaactcttacaatggctggcatggggtctaggacccccaaagaaatctgtgttccccttccctgccccccccacccttcccagaaactgaccccctccccacaagacctggttttgtagcctaggggccctggccttcccccagttatcttcccccaacccaatccctactgccctcactggacttggggggtctggacctttggcccctgccccctgggggacccagacctctgggccctcacttctggcccttacagagatccaggcatccaacacccccatccctgcccaagcgtctgaggtgttagtggtggggggagaagcccaccatcccagactctggtaaatgtctttgctggttccttgcagctggcagtgggggggaccccagcccaggcccaggcctaggcctggggtggggatagggtcagatgaagaattcctctttcctcttgtgtccgtcgctgccattgaggaaggcttctcttgcttctccctgttcatccaagccactggcttcgtgggtcagataggaacctgagggggtgacagacccccggggcaggggggacatatttgtggatccaggagttggacagaagtataagggaagagggagacagacaagacacatgccaggcgaaggaagagggagaaacggaacacacagggagaggcagagaaagaggtaaacagtggcagagaaagaggtaaaagcagaattaggaagactccaaaagctcaccgaaagtgccacccttatcctttctcttggaggtatttccttgccctgctcccagcgaattcagcaattaggaaaataaattgttttattcaaatccatgctctttttttcccctaattttttgtatttttagtagaaaaggggctgcgccatggtgcccaggctggtctcgacctcctagcttctcaagtgctttatccgccttggcctcccaacgtgctgggattacaggcgtgagccaccgcgcccaaccgcaaatctatgcttttaattcagcttctaaattctaccccttttcgagtattgtgccgaaagccccgccccctttgtcatctccgcccccggtgcggcgggatttggaatccagagcctaggctccgccctctcgttaccctggctctaggccccgcctctttccgagccctacaaccaaccaaccgtagagtccaggccccgtcccactcacccttctgccgtaccgagcaccagaccatgcccactagcacacatatgatcagaaacaccagcagcgccaggatgccgcccacaatggcatagggaaccgacgtctgagcctctaccaccgcaccagggtctgccagagggacacggcacaggaccaggtcatcagaggacgatcccagtctggccccatcgctgccaagcttttaagccattctgcacacgtctaaccgtgcccttttatgtgccacacccctcaaaaattactgccaccttgtagtctcttctctttccagatgcttgttggtttgtacactgcccgacccctcccctgagtcatgttacattttccttttctttttcttgttttcttttgcagagacgggggtctcactatgtggcccaggctgatcttaaactcctgggctcaagcgatcctccggcctaggcctcccaaagtactgggattagaggcgtgagcgaccgcacccagccatcccttttcttttgactcaagtttcttcctccactaagaaacagagtccaagaaacaggtccaagtcccttcccaccttgtctaaaacgctccaagtatttaaagtgctgggcccaactaccaaaatttctgccccaccgtcatagagctaaacacagaacagctgtgtgctagagcccattccaaccaccttacatatttagttcacataatcttcacaacagccttgttatataggtgctattgtttatttccactttactgatgggtaaactgaggcgcagacaggttcggttacctgcaatagaatgcagccaacccgaatttgagccccgcgggccagtctggtcccaaaacaaaaagaactctgttggctgccgaacccctgagttatgtggcctctttgctcaagccccgcccccgccacctggcgccccgcccccgccctcagtcggccgcagcctgctctcaccgtagaccacaagtacgtagagcgccctcgcatggccgtgcttattggacgcctcgcaagtgtaggtgccgttatccgcggataccagacccggcagcgtgagcgtctctcccacggcctccgccctctccggcaaagactcattcccgcggttccagcggatctggtttggcctgggtggggataaagtatagtgagagttaggaaccgaggtgccagcacccaattctgacttgtcaagaatctagacatgcaactctcatcccgcagggacctccaaataagaggcttcctgctatctctttcctttctggaaaaccaacagtcctgggcctacttccacccatcaccaaggtctcaggaattctagcccaggctgaacatggtggcttatgcctgcaatcccagcactttaggaggctgagacgggaggactgcttaaggccagcagttccagaccagcctgggcaacacagggagaccccgtcactacaattaaaaaataataataataataataataattctagccctcccacgccattccatcctcagcaaccaggagtctgaggctgcacagcttcagtattggggagtctgagcctccagattcctcctccctcaggatccaggagtccaggtcccagatccctattcgtccaggtccccagctctctcctcctcaggacccaggaatccaggtcctagctccctgtttgtccaggtcctcagctctctcctccttaggacccaggagtccaagtccctggtccctgttcttccaggtccccagctttctcctcctgaggacgcaggaggcccccagagctcacctggggttccccgtgacagcacacgtcaacaccagcgtgtctccctccctcaccacagcttgggaggcatgaatccgggccgtgggggagtctgttaggcaaaagtaagaggagagagtagtttccaagccatcacgcaggacaagggggaccctcgcgggtgcgggtggctggcgttgggatcccttgggtcctggcccgccggtcacttacactgcacatccagcacgtactgcgtctgcttgctgtgtccggagggcagcgcctggttctgcgcctcacagatgatgataccaccgtcgtccttacggtccacacgaaaccgtactgtgcttgccacgctccagaccttgccattttcctggctgctgctcactcctgccacaccccggtcagacactgtcaggccacaattccggctccatccacccacccacccgagccaacgccaaagcaggctatttgccaagctccaccccttacccacaggccccgcctcttgtcctccaagctacgcccctcccctaaccaagcccacgtgcctcctcccaaagctcttccctctttcacgctcatgctttctcgtctatcaatccatttaattgctatatatataaaaacataaatttatatatatacttagagacagggtctcacaatgttgggcaggttgaactcctgacctcaagcaatcctcccatctcagcctcccaaagtgctaggactacaggcgtgagccaccgcgctcgacatcaaccactacatattgaatgtccagtgtctgtgaaaacctgtggctcctctccacatataaacaacctctcctaagtcccacctcctccccatcccttgtcagcactcggcccagggtacctttcagctccttgcggtcccggtaccagcgcagggtggcagccggacgggaccgcggaacgaggcagctgagctccacctcgccgccctctaccgcctgctcccggacctccaccacaggattctctggggccactgccgcagggagaagggaagtaaggggttaaagaaggcacgaacgtgggctcaaagcgatcgagctgcctgttcccagcgaccatagggaaccagggtcccaggtggcaggggtcaaaggggagaggtcaggagccagatgcccatccaggatgttaaaaatagccatggtctgaaagtctcaggagaagagagaagcagagaagaaaggaggagaggatgcgtctgacaagggggagggcgttacctagtaccgtgagcgtggcaatctggtggtgggtgtcttctgtgtagagctggcagaaatagcccccctcgtcctccaggcgggcatctgagagccggatccgcacccggcgtggggagaactcctcaagctggaaacgctcatccttcaaggctagagagagtgagggggaaggtgtgaatttcgggagtcctggcctcacaagtcccacccttccgacaggagcttagagtccagccctctgcctcttttctccagccatatctatgagtctgaggtgtccaactatttactcccttgaggacccagcattattcaagtcctcctgcctgcaggaccagcagtccgggaccccagccctttcttctccgagacccaggagaccaaactctcaggtgtgtcctctttcaggacatgggagcctgggccccagccctctcttcctttaagactcctgagtctggtccccagcactcaccacgggtgccattgaagaagagggtctgccgggctgggttctggatgacaactatggacccatcatactggtgcagacggcaggtgatctcagccaccccaccctcagccactgtcacgttctctgtctgtacttcctgtcctgcccctggacgattagacaaagagacaggatagaagacttactgagagctgcaattcaattttttctttctccctcttccccatccaaacctccaatccctctctttcccctcattcattccattgcactgaacatttcctgcaggctagagtccaggacagggaggaaatctgctccctactctaaaagagctgcagtcaagatttagtagaatatgctctaatgagggcagcacagggcacactaggagcccagagcaagggaggactattatagaattgcctagagagatgggtagccagagagggctctgcaagaaagctccattggatctggatcttaaagagtaagcaggaggctgagcgcggtggctcatgcctgtaatcccagcactttgagaggccgaggtgggcggatcgcaaggtcaagagatagagaccatcctggccaacatggtgaaaccctgtcactactaaaaatacaaaaaaaaaaaaaaaattagctgggtgtggtggtgcgcacctgtagtcccagctactcgggaggctgaggcaggggaatcgcttgaacccgggagttggaagttgcagtgagccgagatggagccactgcactccaggctgggcgacagagcgagactctgtctcaaaaaaaaaaagaaagaaaaaaaagagtaagcaggagttcacaaggtgtgggagactgctgtgtgttcaccaagcctcatctttcacacctgggcacatgttgtagcccgtttgcaaagatagccgtaatattctcctgtccctggacatgccctttgcaagttgattttgccattcctcccattgagaaggcactttgtcccctactagtctgggtaagccttgagagttgctttgaccaatagaatttgctagaagtgatattgagcctaggcctgaagaggccttgtagcttccactcctgccctaagactgttgcatgaagatacccagactagtgtctttgcagatgaacaatcatggtgaaagagaagcccagccggcagccagcaccaatcgccagctgtgtgagtgtggccatcctggatcatccagccccagctgccccaccagctgacagcagccacacaagtgaccccagttgagaccaataaaagatctgcccatctgatacagcccaaactgctgaaccccagaatcatgaacaaataaggtggtggttgttttaagctcctaagttgtgggtgatctgttctactgctaaagttaactgatacaatacataattaggctatacttcccagcatcctttatagttaggtggggccatgtgaccaattctggccaatgggatgtaggtggaagagaaacacctcttgcagcctgacccatctccctcataatccttcacactggctgaacagagaggactccaaggagcctagaggagggcagaatcacaagccagaaggaacctgggtctctaactgactgtcccccatgacccgcctgtataggactgtgatatgagcaagaaatatacctttttgttaagccattgagatttcaggggtgtctgttacagcctttaacctaccctgattaatccatcagaaaaacaaggtggggaatctagaaccatcagagaaaagcatttaggaaagctgaaagccaagactaatcatcagcattaatatcatcatctgttgtcttcaaaataacaataacccccatagctaccaattattaggtacttgcagtgttagtccctgtgctaagggcattacccatataacttacctttaatcctcacaatccctgtgtaaggtagacatgattattatcattattattattattttgggacagagtattgctctgttgcccaggctggagtgcagtggtgtgatctcagctcattgaaacctccacctcccaagttcaagcgattcttcagcctcagcctcccaagtagctggaattacaggcatgcaccaccatgccgggctaatttttatttttagtagagacagagtttagccatattggcctggctggtctcgaactcctggcctcaagtgatccgcctgcctcagcctcccaaagtccagggattacaggtgcgacccaccgcgcctggccaattattattattatttttaatttgagacaaggtcaggctggagtgcagtggcacgatctcagctcactgcaatgtctgcctcccaggctcgagtgatcccacctcagcctccccagtagctggaactacaggtgcacaacatcacacctggctaacttttgtatttttttagagacggagtttcaccgtgttgcccaggctggtcttgaacttgcgagctcaagtgaactgcctgcttcggcctcccaaagtgctgggattacaggcatgagccactgtgcccggcctgcgctattattatccccattttgcccggcctgcgctactattatccccattttcccccatttccatttttcttttcttttttttttttttttttttttgagacattgtcttgctctgtcgcccaggctagagtgcagtggtacgatctcggctcactgcaacctccacttcccgggttcaagcaattctcctgcctcagcctcccaagtagctgggattataggcacctgccactgcacttggctaatctttgtgtttttagtaaagacggggtctcaccatcttggccaggctggtctggaactcctgacctcgtgatccacccgcctcggcctcccaaagtgctgggattacaggcttgagctatcgtgtcctgctcccattcccattttataggtgagaaaattggcccacagagatgaaatgacttgcccaagttcacagccaagagtggcagtgccaaaatcttcgtccaaatctctgattctgtatcctgaatctgtatatccactcctggctgtctggattaagtgtccatcattggcagggggttgtgagagccgcttgtgatgggcctcgaatgccaacctaggagatttgctttcatcctaagggccagtgaaggttttgaagcaggaatatgccatgattagatctggctatttgtctttaagtgctggataactatccatgtcttttacattcaggtgctgggttgcattcattcaggagtatttcctgagcatcacgtaggttttcaggggctgagtagtcagagatgagttagatgaggtccctgccctttaagatttatgggaaggtaggaaccaatcacggtaatcaaaagtgttatgtggctgggcacggtggctcacacctgtaatcccagcactttgggaggccgaggtgggcggatcacaaggtcaggagttcgagaccagcctgaccaacatggtgaaaccccgtctgtactaaaaatacaaaaattagccaggtgtggtggtgggtgcttgtaattccagctactcaggaggctgaggcataagaatcgcttgaacctgggaggcagaggttgcagtgagccaagatcgcgccactgcagtccagcctgggtgacagagcaagactccgtttcaaaaaagaaaaaaaaaaaagaaataaataaaagaaagtgttatgttttctgtaagagggtaggtaacctaatttggaagttgaggggtagaaaagattatttctgggggatggagacagagacttctggcttcctattctgacatccatttttccctttctcctcagtaaaagaaaagaacactggttgtattttatggttgcactatgtccagcagaaaaaggcattcctcagtctccttgcagcaaggtaaagccatctgataaaattttgtccagttggatataagccaaaatgttgcgtgacaattttgggaggacttcctgaaacaggtggacaaaccctttttctactgagtcacctttgtgccacctggaactaacagtgtgacgcgtggaatttaggcagccatattgaaccatgaggacaagagcagtggggatggcggaaccaagagctggaaggtgcctgagtctctggtgaagatgtggagctgctgtaacagccctcaactcctagttctggacttcttttatgttttagtgtaacgctttgggtatttttatttttttaatttattttagagatgaggtctcactatgttgcctaggctggactcaaactcttatgctcaagcagtcctcctgcctcagcttcatgagtagctgaaactatagcactttgggtatttcagccactgtttgaggtttttctagcacctcctggaatatcaagcttaacatgtccaatccttgccccagatattttcctccccaaattttctcaatctcaataaatgtcaccaccatccacctggttgctcaggtcaaaaacctagaaatcattcaagttctctccctttccctcatccccaatatccattccatcagcaacatctgtccattctacctccaagacatatcccagatctcatcacctttgtctgcctctcctaccctcactctcatccagcatcatccctcacctggactctgcaaaagcctactcgtgggtctgtctgcatccctgtctgcctcctccagggccattctccacccagtggccggatcgatttttcaaagaggtaaatcagatcaattcacctttctgcttaaaaccctccgagggctgcccgtaacatgtagaataaaatagagaccccttcccggggacttcaaggtgctatatggcctggccccttgctgaccttacttcactctgggctcgctagccttgctgtccctcaaacatgctgagctcgctcccaccacagggccttttcccttttcttccttctgcctggaatgttcttctccccacctcccaagccccatcttcccagggctgactcctgttcccatttgggtctcaaatcatatcagtaccttctcagagaggccttccctcactgctcatcccttcacctttagaacactttcttttcttttaagagacaaagtcagcccagtgcggtggctcacgcctgtaataccagcacttttgagaggccaaggcgggcagatcacctcaggtcaggagttcaagaccagcctggccaacgtggcgaaaccccgtctctactaaaaaaatacaaaaattagctaggcagtggtagcccgggctactcaggaggctgaggcagaattgcttgaacccaggaggcagaggttgcagtgagccgagattgagccactgcaccccaacctgggtgacagagagagactctgtctcaaaaaaaaaaaaaaaaaaaagagacagggtattgctctgtcacccaggctggagtgcagtggtgcaatcatggctcactgcagcctcgaactcctgggctcaagccatcctcccacctcagcctcctaagtagctgagattataggctcctcccaccacacctggctaatttttgtgctttttgtggagacacagattctccatgttgcccaggctggtctccaactcctggggtcaaaggatcctcctgcctcggcttcccaaagtgctgggattacaggcgtgagccactgcgcctggcccagaacacttgctatttcctcaccattgctttatttcttctatgaagatttcactggaattatcagattaatttgcttatttgtttactgtctgtttgtcacccatgactggaatgtatactctaggaaggcagggatataatccaatgggtttactgctgcacccctagtacccagaagagtgcttggcacctgataagtgtctggggaacttgctacatgaattacatgtgtcagatgggatatctgttcgtctttcttctctcttttttctttctctctttctctctctctttctttctctttctttcttttttctttttttgagataaggtctcgctctgtcacccaggctagagtgcagtggtgcaatcatggctcactgcaaccttgaacatgtgggctcaagcgatcctcccacctcaggctaccaaatagctaagactacagaggtgcgtagctatgcccagctaattaaaaaaaaaaaaatttttttttttttttagagatgggggtctcaatatcttgcccaggttggtcttgaactcctaggctcaagcaatccccctgccttggcctcccaaagtgctgggattataggcatgagccattgcagctggcccagacagaatctcatttcagcccgacaactttgtgacatcattattttcatcttaaacacctaggttgatcccagctcaaccacttgccatctgtgtgacctgtgggcaagtgaccttacctttcggagcctcagttgccccatctataaaatgggaatgatgccagtgcctgcctcataaggatgagccccgctcctgaagctcagggagccctctctgcaaggctgttttagtgcaacctccggaaacatgcccatgcatgtgaaaactggcatgcacattctggtgcttttaaaaacatctcgaagcctatccacagatcctggacctcaagactggttcagtgctagccccccattttacagatgtggagaatgaggcttagcgggtcccaggcaagtcagtggcaaaactcaccatctcctgggagccatcaggttcctctggatctgcccccaccaaatttatcccctgctctctgcttgagggtgcacatggggtgagggtgggggtcttttgttttactccctccccctcctgaggagtcagtaaccaacagtgtctgtgcctggaatattaatgtctcagcagcttttgtttggggggttgggggtggtgggggcgggactttctggtcagagaggggctgagctttggggactgaggcactggccctttaaactgtgttgacagccaggagtcgtcatggggatggtgcttggaaaaggggacagggagggtttgggaaagagtggcggagcaggtaatgcgtaagacccaggaatccagcccccaactacctcctctcccaggacccaggagtctaggctcccagcccctcctccatcaggttccaggagtctggaaccccggcttctttccgccttagacccaggaattcagcccccaaccacctcctctctcaggttcccgaaatccagacccctagcccccttctcgatcaggacccaggagtctgggctgtcagcagccccttccttcaaacctaggagtcagagcccccagccctctcctagcttagacacaggagtctgggcctccagccccctcctccttcaggacccaggagccaggggtccagagtacacagctggtggatgtttccacggagactaagcagggtggggggagcgcttcctgggtcctgagtcagcgaatacccaagggagtctcaaggtcatagttccgggaaggtcaccaccaccccctctgtatccgctccccagggggctcctggcatcctgcctccttcccccttcctcccttagggaggtggtacatccctgcgtcctgactgaacccccctcagccccccatcaatggcggagtccgaacatcctcgcacaaagcgtcaattcttccccagctcagccttgtgaaggcgcctgtattcgcaggacctaggcgtcagggtctcagcccctcctccctcagaaacctgcagtggaatcccccgcctccagccccttcctccctcaggacccaggagtctgtatcctcatcccttcctccctcaagacctaggagtgtggactcccagcccccttttccttccggacacaggagttccagccctcggccctctcctctcttaaacccaggggtctaagaccccagcctcctcctccctcaaactcaggagtctaagatcccaggcccctcctccctcagactcaggagtctaagatcccaggcccctcctccctcagactcaggagtctaagaccccaggcccctcctccctcagactcaggagtctaagatcccaggcccctcctccctcagacccaggagtctaagaccccagcccctcctccctcagactcaggagtctaagaccccagcccctcctccctcagactcaggagtctaagaccccagccccctcctccctggacccaggagcctaagacctcagccccctcctccttgagacccaggagtctaagaccctagctccctcctcctttagacccattagtccaggcccccagaccctcctccatcagacccaggagtccaggcccccagcccctcctccatcagatccagcccctcctctcctgaaaacttttgactctaactccccagtcctcaacccctagaagcacagtcctgcctttcctcaatcctctgtcccctcccatctggggacctaggcatcaggtgggggcgtaggggtgagtcagcaacctcacacacaaagtccccgctgtggcccccacattcctgggatattcgggactccctggattccaggcctcaggcccagccagggagtggggagtcccccagaggtcctccctgggtgtggggtacgagaggaattcctgctccgggaagggtgcaggcctgcactgagctccctctgtccgaacctccacgcccagtgccctctattcaccccctcttcccagaagagcccaggctcagcacctgccccttgccccactgggtgcccacggaggagcctgcgtgcctgctccctatgggcctggggtctgcacaggcggaaatcagtgggtgcttccgttctgatgccacaggccattggatgctggcgggtctgactgtctccaggccaccccccacccctcccagagagagaaagctgcctttgtgttctccaagatggggacaggccaggctcgcacgacattaacccagccttaggccccagccctgctgtgtctaaggtcttggaatccactgcagaacctgacccccacccccaggctctggggacacaggcgcctggctcatgggtgggtgggtgggggggtcagtgatagaaacctccaaaacctgttccttggggtgactcacaatggagggagggtccccctattctcaagagtggctggtcagaattttagcaggaaaaagtgagtcaccctgggaaggaaacattatttagggaccaacaactgccccctccacaagacccctcaactcctaatagcctctctattctttctttgtattggatatctgtttcctctcctcctttctgttctacccagtttctggctgcgggtcccatttctgcctgggtgcatccctgggcaggcaacccatccctccctcttgctttctctcctctgcccaccctggatccttctttgggcataaatctcatcttcttctgctatgctcagaagatgaatgaaccaggagagagagaacatgtttttaaaatggcgcaaatgcaccccatctcccccgattcctgctggctgggcaaggtgagagaggaagaagtgactaagagagaaatgtgggaacaacagataccccctaaaatgtggtagccaaggccactgagaaatatccaatggaaaggagagcaggaagggccctccaagaccacatgctacagcctcctaccccatgctttacagaacgggaaagtaaggcccagagagggacaaggactgatgcaaaattatactaaagggtcctgggtaaggcttggacccaagttccttagctcccagctgagagctcttcccatgacaccaagctcagtttctactggtaaaagccacatactatttactttagagaaagtttacagagagggttagggtgccaggaagcagtgacttggaaatcaaacgagggacagggctgtagacctaactcccagaagcaccagagaaaggcttttgcacggggcgggtggtcaccttaagctatattctgatcctgagaattcaaagtctgatgattctaagctgtcaggattctaaatgtcatagatgtcaagatccaggaactccaagacatcaagatttcacgatttttaagacgtcaagatgctagcatgctaacaccatcacggttctagaactttaaaggtgtcaagattctaaagccttctggattctagaatcctgtagatgtcagcattctaaagtaccatcaggttctttatttactggattcattagttccaggattctatgagcctggtgtttagcctaaaaaataaagataaattaaaattgatggaaatgtcactgaggtaccaaagttctcatctgggaaattgtggcatgtctgttgtaaagaaaggaggtaatgatgcaagttctaaagcagtcacagaagactagagaagaaagaaagacagtgagaggacagctttgcccctcatcctggccgaggtgaggatggctctgcctcaaaccctggagtggggaacatgtaaccgcactcaacttgccagaaaccccttcacggtctgagctggcgttccctttcatgtcactgagttcaacatcctcactttacagaaagagaaacagaagcctggagagaggaaggtgtttaccattggctgcgatggcaaatggcaagagccaagatttaagcccaggccgccagccccatgccacctggttataactcctctcaccaatctctgccgaacacccagccctcctgcttctgcctagccaccttccaatcctctgttccttccaaaagtggccttatccaccagggaggggtgacccgtggcaggttcaagacttacacagtgtgagagtgtgtgtgggtgacatttcctgaccttgtccccattctcagggtcacccaacctcgggggtctccagcttctcacagtgtgtgatgagggtatgtggatggctccctggatgtcctggacaggggcttctctgtgagtcaagcctgggtgtgtgaatgggtgagcagggtttggagaggcattcgctgaatccacgtgtgtgcctacacgccaaggtcccccattctcacttccccacacacatgcacacagatgttcccctccagggctctttagaatgccctgcctgactgaattcctcttcaggggcacagagggatagagagagggaggaaggtaggatgggaatgggagatcccgggatggaggctgtaagcgtagagagaggaggcacagcagaaagacagggatggagatagtgggacagagaagggggaaagagacaggtgacagaaagggttagagaaacgagtgacagaaagacaggggacagagacaaggggatggggcagataggggacagagaaaaagggacagaaaaacaagggtgacagcgagacagagacagggaccaagaataggggcagagagggagggcagaaatccgggggaaagagaatagacaggatgatggaggggacagagtgacccaggaaaaggggacagagaccaggggacagaggtaggggacaaagacagaatagatgaggaacaccgaggcaagaagagagggagacagacagaaggagggacaggacttcgagactgagggatagaggacaagggtagggggacgaggagccagacgggggggttcagagacgggcggacagagggacgcagagactggacagaaggacagcgggaccggcctggggagggcggacttgtgtgtgtaggggggtctcgggccctttgtccccgccgggatccagcctgcgcgggtgggggggctgcggcacggcggccgggccccgcgccccctcccccgctcgtcgctcccggctcccggcccgcgctgcgctttgtcccggggagggggcccggcccggccccgcgcgcattgttcggcctctgcggccccgaggctgccgggctgtcaccacagcgcgccccccgccccagcccggccggccgaccccggcccccgaccctacctggccccgccgcggccgcccacagcagcagcagcggccactggaagcgccgggcccggcccatggtgccgccgccgccgccgccgccgctcgctcccggcccggcacctgcaccgcccgcgccgcccgccccgccccccgcgccccgccccctgcccgcccgggggcggggcgccgaggccggggcggggccggggaggggagggggagacggaggagaggcccggagacaatcggggggacggcacggtgggggaacggtgcggggtgcgaaagctggagaggagaggggtgaggagggcgggaaggggtgcgcgggagggcgacagcggcgtgggagcaggtgggggatctcggtgagcgcgggaaatggagggtgttgggtgagggtgctgcgtgcgggcccaggtgctgcgcgcgagggtgcggagttgctggcatgcagggtgcttgcgctgcgcggaggggagggtggcagggtgttgctggaggctgtgcgagggtgggggcgcgggcgtcgtggggtgcggtgtgtgcgaagggagagcgtggccagcgtgacgggggagcgtaagggagggagtgcgacgtgggaaaggtgagtgtgagaggcgtgctgcgggcaggtgggtgtctggagtctagcgagaggctgtgagctgagccaccgggacaggggaggctgcagctggaggtccggagggtccggaggtcgaggcaggtcaaggatctcccagggcagggcgaggctggggctcaggagtggggtggggtcagttccctccctccctctctcctgtcctgacctgaaaaccccgtgtttccgcgtcattctccgggaggggccccctgaaagtgaactaactggaaggaagcctgaatcctgggtcccaggagggagaggctcctgtgaacaccttccaagccctggcgtcccctctcctccctgctgtctccctgccccagcctctctccctctctctgcatgtatttgcctctgcccttcctctctccccatctttgagggtgactcacccctccagacttaggtcccttctccctcctgggagtgggtttccctgagcccacttctgtgacaccctgtagacctgatgcgggatcattacctatgggacccagaaagagtgagaaaccatggaaagaaggcctcgacctctctcatgcccatttgtcaggcaaactgaggtccagaagtgccaattatgaacatctttccttcccccctcccccctccccgcccagacggagtctcgctctgttgcccaggctggagtgcagtggcacgatctcgactcactgcaacctctgcctcccaggttccagtgattctcctgcctcagcctcccgagtagctgagattacaggcgcccgccaccatgcctagctaatttttatatttttagtagagacggagttttgccatgctggccaggctggtcttgaactccttacctcaggtgatccatctgtctggcctcccaaagtgctggattacaggcgtgagccaccatgcctggctgaaaatccttactttttattccgactaaaaaattttacatccagtcccacaagggacttcagcttcacacaccctttctgtcctcagtacccagctcccagtatcctttctgacctcaaaaccatagctaccatcaacccttgtgtcccaggaccatggctcccagtgtcttctctgtcctcagggtccaagctcccatcaactcctgtgtcctcaggaccacggctcccagcatcctctctgtccttcaggtccaagctcccatcaacccctgtgaagcaggaccatggctcccagcatcctctctgtcctcagggtccaagctcctatcaactcctgtgtccccaggacgatggctccagcaatcctctctgtcctgagagcccaagcttctaactgcccctgtgtccccagatccatagccctgagcaacttccttctttttcagtcctcagcttcccagcttctgtagacttgggaagagatagtctctaatcctctttccagggctcacattctgtgacttttgctagatgggagaggaatgtttgatctgcctttggaatactggtccaaggggtaactagtagttgccttttcccgcaggagccaataggcccgctcactctgtgctctgacagatgtctcctgctccagctgaaggggaaccttgggagatgttggtttggttctcacctgtcatccttaagtcccaccattccatgtgaagacatcacaagagtagtggtcctgacgggcgcgttggctcacacctgtaatcccagcactttgggaggccaaggtgggccgatcacttgaggtcaggagtttgagaccagcctgaccaaccggccaacatggtgaaacaccatctttaccaaaaaaaaaaaaaaaaattagcaaggcgtggtggcacgtgcctgtaatcccagctggtcggaaggctgaggcatgagaatcccctgaacttgggaggcagaggttgcagtgagctaagatcatgccactgcactccagcctgggtgacagaatgagactcagtctaaataataataataataataataataataataataataataataaatagaatagtggtcctgtccccatcctacttcagggtaccctgtccattagggatttagtgcaagtgacagcaagtgcaacccaactggtttgagagaaagagaactggttcacacataacaaaaagtccttctatggctggctttggcgaggtctgtcaatctctgtcctaaggatgcatggctcccctcctgtagcaagatggctggcagatacccctggggccagattcatatttggggtgattaagattctgcaagagagagacaacctttatttcacacagcttttcaattgttgcctgtccctggtgagactcggagacctagctcttgcctggtttctaaactttcaataacaccgtttttgcttaagtcagcacaaacagattttatttcttgcaagcaaagattcctgaacaacaacttcagagccgttaacaatgaggtcctgatcacaagctatggtataggacgtgagaaatttgtccctagcctcaatatctgctggagggcatcatggaataagtatttctatcctctgatccccactgtagggcatcatgggatatataatcctaaccttcaatctctgccatagagtttcataggcaatgcagtcctagcctcaatatgttgtagggaattatgggaaaggtgaaattatcctcaattataatacagagcatctcagaaaatgtcgttttagcctcatctctgctgtagggcatcatgggagatatacttctggcccaatttttgttgtaagttgccatagaagatgcagtctttccttccttcccttttttcttttctttctttctttctttttttttttttttattatgtagagacagggtctctcgctatgttgcccaggctggtcctgaactcctgggctcaagcagttctcctgccttggcctcccaaagtgctgggattacaggcaagagccattgcacccagtcccttctctcctttctttcttcatcacctgccatattccaggcactaggaataaatcatcaagtaaataaacggccttaccctccctggcaattataatggggaaagttagctaaaaacaaacaaaaattactgttccatttaaccatcgctgaataacaaaataccccagaacgtagtggtgtgaaacaacaaccttttaattttatgattctgtgagtcaggaattggagcaggattggtgtgtatctgcttcatgatgaactggagccaaaaatgaactagctggaacagctggagatggaggggaggggcatcaagggccatatatctaaggctggtggttggtgttgtgggttttgaatagtgtcctccaagtaaaatatatgttgaagttctagcccctggtatctgtacatgtgaccttatttggaaataaaatctttgcaaatgtaattcacttttttgtttgtttgtttgtttgctcgagactgagtctcgctctgtcacccaggctggagtgcagtggcatgatctcggctcactgtaaccttcacctcctgggttcaagcgattctcctgcctcagcctcccaagtagctgggattataggcacgtgtcaccatgcccagctaatttttgtattttcagtagggacggggtttcaccatgttggccaggctggtctcgaactcctgacctcaaatgatctgccacctcagcctcccaaagtgctgggattataggcatggggcactgcatcctgcccagatgtgattaacttctaacccctggtatctttgcatgtgactttatttggaaataaggtgggtttttttcttgtttttttttttttttttgagacagtttcactttgtcgctcaggctggagttcagttgcataatctcagctcactgaaacctctgcctccgaggctcaagcgatcctcccgcctcagtctcccgagtcactgggactacgggcaagcgccaccacacccggctaattgttgcagtttttgtagagatggggttttgccatgttgcccaggcggtctccaattgccaccctcaagcaattcatccgcctcggcctcccagagtgctggaattataggtgtgagccatggcgcccggccagaaagtctttgcagatttagttgaattaatgactaaatgtttccatgctgagttagagtgggctctaaatccaatgattgatatggggttataaggagagatatttggagacatagccacagtcccagggaaggtggacattggaagacagaggtagggattagagtgatgcagctacaagccaaggaatggcaaagattgctggcagtccctcagaagcaaaggagaggcaaggaagggttcttcccctgagacttttttttttttttttgagacggagtctcactgctgtcagcctcagctggagtgcaatggcgcgatctcggctcactgcaacctctgcctcccaggttccagcaattctcctgcctcagcctcccgagtaactgagattacaggcacccgccaccatgcctggctagtttttgcatttttagtagagatgggatttcaccctgttggccaggctggtctcgaactcctgacctcaggtgatccacccgcctcggcctcccaaagtgctgggattacaggtgtcagccccggagactttaaaagcatggctcttcccctgacgctttaaaagcgtggctcttcccgtgagacttcaacaccttggttttggacatttagcattcagaactgtgagagaacaagtttctagtgtgtgtgtgtgtgtgtgtgtgtgtgtgtgtgtgtgtgtgtgtgtgtatgtgttttagacagaggctcattctgttgcccaggctggagtgcagtggttcaatctcggctcactgcaaactccgcttctcagattcaagtgattcttatgcctcagcctcccaagtagctggaattacagaggagcgccatcacagccggctattttttttttttttttttgtacttttagtagagacagggtttcactgtgttggccaggctggtctcaaattcctggcctcaagtgatatgcctgccttggcctcccaaagtgctgggattacaggtgtaagccaccacacctggcctaagtttctgtgtgtgtgtgtgtgtgttttgttttgttttttttttttttttgagtggagtctcgctctgttgcccaggctggagtgcagtggcatgatctcgactcactgcaagctccgcctcccgggttcacgccattctcctgcctcagcctcccgagtagctgggactacaggcacccaccaccacgcccagttaattttttgtatttttaatagtgacagggtttcatcatgttagccaggatggtctcgatctcctgacctcgtgatccgcccgcctcagcctcccgaattgctgggattacaggcatgagccaccaaacccggccaagtttctgtggttttaagccaccttgcttgtaagatttgtgtgtgtgtgtttttaattttttatttttaagtattatgaatacataatagtggtgtatatttacaggacatatgtaatatggttttgggttttagtgttttttttttggagacagagtctggctctgttgcccaggctggagtacagtggtgggatcatggctcactgcagccttgacctcccgggctcaagggatcctcctgcctcagcctcccatgtaactaggaccacaggcatgccccaccacatccagccaatttttttttatttttagtggagatgaggtctcactgtgttgcccaggctgatcttgaactcctgagctcaagagatcttcctttctcaccctcccaaagtgctaggactacaggcatgagccactgtgcctgtccttccatgatgttttgatataggcacacaatgtgttagtttataaagtttgtaataatttatcacaggcagccctaggaaactaatatagccaagtttcctgtttcttctctatatcacatctgctggggctacatgtccaaggtggcttcttcacccacttgtctggtgcctgggctgagatggctgaaacatctggggctctatctccacatggcatttatacatgagtagcttgggcttcctcacagcatggtggtctcagggcagtagtacttttacatggcaaccagcttccccagagtgagcgttctaagattcagaaagtgaaaaatgaaagtttcttaaaacttggttccagaacatagcacagcaaaacttccaccacattctactggtcaaagcagtcacagagtcactcatattcaagaggcagaagtacagacctcacttctttaagccactacagtgacaggtggtgatatgtcattagagaaagccctaaacaagaaccttgtccctcacctgcccccaaataccatggaagatgtctttttttttttttttttttttttggggatagtctcactgtgtcatgcagtggtgtgatcttggctcactacaacctcctcctcctgggttcaagcgattctcctgcctcagccttccgagtagctggagttacaggcacccaccaccttacccggttaatttttgtaattttagtagagacggggttttgccaaattggccaggctggtctcaaactcctgcctcaagtgatctgcccacctcggcctcccaaagtgctgggattacaggcgtgaaccaccacagccagccgaagatatcttattttttcttcattagccacaagatttgatggggaatgtaatttttgtctccatgggttgccttagcaaatgatgagaagaacatgaatttttcaatattgtgctcctagagtgccattgaaatggtagttctgtctctttttctgacagtcctgaggcatcccgggaaatagagcccagcctttatccccggtccccagcacatcaggggaagtgcactcctgtccttattcctcactgcagtgcatgcagggagttctggccatcaggttatcttctatccgtctcctttcccaaagcatgctgggaaatgtggggatgtctccttagaacaacaaaatagttgcaacctttgaagtttaggagaagactagaaggttagtgttcagtgtgtgatctggaagcttgcatttgtaagaattaaagaaagaggaggccaggcacggtggctcatgcctgtaatcctagcactttgggaggccaaggtgggcagatcacctgaggttgggagtttgagaccagcctgaacaacatggagaaaccctgtctctactaaaaatacaaaattagccgggtgtggtggtgcatgcctgtaatcccagctacttgggaggctgaggcaggagaatcccttgaactaggaggtggaggttgtggtgagctgagattgtgtcattgcactccagcctgggcaacaagagtgaaactccatctcaaaaaaagaaaagaaaagaaaagaaaaaggaaaaggaaagaaacatgaaatgtggcttgacggtgaaggacaggtttattttagagaaaaccaacctgaggggggcttttggctgagttaggttagagagcccttttttttttttttttttacagactaaggatatttaagagttttggaagggggtgcttatctaggttcggaatgttttcatgtgaggaaaagtttattgtggggttggaaagtctctggtcggaagggaggctatctgggggttggcatgtttctggtcagagaggggtttatcttagggttggaatgtttctggttatgctgatggtagccattaggctgatgttttggggctggatttagctgatttttttttgagacagagtcttgctctgtcacccaggctggagtgcagtggtgcaatctcggctcactgcaagctccacctcccggattgacgccattctcctgcctcagcctcccgaatagctgggactacaggcacccgccaccacgtccggatttagccgatttttaatcaagaggaactaagaat

SEQ ID NO: 362 - DNA, 3335 bp, Homo sapiens
tggacctaaatacccagaagcacccccctttgtaagatttgtaacaaaaattaatatgaatggagtaaatagttctaatggagtggtggacccaagagccatatcagtgctagcaaaatggcagaattcatatagcatcaaagttgtcctgcaagagcttcggcgcctaatgatgtctaaagaaaatatgaaactccctcagccgcccgaaggacagtgttacagcaattaatcaaaaagaaaaaccacaggcccttccccttccccccaattcgatttaatcagtcttcattttccacagtagtaaattttctagatacgtcttgtagacctcaaagtaccggaaaggaagctcccattcaaaggaaatttatcttaagatactgtaaatgatactaattttttgtccatttgaaatatataagttgtgctataacaaatcatcctgtcaagtgtaaccactgtccacgtagttgaacttctgggtcaagaaagtctatttaaattgattcccatcataactggtggggcacatctaactcaactgtgaaaagacacatcacacaatcaccttgctgctgattacacggcctggggtctctgccttctccccttaccctcccgccttccaccctccctgcaacaacagccctctagcctggggggcttgttagagtagatgtgaaggtttcaggtcgcagcctgtgggactactgctaggtgtgtggggtgtttcgcctgcacccctggtttctttaagtcttaagtgatgccccttccaaaccatcatcctgtccccacgctcctccactcccgcccttggccgaagcatagattgtaacccctccactcccctctgagattggccttcggtgaggaattcagggctttccccatatcttctctcccccacctttatcgaggggtgctgctttttctccctcctcctcaagttcctttttgcaccgtcaccacccaacaccttccatgacacttccttgctttggccagaagccatcaggtaaggttggaaagagcctctgacctcccttgtttagttttggaaccatactcactcactctccaccagcctgggaaatgaatattgggtcctcagccctgccaccctctgctgtcatcagctgatgcattgtttttagctcaggttttgataaggtgaaaagaatagtcaccagggttactcagacctgccagctctcggagtctttggtggttgaacttggagaaagaccgcatgaagatacttgtaagcacacatgatccctctgaattgttttactttcctgtaactgcttttgcttttaaaaattgaagaagttttaaacagggctttcatttggtcatccttgcaatccattggggtctagtttggaatctgacaactggaacaaaaaggaccttgaatccggtgcatgccttggttttggtgctgctgctgcttcccaagatcctcagcagggattaagaaggaacccggtgtgcacagcagatccccgaaattggtgggcttgaccccctggcaaattgctgcgtcttgccacttgctgttcaggaccactaaatgctgaaatgtggatgcataccgaaataaaagcaattcattgtgtactaaaggttttttttttttttttaatttagtatttgtgtaaaaccaccttttgaagcagcaactatcaagtctgaaaagcaattgatgtttccattaatctttttctggggggaaaaccttagttctaaggatttaacatcctgtaagtgaagtttaacataacagtattccataagcagcctttttattgtcagaccattgcctgattttaatataataaaaaaaaagtgtgcgttaatatttaaaaaaaaaacctttgtcaccccctgcctgctagctggggaccgctccttggcagatgtcatcatccatgagatctcccacagttggtttgggaacctggtcaccaacgccaactggggagaattctggcacaatgaagtttcaccatgtacgcccagaggaggatctccaccatcctctttggcgctgcgtacacctgcttggaggctgcaacggggcgggctctgctgcgtcaacacatggacatcactggagaggaaaacccactcaacaactccgcgtgaagattgaaccaggcgttgacccggacgacacctataatgagaccccctacgagaaaggtttctgctttgtctcatagctggcccacttggtgggtgatcaggatcagtttgacagttttctcaaggcctatgtgcatgaattcaaattccgaagcatcttagccgatgactttctggacttctacttggaatatttccctgagcttaagaaaaagagagtggatatcattccaggttttgagtttgatcgatggctgaatacccccggctggcccccgtacctccctgatctctcccctggggactcactcatgaagcctgctgaagagctagcccaactgtgggcagccgaggagctggacatgaaggccattgaagccgtggccatctctcctggaagacctaccagctggtctacttcctggataagatcctccagaaatcccctctccctcctgggaatgtgaaaaaacttggagacacatacccaagtatctcaaatgcccggaatgcagagctccggctgcgatggggccaaatcgtccttaagaacgaccaccaggaagatttctggaaagtgaaggagttcctgcataaccaggggaagcagaagtatacacttccgctgtaccacgcaatgatgggtggcagtgaggtggcccagaccctcgccaaggagacttttgcatccaccgcctcccagctccacagcaatgttgtcaactatgtccagcagatcgtggcacccaagggcagttagaggctcgtgtgcatggcccctgcctcttcaggctctccaggctttcagaataattgtttgttcccaaattcctgttcccgtgatcaatttcctggagtttatatcccctcaggataatctattctctagcttaggtatctgtgactcttgggcctctgctctggtgggaacttacttctctatagcccactgagccccgagacagagaacctgcccacagctctccccgctacaggctgcaggcacgcagggcagcgggtattctcctcccacctaagtctctgggaagaagtggagaggactgatgctcttcttttttctctttctgtcctttttcttgctgatttatgcaaagggctggcattctgatgcttttcaggtttaatccttattttaataaagttttcttgcaaaaatt

SEQ ID NO: 363 - DNA, 724 bp, Homo sapiens
gagcatacaccgagagagtgaggagccagacgacaagcacacactatggcgctgaaacggattaataaggaacttagtgatttggcccgtgaccctccagcacaatgttctgcaggtccagttggggatgatatgtttcattggcaagccacaattatgggacctaatgacagcccatatcaaggcggtgtattctttttgacaattcattttcctacagactaccccttcaaaccacctaaggttgcatttacaacaagaatttatcatccaaatattaacagtaatggcagcatttgtctcgatattctaagatcacagtggtcgcctgctttaacaatttctaaagttcttttatccatttgttcactgctatgtgatccaaacccagatgaccccctagtgccagagattgcacggatctataaaacagacagagataagtacaacagaatatctcgggaatggactcagaagtatgccatgtgatgctaccttaaagtcagaataacctgcattatagctggaataaactttaaattactgttccttttttgattttcttatccggctgctcccctgatcagacctcatcttttttaattttattttttgtttacctccctccattcattcacatgctcatctgagaagacttaagttcttccagctttgacaataactgcttttagaaactgtaaagtagttacaagagaacagttgg

SEQ ID NO: 364 - DNA, 751 bp, Homo sapiens
aggatgatcaagctgttctcgctgaagcagcagaagaaggaggaggagtcggcgggcggcaccaagggcagcagcaagaaggcgtcggcggcgcagctgcggatccagaaggacataaacgagctgaacctgcccaagacgtgtgatatcagcttctcagatccagacgacctcctcaacttcaagctggtcatctgtcctgatgagggcttctacaagagtgggaagtttgtgttcagttttaaggtgggccagggttacccgcatgatccccccaaggtgaagtgtgagacaatggtctatcaccccaacattgacctcgagggcaacgtctgcctcaacatcctcagagaggactggaagccagtccttacgataaactccataatttatggcctgcagtatctcttcttggagcccaaccccgaggacccactgaacaaggaggccgcagaggtcctgcagaacaaccggcggctgtttgagcagaacgtgcagcgctccatgcggggtggctacatcggctccacctactttgagcgctgcctgaaatagggttggcgcatacccacccgccgccacggccacaagccctggcatcccctgcaaatatttattgggggccatgggtaggggtttggggggcggccggtgggggaatcccctgccttggccttgcctccccttcctgccacgtgcccctagttattttttttttaacaccaggctaactaaaggggaatgttactgc

SEQ ID NO: 365 - DNA, 1098 bp, Homo sapiens
tcccccgccccaaagatacgtggttgcagacggagaaatggaggccagagacaaacaagtactccgctcacttcgcctggagctgggtgcagaggtattggtggagggactggttcttcagtacctctaccaggaaggaatcttgacggaaaaccatattcaagaaatcaatgctcaaaccacaggcctccggaaaacaatgctcctgctggatatcctaccttccaggggccctaaagcatttgatacattcctagattccctacaggagtttccctgggtcagggagaagctgaagaaggcaagggaagaggccatgaccgacctgcctgcaggtgacagattgactgggatcccctcgcacatcctcaacagctccccatcagaccggcagattaaccagctggcccagaggctgggccctgagtgggagcccatggtgctgtctctgggactgtcccagacggatatctaccgctgtaaggccaaccacccccacaacgtgcagtcgcaggtggtggaggccttcatccgttggcggcagcgcttcgggaagcaggccaccttccagagcctgcacaacgggctgcgggctgtggaggtggacccctcgctgctcctgcacatgttggagtgatggtgcctccagcaaccgctggggagtgtgtccctgagtcatgtgggctgaatcctgactttcactcagagcaggtggttttttgtgtaggtttgttttttatttttgatgatcttcagatggaaggagaaaacagggtttccactagacatcacttgaaaggccagattactcagcagatctcccatgttggctcaacaattctttgtttttaattgcttgaagattgcattgttgtaattgttcagtttttaaatgtgtaatggcattttcaatagactagtaaatcacagtggttcaaaatatatatccatatatatatatatcccatatatatatctcatgtcatcacattacaggcaggtgtctcatatgtaaaacatttacctgaatgttgtctgaggactgaactgtggactttactattcataatgataaaataataaaatgcgaattactat

SEQ ID NO: 366 - DNA, 2272 bp, Homo sapiens
aggcgcccgcccgccgcgcgtgattctcgcctcgccgcagcccagccctgcgcgccttgcccggcggcccccgcccggccgctccgggcccctggccccgcggagcgatgctgctgctggctgccgccttcctcgtggccttcgtgctgctgctgtacatggtgtctccgctcatcagccccaagcccctcgccctgcccggggcgcatgtggtggttacaggaggttccagtggcatcgggaagtgcattgctatcgagtgctataaacaaggagcttttataactctggttgcacgaaatgaggataagctgctgcaggcaaagaaagaaattgaaatgcactctattaatgacaaacaggtggtgctttgcatatcagttgatgtatctcaagactataaccaagtagagaatgtcataaaacaagcacaggagaaactgggtccagtggacatgctggtaaattgtgcaggaatggcagtgtcaggaaaatttgaagatcttgaagttagtacctttgaaaggttaatgagcatcaattacctgggcagcgtgtaccccagccgggccgtgatcaccaccatgaaggagcgccgggtgggcaggatcgtgtttgtgtcctcccaggcaggacagttgggattattcggtttcacagcctactctgcatccaagtttgccataaggggattggcagaagctttgcagatggaggtgaagccatataatgtctacatcacagttgcttacccaccagacacagacacacctggctttgccgaagaaaacagaacaaagcctttggagactcgacttatttcagagaccacatctgtgtgcaaaccagaacaggtggccaaacaaattgttaaagatgccatacaaggaaatttcaacagttcccttggctcagatgggtacatgctctcggccctgacctgtgggatggctccagtaacttctattactgaggggctccagcaggtggtcaccatgggccttttccgcactattgctttgttttaccttggaagttttgacagcatagttcgtcgctgcatgatgcagagagaaaaatctgaaaatgcagacaaaactgcctaatcttcttaccccttggaagaagactgtttccaaataatttgaacagcttgctgctaaatgggacccaatttttggcctatagacacttatgtattgttttcgaatacgtcagattggaccagtgctcttcaggaatgtggctgcaagcaaggggctagaagttcacctcctgacagtattattaatactatgcaaatatggaataggagaccatttgattttctaggctttgtggtagagaggtgaaggtatgagaattaatagcgtgtgaacaaagtaaagaacaggattccagaatgatcattaaatttgtttctatttattcttttttgcccccctagagattaagtccagaaatgtactttctggcacataaagaaatcttgaggactttgtttaaaccttccataaaaaaacaattttcggtttctcgggttctctctctctgtctctctgtctctctgtctctctgtctctctgtctctctctctctctctctttctttctttgtgtattttattcaagatgagttggacccattgccagtgagtctgaatgtcactgacagccctgtgttgtgctcaggactcactctgctgctggtggaaactcatggcttctctctctctttgatcccataaagctacgagggggacgggagagggcagtgcaatgggaagtaaagagatattttccagtaggaaaagcaatgctttcttgtctttagactcaaatgcttagggaacgtttcatttctcattcatggggaaaggcagcctccttaaatgttttctgaagagcggtaaaatctagaagcttaagaatttacagttccttcaataaccatgatgacctgaagttcacctatcccattttagcatctacttgtttttcccatctcttcctttccaattttgcttatactgctgtaatatttttgtaaaaaaaaaaaaaaaggaaaaaaaagaccagctaaaattttcgacttgactttttaacttaactcatgaattaattaaagcaaatgaaaaaattaaaaagtgtgactttttctcggagcatatatgtagcttttaggaaaggctgatgatggtataaagtttgctcattaagaaaaaaagacaaggctgattttgaagagagttgcttttgaaataaaatgatca

SEQ ID NO: 367 - DNA, 971 bp, Homo sapiens
taaaactttaggaaattagtaccagacttttatattggtcaacagcaaaatgaacattactactcagcctccaacacatgcagtttgcctataccagggatcctgtcaaaatatacaccacttatagcttcttaagtgcagttatcatagagcacagtccctgacatcacacagctgcagagatgaataaacaaagaggaacctactcagaagtgagtctggcccaggacccaaagaggcagcaaaggaaacttaagggcaataaaatctccatttcaggaaccaaacaggaaatattccaagtagaattaaaccttcaaaatgcttcttcggatcatcaagggaatgacaagacatatcactgcaaaggtttactgccacctccagagaagctcactgctgaggtcctaggaatcatttgcattgtcctgatggccactgtgttaaaaacaatagttcttattccttgtattggagtactggagcagaacaatttttccctgaatagaagaatgcagaaagcacgtcattgtggccattgtcctgaggagtggattacatattccaacagttgttattacattggtaaggaaagaagaacttgggaagaaagagtttgctggcctgtgcttcgaagaactctgatctgctttctatagataatgaggaagaaatggtaagacgtaaatgtttcaacactttactaaaagcttatttctgtcaatatcatatttgtagaaatcatccatatgtttatacatatatttacttcatatatttttaagtctgtgtagtattcaactgacttcataatatttttatattcatatactgttaatgcacatttggttatttccagttttgcttttcatggaaacccatgcttctataaatgtttttatcacaaaataaatataaagaaaactaaaaaaaaaccaaaaaaaaaaaaaaaaaaggcggccgcgatatag

SEQ ID NO: 368 - DNA, 5102 bp, Homo sapiens
gaattccacttctctgtcgcccgcggttcgccgccccgctcgccgccgcgatgccagtgtttcatacgcgcacgatcgagagcatcctggagccggtggcacagcagatctcccacctggtgataatgcacgaggagggcgaggtggacggcaaagccattcctgacctcaccgcgcccgtggccgccgtgcaggcggccgtcagcaacctcgtccgggttggaaaagagactgttcaaaccactgaggatcagattttgaagagagatatgccaccagcatttattaaggttgagaatgcttgcaccaagcttgtccaggcagctcagatgcttcagtcagacccttactcagtgcctgctcgagattatctaattgatgggtcaaggggcatcctctctggaacatcagacctgctccttaccttcgatgaggctgaggtccgtaaaattattagagtttgcaaaggaattttggaatatcttacagtggcagaggtggtggagactatggaagatttggtcacttacacaaagaatcttgggccaggaatgactaagatggccaagatgattgacgagagacagcaggagctcactcaccaggagcaccgagtgatgttggtgaactcgatgaacaccgtgaaagagttgctgccagttctcatttcagctatgaagatttttgtaacaactaaaaactcaaaaaaccaaggcatagaggaagctttaaaaaatcgcaattttactgtagaaaaaatgagtgctgaaattaatgagataattcgtgtgttacaactcacctcttgggatgaagatgcctgggccagcaaggacactgaagccatgaagagagcattggcctccatagactccaaactgaaccaggccaaaggttggctccgtgaccctagtgcctccccaggggatgctggtgagcaggccatcagacagatcttagatgaagctggaaaagttggtgaactctgtgcaggcaaagaacgcagggagattctgggaacttgcaaaatgctagggcagatgactgatcaagtggctgacctccgtgccagaggacaaggatcctcaccggtggccatgcagaaagctcagcaggtatctcagggtctggatgtgctcacagcaaaagtggaaaatgcagctcgcaagctggaagccatgaccaactcaaagcagagcattgcaaagaagatcgatgctgctcagaactggcttgcagatccaaatggtggaccggaaggagaagagcagattcgaggtgctttggctgaagctcggaaaatagcagaattatgtgatgatcctaaagaaagagatgacattctacgttcccttggggaaatatctgctctgacttctaaattagcagatctacgaagacaggggaaaggagattctccagaggctcgagccttggccaaacaggtggccacggccctgcagaacctgcagaccaaaaccaaccgggctgtggccaacagcagaccggccaaagcagctgtacaccttgagggcaagattgagcaagcacagcggtggattgataatcccacagtggatgaccgtggagtcggtcaggctgccatccgggggcttgtggccgaagggcatcgtctggctaatgttatgatggggccttatcggcaagatcttctcgccaagtgtgaccgagtggaccagctgacagcccagctggctgacctggctgccagaggggaaggggagagtcctcaggcacgagcacttgcatctcagctccaagactccttaaaggatctaaaagctcggatgcaggaggccatgactcaggaagtgtcagatgttttcagcgataccacaactcccatcaagctgttggcagtggcagccacggcgcctcctgatgcgcctaacagggaagaggtatttgatgagagggcagctaactttgaaaaccattcaggaaagcttggtgctacggccgagaaggcggctgcggttggtactgctaataaatcaacagtggaaggcattcaggcctcagtgaagacggcccgagaactcacaccccaggtggtctcggctgctcgtatcttacttaggaaccctggaaatcaagctgcttatgaacattttgagaccatgaagaaccagtggatcgataatgttgaaaaaatgacagggctggtggacgaagccattgataccaaatctctgttggatgcttcagaagaagcaattaaaaaagacctggacaagtgcaaggtagctatggccaacattcagcctcagatgctggttgctggggcaaccagtattgctcgtcgggccaaccggatcctgctggtggctaagagggaggtggagaattccgaggatcccaagttccgtgaggctgtgaaagctgcctctgatgaattgagcaaaaccatctccccaatggtgatggatgcaaaagctgtggctggaaacatttccgaccctggactgcaaaagagcttcctggactcaggatatcggatcctgggagctgtggccaaggtcagagaagccttccaacctcaggagcctgacttcccgccgcctccaccagaccttgaacaactccgactaacagatgagcttgctcctcccaaaccacctctgcctgaaggtgaggtccctccacctaggcctccaccaccagaggaaaaggatgaagagttccctgagcagaaggccggggaggtgattaaccagccaatgatgatggctgccagacagctccatgatgaagctcgcaaatggtccagcaagggcaatgacatcattgcagcagccaagcgcatggctctgctgatggctgagatgtctcggctggtaagagggggcagtggtaccaagcgggcactcattcagtgtgccaaggacatcgccaaggcctcagatgaggtgactcggttggccaaggaggttgccaagcagtgcacagataaacggattagaaccaacctcttacaggtatgtgagcgaatcccaaccataagcacccagctcaaaatcctgtccacagtgaaggccaccatgctgggccggaccaacatcagtgatgaggagtctgagcaggccacagagatgctggttcacaatgcccagaacctcatgcagtctgtgaaggagactgtgcgggaagctgaagctgcttcaatcaaaattcgaacagatgctggatttacactgcgctgggttagaaagactccctggtaccagtaggcacctggctgagcctggctggcacagaaacctctactaaaaagaaggaaaatgatctgagtcccaggagctgcccagagttgctgggagctgaaaaatcacatcctggcctggcacatcagaaaggaatgggggcctcttcaaattagaagacatttatactcttttttcatggacactttgaaatgtgtttctgtataaagcctgtattctcaaacacagttacacttgtgcaccctctatcccaataggcagactgggtttctagcccatggacttcacataagctcagaatccaagtgaacactagccagacactctgctctgcccttgttccctaggggacacttccctctgtttctctttccttggctcccattcactcttccagaatcccaagacccagggcccaggcaaatcagttactaagaagaaaattgctgtgcctcccaaaattgttttgagctttccatgttgctgccaaccataccttccttccctgggctgtgctacctgggtccttttcagaagtgagctttgctgctacaggggaaggtggcctctgtggagccccagcatatgggggcctggattcatttcctgcccttcctcagtttaatccttctagtttcccacaatataaaactgtacttcactgtcaggaagaaatcacagaatcatatgattctgcttttaccatgcccctgagcaatgtctgtgctagggaaactccccgtcccatatcctgcctcagcccgccaaggtagccatcccatgaacacactgtgtcctggtgctctctgccactggaagggcagagtagccagggtgtggccctgccatcttcccagcagggccactcccggcactccatgcttagtcactgcctgcagaggtctgtgctgaggccttatcattcattcttagctcttaattgttcattttgagctgaaatgctgcattttaattttaaccaaaacatgtctcctatatcctggtttttgtagccttcctccacatcctttctaaacaagattttaaagacatgtaggtgtttgttcatctgtaactctaaaagatcctttttaaattcagtcctaagaaagaggagtgcttgtcccctaagagtgtttaatggcaaggcagccctgtctgaaggacacttcctgcctaagggagagtggtatttgcagactagaattctagtgctgctgaagatgaatcaatgggaaatactactcctgtaattcctacctccctgcaaccaactacaaccaagctctctgcatctactcccaagtatggggttcaagagagtaatgggtttcatatttcttatcaccacagtaagttcctactaggcaaaatgagagggcagtgtttcctttttggtacttattactgctaagtatttcccagcacatgaaaccttattttttccaaagccagaaccagatgagtaaaggagtaagaaccttgcctgaacatccttccttcccacccatcgctgtgtgttagttcccaacatcgaatgtgtacaacttaagttggtcctttacactcaggctttcactatttcctttaaaatgaggatgattattttcaaggccctcagcatatttgtatagttgcttgcctgatataaatgcaatattaatgcctttaaagtatgaatctatgccaaagatcacttgttgttttactaaagaaagattacttagaggaaataagaaaaatcatgtttgctctcccggttcttccagtggtttgagacactggtttacactttatgccggatgtgcttttctccaatatcagtgctcgagacacagtgaagcaaattaaaaaaaa

SEQ ID NO: 369 - DNA, 1440 bp, Homo sapiens
cgggcgcagaagcccctcctcggcgtcctggtcccggccgtgcccgcggtgtcccgggaggaaggggcgggccgggggtcgggaggagtcacgtgccccctcccgccccaggtcgtcctctcagcatgggggtcccgcggcctcagccctgggcgctggggctcctgctctttctccttcctgggagcctgggcgcagaaagccacctctccctcctgtaccaccttaccgcggtgtcctcgcctgccccggggactcctgccttctgggtgtccggctggctgggcccgcagcagtacctgagctacaatagcctgcggggcgaggcggagccctgtggagcttgggtctgggaaaaccaggtgtcctggtattgggagaaagagaccacagatctgaggatcaaggagaagctctttctggaagctttcaaagctttggggggaaaaggtccctacactctgcagggcctgctgggctgtgaactgggccctgacaacacctcggtgcccaccgccaagttcgccctgaacggcgaggagttcatgaatttcgacctcaagcagggcacctggggtggggactggcccgaggccctggctatcagtcagcggtggcagcagcaggacaaggcggccaacaaggagctcaccttcctgctattctcctgcccgcaccgcctgcgggagcacctggagaggggccgcggaaacctggagtggaaggagcccccctccatgcgcctgaaggcccgacccagcagccctggcttttccgtgcttacctgcagcgccttctccttctaccctccggagctgcaacttcggttcctgcggaatgggctggccgctggcaccggccagggtgacttcggccccaacagtgacggatccttccacgcctcgtcgtcactaacagtcaaaagtggcgatgagcaccactactgctgcattgtgcagcacgcggggctggcgcagcccctcagggtggagctggaatctccagccaagtcctccgtgctcgtggtgggaatcgtcatcggtgtcttgctactcacggcagcggctgtaggaggagctctgttgtggagaaggatgaggagtgggctgccagccccttggatctcccttcgtggagacgacaccggggtcctcctgcccaccccaggggaggcccaggatgctgatttgaaggatgtaaatgtgattccagccaccgcctgaccatccgccattccgactgctaaaagcgaatgtagtcaggcccctttcatgctgtgagacctcctggaacactggcatctctgagcctccagaaggggttctgggcctagttgtcctccctctggagccccgtcctgtggtctgcctcagtttcccctcctaatacatatggctgttttccacctcgataatataacacgagtttgggcccgaaaaa

SEQ ID NO: 370 - DNA, 2922 bp, Homo sapiens
ggacaccgggccatgcacgcccccaactgaagctgcatctcaaagccgaagattccagcagcccaggggatttcaaagagctcagactcagaggaacatctgcggagagacccccgaagccctctccagggcagtcctcatccagacgctccgctagtgcagacaggagcgcgcagtggccccggctcgccgcgccatggagcggatccccagcgcgcaaccaccccccgcctgcctgcccaaagcaccgggactggagcacggagacctaccagggatgtaccctgcccacatgtaccaagtgtacaagtcaagacggggaataaagcggagcgaggacagcaaggagacctacaaattgccgcaccggctcatcgagaaaaagagacgtgaccggattaacgagtgcatcgcccagctgaaggatctcctacccgaacatctcaaacttacaactttgggtcacttggaaaaagcagtggttcttgaacttaccttgaagcatgtgaaagcactaacaaacctaattgatcagcagcagcagaaaatcattgccctgcagagtggtttacaagctggtgagctgtcagggagaaatgtcgaaacaggtcaagagatgttctgctcaggtttccagacatgtgcccgggaggtgcttcagtatctggccaagcacgagaacactcgggacctgaagtcttcgcagcttgtcacccacctccaccgggtggtctcggagctgctgcagggtggtacctccaggaagccatcagacccagctcccaaagtgatggacttcaaggaaaaacccagctctccggccaaaggttcggaaggtcctgggaaaaactgcgtgccagtcatccagcggactttcgctcactcgagtggggagcagagcggcagcgacacggacacagacagtggctatggaggagaatcggagaagggcgacttgcgcagtgagcagccgtgcttcaaaagtgaccacggacgcaggttcacgatgggagaaaggatcggcgcaattaagcaagagtccgaagaaccccccacaaaaaagaaccggatgcagctttcggatgatgaaggccatttcactagcagtgacctgatcagctccccgttcctgggcccacacccacaccagcctcctttctgcctgcccttctacctgatcccaccttcagcgactgcctacctgcccatgctggagaagtgctggtatcccacctcagtgccagtgctatacccaggcctcaacgcctctgccgcagccctctctagcttcatgaacccagacaagatctcggctcccttgctcatgccccagagactcccttctcccttgccagctcatccgtccgtcgactcttctgtcttgctccaagctctgaagccaatcccccctttaaacttagaaaccaaagactaaactctctaggggatcctgctgctttgctttccttcctcgctacttcctaaaaagcaacaaaaaagtttttgtgaatgctgcaagattgttgcattgtgtatactgagataatctgaggcatggagagcagattcagggtgtgtgtgtgtgtgtgtgtgtgtgtgtgtatgtgcgtgtgcgtgcacatgtgtgcctgcgtgttggtataggactttaaagctccttttggcatagggaagtcacgaaggattgcttgacatcaggagacttgggggggattgtagcagacgtctgggcttttccccacccagagaatagcccccttcgatacacatcagctggattttcaaaagcttcaaagtcttggtctgtgagtcactcttcagtttgggagctgggtctgtggctttgatcagaaggtactttcaaaagagggctttccagggctcagctcccaaccagctgttaggaccccacccttttgcctttattgtcgacgtgactcaccagacgtcggggagagagagcagtcagaccgagctttctgctaacatggggaggtagcaggcactggcatagcacggtagtggtttggggaggtttccgcaggtctgctccccacccctgcctcggaagaataaagagaatgtagttccctactcaggctttcgtagtgattagcttactaaggaactgaaaatgggccccttgtacaagctgagctgccccggagggagggaggagttccctgggcttctggcacctgtttctaggcctaaccattagtacttactgtgcagggaaccaaaccaaggtctgagaaatgcggacaccccgagcgagcaccccaaagtgcacaaagctgagtaaaaagctgcccccttcaaacagaactagactcagttttcaattccatcctaaaactccttttaaccaagcttagcttctcaaaggcctaaccaagccttggcaccgccagatcctttctgtaggctaattcctcttgcccaacggcatatggagtgtccttattgctaaaaaggattccgtctccttcaaagaagttttatttttggtccagagtacttgttttcccgatgtgtccagccagctccgcagcagcttttcaagatgcactatgcctgattgctgatcgtgttttaactttttcttttcctgtttttattttggtattaagtcgttgcctttatttgtaaagctgttataaatatatattatataaatatattaaaaaggaaaatgtttcagatgtttatttgtataattacttgattcacacagtgagaaaaaatgaatgtattcctgtttttgaagagaagaataatttttttttctctagggagaggtacagtgtttatattttggagccttcctgaaggtgtaaaattgtaaatatttttatctatgagtaaatgttaagtagttgttttaaaatacttaataaaataattcttttcctgtggaag

SEQ ID NO: 371 - DNA, 6835 bp, Homo sapiens
cggcggcggctgcggcttagtcggtggcggccggcggcggctgcgggctgagcggcgagtttccgatttaaagctgagctgcgaggaaaatggcggcgggaggatcaaaatacttgctggatggtggactcagagaccaataaaaataaactgcttgaacatcctttgactggttagccagttgctgatgtatattcaagatgagtggattaggagaaaacttggatccactggccagtgattcacgaaaacgcaaattgccatgtgatactccaggacaaggtcttacctgcagtggtgaaaaacggagacgggagcaggaaagtaaatatattgaagaattggctgagctgatatctgccaatcttagtgatattgacaatttcaatgtcaaaccagataaatgtgcgattttaaaggaaacagtaagacagatacgtcaaataaaagagcaaggaaaaactatttccaatgatgatgatgttcaaaaagccgatgtatcttctacagggcagggagttattgataaagactccttaggaccgcttttacttcaggcattggatggtttcctatttgtggtgaatcgagacggaaacattgtatttgtatcagaaaatgtcacacaatacctgcaatataagcaagaggacctggttaacacaagtgtttacaatatcttacatgaagaagacagaaaggattttcttaagaatttaccaaaatctacagttaatggagtttcctggacaaatgagacccaaagacaaaaaagccatacatttaattgccgtatgttgatgaaaacaccacatgatattctggaagacataaacgccagtcctgaaatgcgccagagatatgaaacaatgcagtgctttgccctgtctcagccacgagctatgatggaggaaggggaagatttgcaatcttgtatgatctgtgtggcacgccgcattactacaggagaaagaacatttccatcaaaccctgagagctttattaccagacatgatctttcaggaaaggttgtcaatatagatacaaattcactgagatcctccatgaggcctggctttgaagatataatccgaaggtgtattcagagattttttagtctaaatgatgggcagtcatggtcccagaaacgtcactatcaagaagcttatcttaatggccatgcagaaaccccagtatatcgattctcgttggctgatggaactatagtgactgcacagacaaaaagcaaactcttccgaaatcctgtaacaaatgatcgacatggctttgtctcaacccacttccttcagagagaacagaatggatatagaccaaacccaaatcctgttggacaagggattagaccacctatggctggatgcaacagttcggtaggcggcatgagtatgtcgccaaaccaaggcttacagatgccgagcagcagggcctatggcttggcagaccctagcaccacagggcagatgagtggagctaggtatgggggttccagtaacatagcttcattgacccctgggccaggcatgcaatcaccatcttcctaccagaacaacaactatgggctcaacatgagtagccccccacatgggagtcctggtcttgccccaaaccagcagaatatcatgatttctcctcgtaatcgtgggagtccaaagatagcctcacatcagttttctcctgttgcaggtgtgcactctcccatggcatcttctggcaatactgggaaccacagcttttccagcagctctctcagtgccctgcaagccatcagtgaaggtgtggggacttcccttttatctactctgtcatcaccaggccccaaattggataactctcccaatatgaatattacccaaccaagtaaagtaagcaatcaggattccaagagtcctctgggcttttattgcgaccaaaatccagtggagagttcaatgtgtcagtcaaatagcagagatcacctcagtgacaaagaaagtaaggagagcagtgttgagggggcagagaatcaaaggggtcctttggaaagcaaaggtcataaaaaattactgcagttacttacctgttcttctgatgaccggggtcattcctccttgaccaactcccccctagattcaagttgtaaagaatcttctgttagtgtcaccagcccctctggagtctcctcctctacatctggaggagtatcctctacatccaatatgcatgggtcactgttacaagagaagcaccggattttgcacaagttgctgcagaatgggaattcaccagctgaggtagccaagattactgcagaagccactgggaaagacaccagcagtataacttcttgtggggacggaaatgttgtcaagcaggagcagctaagtcctaagaagaaggagaataatgcacttcttagatacctgctggacagggatgatcctagtgatgcactctctaaagaactacagccccaagtggaaggagtggataataaaatgagtcagtgcaccagctccaccattcctagctcaagtcaagagaaagaccctaaaattaagacagagacaagtgaagagggatctggagacttggataatctagatgctattcttggtgatctgactagttctgacttttacaataattccatatcctcaaatggtagtcatctggggactaagcaacaggtgtttcaaggaactaattctctgggtttgaaaagttcacagtctgtgcagtctattcgtcctccatataaccgagcagtgtctctggatagccctgtttctgttggctcaagtcctccagtaaaaaatatcagtgctttccccatgttaccaaagcaacccatgttgggtgggaatccaagaatgatggatagtcaggaaaattatggctcaagtatgggtgggccaaaccgaaatgtgactgtgactcagactccttcctcaggagactggggcttaccaaactcaaaggccggcagaatggaacctatgaattcaaactccatgggaagaccaggaggagattataatacttctttacccagacctgcactgggtggctctattcccacattgcctcttcggtctaatagcataccaggtgcgagaccagtattgcaacagcagcagcagatgcttcaaatgaggcctggtgaaatccccatgggaatgggggctaatccctatggccaagcagcagcatctaaccaactgggttcctggcccgatggcatgttgtccatggaacaagtttctcatggcactcaaaataggcctcttcttaggaattccctggatgatcttgttgggccaccttccaacctggaaggccagagtgacgaaagagcattattggaccagctgcacactcttctcagcaacacagatgccacaggcctggaagaaattgacagagctttgggcattcctgaacttgtcaatcagggacaggcattagagcccaaacaggatgctttccaaggccaagaagcagcagtaatgatggatcagaaggcaggattatatggacagacatacccagcacaggggcctccaatgcaaggaggctttcatcttcagggacaatcaccatcttttaactctatgatgaatcagatgaaccagcaaggcaattttcctctccaaggaatgcacccacgagccaacatcatgagaccccggacaaacacccccaagcaacttagaatgcagcttcagcagaggctgcagggccagcagtttttgaatcagagccgacaggcacttgaattgaaaatggaaaaccctactgctggtggtgctgcggtgatgaggcctatgatgcagccccagcagggttttcttaatgctcaaatggtcgcccaacgcagcagagagctgctaagtcatcacttccgacaacagagggtggctatgatgatgcagcagcagcagcagcagcaacagcagcagcagcagcagcagcagcagcaacagcaacagcaacagcaacagcagcaacagcagcaaacccaggccttcagcccacctcctaatgtgactgcttcccccagcatggatgggcttttggcaggacccacaatgccacaagctcctccgcaacagtttccatatcaaccaaattatggaatgggacaacaaccagatccagcctttggtcgagtgtctagtcctcccaatgcaatgatgtcgtcaagaatgggtccctcccagaatcccatgatgcaacacccgcaggctgcatccatctatcagtcctcagaaatgaagggctggccatcaggaaatttggccaggaacagctccttttcccagcagcagtttgcccaccaggggaatcctgcagtgtatagtatggtgcacatgaatggcagcagtggtcacatgggacagatgaacatgaaccccatgcccatgtctggcatgcctatgggtcctgatcagaaatactgctgacatctctgcaccaggacctcttaaggaaaccactgtacaaatgacactgcactaggattattgggaaggaatcattgttccaggcatccatcttggaagaaaggaccagctttgagctccatcaagggtattttaagtgatgtcatttgagcaggactggattttaagccgaagggcaatatctacgtgtttttcccccctccttctgctgtgtatcatggtgttcaaaacagaaatgttttttggcattccacctcctagggatataattctggagacatggagtgttactgatcataaaacttttgtgtcacttttttctgccttgctagccaaaatctcttaaatacacgtaggtgggccagagaacattggaagaatcaagagagattagaatatctggtttctctagttgcagtattggacaaagagcatagtcccagccttcaggtgtagtagttctgtgttgaccctttgtccagtggaattggtgattctgaattgtcctttactaatggtgttgagttgctctgtccctattatttgccctaggctttctcctaatgaaggttttcatttgccattcatgtcctgtaatacttcacctccaggaactgtcatggatgtccaaatggctttgcagaaaggaaatgagatgacagtatttaatcgcagcagtagcaaacttttcacatgctaatgtgcagctgagtgcactttatttaaaaagaatggataaatgcaatattcttgaggtcttgagggaatagtgaaacacattcctggtttttgcctacacttacgtgttagacaagaactatgattttttttttaaagtactggtgtcaccctttgcctatatggtagagcaataatgctttttaaaaataaacttctgaaaacccaaggccaggtactgcattctgaatcagaatctcgcagtgtttctgtgaatagatttttttgtaaatatgacctttaagatattgtattatgtaaaatatgtatatacctttttttgtaggtcacaacaactcatttttacagagtttgtgaagctaaatatttaacattgttgatttcagtaagctgtgtggtgaggctaccagtggaagagacatcccttgacttttgtggcctgggggaggggtagtgctccacagcttttccttccccaccccccagccttagatgcctcgctcttttcaatctcttaatctaaatgctttttaaagagattatttgtttagatgtaggcattttaattttttaaaaattcctctaccagaactaagcactttgttaatttggggggaaagaatagatatggggaaataaacttaaaaaaaaatcaggaatttaaaaaaacgagcaatttgaagagaatcttttggattttaagcagtccgaaataatagcaattcatgggctgtgtgtgtgtgtgtatgtgtgtgtgtgtgtgtgtatgtttaattatgttaccttttcatcccctttaggagcgttttcagattttggttgctaagacctgaatcccatattgagatctcgagtagaatccttggtgtggtttctggtgtctgctcagctgtcccctcattctactaatgtgatgctttcattatgtccctgtggattagaatagtgtcagttatttcttaagtaactcagtacccagaacagccagttttactgtgattcagagccacagtctaactgagcaccttttaaacccctccctcttctgccccctaccacttttctgctgttgcctctctttgacacctgttttagtcagttgggaggaagggaaaaatcaagtttaattccctttatctgggttaattcatttggttcaaatagttgacggaattgggtttctgaatgtctgtgaatttcagaggtctctgctagccttggtatcattttctagcaataactgagagccagttaattttaagaatttcacacatttagccaatctttctagatgtctctgaaggtaagatcatttaatatctttgatatgcttacgagtaagtgaatcctgattatttccagacccaccaccagagtggatcttattttcaaagcagtatagacaattatgagtttgccctctttcccctaccaagttcaaaatatatctaagaaagattgtaaatccgaaaacttccattgtagtggcctgtgcttttcagatagtatactctcctgtttggagacagaggaagaaccaggtcagtctgtctctttttcagctcaattgtatctgacccttctttaagttatgtgtgtggggagaaatagaatggtgctcttatctttcttgactttaaaaaaattattaaaaacaaaaaaaaaaaaaaaaa

SEQ ID NO: 372 - DNA, 1541 bp, Homo sapiens
ggaattcccgaagccggagctgcgggcgctttttctgcccgcggtgtctcagattcattcttaaggaactgagaacttaatcttccaaaatgtcaaaaagaccatcttatgccccacctcccaccccagctcctgcaacacaaatgcccagcacaccagggtttgtgggatacaatccatacagtcatctcgcctacaacaactacaggctgggagggaacccgggcaccaacagccgggtcacggcatcctctggtatcacgattccaaaacccccaaagccaccagataagccgctgatgccctacatgaggtacagcagaaaggtctgggaccaagtaaaggcttccaaccctgacctaaagttgtgggagattggcaagattattggtggcatgtggcgagatctcactgatgaagaaaaacaagaatatttaaacgaatacgaagcagaaaagatagagtacaatgaatctatgaaggcctatcataattcccccgcgtaccttgcttacataaatgcaaaaagtcgtgcagaagctgctttagaggaagaaagtcgacagagacaatctcgcatggagaaaggagaaccgtacatgagcattcagcctgctgaagatccagatgattatgatgatggcttttcaatgaagcatacagccaccgcccgtttccagagaaaccaccgcctcatcagtgaaattcttagtgagagtgtggtgccagacgttcggtcagttgtcacaacagctagaatgcaggtcctcaaacggcaggtccagtccttaatggttcatcagcgaaaactagaagctgaacttcttcaaatagaggaacgacaccaggagaagaagaggaaattcctggaaagcacagattcatttaacaatgaacttaaaaggttgtgcggtctgaaagtagaagtggatatggagaaaattgcagctgagattgcacaggcagaggaacaggcccgcaaaaggcaggaggaaagggagaaggaggccgcagagcaagctgagcgcagtcagagcagcatcgttcctgaggaagaacaagcagctaacaaaggcgaggagaagaaagacgacgagaacattccgatggagacagaggagacacaccttgaagaaacaacagagagccaacagaatggtgaagaaggcacgtctactcctgaggacaaggagagtgggcaggagggggtcgacagtatggcagaggaaggaaccagtgatagtaacactggctcggagagcaacagtgcaacagtggaggagccaccaacagatcccataccagaagatgagaaaaaagaataagtgttgccttgttttgtgtgttctaaatactttttttaatgaaaaaatgttttttggttttaatggtgttacgtggtttgtgtattaattttttttcttgtccatatcacaccaccaaaggcttttggaccatttagcatcatgagcctaatggctcagtcagtcacttttttaagtgttgtgaagtgggtcttttctttgggtctgtttctagcc

SEQ ID NO: 373 - DNA, 1160 bp, Homo sapiens
gcgcgggccgaccgggcgcaccgaccatggcctccaaatgccccaagtgcgacaagaccgtgtacttcgccgagaaggtgagctccctggggaaggactggcacaagttctgcctcaagtgcgagcgctgcagcaagacgctgacgcccgggggccacgccgagcatgacgggaagccgttctgccacaagccgtgctacgccaccctgttcggacccaaaggcgtgaacatcgggggcgcgggctcctacatctacgagaagcccctggcggaggggccgcaggtcaccggccccatcgaggtccccgcggcccgagcagaggagcggaaggcgagcggccccccgaaggggcccagcagagcctccagtgtcaccactttcaccggggagcccaacacgtgcccgcgctgcagcaagaaggtgtacttcgctgagaaggtgacgtctctgggcaaggattggcaccggccctgcctgcgctgcgagcgctgcgggaagacactgacccccggcgggcacgcggagcacgacggccagccctactgccacaagccctgctatggaatcctcttcggacccaagggagtgaacaccggtgcggtgggcagctacatctatgaccgggaccccgaaggcaaggtccagccctaggctacagcggctctcatgatgtgggctcacctgcgccccagaccctgcaggggcccccctgcttggctctgctgggagagtgctcagccgcccagtcctgcctgcaagcccagggcgagtattggaggaggggcagccacgggcagagcaccatgcccatccccgagtctctggtgtgtctgccccctctggcatcctctgggcgtcccatgatcccttctgtgtctgcgtgtccgaatccccgtgtgaccctgtcccagcattttcccgccgaccctgcgtgtccccgtggcgctgtccgctctccctctcctgctgcccacccacctgccagtgttatttatgctcccttcgtgggtgatggccacgccctcaccatgtccctggcagagggcttcctccgggatcccctgcctggtgcccacactgcctcgcaagcgctcgccaccctcacgtggctcacctgctgttgagccttgtgctgtcaataaacggtttgaggattgc

SEQ ID NO: 374 - DNA, 6813 bp, Homo sapiens
accttgaaatccaagccctaaaaatgccagcttctttggacttagaagatgacctggataaatgataaaaattaagaaagagattttgaagttttcttattgtcctcttggcatatgcttctggaataatattcaccatggttttggatgaccttccaaacttagaagacatctatacttccttgtgttcatcaacaatggaagactcagagatggattttgactctggactagaagatgatgacacaaaaagtgatagtattttggaggattccacaatttttgtggccttcaaaggaaatatagatgataaagacttcaaatggaaattagatgcaatattgaaaaacgtgcccaatttgttacacatggagtccagcaagctaaaagtacagaaggtggagccctggaacagcgtgcgtgtgacattcaacatcccccgggaagcagcggagcggctacggatccttgctcagagcaacaaccagcagcttcgggatttagggattctctccgttcagattgaaggggaaggtgctattaacctggctttggctcagaaccgaagccaagatgtgagaatgaatggacccatgggagctggaaattcagttaggatggaggcgggatttcctatggcaagtggtccaggaataataaggatgaacaaccctgccactgttatgatacccccgggtggaaatgtgtcatcttccatgatggcaccaggccccaatccagagctgcagcccaggactcctcgccctgcttctcagtcagatgcaatggatccactcctctctgggctccatatacagcagcaaagtcatccctcaggatctttagctcccccacatcacccaatgcagcctgtctctgtgaacagacaaatgaacccagctaattttccccagctgcagcagcagcagcaacaacaacaacagcagcagcagcagcagcagcagcaacaacagcaacagcagcaacaacagttgcaggcaagacccccacagcaacatcagcagcaacagccacagggaattcgaccccagtttactgccccaactcaggtgcctgttcctccaggctggaaccagctgccttctggagcccttcaacctcctccagcccagggttctctgggcacaatgactgcaaaccaagggtggaagaaggctcccttgcccggcccaatgcaacagcaactccaggcaagaccatccttagccacggtacagacgccttcccaccctccccctccatatccctttggcagccagcaagcctcacaagcccacacaaactttcctcagatgagcaacccaggccagttcacagctcctcagatgaagagtttgcagggagggccctctagggtcccaactcccttgcagcagccccacctcaccaacaagtctcctgcctcctcaccctcctccttccagcagggatcccctgcatcctccccaacggttaaccaaactcagcagcagatgggaccaaggccacctcaaaataacccacttccccagggatttcagcagcctgtcagctctccgggtcggaatcctatggttcaacagggaaatgtgccacctaacttcatggtgatgcagcagcaaccaccaaaccaggggccacagagtttacatccaggcctaggaggaatgcctaaacgcctcccacctggcttctcagcaggacaggccaatccgaactttatgcaaggtcaggtgccttcgaccacagcaaccacccctgggaattcaggagcccctcagctgcaagcaaatcaaaatgtccagcatgcaggtggtcaaggagctggtcctcctcaaaaccagatgcaggtgtcccacgggccgccaaatatgatgcagcccagcctcatgggaattcatggcaacatgaacaatcagcaggctggtacttctggggttcctcaagtgaacctcagcaacatgcaaggccagccccagcagggcccaccatctcagctgatgggcatgcaccagcaaatcgtgccctcccagggccagatggtccagcaacaaggaaccttgaaccctcagaaccctatgatcctttcaagggcccagcttatgccacagggccagatgatggtgaaccccccgagccaaaatcttgggccctcgccccaaaggatgaccccacccaagcagatgctttcccagcagggcccacaaatgatggcgccacataaccagatgatggggcctcaggggcaggttttgctccaacagaacccaatgatagagcagattatgaccaatcaaatgcaggggaataagcagcagtttaacactcagaaccagtccaatgtcatgccgggaccagcccagataatgaggggaccaactccgaacatgcaaggaaatatggtgcagtttacgggacagatgtcaggacagatgctgccccagcaagggcctgtgaacaacagtccatctcaggttatgggcattcagggacaggtcctgcggccaccagggcccagcccacacatggcccagcagcatggtgatcctgctactacagcaaataacgatgtcagtttatctcagatgatgcctgatgttagcattcaacaaaccaacatggtcccccctcatgtgcaggccatgcagggaaacagtgcctcgggaaaccacttctcaggccatgggatgtctttcaatgcacctttcagtggagctcccaatggaaatcagatgtcctgtggtcaaaatccaggcttcccagtcaataaggatgtcacgctaacgagcccattgttggtcaacttattgcagagtgacatatctgcaggccattttggggtaaacaataagcaaaataataccaacgcaaataaaccgaagaagaagaaaccccctcggaagaagaaaaatagtcagcaagatctaaacaccccagatactcgcccagctggtctggaagaggctgatcagccaccgttgcctggagaacaaggaattagcttggataactcaggccctaaactgccagaattttcaaaccggccaccaggttatccttctcaaccagttgaacagaggccacttcagcagatgcctcctcaactcatgcagcatgtggcacccccaccacagccaccacagcagcagccacagccacaactgcctcagcagcagcagccaccacctcccagtcagccacagtctcagcagcagcagcagcagcagcaacaaatgatgatgatgctcatgatgcagcaggatcccaaatcagttaggcttccagtctctcaaaatgtccatcctccaaggggccccctgaaccccgactcccagagaatgcccatgcaacagagtggcagtgtgcctgtcatggtcagtctgcaaggacctgcctccgtgccaccatcacctgataaacaaagaatgccaatgcctgtgaatactcccttgggaagcaattcaaggaaaatggtctatcaggagagcccgcagaatccttccagctcgccactggcggagatggcctcactccctgaagcaagtggcagtgaagcaccatctgtcccaggaggcccaaacaacatgccttcacatgtagtacttccccagaatcagttaatgatgacagggccaaaacctggaccatcgcccctttcagcaactcaaggtgcaactccccagcaaccccctgtaaattccctgcccagctctcacggccaccacttcccaaatgtggctgcgccaacccagacatctaggcccaaaacaccaaacagagccagccccagaccctattatcctcagacacccaacaaccgccctcccagcacagaaccttcagaaatcagtctgtcaccagaaagactcaatgcctccatagcaggactcttccctccacagattaatattcctttacctcctaggccaaatttaaacaggggctttgatcaacaaggcctaaatccaacaactttgaaggccatcgggcaagcaccttcaaatcttaccatgaatccttccaattttgctaccccacaaactcacaaattagattctgtggtagtgaattctggaaagcagtctaattctggagcaacaaaacgggcaagtccaagcaacagtcgcaggtctagtcctgggtccagtaggaaaaccactccaagccctgggaggcaaaattcaaaagcccctaaacttactctggcctctcagacaaatgcagccctattgcagaatgtggagttgccgagaaatgtattggtcagtcccactcctctggccaatccccctgtacctgggagctttcctaacaacagtgggctgaatcctcagaattctactgtgtctgtggctgcagttgggggtgttgttgaggataacaaggagagcttgaatgtgcctcaggacagtgattgccagaattcccagagtaggaaggaacaggtaaacattgaactaaaagcagtccctgcccaagaagttaaaatggttgtccctgaagatcagtccaaaaaggatgggcagccttcggatcctaacaaacttcccagtgtcgaagagaacaaaaatttggtgtctcctgctatgagggaagcaccaacatcgttaagtcaacttcttgacaactctggagctcccaatgtgacaattaaaccccctgggcttacagatctggaagtaacacctccagtagtttctggggaggacctcaaaaaagcatctgtcattcccacactgcaggatctgtcttcttctaaagaaccttctaattccctaaacttacctcacagtaatgagctgtgttcatcccttgtgcatcccgaattgagtgaggtcagttctaacgttgcaccaagcatccctccagtaatgtcaagacctgttagctcttcctccatttccactcccttgcccccaaatcaaataactgtatttgtcacttccaatcccatcacaacttcagctaacacatcagcagctttgccaactcacttgcagtctgcattgatgtcaacagttgtcacaatgcccaatgcgggtagcaaggttatggtttctgagggacagtcagctgctcagtctaatgcccggcctcagttcattacacctgtctttatcaattcatcctcaataattcaggttatgaaaggatcacagccaagcacaattcctgcagccccactgacaaccaactctggcctgatgcctccctctgttgcagttgttggccctttacacatacctcagaacataaaattttcttctgctcctgtaccgcctaatgccctctccagtagtcctgctccaaacatccagacaggtcgacctttggtccttagctcacgagccacccctgttcagcttccttcccctccttgtacgtcttctccagttgtcccttctcatccccctgtgcagcaagtgaaagaattgaatccagatgaggctagccctcaggtgaacacctcagcagatcagaacactcttccctcttcacagtcaaccacaatggtttctccccttttgaccaatagtccagggtcctctggcaaccggcgaagcccagtctcgtctagtaagggcaaaggaaaagtggacaaaattggccaaattttgttgaccaaggcatgtaagaaagttacaggctctcttgagaaaggggaagaacaatatggtgcagatggagagactgaaggccaagggctagacaccacagctccggggctcatgggaacagagcagttatccacagagctggacagtaaaaccccaacgcccccagcacccactctgctaaaaatgacctctagccctgtgggcccgggcactgcctcagcaggacccagcttacctggcggtgctctccccaccagtgtacgctcgatagtaaccactctggtaccctccgagctcatctccgccgtaccgaccacaaaaagcaatcatggtggcatagcatctgagtcacttgcgggtggcctagtggaggagaaggtgggatcccatccagaacttctacccagcatagccccgtcgcagaatttagtctcaaaggaaacttcaaccacagcactgcaggcctctgttgccagaccagagctggaggtaaatgctgccatagtctctggacaaagcagtgagcccaaagagatagttgaaaagtccaaaatcccaggccgaagaaactcccgaactgaagagccaactgtggcctctgaaagtgtggaaaatggacatcgtaaacgatcttctcgacctgcttcagcctccagctctactaaagacataaccagtgcggtgcaatccaagcgaagaaaatccaagtaaacaagcaggactgcgacttgatacttggaaatgtgtgtgacttttacaaagagcaattttgagctgtgacttttttaaatcaatttctgtacagttagtaattttaataatgtggcccttttcctagtccctgcaacctgtttcataaagtgcaatggggaaagcaggactgttgagcccttttggtgttgcgagttgaagttcaaggtttctaaaatgttgtcttgtattgaaaggagctaatgccattataaatgttactagttttcacatttcctaagcagcctagagtacagggtgagcatttttagatctcctaatgtattgtgccgtggaagtactgtgtgtgaatagcagtagtgggggcaaaagcaatcttctcatttggaaatgttgtaaataattttattatatagtgttttggatgtatttgttgtagaaatggaccagtgaataaagagaatctaaggatttgtacaatgtg

SEQ ID NO: 375 - DNA, 1914 bp, Homo sapiens
gcagccaggcgcgcactgcacagctctcttctctcgccgccgcccgagcgcacccttcagcccgcgcgccggccgtgagtcctcggtgctcgcccgccggccagacaaacagcccgcccgaccccgtcccgaccctggccgccccgagcggagcctggagcaaaatgatgcttcaacacccaggccaggtctctgcctcggaagtgagtgcttctgccatcgtcccctgcctgtcccctcctgggtcactggtgtttgaggattttgctaacctgacgccctttgtcaaggaagagctgaggtttgccatccagaacaagcacctctgccaccggatgtcctctgcgctggaatcagtcactgtcagcgacagacccctcggggtgtccatcacaaaagccgaggtagcccctgaagaagatgaaaggaaaaagaggcgacgagaaagaaataagattgcagctgcaaagtgccgaaacaagaagaaggagaagacggagtgcctgcagaaagagtcggagaagctggaaagtgtgaatgctgaactgaaggctcagattgaggagctcaagaacgagaagcagcatttgatatacatgctcaaccttcatcggcccacgtgtattgtccgggctcagaatgggaggactccagaagatgagagaaacctctttatccaacagataaaagaaggaacattgcagagctaagcagtcgtggtatgggggcgactggggagtcctcattgaatcctcattttatacccaaaaccctgaagccattggagagctgtcttcctgtgtacctctagaatcccagcagcagagaaccatcaaggcgggagggcctgcagtgattcagcaggcccttcccattctgccccagagtgggtcttggaccagggcaagtgcatctttgcctcaactccaggatttaggccttaacacactggccattcttatgttccagatggcccccagctggtgtcctgcccgcctttcatctggattctacaaaaaaccaggatgcccaccgttagattcaggcagcagtgtctgtacctcgggtgggagggatggggccatctccttcaccgtggctaccattgtcactcgtaggggatgtggagtgagaacagcatttagtgaagttgtgcaacggccagggttgtgctttctagcaaatatgctgttatgtccagaaattgtgtgtgcaagaaaactaggcaatgtactcttccgatgtttgtgtcacacaacactgatgtgacttttatatgctttttctcagatctggtttctaagagttttggggggcggggctgtcaccacgtgcagtatctcaagatattcaggtggccagaagagcttgtcagcaagaggaggaacagaattctcccagcgttaacacaaaatccatgggcagcatgatggcaggtcctctgttgcaaactcagttccaaagtcacaggaagaaagcagaaagttcaacttccaaagggttaggactctccactcaatgtcttaggtcaggagttgtgtctaggctggaagagccaaagaaatattccattttcctttccttgtggttgaaaccacagtcagtggagagatgtttggaacacagtcagtggagctggtggtaccaggtttagcattattggatgtcaaaagcattttttttgtcatgtagctgttttaagaaatctggcccagggtgtttgcagctgtgagaagtcactcacactggccacaaggacgctggctactgtctattaaaattctgatgtttctgtgaaattctcagagtgtttaattgtactcaatggtatcattacaattttctgtaagagaaaatattacttatttatcctagtattcctaacctgtcagaataataaatattgtggtaaaa

SEQ ID NO: 376 - DNA, 3479 bp, Homo sapiens
accgaactccgccgccatttcctcgcttggcctaacggttcggccaatcccagcgcgcatcaagaaggactgaggctccgccaatcggaggccgccgatttcgacccttcgcctcggcccggcccaatccaggccccggccccgccgcccccggcccgcccccgcggtgccctctctcctccctctttgtgcgtctcgcgccgccgccgcccgccgcgtgagaggacgggctccgcgcgctccggcagcgcattcgggtcccctccccccgggaggcttgcgaaggagaagccgccgcagaggaaaagcaggtgccggtgcctgtccccgggggcgccatggcgaccggagcgaacgccacgccgttggacttcccaagtaagaagcggaagaggagccgctggaaccaagacacaatggaacagaagacagtgattccaggaatgcctacagttattccccctggacttactcgagaacaagaaagagcttatatagtgcaactgcagatagaagacctgactcgtaaactgcgcacaggagacctgggcatcccccctaaccctgaggacaggtccccttcccctgagcccatctacaatagcgaggggaagcggcttaacacccgagagttccgcacccgcaaaaagctggaagaggagcggcacaacctcatcacagagatggttgcactcaatccggatttcaagccacctgcagattacaaacctccagcaacacgtgtgagtgataaagtcatgattccacaagatgagtacccagaaatcaactttgtggggctgctcatcgggcccagagggaacaccctgaagaacatagagaaggagtgcaatgccaagattatgatccgggggaaagggtctgtgaaagaagggaaggttgggcgcaaagatggccagatgttgccaggagaagatgagccacttcatgccctggttactgccaatacaatggagaacgtcaaaaaggcagtggaacagataagaaacatcctgaagcagggtatcgagactccagaggaccagaatgatctacggaagatgcagcttcgggagttggctcgcttaaatgggacccttcgggaagacgataacaggatcttaagaccctggcagagctcagagacccgcagcattaccaacaccacagtgtgtaccaagtgtggaggggctggccacattgcttcagactgtaaattccaaaggcctggtgatcctcagtcagctcaggataaagcacggatggataaagaatatttgtccctcatggctgaactgggtgaagcacctgtcccagcatctgtgggctccacctctgggcctgccaccacacccctggccagcgcacctcgtcctgctcgtcccgccaacaacccacctccaccgtctctcatgtctaccacccagagccgcccaccctggatgaattctggcccttcagagagtcggccctaccacggcatgcatggaggtggtcctggtgggcccggaggtggcccccacagcttcccacacccattacccagcctgacaggtgggcatggtggacatcccatgcagcacaaccccaatggacccccacccccttggatgcagccaccaccaccaccgatgaaccagggcccccaccctcctgggcaccatggccctcctccaatggatcagtacctgggaagtacgcctgtgggctctggggtctatcgcctgcatcaaggaaaaggtatgatgccgccaccacctatgggcatgatgccgccgccgccgccgcctcccagtgggcagcccccaccccctccctctggtcctcttcccccatggcaacaacagcagcagcagcctccgccaccccctccgcccagcagcagtatggcttccagtacccccttgccatggcagcaaaatacgacgactaccaccacgagcgctggcacagggtccatcccgccatggcaacagcagcaggcggctgccgcagcttctccaggagcccctcagatgcaaggcaaccccactatggtgcccctgccccccggggtccagccgcctctgccgcctggggcccctccccctccgccgcctccaccgcctgtttccgccggcatgatgtatgccccgccccctcctcctccgcctcccatggacccttctaactttgtcaccatgatgggcatgggggtggcgggcatcccgcccttcgggatgcctccagctcccccaccgcctccaccacagaactagacttgttttttaagaaaatatatattatatatagagagaattggtctcgtttaaacacgccgaacctcaccatatggagccagacattgggacgcacgcatgtgattgtgtgtgcacgcatgtgtgtgtgtgcacgcactggcctggcccaagcgactgaggattcgcttgggaacggccaggtggtagtaggggcgccagcttgggctctcctggcgccccgtagcatcgagtgtcttctttgtcttctttctctcctcacccaactccctttgcctctccccaaaccgggccgccaggatccctccccgcggcggcgatggcccgagccatgagagtgaggactttccgcgcccattggtgacccttccaggcagacagcctcagcaacgcccctggtggacaggatggttcggcaaagcagcctgagttatttttgtggacggaatcggaacacgctggctccatatcgtgaaatttttattaatttttttctttttcctttgttacttctttatcttttcctttcttcagactccgtccaaggagatgctctccccggtcttctgctgcaatttagattcctttcccttctctccagttctccttcccttaccaaggagaggggagcaaatggttttgggcaagggctttggccattcatgtcaagctggttgtgggtttttcaaggtgccatagccacccccaaatatgtttgtttaaagcgtggggttttttaatctctgccacccttgtcaagggagtcttgtaaagttgccgagggtaggttcatctccaggtttcgggattcccatccgtcctggcgatcctgccagcagtgggtgggcagcctgagctccctcgggctcgcctgccagcctggagttcttcctgtgctccttgatcacctgagctgcctcagattccatttggtcctctccttcctggaaggcttccttttatgttttgttttaatcccaaatgtctgaatgttttgcagtgtgtaggggtttgagccccttgttcattctccttcctttttcctcccgcttccctctccatgaagtgattctgttgacaataatgtatactgcgcgttctcttcactggtttatctgcagaaatttctctgggcttttttcggtgttagattcaacactggctaaagcggggatgttccattgaataaaagagcagtgtggttttctgggaaaaaaaaaa

SEQ ID NO: 377 - DNA, 2634 bp, Homo sapiens
gccgccgccgccgccgccgccgcgggcttcgttcgtaaggaagggggcctaggccgggcctgcggtggtgggggttgctgcgcgccgggggtcgctcctgctgtgtcttccgctccagcttcgcccacttccccttaccagcggggtgggcgcggagaagacctgccggagccatggaggacgaagtggtccgctttgccaagaagatggacaagatggtgcagaagaagaacgcggctggagcattggatttgctaaaggagcttaagaatattcctatgaccctggaattactgcagtccacaagaatcggaatgtcagttaatgctattcgcaagcagagtacagatgaggaagttacatctttggcaaagtctctcatcaaatcctggaaaaaattattagatgggccatcaactgagaaagaccttgacgaaaagaagaaagaacctgcaattacatcgcagaacagccctgaggcaagagaagaaagtacttccagcggcaatgtaagcaacagaaaggatgagacaaatgctcgagatacttatctttcatcctttcctcgggcaccaagcacttctgattctgtgcggttgaagtgtagggagatgcttgctgcagctcttcgaacaggggatgactacattgcaattggagctgatgaggaagaattaggatctcaaattgaagaagctatatatcaagaaataaggaatacagacatgaaatacaaaaatagagtacgaagtaggatatcaaatcttaaagatgcaaaaaatccaaatttaaggaaaaatgtcctctgtgggaatattcctcctgacttatttgctagaatgacagcagaggaaatggctagtgatgagctgaaagagatgcggaaaaacttgaccaaagaagccatcagagagcatcagatggccaagactggtgggacccagactgacttgttcacatgtggcaaatgtaaaaagaagaattgcacttacacacaggtacaaacccgtagtgctgatgaaccaatgacaacatttgttgtctgtaatgaatgtggaaatcgatggaagttctgttgagttggaagaattggcaaaatatctggaccattaagaaaacggattttgtaactagctttaaactaggccaagcaactagttttcctgcaaatcaaatttttaaagcaacttgggttagactttgtttttgacctaacatcccttccttaaatgccttctgtagtttcagatcagtagggagaccatataataattgtatggtacctgtttcaaaacatattttttctgtttttataagtaagttgatattaattaaactcttggcaatatttcttctttcttaaaggaaaatataccttaactttttttcttttacactgtgaaacatacacagtagaaattctgttactctctgttattaatacataaatgaaaatacatttttttccatattggcatgtagctacaaatattaaaggaggagaaaaggtaatataattttaggtttaccaaatatggtgtgtattcaaataatacttgaccagcttatctaaaatgtacataattttgaggtagcttatgaatttgattttaattattatgttcacaagcttggaatattagatattattttgcatctgtaactaaccgtgatcatcatttcttgtaatttcttgtacatgtatattacttgttcttaatagatttttggaaacaagactttattgagatcagtttggttttcctgttaatttacctgtttgactttataatgtgttttagttttgcagaagaacactgttgtagtttagaaggcttttcataaatcccctcataggcaaagatgaaaacttcccactatttttttcccctcttaggaagacatactggaaagaaaatgtttagcatcttagtgtagtatagctattgtaaacagttcatgactagattttgattcggaaatctatactgaccaaggattaatcttaaggattgtataattcattaaagctgtggtctttccatgtggagactgatagaaaataattttgtcccaagtcttatttgctgactttttctgtcatgagtgagattgttgaacaaactgaatatatgggctatagcaagtagctttacagtacagatcttacaattaagttttgcttttgttaaagtgtgtaccattttttctgtttggagtaagacaaaaattgttttgacataggttccctagggtacacttgctctagcatactttaaaggccactgttgcaaagtctacattttatgctgaatctgcattctgtcaggcacccatagaaagacctcagtacatgctttgcactctcctttgctccctttttccaatttcttattgcatatcattttgttgtaatacagaaagcagcatttttaaatgtccgtgttaagaattggcccgctggtaccaactcacctctattttgtcagttcatagttgaagattttgttttatttcaaaaagaaagtacatttttgaaataatgtttcagaataaaataatctcacttttaagtgatccattttaaaatttgtaattcaataaagttttttttgttgttaaacataaaaaaaa

SEQ ID NO: 378 - DNA, 2397 bp, Homo sapiens
gaccttcgcttggtgtcctcctggcctcagcaacctgacaattctgtcgtgtcccgggctgggtataagtaagcaagaagagggcctgggagaagagtctgacgagcaaggggaaggtagccaaggatggagtgaaatacagggtgacctgtgtttttcccctggctcctttggaaattatgggaaaaaatcaaataccaaggaagaaaaatctataatgaaattagatgtggatttctttttatgtattcagcttgggggcttatgatacttctagtacccaaagagatgcggtcttgctgtgttgcctaggctggtctcaaactcctgctctcaagtgatcctcctgcctcagcctcctgagtacatttatatttaaagtaattattgatggctctgcctgcttaggactctgcccagccaggaaggaaacctacaggaggaagaatggctgcagggtggctgacaacctggtcacagaactcagtaaccttccaggaagtggcagtggacttttcccaggaggagtggggattgctggaccctgctcaaaaaaatctatacaaagatgtgatgctggagaactttaggaacctggcctcagtagggtatcagctctgcagacacagtctgatctccaaggtggatcaagaacagctgaagacagatgaaagaggaattttacaaggtgactgtgcagactgggaaactcaacttaaaccaaaagatacaattgctatgcagaacattcctgggggaaaaacatccaatggcataaacatgaatcctcatggaagagaattcctgtgaataaggtgaaagtgaaaaagcctctagtcaccacttactcccttttcaacaggcagaaaatcaacctggtgagcactccctggagtgtaaccattgtgggaaattcagaaagaacactcgctttatttgtacaagatattgcaagggagagaaatgctataaatatataaagtatagcaaagtcttcaaccatccctcaactcttaggagtcatgtgagcattcacattggagagaaaactcttgaatttactgattgtagaaaagctttcaatcaagagtcatccctcaggaaacacttaagaactcccacaggacagaagtttcaggagtatgagcaatgtgatatgtccttcagcctacactcttcctgctcagtacgtgagcaaatacctactggagagaaaggtgatgaatgcagtgactatggcaaaatatctccccttagtgtccacacaaaaactggtagtgtggaggagggtttggaatgtaatgaacatgagaaaactttcactgaccctttgtcccttcagaactgtgtcagaactcactctggagagatgccctatgaatgcagtgactgtgggaaagccttcatttttcagtcttcccttaagaaacacatgagatctcatactggagagaagccttatgagtgtgatcactgtggaaaatcctttagccagagctctcatctgaatgtgcacaaaagaactcacactggagagaaaccctatgactgtaaggaatgtgggaaggctttcactgttccttcatcccttcagaaacatgtgagaacccacactggagagaaaccctatgaatgcagtgactgtggaaaagccttcattgatcagtcatcccttaagaaacacacacgctctcacactggagagaagccttatgagtgtaaccagtgtggaaagtccttcagcacaggctcttaccttattgtgcacaagagaactcacactggtgagaaaacctatgagtgtaaagaatgtgggaaggcctttaggaattcctcttgcctgagggtacacgtgagaactcacactggagagaagccttataaatgttttcagtgtgaaaaagcctttagcacaagcactaaccttataatgcacaagcgaatccacaatggccagaaactccatgaatgaaatgactcagggaagtgtttgttgcccctcatgcctcctttctcactttagaacatatattggagagaagccctgttatggtcacctggaaacagccttctggcccaactctggatgcctgttatactgggacaaaccttataaatgttatagctatgattgtttttatcagtgagtatttcattcttatatgtgtcacaactgtagatcctatgaatattttagttatcttttcagtttaattgcattgtgaacagaacacatggtcttcaatatgtagattctgtgtgacatagatttgaacataattgctggacactgactgatgtactgtggcagacagaactagttgctgtctcaatatccattcctcccttctttcttaaagtaataaaatttaccatttagttcaaaaaaaaaaaaaa

SEQ ID NO: 379 - DNA, 3439 bp, Homo sapiens
ggatccgcgtgaagattggcacccagacaccattcgcttttcacccaagatgatttgatgtcttataaaactctgatgaaccatgatggctacacagacattaagtatagacagctatcaagatgggcaacagatgcaagtagtaacagagttaaagacagaacaagatccaaactgctctgaacccgatgcagaaggagtgagccctccccctgtggagtctcagaccccgatggatgtggacaagcaggccatttataggcatccactatttccattattagctttgttgtttgaaaaatgtgaacaatctacacagggctctgaaggcacaacttctgccagttttgatgtagacatcgaaaattttgtaagaaagcaagagaaggaagggaaacctttcttttgtgaagatccagaaaccgataatttaatggtaaaagcaatccaggttttgcgcattcatcttcttgagctggaaaaggttaacgaactctgcaaagatttctgcagtcgatacattgcttgtctgaaaacaaaaatgaacagtgaaactctgttgagtggagagcctggaagcccgtactcaccagtgcagtcccagcagattcaaagtgccatcacaggcaccatcagccctcagggaattgtggtgccggcgtccgcgctgcagcagggaaacgtagccatggcgacggtggcaggtggcacagtgtatcagcctgtcacggtcgtcactccccaaggccaagtggtcacacagacattgtcgcctgggacaattaggatccagaactcccagcttcagttacagttaaaccaagatctcagcatcttgcatcaagatgatggttcatctaagaacaagaggggcgtcctgccaaagcatgccacgaacgtgatgcggtcctggctcttccagcacatcgggcatccctacccaacagaggatgagaaaaaacagattgctgctcagacaaatttgacactactccaagtcaacaactggttcatcaatgccagaagacgaattcttcagccaatgttggattcaagttgttcagagacccccaaaacaaagaaaaaaactgctcagaaccggccagttcagaggttttgggctgattctattgcatcaggagtcgcacagccaccgccgagcgagctcaccatgtcggaaggagctgttgtcaccatcaccacgcccgtgaacatgaacgtggacagccttcagtctctgtcctcggacggggccaccctggcggtgcagcaggtcatgatggcagggcagagcgaggacgagtctgtggacagcacagaggaggatgcgggtgccctggcccctgcccacatcagcgggctggtcttggagaacagtgactccctgcagtaggggcaggagcagacgcacctgactttttggagtttgcacagcaaacattttacacagttttatttctaatatgttttatatgtagatatagaagagtgcacttttgtatttcatagtaagcttaaagcgcgtctttgccggtgcagcgacttctttcaagtgtgtgtgtgtgtgtgtgtgcgcgtgtgtgcgtgtgtgtggatttttaaagaaattctttaaaggtttaacgctagattgtgaggaatgacacaccactccctccccaccttgaatccctaattagattaaggaatagcgctgccattttctaaaccgtgatgcggttgtcacttagttctgtggttccagcagatctcagtgggctggttgatcttgtgtggcccatggatttgaaagaagctgctgcacccgaaactgccagtgtgcggtgacaacggcacacgcctagactgagtgtggtttcgtcgtgagtggatggacggcaagcttagcaagcctaagtcccctcatgttcagtgagcctgtttcatttgctatatagaaaaagaaactcctatttttaccttgctggaattattggataaaaaagctatttttataaattcgttatgaattggatgatgactatattgaggataaaatttctagagaagaaacaatacatgcttgctattaatatttcaatttggaatgttctgaattgaccaaatttaacgaacctgcccaaagttagctaccgttccatggttctttgctctccccgggtagtgatgaacatttactactataaaagaaacagctatttaatgaaattttgatatctgcaaatttttgttgatatgtaatgctcagattgcattttacacttgatctaaacatatatcgaaagatatctgctaaacaggacttcaggtaagtgaggtgaaatggtagccagtgacccgttaggagctctcaccgtacatactccagtctaatttaaatctgaccacagttgcatggtcgctttaccatgttagctgtgtattgttttaaaagttttaacttcaaaatatgttatgcacagaatgtttattataaactaatataaaatgtgctctaccccattggctcagagctagggcaaacagcagatattcagactttattacttaactagcggacatccctggagtcccagcagcgagttggtctggcgagggcacctcggcagcccccacgggttggctcctacgtttgcgtttgtggctggtctcctggtgtcagtgttctcttgtacgttgttgctttcgacttttcagagccctcctgctcacttgaccacgtgagatttggaataactgtaggacttctgtttcctggtaacaagatgaaccgagagagtgggctgggttctgttttctttggtttcgatttgttttcattgtttacttaggagtggtgctttttctcagaaaacaggccacggtgtttcatacagaatgtcttcatatcatctgaaatggtatggctgaagttcatttgtttacagggtcgggaatgtcttcagtttcttgagagtcaacagtaatgattggttgtaagccaagggacattttaagctagtgaagagttttttctggaattgatttttcccaaaagaatatattaattgaggttaagaagtcagtgggaaacacacagaaatttattttaaaatctttcaggagctttaactgaaagacttggttatcaagtcttttggggagagaatgacattttttttttgagacagagttttgctcttgttgcccaggctggagggcaatggtgcccccgctccccacccttgaattatgcacatctcatggttttttttgctgctttttttttcaaaagcagctttactgagatataatttatattctataaaattcacctgtttcaagtatacaattcaatgactttgagtaaatgtacagcgttgtgtgaccatcgccacaatctaattttagaacattttcatcacagcaaaaatgatcccttgtacccattccggaattc

SEQ ID NO: 380 - DNA, 2053 bp, Homo sapiens
gggactaggagcttaagtgaagaggtacgccttgttcggtggaaatcagccgtagccatgagtttctgccggggctagccctagagtacggagcaggcggacttttcggttccccgccccgccaggtggcggggcctactaggcctccgggcatccccggtctcaagtaggcctcatctgccggcaagggcgcccgaaacgcgggaggcgccatgtcgctggttgcttacgccagcagcgatgagagcgagccggatgaggctgagcccgagccggaggaagaggaggcggtggctcctacatctgggcccgctttagggggcttgttcgcttctctccctgcgcccaagggtccggccttgctgcctccgccccctcagatgctggcgccagcctttcccccgccgctgttgcttcccccacccaccggagaccccaggcttcagcctcctccccccttgcccttcggcctgggaggcttccccccacctccaggcgtgagcccggctgaagcggcgggagttggggagggactgggattggggttgccctcgccccgaggccctggcctcaatctgccccctccaattggcggtgccggtcccccgctggggcttcccaagccaaagaagaggaaagagcccgtgaagatcgcggcgccggagttgcataagggagattcagattctgaggaagatgaacccacaaagaagaaaactatccttcagggatccagtgaggggactggtttgtctgccttgcttccccaacctaaaaacctgactgtgaaagagactaacaggttgctcctgccccatgccttctcccgcaaaccctcggatggctcccctgatactaagccctccagactggcttctaagaccaagacttcctctcttgcccctgttgtgggcaccacaaccaccactccgtcgccctctgctatcaaggctgctgccaagagtgctgccctgcaggtgacaaagcagatcacgcaggaagaagacgacagtgatgaggaagtagcccccgaaaactttttctccctccctgaaaaggctgagccacctggagttgagccatacccttaccccatccccactgtccctgaagagctgcctccaggcacggaaccagagccggctttccaggacgatgcagccaatgccccccttgaattcaagatggcagcaggttcaagtggggccccttggatgcctaagcctggggacgactacagctacaatcagttttccacatatggcgatgccaatgccgctggtgcttattatcaggattattacagtggtggctactatcctgcacaggacccggccctggtccccccccaggaaattgccccagatgcctccttcatcgatgacgaagcatttaagcggctgcagggcaagaggaaccgagggagagaagaaatcaactttgtggagatcaaaggtgatgaccagctcagtggggcccagcaatggatgactaagtcattgacagaagagaaaaccatgaagtcattcagcaaaaagaaaggtgagcagccaacaggccagcagcggcggaaacaccagatcacatatcttattcatcaggccaaggagcgggagctggaactgaagaacacctggtcagagaacaagctcagccgccgtcagacccaagccaaatatggattctagggctctggaactgattgctcccaggatctcctgccagcccagctggcctggcccccagcttcacctctgggaccccagctgctctaagcccaggatctctttccccaaggacccagccctcgcctctgcgagaatgaacatatttgatagatttttcttaacaagttagaaaattcagctcctttctgtcctggagctagcaaagacttgtgtgatgcctccgaaggggctctgagttctggggtgggagttttgctctctgtcaggtgtgataaaatgttgaaccctccccaccaccacttttttttttttaaaccagggatgtctgttgaaataaaacattcagtctgacaaacaaaaaaaaa

SEQ ID NO: 381 - DNA, 1296 bp, Homo sapiens
agttacagacagctgaccatggaagcgaatgggttgggacctcagggttttccggagctgaagaatgacacattcctgcgagcagcctggggagaggaaacagactacactcccgtttggtgcatgcgccaggcaggccgttacttaccagagtttagggaaacccgggctgcccaggactttttcagcacgtgtcgctctcctgaggcctgctgtgaactgactctgcagccactgcgtcgcttccttctggatgctgccatcattttctccgacatccttgttgtaccccaggcactgggcatggaggtgaccatggtacctggcaaaggacccagcttcccagagccattaagagaagagcaggacctagaacgcctacgggatccagaagtggtagcctctgagctaggctatgtgttccaagccatcacccttacccgacaacgactggctggacgtgtgccgctgattggctttgctggtgccccatggaccctgatgacatacatggttgagggtggtggctcaagcaccatggctcaggccaagcgctggctctatcagagacctcaggctagtcaccagctgcttcgcatcctcactgatgctctggtcccatatctggtaggacaagtggtggctggtgcccaggcattgcagctgtttgagtcccatgcagggcatcttggcccacagctcttcaacaagtttgcactgccttacatccgtgatgtggccaagcaagtgaaggccaggttgcgggaggcaggcctggcaccagtgcccatgatcatctttgctaaggatgggcattttgccctggaggagctggcccaagctggctatgaggtggttgggcttgactggacagtggccccaaagaaagcccgggagtgtgtggggaagacggtgacattgcagggcaacctggacccctgtgccttgtatgcatctgaggaggagatcgggcagttggtgaagcagatgctggatgactttggaccacatcgctacattgccaacctgggccatgggctttatcctgacatggacccagaacatgtgggcgcctttgtggatgctgtgcataaacactcacgtctgcttcgacagaactgaccgtatacctttaccctcaagtaccactaacacagatgattgatcgtttccaggacaataaaagtttcggagttgaacctattgtgtagttttgtttgtgaaagattgtcccatatcctcagttcttcttagcctctgtctccttccctgggaccctctcatatcctcttatag

SEQ ID NO: 382 - DNA, 1991 bp, Homo sapiens
cttgctccgagagggagtcctcgcggacgtcagccaagattccagaatgactatcttgacttacccctttaaaaatcttcccactgcatcaaaatgggccctcagattttccataagacctctgagctgttcctcccagctacgagctgccccagctgtccagaccaaaacgaagaagacgttagccaaacccaatataaggaatgttgtggtggtggatggtgttcgcactccatttttgctgtctggcacttcatataaagacctgatgccacatgatttggctagagcagcgcttacgggtttgttgcatcggaccagtgtccctaaggaagtagttgattatatcatctttggtacagttattcaggaagtgaaaacaagcaatgtggctagagaggctgcccttggagctggcttctctgacaagactcctgctcacactgtcaccatggcttgtatctctgccaaccaagccatgaccacaggtgttggcttgattgcttctggccagtgtgatgtgatcgtggcaggtggtgttgagttgatgtccgatgtccctattcgtcactcaaggaaaatgagaaaactgatgcttgatctcaataaggccaaatctatgggccagcgactgtctttaatctctaaattccgatttaatttcctagcacctgagctccctgcggtttctgagttctccaccagtgagaccatgggccactctgcagaccgactggccgctgcctttgctgtttctcggctggaacaggatgaatatgcactgcgctctcacagtctagccaagaaggcacaggatgaaggactcctttctgatgtggtacccttcaaagtaccaggaaaagatacagttaccaaagataatggcatccgtccttcctcactggagcagatggccaaactaaaacctgcattcatcaagccctacggcacagtgacagctgcaaattcttctttcttgactgatggtgcatctgcaatgttaatcatggcggaggaaaaggctctggccatgggttataagccgaaggcatatttgagggattttatgtatgtgtctcaggatccaaaagatcaactattacttggaccaacatatgctactccaaaagttctagaaaaggcaggattgaccatgaatgatattgatgcttttgaatttcatgaagctttctcgggtcagattttggcaaattttaaagccatggattctgattggtttgcagaaaactacatgggtagaaaaaccaaggttggattgcctcctttggagaagtttaataactggggtggatctctgtccctgggacacccatttggagccactggctgcaggttggtcatggctgctgccaacagattacggaaagaaggaggccagtatggcttagtggctgcgtgtgcagctggagggcagggccatgctatgatagtggaagcttatccaaaataatagatccagaagaagtgacctgaagtttctgtgcaacactcacactaggcaatgccatttcaatgcattactaaatgacatttgtagttcctagctcctcttaggaaaacagttcttgtggccttctattaaatagtttgcacttaagccttgccagtgttctgagcttttcaataatcagtttactgctctttcagggatttctaagccaccagaatctcacatgagatgtgtgggtggttgtttttggtctctgttgtcactaaagactaaatgagggtttgcagttgggaaagaggtcaactgagatttggaaatcatctttgtaatatttgcaaattatacttgttcttatctgtgtcctaaagatgtgttctctataaaatacaaaccaacgtgcctaattaattatggaaaaataattcagaatctaaacaccactgaaaacttataaaaaatgtttagatacataaatatggtggtcagcgttaataaagtggagaaatattggaaaaaaaaa

SEQ ID NO: 383 - DNA, 996 bp, Homo sapiens
gtggaattcatggcatctacttcgtatgactattgcagagtgcccatggaagacggggataagcgctgtaagcttctgctggggataggaattctggtgctcctgatcatcgtgattctgggggtgcccttgattatcttcaccatcaaggccaacagcgaggcctgccgggacggccttcgggcagtgatggagtgtcgcaatgtcacccatctcctgcaacaagagctgaccgaggcccagaagggctttcaggatgtggaggcccaggccgccacctgcaaccacactgtgatggccctaatggcttccctggatgcagagaaggcccaaggacaaaagaaagtggaggagcttgagggagagatcactacattaaaccataagcttcaggacgcgtctgcagaggtggagcgactgagaagagaaaaccaggtcttaagcgtgagaatcgcggacaagaagtactaccccagctcccaggactccagctccgctgcggcgccccagctgctgattgtgctgctgggcctcagcgctctgctgcagtgagatcccaggaagctggcacatcttggaaggtccgtcctgctcggcttttcgcttgaacattcccttgatctcatcagttctgagcgggtcatggggcaacacggttagcggggagagcacggggtagccggagaagggcctctggagcaggtctggaggggccatggggcagtcctgggtgtggggacacagtcgggttgacccagggctgtctccctccagagcctccctccggacaatgagtcccccctcttgtctcccaccctgagattgggcatggggtgcggtgtggggggcatgtgctgcctgttgttatgggttttttttgcggggggggttgcttttttctggggtctttgagctccaaaaaataaacacttcctttgagggagagcaaaaaaaaaaaaaaaaaaaaaaaaaaaaaaaaaaaagaattccaccaca

SEQ ID NO: 384 - DNA, 1323 bp, Homo sapiens
gaattccgttttttttttttttctgtaaggtatattatttattgttagttacatgtggtcaatggtgacatactttcaataattaaaaatcgaataatactgaaataaccacagcagctttcagtataatttgcttaagttgttctagaaaacactgctaattttttgtttctgcagagtcaagtatagaagtgagcagattggtaaatttataaacatcatggaaagaattatagagaggaactggagccactcgaatgccatttggattccgcttgtcacaaaccactcctcttttttctagttcttggaaaacatcttcgtttggaacagaaaatgttattgttagctggcacccccgctcctctacatgagacggagtaattatgttcacaactggtttcttggttgctgctttatctttgccatagttatgcttgatcaggtattccagatagccagttagcaaaacagattttttccgcaatgccttcattgtcgcttgcttaaagatctgtggaatgagaaacaatcagattaaagtgtcttattgatttacaaagaagcaaaaattaagagtaaatcatgcataaaaaggaaatgcccatatttgatctttcccaataaatatctccctttacataatctttttgtgtaaaatcatgccctcctttaaatgctttgctattaaatactgaaggtaaaatttccatgacagaaaaattgtacaaatgtcacttaaataaaacttgcaaaggaagaaaatgtaagttaatatcatgtacctgtggcaggccaggtttcactaatgcaggcctccatcacaactgtttcagtactgaccgagtggttacgttaaatattaaaaactaaaaaagtcagtgcccttatacaaaggctgggatgaacaaaagcctatcaagagttttgcctaggctttccctgggccttaaagcatgacagaataatgaaggaattcttaacaggacccattcaggattaaacaagttttactgtgggttgtgaagaaactctccaggcctctacaaacaagtttattgaaggtctaaaggaactcctcaaacttcagtgatttagcagaagacaagataagggtaatcactccagcacctggacccatttagattaagtaaatttactgaggctccagaggaaggtcttcaggactcagaccttagttgtagattaaaagaagttaatcacttatgtcttcagatgaatgcacacttacacctgtaaaactttgtaattttgagttgggtctggtgataattttccaggccttcctccctgcgggaattc

SEQ ID NO: 385 - DNA, 2053 bp, Homo sapiens
ctttatctgaaacttgattgtcttaaatgtatttgtggagaaatataattattgtatattttgtgtaacagaatcagtgagaataagctggtcgcaaactgtcttgcctagagagagggcagtggcatacagctgcagaagcgcgacacgggcctgctgagtgttccgtttcatttcaaattaggtcattctgtcttgattttgatatggatgtttcagaagaccctagcagatgtccctgtttaacttgaaaccatagatcagaaaactaagttcatatttcaattttacagagatttgaatagaaaaagtaatcaagttaaaacctgcaaagctaaaattgaactacttgggagctatgatccacaaaaacaacttattattgaagatccctattatgtaagtacagttcacgttttagggctaatatgaagacccaacacatttgtatcctgccatattaaataacagatgagattgtgttaaggatgtttttgttatgcaggttttgccattttcttctttttcctgtccatttaggggaatgactctgactttgagacggtgtaccagcagtgtgtcaggtgctgcagagcgttcttggagaaggcccactgaggcaggttcgtgccctgctgcggccagcctgactagaccccaccctgaggtcctgcatttctcagtcggtgtgtaatcacgttccagggcccaaagccagctctttgttcagttgacttactgtttcttaccttaaaaagtaattgtagatggaaatcagttgtgtttggcaggagaatcaataaaaatgtttgattcagacagcttatggggtattttaagcattcttagactagttgaacatctcactttgccccagttacaaaaatagtagaacaagcaacataaaacaatgaaggaaaacctcacttgaaggcccaggtcaacatctaagcctgttgagacttagataatcgagtctacctcttcagtaggtttgtgtggatggcctggaggcaggtgcttgctccccagtgctacctctctcttccctagggccttttgtggattgacagtagtcccctccgtagagctcacagtctagattagaagtgttttaatttctacacacccatagtgcacacttgtatattgaaaagatagggaagagagaaacatttatggaatcagtcgttggcaccttcaatacttcatgatttttgtcgagtttacttcatgaggaggtcagcccattggctcccatctgaaccactttgcctctgaaacttaattacatccagaaagaaggacacttgtatgctagtctatggtcagttgaggaatatgactgtttttatatgcacatgtaacccaaatgtccaatataaattggcttattttttaaaataattttaaaagttgggaaaagtgttattatttggcatgcttaaatattgaataagtattcttcatcagcatttaataaatgtataggcagatgtaaggtaatttctgtgtattttgagataatgtcaaaatcatgaatatttcaaaataaactggggagttataaaaatacaactagagatataaatctgtgtctgtcctgttgttgattgacaggtaggaagcatttgcaaaacattgtattgtcctttttacatgatctgtgatgttaggcgtgcgtgccatattttagtcttcaggggataaggaagtaagacatgatgaaaagtcagcacgactgctgccccatgtcatcatgtctagtttctgaaggaagtttgaggttctacagctggaactgtccttgcccagtaccatcctctggacatgttgcctctacgctgtgccctcctgtgcagtgatcgactgcctggccaggacatctgcactcctgacctcagtatcatgagggtcccaggcagtgcatgggaggagacacgtttgatcctttgactccctagtatctttgaggataagcttgtttgcccagatgaaaagtgagtagtttcccactgtacccatgtggaagtgcccagggctgtcttcatag

SEQ ID NO: 386 - DNA, 1492 bp, Homo sapiens
tttttttttccagccaagcagcagctttattagtggtgctgggttcttcccataccctacagcgtgctcggaagcattccgcgccgggcctgccagacacctgcgcccttctgcagccgcccgccgcatccgccgccgcagcccccagcatgtcgggcccagacgtcgagacgccgtccgccatccagatctgccggatcatgcggccagatgatgccaacgtggccggcaatgtccacggggggaccatcctgaagatgatcgaggaggcaggcgccatcatcagcacccggcattgcaacagccagaacggggagcgctgtgtggcagccctggctcgtgtcgagcgcaccgacttcctgtctcccatgtgcatcggtgaggtggcgcatgtcagcgcggagatcacctacacctccaagcactctgtggaggtgcaggtcaacgtgatgtccgaaaacatcctcacaggtgccaaaaagctgaccaataaggccaccctgtggtatgtgcccctgtcgctgaagaatgtggacaaggtcctcgaggtgcctcctgttgtgtattcccggcaggagcaggaggaggagggccggaagcggtatgaagcccagaagctggagcgcatggagaccaagtggaggaacggggacatcgtccagccagtcctcaacccagagccgaacactgtcagctacagccagtccagcttgatccacctggtggggccttcagactgcaccctgcacggctttgtgcacggaggtgtgaccatgaagctcatggatgaggtcgccgggatcgtggctgcacgccactgcaagaccaacatcgtcacagcttccgtggacgccattaattttcatgacaagatcagaaaaggctgcgtcatcaccatctcgggacgcatgaccttcacgagcaataagtccatggagatcgaggtgttggtggacgccgaccctgttgtggacagctctcagaagcgctaccgggccgccagtgccttcttcacctacgtgtcgctgagccaggaaggcaggtcgctgcctgtgccccagctggtgcccgagaccgaggacgagaagaagcgctttgaggaaggcaaagggcggtacctgcagatgaaggcgacgatcagggccacgcggacgctcagccctagactccctcctcctgccactggtgcctcgagtagccatggcaacgggcccagtgtccagtcacttagaagttccccccttggccaaaaacccaattcacattgagagctggtgttgtctgaagttttcgtatcacagtgttaacctgtactctctcctgcaaacctacacaccaaagctttatttatatcattccagtatcaatgctacacagtgttgtcccgagcgccgggaggcgttgggcagaaaccctcgggaatgcttccgagcacgctgtagggtatgggaagaacccagcaccactaataaagctgctgcttggctggaaa

SEQ ID NO: 387 - DNA, 670 bp, Homo sapiens
cggccacgaggcggaatcccttctgctctcccagcgcagcgccgccgcccggcccctccagcttcccggaccatggccaacctggagcgcaccttcatcgccatcaagccggacggcgtgcagcgcggcctggtgggcgagatcatcaagcgcttcgagcagaagggattccgcctcgtggccatgaagttcctccgggcctctgaagaacacctgaagcagcactacattgacctgaaagaccgaccattcttccctgggctggtgaagtacatgaactcagggccggttgtggccatggtctgggaggggctgaacgtggtgaagacaggccgagtgatgcttggggagaccaatccagcagattcaaagccaggcaccattcgtggggacttctgcattcaggttggcaggaacatcattcatggcagtgattcagtaaaaagtgctgaaaaagaaatcagcctatggtttaagcctgaagaactggttgactacaagtcttgtgctcatgactgggtctatgaataagaggtggacacaacagcagtctccttcagcacggcgtggtgtgtccctggacacagctcttcattccattgacttagaggcaacaggattgatcattcttttatagagcatatttgccaataaagcttttggaagccgg

SEQ ID NO: 388 - DNA, 1319 bp, Homo sapiens
ttgccgatttctctcacctcacctttcaaacctaaactcgagcctgctgttcaccggcctagcattgctctcgccatggctctcagcgatgctgacgtgcaaaagcagataaagcatatgatggctttcattgaacaagaagccaatgagaaagcagaagaaatagatgcaaaggcagaagaagagttcaacatagagaaaggtcggcttgtgcaaacccaaagactaaagattatggaatattatgagaagaaagagaaacagattgagcagcagaagaaaattcagatgtccaatttgatgaatcaagcgagactcaaagtcctcagagcaagagatgaccttatcacagacctactaaatgaagcaaaacagagactcagcaaggtggtaaaagatacaaccaggtaccaagtgctgctggatggactggttctccagggtttgtaccagttgctggagccccgaatgattgttcgttgcaggaaacaagatttccctctggtaaaggctgcagtgcagaaggcaattcctatgtacaaaattgccaccaaaaacgatgttgatgtccaaattgaccaggagtcctacctgcctgaagacatagctggtggagttgagatctataatggagatcgtaaaataaaggtttccaacaccctggaaagccggctggatctcatagcccagcagatgatgccagaagtccggggagccttgtttggtgcaaatgccaacaggaagtttttggactaagccttcaggaggtggagttcgtcgtcagctctcctgctgtgatgtggaagcttctgatatttgaagaaacacgaatgtctctgtagcttcctcttcactgccccagtattgctctgtatttatcagcgatgcccctctgtcactcatgccttgcctaattgttcacaatggtggaaagcttcatgtaatatgatcaggacccacctccagttcttctgaaagtgtgacagtgtccagccggttctgcagcactaggggagggggcaaatggtggttgcatgggcttcctgggtctccactctccgtctggcctaaaggtgatgtatttggtgtttggccctgcagtccccactcttgaggcttaaggcgcatgtggcacaccactccttccagcagtagtcgctttactgttacctgtttaggcctagaagttttccctcatctgtaaatgtgatttaaaatctaagccatgaatatgctttatttattaaaagagttatgcggaaaaaaaaaaaaaaaaaaaaaaaaaaaaaaaaaaaaaaaaaaaaaaaaaaaaaaaaaaa

SEQ ID NO: 389 - DNA, 957 bp, Homo sapiens
  misc_feature (108)..(108): n is a, c, g, or t
  misc_feature (529)..(529): n is a, c, g, or t
  misc_feature (770)..(770): n is a, c, g, or t
  misc_feature (800)..(800): n is a, c, g, or t
  misc_feature (889)..(889): n is a, c, g, or t
  misc_feature (928)..(928): n is a, c, g, or t
  misc_feature (946)..(946): n is a, c, g, or t
  misc_feature (953)..(953): n is a, c, g, or t
catctttcgcagcggaccgaagagaagaaaagtaggccagagcggactctcttcctgccaagatgtctattggtgtgccgattaaagtactgcatgaggccgaggcancattgtgacatgtgagacgaacaccggtgaggtatatcgggggaagctcattgaagcagaggacaacatgaactgccagatgtccaacatcacagtcacatacagagatggccgagtggcacagctggagcaggtatacatccgtggcagcaaaatccgctttctgattttgcctgacatgctgaagaacgcacccatgttaaagagcatgaaaaataaaaaccaaggctcaggggctggccgaggaaaagctgccattctcaaggcccaagtggcgcaaagaggaagaggacgtggaatgggacgtggaaacatctttcaaaagcgaagataattttctaagttgaacagaactttgtccttttttctttcaggttatctgagttcattggagtgggtgcttgtgcatatatgctaggtntcttttgccatctttctctttagatcaggggaaatgtttaagctaaataaatctggggggttttttgttctgttttgttttgttttctttgagaaaataaggactttgtgttcatttgaagtttgctttggctaaattttgacaccctgggggatgtcctgggagaatgccagtactttgaaatagcacagctattgatgagatttaagctgctgttcctggccattgcaggttaagcccngaaagttccccttgagaagtccggaacccncagatttgtcccatcatcttcggcacaggcccaagtgtggcccttgttccgttacattgtgggccgtcacagccagcttaaaaacaggngccttccctggaaagccaggattcaggctggttcggggnacccttggccccccttgnggccagngggg

SEQ ID NO: 390 - DNA, 2180 bp, Homo sapiens
gaggccgcgcggggcccgggcttcggccgatcagcccgggaggccccgccgcgcccccttggcccgcgcgcccgtggtcacagtggaagaggcgcccgcgctgcgctgcccggaggagccgtcgcgcgcccgcttcctgttcggctggttcctgccagctcgaggacaaaacacgcgtgcgcgcggcgggcgagcgcgctcgccgcctcagtcgccagcgccgggcgcagtccgcctttttccggagcagactggccgcggtgctagtcggtagcagcggccgccgcagcggctccgcactggcgaaccgagggcagaaaaaggcggggttgacggctttttggtaggagtgggctggaccggacgccagagacaaaggctcccaaggcaagagggactgtggccctgcgtcggctctgctcggaactgctgaccccaggaatttacgccccttcgtttttctcttctgattcttctcttctcccaagcccgcgtcccctcacgcgtggcctctctccttgccgggagggccgcgatggaggtcccgcccaggctttcccatgtgccgccgccattgttcccctccgctcccgctactttagcctcccgcagcctctcccattggcggccgcggccgccgcggcagctagccccgctcctcccttcgctcgctcccagctccgcccggcagggggcgcgccgggcccagcgccacgtcaccgcccagcagccctcccgattggcgggcggggcggctataaagggagggcgcaggcggcgcccggatctcttccgccgccattttaaatccagctccatacaacgctccgccgccgctgctgccgcgacccggactgcgcgccagcacccccctgccgacagctccgtcactatggaggatatgaacgagtacagcaatatagaggaattcgcagagggatccaagatcaacgcgagcaagaatcagcaggatgacggtaaaatgtttattggaggcttgagctgggatacaagcaaaaaagatctgacagagtacttgtctcgatttggggaagttgtagactgcacaattaaaacagatccagtcactgggagatcaagaggatttggatttgtgcttttcaaagatgctgctagtgttgataaggttttggaactgaaagaacacaaactggatggcaaattgatagatcccaaaagggccaaagctttaaaagggaaagaacctcccaaaaaggtttttgtgggtggattgagcccggatacttctgaagaacaaattaaagaatattttggagcctttggagagattgaaaatattgaacttcccatggatacaaaaacaaatgaaagaagaggattttgttttatcacatatactgatgaagagccagtaaaaaaattgttagaaagcagataccatcaaattggttctgggaagtgtgaaatcaaagttgcacaacccaaagaggtatataggcagcaacagcaacaacaaaaaggtggaagaggtgctgcagctggtggacgaggtggtacgaggggtcgtggccgaggtcagggccaaaactggaaccaaggatttaataactattatgatcaaggatatggaaattacaatagtgcctatggtggtgatcaaaactatagtggctatggcggatatgattatactgggtataactatgggaactatggatatggacagggatatgcagactacagtggccaacagagcacttatggcaaggcatctcgagggggtggcaatcaccaaaacaattaccagccatactaaaggagaacattggagaaaacagcgggaacttcattgcaggccgtgtgtcaccctgaccacgtctatctctgggggtcgcacgttgcgggcagagcgcaaggcatacaccagaaaacgctgtcctgtggaggagatgttaaagtaacccatcttgcaggacgacattgaagattggtcttctgttgatctaagatgattattttgtaaaagactttctagtgtacaagacaccattgtgtccaactgtatatagctgccaattagttttctttgtttttactttgtcctttgctatctgtgttatgactcaatgtggatttgtttatacacattttatttgtatcatttcatgttaaacctcaaataaatgcttccttatgtg

SEQ ID NO: 391 - DNA, 86080 bp, Homo sapiens
gatcagagtagtaaagggtgaggcagcatggtaaaatggggagagtacaagccttgaagtccaaaacccaagatccaaggccagcctctgcgagttgtgtgaccttgggccggtagcagtgcctctctgagccatttcttcatctgtgggattggacctgtctgtggggtctccctcacagagagaccatggtaaatgggaacccgggtataagtcacctagcttgtgctgggtacacagcgttggtgcttggcaagaggaatgtcccgtctttgaaccatggtaaggggcaggggataggaggagaaagtgacaggtaggccactgtttactgaaccccatgacgtgccacacactgtgctaagcattttaacatgatctcatctagtgctcctcctatgaggtagcaacgattatccccacttgactgcagagctttgtaaattataaaggtctatactcactctgtcaccaaggctgatgtgcagtggtgctattatagctcactgcagcctctatctcctgggctcaagtgatcctcccacttcagcctcccgagtagctgggactagaggtgcaccaccacccctggctttttttttttttgtatttttatagagatggggtttcaccatgttgcccaggctggtctcgaactcctaggctcaggggatccttccaccttggtttcccaaagtgctagaattacagtcatgaggcaccatgcccacccatgttgatgattcttattattaatcctgactggagggaagttgggacagacagtccttggggcacctgtccagatggaaaaatgtatggagggatggaggagaggaggatgtgcatttggaggagaaataatcattgaaagcaaagatccttctctgaaagttaccttctccagggaaagggtgtttggattcactttttttgaagtaaggagtaggcaggggaaggttctttaagtggtaaaaggacagctggccccttcctagagctcagtgaagaaatctggtcatctggggagtaaaggggtgggcagaccaagtccagagggagcccaacctgagaatccacaaggtgcaggctgggcactggggagtaggcaaggcttgtagacagtggctacgtggacagaaagagcaccaagacaaccgatagcaggctctggggccaggaaaggggggctggacaccaaggaatgcagatggacagtggcaactgggctgcccccttcccctatatatagacattcccaaggaaagctcagcagggctgggccaagctaaataaggcctcccccaggcaggcagggtgccaaagggtgagggagacccatgggattccaatttagtttttattgttttttggttttttggggttttgtttttgagacagactctcactctgtcacccaggctggaatgcagtggcacaatctcggctcactgcaccctccgcctcctaggttcaagtgattctcatgcctcagccttctgagtagctaggattacaggcacataccactacgcccagctaatttttgtttttggtttttttttttttttttttttgagacagagttttgctcttgttgcccaggctggagtacaatggtgcaatctcggctcaccacaacctccgcctcttgggttcaagcaattctcctgcctcagcctcccgagtagccggaattacaggcatgagccaccatgcccggctaattttgtatttttagtagagacagggtttctccatgttggtcaagctggtctcaaactcccaacctcaggtgatccgcccacctcagcctcccaaagcactgggattacaggtgtgagctaccacacccggcaaattttttactttttgtagagacaaggtttcatcgaccgggcacggtggctcaggcctgtaatcccaccactttgggaggctgagatgggcggatcacgaggtcaggagatcgagaccatcctggctaacacagtgaaaccccatctctactaaaaatacaaaaaaattagccgggcatggtggtgggcgcctgtagtcccagctacttgggaggctgaggctgaggcaggagaatggtgtgaacctgggaggcagagcttgcagtgagccgagatcacaccactgcactccagcctgggcaacagagcaagaccccgtctcaaaaaaaaaaaaagtttcatcatgttggccaggctggtctcaaactcctgacctcaagtgatccgcctgcctcagcctcctaaagtgctaggattacaggcatgagcccctgagcccagcctttgttcttttgtttattcaagggattaggtaaggcccaaattgcttaatgtagccaagcaaggtcccattggcccttctaatctcactccttccctccacatcatgttgctgtctgctctgatcagactttaaaatactgctctaggctgggcacggtggctcatgcctgtaatcccagcattttgggaggtgcaggctggcagatcacgaggtcaggagttcgagaccatcctggccagcatggtgaaaccctgtctctactaaaaatacaaaaaattgctgctgggtgtggtggtgggcgcctgtagtcccagctacttgggaagctgaggcagaagaatcacttgaacctggcaggcgaaggttgcactgagccaagatcatgccactgctctccagcctgggcgacaaaaggagactgcatctcaaaaaaaaaaaaaaaaaaaaaaagactactctaaacaccaccttctatgaaccttcaagcctttgcacatgctgtttttttctgccagaaactcccatctttcctctcttcatctgtctacttccctatcatctttctaagctctaacatcacttcctcggggatccttcccccactgtgtccagaccagggagtccaaggtggtctctagtagtttcctcaatcatagcactgagcataccttatgctcacaacccattctatgttctacagatcatcacatttcccagtgctcagcacttgctatgtagcaggtgttcaacagatattatattctacataagaataactgaactggatggtatttagttcaatataagggggaacttcctaatagtcatagttgaacaataatgggaacaggtggcctcaggaggtaatgagctccgtatcactgagtatacccaaacaggagctagatgaccatttctcagggaggctgtagggagatatccatacagaatttaagaatgggggcagtggctcacacttttaatcctagcacattgggaagctgaggcaggtggatctcttgagcccaggagttcaataccagcctgggcaacatggcgagacgctgtctccaattaaaaaattaaaataaaacaaagaatggtgggtggtagctcatacttgtaatcccagcacattgggaggcagaggtaggaggatctcttcaggccaagagttcaagatcagcctgggcaacatgcaaccccacctttacaaaaaataaaatactagccaggcatggtgggcacatatctgtagtcccagatacttgggaggctgaggtgggagaatcacttgagcccaggagtttgaggctgcagtgagctatgatcgcacccctgcactccagcctcacaacagagtgagactctgtctctgaaagaagaggccgggcacggtggctcatgtctctaatcccagcactttgggaggctgaggcaggtggatcatttgaggtcagcagttcgagaccagcctggccaacatggtgaaaccccatctctactaaaaatacaaaaattagccgggtgtggtggcacatgcctgtaattccagctacttgggattacttgtaattccagctacttgggattacttgaggcaggaaaatcgcttgaacccaggagatggaggttgtagtgagccaagagtgtgccattggactccagcctgggtgatggagtaagactctgtctcaaaaaaaataaaataaataaaaataaataaaaaaggaagaagaagcaggaggaggaagaaggaagcaaaaagaagaagaaataataatagtggagaatgcgcaaccttcagatctcctagttctgactgtttatatgacccagcataagcccttcccctcactaagcctcagactacctatctgtaaaatggaggtgataggccagatttctgaggggccctcctgctctaacaacccatggtttcatgaagaccagctttgtgcccagacatgtaaggcatataccgaaggacaagttattttttaaccaatggttggtgaatgagtgagtgttgaattaatgaatgaagtatgccttttttgtcccaatatcttgcccataagccaaatgaagagtaattcgaggtttgaaattgtgcaaactggccaggcacagtggctcacgcctgtaatcccagcactttgggaggtagaggcaggtggatcacttgaggccaggtgttccagatcagcctggccaatatggtgaaaccccacctctactaaaaatacaaaaattagccgcatggtggcacatgcctgtagtcccagccactcaggaggctgaggcaggagaattgcttgaacctgggaggcagaggttacagtgagccaagattgcatcactgtactccagcctgggcgacagagcaagactctgtctccctctctaaaaataaataaataaataaataaaattgcacaaacttaggcttaaaatcccagcccctctatttcccagatgtggatcttggggaagtcactttgcctcagtttcttcatcttgaaaatggaccattaatgtccagttacagcctcttccccaggacgctgtgagggagagatgtgacagtaaagtgcctagagcaggatgtagaaagtggaccctcagaaaataagaaccccagcctttctgctcacatgggagggcagggagctgaaataccttctgcttatcccaaggcattttcccccacccttctctcctgtgccactcagaaagggtaggagctactttggagagattttgattttatttattgtattgtataactatcaaaatctgccctaacaactgatacctaggctttgtgacaggaagccacaataactttttcttgacctgcagctgccctgcggataaaagataaaacaaagctggggagccactgagattatcaggcctgctgcacaggaaaagggcagtatgcagcaggggacctgggctccaggccccatactcagaaacctctgagggaggcagaggcaggtggatcacttgagcccaggaattcgagaccagcctgggcaacatggccaaatcccatctctacaaaaaatacaaaaattagctgggtgtggtggcgaacgcctctattcctagctactggggaggctgaggtgggagggatgacctgagcccagggaggcggaggttgcagtaagcagagatggtgccactgcactccagcctaggtgacagagtgagactccatctcaaaagagaaagaaagaaagaaagagagagagagaaagaaagaaagagagagagagaaagaaagaaagaaacctctggcaagctgtgtggttaagccaagtaactcaccctctctggtcctcagtttccctgtttgcctacttcccatgtgtgaggttcaaatcagattgtgcaagcctgtgaacactgtagaaacaataatcattatgtaagtgatcatttcgtcagcctttgctctatgccaggcacgggacgagcgttcttacaagagctgcaaaattagttttagcagtattgttcctgttttacatatgagaaaacctaggctcagcgaggtcagattccaaccaacccaaatcacgcatcttctcctggcccttcgttttctctcgggagacatggcctccctactattgcataattactttgtgaagttaaagagcgttgggtggaaatgagtgggacagattggagatgacgtgggtggggtgggaggattcaaggagggtacgcgcctggccggactgggatgactctgcggcaggcctgggactccctcaggccgacccaggcttcccaagtccctcctggagccaagggcccgggattctcgggcggctcgggcgagcgggcggggcaggaggcggggcggcggcaggaagctgcccgagcggcgctctgagcggcctgagcccggcggagccctgcagaacccggccgacctccatgggctgcggggggctgcacccggacccctggggcgcggcgcgcccctgaatgcaccgtgggacgcaggaggtagaggcgcacgaggcggcgcaagagacatcgggagggtcctgagcccctccggggaggaacgcggtcctaggctgagtgggttggggggaaagcgatgctggctgggtcccctggttcgcaagacctcggactgccagggggtggggcctcaccgcgcccctccctctccggttcgggccccgcccctcctcctcctgcgccgggctggggtacccctcctccgggatccggtacacagcgtcgcgcgctccccccagggtgccatggcctcccggctcctgcaccggctgcggcacgccttggccggcgacggccccggggaggcggcggccagtccagaggccgagcagtttccggagagctcagagctggaggacgacgacgccgagggcctgtcctcccgactcagcggcaccctcagcttcaccagcgccgaggacgacgaggacgacgaggacgaggacgacgaggaggctggccctgaccagctgcccctcggggatgggacgtcaggagaagacgcaggcgagtgcaggaggacggaggcgggaaccctggggctcgattaggcctccatcccagccgcgttcccagagcatccagggcgctaagttgatccagctgaaactcccacacttcttaaagcgcctgggccacctcttggctgtgtgaccttgagagagtcttaacccccctctgagccaagttttcccttgtgtcaagtgggagaactcactctcatctcagaattgctgcaggcattaaatgtacagggcttgggatccgaatggaaatgatgtattaacgatattttgagggtggagctattaatttagcccctactgtctgccaggcacggtgtttggctcctcggtgcctctctgtccctcagtttccatttctgtaaaaagggggtaagtcctgcctcacactgggaggatgagtgaggccacgtcagtggttgatgtcgaccctggccctaggcccattgatatgactggtcatgtgtctgcagaacggagccccccacctgatgggcagtggggcagtcagctcctggcgcggcagctgcaggatttctggaagaagtcccggaacaccttggcaccccagcggctgctcttcgaagtgaccagcgctaacgttgtcaaggacccgccctccaagtacgtggtgagtgagggtctagaacccctgggctgtgagtccagaagtatggctaggagcaagtagggaagaccccaacttcctgaggggtctatgtagttataaatggttaccttgtttacaaatggggaaactgaggtcagaaaggggatgtaacttgagcaaatcctcacacaagacttagtttccttgagactgactgaagtggggattaaggaccttcctcttaacctggttttgagactaagagaactggtgtgtgcacttccccacccagcccacaaggtttttgcaaattgtagcaagatgtgagatacagagagacagatgttatctgggtcaaacttgagatccaagttgcatgggctggtagttaaggaaataggctttcgatccagaccaatcttgactcccacttatttccagttgtttgactctgggtgagttgtttaaccttggtcatcttccgtttcctcattatagcaatggggaaaatgcagaagattacagcaggagttaaatgagacaatggacaaaaagcccttagcagtgtgcctggcattatgacgtggtcaatgaaatggtagctatgtcatcattatttaactttgggttgaaaatgtttgtcatctagggcctgctgtgtccttataacgcacaggtcaatcagttctcaagcacccgaccttgtccctaagggctagacttagagggttggtggaggttaggatgaagagcaatgttggggaggaccttggagtcccttgctgttttccttgctgttgagagactgacttggagaatgaggtctgctcctttaatgcccacagcgactcctgctccagtcccttttcaggccaggcctgaaagccagctgagctggccactcctgtcagtggcagctctccatctctcactcccctcctcttcaccacccttctccacctctgactcagcaggagggggcctggagcccagtcccacatctgggcctctccacccttttctgttgctgttagtaagcaagggccacacccatggggtgactactccaatttcagcagggaccgactccgattattgagtcttttaaaaaaatttttgaggccgggcgtggtggctcacgcctgtaatcccagcactttgggaagccgaggcgggcggatcacgaggtcacgagaccatcctggataacacggtgaaaccccgtctctactaaaaatacaaaaaaatagccgggcatggtggcaggcgcctgtagtcccagttacttgggaggctgaggcaggagaatggcgtgaacccaggaggcagagtttgcagtgagccgagatcgagccactgcagtccggcctgggcaacagagcgagactccgtctcaaaaaaaaaaaaaaaaaaaaaaaaaaattttgagacagggtctcgttctgtcactcaggctggagtgcagtggtgcagtcataactcactacaacctccaactgggctcaagctatcctcccacctcagcctcccaagtagctaggactacagctgtgcaccaccacgtgtggccaatgatgaagtctgaagtggcaaaggtctcagaactctgggttcatacactggaaggggacaccaaggaatagttcagaggctgagaggaatgggggtgactgtgggtacctggatgggaagggatgacaagatagagcaggatggccaagtatgccccggcctgtgtctggagaagcaaggcacctcctgtgtacaatggggaccctaattccccactcaacttgtgggggtgaagagcacaggctttggaatcagatcaacctgagtttaaatcccagctgggctgttttccagctgtgtgacttacggcaagtctttgagcccttttccccctctttgagcctgcttcctcagctgtcagagataaggaccttccttgcagtgctgttgtgatgattaaatgaaatcacagatgtaaagagtgcttggtacaacaggaggcacagggtaaatgcttgggtaatggaactactgtcattatcacccatctggctgcatgttacaaggtcaatgagataatggatacaaaatgtaaactagatgaacataaaggcttattatatagaccagtgtgtcctgaagaaaactggtgtcctaaagtgtgtcctgcagaaaactagttccctggaatgttaatagctgtttctaaataaaggttttgcaggcaatatgttttgagaatgcagagttaaatgagaatacaataagtttctttattgttaaagtatttaatccctaatagtgatatacactgtgaatcttcaagaggacagagtaagcaaacctaactgaccaggagtggctagagtattgtcagttccacagaacaaatgtgagagaaagatctggatttggtgttagggtgcctttaacatctaacactggttaactctccttttaaacctgttggcttggcattataggttaatccatattcaggttctcagacctgggaggcggggaacttcgtgatcatcttgttcagtgttttccaaacctcagtcattccaatacctccctgattcttgtcctatctaaaaatgccacttgtgtccttttcttcttaacatttttctttaaatgaacctatttttttttctttatctttttttttttcttttttgagacagagtcttgctctgttgcccaggctggagtgcagtggtgcaatctcagctcactgcaacctccacctcctaggttcaagcaatcctcccgcctcagcctcctgagtagctaggattacaggtgcccaccaccatgcctggctaacttttgcattttcagtagagatggggtttcactgttggccaggctggtcttgaactcctgacctcaagtgatctgccgcctcagcctcccaaagtgttgggattacaggtgtgagccactacgcccagccgaacctattttttttcttaaataagtttatcgagacggagtcttgctctgtcgcctaggctggagtgcagtggcgtgatcatagctcactgcagccttgaactcgtgggctcacatgattctctgcctcagcctcctgagtagctgggaccacaagtgcccaactaattctttttctttttctttttcttttttttagagacagggtcttgccatgttgcccaggctggtctcgaactcctggccttaagctgttctcctgcctcagcctcccaaagtactgggattacaggtatgagccactgtgcccatcctttaagtaattttaaaagacaacttcatagcactaccgtacgtggaaagtctcacttgccaccgagagaagctagccataaaaataaaaggtgaggcacggtggctcacacctgtaatccccgcactttgggaggctgaggtgggcagatcacctgaggtcaggagttcaagaccagcctggccaacacggtgaaaccccgacactactaaaaatacaaaaattagccggatgtggtggtaggcgcctgtaatcccagctactcgggagattgaggcaggagaattgcttgaacccaggaggcagaggttgcagtgagcggagattgtgccactgcatgccagcctgggcgacagggcgagactaaataaataaataaagtaaataagtaagtagtgaaaatgaaacgtcattaaatcttgcctagatgttgttgcctgaaggaggccctgacctgagatccactttctgactcttttctaaaaatggagatgagaagtgttagagaagtactttttttttttttttttgagagagagtttcactcttggtgcccaggctcgagtgccatgagcaatctcggctcaccacaacctccacctcccaggttcaagcaattctcctgcctcagcctcccaagtagctgggattacaggcatgtgccaccacgcctggctaattttgcatttttagtagagacagggtttctccatgttggtcagcctggtctcgaactctcaacctcaggtgatccacctgcctcagcctcccaaagtgctgagattacaggtgtgtgtgtgagccactgcaacctgcccaagaagtcctttttttaaaaccaaactgagagctggccaggcgcggtggctcacacctataatcccagcactctgggaggcaaaggcgggcggatcacaaggtcaggagatcgagaccatcctggctaacacagtgaaaccccgtctctactaaaaaatacaaaaaattagccgggcgtagtggcaggcgcctgtagtcccagctactcgggaggctgaggcaggagaatggagtgaacccaggaggcggagcttgcagtgagccgagatcgtgccactgtactccagcactccagcctgggcaacagagcgagactccgtctcaaaaaaaataaaaaaataaaaaaaccccaacaaaaccaaactgagagcttctcaatttgtagtcagaaagattaaaaaacaattaggctgggtgtggtgctcatgcctgtaatcttagcactttgggaagcctagctaggaagattgttcaaggccaggagttcaaggccagccctagcaacatagtgagaccccccctcatctccatacaaaaaaaaaaaaaaaaatttttttaaatagctgagtgtggtggtgcatgcctatagtcctagctacttgggaggctgaggcaggaggaatgcttcagcccaggaggttgaagctgcagtaagctatgattgtaccagtgtactccaacctggccaacagtgagaccctgtctcaaaaaataataattaaaaggggaccaacctcctgatacagtgatatttactctagtgcacaccacctaaaaacctcaggtaccaatacttgtacatgtctcatttttggacaaacactgacttgaccgagcacttccttcactagaaacagaagtggacccagagggggactcccttgcctgggtcacacagagaaggagtagctgacctggggttagaacttgagtcctaggccagtatacttttcacagttatggcagttgtggctatctacagacctgtcctctgggtctagtttggaaaagcctgaccagggatgtggaggccaggtgtccaaagtggaacaagctccaagctggtcctaaaggagccccaagagattggctggggtttcagcttatgtctggttttccagagggggctgtcagaagaactaatgctctatgggaagggagtacaaaaaaaggggcagcagccccgggcactgaagctcatctctgtctttctctcttcttgctgccttgggcctgggtcatttcagacaaacctcaggtaagatgggactgggcttccccgccactgcgcagcagctcccgccctcctgggtgctgtcccaggggtgaaaggaagaggtggggaggtacagctgggagtgtgggggatggggaaggatggggagggaacgggcccgtggacaacttgcatttgccctgacacccaccctccctgcagctctacaccctcgccgtgatcggcccaggaccgccagattgccagccagcccagatctctcgccgttactcggactttgagcggctgcaccgaaacctgcagcggcaattccggggcccaatggctgccatctccttcccccgtaagcggctgcgccggaattttactgcagagaccattgcccgccgtagccgggcctttgagcagtttttgggtcacctgcaggcagtgcctgagctgcgccatgccccggacctgcaggacttcttcgtgctgccggagctgcggcgggcacagagcctcacctgtactggcctctatcgtgaggctctggcactctgggccaatgcctggcagctgcaagcccagctgggcaccccctctggcccagaccgccccctgctgaccctggctgggctggccgtgtgccaccaggagctggaagaccctggagaggcccgggcatgctgtgagaaggccctgcagctgcttggggacaagagcctccaccctttgctggcaccctttctggaggcccatgtccggctctcctggcgcctgggcctggacaaacgtcaatcagaggctcggctccaagccctgcaggaggcaggccttacccccacaccaccccccagtctcaaagaattgctcatcaaggaggtgctggactaacccttgcctagatttaaggccactgtgaggagaggggttgccccagaaggcaggggaaggacctgatgagaacagaatagctgggaggctgcagagggtgctgggagcccctagaagttccaaaagagaatgtgaagcagatcaaggaaacttctgttgagctaggctcagggtgagctttggctggggttgcccttgtgtagtacagggaagtctgacacagcctctccagcctataaacagccggggggctgtggcacaggttggggcaatgttcccttgttggtgggcccccaagctggcaaggcctcttggctgaaggccagggactctgcccctggagtcctggagttaagggatgaaggcaaggctgcaggtctggcccaggggaattaaaagccagccactccagtggtatcagtctctttattggatgtgagggccaaaagggactgtaactcctgtctcaggaatggggatagatgggaggttcttgaagccccaggcgaagctggtacctctggctacagcttgctctctgagacctggggcttcactcggatcacgccctcctgggcacaggtcacagctaggactccatcctgacgccacagccgcccatggaccagcccccgagagccacctgtgggtgaggtgaagggtgatgatggcctgcttcagaacagccaaatacactttttttttttttcctgaaacagagtctcactaagttgccaggctggtctcaagcgcctgggttcaagggatcctcccgcctcagcctcctgagcagctgggattacaggcgcacatcaccatgcccaacctccaagtggacttcttgcaaagggtctggcccagggcagggctgccccacacaagggtgcactgagtgtcgtggctgctccaaatgccccttcatgagcttattatggaccgtcattgaggggtaactcctcccacaggaaccccagttgacagtttaaaagcactttcacacctctcctcgcttcctcaaaaagatcacagagggaggagctctgagaacagtctccttcaacagttcggccaagcagaactgctgtacctctgaccacttgtgttaggaaaactatcggctccctgtataataaatcaagccaggtcctccaagtggtaattcatgaaaaatatccccactaccaccaccaaggggaagaaaggactcagaagagaggacttgaggccatgaggtctggcctcttccctccccatctggagactctttctcccttgctggctttgggcccaagtttgatgtttatgaggatgattgctggtttcccttacacatagcagagctcactcagttctcacagtagccaaatgaagcagttatgtgttgtccagttttccagaccaggactgaaatccagagagggtcaggaatttggccccatgatgaagccaaatctgaacccatgtcctcacttcaaggttatcaatcttggattgtgatgctattggtacttgagaataccccttatctgagtataaagaatccttgagttttgtccttggtttatcaagcaaagcttttcttcatttgaaatgtactcccttggaaaggaggtcagggttctgaagctagacattgatgaacgagtcttgtttctctcccctgcaaggaaggtccaagcaggcccttagggaccactgaatgccccgatcccaatcaggttaatcagaatcacttagagaacttaaaaatacagtttcctggaccttatccaagacctactgagtgagaatcttgagggtggaatcagaatctattttgaaaaggcatccccaaatggcagtctgatggactgcgggtttggataccactgctgtaatgtaaccctctttgtttagatgaggaaactgaggttcagatggaagatatgatttgcctattgtaatacaaagaatctgaactggttttgggactagaactgggtccctgggagaaggtgaatcacatttccagcacattctagaaatttagagcagagcaggtgtcccggcctcaccctctcattttgaagatgaagatgccaaagcctgggagggaaggaaaggaagtgacctgtgcagcgccacacaggaagtcgggaaatcagcatcacccaagaaagcaggctcctgccactcaaggtcagtgcccttgtcccacacggccccacactcaccggcccaggggctctcgcattcatagagcatccagtggtcagctcggaagggggcgtggaaccacatggaatggtccagtgagaccatgaagtgcaccttgtgctgccactggtgaggcagcagtgcagtgcccaagaaggcatagtcggagatataggcggccacgcagcagtgcatcttcatgtcgccctcgcctgcaacaggtccccatcagccctgggctcctgggctttccagctcaggacctgcacggaggtagggggaaaagggactcccgtgcatgggtgtgcagactggttgctgcacaagagcgcttggcctacagtgtgtgtgtgtgataggggagaagtgagatggcgacttggggagggcaggggtgagcagggactgaaattcagtcttcaccacccaagtctcccactctaggccccaaaaggggtgtcttcttccaatttgcacaaagatactttatagttagcagcaaagctggacaacaaccccagcgaggtgccttttgccttcctcagaaaggccttgtgtcgggattatagtcatctccaccttctccccatgcaaagggctgagagggcccaggtgagaagctaagccaacttccccatcatgcagataaggaaacaggcccagagaagggaactcatgtgcccaaggccacacagcaaatgagtggtagaccccttggagagtggtttcctcccatccatggggtactcttaccaatatagccccgggctcgcacccagaacatctgtttgggctccattctctgcagctggctcaggggggatgggtttactggcttgatctcaatggggacctcctgagcagcaattcggttgagcgccaatgggtacctcttttggaggttagggtccctgaaagtaaagggaagagggtcggggtgagacccaggaagagagggagtcacatctgcattgcctcttctgactcccctcattcttccacagggacccctgatatccccaaagctcccctcccctgtggcaggcaggatagtgcagcgtttgaatcccttcttggccacttacgagccatgtggtctcgtgctaattagtaatctgagtctattttcccatctgcaaaatgtggataatgatagtaacctacctcataaccaacactgtgaagacaagatcatgaatatctaaccaacacatcatagtaataaggcataccctgtaatatgcactgttctaagcattgtacatacaatagtattcctcacaacaaccctgtgagataggtactattatcacccccatttcatcagtgaaataagcacagagtccaggtagcttgcttaaaaattggagagacaggatttggactcaggcaatctgggtccacagtatgattattttctatttttttagagacaaggtcgtcttctcacccaggctggagtacagtggcgcaatcagctcactgcagtctccaactcccaggctcaagccatcctcttgccttggcctcccgagtagctgggactagaggtgtacgccactgtgcctggctaacatttttattatttctttattttgagacggagtctagctctgtcacccaggcttgagtgcggtggtgcaatctcagctgactgcaacctccgcctcccaggttcaagtgattctcctgcctcagcctcccgagtagctgggattacaggcgcctgccaccatgcccagctaatttttgtatgtttagtagagatggggtttcactgtgttggccagggtggtctcgaattcctgacctcatgatccgcccgcctcagcctcccaaaatgctgggattatttttacttttttttgtagagatggggtctctttatgttgcccaggctggtctcaaaatcctggccttaagtgatcctcctacttcagcctcccaaagtgctgggattacaggagtgagctgctgtgcccagccacttcattattttaaacactcaagaaacaggctgcctgacttggcctgagttaccaaaccctacacagtagggaacattgcatccccccagggggaggagcccattccaaggaactcccttcaatacagtgacaaccacccatagtgctctgcacaggtcctgccattttcacccctatcctctggagtgctgttggacagaacctcctatgatgatggaatgcctatctgcacagcacactatggtagccactagccacatgtgactatggagcacctgaaatgtggctaatgcaactgaggaacagaattgttcattctactgactttggtttttttttgtttttttttttttaagacggaatctcgctctgttgcccagtcaggagtgcagtgactcaatcttgcttactgcaacctctgccccctgggtccaagcgactctcctgcctcagcctcctgagtagctgggattacaggcacgggccaccacgcctggctaatttttttgtgtgtgtatttttaatagagatgaggtttcaccatgttggccaggctggtctcaaactcctgaccttgggtgagccacccgccttggcctcccaaagtactgggattacaggcatgaaccactgcgcccggacctatttaattttaattaatgtaatatagccacgagtggctagagactaccttattaacagcacagatctaaattcaaggtcctttaacaatgtcttcctttcatttcagcaaacatttgtcgaactgcaaccacacaccaggccctgtgttttttctgttaatagtgatataactacaattcactgccattgtgctagttagtactagcacgctaagtgccttttctctcttatttaatcctcacagcagccttatgaggtaggaatatgattagcaccattttataatggtgagtactggctcagagtgggaaagcaacttgcccaaactcacacagctagtagggacaaaatctagaattgaatccaggcctttcaggttcccaaacccacatccatcccgtcatactctgctgcctccccagtatctaacacgagatagagacattctctccttatgatacagctaagaagtaggcagggcagaaatgagcattcccattttttagaagaagaaactagggccctggggagttgggcactgtcccacagcaggtgagcattcacagaggcacagccctggacagaatccatgtgtctatcctttgtctggacccagagctctttcccctgtaccagcatttttcaaacttgattaggtgtgatccaaataaatatattttaccaggtattcaaaatatctaacatgctccctggtggtctaatggttaggggaaaatacatatttgtatttttgtacatatgttttatatacataaaacatgtggccgggcacggtggctcacgcctgtaatcccagcactttgagagaccaaggcaggtcgatcacttgaggtcaggagttcaagaccagcctggtcaacatagcgaaacctggtctctactaaaaaaatacaaaaattagccaggcatggtggcatgtgcctgtaatcacagctgcttgggaggctgaggcacgggaattgcttgaacctgggaggcagaggttgcagtgagccgagatcatgccactgcactccagcctaggcaacagggcgagactctgtctcaaaacaaacaaacaaacaaaaacatgcactaatgcaaaggcagtgaccaaacataggccatagcgctgcagctctccagaggacactcactcctggtgtgcattaagtcctaagttgctggaccaggggcctgggggagagagggaatcacttagggggctggggaggtggtacttaacaagtggttacggaagtatttctatatacatatatatataaaatatatatatggttttttttcccaggtatggtggctcatgcctataatcccagcactttaggaggtcaaggtgggtggatcacctgagatcaagagtttgagaccagcctggatagcatggtgaaacgccatctctactaaaaatacaaaattagctgggcatggtagcaggtgcctgtaatcccagctacttgggaggctgaggcgggaggatcacttgagtctgggagtcagaggctgcagtgagccgagatggtgtcactgcactccagcctgggcaacaagagcaagactccatctcaaaaacaaacaaacatgtatatatataaacaacaacaaaatatatattctttttttcttttttcagacagagtcttgctcttgttgcccaggctggagcacagtaacacgatctcggctcactgcagcctccacctcccaggctcaagtgatccccccgcctcagcctcccaagtagctgggactacagacacatgccccgacacccggctaatttttgtattttttatagagacagggtttcaccatgttgcccaggctggtcttgaactcctgggctcaggtgatcctcccacttgggcttcccaaagtgttattataggtatgagcccccacacccagccccagccttatttttaaattagagatggagtcttgctatgttggcgaggctagtatccaactcctggtctcaagcaatcctcctgccttggcttcccaaagtgctgggattataggtatgcgccactgcacccggccaagcccttcattttataccatgacccagtacagacacacaccagaaacacacatgactaaacctcaagtttcacaaaaggattcttgcccttaatacatacatattattcactccagtatcttcttttctaatctgtattttaaaaatgctggtcaagacccactaaaggattctatgacccacaaacagatagcagctgcattttgaaaagtctgccatggagcctccaggtctctcaccttaaatactggtcaatgagggtctcacagtcaagcagctcttctggtggtggcacagtgggcatggagaactggtgctgcatggggctgggctgggcctgctggaaggaggcctggcagatgaagatgggcttcccatgttgcacggccttcacagagcgcaccgagaagctcgaccctgttcgtgtccgctccacttggtacagtactggcagcttcgggtcccctgcagtgggcacaaggacacagtgggtccacaggccctgtcatcatcacaacgcctgacaggcactctactactcatcttccattccatttcatctcagtgactactaactgaggtctgctaaggtccaggcccagggatacagagaccaccaggccctgtcatcaggcttctccctgtgcaggtggagcttttctctaacagcacaaacagcagagacattgacagattccttgcattcaaatcctggctccaccactcaccagccgtgtgacccttcacttctctgagcagtgtgcttatttgcaaactggggatcatcatggtgctcatcgcttacaggattttaatgataatgaaatgaatccgtagttgtaaagtgtttagaataatatctggcacatagtgagggctctatatgtgtttgttaaataaaattaatactccttgcttctatcttgctccatctatgcctgggatcttgtcatcagtccaaaaccattattctagatcagggagcagtaaatctagcctgcagcctgtttactgtttattctgttgttgttttcttttttgagaacaaacaaaggctatttattcagcgcttgttcttttttttgtttgtttgagatggagtcttgctctgtcacccaggctggagtacagtggtgtaatctcggctcactgcaacctccacctctcaggttcaagcgattcctgtgactcagcctcctgagtggggggggactacaggggtgcatgaccatacccagctaattttttttttttttttgagagacagtttcgctgggtcaccgaggctgaagtgcagtggcgctatctgggctcactgcaacctctgcctcccaggttcaagccatgctcatgcctcagcctcctaagtagctgggactacaggcgtgcgccgctacacccaacaaatttttgtattttttgtagagatggggtttcactgtgttgcccaggctggtctcaaactcctgacctcaactgatccacccaccttggcctcccaaagtgttgagattacaggcatgagccactgcgcccagccaatcagagcttgttgtagcaggaagtcaaccaccatcacttgcttttggcagagacttagaggcaggcaaaggaatgggaatgctctgtagtggaaaaaaaggcttcagggatgctcccattgcaggctgttggcatggggaagctgttggtgggctaactagaagcatgacacctggctgggcacggtggctcacacctgtaatcccaacactttgggaggctgaggcgggcagatcttctgagaccaggagttcaagaccagcctggccaacatggcaaaaccctgtctctactaaaaatacaaaaaattagccaggcctggtggcacacacctgtaatcctagctactcgggaggctgcagcaggagaattgcttgaagctgggaggtggaggctatggcaggagaactgcttgaacctgggaggtggaggctgcagtgagccgaaattgcaccactgcactccagcctggggaacaagagtgaaactctgtctcaaaaaagagtgggacatcctatgtgattggttaggagtacatatttggctttctccggttggtcctaagttggaagcaggggcaaaaattagggcagctatcagttattaatcaagtcctggctttggaggccaattgttacagtggtcattatttggcttgctggactggttggtaaagatagtggtctgacttcctacaagtctgacttgtggatagtaggctggcttcctgtgctggttgctgctattgtgcgtcagagttctgtttttctacatggtctagccattgtctgtttgtatattcagcctctcccaggcaagggccactgtcagtcacttcacccctgatgtatatggaagccatttggtccttcactgtcaggtgtctctgctccaaagcagagtggaagagcctaggcaacacagggagaccctgtttctacaaaaaataaaaaataaaaattagctggacatggtggcatgtgcctatagtcccagctaatcaagaggctgaggcggaaggatcacttgaggccaggagatcaaggctgcagtgagccatgactgcgtcactgtgctccagcctaggtgacagagcaagaccttgtctcaaaaacaacaagaccaccaccaccagagtagaaggcactggccagggataaggcagccaacaacaagcaggtgagggaagatttggagaggaagagaacttccctggtttccctgaagttctcactttgtctgagtcaggctgaccttgaggaaccctgacatctgggccatgagacatcttggggatgactttcaaccttcagatgaaagaagcaggtctagagaagtgttgcttccttcactctgatccaaatggggagtcaaccaggcaccagggctcaatcaacagcaataaacatcactgtctgaggtcaactggcttgctcagctctctgttatcaggcactgccaccagcagcacttctatcagagtgcgagctcctcaaggttaaaggcatttgagaagggcttaccaagagtccagacactagacaaagttacttgtgcagtctgctttcagacactgggaatgaagtcttcctccctaccaccaaacttggggggaaaaaacaaaaaaaaacctctaatccaatccttggtctgcaggtaagctaaagtgcagattcctgaggaggatcacagaaacttcagtactctggtctacctttcagtgtgaatgagttccagccctattcttgaaaattgttattggaacagagcaggtaggccctgaggcatattgaagggagttaatgattatggagtgatgcagggtgcctgacagcattggacaggagggtatgttttctcatgttggtctcacaataactatgtagagccactcttacccccattgtacagatgaggaaactgttgccttaaaatacaatttttttgtaataaagtcatgctaatttgtttacatattgtctatagttgctttcactggcaaaacctaaaatgtttactatctggccctttctagaatgtttgctgaccttgttctgaattcttcaagctctaaatttacctctgtagagaaaaactaaaaacaaaacaaaaacccaactaattcacattctttcctgggcttttagaaaaagaactgatttgataaatggccaaggaccaaccctccccctcccccataacatcttttatttttaaaatgtaattgaaacatctcttttttgttttgtttttttgagatggagtctcgatctgtcgcccaggtgggagtgcagtggcgcagttttagctcactgcgacctccagccgccgggttcaagcaattctccttgcctcagcctcagcctcagcctcccgagtagctgggatcacgggctaaggtcaccacgcccagctaattttcctttttttttttagatggagtcttgctctgtcacccaggctggagtacagtagcacgatctcagctcactgcaacctccacctccagggttcaagcgattctcctgactcagcctcctgagtagctaggactacaggtgtgcaccaccacacctggctaatttttgtgtgtgttttttttttttagtagagatggagtttcgccacattgtccaggctggtctcgaactcttgacctcagccgatctgcccgcctcggcctcccaaagtcctgggattacaggcataagccacatgcccagccaaaaaacagcattggttttaatatctgatatagctggcagagtcacaccacaaacagataagagctctcccctttttgccttgcagccaggaagctcagaactaaaccttgtatgaaactgcaacaatatggcttagccaaattttttgacatgatcgcttctcccaaatcccattactactggcctaatgtcctttgacttttaatattcccataataactaccaattattttagctatcttgcagcctttcaagacacaagcaagggcacaaataattatttttatttatttatttatttttgatggagacaagagtctcgctctgtcgcccaggctggagtacagtagcatgatctcagctcactgcaacctccgcctcctgagttcaagcaattctcctacctcagcctcctgagtagctgggactacaggcacatgccgccatgcctggctaatttttagtattttagtagagactgggtttcaccatgttgcccaggctggtctcgaactcctgagctcaggtgatccgcccgcctcggcttcccaaagtgctaggattacaggcatgagccaccacgcccggccaaataattatttattttgaaatggtggcttggacacagctcatttcacgctgctcctggatgaagactttccaagaaagaggatcttttccccagaacctgggatgggtaccctggcagctctctcattgtttagaattattgcccaagagcgaagcaaagaagcaggaaagagtttggcactcaaagacacataaaccaggttcaaatcctggctctgcctccttgggcactgtgggagctggttccaaacctcttcaggtcccagtttccttaggtaagaatgatggcaggaatgcctgccacccatgtttacttatgaagactaaacaagataatgcacacaactatgctctgtatcatgcaaattttaattattcccataagttaatcatcaaaaactaataatatttatggaaaactagattatgccaagccctgcactagatactttactggcaaagactcattgaattcttccatcacaggatgaagagattcagagttcaagtaatgcccccacccacacaaaagaaaacagccaggtatttcactaggctggaaggattacaatatcaaaaggctggtacttacaaacaaattaaagaaacaaagcacatatttactcccaactagcataaagataagaacctggctgagcccaaggtaagtattcaaatactttatagcagtgactgggggccgagaagaggggggccaatcaatactcctcagggatgaggagtaagagacacgggacagtatgaaaaagtgtatttaccattacagggataactttcatatttacaaaatgaagggggaaaccccatggttttcttaatacaaatcacatactgtaaaggtccacaaactcttctcagctggggatctacgcagaacacatgagggcatctgctctgggggtaacagggaaggaaagaaaacagtgagggttttttttgtttgttttttagcataggttttgcttttattttccttttatttatttttttgtagagacaaggtctcgatttattgccctggctggtcttgaattcctgggttccaacaattctccgcattggcctcccaatgtgcggggattataggcatgagccaccacacataggttttttgtttttgagacagagtctcgctctgttgcccaggctggagtgctcgcccaggctggagtgcagtggcacgatcttggctcactgcaagctccgccttccgggttcacaccattctcctgcctcagcctcccgagtagctgggactacaggcacccaccaccacacctggctaatttttttatatttttagtagagacggggtttcaccgtgttagctaggatggtcccgatctcctgacctcgtgatccgcccgccttggcctccaaagtgctgggattacaggcgtgagccaccgcgcccggcctcacacataggttttaagttacattatctgaccccagagctgtaagaagctgtagagatcatcccactaaaatacccttggtcccacccttctccattttacagctgaagtaaaccaaactgtagggcggggaggtaacctcacaaggctgcatggtaaattatggacaaaactgaagctaggccctacatctttggtttgtttttattgaccctatgctcagttgacaaaagaagccttagatcccttgactctcaggctggtgctctcttctccaacccaagctgccctacctccacacctctagcacagaggtcacagcacactgagaacctagcacagcgctccgcaccaggagctatgttaagaatggaagaacaaaagcccacaaggagcagttaagcaacaaagtcttgtgtcattatcagccagacatcaggtacccagtgagtcccagcaggtgtgaggtccaaggctcattgttagccccagacctcgttccaccctagacacctcttagggtggtagtgtccgccacccctccccttgtcttccagtctccctctcttcccttttgacctcagcccccaaggccagaaatggctgctgggccaccagggttgggttggggcaggaagtggggggtttacctgcccgaacaaagtagcagtgcagggagtgcacgtggacgtcttcactcacagacttggctgcagccaccagggcctggcccacgatctgaccaccaaacagcctcttggccggtacccagtaatgccttcctctgtagggagagggggaaagagggaaagacttgggaactgggccaaattctactaccctcactaagactctaatgcatgatctcttcaccatattggggtttaagatccttttgagaatatggtaaaagccataggtcctttccccaggcaaatatccttatgcataaaaatcctctgggccgggcgcagtggcttacatctgtaatcccagcactttgggaggccgaggcaggtggatcatttgagatcaggagttcaagagcagcctggccaacatggtgaaactccatctctactaaaaatacaaaaattagctggacgtggtggcatgcacctgtaatcccagctactcaggaggctgaggcaggagaatcacttgaacccaggaggcagaggttgaggtgagccaagatcgcaccactgcactccagcctgggtgacagagcaagactccatctcaaaaaataaaattaaataaatgtataaatgaataaataacaagagccctcagacatcaagtctaactccttcagtgtacagatgagaaaactgcagcttggccccagagatgaaaatgcttgcccagaatgtaggcccattggaagctgaataattatgtctctagcctcccacgtcccagctgtttggcattttctgtaacaatgagttatgaacagccctccatgacctggcaggtggctctcgcctgtaatcaatcccagcactttgggaagccgaggtgggaggatcgcctgagcccatgagttcaaaaccagcctgggctccaaagtggggcctcatgtctactaaaaataaaaaagttagctggatgtggtggcaagcgcttatggtcccagctaaacgggagactgaggcagaagggtcacttgggcccaggaggtcgaggttgcagtgagccatgttcgtgccactgcactccagcctggacaacagggccagatcttgtcttcaaaaacaaaaatcaaatagccctccaagaagttatttacaattccttaagtggaaggaagggagctcaaagtaagataacttccagtaaagccaggagaagccttggaggtcaaagctgttagaagccttgctgcagggggctgggcgcggtggctcatgcctgtaatcctagcactttggcagaggtgggcagattacaaggtcaggagttcgagaccagcctggccaacacggtgaaaccccgtctctactaaaagaagttaaaaaattagctgggctgtggcgcgcctgtatgtcccagctaatcaggaggctgaggcaggagaaatgcttgaacccgggaggcggaggttgcactgagccgagatcgcaccactgcactccagcctgggcaacagagcaagactccgcctcaaagaaagaaagaaacccttgctgcagtcaagaacttcagcgatgctgggaaagaaaaaaacatgcttaggcctcagaataagtaatgagaaaccagacccaccaaatggtactgggggcgggatattgtgagaagaaaaggatactgaagacacaaggagctgcggcgtcggttttaaggctgatccatcagctgtgtgcccttgggcaaatcactgccctctctgggctagctcccccgtgaaggcttagggcaggctgccgagcagggtctctcaggtcaccactatatttgctcagctgtgcagacctcgcagcgcggagaggaagggaggaagccagagcagagaggacagctctgttgggggcgagttctctcctaatcgtggcagagggtgcatcccacgcagagccatactagtcccggagccaggggccccgggcggcggcagtcaagatcaagtttctgccctaaaggaggggatgctgggcaggagctgccggctacctgaagagatcctcgtccagcggctcgaggttgagcacggtcgtgaccaagacgctacggaggtccccagggggatcgccgcggtcgccacagccctgcccatcttctggggcctgcggggacgacatctagttcaatgctgcaggccctgcacacccgctccgcggaagacgcggagacatacacagaacctgactcttccggcagattgccctagtaaccggaagtctcctgcagaccccgggaaggaggaatctaggttatgattggtcaggactcctgtcagtccgctggtggctgtggccctctttctctagcaattggagaaaatgaatgccaatctgcgaatcctgtgtgtgactggatatgtcgctgaggaggcggaacctcgggactggataatatggactgagtgtcatttcccctgtcagatagcaaatacacccccttcctcttgtaacccggtcaggcctagggttcctccctgagttccagaataggccacccagttggggcggacccttaaggcattctgggcccacgcctgcctataaaccctcatagtgtgacctttgacccctggtgtgatcttgggcccgggctgggaccagcccctagtgtgggttgtgggggcggccatggagctgggcagctgcttcaagacctatgaggacttcaaggagtgcttcagcgcctacaaaagggagaacaggtgctccttcattctcagggactgcgtctccgtccgcttccacaacctcaaccatggcacctccatccgcgaagacatcctgtaagggcgggcggggcggggcgggccaagagggtggggaggaggctggacctccggagggctgcctggaggaggaggggtgcataggcacgcattgggctgcgtggccattcattcaacaggcactcattgagcacctgctgtgtgccttgtgaagagagctaagcctccacggccattggtttttgaccacccactccactttcactccattcacaggcttttctggaatttataactgcagtttctcccattgttttgagcagctgcagcaacccaaatacaaagtatggctttcataaacggataaaaacaccttggcgataatttccttcatcagtctcctctttacaaaacagtcacatggtcgttggaatgttcgttcattcattcattcagtttttagttcttatatatttgttgaaacagggtctcactctgtcccccaggctggagtgcagtggcacaatcagctcactgagccttcaactgctgggctcaagcgatcctcccacctcagcctctcaagtagttggaactggaggtgcacgccaccatgcctggctaattatttgattttgtacagactgggtcttgttatgttggctaggctgttcccagactcctggactaagcgatctttcggcgtctcaaagtgttaggattacaggcatgagccactatgcctggtctattcattcattttgtaaatggtttttgagctccttatattaaccgttttcaaacactttccatgtgccaggcagtgttctctatgcatgctttaccctgcagggcttttttttcagaattatagataaatgttatttttttgcatttgacagatgagaagatttgacagatgagaagtcaggcttagaggttaagacaggagttgaaaactcaaatgccttcagggattaggtgaaacaacccaatgtaagaaagttttaactttgaattttactttaagaaaaagaatgatgaaatagcaaccaacaccaggtctttgtgctagggacaacagaagtgtgaaatgggccaaatggagagtagatgccatctaatcagctccagctgatggctgccatatgaaaataaagatctagtgttgccagaattttgggcaagagttgtcagaaatccacactttatgtggattttcccatttaaaaaaattgaatcagttcaaattttaactcagagcatgcgggccaactcagagttaaagcatatccgagtttgagacttggattgagatgctcaaccaaagctcctcaattagacagccaggctatattctttccactgttctgaagtccagtgctatgctgggtataggtgacataaagatgaataagtgttcaaactatccccagagaactaggataaacttgaactcaagcaaactggtgtgtgataaatgctttaaaaggaatgtggaaaaaaaaaaaaaaaaagaaatgtacggagaaagaaatgaatgacaaatgcctgggaggtgggggaagtcttcacactggaattgatggtttccctgggctgtgaatgaatgtagagtgctagagtagatctgtggttaattactgagtaccatggaggcatttgaccagaagttgctgtgcagaaggacctacaggagcaaagacaaagatacatgaaagaaggttggcatgttagagtaacagtgagggataccatgtttggcaggagatgaagtcatttgcagtctaagggtctttagggaccattgtgaggtgtttggaccttgtcctttatgggtaggaccttgctaagcaatgagaggaatacaaaaaaaaaaaaaaaaaaaaaaaaccacagttgcccgtaaacacccttcaggaagaccatctcaggtggctagcacaaggtgtggcccatagcaggcattaaataattattgaatgagtgagttatcaagtactaaccatgtgattcagggaaataggtgctgcgggaactcagaagagaaaaatcactgcgagctagagacgtaagagtgaaagggaggcttgagctgggcccccaaagatggagagctgtcagaaggtgtattggttttctgtttgccactctagtgaattaccacaagtttaatggtgcaaagcaacacaaatttattatcttagagttatttaggttagaagtcaggcacaggtcttagcaggctaaatcaagatgtctgcagggctgtatttctttctggagtccctgggtaagaatccatttcccgccgggtgcagtggctgatgcctgtaatcccagcactttgggaggccaaggtgggcagatcacttgaggtcagcagttcaagaccatcctggccaacatggtgaaaccccgtctctactaaaaatacaaaaattagctaggcgaggtggcacatgcccgtaatcccagctactcaggaggctgaggcagcagaattgcagccgggaggtggaggttgcagtgagccaagatcgtgccattgcactccagcctcggcaacagagcgagactccatctcaaaaaaaaaaaaaaaaaaaaaaaaagaatccttttcctttccttttccacctcctagaggctgcccaacacaccttgggtcatggcccccttcctccatcttcaaagccagcagtagcaggttgagtcatcacatcactctgaccttgcttctgtcatcacgtctctgactccctcttctgcctccctcttccacttttaaggatccttgtgattatattgggcccacccagataatcccagataatttccctattttgaagtcagctgatagccaccttaattctatctgcaaccttaattctcctttgccatgtaacctaacgtattcacagagtctaggattaggacaaggacatcttcaagggaccattctgcctgccacaagaagattaataacctggaggtaaaaatggtgtgagtcagtacagacgtaaacatgacgtgcttctattagaaaacagtgatgggctgggcacggtggctcacacttgtaatcctaatactttgggaggctaagacagggagattgcttgaaatgaagagtttgagaccagcccagactataatcctgggcaacaaaatgagatccccgtctccacaaaacaaaatttaaaattaggggccaggttgtggcagctcacacgtataattccagcactttggtaggctgaggcaggcagatggcttgaggccaggcattctagaccagcctgggcaacatgccaaaacctcatctgtacaaaaaatacaaaaagtagccaggcatagtggtgtgtgcctgtagtaccagctactctggaggctgcggcaggaggattgcttgatcccaggagtcagaggttgcagtgagctatgatcgcaccactgcacactacattttagcctgggcaacaacagagtaagatcctgtctctaaaaaaaaaaaaaaaagcaagcagtgatgtatgtttgcacgcacatacaaaagccatgaggagacctgcttagctagaaggaaggatttatgctggagcagcaggaaaggaaattggagggttgataagcaggttggtgggttgggatttgttttgtttgttttaggagacaaggtctcgctctattgcccaggctagagtacagtgggagggtcatagtttactgtaaccttgaaatcctggcctcaagtaatcttactacctcagcctcctaagtagctaggactacaggtatgcacccccatgccaggctaatttttttttttcaattttttgtgtagagacagggtcttgccatgttgcccaggctggtcttgaactcctaggctcaagctgtcctcctgcctcagcctcccaaagtgttgggattacagatatgaaccaccatgctggacctgtttttgtttttgaaggtgaacaattttaaaagtgtttttgggccaggcacaattcaatcacttgaacccaggaggcggaggttgcagtgagtcaagatcatgccactacactccagcctgggcgacacagcgagactctgtctcaaaataaataaataaaaagtgtttttgtgtttgagtggttaacataattaaaaatattttcaaaaagtacagaagggactaaaagggtcacctccactgcattagcttttggttttttttggttttttttttttttgagagatggagtttcgctctgtcgccaggctggagtgcagtggcgcgatcttggctccccgcaacctttgactccctggttcaagcgattctcctgcctcagcctcccaagtagctgagattacaggcacgcaccaccccacccagctaatttttgtatttttagtagagacagggtttcaccatgtttgcgaggaaggtctcaatctcctgacccggtgatccacccgcctcagcctcccctgctgggattacagatgtgagccaccgtgcccagtctgcattatcttttttatctatttatttatttcatttttatttatttacttacttacttacttattttgagatggagtcttgctctgtcacccaggctggagtgcagtggtgcaatcttggctcactgcaacctctgcctcccgggttcaagtgattctcctgtctcagcctcccaaggagctgagactacaggcatgcaccaccacgcctggctaattgttgtatttttagtagagacagggttttgccatgttggctaggctggtgttgaactcctgacctcaagttatacacccatctcagccttccaaagggctgcgattacagctgtgaggtgccacgcccagcctatgtatttatttatttttatttttgtagaggtgaggtctcactatgttgcccaaactgatattgaactcctaggctcaagtgatcctccctcctcggccttggaaagtgctaggattacaggcatgagccactgtgcctggcccactgcattattatatagaggcaatcagcgttaccttcctgagagatactgaggctgaacaaacatgtcttgtatatgcatttgcatctttttgttgttttaacacaagtggcagcatgctatttagacatagccttctgtacctgctgtacctggctcttctcacttaccaatatatcttggaaattatgccaccgtatgggcaatttgatttgactttcattgatttccttgtttttttttttgtttgtttgtttgtttttttgtttgttttttgcagttgttaactaaaaagttactccatgctggtgtctggagatacgttgttgaaaaatataaattgaatctctgctcttgtggagacaaatactaatctataatcacagaaataataatttccttaaagtggtagtagagctccaaaggaaaaacccagggtgccctgtggaggggtgatggtgacacttattctgattgtcaggaacagggtgggggtgctggttgacaccctaaaccaatgcaggctcttgctcagaaaaaactgtcagccctgagattttgcagatactttacaaagcacattcacctttattacctgacctggttctctgaataaccttgtcagaggcaaattttgctgttcccactaaattagttaatacatgtaaagtgcttacagcagtgccttgtagatggaaaatagtccacaaatattgtattgttttacagatggggagacagagccaggagaagtcaaacattaagagacaaatagtttagggccaggcgcagtggctcatgcctgtaatcccagcactttgggagaccagggcagacagatcacctgaggtcaggagttcgagaccagccaggccaacatggtgaaaccctttctctactaaaaataaaaaaattagccaggcatggtggtacgtgcctgtaatcccagctactcaggaggctgaggcaggagaatcactttaacccaggaagaggaggctgcagtgagctgagatggcaccactgcactccagcctgagcagcagagcgagactctgtctcaaaacaacagcataaataactgaaaattagacccagcctatttactgacagagctcttaattgttgtacttagccactgggctctaatagttttctaatgtcacttgtccatttttccctcaacaaacttgtggtaagaggctaagtgtttaccatgggccaggagtacaaagatgagctggagtacaaagatgaggaaattgtaggctccacccctgaggacaatagcggactgagatagcttaggaggcggtgaattcatgagcagcacaggtctttagcagaaacaagttgactgctggttgtgatgttataaaggacattcttggatcatttattgcaaactggctctgtgcagagctcactgtcttgggctttttgagtgatacgtgggtgtcttgggggactggagggttggtgggggaaatgtttttaggaggtaatttagtacatgtttctgcagccaaatacacatattactgggtggtcaggtgagatgatattaatacttatgtgaaaatgtagacataaagttccttgataagcaaagtaaagcaagtgaactaatttaaagaaaaccatttacagctggatgttgctcacgcctataatcccaacactttgggaggtcgaggcgggcggatcacttaaagtcgggagtttgagaccagcctgcccgacatggtgaaaccaactctactaaaaatacataaattagccaggcacggtgatgggcatctataatcccagctactcagggggctgaggcaggaggatcccttgaacccgagaggcggaggctgcagtgagctgagatcacgccactgcactccagcctgggtgacagagtgagactccatctcaaaaaaatttttgaaaataatggtgcagggccgggcgtggtggctcacgcctgtaatcccagcactttgggaggcccaggtgggtggatcatgaggtcaggagatcaagaccatcctggctaacacggagaaaccctgtctctactaaaaatacaaaaaatttatccaggcatgtagccggggcgcagtggctcacacctgtaatcccagcaatttgggaggccgaggcgggcggatcacttgaggtcaggagttcaagaccagcctggccaacatggcgaaaccccatctctactaaaaatacaaagaatagctgggtgtggtggcgcacacctgcaatcccagctacttgggaggctgaggcaggagaatcgcttgaacctgggaggcagaggttgcagtgagccaagatcatgtcattgcactccagcctaggcaacaagagcaaaactctgtctcaaaaaaaaaaaaaaaaaaattatccaggcctggtggcgggcgcctgtagtcccagctactcagaaggctgaggcaggagaatggcgtgaacccgggaggcggagcttgcagtgagccaagatcgtgccactgtactccagcctgggtgacagagtgagactccatttcaaaaaataaaaagaaaagaatagtgcaaatattatatgggtggctatggcagatgtaaaggtgattggcaattctttttctggaaaagctggcccaagggttaaaaggaagagctctggagtgaaagagactgcctttgcccttgaccttgggtaaaacttaacctcttcacatagtttcatcctttacaaaatgagaagggtgtggcaatgattaagaaaaattcagggctgggcgtggtggctcatgcttgtaatcccagcactttgagaggccgaggcgggcagatcacgaggtcaggagattgagaccatcctagctaacacggtgaaaccccatctctactaaaaatacaattagctgggcgtggtggcaggcgcctgtaatcccagctactccggagggtgaggcaggagaattgctggaacctgggaggcagaggttgcagtgagccgagatcacgccattgcacttcagcctggatgacagagtgagactctgtctcaaaaaaaaaaaaaaaagaaaaagaaaaaaaaaattcaggctagggggcatgcctgttatcccagcacttgggaggccaaagtgggaggattgcttgagcccaggagttcaagaccagcctggccaacatggtgaaaccgtctctactaaaaatacacaaattagtcgggtgtggtggtgggcacctataatcccagctactcagggggctgaggcaggaggatcatttgaacccggcagaggttgcagtgagctgagatctcaccactgcactccagtcttggtgacagagcgagactccatctcaaaaaataaaattgaaaataatagtgcaaatattatatgggtggctatggcagatgtaaaggtcattgggaattctttttctacaaaactggcctaacggttaaaaggaagagctctggagtaaaaaagacccccccttgcccttgaccttgggcaaaacttaacctcttgacacagtttcatcctttacaaaatgagaagggtgtggggatgattaaggaaattcaggctaggggcagtggctcatgcctgtaatcccagcacttgggagaccaaggtgggaggattgcttgagcccagaagttcaagaccggcctgggcaacatagcgagaccccatttctacaaaaaataaattaactggtcgtggtgacatgttcttgtggtcccagctactcaggaggctgaagccggaggatcacttgagcccaggagtttgaagctacagtgagccatgcttgcaccactgcactcctacctgagcaacagagaccctgtctcaaaaaaagagagaaagaagaaaaggaaaggaaaatgctcgtagcacctaaaacagtgctcagtaaatgtttgctgaagctgtaactatagtatgtagtagaaagtggtagttatttgaaagagagtcaaagatacgtgctctgggaattaccactaaatgaccaaaagttcacgtcaaaaaaataaaatcagatcaagttagaaatttttttttttttttttttttgagacagaatctcactcttgtcacccaggctggagtgcagtgacgctatctctgctcactgcaacctccgccttccgagttcaagcaattctcgtgcctcagcctcctgagtagctgggattacaggtgcccgtcaccacgcccagctaatttttgtagttttagtagagacagggtttcaccatgttgggcaggctggtctcgaactcctgacctcaagtgatccacccacctcagcctcccaaagttctgggattacaggtgtgagccaccgcacctggccagaaaaaattttattatgcacacaaaagaacagttggagattagtcagatgctccagtcactgtagtgagggcagtgttaataaagcctaaggaaggattttgaccttttttgtgattggctgttatacattaacaatctgtttacagccagtagagctgttcaaactgttttgtctatagttgattcctttaattttactgaattatgctgacaaggatgtaaagctttgtgttctgtttatgattgattagagctacatttcagggaatcaggatatcttaaattccggctatgtggctgtgggcagttggccttggagtatatctaaactgtggcctccactttcatttttcttgaaacattgctatcaactgggaagagtatgtgactttatgcccagtttcccctctcagatttttatgacggttgtttttctttttgttatgccatttgagggattgatgtttcttaaactatgaagtacttggctgtctctctccattgctgttcaggttaacagccaccatttgtaaacactttgttggagctcattccttctctgctaggaactttacaagaattgtctcaatcctaccacacctttggcaggacccttgttatcagagttttcattatccatgtatccatagttacaaggctatatagaaaagcaaaagtcatcacacaagaatcttgctaacaaactacttataaaattagtcactacttaaccatccctctgcttatccctgccagtcccattaacatgtttggtagtcaatttctggctgatgaagagatacattaagcatcaaggtaatgcaaatgtaaataaaactgactgtagactgaaatggcacatctcccaaaacttgtaggactaggcgaaatccctgcaagtgatgatagaaaaccttcagccttataccagttaacaaaggaagaagggaaatcaacaaagatgatgagatggtaaaaacttgaaaagtagaggatttgcctaggaaaaattaagcccttcggaaacttagtaaagctaaggaatattttggcaaaaccatcttttgtatgttgcaaaagtgagacaggaaatgaagtatagtgtttgggaattttttttttttgagatagagtcttgctctcctgtccaggccggagtgcagtggtgcgaccttggctcactgcagcctcagcctcctgagtagctgggattacaggcatgcgccaccacacccggctaatttttgtatttttagtagagacagggtttcaccatgttggccaggctggtcttgaactcctgacctcaggtgatccactcgcctcggtctcccaaagtgttgggattacaggcatgaaccactgcacctggcctagtgtttgggaaaactatactaggaaaagaatagttgctttaagtcattctttgattattctgagaattggcatatagctgccattataacctacttttgctaaatataataataataatcattatttttattttttgagacagggtcttgttttgtcaccccggctggagtgaagtggcgcaatctcggctcactgcaacctccacctccgggtgcaagcaattctcctgcctcagcctcttgagtagctaggattacaggcacaagccatcatgcccagctaatttttgtatttttagtagagacagggtttcaccatgttggtcaggctggtcttgaactcctgacctcaggtgatccacccgcctcggcctcccaaagtgctgggattacaggcgtcagccactgtgcccggccctgctaaatataatattaactttataattttagtctcattttccacccagatcttgtttatcactatctgggtggtagtgataaagttccacccagatcttgtttatcactattccctatgaaatgtttctgggtggccgggcgcagtggctcatgcctataatcctagcaatttgggaggccaagacaggtggattgcttgaggcccggagttcaaaaccagcctggccacatggtgaaaccctgtcactactaaaaatacaaaaaattagccaggcatgatggtgggcgcctgtaatcccagctactcgggaggctgaggcaggagaatcacttgaatctgggaggcaggggttgcagtgaggcgagatcatgccacggcactccagactgggcaataagagcaaaactccgtctcaaaagaaaaaaaaaagaaatgtgtctgggtatgtttttggctgcaattagctgaaaaccctgactcaaaatggcttattgcagatacttagaagcccagaggtgggcctccaaaggtcattgtctcagtggcctggactctgcatttttccactctgccatgttcaggtctcagctttgtccttaggaaggctccccatgtggcacaaatgcaggagtcacatccagaagaagaagcctttcttgccgggcgtggtggctcacacctgtaatcccagtgctttgggaggctgaggtgggtggatcacgaggtcaggagttcaagaccagcctggccaacatgatgaaacccccatctctactaaaactacaaaaattaaccaggcgtggtggcgggcacctgtaatcccagctactcgggaggctaagccaggagaatcgctggaacccaggaggcggaggttacagtgagtcgagatcttgccactgcactccagactgggcaacagggcaaaactccgtctcaagaaaaaaaaaaaaaaaaagaaaaggccaagcgtggtggctgtaatcctagcactttgggaggctaaggcaggcagatcacgaggtcaggagtttgagaccagcctgaccaacatggtaaaaccctgtctctactaaaaatacaaaaattagccgggcacggtagcatgcctgtagtcccagctactcgggaggctgaggcaggagaatcgcttgaacccgggaggcggaggttgcagtgagccaagaccgtgccagtgcattccaacctgggtgacagagggagactccgtctcaaaaaaaaaaaagccttccttggtttcctgccaatttcctgtcatgtttctttgtcccgaattgggccaatatccatgcccattcctaatacaattaccttaattgacttagattagccctgaagcatgtagtgatgtgggggaggaatgacaactgaagaaaatagaaaagaagggacaaaggttgttgagttggcaaccaacaattcctgttatagctttttaaattaattcactttaagtggtactgattattcatattgttatttccatgtatagagagagaagaaattggaggcttagaggaagtgaagtgacttgtccaaggtcacatagctaagtggaatttattttttttttttttacttttctgagacaaagtctcactctgtcgcccaggctggagtgcagtggcgtgatcttgactcactgcaacctctgcctcctgggttcaagtgattcttctgcctcagccacccgagtagctgagattacaggtgtgcaccagcatgcccggctaattttttgtatttttagtagagatggagtttctccatgttggccaggctggtcatgaactcttggcctcaagtgatccacctaccttggcctcccaaaatgctaggattacaggtgtgagccacggcgcccagctactggaagtcatgatgcaagctgttgtttgaatcatgaattccaaacttaatgagtgctaggttgaagttattttttttctgtttcccttaatcttctattgagatataacatgtattgaagcacagacatcttttgcaagaattcattgagcactatagttatattcatctgtacttactgtctccctggtaaaggcataaactcccttcaagatggggacatggttttatactttcctgaatctcctttagtgcttatatctaacagcacttaaccaggatctggagggggtcaaccagtcttgcttccttccaatctactctgtagatgtttgtgtttttctactgtaactatagaggtaaaggagccaatggtgtttccagtgtctggcacataataggtgctctatgaatgtcaaatgaatgactgaggcataaaaagttcttcctatgacataagtagtataataggaagatcactgggatagaattttcttagaagacgtggctcctagtcctagcactattactcttactgactataactttggacaagtcatttgtttaatttcaaacatttactgaattctgtgtaccaaatactgtacaagttgttcaaaaggctacagagtctctactctcaaagtctagtcaggggagagattacacaggagtgaaaccccatctctactaaaaaaaaaaaaaagaaagaaaaaaatagccaggcatggtggcaggcacctgtaatcccagctcttgggaggctgaggcagaagaattgcttgaacccaggaggcagaggttgcagtgagtcaagatcacactactgcactccagcctgggcaacagaacgaatatctgtctcaaagaaaaaaaaaaaaagaaaaaaaaagtatgtttagagatccttaaggaagttttgaacctatccaatatgttgggagtcaagatgaggagggtaaaagtaggaattcagagaaaggataaatattttgaaggaaggcagcataatggttaactagtcagactgcagacaaacaagcagtacaaatcccatgttcccaggtcttagctggaggattaaatcccagattctcatccttgagaacctctttaagcttgttttcccatctgtaaaatgtagatgataatagaatccttttcctactgtaaaatgatgcacattgggggcttcatgtagccagatatataataaatcctcaatacatgtagcagtggtaggggagaactaaaagacttgttaacatattggatgtaggtgagaaagaagaatcaaaaagaatatccaggttcccgccctgggaggggcagacataaatggagccaggaatggtacaaggagctttgtggtgggcactcactagtacctttctttggaatagctcaacaaatgttcactaagtacacataaagtcaatataacttgatgagctagagttaggctaagatgttgagttagcagaagagtagtacccaactaagggcttgaggaaggcttcctagaaaagataatgggtgcacgtagtcctgaaggatgagcaaggcttgcgaggagggaaggtaggaagggcattccagacaaagggacaaacatgcacaaaggtgagacagagcatggtgaacacacaaagttgtaggcattttgtctttctaggacacaaaaaacaaggtgatgaaaacaaggctggagagacaagcggagaccacaagtggtcacccctcactggcctcgctgtactactggactgctccagcccttcctggcccagagctagagatggcaccacccccgcactgtgcacacaataggtacagacactctcagccccaaacccctccagcctgttactgtgagactcacacatcctgttttcccaagcttgccccacagggtgagcaaactggaccagctggattagagtatttggaaaagtgcaggtggagtttctaggctatgccacgtcaggccagggggtgagatttttttcccttcccctggtctttgggctggggcactccctgaggagggaggggtgtgacccatcccacccattggtggtccatgatccattcatccagtacatcatccataagcatctgctgagccgggcgcagttgctcacgcctgtaatcccagcactttgggaggccgaggtgggcggatcatctgaggtcaggagttcaagaccagcctggccaacatggtgaaaccccgtctctactaaaaatacaaaatttgccgggcatggtggcgcatgcctgtaatcccagctactcgggaggctgacacaggagaatcgcttgaactcaggaggcagaggttgcagtgagtcgagatcgagccatcgcactccagcctgggcaacaagagtgaaacgccatctcaaaaaaaaaagcatctgctgaaggcacagtattgtgttagaggcttggactaccctgaggaataatagtcctgacacttgaggacatccccatccaattggaaaggcactggataaacatctaagaaaatgtcacaaggcataaaagctgtaataataatagctaacttgtatttagggtaaacaaaaggctgaatcaggctttggactaaatattttgcctgtggctcatttaatcttaataacaaccataagattatctcattttatgatgaggaaactgtatacagagaggtgattgacttgcctaaggttgaacagcttatgagtagtagagccagtattcaaatccagtcagcctccagtgtcccctctctttagtcattagatatagtgctacccagagaatctgctaagccttatagataaatgctatgaattcagaggcaggagcaattactgtggcttgggggcatccacaaagactttctaaggtggtgacacctgatttgggccttgaaactggttgaatagagataagaaaagaacagataatcaatttaactgccgttgtgttttgaatcatcactttaagcctagaatgacaaagctggaaaagaccctaaatatcatctagcccagtggttatcaaattttcttaggatgtggacatttttctttaaatgaaacatgagtagaagccagatgcagtggctcatgcctgtaatcccaactacttgggaggctaaggtgagaggattgctcaagcccagaagttggacaccaacctgggcaacggtgagaccttgtctcaaaaaagaaagaaagaggccgagggcggtggctcacgcctgtaatctcagcactttgggaggctgacgcgggtggatcacttgaggtcaggggttcgagaccagcctggccgacatggtgaaaccctgactctactgaaaatacaaaaattagtcaggtgcagtgctgcatgcctgtcatcccagctactcgagaggctgaggcaggagaatcgcttgaaccccagaggtggaggttgcagtgagctgagattacaccactacactccagcctgggtgacagagtgagactttaatttcaaaaagaaagatgagcagtaatcttgtctcttaaaaaggaggaccaaacattccctagccccaaaacattccctgaaaagttcagttgagaaccactgatctagtccaatgtcctgggatcctcgcttttatctttgctatctggagaaggaagagacagcggtagttcccaaaagacacaaacaatggggacattttaaacgggagtaaccagctaagcactctgctgctgctgcttgtctatttgccctcttgtcctgcctcagggtgaattgttggcagctacaaatggcaaccaagagagaatggagttggggcttagaagtgcggtagaggaatatgaagggggctggagttggagaggctcttaaagaaagagctgactatattgggactggagagttaatgtaaatctcttcttggttcatggggattttgttgttattgtttttttccccatgacacaactctcaggagatcctgagaacacgtgccctgatttggggggggttttaattttaactttttttttttttttttttttttgacagagtctcactctgtcacccaggctggagtgcggtggcgccatcttggctcactgcaagcaagctccgcctcccgggttcacgccattctcctgcctcagcctcccaagtagctgggactacaggcgcctgccaccacacccagctaattttttgtatttttagtagagacggggtttcactatgttagccagaatggtctcgatctcctgatctcgtgattcacccgcctcggcctcccaaagtggtgggattacaggcgtgagccactgtacctggccaaaatttttttttaattagagacagtctcttgctgtgttgcccaggctgatctcaagcagtcctcccaccttggcctcccaaagtgctgggattacaggcgtaagctatagcacccagccttccttctttccttaattctatttttttttttgtttgtttgtttatttgtttgcttttgagatggggtcttgcactgttgcctgggctggagtacaatagcgtgatctcggctccctgcaacctctgcctcccaggttcaagggattctcctgcctcagcctcccgagtagctgggattacaggtgcctgccaccatgcctggctaattttttgtatttttaacagagacagggtttcactatgttggccaggctagtctcaaactcctgaccttgtgatctgccctccttggcctcccaaagtgcggggattacaggcatgagccaccatgcccagccttccttaattctattaatatatgaatccttttcttttttttaaaaaaaagagatagactcttgatctgttgcttaggctggagtgcagtggcacaaatcagagctaactgcagcctcaaactcctgagttcaagcaatcctccagcctcagcctcccgagtagttgggaccacagttgggaaccactacacttggccctactacgggtttttcctgtttgtttgttttttgtttttttgtttttttgtttttttgttttgagacggaagtttgctctcgttgcccaggctggagtgcaatggcgcgatctcagctcactgcagcctccgcctcccgggttcaagcgattctcctgcctcagcctcccgagtagctgggactacaggcatgcactaccatgcccggctaattttgtatttttagtagagtcggggtttctccatgttggtagtcaggctggtcttcaactcctgacctctggtgatccgcccatctcggtctcccaaagtgctgggattacaggtgtgagccaccgcgcccagctgtttgtttttttgagatagggtctcactctgttgcccaggctggagtgcagtggcatgaacatggcttactgcagccttaacttcccaggctcaagcgatcctcccttctctgcctcctgaatagctgggaccacaggaatacaccaccacacctggctgatttttaaattttttgtagagccagggtctctccatgttgcccaggctggtctcagactcctgggctcaagtgatcctcccacctcagcctcccaaagtgctggggttataggcatgagccactgtacccagcccccttcagggtcttatctttataaggggtggggggtggtcagcacctttctcattgttacctctaccttccctaggtatgtgcaggtgaaatttgtctgcattcggacccaatcaaacaggaagagaacgcgggaggcagacatgtgcccagcgtacttgctcctaaggtacaacgagagactagatagactatttatcagtgaactaaacacacagcacatacatggtgactctaaagtggctagtcctggaggagacaccactggcaaatctcaaaagacaatgtgcctgcagagactccagcctgtgcagcccacaaccaaaaaagaccttgacactgccgagaagtccctggttgagccatcgttttgcctagataaggtacaagtgtcctcaaagccagagcaggaaggcatcactccttctgacctggccaagatagcaaaagtgatgaagaactttcttaaggtagatgagggttccatggcttccttcagtgtgggtgacagccagcacctggaccggctcagcttccagagcagtaagatgaccgacctgttcatccgcttcccagagaatctcttgctacaccgggtggagaacacccagggccacatcctctatgctttcttggtggagaacaaggaacgagaaagtcgagtggtgcactttgctgtgctcaaggcggagacagtcacctctgtggccaagatgctgagcatcttcacagagttcaactccgattggcccaaggtcaaggtggtctttgtggacccttcattccattaccgggctatcctgcaggagatctttcctgctgcccgcatcctcctttccatctaccacacaacccgactcttggagaagaagttgcatcgtagttcagcaaatccatcctttaaaaggctcatgaaggaagccctgcgggaggccgtgtttgtcacttctgaagccagcctgaaaaatctctgccagatgtcccaggccgtactggatgaggatctcttcaacttcctgcaggcccactggttcacctgtgaactgctgtggtacatgcatgttaggaagggcctgcttgcgtgtaacacctacatggacagcctagacattgtcaccagcaaggtgtcaagcctctttcgggaacagcagtcgctgctggactgcatcctctgctttgtggattacatagacttctttaataccaaaggcttgaagaacttgcccacacctcctcccaaattaaagagagctcggccggcaagcatgccactgaagtccaagaaggcttttggaatctgtggagagagccttaccagcctccctgcagaagagaccaagccagacgcacagcaggtacaggtacagcagcagtcacaagtgccgccctcgcaggttggcatgctggacaccttgcaccagagtggctctgaactagcctacaagctgtgccacaatgagtgggaggtggtacagaactccacccacctggtggacatggctggctcttcagtggacgttcagctgctagaggactctcaccaggttagcaaagatggctgtagctgcagctgttcctttcaacaatggtaccacctgccatgccgacacattttggctctgctgcacaccagccagcagccggttggtgaagccatggtgtgccgccggtggcagaagaagtaccagtacctccttgggcccaatggggagctccaggatcgtggtatggtcccaaacacaggccagcctgagaagcaaggacggaacgacatgattcaggacctaagcagggagttagcaaacctgctcatgcagaccgaggggccagagctggaggaacgctactccaccctgcgcaagattgtggatatctgggctggcccctcccagccatctgagctctttcagcagccaggagactttaaggacgtgggccgcctccctttcctctggggaaagcaagaagaaggggagggattccctcctgctacagctgtgatgcattattgaagcactttagctgaagcattggaccacaaacacttctccttggaagtgtgagagtttaaagtgggcaggacatactagggtttagcattttagccaatgtcttcctaggtggggctaggaatattgttacagtagagaggaagggaactccactgtgtgacagtcctttcaatctgccccttttcagccctacttttggcattccttgggagcctcagttgttgttcaaggccaaagttatctccgtgctgcaaggtcaccctcttcctcccccagcccctgagatcagatcttatttgctctgcaaagatgaatccctgcctcaggttagggtgagacaaaatcggtctggtaaaagggcctgttttcagggacaaagggaatgaggatgatctttggctgttgctgctctttatgaagaatcttatttgtaactttttattcatattaaagttgtttttaataaaattaaacaagggaaatgtgttctgcttgatcagggaaggaagaggaattgcatagcaataggactcgactttacagttaggaagtggctgctctaggtggatttattaattttaaagaaaattgaggccaggcgcagtggctcacactcataatcccagcactttgggatgtcgaggcgggtggatggatcatctgaggtcaggagttcgagaccagcctggccaacatggcgaaaccctgttctactaaaaatacaaacattagccaggcgtggtggcgcacctgtaatcccagcttcttgggaggctgaggcaggagaatcgcttgaacccaggaggcggaggttgcagtgagcctagatcgtgccaccgcactccagcctgggtgacagagtgagactctatctcaagcaaaaaacaacaacaaaaaaaaaagaaaagaaaattaagtattagcaacctaatggggttgtggagccaaatagaacctgatgcctcacattcaaggatttggcaatctgcgtcttaatttgcctccttcctacaactaagccttcaaggttgatttcaggtttccttatattctagcgggaagaggccaaatagactggagggtgtgggggaaaaacctgaatcttagacttgactgccagcaacttgctggggaactgtgggcaatttctttgacctcagtttcctctgtaaaaattagcatgttggcctgttctaatcccagatttcccctctaggtttacataagcacctttttgttttttgttttgagatggagtttcgctcttgttgcttgttgcccaggctagagtgcaatggcagaatctcggctcactgcaacctctgcctactgggttcaagcgattctgcctcagcctcttgagtagctgggattataagcatgtgccaccacgcctgcctaattttttgtatttagagatggggtttcaccatgttggtcgggctggtcttgaactcccgatctcaggcaatccacctgcctcagcctctcaaagtgctgggattaaagggatgacctactgcacccagcccaataacattttcgatgcgtaagtaccaacactgatttgatgttgctagttggtaatcttaatcctccaaggcctggtaaacacccagttttctaagtctgccatcttcaagggaactgaggacaagagaccagttagtaggcccttgcactactgtagtaggaccctaaataagtcatggcatcattctgtagaatactggagggggttgggctagagaatgccaagttttggcttgtttaaggggatctggatttcctcagctctaaaagttgggctcctgatccccgaaggaggagtagaatttgagacctggaactcagtttccccataaggtagaatatgcgttatgactatatatgcactgtttcctaaattccaggggctttagagtttcacacacacacacacaacaaaacaaaacccgcggtggctcacgcctgtaatcccagcactttgggaggctgaggtgggcgaatcacgaggccaggagttcgagaccagcctggccaacagggtgaaaccccgtctctactaaaaatacaaaaaattaactgggcgtggtggcgggtgcctgtaatcccagctactcaggaggctgaggcaggagaatcatcgcttgaacctgggaggcggaggttgctgtgagtcgagatcttgccactgcactccatcccaggcgacagtgcgagactccatctcaaaaaaagaaaaagaaaaaatatatatataactgctatttattttccttttcattttctgcttttgagggagtttccatagtaacgtgtccttccagtcgcctagcctgaagggaagccccggagctccagcttcaaggctcagctctcccagatgcaagtatctttacctccagccagctccttgtaaccctggcaacacggcccgcccgcgaatcgtcacgctacgattggtccgtggtgctaaagcctgaaagcgaattcctcagacattggtccgagtcactgcgatgctgacgctgtggttggtgagtttggatgtcagtcagagtcggaggcagggtcaaatagggagaaatggcgacggagcctggctgtgggtgagtgcttcctgaaggggtgaaagtgtgagacagcggatcaccgcagttagccgtcacacagctcccaaagggatgggagggaggttttcttctcatccggctccagctggactctgggaatgtcagacatccacatctcccacccaggttagaggtgagaggtcaaaggccgtattccctctgttggtttttggaccccaggtactgtggacagcagtcaggatcccgaaccaaagactcaactttcagctacttacagagtaatggtgggcaagtcacttagcttctttgagccttagtttatcatctgtaaaatgaggacagtaactcggtctggggccaaatagaggaaacaatggaatagagtattgctgctaaaagagggatatagtagaggcaggagaagctatgcacatttgttagccatattttatggtggaagggattgaggctcagagagggtcattgacttgcccaagataacacagcaagtttggagcaattgcagttctcttatacataccaggaccaaaggaaagaatggatgccaatcagtcatttataaatataaaatcgtatttttattttattttattttttgagacagagtttcactctgtcacccagagctggagtgcagtggcgcaatctcggctcactgcaacctcagcctcctgggttcaagcaggtctcctgcctcagcctcccgagtagctgagactacaggcatgggccaccatacccggctaattctttttgtatttttagtagagacgggttttcaccatgttggccaggctggtctcgaactcccaacctcaagttatctgcccaccttggcctcccaaagtactgggattacaggtgtgagccactgcacctggctagaatgctatttttttaaaaggccatatgcagctctggccatacctatttaaatcccctggaaccatatctttccatagctaacttcttatcatttagatttcagctccaatgtcatccttctcccctgagaggccttccattaccactttaactaaagtatccctcccttccccagcttactctctgacatgttactcaggtttatggtctttgtaagcttcattattggatatatatttgcttatttgtttacatgtttattgtgtatcttcccctagaacagtgctgacatatagtaagtgttcaacaaatattgtgtggatgaataattgaagagccaggtccctgctgtctccttaaacctctgttactctccataggcccatctttggaaaaaagatctgggaatgattgtctagcctccagcctcaacttacttgatgcttgagagactcaaagccccgtggtcagctgccctgcaaagaaagtattttgaccttggcatttggacagctcccatctctcccatggccctgacaatgctgaatgggctcctgattaaggactcaagcccacctatgctgctgcaccaggttaacaagactgcccagttagataccttcaactaccagagctgctttatgcaaagtgtctttgaccatttccctgagatcttatttatccaccggacctataacccaaggggtaaggtcttatataccttcctggtggatggacctcgggtgcagctggagggtcatcttgcccgagcagtctactttgccatccctgccaaggaggacactgaaggcctggcccagatgttccaagtattcaagaagtttaatccagcatgggagagagtctgtaccatcctggtggatcctcatttccttccactgcctatcctagctatggagttccccacagctgaggtccttctctcagccttccacatttgtaagttcctccaggccaagttctatcagctgtcccttgaacggcccgtggaaaggctgctcctgacctccctgcagagcacaatgtgctcagccacagcaggcaacctgagaaagttgtatacactcctgagcaactgcatccctccagccaagctgcccgagcttcactcacactggctgctcaacgaccgcatctggctggctcaccgctggagaagccgagctgagagcagccactacttccagagcctcgaggtcaccacccacatcctcagccagttctttggtaccaccccatctgagaaacaaggtatggcttctctgttccgttacatgcagcagaactctgcagacaaggcaaacttcaaccagggcctgtgtgcccagaacaatcatgctccctcagacaccatccccgaaagccccaaactggagcagctggtagaatcccacatccagcactccctcaatgccatctgcacagggccagcagcccaactgtgcctgggcgagcttgctgtggtccagaaatccacacacctcattggctctggctcagaaaagatgaacatacagatcctggaagatacccataaggtgcagccccagccccctgccagctgcagctgctactttaaccaggccttccacctgccctgccgccacatcctagccatgctcagtgcccgccgccaggtgctccagcccgacatgctgccggctcagtggacggcaggctgtgctaccagtctagacagcatcctgggcagcaagtggagtgagaccctggataagcacctggcagtgactcacctcaccgaggaggtgggtcagctgttgcagcactgcaccaaggaggagtttgagcggaggtatagcaccctgcgggaactggccgacagctggattgggccttatgagcaggtccaactctgattattctcgatgcccagagatgctcatgcacctgtgcacactcacatccacccatacacacacacacacacacacacacacacacacacacactcccttacactgttgtacttccgtgggccctccttccagaacaaggacaacaaggacaaggttgaagggtcttctcatctaccatggcctgctacctagcatgtgtctagctcaatgagacaggagtcagcaaatcttaatctgtttagtttactcaggtggccacatacagtctctgttgtatattcttggttttgttttaatattttttttctttttttttttttttttttttttgagaaggagtctgtctccgtcacccaggctggagtgcagtggcgcaatctctgctcactgcaagctccacctcctgggttcacaccattctcctgcctcagcctcccgagtatctgggactacaggcgcccgccacaatgccgggctaattttttgtatttttagtagagacggggtttcaccgtgttagccaggatggtctcgatctcctgacttcgtgatctgcccgcctcggcctcccaaagtgctgggattacaggcgtgagccatcgcacccggcctgttttaacattttcataaggtaaaaacctttcttagctcaaaggtctttaaaaaagcaggcaatccagctgggcatggtggctcacgcctgtaatcccagcattttgggaggctgaggtggacagatgacttgaggtcaggagttcaagaccagcctggccaacatagtgaaaccctgtctctactaaaaatacacaaattagccaggtgtggtggcgggggccctgtaatcccagctactcgggaggctgaggcaggagaatcgcttgaacctgggaggcagaggttgcagtaggccaagatcctgctgccactgcactccagcctgggagggtgagactccatctaaaaaaaataaaataaatggcaacccctggtctaagataagagataaaacatcaggtggtgaggttgaggtttggggcttggtagcagttgccccagtcatgagatgactcacttaacccgtctcctttaagtgagctgggctgggaggcttcctacaggggaagaggcccctctggggagctgactcagccaggctccctgaacttttttccttgtcccatcctggggtcaataaaactgaatgttgcatattctagcacttgtctagttttttttttgttccatagaaggcagtttagggtatatcatggagagaatagactttagagtgttatacaacatgtgaatcctggttggttccttccctgcttgatttttgtgcctggttctgccttttactagctatgagacttattaggataagttacccctctaaacctcaacctgattatctgtaaaaatggggatctccacagggtatgttcacagagcaggcatacctagtgggtgctcaattaagtattaattttccttccttgcctatggtcctatgacctgccttcaacatgctgggaaatttaaggcaagaggagaattcaaatacctaggacttaatataagaaattctggccaggcatggtggctcacacctgtaatcccagcactttgggaggccgaggcaggcggatcacctgaggtcgggagtttgagaccagcctgaccaacatggtgaaaccgtgtctctactaaaaatacaaaaattagccgggcgtagtggcaggcacctgtaatcccagctattcgggaagctgaggcaggagaatcacttgaacctgggagacggaggttgcagtgagccaagatcatgccattgcactccagcctaggtgacagagcaagactctgtctaaaagataaaaattaaaaaaaaaaaattctgggtaggccaggtacggcgtctcacgcctctaatcccaacaccttgggaggccaaaacaggcagattggagcagcctgggcaacatggcaaaaccccttctgtacaaaaaatacaaaaattagctggatgtagcacgtgcctgtagtcccagctactcaggaaggctgaggtaggaagatcacttgagcccaggaggttgaggctgcagtgagctgtgattgtgccactgcactccagcattggtgacacagtgagaccctatctcaaaaaaaaaaaaaattctgatcaagtcttcaaaacaacataaaagcagccttaactctccaagcaggggcccctacctcagataatttccattgtatctacctgacaaaacctatctcctgtcttagtggtatctggagaaactttagggtctggaagtccctgatgaaggactggaatttgtcagaatggctcaaccaccagctctatccccatccctgccataggccctcctcccaaccctgtctgcccaagaaccatacggagaaaccaccctacatatctggtgctatttcatccatctacaagcaggagccaggaggctggccccttttagatctcactaggggcatcttcccagaggctgtgtgggcatgtgcctgctcccaccgcgccccctccacagcaccctctggctccggatgggccatcatgaaagcttgagcggcccagatcaggtcctcttcccgaactcctgggacgggcacggtggggatgccagcgatcatcatggcgagggtgaggatgcagatatcaggctgggagctggcctccttccccactgcctcagagggtaccggtagaacccgtggtgacagcccacacagcatcaggggcctaggcctgctggggccacccaggtcaggggctctgcttctggagtagccattgtcccagcccaagctctccagctgcctcacatgcgggaatttgtggcagtttcggctgtattccttccgtagtgtctcccagctagtccccccagggcagcccctggcttgtggcattgccagggctgggccccaggcctgggcagcaggtgccacctgctcagctttctggctcagtgggcctgttccaccagaggccaccaccactggctctacaggactacagaggccaagggacaagcctggagaagcagccccacctgcagagacaggaatgaaatggaacgttattctcagttctttgaggagggggccctgaggggcagggcatgggagcagagcttgggggcgtaactaagaccagccccagcggactgtctagaggttgggaactaggtgttactcatatccacactcccagtccccaacacggagtaggtgatggagaagcgtttgttgaattaatgaatagtgagcaagcgggtagttattgattggcaaggatgtttggaatggcttttcttctaaaagaattgattctagggccagcccccaaatgcccagcagaaccgccacctccccagagccagaaagcaacttctcaggggaagctgccgcactccctccaattgcaggtgccccccgctcaccttggccggaaggcagaggacctggatgagtttgtggagtcctgaagtaggacatggcttccccaaagccccggtttgtgagggaatagtgatctgccgcctgtcctcccttcttcacccttctagaatgtcacctcatagaccctccccttcacacttggaatccactttacagcgttgacctattcattctagaacctggacatgacaataggatgaggttaaaagagcaccagaccaggagctgggtgttctaggttcttgccctaaccttgaacgagtcacccagatagttttgttccttgatatccttatctgtaaagtgtgtctgatgactgcccactacctcattaggagttttgaggatgaaatgagatcatttgtatggaagcagatgaccagagatggaaacacaggagccaagtgcttcgtgccttgtagagtaagacttcgggtcagacccagtattggtatttttctttttctttttttgagacagagtctcactttgtcgccatgactggaaggctggagtgcaggagcaagacctcagctcactgcaacctctgcctcctgggttcatgcaattctcctgcctcagcctcccgagtagctgggactacaggaacctgccaccacacctggctaacttttgtatttttagtagagacagggtttcaccatgttggccaggctggtctcaaactcctgacctcaagtgatctgcccacctcggcctcccaaagtgctgggattacaggccaggtattggtatttttcaaaattcctcaagtgattataatatatgacaaagttggaaccttttttctagggacatacttctcaaccctggctgtacatgagaatctcttgagaagcttttacaaaacacaatgtctaggcctaatttcccaacaaatcaaatacgaatccctagggatgggatgtgggacaccagcactctttacatatcctaagatgactctaacaagcagccagcctagggacccctgctcttttgctccgacctgctgacctgcagtgattctaaacgaagtgactctcataggctgtaggggcaaggagaccttccagtgatcaagatgtcagcatcggctgtttatttctggtcttggctggcagcaatgtggccaacttcggaccagccagccacaggtctggggctccaggatgcagctgtgctctggtgcactgtgggtcttcactcatacttgcagaaatccttaagttctttgggcaggtggagcccatcaatggccagccggtgcaccatgctcctttgtatcactaggcggcacagagtctgcagggatggcactgtgggaagaagactgtgaaaggcaaactgaactggagggtgggtctgaggccaagatccagaaggtctaggtcatggtccccactttgtcattaaatgtgggcaagtccttactgctctctgggcccagcctgcttcatggggctgagagaagcacctcttcctgagagctgccacaaagctgcagccctgtttatatcataacacttagcacaatcccttccccattcacttagcagcttctgggggcaggggtagtgtctgatttgcctgtgcaactgaagcctccagcacaggcctggcacaaagagggttctggtgcattgagttcatgaaatgtgatgagaggtataactgcaatgcttaccagggctataatgaatcatactcagcattaagaagctctcagtctggggtttgttatgcctcgaagccaatagccaatatgcccaagtctatgagcatgtttctttcttttctttctttttttttttttatttaaagagagagggtcttgctctgtcacccaggctgaagtgcagtgctcagtgaactgcagccttcaattcttgggctcaagcgatcctcctgccttagcctcccaaatagctgggactacaggcatgcaccaccatgcccagataattatttaattttttgtacagatggggtctcactttgttgcccaggcttgagctagctagcttgcttgcttgcttgctttctctctcttcctctctctctctctttcttttttttttcagagtcttgctctgttgcctaggctggagtgcactggtgagatctcggctcattgcaacctccacctctcgggttcaagtgactctcctgcctcagccttctgaatagctgggattattggcacatgccaccacacccagctactttttgtatttttagtagagacaggctttcaccatgttggccaggctggtctcgaactcctggcctcaagtgatctgcctgcctccccctcccaaagtgctgggattacaggtgtgagccactgtgcccggccaagcatgtttctaagaaaagggcaaacaattctcaaagaggcccctaatatctaaaattggtttagaatccctgccctaggtgaatacaggaaacactatcaaaactaaaagggaacttgtagggcatcttaatcaatcaaccaagataggtaccaaggcccaaaaccatgtagaggcttgtgcaagatcacaagcagaggtgcaatttgaagctagattctcccactcttaaactagtgccggacagacgaaggcctagcacatgggctacggagccctagtagattccagtccccacactgagccaggaggggtcgctgcccagggatacctacagccatactcgagctggacaaggcgcacgctctttgtggaagcaaacacgtccaccaccgcgtagaggggctgcgcagctggcagtccccgggcgctcgggcccatgtcctcgccgttgatgatgatgtgcatgtcggccgtgccatcggggcgcgggcaaaagaggacacccaggcggctacggcgcgcggtcggaggcagcacgttcagctcatagagctggtccaagagatggctgtagagccctggccggctgcggcccaccaggcggtcccggggaatgcgaaactgctcaatgcgcagatatggttccacgaggagggttggaggtcggctgggggccgctgcctccgcctccgggcggccctcccggggcacgcggttgtggtggcgcgtgatggcgaagacccaggtgtggcccaggttgaccagatcgggcagagaaaactcgggaacgggggccagactggcggggtccagcgcggtcagaccgagacgcagatgtccgcaccagcccagctctttctcctcgatctcgaccaggaagacctggcccggggccagcggctcgcggctgaagcacacgccgtgggcgaagctctccacgcgtgtggcccgcgtcccagaggggtccacgcggatgttggcaccgtgcacccgatggaagcgggtgggagggggctccgggcgctcgagtccccagagtgcacccgaatccacgggctcggaggcagcagccatctctcggccatagggcaggccagctggcgccgggggctattttgggcggcgggcaatgatggtgaccgcaaggcgaccttgtaaggcatttcccccctgactcccttccccgagcctctgcccgggggtcctagcgccgctttctcagccatcccgcctacaacttagccgtccacaacaggatcatctgatcgcgtgcgcccgggctacgatctgcgaggcccgcggaccttgacccggcattgaccgccaccgccccccaggtccgtagggaccaaagaaggggcgggaggaagactgtcacgtggcgccggagttcacgtgactcgtacacatgacttccagtccccgggcgcctcctggagagcaaggacgcgggggagcagaggtgagctggcaccggaggctggaggggatccccgagcccgggatcggtgcgcggcagaggaggctcgcgggtgggagctggcgctggggccggggcttccctcgcggaggcgccgccagcaactccccgggggctgctgcacggaagcgctgaggagcgagtcaacagcccctctgctgcctcccgtagatgatccgagccgcgccgccgccgctgttcctgctgctgctgctgctgctgctgctagtgtcctgggcgtcccgaggcgaggcagcccccgaccaggacgagatccagcgcctccccgggctggccaagcagccgtctttccgccagtactccggctacctcaaaggctccggctccaagcacctccactactggtctgccgccctgccttctgggcgggattgggagaagagatgacggatgagggatggggggtagttctgcagacccctgaggatgcctgggagccgggagggctggaaagggcccctccaactgcgccaaccctgccctgacccccctcccaggtttgtggagtcccagaaggatcccgagaacagccctgtggtgctttggctcaatgggggtcccggctgcagctcactagatgggctcctcacagagcatggccccttcctggtgagtggacagcagggggaaagcacagttcccaaagtaaaaggctggggaaagcgagagaggggctttgtgattttccaaaaagtttccttccttctaagcctcgggattttcctctatgccattggctttgctgcctgtacctctcagaggttttacccacatgtaaagtgcctctcatggtggccctttccctccacccagctggcccttgggacttactcagccatctctttcctcctcaggtccagccagatggtgtcaccctggagtacaacccctattcttggaatctggtatagctggagctgtgggtgtgtctgggcacttggatggggtggcatttagctaatttttccctcccctctagattgccaatgtgttatacctggagtccccagctggggtgggcttctcctactccgatgacaagttttatgcaactaatgacactgaggtgagtctggtgcctgcccatctgccccaggctccccggtcctccatccatggcatgatgctgggagagagagcatggccttggagtctacttttcgctctgtcatatgctattgtggtatggtggccagtcacttcctcttgcacaaatagggtgggttaatgtcattatctctgaagttctttccagttcaaataccaaagcttcctgattccctctgtcttgctctgccatccccaggtcgcccagagcaattttgaggcccttcaagatttcttccgcctctttccggagtacaagaacaacaaacttttcctgaccggggagagctatgctggcatctacatccccaccctggccgtgctggtcatgcaggatcccagcatgaaccttcaggtgcagggtagctgcaggagggaagggaggtagcttgaggctgtggccttacagttagcaaggtcagactgactggtcaatgtccccatccaacccagcttcctgcataacctccccaccaccggctgccctaggtctgtctgtgtgcctcccacacaggaaactcacctgtcaggctgccagctctgtgttttgcattgagtggcctctcatacccaccggcctacataaaccaccctgggtttcagcttccggattgctgaaggtctgggtggtagggtgagggaggctcttcctttttgccctccacatgagctgagcaccctgggtgtttcacaggggctggctgtgggcaatggactctcctcctatgagcagaatgacaactccctggtctactttgcctactaccatggccttctggggaacaggtatgggatagggcagttgggcaatctctggggtgaggcaggtcacatgatctcaggtctgtcctccaggcacatgatatgacaggcccagcccaggtttatgagcagcaggtgggttgcagaaagaacctagtgctgaaaggccaaagaatagagatcagtttttctttctttcttttttttttttttgagacagattcttactttgtcacccaggctggagtgcagtggcacgatcttagctcactgcaacctccacctcccaggttcaagcaattctcatgcctcagactcccaggcagctgggactacaggcgcgtaccaccacacctgcctaattttttgtatttttagtagagatggggttttgctgtgttggccaggctggacttgaactcctggcctcaaatgatcttcccaaagtgctgggattacaggcatgagctacagcgcccagccagaaatcagattttaaaggaactaaggaggcctgtctgtatgaccctggggcacctctttgggagctagcttagatgacatacagaccacaccctgtgatatctttcccagtctcctagggtcagggaggttggtgggaggtggggggtatgctcgcctcctctgccttcctcttcccaccagcagctgatgcgcttttcactctcatctcctacaggctttggtcttctctccagacccactgctgctctcaaaacaagtgtaacttctatgacaacaaagacctggaatgcgtgaccaatgtgaggttctgccatcactttgcatgagctctcccatccctaatcctgagaacaggaccacattccctccttggggactccttgttctccgtccctcattgctttcttgcacctttaagcaatttagtgttctctgggacatgtgtctaagtgtgtattcccaccaccacctcctatggtggcaaatcccataacctccgtgaggagaaaggacttcttcacatttatcaaacacctgcaacgtggcaggcactgtgctgaactgtgtctatgtagattatttaagcttcaagattccccctcaaatgagatcatactacccacattttccagataaggaaactgagggctatgaattttgaaatcactgtctgaagtcacagtgttgggaggcagtgatgctaggatttggacccaggtctgggaagattcctgccactgagcctcagtttccctacctgtgaaaaaaagtgggtgaagaggtgaaatccaagagcagtaaatcttgggacaacttggtggggtcgtggagaggctggggatctgtaaagcatggtggcttggtgtatcattgcagcttcaggaagtggcccgcatcgtgggcaactctggcctcaacatctacaatctctatgccccgtgtgctggaggggtgcccagccattttaggtaggtgctgctgggtgcccctggagccaaccccagccccatctggaggctccacacccattcccccacctcacattgcaggtatgagaaggacactgttgtggtccaggatttgggcaacatcttcactcgcctgccactcaagcggatgtggcatcaggtgtgcgagggcgtgggcttcctcctggtgaggtgggggcagggggaggggcagggaagcagaggccctgacccactgtctgtgccttccaggcactgctgcgctcaggggataaagtgcgcatggaccccccctgcaccaacacaacagctgcttccacctacctcaacaacccgtacgtgcggaaggccctcaacatcccggagcagctgccacaatgggacatgtgcaagtgaggttccgtggccacctgtgacttggggtggtgggttgctggggcttgtgggcatcggcaggtttctcagggatcttctgtgtagagtttctcaatgagatgagctgtagaggatgtttaacatccatccctgacccctcagtggattgagagtcagccaattcattcttttatcttttttaaatttaaaatttttttgtttgagacaaggtctcactctgtcacctaggctggagtgcagtggtgtgatcatagctcactgcagcctcaaactcatgggctcaagcaatcctcccacctccccagtagctgggactacagacgcaccaccacccccaacaagtttttgtattttttgtacagatggtgttttaccacattgctcaggctggttttgaactctggggctcaagtgatctgcccatttcagcctcccaaagtactgggattacaggcatgagccaccccgcccagccccatttcattacgtagccacattggttgttgtttcacagttcactacagcctcaacctcctaggctcaagcgatcctcccaccttagtctactgagtagctgggtctacaggcacatgccaccattcctggctaatttttaaaaaatttttttgtagagacagggtctcactatgttgtccaggttggtctcaaactcttggtctcaagcaatcctccctccttggcctcccaaagtgctgggattacaggcgagggtccccacacccggccatcacattggttaataactattacttccgactgggcgcagtggttcacgcctgtaatcctagcacttttggaggctgaggtgggggaatcacctgaggtcaggagttcgagaccagcctggccaacatgaagaaaccccatctctactaaaaatacaacaattagccaggtgtgctgttgggcacctgtaatcccagctattcaggaggctgagggaggagaatcgcttgaacccaggaggcagaggttgcagtgagctgagatcatgctactgcactccagcctgggcaacaaaagtgaaactccatctcaaacaacaataacaaactgttaacttccatgtccagtctcctgtggccacccccccccacaaccccaagtaaaagggtaacactgggcccagcagggctgctcaggtccattttgattggtcagtgctcacactctaccctgttgtatgttgtgactcccacacctgctggcccctagacactaaatgccagatgcatcccagtcctcgtaacaaccaaaatgcgtcccttgtacatttctttttctttttttttttgagatggagtcttgctgtcactcaggctggagtgcagtgctgcgatcttggctcactgcaacctccgcctcccgggttcaagtgattctcctgcctcagccttctgagtagctgggactacaggcacgcaccaccacgcctggctaatttttgtatttttttttttagtagagacggggtttcaccatgttggtcaggctggtctcgaactcctgacctcgtgatccactcacctcggtctcccaaagtgctaggattacaggcgtgagccaccacgcccagcatccctgtacctttctaaatggtggtgagttgaggctgtctgaatcccagcccatccagcccaacatccaagtcagtcctagagaggtggcccccccccaaaaaggggagtggaacccagctgtctgccttctgggttggagcttggagataggagagaaggtctgatctgttgactacttttcgccccgacctggtcttcctggggcctgctcgtatgttcccggcagctttctggtaaacttacagtaccgccgtctctaccgaagcatgaactcccagtatctgaagctgcttagctcacaggtgagtggggagagcacagctggatcaccagcagccttaggaccccagagtagcacagcaagctgggggcccttgagacttcctgtcaggacaagggaagctgaaactccgaaaggcgaagcccagggtcctgtgattggtggggtcagaatttgaacctgggtttgtccccacccatgctgtcctgctataggaggcctaggggtctgcatcagccacggagtcttaagggtgagaagagcttcattcatgccaaaaatgggccagcagaggtccagggtgggaggagaccttgcacaaggtgatataggaagcactggcagggccaagttaggactaggttctgtccagcacagtggttaatagcatgggctctggagtcacatggcctgggtgcaagtccctgtactagccacataatcttgggcaaatttcttaaatatgagcctcaggttctccatctgtaaaatggggataataatgatatctaccttcacagataaaacatttagtagaatactggacatgcagtaagtcgttagaaaacatgaaaattccctggttcgtgttatctagcttggccccttgaatttcctgaggggtaggccttgaactagggaagggctggggactgggcttgttccacacccctcatttttaccccatcctgctttagaaataccagatcctattatataatggagatgtagacatggcctgcaatttcatgggggatgagtggtttgtggattccctcaaccagaaggtaaggtagagattcctggccctgggataggggctgctgtggaggattgggagcgggtatgcctgggagtggccagctggctgcctggctctggcccacagagggcaagtgtggaggaattcccagccctaaggtcttgctggtagctgtgagcaaggatgcagctgctgtaggctgatgtctttcctggtggggcagatggaggtgcagcgccggccctggttagtgaagtacggggacagcggggagcagattgccggcttcgtgaaggagttctcccacatcgcctttctcacgatcaaggtagggactgggcctgctgagagataactgggccggaggcaaaggagcaggacccacccgtcctttccctctggctgccttttaggctgggtcatgggtcaccatctggcccctgtatgggcaagtttttttggagaggggtggggagggttctgggaagaataaagggtttgggatgaaggaattgcccccgagtgagcagttatatggggaggagggaatggtggggtcaggagctcacgaacattgctcctcagggcgccggccacatggttcccaccgacaagcccctcgctgccttcaccatgttctcccgcttcctgaacaagcagccatactgatgaccacagcaaccagctccacggcctgatgcagcccctcccagcctctcccgctaggagagtcctcttctaagcaaagtgcccctgcaggccgggttctgccgccaggactgcccccttcccagagccctgtacatcccagactgggcccagggtctcccatagacagcctgggggcaagttagcactttattcccgcagcagttcctgaatggggtggcctggccccttctctgcttaaagaatgccctttatgatgcactgattccatcccaggaacccaacagagctcaggacagcccacagggaggtggtggacggactgtaattgatagattgattatggaattaaattgggtacagcttcaaatcccgtcttctctgtggcactgggggttagagggggcactacaggctatgaatgtgggaaaagaggggctgagaggggttggggtcctgaatgacagctgccagcttggggattgagggctcagacagctgctgtggacggtgtgggggcagtggacgccctgacatcagcaggccggttcttctcaatcacctctcgcagccctttggcaaagtggagatcagccccgatggtgaggaatccctgtgttggggagaggggagcctcatttattcattcagttattgaggccagagtttagagatcaagagacagagtgtttgtctttcaggaactcaatctaatggataattccatgtcaaggtgttaaaatgaggctgtaggagtgtagactatgggtgtcaaggagggcttcttggaggaggtgacctctgagctaagacctgaacaattagtaggtattgggatgggagaagagtgctccaagaagtcacagtgtgtgcaacggcttttaggagtctaagattaaaatgggaggggcgactggtaatgggggagctggggtcaggtaatggagggcactggggagctatagagagaggggaaggccctccctccttccccatcctgcccccactcaccgcatggttcgtcaccacctcatgcacaaagttgatgccctcaggtagtgggatctgcaccccacgccaggtccgctctgtgggtgggagcaccccgctcagtctgggcccgcccagttcacccctcctttcttcctccatcctcacaccccagccttaccattgagcatgggcatcaccccaatctgcagcatggtcttcagaggggcctgtaatgggatcagctgggaggggcgagggcggaaacagggcagtgagtcagggttgggtttgcctttagctgcccgcaggtgagcagttatatgaggagggggggatggtgagggtcaggatctcacgaacccagcccagcccacccacccttccccactcacagccagcgactccagtgcagaatggttggaatagattcggaacctgcgggaaagaaaggagccctgtgggcaggaagcctggaagctccccttcctcaggccacccaggcctacctgccagaggtgtctgagttgcaggctcagatgcccacctaggcacctttccaagtgctacaactttccaggtatcctcggggcagtcattgctgccacttgggtctccttttctccaagactgctactttttatttattgagcacctcttttttttttttttttttttttttttttgagacagagtctcgctgtgtcgcccacgctggagtgcagtggcgcgatctcggctcactgctccgtctcccgggttcacgccattctcctggctcagcctcccgagtaactgggactataggtgcccgccaccaagcccagctaattttttgtgtttttagtagagacggggtttcaccgtgttagccaggatggtctcggatttcctgaccttgtgatccgcccgtctcggcctcccaaagtgctgggattacaggcgtgagccaccacgcccggcctttattgagcacttctaatgtgccagacttctgctggtagctttgcaggtgttatttattttatgtaacaaaacttcacattgcttagttcctgtcagacactaagcatatttattttctttttttatttttatttatttttgagacagcgtctcactgtgttgcccaggctggagggcagtggtgtaattttactcactgtggctttgacctccagggctcaagtcagcctcccacctcaggcttccaagtagctgggaccacaggcgtgcatcactatgaccaactaacttttaaatttttttgtagagacaggatctcactttgtagctcaggctggtatcgaactcctggcctcaagcgatctacccgccttggtctcccaaagtgttgagattacaggtgtgagccactgcacccagccaacgtgtttaaaaagttaatattagtaaactgttttaaaatacagtaccaactggtttagtcctcaaaacaagcccaaggagtgggcactattaggatttgcactaatttatagatgaggaaaatgaggccctgcaaggttaagtaatttgcctgaagtcacacagctggaaagtgtcagaagctgcctctagaacctagggtcctaacctacattatctcctttaaccttagaacagcactgtccagtcagattttctgtgaaacgttttgtatctgcaccgtctactatggtagtcactagccacatgtggctaatgaaatgtggcttagtgcaactgaaaaactatttaattataattaatttaaatgtaaatagtcacatgtggctagtatctaccatattggatagcacagccctagaaggcagatgctacttttgcctgtattaaacacatggagaaaatgaggcctagaaagacaaaatgggctgggtgcggtggctcacgcctgtaatcctagcactttgggaggctaaggtgggacgatcacttgagcccgagaattggagaccagcctggacaacaaagtgagaccccatctctacaaaaaataaaatagtcaggcatggtagtgcatgcatgcagtcccagttactcgggaggctgaggctggacgatcacttgagcccaggaggtcaaggctgcagtgagctatgattgcaccactgcactccagcttgggcaacagagtgagactctgtctcaaaaataaataaatacaataaaataaggccaagcacagtggctcatacctataatcccagcactttgggaggccggggcaggtgaatcacctgaggtcaggagtttgagaccagcctgaccaatatggtgaaaccctgtctctactaaaaatgcaaaaattagccgggcgtggtggcgcacacctgtaatcccagctactcaggaagctgaggcagaattgcctaaacccgggaggcagaggtggcagtgagtcaagaccacgctattgcactccagcctgggcaacaagagcgaaactccttctcaaaaaaaaaaaaaaaagaataataacatttttaaaaaagataaaatggcctcaaggtcacaaagctgtgttgtgctgaggtttttgtcaaaacccatgttctgatctttgctgtgtgactgtgggcatgttatttaacattgctggacccatttgttcatctctcataatacctgccctgcctgcctctgggacatgtgagaatgcagaggagtcagactttaccaaagcactttggcatgcattaacaaagacagaccccagctctcagtggcttacaggtatcactgtactttaagcgcaacatccctgtggacaggtgtgattgtcctccaatcactgaggtgcagggaagtgcgcctgcctacctgcgcaggtccagctgcgtgcgcagggccttcccccggagagccatcttggcgctgagacgggcgtcctgcaggaacatggggaggaggatgttactgacccagaaggtcagtaacccacagcccatttttccctgacccccagccagcagcccccactctgggacccgtaccatagtcatgctggacagctggacctcaggctggtctggtgggaccagggcaatggtgacgctagcagtgacagagatggtggtgccagagggcttgatggtgcagcgcggtggggccaggacccgcagctccagcttcaatggggagtcaatcactgctgggctctgggggatgagcagcaggggcgggtcaagtccctgccatttcctttggagcccccagggaagaaggggaaggaaggcaggtgcagcttctgtcctctggggactctcatattgcaaatacagagggagctctggcttccaaaactctcacatctgcatctagccttcatgcctttgccacacaaagaaacaggaatgtgttcttctctttctgcttcctaaatacatctcaatattcaggtctatctccaatccagactctttgtggatgtcctttttgcattagtatctcagcccttgccatgtcttctgtttttgatatggagtctcactttgttgcccaggctggagtgcagtggcacaatctcggctcactgcaactctgtctcccaggttcaggcgattctcccgcctcagcctcccaagtagctgagattacaggcacctgccgccatgcccggctaagttttgtatttttaatagaaacggggtttcgccatattggccaggctagtgattcgcccacctcggcctcccaaagtgctgggattacaggcatgagccaccacacccaaaccccttgccatatctttttgctctctctctcctttttttttgagacagggtctctgttgcccaggctggagtgcagtggcatgatcacggctcactgcagcctcaacctcctcagctcaaattatcctgccacatcagcctcctgaacagctgagaccacaggttcatgccatcacgcctggcttatttttgtatttgttttttgttttggtttttgcttttgtgttttcgtagagacggggtttggccatgttgcccatgctggtctcaaactcctgggctcaagtgatctgccggcttcagcctcccacagtgttgggattacaggcgtgagccaccgtgcctggccatatcttctttctctaaactgctatgccttcttctataggcagtgaaggaatactataagatgcaactgcctaatcttcaccaaacatgattctaaacactgtatatgtgttggttcctttaaacctcataataaccatgtgaggccgatattattactgccaattttgttgttgttattttttacaaatttatttttcaggctgagtcgtcatggcagagaattgcttgaacccgggaggttcaattgcagtgagccaagattgcgccactgcactccagcctgggtgacagagtgagactttgtccccccaccgaaaaaaaaagatctgactaaaaatttatttttcaatagagacagtgtctcactgtgttgcccaggctggtctcaaactcctgggctcaagcaattttcctaccttgacctctcaaagttctcagagtataggcgtgagccatcatgcccagccatatccccatttttgagatggggaaattgaggcacagataggttaagtaacttgtagaggttatgtagttactcagtttcagaactaggcttgaagcccaggcagtctgacaatagagaccctgccctgccataaattggatgatgataatgactgaattatttcttttaaaatttgtaattctgctaggtgcggtggctcacacctgtaatcctagcactttgggaggccaaaaatgggtgatcacttgagcccaggagttcaaggacagcctgagcaacataatgaaactctgtctcaacaaaatataaaaattagcggggtgtggtggcacaagcctgtaattccagctactcaagaggctgaagcaggaggatggcttgagccctgggaggcagaggttgcagtgagcctagattgtgccactgcattccaacttgggtgacaaagtgagactcttgtctcaaaaaaaaaaataaataaaatgtgtaactcttactctcctccccaatacacaaataaacaaaagtatatgtgaattattattaaagccctcacacttgcaaagcttgggttctcactaatcctcacagcagctctgcgaaggagatggggcaggaaggagcaggaaggagcagaccgcttcacagacaggaacagccatgacaaggcgagggggattggccacagacaagaggccagggccctgtctgcgtggctgccactgggggccccacctgcacccctccttggtctcactggtgtgcaggtggccctatccctgcccccgccagcactcaccagcaggacaatgctcccaaagtaggtggccctcagcagcatgtccaggtcgtggggcacctgaacaggggaatcaggagtgagggagtgagctctgtcacagaccttctcttgcccatcccacaaacaggccatgacataccttgtcccccaccagcaacagctgcagggcccccgcccggaagtagctctccatggcagagtcgaagaagaactcagagaaggccacatacaccatccgctcttcctcctgcagctggggctccactgcccggttggggaggctccagttcctctcagtcagggggaagaaggccccctggggtggggcattcacagtcagggtcaaggcagactggcctggcacctggactgacagcaggtgtctcccagccccgtgctaggcactgtggggggatggtgggaacccagctgctgttcttggaggattcacaagcacatctcttaaaaggcattggaaggaggacacctgctaccagggggcgagcccgtcagactggaggagggagggtcaggaaaggtttcagggaagaggtgacatctgagtgggccttgaaagctagaggcagtaacaacagctactgtttacatatattgtgcatactcatgcttctttgccaagtactctaagctcttcacatagatcgacttctttaatctgcataacaacgtgtgttttcttactagattatttccatttacatgttaggaaactggccaactgaaaacttatgcttagggccgtgcagctagtcagtggcagagctaggatttgaacttcaggcattctttttctctttgtagagaaggaggtctcactatgatgcccaagctggtctcaaactcctgggctcaagcgatcctctcgcctgggcctcccaaagtattgggattacaggcatgagccactgcacccgactgattctagctcccgagtctgcactctgaaactgctatactcctctgggagaccaaaggtagtggctacacactggctatgtggccttgggcaagtgacgtcacctctatgagtaagtctccacattcctaaaattaggatgatgttagtacctgactcacagggttgtgagagaatgaaatgagattatttgtatagaaatttatgtccagctccttcgggggagttggggaaaggccgtgcatgagcaaaggccctgaggtgggaagccagggtccaatttgggaaagagcagctgcaaagaaacaggatgagatataaaaggtggggccaggtaagattaacaggggctcaaatgccagacccaggaggctgaacctaattctgtagtaacagggagccatagcattctcagtaatgggagtggcctcatcagagctgtgctttaagaagtaaaatcttgcaacttagcagagaaagaggtcttgttaggaagtcagaggtcatacaccagcccaagcagctcacccggaagtccatgtccaggttgctggtggaagccacaggatccttcatgagggaatagtcaatgccaacaagctcgtccacagaactgcgcactgcaggaaggggctcaagtcactcacggctgtgtgatgtgggataaggtgcttaacctctccaggctcagaggcccacccataaaatgaggatacatccttcacagggttgtcatgagggtcaaattagttttatgtggaaagcacttagggcctggtgtgtagttaggtgctcattaatgttagttattattattactaccactatagaggtttcaaaaaaataactaaacaagatggcatgggggggccgcgcatggtggctcacacctgtaatcccagcacttagggaggtcaaggcgggcggatcacctgaggtcaggtgttcgagaccagcctggtccaccacggtgaaaccccgtctctactaaaaatacaaaaattagttgggcatggtggtgggcgcctgtaatcccagctactcaggaggctgaggcaggagaatcgcttgatcctgggaggtggaggttgcagggagccaggattgcaccactgcactccagcctgggtgacagagcgagactccatctcaaaaaaaaaaaaaaaaaaaaaagatggcatgaggttcctttcccttggtttctcctacctcctccttcgcttcccatgcctgtgtgttaggtgtgatgggaaaatacctttgccccacagtagacagaggtcatggcttagaaaaagggaattcatggccaggcacagtggctcatgcctataatcccagcactttgggaggccaaggtgggcagatcaggaggtcaggagatcgagaccatcccggccaacatggtgaaaccccgtctctactaaaacacaaaaaactagttgggcatggtggtgcacgcctgtagtcccagctactcgagatgctgaggcaggagaattgcttgaacccgggaggtggagattgcagtgagctgagatcgcgccactggactccagcctggcaacagagtgagactgtaagactccgtgcaaaaaaaaaaaaaaaagaaagaaaaagaaaaagggaattcatgttaattgagcacctattagatgctaggtgatgaagacaaatgggatgccagtgatcagcatgcacatattgaggaccttgacaactattctctcagataatcctcacagcaaccccaggaggaggcactgccagccaagtgaggaaacaagcactttgcccagacagaaatgagcacttcacccaaaatcgcacaacaagtcagctccaggggccacatttgaacccaggactgttcaacagcagggctcggaaggggcctgctctgaggtgctgcatgacagctgcacacccagactcacccgccaccaactcaccaggcacggtgtccaggagggagttgagcaggaccgtccctgcgtggtagaggacagggcagatctgcgaggtgggagccagagtcagggccttctcaaagtgagagcatgcccacccttgccaccctgcgacctgtcgctgcccacacctgctggttgaggaggaagcgcatccctgaggtgatgaacgtggagagaaaatcatacaccttcctgtgaggagaggagaggccggatgagcccagaacctgcctccaccccagtccaggtccaggagaaatcagtgactagggaaatagtggcagtaggagtcctcagcttcagcctgaataacagctcctccacgtaggttttccaagaaccaggcccaaattccctctccagtctaattctcaagacctcctgacctactctctggtcccatcagtcaaatgaatccacccacattgcctcaaacccactctgagcatccccacatccatcggcttactgatgccctcccttccgccctctgcattcctactctgtattttcccatctgagctcagatgcttcctcttccaggcagtcttcccagattcccctcctctgaatccccaaagcattttcttagtccttctctccaggccctgatatcaaatgttttttgctccagataggctctgagctccttcctgcatcctcagggactggcatacactttgtttgatgaataaataatactgacagtgtaccaacaccaggttataatccatcatcttctctcccccatcctcttccagaacaagaacaatatccccttctcagcagcaaaaataaaaaaataggccgggcacagttgctcaggcctgtaatcccagcactttggtaggccgaggcggacagaccacctgagatcaggagtttgagaccagcgtggccaatatggcgaaaccctgtctctactaaaaatacaaaaaaagtagttgggcatggtggtgcatgcctgtagtcccagctacttgggaggctgaggcaggagaatcgtttgaacccaggaggtggaggttgcagtaaaccgagatggcgccactgcactccaggctgggtgacacagtgagactccctctcaaaaaaaaaattattatttttgttattattatttagagataccaattattgagaatccagtacatggccaaatgtgcatatcagatagtcctcacagttactcttatctaagtggccagcacttaaatatacatttatcatatgccaggtgctgttctaaatttttttttttttttttttttgagatggaatcttgctctgtcaccaggctggagtgcagtggcacgatctcagctcactgcaacctccgcctcccgggttcaagcgattctcctgcctcagcctcccacgtagctgggactacaggcacgtgccaccacgcccagctaatttttgtatttttagtagagatggggtttcaccatgttggccaggatgatctcgatctgttaaccttgtgatccgcccgcccagacctcccaaattgctgggatttcaggcatgagccaccacagccagccttgttctaaatattttttacatataccaacacaaataatcctgacaacgatcttataaaataggatcttataaaatgaggatattgaggcaccaagcttcagtgacttggccacgttcacacagccaggaagtgacagagctgagctttggacccagttggtctgattcccaggcctatgcactttgcattgcgctaggcagatgagctgtggggctcgaaaagggtgagctggggttggggctggggcttacttgaaggttcccccgaaggccgcgtgcattctggagacagaggcctggcaggagacattggacactttcatccgtccagcgggatcccgggagagctccagaccagtgcggatggacacaccctcagctgaggcgttgatgtagcccccatcatagctgccaggggggttaatattcactccaggtaggagctcaattgagtcttcagtgcccccatgcatcaccatacctcttaataaggtttcacctctttccacacatcctaccaaaccttcctatcaactcgtatgaaatgcatatgcctgtttctgttacacagatgaagaaacggaaactcaggaaggctaagggggctgcccacagccccacagcacctccagccctcctgacccactctccactcccctgagggtgctgggtccttacaagaaccagtagagcagctgtctccggaagcgcagccccaaggaggcattggtgatttgaagcatcagctcctgctgtggctggaaatcgagctcggaagatgtcagttgcagctctgtgaccttcaccctacaggaggcctcagggtcagatccagggccaagaagagggaacttcccccaacgacaggaaatttgtctgctcccctttcaagtccaggcctggggaagcgggagtgggtggaatgaattcttccattgtccctcaagtgcccaacttagacttgggtggctcaaagttgaacttgggtggctgagagaggaggtcttcctgatccaggtgttaaaaatgagcttcaccccatcgcttaaaagtcttgtttgtttgtttgccaggtgcggtggtggctcatgcctgtaatcccagcactttaggaggccgaggagggcggatcacttgaggtcaggagttcgagaccagtctggccaacatagtgaaacccgtctctaccaaaaatacaaaacttagcagaccgtggtggcacgcgcctgtagtcctagctactcgggaggctgaggcaggaaaatcgcttgaactcgggatgcggaggttgcagtgagccaagatcgcgccactgcactctagcctgggcaacagaacaagactccctctcagaaaaaaaaaaaaaaaaagtcttgtttgcttgcaccccctcccctcccacaccctggggttgctacacccggtcttttaatagagtccgttcactttgcctccatcacctaagctccgtctcacatctcaattccttattccccctccctcatcctaaaccatacttagagccttcagtttctccacccctccgattaactccaccccgtgcccgagactccactctcatctattgggaagttccttgactccacctttctgttgttcttcgaccacgcctcacatccactggtcctgcttccttcttggccccctctacattttcaaggccacgcccatctgcctggtcccgcctatgatgactggcttggcctttatcttttcggccccatccggtttcttaagtcttgcctcatcgatttggccacgccccatcccactcagcctccagtctcccgagaccctgagatttctcgggccccgcctccaccgccgaggccccgccccggatcgcgaggccccgccccccacttactcagagatgttgtagtagaagtggccttctttgccccgcaggtccggaatggtgatagtctccagctcttgctccagaaagcgcagcccctcctgcttcactgaagcagcagagaaacccttacttagctcccgtgcccactgttggggcgaccccaaccccgtccgctcccgtccgtccctgtctgcccctgcgccttacccagctccagcgccttggaggtgacgcggatcttgcagcctgggaactctgcatgtgcgcctgccagcagcgctaggaagagggccccgaagagggccatggcgagcgggcctgggggtggggtggggtcgcaggagttatctgagccgcttaaacccattccttggacgtccaaccataagtgggaactagcctggatcgttaccctccagataactcttcggggaacttggaaccaataatcttgcctccatatggcagatgtggaaactgaggctcagagaggcgatgcgacttgcgttctggctcccagaggatttgggacacgggggaggggacgttcccagttccctcgtgctaccgccgcgtgatgagtttggacctccaggggaccagcccccacacccccaacaacctcccctttcctttagcggtgggcccatgcaggcttgcacgttgccacggcaacgactgcacgcgcattcttggagggtggcttgcggtctcataggcctcgcgcccggggaggagaggaggtggccgaccagaccgtgggctcccgggtctcccggctccctcaggtcctaaatctctcccattagagattctgcctggagcccccatgttagcgttctccttcatcggctctcctccccacgccggcttcagtgcaccacgcggctcggcgagggactgggaacgggatagggacgcgccccaactcactcagcggtggagctggggggcggcgcggtcacgtgggatggcgggcagctcaggggatccgggcgacggggtctggcgggcagggttgttccagccgcctttataaagccggcctccccgacccctcctcctctctgcagctctcccctcctcccttgggggctgggaggggacggggcgggacgctggcagccgggagagtggaaaaggctgcacagagccccgtgacaagcccggccgctgtctggacaagtgggagacccaagcccagggagagggaaggaaatgcaggagccggcccactcagccccaacaatcccactttgctgggaccttggttcaaattacaattatccatgtcttcctgcatgatcttgggcaagtcacttcacttgggtcactgaccctcagtttcttccttcagcgaaatgtgcacgatgataggaactacctcttgggcctttattacaaccaggtccaggcacaaagtcaaggaatattttttctttccctgccacccacaatcatctcgggacctccttgcctggctttgctatgggcccccctacctgtctctgtgtcaccacctggggaccttaaggtcccagagacctttcccacttgggaaagcaagactagacaagtgctgtcagcccaggaacataccacaccggctgaaatcagaaggaggtctgccatttatcgtggctggtggattgttttttctattttttttatttttattttttgagacggagtctcgctctgtcccccaggctggagtgcagtggcgcgatctcggctccctgcaagccccgcctcccgggttcacgccattctcctgcctcagcctccccagcagctggggctacaggcgcacgctgccacgcccggctaattttttttgtatttttagtagagacggggtttcaccgtgttagccaggatggtctcgatctcctgaccttgtgatccgcccgcctcggcctcccaaagtgctgggattaaaggcatgagccaccgcgcccggtccactggtggattttttaatgaacccttggagcaaggtgctctgaacagcatccccgcccccacccccacccccacctccatctactgcttacagggttcccggaccctaggacagggcacagagtgggtgcttgccacctttttgttgccaaatggacgaaagaaaggggaagcaataatcatgtctgctgagcatgtatttagcaccaaacactcatctaggaaggatgactaactcatcctgatttgcctaggactttccccattgtgtcttttttttctgatataatccacagattcacaaaaatagttccatttccttttttatttaattaattaattaatttttttgagacacagtcgtgctctgtcaccaggctgcagtgcggtggtgtgatcttggctcactgcaacctctgcctcctgggttcaagtgattctcctgcctcagcctcccaagtagctgggactacagccatgtgccaccacacctggctaatttttgtatttttagtggagacagggttttgccattttggccaggctggtcttgaactcctgccctcaagtgatc

SEQ ID NO: 392 - DNA, 5032 bp, Homo sapiens
gctgagcgggttggcatctggggcagcgggctcgctccaggccgtcgggggccgctcgccagcgtcgcccgctgtgttgggagcgcgggccgtgggcgtcgctcggccttgtccgcggcgtccccgctgccggccacggcgctcagcgcttgtgctctgtgttgcaggtctaccccgagccccggagcgagagcgagtgcctgagcaacatccgcgagttcttgcgcggctgcggggcttccctgcggctggagacgtttgatgcaaatgatttgtatcaggggcagaattttaacaaggtcctcagttccttagtgactctaaataaagtaacagcagacatcgggctggggagtgactccgtgtgtgcccggccctcgtctcaccgcataaagtcttttgactcccttggatcacagtctttgcacactcggacttcaaaactgttccagggccagtatcggagtttggacatgaccgacaatagcaacaatcaactggtagtaagagcaaagtttaacttccagcagaccaatgaggacgagctttccttctcaaaaggagacgtcatccatgtcacccgtgtggaagagggaggctggtgggagggcacactcaacggccggaccggctggttccccagcaactacgtgcgcgaggtcaaggccagcgagaagcctgtgtctcccaaatcaggaacactgaagagccctcccaaaggatttgatacgactgccataaacaaaagctattacaatgtggtgctacagaatattttagaaacagaaaatgaatattctaaagaacttcagactgtgctttcaacgtacctacggccattgcagaccagtgagaagttaagttcagcaaacatttcatatttaatgggaaatctagaagaaatatgttctttccagcaaatgctcgtacagtctttagaagaatgcaccaagttgcccgaagctcagcagagagtcggaggctgctttttaaacctgatgccacagatgaaaaccctgtacctcacgtattgtgccaatcacccttctgcagtgaatgtcctcacggaacacagtgaggagttgggggagttcatggagaccaaaggtgccagcagccctgggattctcgtgctgaccacgggcctgagcaaacccttcatgcgcctggataaataccctacgctgctcaaagagctcgagagacacatggaggattatcatacagatagacaagatattcaaaaatccatggctgccttcaaaaacctttcagcccaatgtcaagaagtccggaagaggaaagagcttgagctgcagatcctgacggaagccatccggaactgggagggcgatgacattaaaactctgggcaacgtcacttacatgtcccaggtcctgattcagtgtgccggaagtgaggaaaagaatgaaagatatcttctactcttcccaaatgttttgctaatgttgtctgccagtcctaggatgagtggctttatctatcagggaaagcttccaacgacaggaatgacaatcacaaagcttgaggacagtgaaaatcatagaaatgcatttgaaatatcagggagcatgattgagcggatattagtgtcgtgcaacaaccagcaggatctgcaggaatgggtggagcacctacagaagcaaacgaaggtcacgtctgtgggaaaccccaccataaagcctcattcagtgccatctcataccctcccctcccacccggtcactccgtccagcaagcacgcagacagcaagcccgcgccgctgacgcccgcctaccacacgctgccccacccctcccaccacggcaccccgcacaccaccatcaactggggacccctggagcctccgaaaacacccaagccctggagcctgagctgcctgcggcccgcgcctcccctccggccctcagctgctctctgctacaaggaggatcttagtaagagccctaagaccatgaaaaagctgctgcccaagcgcaaacctgaacggaagccttcagatgaggagttcgcgtcccggaaaagcacagctgctttggaagaagatgctcagattctgaaagtcattgaagcttactgcaccagcgccaaaacaaggcaaacactcaattcaagttcacgcaaagaatctgctccacaagttttgcttccagaagaagagaaaattatagtggaagaaactaaaagtaatggtcagacagtgatagaagaaaagagtcttgtggataccgtatatgcattaaaggatgaagttcaagaattaagacaggacaacaaaaagatgaagaaatctctagaggaagaacagagagcccgcaaagacctggagaagctggtgaggaaagtcctgaagaacatgaatgatcctgcctgggatgagaccaatctataagggacgtcctcagttctttctgttgaagaccagttctgaggtgaagctgggcacccctgacccaagtcggggtgcactcaggaccacagggcagggctgggtggggcgccaccttgctctctgtatatagaaaagctggagcttattctgcgaatggagacgatcaaaccatgactgatgaatccagacaggagggattgactctgaggacctgagctacatcaatccactctgtgaacatctcagttacctcattctgcaataagttcagtgactgactaaaagtcttgtttttccagactttgaattgaatatataaatattatatatacatgtttcttgtaaatatcccattttgaatgcatacctgtggtggttctgtccgggctaatccccatgctagaatgtcctttccagctacgtgaataagaagtcccatgcccgcacccaccggaagcagaagcctggtggatgcctggttcgttccgcagcaccagggcctccaccgtgctgtggcagcaccccccatgtcggtatttctaaataaccttatttatacctgcagagatacacttcagtcccattcagaagtcttctcttaaagcagcattacagtcccagacctgcgggtttctgagggcagcttgctggctgacagactcagtcttgacctcaaggaaggcccatacggcactgccgcatccacctagaggtgtttgctcttgtccgctgtctgagtactgtgattctcagatgagtttgctgcgttttgggaggacacagacggttctgtataggctagttcagtaacaacaaaatacactgttttgtcttccctcaaagagagatcttactagaacctgtaaatagaatgtattatttattataagtcactgcagctgatgaaaacagatggaggccatgctgcaggctgatactgatgggtggagttttgtcatcaggccagcctcatcccgaggtctcctccaccattggccgtagccagcaggcttcagtgctcaccgaaagtaaaatcccctccttcagcaagaataaagcaatatacaccttaggttccactaagtaacataggcataagcagggaacgtttcccccactgtgttccagtgcagaggagacgaagcctgtcctcaccgcggctcgctgggcccaggctggctctggaaagcctgtgcggtcctgggcaggaagcccggcccgtggagcaggttttcgttctgcttcagcaataaataagggtgaccacagggactttgcttttggtttcctttcctgtgaaaaggttggttttaaagtgagatacacttttccgtagaacaagtgttctatctttaaaaacccaaattgcagcaccgtggattactggtctcagaacaactcattgcgcatcagatttgactctctgattttctgtctattggccaaattgccctttaactgcacctgaatcctttgtgtactgatgcctttgagctgggcaccttgggagagtgttgtgttgctgtttacggttcttccttgcccttgctaattacagtctctggtgcccagcaagcccctttggcttccttccgtgactggtcacgttgtctgcctgggctcagcgtggacctgccccatgctgcagaacctggcctcacctggacttttcactagaattgccagcttcctcaacttagcagatcattcactcatgcgggcacaagcaaagatcaacactttcttttttggtaagcttgagttttacaagttattttttggtgatgcgtaagacattgcagtgggaaaccattcaacttgagtttattggagtttgctgttgtagcaggttttaactcaggaacaactcttgtctgatctctccgcccctctgccgggaggcgacattaactgtcctctcggagccggtagcgttgctgtccgagtccccaggacggatctcctgcagacctgccttaatgctcagatcgaagtatttcacaagaatacttgtgtttttaacagcccttcccctggacggtgcggccatgagggcctcatgttacggcattgccttttctttctgtggatccagtatcttcctcggctttttagggagcaggaaaaatgcgtctgagagcaactctttttaaaaacctgccctgttgtatataactgtgtctgtttcaccgtgtgacctcccaagggggtgggaacttgatataaacgtttaaaggggccacgatttgcccgagggttactcctttgctctcaccttgtatggatgaggagatgaagccatttcttatcctgtagatgtgaagcactttcagttttcagcgatgttggaatgtagcatcagaagctcgttccttcacactcagtggcgtctgtgcttgtccacatgcactgggcgtctgggaccttgaatgcctgccctggttgtgtggactccttaatgccaatcatttcttcacttctctgggacacccagggcgcctgttgacaagtgtggagaaactcctaatttaaatgtcacagacaatgtcctagtgttgactactacaatgttgatgctacactgttgtaattattaaactgattatttttcttatgtc

SEQ ID NO: 393 - DNA, 2197 bp, Homo sapiens
tttataagcagtttacaactacttggcatcactagctcagaagctcaaaatgtatatacaaagaaatgattagaatttatcttaactgaaagcactagtttaaacagcctagagtcttgtagaaattgttatccaaaacatgcagaggcagcaagagttgcccaaaaccacattatctatactttatatgcttttctgttaaagattgaagcaatgtgaagtggatggaaatatttgcttaaaagaacaaaatgaattaacacagcatagatgactaataaaaaccttgggtttatgccatacacttcaaactcaaggcaaagtccagtagtggctcatgttctgggtttttagaaagcaaatgaaaatatttggaaagatcaatatatttcaacagaagagccataaatgccctgaaagcagaaagttgacacaattttaaatagaattcagttgaattaaacaggaccttgcctcaagaaataatctaccaacaattaacttgttttaaagcaaagttaggaagtgagcatgttcaaattattaaataaaaaagtaagctgtgtatttcattcatagaaatagaggctggcctacttcggatgattctcagcatgtgattacagatgtgggcttatacatcctagggagttaaggcgtactctggcttggatagagtagagctctttgaaactcttctctcacccagctagtttatatagactagagaactagaatgtagcagcatactctgtcttagaagcccttttatatggagctggtctggaaggtttgaaaacataacaaatgtgttggtgtctcccaatgtattgctagattcttacccaagagcattatcctggttagggtttggtttggttttgttttgtttttaatgatgaaccacaaactaacactagatgttagttctttcatcaagtgaggagagtagaagaaaagtccagaactctgaaacaccttttcaaaagtttttcaagccatgatgtttcgaagttaaatgctctgttatgtaagcaatataatcagtttttattaatgtaacattccttagtgttttggggtatcacacaaaaaagaatatccatatctggaagcaacagcttttaaataagagcattgtggtggtggtggtgatagtggtttttttttttttttttgagttggagtctcgcacagttgcccaggttggagtgcagtggcacgatctcagctcgcttcaacctctgctcccaggttcaagcaattcttctgcctcagcctcctgagtagctgggattataggcacctgctaccatgcctggctgatttttattattttagtagagacaggtttcaccatgttggccaggctggtcttgaactcttaacctcaggtgaatcacccacctcggcctcccaaagtgctggaattacaggcatgaaccaccatggccagccaaataagagcatttttaatgtaaaattatgcatgaaatgtacattcaattttgtctttgtttactaggatccatgttctcacaagctatgaagaaatggtgcaaggaaatactgatgaggccgatctgtcactgttgtttccaggagagaatgggagacaatcctagacttccaccataatgcagttacctgtaggcataattgatgcacatgatgttcacacagtgagagtcttaaagatacaaaatggtattgtttacattactagaaaattattagttttccaatggcaataacccatttatgagagtgttttagcctactggaatagacagggaccacatcctctgggaagcagataaggacatagaactgatacttgatgcacactcgtagtggtaactcatccctaatcagcattgtaaagcaggtgccagaggtggtttgctttgtccttccaaagcaggtgagtcagccccaccgagagccaggcagctttgagtggcagcgtggtgctagcagcttcagcggaacagggtgagagttaattatgcagtcttcttgacagcggcattaatttggaaggaaactgacaagtcatgggtcaagtttcagtgacttcctccttcctctgatggcagtatatagttttcacattttaattcctcctcctgagatgcactatacttaaaaccattctctcccctgctaacagaagggtgtgaatctggtttacttt

SEQ ID NO: 394 - DNA, 894 bp, Homo sapiens
ggaagggacagtcggccgcagaccgcgctgggttgccgctgccgctgccgccatcgtgccagcccctcgggtctccgtgaggccgggtgacgctccagaatgggagacaagccaatttgggagcagattggatccagcttcattcaacattactaccagttatttgataatgatagaacccaactaggcgcaatttacattgacgcgtcatgccttacgtgggaaggacaacagttccaggggaaagctgccattgtggagaagttgtctagccttccgttccagaaaattcagcacagcatcaccgcgcaggaccatcagcccactccagatagctgcatcatcagcatggttgtgggccagcttaaggcggatgaagaccccatcatggggttccaccagatgttcctattaaagaacatcaacgatgcttgggtttgcaccaatgacatgttcaggctcgccctgcacaactttggctgacctcctctcagctaggcactcacgctgtttcctcctccctcctcttcccaatactattcccactcctccagatgctccaaatatcatgcacaaatgagcagggccgcggtgggagtgggcgcagtgcgctgctgccactgaggtgttgtgcatgatgtttggatgctagactagttgcatctgacgggagaagtttgtgttgtaccagcgcatgccttggaaagacttaagtaatgcaaaaggttgtccttttttttttttttttttttttaatctactgacaagttgctctagtaacccaaagaagtgaaggagaaagcagctgcctcaccgcccagacattgatttgttcagatgtttcaatgcctcatgatacaataaaaccacaaaaattttcttaacaaaaaaaaa

SEQ ID NO: 395 - DNA, 1512 bp, Homo sapiens
cggccgcgttctgtggttttccgctattcccccagacccgcaccttctcggcctctttgcggagaatcgtgaccaagatgtggaacagtggattcgaaagctatggcagctcctcatacgggggagccggcggctacacgcagtccccggggggctttggatcgcccgcaccttctcaagccgaaaagaaatcaagagcccgagcccagcacattgtgccctgtactatatctcagctgctttctgccactttggttgatgaagtgttcagaattgggaatgttgagatttcacaggtcactattgtggggatcatcagacatgcagagaaggctccaaccaacattgtttacaaaatagatgacatgacagctgcacccatggacgttcgccagtgggttgacacagatgacaccagcagtgaaaacactgtggttcctccagaaacatatgtgaaagtggcaggccacctgagatcttttcagaacaaaaagagcctggtagcctttaagatcatgcccctggaggatatgaatgagttcaccacacatattctggaagtgatcaatgcacacatggtactaagcaaagccaacagccagccctcagcagggagagcacctatcagcaatccaggaatgagtgaagcagggaactttggtgggaatagcttcatgccagcaaatggcctcactgtggcccaaaaccaggtgttgaatttgattaaggcttgtccaagacctgaagggttgaactttcaggatctcaagaaccagctgaaacacatgtctgtatcctcaatcaagcaagctgtggattttctgagcaatgaggggcacatctattctactgtggatgatgaccattttaaatccacagatgcagaataactggatctaactgggtacctgagatattttacagctggacctagtttcacaatctgttgtctccagctctgcatatgtctggccagggggcttctaggaagtaggtttcatctatcaaatgtctcctctgacttccttttgaaacttactgctcttctgttttattttgttttgtttgaagctcagagggagatgggcaattgacagggatgcaatccagggtgggatttcttgaggaagttacaaataagcttgttacaacatcaagatagatggaattggaaggatgctaccaggagagtacttacatagtgctcaggagtttctcttcttaaaatgtttactgctgaaagatgagcaggaccagggcgttataggcagagccctagccagaaacctgctggcctctgcctgttttcatttcccactttggttgtgtggcattactttcagaattgcactttcctgcttgtcatgactttttgacacacttgccatgacgtgtgtttctgtgaacatgaagttctgcggtagtgcctccaggggcagaggaaaagaagaagtgttactgcattttgtacaaaataaatacagtcatatgtttaataaaacagttctaccg

SEQ ID NO: 396 - DNA, 3702 bp, Homo sapiens
aattagagtagaagttgtcggggtccgctcttaggacgcagccgcctcatgggggtccaggggctctggaagctgctggagtgctccgggcggcaggtcagccccgaagcgctggaagggaagatcctggctgttgatattagcatttggttaaaccaagcacttaaaggagtccgggatcgccacgggaactcaatagaaaatcctcatcttctcactttgtttcatcggctctgcaaactcttattttttcgaattcgtcctatttttgtgtttgatggggatgctccactattgaagaaacagactttggtgaagagaaggcagagaaaggacttagcgtccagtgactccaggaaaacgacagagaagcttctgaaaacatttttgaaaagacaagccatcaaaactgccttcagaagcaaaagagatgaagcactacccagtcttacccaagttcgaagagaaaacgacctctatgttttgcctcctttacaagaggaagaaaaacacagttcagaagaggaagatgaaaaagaatggcaagaaagaatgaatcaaaaacaagcattacaggaagagttctttcataatcctcaagcgatagatattgagtctgaggacttcagcagcctgccccctgaagtaaagcatgaaatcttgactgatatgaaagagttcaccaagcgcagaagaacattatttgaagcaatgccagaggagtctgatgacttttcacagtaccaactcaaaggcttgcttaaaaagaactatctgaaccagcatatagaacatgtccaaaaggaagtgaatcagcaacattcaggacacatccgaaggcagtatgaagatgaagggggctttctgaaggaggtagagtcaaggagagtggtctctgaagacacttcacattacatcttgataaaaggtattcaagctaagacagttgcagaagtggattcagagtctcttccttcttccagcaaaatgcacggcatgtcttttgacgtgaagtcatctccatgtgaaaaactgaagacagagaaagagcctgatgctacccctccttctccaagaactttactagctatgcaagctgccctgctgggaagtagctcagaagaggagctggagagtgaaaatcgaaggcaggcccgtgggaggaacgcacctgctgctgtagacgaaggctccatatcaccccggactctttcagccattaagagagctcttgacgatgacgaagatgtaaaagtgtgtgctggggatgatgtgcagacgggagggccaggagcagaagaaatgcgtataaacagctccaccgagaacagtgatgaaggacttaaagtgagagatggaaaaggaataccgtttactgcaacacttgcgtcatctagtgtgaactctgcagaggagcacgtagccagcactaatgaggggagagagcccacagactcagttccaaaagaacaaatgtcacttgttcacgtggggactgaagcctttccgataagtgatgagtctatgattaaggacagaaaagatcggctgcctctggagagtgcagtggttagacatagtgacgcacctgggctcccgaatggaagggaactgacaccggcatctccaacttgtacaaattctgtgtcaaagaatgaaacacatgctgaagtgcttgagcagcagaacgaactttgcccatatgagagtaaattcgattcttctcttctttcaagtgatgatgaaacaaaatgtaaaccgaattctgcttctgaagtcattggccctgtcagtttgcaagaaacaagtagcatagtaagtgtcccttcagaggcagtagataatgtggaaaatgtggtgtcatttaatgctaaagagcatgagaattttctggaaaccatccaagaacagcagaccactgaatctgcaggccaggatttaatttccattccaaaggccgtggaaccaatggaaattgactcggaagaaagtgaatctgatggaagtttcattgaagtgcaaagtgtgattagtgatgaggaacttcaagcagaattccctgaaacttccaaacctccctcagaacaaggcgaagaggaactggtaggaactagggagggagaagcccctgctgagtccgagagcctcctgagggacaactctgagagggacgacgtggatggtgagccacaggaagctgagaaagatgcggaagattcgctccatgaatggcaagatattaatttggaggagttggaaactctggagagcaacctcttagcacagcagaattcactgaaagctcaaaaacagcagcaagaacggatcgctgctactgtcaccggacagatgttcctggaaagccaggaactcctgcgcctgttcggcattccctacatccaggctcccatggaagcagaggcgcagtgcgccatcctggacctgactgatcagacttccggaaccatcactgatgacagtgatatctggctgtttggagcgcggcatgtctatagaaacttttttaataaaaataagtttgtagaatattatcaatatgtggactttcacaatcaattgggattggaccggaataagttaataaatttggcttatttgcttggaagtgattataccgaaggaataccaactgtgggttgtgtaaccgccatggaaattctcaatgaattccctgggcatggcctggaacctctcctaaaattctcagaatggtggcatgaagctcaaaaaaatccaaagataagacctaatcctcatgacaccaaagtgaaaaaaaaattacggacattgcaactcacccctggctttcctaacccagctgttgccgaggcctacctcaaacccgtggtggatgactcgaagggatcctttctgtgggggaaacctgatctcgacaaaattagagaattttgtcagcggtatttcggctggaacagaacgaagacagatgaatctctgtttcctgtattaaagcaactcgatgcccagcagacacagctccgaattgattccttctttagattagcacaacaggagaaagaagatgctaaacgtattaagagccagagactaaacagagctgtgacatgtatgctaaggaaagagaaagaagcagcagccagcgaaatagaagcagtttctgttgccatggagaaagaatttgagctacttgataaggcaaaacgaaaaacccagaagagaggcataacaaataccttagaagagtcatcaagcctgaaaagaaagaggctttcagattctaaacgaaagaatacatgcggtggatttttgggggagacctgcctctcagaatcatctgatggatcttcaagtgaagatgctgaaagttcatctttaatgaatgtacaaaggagaacagctgcgaaagagccaaaaaccagtgcttcagattcgcagaactcagtgaaggaagctcccgtgaagaatggaggtgcgaccaccagcagctctagtgatagtgatgacgatggagggaaagagaagatggtcctcgtgaccgccagatctgtgtttgggaagaaaagaaggaaactaagacgtgcgaggggaagaaaaaggaaaacctaattaaaaaatatgtatcctctataattagttatgacagccatttgtaatgaatttgtcgcaaagacgtaataaaattaactggtagcacggtca

SEQ ID NO: 397 - DNA, 3457 bp, Homo sapiens
cctccacctcccgggttcaagcgattctcctgcctcagcctcccgagtagctgagactacaggcacgcgccaccacgcccagctaatttttgtatctttagtagagacgggctttcaccatgttggccaggatggtctcgatgtcttaacgtcgtgatccggccgcctcggcctcccaagtgctgggattacaggcgttagccactgcgcccggccccagccaggcagttttaatcgagcgctcacaaccactgagacgcagcgaagcacccaccataatatcccaggaggccgaccgccggttcagactttttcttttctttaatccccgtccaagggatccgccctcaccccccaccccagccaccccaattccctattccctccccttggacggcgccggggaaaacaagctgctcgagctttatttcttcggtgcaaccaactcagaatgaattcctccgcccctgcgtgctcagtgagtcggcaccctagcagtgaactgcatttaaaacctcaggaattgagcgaactctcccagtggctctcctcaccgggatccccttccacgcctcctccccgtgccgcgcctcagtccgcactgctcattggccgcgtgcctgccaatccgatgcacgtcggctagggcaaagaccgcgaaaaagcgcgtacacctggctctgggagcgcgcgcctaacgccagccagcagcaggaggcgcgcgaggcaccacggcctggcggccgagagtcagggaggaacctcatttacataacggccgcccctctgtctcctggcgggggccggagtcccgcccctcgtccaacttgaaatctgttgggtcacgggccagtcactccgacctaggcaagcctgtggtggagctggaagagtttgtgagggcggtcccgggagcggattgggtctgggagttcccagaggcggctataagaaccgggaactgggcgcggggagctgagttgctggtagtgcccgtggtgcttggttcgaggtggccgttagttgactccgcggagttcatctccctggttttcccgtcctaacgtcgctcgcctttcagtcaggatgtctgcccgtggcccggctatcggcatcgacctgggcaccacctattcgtgcgtcggggtcttccaacatggcaaggtggagatcatcgccaacgaccagggcaatcgcaccacccccagctacgtggccttcacggacaccgagcgcctcatcggcgacgccgccaagaaccaggtggccatgaaccccaccaacaccatcttcgacgccaagaggctgattggacggaaattcgaggatgccacagtgcagtcggatatgaaacactggccgttccgggtggtgagcgagggaggcaagcccaaagtgcaagtagagtacaagggggagaccaagaccttcttcccagaggagatatcctccatggtcctcacgaagatgaaggagatcgcggaagcctacctggggggcaaggtgcacagcgcggtcataacggtcccggcctatttcaacgactcgcagcgccaggccaccaaggacgcaggcaccatcacggggctcaatgtgctgcgcatcatcaacgagcccacggcggcggccatcgcctacggcctggacaagaagggctgcgcgggcggcgagaagaacgtgctcatctttgacctgggcggtggcactttcgacgtgtccatcctgaccatcgaggatggcatcttcgaggtgaagtccacggccggcgatacccacctgggcggtgaggacttcgacaaccgcatggtgagccacctggcggaggagttcaagcgcaagcacaagaaggacattgggcccaacaagcgcgccgtgaggcggctgcgcaccgcttgcgagcgcgccaagcgcaccctgagctcgtccacgcaggcgagcatcgagatcgactcgctctacgagggcgtggacttctatacgtccatcacgcgcgcccgcttcgaggagctcaatgccgacctctttcgcgggaccctggagccggtggagaaggcgctgcgcgacgccaagctggacaagggccagatccaggagatcgtgctggtgggcggctccactcgtatccccaagatccagaagctgctgcaggatttcttcaacggcaaggagctgaacaagagcatcaaccccgacgaggcggtggcctatggcgccgcggtgcaggcggccatcctcatcggcgacaaatcagagaatgtgcaggacctgctgctactcgacgtgaccccgttgtcgctgggcatcgagacagctggcggtgtcatgaccccactcatcaagaggaacaccacgatccccaccaagcagacgcagaccttcaccacctactcggacaaccagagcagcgtactggtgcaggtatacgagggcgaacgggccatgaccaaggacaataacctgctgggcaagttcgacctgaccgggattccccctgcgcctcgcggggtcccccaaatcgaggttaccttcgacattgacgccaatggcatccttaacgttaccgccgccgacaagagcaccggtaaggaaaacaaaatcaccatcaccaatgacaaaggtcgtctgagcaaggacgacattgaccggatggtgcaggaggcggagcggtacaaatcggaagatgaggcgaatcgcgaccgagtcgcggccaaaaacgccctggagtcctatacctacaacatcaagcagacggtggaagacgagaaactgaggggcaagattagcgagcaggacaaaaacaagatcctcgacaagtgtcaggaggtgatcaactggctcgaccgaaaccagatggcagagaaagatgagtatgaacacaagcagaaagagctcgaaagagtttgcaaccccatcatcagcaaactttaccaaggtggtcctggcggcggcagcggcggcggcggttcaggagcctccgggggacccaccatcgaagaagtggactaagcttgcactcaagtcagcgtaaacctctttgcctttctctctctctcttttttttttgtttgtttctttgaaatgtccttgtgccaagtacgagatctattgttggaagtctttggtatatgcaaatgaaaggagaggtgcaacaacttagtttaattataaaagttccaaagtttgttttttaaaaacattattcgaggtttctctttaatgcattttgcgtgtttgctgacttgagcatttttgattagttcgtgcatggagatttgtttgagatgagaaaccttaagtttgcacacctgttctgtagaagcttggaaacagtaaaatatataggagcttaaattgtttatttttatgtactactttaaaactaaactgaacattgcagtaatgttaaggacaggtatactttttgcaaacaaatgcataaatgcaaatgtaaagtaaa

SEQ ID NO: 398 - DNA, 4659 bp, Homo sapiens
gaattccgaactgcgggtggactgtgtagtgaccggcgtcccgctgtctcgccccgtggcgggtgagcgagggtgcgtggtgcgcggcggcggcggaacgaacgcggtgcgggcggggcgcccgccgcaagggcccatggcctcctgcgcgagcatcgacatcgaggacgccacgcagcacctgcgggacatcctcaagctggaccggcccgcgggcggccccagtgcagagagcccacggccatccagtgcctacaatggggacctcaatggacttctggtcccagacccgctctgctcaggtgatagtacctcagcaaacaagactggtcttcggaccatgccacccattaacctgcaagagaagcaggtcatctgtctctcaggagatgatagctccacctgcattgggattttggccaaggaggtggagattgtggctagcagtgactctagcatttcaagcaaggcccggggaagcaacaaggtgaaaattcagcctgtcgccaagtatgactgggaacagaagtactactatggcaacctgattgctgtgtctaactccttcttggcctatgccattcgggctgccaacaatggctctgccatggtgcgggtgatcagcgtcagcacttcggagcggaccttgctcaagggcttcacaggcagtgtggctgatctggctttcgcgcacctcaactctccacagctggcctgcctggatgaggcaggcaacctgttcgtgtggcgcttggctctggttaatggcaaaattcaagaagagatcttggtccatattcggcagccagagggcacgccactgaaccactttcgcaggatcatctggtgccccttcatccctgaggagagcgaagactgctgtgaggagagcagcccaacagtggccctgctgcatgaagaccgggctgaggtgtgggacctggacatcgtccgctccagccacagtacctggcctgtggatgttagccagatcaagcagggcttcattgtggtaaaaggtcatagcacgtgcctcagtgaaggagccctctctcctgatgggactgtgctggctactgcgagccacgatggctatgtcaagttctggcagatctacattgaggggcaagatgagccaaggtgtctgcacgagtggaaacctcatgatgggcggcccctctcctgcctcctgttctgtgacaaccataagaaacaagaccctgatgtccctttctggaggttccttattactggtgctgaccagaaccgagagttaaagatgtggtgtacagtatcctggacctgcctgcagactattcgcttctccccagatatcttcagctcagtgagtgtgccccctagcctcaaggtttgcttggacctctcagcagaatacctgattctcagcgatgtgcaacggaaggtcctctatgtgatggagctgctgcaaaaccaggaggagggccacgcctgcttcagctccatctcggagttcctgctcacccaccctgtgctgagctttggtatccaggttgtgagtcgctgccggctacggcacactgaggtgctgcctgccgaagaggaaaatgacagcctgggtgctgatggtacccatggagccggtgccatggagtctgcggccggtgtgctcatcaagctcttttgtgtgcatactaaggcactgcaagatgtgcagatccgcttccagccacagctgaaccctgatgtggtggccccactgcccacccacactgcccacgaggacttcacatttggagagtctcggcccgaactgggctctgagggcctggggtcagccgctcacggctcccagcctgacctccgacgaatcgtggagctgcctgcacctgccgacttcctcagtctgagcagtgagaccaagcccaagttgatgacacctgacgccttcatgacacctagcgcctccttgcagcagatcactgcctctcccagcagcagcagcagcggtagcagcagcagcagcagcagtagcagcagctcccttacagctgtgtctgccatgagcagcacctcagctgtggacccctccttgaccaggccacctgaggagctgaccttgagccccaagctgcagctggatggcagcctgacaatgagcagcagtggcagccttcaggcaagcccgcgtggcctcctgcctggcctgctcccagccccagctgacaaactgactcccaaggggccgggccaggtgcctactgccacctctgcactgtccctggagctgcaggaagtggagcccctggggctaccccaagcctcccctagccgcactcgttcccctgatgtcatctcctcagcttccactgccctgtcccaggacatccctgagattgcatctgaggccctgtcccgtggttttggctcctctgcaccagagggccttgagccagacagtatggcttcagccgcctcggcactgcacctgctgtccccacggccccggccagggcccgagctcggcccccagctcgggcttgatggaggccctggggatggagatcggcataataccccctccctcctggaggcagccttgacccaggaggcctcgactcctgacagtcaggtttggcccacagcacctgacattactcgtgagacctgcagcaccctggcagaaagccccaggaatggccttcaggaaaagcacaagagcctggccttccaccgaccaccatatcacctgctgcagcaacgtgacagccaggatgccagtgctgagcaaagtgaccatgatgatgaggtggccagccttgcctctgcttcaggaggctttggcaccaaagttcctgctccacggctgcctgccaaggactggaagaccaagggatcccctcgaacctcacccaagctcaagaggaaaagcaagaaggatgatggggatgcagccatgggatcccggctcacagagcaccaggtggcagagccccctgaggactggccagcactaatttggcaacagcagagagagctggcagagctgcggcacagccaggaagagctgctgcagcgtctgtgtacccaactcgaaggcctgcagagcacagtcacaggccacgtagaacgtgcccttgagactcggcacgagcaggaacagcggcggctggagcgagcactggctgaggggcagcagcggggagggcactggcaggagcagctgacacaacagttgtcccaagcactgtcgtcagctgtagctgggcggctagagcgcagcatacgggatgagatcaagaagacagtccctccatgtgtctcaaggagtctggagcctatggcaggccaactgagcaactcagtggctaccaagctcacagctgtggagggcagcatgaaagagaacatctccaagctgctcaagtccaagaacttgactgatgccatcgcccgagcagctgcagacacattacaagggccgatgcaggctgcctaccgggaagccttccagagtgtggtgctgccggcctttgagaagagctgccaggccatgttccagcaaatcaatgatagcttccggctggggacacaggaatacttgcagcagctagaaagccacatgaagagccggaacggacgggaacaggaggccagggagcctgtgctagcccagctgcggggcctggtcagcacactgcagagtgccactgagcagatgcagccaccgtggccggcagtgttcgtgctgaggtgcagcaccagctgcatgtggctgtgggcagcctgcaggagtccattttagcacaggtacagcgcatcgttaagggtgaggtgagtgtggcgctcaaggagcagcaggccgccgtcacctccagcatcatgcaggccatgcgctcagctgctggcacacctgtaccctctgcccaccttgactgccaggcccagcaagcccatatcctgcagctgctgcagcagggccacctcaatcaggccttccagcaggcgctgacagctgctgacctgaacctggtgctgtatgtgtgtgaaactgtggacccagcccaggtttttgggcagccaccctgcccgctctcccagcctgtgctcctttccctcatccagcagctggcatctgaccttggcactcgaactgacctcaagctcagctacctggaagaggccgtgatgcacctggaccacagtgaccccatcactcgggaccacatgggctccgttatggcccaggtgcgccaaaagctttttcagttcctgcaggctgagccacacaactcacttggcaaagcagctcggcgtctcagcctcatgctgcatggcctcgtgacccccagcctcccttagctgctaagcctgccttgcccaggggtgggatggcactgaaggccagcagacaggcctaggctggggcagggtcacggctggcctttacctgctcaggccccatctctggggtgtttgggggtcagggagcagggagcactggccgtggtctacagcgtgtggtagtcagaaggtttagctgggcccagggcaggtattgcgcctgcttgggttctgccatgcctggagcatgaccctgagatcgtgacaccacttgagtggaattttccatgttcctttttacctctaatttggatctttttgtttttgaaaaacata

SEQ ID NO: 399 - DNA, 117143 bp, Homo sapiens
acggggtctcgaaaaaaggagaatgggatgagaaggatatatgggtagtgtcattttttaacttgcagatttcatcctagtcttccagttatcgtttcctagcactccatgttcccaagatagtgtcaccaccccaaggactctctctcattttctttgcctgggccctctttctactgaggagtcgtggccttccatcagtagaagccggatgttcttgtgtccgaaattggtgggttcttggtctcactgacttcaagaatgaagttgcggaccctcacggtgagtggtacagttcttaaagatgatgtgtccagagtttgttccttctgatgttcggacgtgttcagagttacctccttctggtggattcgtggtctcgctggcttcaggagtgaagctgcagacctttgcggtgagtgttacagctcttaaggcggcatgtctggagtttgttcgttcctcccgtctggagttgttcattcctcctggtgggttcgtggtctcgctggcttcaggagtgaagctgcagacctctgcggtcggtgttaccagcagataaatgctatgcggacccaaagagtgagcagcagcaagatttattgcaaagagcacaagaacaaagcttccacagcgtggaaggagaccagagcgggttgctgctgctggctcaggcagcctgcatttttttttttttttttttttttttttgagatggagtctccctctgtcacccaggctggaatgcagtggtgcaatctgggctcactgcaagctccgcctcccgggttcacgccattctcctgcctcaacctccccagtagaggggattacaggcacccaccaccgcacccagctaatattttgtctttttagtagagtcggggtttcactgtgttagccaggatggtctcgatctcttgacctcgtgatccacccctctaggcctcccaaattgctgggattacaggtgtgagccactggcacccagcggggcagcctgcttttattcccttatctgaccccacccacatcctgttgattggtccattttacagagagctaattggtccgttttgacagggtgctgattggtgcatttacaatccctgagctagatatacacagagtgctgattggtgcatttacaatcctctagctagacataaaaattctccaagtccccactacatttgctagacacagagcactgattggtgcgtttacaaacctttagctagacacagagtgctgattggtgcatttgcaaaccttgagctagacacagagcactgattggtgcatttacaatcctttagctagacacagaagttctccaagtgcccaccagattagctagatacagagtgctgattggtgcatccccaaaccccaagctagacacagagtgctgactggtgcatataaaatcctcaggctagacataaaagttttccaagtccccatctgactcaggagcccagctggcttcacctagtggatcctgcgcagggctgtgccgggcgcctgcactcctctcagcccttgggcagtcgatgggaccgggcgctgaggagcagggggcggtgcccgtcggggaggctcaggccacgctggagctcacaggggttgggagggggctcgggcatggcgggctgcaggtcctgagccttgccctgtgcagggcggctggggcccggtgagaattcaagcggggtgcaggcgggccggcagtgctgggggacccggcgcaccctctgcagctgctggcccgggtgctaggcccctgactgcccggggccgggggtgcggggcccgctgagcccgcgcccacctggaactcgcgctggctggcgagcgctgcgcgcagccccagttcccacacccgcctctccctccacacttccccgcaagcagagggagccggctctggcttcggccagcccagagaggggcccccacagcgcagtggcgggctgaagggctcctccagcacggccagaatggacgccaaggccgaggaggcgccgagagcgagcgagggctgctagcacgttgtcacctcgcattctgaaccacagactctccaactctccggcgcttttcgcccactcggtccctcagaacacgaagggctctctcatcctgtcactaaaacgattagctgtccggagacacggaaaaagtcgcccctcttctttgcaggattcctcccttgaacttctccaaaccctcttagtgtgacgtgaccccacccctagctaacccaggctgcttccttaccagcttcccgccccctggggaggcggcaatgcaaagaccgtccgctgccagctctgccgctatctctgtggggtgaatctaacatggcggacaaagacagtaactagtcccgtttctccgcgttttcgccaagaagattggctcttaccacttgtccctcaaaacgaccaccccattgactggtggcgattgcgtcgacggagacggggcaaaagcaagctgaacccgaaaaataacaaacactggggctgaggggtggaactacgagtgcgcagacatgggccagagcgcatttcccctgccccaggcaaattcggcgctcactgcgtccccgcaggccactgaccttacaagactacttgccccagactcctggggctggatgggaattgtagtctccctaaagagttgtacgtatctttttaaggcctagtttctgctttcaaaatacgaaaacataacactccagtccataactgttgacaagtacaagcgcgcacaggtctccaatctatccactggatttccgtgagaattgtgcccgctctggtattggatgttcctctccataagactacagtttctaaggaacactgtggcgaagacctttcattccgcaacgcatgctggaaataattatttccctccacccccccaacaatccttattacttatatttaccgaaactggagacctccattagggcggaaagagtgggggattgggacctcttcttacgactgctttggacaataggtagcgattctgaccttcgtacagcaattactgtgatgcaataagccgcaactggaagagtagaggctagagggcaggcactttatggcaaactcaggtagaattcttcctcttccgtctctttccttttacgtcatccgggggcagactgggtggccaatccagagccccgagagacgcttggctctttctgtccctcccatcctctgattgtaccttgatttcgtattctgagaggctgctgcttagcggtagccccttggtttccgtggcaacggaaaagcgcgggaattacagataaattaaaactgcgactgcgcggcgtgagctcgctgagacttcctggacgggggacaggctgtggggtttctcagataactgggcccctgcgctcaggaggccttcaccctctgctctgggtaaaggtagtagagtcccgggaaagggacagggggcccaagtgatgctctggggtactggcgtgggagagtggatttccgaagctgacagatgggtattctttgacggggggtaggggcggaacctgagaggcgtaaggcgttgtgaaccctggggaggggggcagtttgtaggtcgcgagggaagcgctgaggatcaggaagggggcactgagtgtccgtgggggaatcctcgtgataggaactggaatatgccttgagggggacactatgtctttaaaaacgtcggctggtcatgaggtcaggagttccagaccagcctgaccaacgtggtgaaactccgtctctactaaaaatacaaaaattagccgggcgtggtgccgctccagctactcaggaggctgaggcaggagaatcgctagaacccgggaggcggaggttgcagtgagccgagatcgcgccattgcactccagcctgggcgacagagcgagactgtctcaaaacaaaacaaaacaaaacaaaacaaaaaacaccggctggtatgtatgagaggatgggaccttgtggaagaagaggtgccaggaatatgtctgggaaggggaggagacaggattttgtgggagggagaacttaagaactggatccatttgcgccattgagaaagcgcaagagggaagtagaggagcgtcagtagtaacagatgctgccggcagggatgtgcttgaggaggatccagagatgagagcaggtcactgggaaaggttaggggcggggaggccttgattggtgttggtttggtcgttgttgattttggttttatgcaagaaaaagaaaacaaccagaaacattggagaaagctaaggctaccaccacctacccggtcagtcactcctctgtagctttctctttcttggagaaaggaaaagacccaaggggttggcagcaatatgtgaaaaaattcagaatttatgttgtctaattacaaaaagcaacttctagaatctttaaaaataaaggacgttgtcattagttctttggtttgtattattctaaaaccttccaaatcttaaatttactttattttaaaatgataaaatgaagttgtcattttataaaccttttaaaaagatatatatatatgtttttctaatgtgttaaagttcattggaacagaaagaaatggatttatctgctcttcgcgttgaagaagtacaaaatgtcattaatgctatgcagaaaatcttagagtgtcccatctggtaagtcagcacaagagtgtattaatttgggattcctatgattatctcctatgcaaatgaacagaattgaccttacatactagggaagaaaagacatgtctagtaagattaggctattgtaattgctgatttccttaactgaagaactttaaaaatatagaaaatgattccttgttctccatccactctgcctctcccactcctctccttttcaacacaaatcctgtggtccgggaaagacagggactctgtcttgattggttctgcactggggcaggaatctagtttagattaactggcattttggcttttcttccagctctaaaacaagctccatcacttgaaatggcaaaataaaatcatggatgaggccgagggcggtggcttatgcctgtaatcccagcactttgggaggccaaggtggtaggatcacgaggtcaggagatcgagaccatcctggccaacatggtgaaaccccctctccactaaaaatacaaaaattagctgggcgtagtggcatgtgcctgtaatcccagctactcaggaggctgaggcaggagaatcacttgaaccaggaggcagatgttgctgtgagccaatatggcaccactgaactccagcgacagagctaaactccatcccaaaaaaaaaaaaaaaaaaaaaaaaacatggatgatcggtgtcgttgagaggataggtatttggaagaacctttgtttgaaactggctctgtacatacaatgaaattacatacttatttacatacaatgaaatgcagaggttttttttttatataggatctctgtcgagaggctggagtgcagtggtgctatcacagctcactgcagcctcaacctcgtcaggctcaagcaatcctcccacctcagcctccagagtagcagggacgataggtgtgcaccaccatgcccagctaatttttgtatttttttttctttttttgagatggagtcttgctctgttgcccaggctggagtgcagtggcgcgatctcagctcactgcaaactctgcctcccgggttcatgccattcttctgcctgagcctcctgaatagctgggactacaagcacccactaccacgcccggctaattttttgtatttttttttcttttttagtagaggcgggatttcaccgtgttagccaggatagtcttgatctcctgaccttgtgatccacccgcctgggcctcccaaagtgctaggattacaggcataagccactgcgtccagccattcttgtatttttctgttgtagagatagggttttgctatgttggccatgctggtctcaaactcctgacctcaagtgatctaccctcccttggcctctcaaggtgctgggattacaggcctgagccattgcacccagccatggtctaaaaatcttgattgaaataccaccttttcatttccagacacccctatttaaaattaccacacccccagcacacactttatcttctattcctgctgcttctccataacactgattactagctgacattctatgtaatgtatccattttttatctctagtcccacagaatgtaaactccaggatgggatttttgttttgtttacatacatctgtatgttcagtagttagaacggtacttgggacctagttgccactcaataaacatttgtcaaataaataataaactaaactaaattagttctttaatttttttaaatatggtgatggttagtagtgagtaacattcaaaaaataagttgaaaagttgtaccattgcctcttacccacaataaaaaagggtaaattcttttctgctttatgaaagttgtttttcatatttgaagtcaagttaatcagattaaggaaaatgtatgttgtgttttcagagcgatacaagatttataaataaccatcctctcccttgcccttcaacattatagctaaacaaaaataagaggaaaacaggattcacaatttatcaatttattgaaaatcagagccagagaagcaggaaatgacattgtaggaaaaaactgcttttgaaaaagcacaaaacttactcatgacaatcagtgatcaggaaaatcctcaatagtgtggcatttggatacatttatgtttcatttccatgggagagagtcataaaaataggatgttctttctcattctggcaaattaaaccatcaattaaaaactcagatacataaaaattaaagatgtaagaatgaaaatgctaaattgttattttcaatcaactattatgttttctagcttttcattgcttttttctgtttcctgttaagattaatttctttttttttttttttttttttttttgagacagactttggctcttgttgcccaggctggagtgcagtggcacaatctcggctcactacaacctccacctcccgggttcaagcaattctgctgcctcagcctccggagtacctgggattgcaggcatgtgccatcacaccagctaattttgtatttttagtagagacagggtttctccatattggtcaggttggtctcgaactcctgacctcaggtgatcctcctgccttggcctccgaaagtgctgggattacaggcgtgagccaccgctcccagactttttgttttgttttgttttgtttttttgagacacggtctcgctctgctgcctaggctggagtgcagtggcacgatcttggctcactgccagctccgactcccgggttcaggccattctcctgcctcagcctcccgagtagctgggactacaggcgcccaccactatgcccggctaattttttgtatttttagtagagacggggtttcaccatgttagccaagatggtctcgatctcctgaccttgtgatccacccgcctcagccttccaaagtgctgggattacagtcctgagccactgcgcccggcctggacctttttttttcggggtggggggttggagtctggctctgtcgcccaggctggagtgcagtggcgccatcttggctcactgcaacctccgcctgccaggttcaagttcaagcgcttctcctgcctcagcctcctgagtagctgggattataggcgcacgccaccgtggccggctaattttgtatttttagtagagatagggtttcatcacgttggtcaggctggtcttgaagtcctgatctcgtgatccacccgcctcggccttccaaagtgctggcgtgagccactgcgcctggcttaagattaatttttgtttgttttgtttttgagacggagtctcgctctttcacccaggccggagtgcagtggcgccatctcggctcactgcaagctccgcctcccgggttcacgccattctcctgcctcggccccccaagtagctgggactacaggcgtccaccaccacgcccggctaattttttgtatttttagtagagacggggtttcaccgtgttagccaggatggtctccacttcctgacctcgtgatccgcccacctcggcctcccaaagtgctgggattacaggcgtgagccaccgcgcccggccttaagattaatttttatggtgttttacattcatttgtatggaaagttctaggatagggatcatatttcacttccttttaatatagtacagtatagcacaatttgcagttatgtcttaatatgtgatcaggaatgatcatgactggaaacagtgttatttgtggtagctatagggtaggtaaggttttcagcctgttttaggtttcttgaactaaaattccttctgctgtcttctaagtcaatattggcagctatttctgacaattggtagttctttgtaactttttacctatgactataacatttttgactttcagaagaatttgctaaaatgtgttccccggtgggttgttgtttttcaacctaaacctagctgctttttccagtcacttatccgtattggaagctcaaaatgcaaatatacagtaggcctaaaatattgcctggtttgaaaagtgtttaaaatatttgaatcatttttatagtaaacatttactctcatcaggacctagaaggggaacattttaattttttttcttttcccttttcacagtcttccttcaacattcattacctttttacatatcggagttttcatctgttcaaagtttgtgtttacagtgtgtttatatagtttagattataattaccatactgaaatataattgtttcagaattgagtcagtggtgagaatgaaagccatctggtatgataactgaatccaatttttcttttacggagaatttctttgaaatgtagcttatctcagaaatagggatttagtaaccaatcagagttttctttgtcaaggttgtttttctttttaaagtcacatttggtcccagtaataataccaatgttggtacaagttatctcaggttgtgaagcatttttcccaagtcatctcaggttgtgaagcattttcccaagtagcatttaattttattcttgcaatagcccaaggagtctggcagggtgaatggcaagagaaggaaacaggttcaggtagagtggttagcccaaggtggctctgcttatatacacaactggtagtagaaacccagcctcctgacttagttcattgtttttcttttcactgccctgtgctatgtcaaaaaccccatgattacaagagttgtattacaacccttcacaataaggttactgtccacaagcttttcttgtgatccttttcttttttttttttctttttttgagatggattctctgtcacccaggctggcccgccttggcctcccaaaatgctgggattacagcgtgagccaccgcacctggcccttgtgatccttttctaaaaagttaaatatttaaggaaaaaaccacattcttgtcacactgccaggttagtcgttctttgatatcttgcctggactttatccaaaaaatccgtttcaaaaattcacatttagagctaagtgtagtggctcacgcctgtaatcccggtcgaggcagatggatcacttgaggtcaggacttcaagaccagcctgggcaatatggtgaaaccccttccctaccaaaaatacaaaaaaattagccgggtgtggcagcacgcgcctgtagtcccagctacttggaatgctgaggcacaagaatcacttcaatccgagaggcagaggttgcagtgagccaagaccacaccactgcactccagcctgagcagcagagtgagtgagactccatctccaaaaaaaaaaaaaaaggttcacattcagaagaaagctaaaggccgggtatagtagctcacacctgtaatcccagcactttgggaagccgaagcaggaagattgcttgatgccaggcattcaagaccagcatgggcatcatagtgagatcctgtctctacaaaaattaattaacattaaaaattaaaaagatggctggcatggtggctcactcctgtaatcccagtactttgggaggccaaggcatggtggtgcatgcctttagtcccagctactcgggaggctgaggcaggagaatcacttgaattcaggaggcggaggttacagagagccgagatggtgccactgcactccagcctgggcgacagaacgagactctgtctgaaaaaaaaaaagaaaattaaaaagaccagaataaagctaaagatttaaaatagcctataggttcctaccagaagttaccagctacctctctgatagtctttccctacaatatcctcctggattattacattttagcaccttgacctatctgatgtcctgcatacacaggcatggtcctgctcagggtttgccttctctgctccctctttcttggaatgctcttcccctaattgttgcatagtgtgtttctttacattattaagctatcctctagtctcacctcagtgaaacctttcctgactccccccatgtacatctcacccccacatagatattgaactacctgtttccccttaccctgcttaatttttctctttaatgcacttattcccatgtattctttaattccgtatcaactgtctaccacactagaatatgagctctatgagagcaggctttattttgtaaactgctacatttctatctcctagaatagtacttgaatatagtagtagatacttaataaacacttgttatattagtataataaatgaactaatctcaggaatgccttggttttgtggatagacaggtagggatgggaacttgggtgatgtattttctgaagtttttatttttaagcttattattattttgagatggagtccagctctgtcgcccaggttggagtacagtggcgcgatcttggctcactgcaacgtgcacttccccggttcaagcgattctcctgccttagcctcccaagtagctgggattacaggcgcatgccaccatgcccagttagttttggtatttttagtagagacagcgtttcactgtgttggccaggctggtctcgaaatcctgacctcatgatccgcccgcctcggcctcccaagtgctgggattacaagcatgagcccccgtgtctggccttattttcttttttttgagacagagtcttcctctgtcacctaggctggagtgcagtggcacgatattggctcactctgcaacctccacctccaggattcaagtgatccttctaccttagtctccaaagtagctgagaccacaggcatgccccaccacgcccggctaatttccgtattttaagcgtagacagggtttcaccatattgtccaggatgatctggaactcctgagctcaggtgatccacccacctcagcctcccaaagtgctaggattacaggcatgaggcaccatgcccggccttaagcttatcattttctaaatttcctttagtgagtacttattacactgtttttacaaagtaatcacaaaccaaacatcatgcctcttctgaagtgatctaataagagtacacagtaccatctgtaaagtgttcttgccagaaagttgaacctgaatgattaagcctgtaagtctagtttataggaaataaggctagaggaacaagttaaacctcaccatagggttatacaatcagcaaaatccagaatgggggaaactccacaggtcaaatgacctaattttaaaaataaatgacaagggagaaaaagtaagagacacctatagatcagaagacacttggggctgggcatggtggctcacacctgtaatcccagcactttgggaggccaaggcaggcggatcacctgaggtcaggagttcaagaccagccggccaacatggtgaaccccaactctactaaaattacgaaaaatcagccgggcgtggtggcgcacgcgtgtagttccaactacctgggaggctgaggcaggagaatcacttgaacttgggaggcagaggttgcagtgagccgagatcgcaccattgcatgccagtctgggctacaaaagcaaaaccccatctcaaaaaaaagaagacacttgggtttgggtgtgttggctcatgcctgtaaaccccgtgctgggaggattgcttgagcccaggagttcaaggctgcagtgaggtatgtttgcaccactgcactccagcctaggtgacagagtgtgaccttatcttaaaagtaataataattaaaataatctggggtaggggtggatatgggtgaaacagcttggccatgagttgatggttgttggaccagggtgatggtccatatagttcattttattattttatttacttgaaattttgaaatacttgaaattttccatattaagttaaaaaggcatttacagtaaacaaaaaaaagttctaggaaggaattcaaaagaaatataagcagaaaattttgtctttatggagcttaaagatgagatgtgcacccacagtgatagtgcagaaaaatatatcactggaaatgaattcgtacgaactattatcaactaatcttttaaatgctgatgatagtatagagtattgaagggatcaatataattctgttttgatatctgaaagctcactgaaggtaaggatcgtattctctgctgtattctcagttcctgacacagcagacatttaataaatattgaacgaacttgaggccttatgttgactcagtcataacagctcaaagttgaacttattcactaagaatagctttatttttaaataaattattgagcctcatttattttctttttctccccccctaccctgctagtctggagttgatcaaggaacctgtctccacaaagtgtgaccacatattttgcaagtaagtttgaatgtgttatgtggctccattattagcttttgtttttgtccttcataacccaggaaacacctaactttatagaagctttactttcttcaattaagtgagaacgaaaaatccaactccatttcattctttctcagagagtatatagttatcaaaagttggttgtaatcatagttcctggtaaagttttgacatatattatctttttttttttttttgagacaaagtctcgctctgtcgcccaggctggagtgcagtggcatgatcttggctcactgcaacctccgccccccgagttcaagcgattcttctacctcagcctcccaggtagctgggactacaggcacccgccaccatgcttggctaatttttgtacttttagtagagataaggtttcaccatattggccaggctggtctcgaactcctgaccttgtgatccacctgcctcggcctcccaaagttctgggattacaggcgtgagccaccacacccgactgacatatattatctattaggatgtaacatcattttgaacagtgttttgtattttttgtgtccatcagtgaaagcaaactgcaagcagttttgaaataagcacattgtgtttgagccttcccagtttctcctttctgttcatttctgcatatccttatgcattcccccttctaagggtcagtgtttgcccgctttgtaatcattgtgaagacaggaaaggacctgataccagtttctatttaggccaaaattcatttatagcagtgattcaagttatatttacgtatttgatgatcttgtcttttgaaatgaaaatgtttgtttcttaataaaagaatttcagaaaaagtagagtaggtaatttagtagaacaagtgggctttctccttttctttatgttaagctatggctcacatcttaccttaaatgtcaactaatttgtttttaagtatttatgtacctggtacataacctggtaccaggtacaaactatgtacttggtaaaaagtttattagcacaaaaaggtatatgatgcaaagtatacttccctcttaccctacaacccctgcctccctgttccctccccagacaaccacaatgatcaatttcttatgtatcctttgaggaatttttaaattccagagttcttaacttggggtttatgaatagtctttatgaatttcctagaattatatttaaattgtattcaaaactatggccatgtacatttttctgggaagatagtccataattttcatctgagtgagctaagatcatgccactgcactccagcctgggagacaagagggagactcaaaaaaaaaaaagaaaggcccagtatttactacagagagctaaagattaacctttaaagccctggggctttcaatttatctggatgagaatctttctggaatgaactgtatgttttatggtcagcttgagtaacaaatgctgagcatactatactattattacagggactcaggggcccagtgtggtagctcctgcccataaccccagcactttgggaggccaaggcaggaggatcacttaaggccaggagttcgaagctgtagtgagctatgatcacaccactgcactccagcctagatgacagagtgagaccctgtctttttttttttttgagatggtgtttcactctattgcccaggctggagtgcagtggtgtgatctcggctcactgcaacctccacctcctgggttcaagcgattctcctgcctcagcctcttgagtagctgggattacaggcatctgccaccacacccagctaatttttgtatttttagtcgagacagggttttcaccatgttggccaggctgctctcaaactcctgacttcagctaccttggccttaaaaagtgttgggattacaggtgtaagccaccgcgcctggctgaccctgtctcttaacaaaaaaagagagattaagttatgaatatagttgctttgagaacttgtggaagaaggaaattataggcttataggcagagataataatacgagcaaatgtacaaataaaagaaaatagaggacgggcgcggtggctcacgcctataataccagcactttgggaggtcgaggtgggcggatcacgaggtcaggaaattaagaccatcctggccaaaatggcgaaacactgtctctactaaaacacacaaaaaactagcctggcatggtggcacgtacctgtagtcccagctacttggtaggctgcggcaggggtatcacttgaacctgggaggcagaggttgccctgagccgagatcatgccaatgcactccagcctgacaacagagtgagactctgtctgaaaaaaaagaaaagaaaagaaaatacatccaggaaaaataagctaactttgcatatgtgtataggagttgtgttagaaaaggaagaagccctcaaagatgggaagccatttgcaagaaagagaaggtccaagaggaggcagaagggattggaaatagaaaaaggatgtaagaaagagttgattattactcataaacagtaatgaaggaaaaggagagtaattctacaggaagatgctgaggtgctttgagcccagtgaagttggaggtaaagacagctgttgaggccgggcacggtggctcacgcctctaatcctagcacttttggagcccaaggcaggtggatcacctgaggtcaggagctcaagaccagcctgaccaacatagagaaaccccatctctactaaaaatacaaaattagacgggcgtggaggcgcatgcctgtaatcccagctacttgggaggctgaggcaggagaatcacttgaacctgggaggcggaggttgcagtgagccgagattgcgccattgcactccagcctggccgacaagagtgaaaactgtctcaaaaaaaaaaaacaacaaaaaacagctgttgagattgagaggattagagttggcaactggagaagagtgagaagcttggtttcaagcttgtgatagtcaggattgtgatagtcaggaaagaaccagtcataaagatatatgtgtgtgtatacatataaatatgttatatatatgtgtgtgtgtgacacatatatatttttgtttgtttctttgagacagtgtctccctctgacacccaggctggagttcagtggtgtgatcatagttcacttttaccttgcaatctgggttcaagcaatctctcatctcagcccctcaagtagctaggactacaggtacatggcatttgcccagctaatttttaagtttcttgtagagatgggccagccatattttaaattgtgttttgaatgttatattagaattaaaagtccaaagccgggtgtggtggctcacgcctgtaatcccagcactttgggaggctgaggtgggcggatcacgaggtcaggagttcgagaccagcctggccaatatggtaacaccatctctactaaaaatacaaaaattagctgggtatgggggcacatgcctgtagtcccagctactcaggaggctgaggcagaggaacctcttgaacccaggaggcagaggctgcagtgagttgagatcgtgccactgtactctagcctgggcgacagagcaagattccgtctcaaaaaaaaaaaaagtccagtataatgcccatgtgatagatcgactttttcatgaaatctcttctgtaatatcaatataatctgaataacactttgatctatatgatgagaaagctgggagcctgggagcgatacccccatgcttttgttgtattaattgtattttctacggataaactctaattgctaaaaataaaacaactttattgacccaagcaagcctaaagttctgaaatcttttttttatttttgtttgtttgtttgtttgtttttgtttgttttgttttgagacggagtctcgctctgtcgcccaggctggagtgcggtggtgcagtctcggctcactgcaagctccacctcccgggttcacaccattctcctgcctcagcctcccaagtagctgggactacagacgcctgccaccacgcccagctaatttttttgtatttttagtagagaaagggtttcaccgtgttagccaggatggtctcgatctcctgacctcgtgatctgcccgccttggcctccctaagttctgggattacaagtgtgagccaccacgcccggctgtttttttttgttttgttttgagacggagtctcactgtgttgcccagactggagtgcagtggcatgatctcagctcactgccacctccatctcctgggttcaagcaaatctcctgcctcagcctcccgagtagctgggactacaggcatgtgccaccacacctggctaatttttgtatttttagtagagacggggtttcactatgttggccaggctggtccaaaactcctgacctcaggtgatctgctcgccttggcctcccacagtgccaggattacaggcatgagccaccttgcccagccagttctgaaatcttttatgaagcctataaaaaaagataataataccaatctagaaaatatttcttaaggcagtcatgcattagtttgaactttccaaacaaaaaaatgcaatgtgtaatacttttttttttttttttgagatggagtcttgttctgttgcccaggctggagtgcagtggtacaatctcggctcactgcagcctctgcctctctggttcaagtgattctcctgcctcagcctcccaagtagctgggattacaggcgtgcaccaccatgcatggctaatttttgtatttttagtagagacagggtttcaccatgttgacaaggctgatctcgaactcctgacctcaggtgatccgcccacctcagcctcccaaagtgctgagattacaggcattagccaccacgcccagccttttattttagtagagaccatgtttcaccatgttgaccaagctggtcttgagctgacctcaagtgatccgcccacctccacctcccaaaatggtgggattataggcatgagccaccgcacccagcctgtaatacttttttgaagatctagaaccacattgttcaaagagatagaatgtgagcaataaatgtaacttaaatttttcaacagctactttttttttttttttttgagacagggtcttactctgttgtcccagctggagtacagtggtgcgatcatgaggcttactgttgccttgacctcctaggctcaagcgatcctatcacctcagtctcccaagtagctgggactgtaagtgcacaccaccatatccagctaaattttgtgttttctgtagagacggggtttcgccatgtttcccaggctggtcttgaactttgggcttaacccgtctgcccacctaggcatcccaaagtgctaggattacaggtgtgagtcatcatgcctggccagtattttagttagctctgtcttttcaagtcatatacaagttcattttcttttaagtttagttaacaacctttatacatgtattctttttctagcataaagaaagattcgaggccgggtgcggtggctcacgcctgtaatcccagcactttgggaggctgagatgggcacatcacgaggtcaggagatcgagaccatcctggctaacatggtgaaaccccgcctctactaaaattacaaaaagttagccaggcgtggtagcgggcacctgtagtcccagctactcaggaggctgaggcaggagaatggcgtgaacccaggaggcagagcttgcagtgagcagagattgtgccactgcactccagcctgagagacagagcgagactccgtctaaaaaaaaaaaaaaagattcgaatccttatcttggttgatttttgcgtatctagttccactgaattatttatataattgtatagactacagcacgagacagcttagcttgtcactctactgtactatattctgcagtactatcataagggaatttcctccctacccctgctctgaattgttcaattgtactatttgctggagtaatgcttgatgccttcttgatccattatactagagtatatgtagtatttgtagattctgaaggagtgggagcctctattctgagttttaaaggtacttatgtacagtggaggtagctttttgacagcctcatcttccaaactatagagtcattgttttgttgagtgcaatatggtacttgaagcatctatatcggcgaagaaggacccaagtctccttgaccttacctacctacattcactttctctggtaggaagattgtgggtgcctctctccagacttagtttccatgtcaaaaaagaaaaaaggaagattgtgggctttgctacaatccaattctggatccaatataaccttcattgcttaattactgtgtgatctgggacaagcctctactctataaaaatgaagataaggccaggcttgatggctcatgcctgtaatcccagcacgttgggatgccaaggcaggaggatcacttgaggtcaggagttcgagaccagactgggcaatatagtgaaaccacatctgtacaaaaataaagatagaaagtagcccagcgcaatggctcacacctgtaatcccagcactttgggaggctgaagcaggcgatcacttgaggtcgggagttcaagactgtagacagatagataggtaggtagatagatagagatatagatatagttggggtttttttgttttgttttgttttgtttttgagatggagtttcgctcttgttgcccaggctggagtgcaatggcgcgatctcagtttactgcaacctccgcctcccgggttcaagagattctcctgcctcagcctcctgagtagccaggattacaggcatatgccaccatgcccggctaatttttgtatttttagtagagacagggtttctccgtgttggtcaggctggtcttgaactcctgacctctcccaaagtgttgggattacaggcgtgagccaccgctcctggccttttttttttttttttttttttttttgagacagagtcttcctctgttgcccagggtggagtgcagtggcactcttctcagctcattgcaacctctgccatcctgggttccagtgattctcatgcctcagcctcccaagtagctgggactcaggcgtgtgcccaccacgcctggctaattttgttgtatttttagtagagacagggtttcaccatgttagccaggctggtctcaaactccaggcctcaagtgatctgcctgcctcagcctcctgggattgcagacatgagccactgcacccggccaagagagggtaataaatgttaaattacctggctagtaaaaaatattctctaagtgtcttttctcacaattcccaatgccttttttttttttttggcacaatctcactctgttgcccaggctggaatgcaatggtgcaatattggctcactgtaacccccgcctcacaggttcaacttattctcatgcctcagcctcccgagtaactgggactacagtgcaccaccaccacacccagctaatttttgaatatttagtagagacagggtttcaccatgttggccaggctggtcttgaactcctggcctcaagtgattcacccaccccgcaagtgctgggattacaggtgtggaccaccgtgcacagccctagtgactttttttttagccccttaatcttttctttcctgggtctcttcattgtcagtgtctgctatttactccctacctagtcacccccttcaccagtatattatgtcctttatgttttattttgcaggatcttattttgcttttctattgaatcccctccatctagaatagtactagacatagtaaatattggttgtatgagtgaatcgctgcttttaattatcatcaccattgctctctctacttctggtctatgatccactttgagttaacttttgttatttggtgtgagataggagtataatttcattcttttacatgtggttatacttttgtctcaacactgtttgttaaaaacacaaaaagtattattttcccatttaatcatctttggcctgggcacggtggctcatgcctgtaatcccagcactctggaaggccaaggcagatggatcaatttgaggccaggagttcaagactagccaacatggtgaaactaaaaatacaaaaaattagctgggtatggtggtgcatgtctgtaatcccagctactcgggaggctgaggcacgagaattgcttgagcctaggaggtggaggttgtagtgagctgagattgtgtcactaccctccagcctgggtgatagagtgagtctgtctcaaaaaaaaaaaaaaaaaattaagaaaataaaaatcgtcggccaggcatggtggctcacacctgtaatcccagcactttgggaggcagaggcgggcagatcacgaggtcaggagatggagaccatcctggctaacatggtgaaaccccgtctctactaaaaataaaaaaattagccgggcatggtgctgggcgcctgtagtcccagctgctcgggaggctgaggcaggagaatggcgtgaacccaggaggtggagcttgcagtgagccgagatcgtgccactgcactccagcctgggagacagagcgagactccgtctcaaaaaaaaaaaaaaaaaaaattgtcttggtatttattattgttgaaaatcgcttgatcacagatgtatgtatgagtttatttctgtactgtcaattccattttattgatgtatgtgtctattcttatgctattaccacactttcttgattactatagctttgtggtgaggtgttgagattttaaactaattataagcatcttacatgaactacttaccgtttatatttgattatgcagcatgaaataattatgaatatatcattaaatatgccatattaacttttattaagttttatgtgatcataacagtaagccatatgcatgtaagttcagttttcatagatcattgcttatgtagtttaggtttttgcttatgcagcatccaaaaacaattaggaaactattgcttgtaattcacctgccattactttttaaatggctcttaagggcagttgtgagattatcttttcatggctatttgccttttgagtattctttctacaaaaggaagtaaattaaattgttctttctttctttataatttatagattttgcatgctgaaacttctcaaccagaagaaagggccttcacagtgtcctttatgtaagaatgatataaccaaaaggtatataatttggtaatgatgctaggttggaagcaaccacagtaggaaaaagtagaaattatttaataacatagcgttcctataaaaccattcatcagaaaaatttataaaagagtttttagcacacagtaaattatttccaaagttattttcctgaaagttttatgggacatctgccttatacaggtattagaaacttactgcctttctctaatgcttctagtgtaaaaacttgcagacttatgtaaagtagggctgtatcgccgtgcccccattgtctgttaatcttgtttttatatttttgattgtgtttccttttctttttttttttttttttaagacagggtcctgctctgtcactgaggctggagtgcagtggcgtgatctcggctcactgtagcctctgtctcccagcctcttcctgccttagcctcccaaatagctgggactacaggcacacgctaccatgcccggccaatttttgtattttttgtagagatgaggttttaccatgttgcccaggctggtaactcctgagctcaggtgatctgcccacctcggcctcccaaagtgctggggttcacaggtgtgtgtttatttctatctaattatttacacaaacacaatgtatttatatattgtgtatctcttctgctacaatgtaaattctatgagagtagtaattttgtctgtctcaacactgtttttcctaagtttggtacatagtaggcactcagatgcttaaaggaatgaatgaattgtgctttaattccactttactaaacccaaatctccctttggacattgttatctatgtgttttcaaagaagtataatcataatttgacagaaatccttgagaggcagaactaagtgagggattgggcagggttcagatgttaagaacagtaagctcagcagggtgtgattgctcatgcctataaccctagcactctaggaggctgaggtgggatgattgcttgaggccaggagtttgaaatcagcctgggcaacatagtgagaccccatcactaccaacaaaataaataaataaatgtacatggtggcatatgcccatagtcctagctacttgggaggctatagtgggaggatagcttgagtacagaagtctgaggctgcagtgagctatgattgtggcactgcatgctagcctgggcaatagagcaagaccctgtctctaaattaaacaaaaaaaaaagtactctagttttctatgcaatgcattatatctgctgtggatttagggcagtattatatcagataattttaggcatttggtaggcttaaatgaatgacaaaaagttactaaatcactgccatcacacggtttatacagatgtcaatgatgtattgattatagaggttttctactgttgctgcatcttatttttatttgtttacatgtcttttcttattttagtgtccttaaaaggttgataatcacttgctgagtgtgtttctcaaacaatttaatttcaggagcctacaagaaagtacgagatttagtcaacttgttgaagagctattgaaaatcatttgtgcttttcagcttgacacaggtttggagtgtaagtgttgaatatcccaagaatgcaactcaagtgctgtccatgaaaactcaggaagtttgcacaattactttctatgacgtggtgataagaccttttagtctaggttaattttagttctgtatctgtaatctatttttaaaaaattactcccactggtctcacaccttattttatcaatcgtaaggtgcacatttttcacatcttaacatctctgaaattgggaacattttactattgagggtgtgtcatttgtttaatttgtgtgctttctttcttagtgatacacgaaataatagtgccacttacattgttggtgtcttagctttagtgaaatacagtattgataggcaaatttcttagtgttaaggtagaaaacaaggactctaaataactttgatggtctgtgtatttgtttttgtttcctaggagtaaaatttccagttgattttttaaaatttgatttttaaaaaaaatcacaggtaaccttaatgcattgtcttaacacaacaaagagcatacatagggtttctcttggtttctttgattataattcatacatttttctctaactgcaaacataatgttttcccttgtattttacagatgcaaacagctataattttgcaaaaaaggaaaataactctcctgaacatctaaaagatgaagtttctatcatccaaagtatgggctacagaaaccgtgccaaaagacttctacagagtgaacccgaaaatccttccttggtaaaaccatttgttttcttcttcttcttcttcttcttttcttttttttttcttttttttttttgagatggagtcttgctctgtggcccaggctagaagcagtcctcctgccttagcccccttagtagctgggattacaggcacgcgccaccatgccaggctaatttttgtatttttagtagagacggggtttcatcatgttggccaggctggtctcgaactcctaacctcaggtgatccacccacctcggctccccaaattgctgggattacaggtgtgagccactgtgcccggccggtaaaaccattttcatttattctggcaacatctctttattgagcattgtgaatatgttagtgaatgtgctagatgctcatagatttatataaaaagttagtgaagaaggaaagatggtatattaagtggttagacaagtgttctaatcagttagagttcagagaaggtcagggtacctgatataatcaagagagagaccttacagccaggtgaggtgaatgtacctataatcccagctacttaggaggctgaaatgggaggatcacttgagtccaggtttgagaccagcccaggcaacatagcaagatccccatcagatacaccaaaaagacagatttcttttttttttttttttttgagacagagtctcgctctgtcgcccaggctggagcgcagtgacacgatgtcagctcactgcaacctccgcctcccaggttcaagtgattctcctgcctcagcctcctgagtagttgggactacaggggtacgacaccagacctggctaatttttgtaattttagtagagtcggggtttcaccatattggtcaggctggtctcgaactcctgacctcaggtgatccaccctccttggcctcccagagtgctgggattacaggcgtgagccaccaagcccggccaaaaaagagagctcttataggcccttccttgctttggagctttatctgctctgtgatgcttatctaaaatagccataaggtcactgatatttttaagcatttggaaattacttcagctgggtgccatggctcatgcctataatcccaaccctttgggaggctgaggtaggaggtcctttgagcccagcttgggcaacacagtgagacactgtctctgcaattaaaaaaaaaaaaaaagtagctgggtgccgtggctcacgcctgtaattccagcactaggaggcttgaggattgcctgagctcaggagttcaagaccagtttgggcaacatagcaagtccttgtctatattaaaagtttttttaaattatctgggcatggtggtgtgtgcctgtagtcccagctacttgggaagctgagacagaaggatcacttgagtccaggagatgtagactacagtgagctatgatcactccactgcacttcagcgtgggcggcaaagcaagatctagttgcaaaaaaaaaaagaactggctgggtgcggcggctaacacctgcaatcccagcaccttgggaggctgaggccagtggatcatgaggtcaggagattgagaccaccctggccaacatggtgaaacccggtctctactaaaaatacaaaaattagctgggtgtggtggcacgtgcctgtaatcccagctactccagaggctgaggatggagaatcacttgaacctgagagtcggaggttgcagtgagccgagattgcgccactgcactccagcctggcgacagagcgagactccgtctcaaaaaaaaaaaaaaaaaagcttcacgcctgtaatcccagcactttgggaggccgagtcaagtggatcacgaggtgtggagatcaagactatcctggctcacatggtgaaagcccgtctctactaaaaacacagaaaaattagctgagcgtgatggcggactcctgtagtcccagctactcgggaggctgaggcaggagaatagcatgaacccgggaggtggagcttgcagtgagccgagatcccgccactgcgatccagcctgggcgacagagtgagactctgtctcaaaaaaaaaacaaaaaaacttagctgggcgtggtggtatgcacctgtggtcctagctacttgggaggctgaggctggagcattgctttaacatagagagtcaaggctgcagttgagctatgactgtgccactggactccagcgcaggtgactgagaccctatcttttaaaaaaagggaaaattacttgaacttaaaaggtgtaattgttaaagaaaatgtagtgatttgctctgttgttacttatatgtgcatgaatgatggagatcttaaaaagtaatcattctggggctgggcgtagtagcttgcacctgtaatcccagcacttcgggaggctgaggcaggcagataatttgaggtcaggagtttgagaccagcctggccaacatggtgaaacccatctctactaaaaatacaaaaattagctgggtgtggtggcacgtacctgtaatcccagctactcgggaggcggaggcacaagaattgcttgaacctaggacgcggaggttgcagcgagccaagatcgcgccactgcactccagcctgggccgtagagtgagactctgtctcaaaaaagaaaaaaaagtaattgttctagctgggcgcagtggctcttgcctgtaatcccagcactttgggaggccaaggcgggtggatctcgagtcctagagttcaagaccagcctaggcaatgtggtgaaaccccatcgctacaaaaaatacaaaaattagccaggcatggtggcgtgcgcatgtagtcccagctccttgggaggctgaggtgggaggatcacttgaacccaggagacagaggttgcagtgaaccgagatcacgccaccacgctccagcctgggcaacagaacaagactctgtctaaaaaaatacaaataaaataaaagtagttctcacagtaccagcattcatttttcaaaagatatagagctaaaaaggaaggaaaaaaaaagtaatgttgggcttttaaatactcgttcctatactaaatgttcttaggagtgctggggttttattgtcatcatttatcctttttaaaaatgttattggccaggcacggtggctcatggctgtaatcccagcactttgggaggccgaggcaggcagatcacctgaggtcaggagtgtgagaccagcctggccaacatggcgaaacctgtctctactaaaaatacaaaaattaactaggcgtggtggtgtacgcctgtagtcccagctactcgggaggctgaggcaggagaatcaactgaaccagggaggtggaggttgcagtgtgccgagatcacgccactgcactctagcctggcaacagagcaagattctgtctcaaaaaaaaaaaacatatatacacatatatcccaaagtgctgggattacatatatatatatatatatatatcatatctatatatatatatatgtaatatatatgttatatatatattacatatatatatgttatatatatgttatatatatataatatatatatgttatatatatgttatatatatatatacacacacacacacatatatatgtatatatatatacacacacacacacatattagccaggcatagttgcacacgcttgtagacccagctactcaggaggctgaggcaggagaatctcttgaacttaggaggcggaggttgcagtgagctgagattgcgccactgcactccagcctgggtgacagagcaggactctgtacaccccccaaaacaaaaaaaaaagttatcagatgtgattggaatgtatatcaagtatcagcttcaaaatatgctatattaatacttcaaaaattacacaaataatacataatcaggtttgaaaaatttaagacaacagaaaaaaaaattcaaatcacacatatcccacacattttattattactactactattattttgtagagactgggtctcactctgttgcttatgctggtcttgaactcctggcctcaagcagtcctgctccagcctcccaaagtgctgggattataggcatgagctaccgctcccagccccagacattttagtgtgtaaattcctgggcattttttccaggcatcatacatgttagctgactgatgatggtcaatttattttgtccatggtgtcaagtttctcttcaggaggaaaagcacagaactggccaataattgcttgactgttctttaccatactgtttagcaggaaaccagtctcagtgtccaactctctaaccttggaactgtgagaactctgaggacaaagcagcggatacaacctcaaaagacgtctgtctacattgaattgggtaagggtctcaggttttttaagtatttaataataattgctggattccttatcttatagttttgccaaaaatcttggtcataatttgtatttgtggtaggcagctttgggaagtgaattttatgagccctatggtgagttataaaaaatgtaaaagacgcagttcccaccttgaagaatcttactttaaaaagggagcaaaagaggccaggcatggtggctcacacctgtaatcccagcactttgggaggccaaagtgggtggatcacctgaggtcgggagttcgagaccagcctagccaacatggagaaactctgtctgtaccaaaaaataaaaaattagccaggtgtggtggcacataactgtaatcccagctactcgggaggctgaggcaggagaatcacttgaacccgggaggtggaggttgcggtgaaccgagatcgcaccattgcactccagcctgggcaaaaatagcgaaactccatctaaaaaaaaaaaagagagcaaaagaaagaatatctggttttaaatatgtgtaaatatgttttggaaagatggagagtagcaataaggaaaaacatgatggattgctacagtatttagttccaagataaattgtactagatgaggaagccttttaagaagagctgaattgccaggcgcagtgctcacgcctgtaatcccagcactttggaaggccgaggtgggcggatcacctgaggtcgggagttcaagaccagcctgaccaacatggagaaaccccatctctactaaaaaaaaaaaaaaaaaaattagccggggtggtggcttatgcctgaaatcccagctactcaggaggctgaggcaggagaatcgcttgaacccaggaagcagaggttgcagtgagccaagatcgcaccattgcactccagcctaggcaacaagagtgaaactccatctcaaaaaaaaaaaaaaagagctgaatcttggctgggcaggatggctcgtgcctgtaatcctaacgctttggaagaccgaggcagaaggattggttgagtccacgagtttaagaccagcctggccaacataggggaaccctgtctctatttttaaaataataatacatttttggccggtgcggtggctcatgcctgtaatcccaatactttgggaggctgaggcaggtagatcacctgaggtcagagttcgagaccagcctggataacctggtgaaacccctctttactaaaaatacaaaaaaaaaaaaaaattagctgggtgtggtagcacatgcttgtaatcccagctacttgggaggctgaggcaggagaatcgcttgaaccagggaggcggaggttacaatgagccaacactacaccactgcactccagcctgggcaatagagtgagactgcatctcaaaaaaataataatttttaaaaataataaatttttttaagcttataaaaagaaaagttgaggccagcatagtagctcacatctgtaatctcagcagtggcagaggattgcttgaagccaggagtttgagaccagcctgggcaacatagcaagacctcatctctacaaaaaaatttcttttttaaattagctgggtgtggtggtgtgcatctgtagtcccagctactcaggaggcagaggtgagtggatacattgaacccaggagtttgaggctgtagtgagctatgatcatgccactgcactccaacctgggtgacagagcaagacctccaaaaaaaaaaaaaaaagagctgctgagctcagaattcaaactgggctctcaaattggattttcttttagaatatatttataattaaaaaggatagccatcttttgagctcccaggcaccaccatctatttatcataacacttactgttttccccccttatgatcataaattcctagacaacaggcattgtaaaaatagttatagtagttgatatttaggagcacttaactatattccaggcactattgtgcttttcttgtataactcattagatgcttgtcagacctctgagattgttcctattatacttattttacagatgagaaaattaaggcacagagaagttatgaaatttttccaaggtattaaacctagtaagtggctgagccatgattcaaacctaggaagttagatgtcagagcctgtgctttttttttgtttttgtttttgttttcagtagaaacgggggtctcactttgttggccaggctggtcttgaactcctaacctcaaataatccacccatctcggcctcctcaagtgctgggattacaggtgagagccactgtgcctggcgaagcccatgcctttaaccacttctctgtattacatactagcttaactagcattgtacctgccacagtagatgctcagtaaatatttctagttgaatatctgtttttcaacaagtacatttttttaacccttttaattaagaaaacttttattgatttattttttggggggaaattttttaggatctgattcttctgaagataccgttaataaggcaacttattgcaggtgagtcaaagagaacctttgtctatgaagctggtattttcctatttagttaatattaaggattgatgtttctctctttttaaaaatattttaacttttattttaggttcagggatgtatgtgcagtttgttatataggtaaacacacgacttgggatttggtgtatagatttttttcatcatccgggtactaagcataccccacagttttttgtttgctttctttctgaatttctccctcttcccaccttcctccctcaagtaggctggtgtttctccagactagaatcatggtattggaagaaaccttagagatcatctagtttagttctctcattttatagtggaggaaataccctttttgtttgttggatttagttattagcactgtccaaaggaatttaggataacagtagaactctgcacatgcttgcttctagcagattgttctctaagttcctcatatacagtaatattgacacagcagtaattgtgactgatgaaaatgttcaaggacttcattttcaactctttctttcctctgttccttatttccacatatctctcaagctttgtctgtatgttatataataaactacaagcaaccccaactatgttacctaccttccttaggaattattgcttgacccaggtttttttttttttttttttggagacggggtcttgccctgttgccaggatggagtgtagtggcgccatctcggctcactgcaatctccaactccctggttcaagcgattctcctgtctcaatctcacgagtagctgggactacaggtatacaccaccacgcccggttaattgaccattccatttctttctttctctcttttttttttttttttttgagacagagtcttgctctgttgcccaggctggagtacagaggtgtgatctcacctctccgcaacgtctgcctcccaggttgaagccatactcctgcctcagcctctctagtagctgggactacaggcgcgcgccaccacacccggctaatttttgtatttttagtagagatggggtttcaccatgttggccaggctggtcttgaactcatgacctcaagtggtccacccgcctcagcctcccaaagtgctggaattacaggcttgagccaccgtgcccagcaaccatttcatttcaactagaagtttctaaaggagagagcagctttcactaactaaataagattggtcagctttctgtaatcgaaagagctaaaatgtttgatcttggtcatttgacagttctgcatacatgtaactagtgtttcttattaggactctgtcttttccctatagtgtgggagatcaagaattgttacaaatcacccctcaaggaaccagggatgaaatcagtttggattctgcaaaaaagggtaatggcaaagtttgccaacttaacaggcactgaaaagagagtgggtagatacagtactgtaattagattattctgaagaccatttgggacctttacaacccacaaaatctcttggcagagttagagtatcattctctgtcaaatgtcgtggtatggtctgatagatttaaatggtactagactaatgtacctataataagaccttctgtaactgattgttgccctttcgtttttttttttgtttgtttgtttgtttttttttgagatggggtctcactctgttgcccaggctggagtgcagtgatgcaatcttggctcactgcaacctccacctccaaggctcaagctatcctcccacttcagcctcctgagtagctgggactacaggcgcatgccaccacacccggttaattttttgtggttttatagagatggggtttcaccatgttaccgaggctggtctcaaactcctggactcaagcagtctgcccacttcagcctcccaaagtgctgcagttacaggcttgagccactgtgcctggcctgccctttacttttaattggtgtatttgtgtttcatcttttacctactggtttttaaatatagggagtggtaagtctgtagatagaacagagtattaagtagacttaatggccagtaatctttagagtacatcagaaccagttttctgatggccaatctgcttttaattcactcttagacgttagagaaataggtgtggtttctgcatagggaaaattctgaaattaaaaatttaatggatcctaagtggaaataatctaggtaaataggaattaaatgaaagagtatgagctacatcttcagtatacttggtagtttatgaggttagtttctctaatatagccagttggttgatttccacctccaaggtgtatgaagtatgtatttttttaatgacaattcagtttttgagtaccttgttatttttgtatattttcagctgcttgtgaattttctgagacggatgtaacaaatactgaacatcatcaacccagtaataatgatttgaacaccactgagaagcgtgcagctgagaggcatccagaaaagtatcagggtagttctgtttcaaacttgcatgtggagccatgtggcacaaatactcatgccagctcattacagcatgagaacagcagtttattactcactaaagacagaatgaatgtagaaaaggctgaattctgtaataaaagcaaacagcctggcttagcaaggagccaacataacagatgggctggaagtaaggaaacatgtaatgataggcggactcccagcacagaaaaaaaggtagatctgaatgctgatcccctgtgtgagagaaaagaatggaataagcagaaactgccatgctcagagaatcctagagatactgaagatgttccttggataacactaaatagcagcattcagaaagttaatgagtggttttccagaagtgatgaactgttaggttctgatgactcacatgatggggagtctgaatcaaatgccaaagtagctgatgtattggacgttctaaatgaggtagatgaatattctggttcttcagagaaaatagacttactggccagtgatcctcatgaggctttaatatgtaaaagtgaaagagttcactccaaatcagtagagagtaatattgaagacaaaatatttgggaaaacctatcggaagaaggcaagcctccccaacttaagccatgtaactgaaaatctaattataggagcatttgttactgagccacagataatacaagagcgtcccctcacaaataaattaaagcgtaaaaggagacctacatcaggccttcatcctgaggattttatcaagaaagcagatttggcagttcaaaagactcctgaaatgataaatcagggaactaaccaaacggagcagaatggtcaagtgatgaatattactaatagtggtcatgagaataaaacaaaaggtgattctattcagaatgagaaaaatcctaacccaatagaatcactcgaaaaagaatctgctttcaaaacgaaagctgaacctataagcagcagtataagcaatatggaactcgaattaaatatccacaattcaaaagcacctaaaaagaataggctgaggaggaagtcttctaccaggcatattcatgcgcttgaactagtagtcagtagaaatctaagcccacctaattgtactgaattgcaaattgatagttgttctagcagtgaagagataaagaaaaaaaagtacaaccaaatgccagtcaggcacagcagaaacctacaactcatggaaggtaaagaacctgcaactggagccaagaagagtaacaagccaaatgaacagacaagtaaaagacatgacagcgatactttcccagagctgaagttaacaaatgcacctggttcttttactaagtgttcaaataccagtgaacttaaagaatttgtcaatcctagccttccaagagaagaaaaagaagagaaactagaaacagttaaagtgtctaataatgctgaagaccccaaagatctcatgttaagtggagaaagggttttgcaaactgaaagatctgtagagagtagcagtatttcattggtacctggtactgattatggcactcaggaaagtatctcgttactggaagttagcactctagggaaggcaaaaacagaaccaaataaatgtgtgagtcagtgtgcagcatttgaaaaccccaagggactaattcatggttgttccaaagataatagaaatgacacagaaggctttaagtatccattgggacatgaagttaaccacagtcgggaaacaagcatagaaatggaagaaagtgaacttgatgctcagtatttgcagaatacattcaaggtttcaaagcgccagtcatttgctccgttttcaaatccaggaaatgcagaagaggaatgtgcaacattctctgcccactctgggtccttaaagaaacaaagtccaaaagtcacttttgaatgtgaacaaaaggaagaaaatcaaggaaagaatgagtctaatatcaagcctgtacagacagttaatatcactgcaggctttcctgtggttggtcagaaagataagccagttgataatgccaaatgtagtatcaaaggaggctctaggttttgtctatcatctcagttcagaggcaacgaaactggactcattactccaaataaacatggacttttacaaaacccatatcgtataccaccactttttcccatcaagtcatttgttaaaactaaatgtaagaaaaatctgctagaggaaaactttgaggaacattcaatgtcacctgaaagagaaatgggaaatgagaacattccaagtacagtgagcacaattagccgtaataacattagagaaaatgtttttaaagaagccagctcaagcaatattaatgaagtaggttccagtactaatgaagtgggctccagtattaatgaaataggttccagtgatgaaaacattcaagcagaactaggtagaaacagagggccaaaattgaatgctatgcttagattaggggttttgcaacctgaggtctataaacaaagtcttcctggaagtaattgtaagcatcctgaaataaaaaagcaagaatatgaagaagtagttcagactgttaatacagatttctctccatatctgatttcagataacttagaacagcctatgggaagtagtcatgcatctcaggtttgttctgagacacctgatgacctgttagatgatggtgaaataaaggaagatactagttttgctgaaaatgacattaaggaaagttctgctgtttttagcaaaagcgtccagaaaggagagcttagcaggagtcctagccctttcacccatacacatttggctcagggttaccgaagaggggccaagaaattagagtcctcagaagagaacttatctagtgaggatgaagagcttccctgcttccaacacttgttatttggtaaagtaaacaatataccttctcagtctactaggcatagcaccgttgctaccgagtgtctgtctaagaacacagaggagaatttattatcattgaagaatagcttaaatgactgcagtaaccaggtaatattggcaaaggcatctcaggaacatcaccttagtgaggaaacaaaatgttctgctagcttgttttcttcacagtgcagtgaattggaagacttgactgcaaatacaaacacccaggatcctttcttgattggttcttccaaacaaatgaggcatcagtctgaaagccagggagttggtctgagtgacaaggaattggtttcagatgatgaagaaagaggaacgggcttggaagaaaataatcaagaagagcaaagcatggattcaaacttaggtattggaaccaggtttttgtgtttgccccagtctatttatagaagtgagctaaatgtttatgcttttggggagcacattttacaaatttccaagtatagttaaaggaactgcttcttaaacttgaaacatgttcctcctaaggtgcttttcatagaaaaaagtccttcacacagctaggacgtcatctttgactgaatgagctttaacatcctaattactggtggacttacttctggtttcattttataaaagcaaatccaggtgtcccaaagcaaggaatttaatcattttgtgtgacatgaaagtaaatccagtcctgccaatgagaagaaaaagacacagcaagttgcagcgtttatagtctgcttttacatctgaacctctgtttttgttatttaaggtgaagcagcatctgggtgtgagagtgaaacaagcgtctctgaagactgctcagggctatcctctcagagtgacattttaaccactcaggtaaaaagcgtgtgtgtgtgtgcacatgcgtgtgtgtggtgtcctttgcattcagtagtatgtatcccacattcttaggtttgctgacatcatctctttgaattaatggcacaattgtttgtggttcattgtctccttaaattagactgtaagcaccttgatggaactcatactaccttttatttcacacacacgcacacgcgcacacacagcctacacatacactgcctagctcattgtagcatactaaatactgattttaatgaataagctaaaccttcgaaacccatttgctaatcccagcactttgggaggccaaggtgggtggatcacctcaggtcagaagtttgagaccagcctggccaacatggtgaaaccccacatctactaaaaatacaaaaattagctgggcgtggtggccaatgccttgtaatcccagctattctggaggctgagacaggagaatcgcctgaacctgggaggcggaggttgcactgagctgggattgtaccactgcactccagcctgggtgacaaagtgagactccatctcaaaaacaaacaaacaaaaacacatcatttcccctatagcaaaaacatgacggcacttactgtatcaagagaggtgagaaaaaggagccacagcaggatgattcaagggactctgcatagctccattttaagaatatgcctactgcaggtcagagaaggtaagcaaactgcctaaggccacacagccaggtacagaactctcaccaatattattgccagcaatcgcaattttggtgtttattcttggtaccaagttggagactatagggttctcttcctaatagagaccatctagcctttcactgttttgtggatacttctttctcttcttctttttttttttcccttttaaaatctagttatttttttctttttggtttctttgacacagggtctcttactctgttacccaggctggaatggagtagtgcagtcatggttcactgtagctttgacttcctgggctcaagcgatcctcctacctcagcttcccgagtagctgggaccacaggcgcccaccaacacctccagctaatttttaagtttttactagagacaacatctcactatgttgcccaggctggtctcaaaatcctgggctcaagtgatcccacctcagccttccaaaatgctgggattacaggtgtgtgcaccacgcctggcctattttttttttaattgctcataaatcatcttttttctttaaaaaaaagaaagatgggaggctaaagcaggagaatcacttgaacccaggaggcggaggttgcagtgagctgagatcatgctgctgctctccagcctgggcaacaagagtgaaactccatctcaaaaaaaaaaaaaaagaaagtacacaattttactttctggacctaatggtcaaggccaataatttggtcacctatgaaataaataaaagctttaccatatatatgaccatttgataatgtaatatgaaatgtttatgtactaaaggcagaatagtctagaaaaaacattctgtatcacaacgtctaaaaatgaatatcatcttcatcatagaaccaggctctttctcctaatttttttttttgagatggagttttgctctgtcacccaggctggaatgcagtggcacaattttggctcactgcaaccttcagctcccaggttcaggatcaagtgattttcgtgcttcagccttctaagtagctgggattacaggtgactgccaccacacccagctcatttttttgtatttttttagtagagagagggtttcaccatgttggccaggctcgtctcgaactcctgacctcaaataatccacccgtctcagcctcccaaagtgctgagattacaggcgtgagccaccaggcctggcctcctaatttttatttgtagaagtggcaccaaaattttccaagttctcatgcaaaaattcaggctcatctcagtttatttttttcatttatttatctcccactaaattgacaacttctaataattaggttggttctttgtattcccagcacagggttctatgcagaatacacacacagcagttgctggcaataatattggtgagagttctgtactgggctatgtgatcttagacagtttgcttatgttctctgacctgccgtaggcacattcttaaaatgaagctgttcagaccccctcgattcatcctgctgtggcttctttttcccacctaaatcttaaatacccttttagctgctagtaagtgaatgatgtttttttatgaactttctgaagtcagattagatgaagttgagaaaagcctgatattcttataaagttatatatgtgcatcatagaaaacttagaaaatacagataaacaaaaatcatccatggacgaaccttgaagacattgtgttaactgaaataaaccggacaccaaaggacacatgttatatgcttccacttatatgagatacctagaatagttacatttggttactctgggtacattgcctatagataagccttgctccacaaggagcagttaaaaaaaaaaaaaagataaattcataggatggaaggtagaatagtggttactagggacttggggagggggaaatggggagttactgtttgatgagtgcagatttcagtttgggatgatgaaaaagttctggagatagatagtggcaatggtaacacaacagtgtgaaaataatgccactgaactgtacacttaaaatgattaaaatgataagttaattgtaatttgtgttatccagaaatggttagcaatttattggtgtatattcttttagtattcctgtgtgtgcacaggggtgcttgtatatactttatctttaaaatatatccaggaagctaggcacagtggcttacacctgtaatcccagcactttgggagggtgaggcaggaagattgcctgagccccggaggtcaaggctgcagtgagttgtgatcacgctactgcactctgttctgggcaacccctgtctgggaaaaaaaaaaaaattagtgaggcttagtggtgcacacctgtagtctcagctacttgagtggctggggtaggattgcttgatcccagcaagttgaggccgtggtgagccatgatggtgccactgcactccatcctgggtgatatggtgagaccctgtctcaaaaacaagaaatccagataattctgtgcattataatctagcttttactggatcattaaaattcttttttctttttttttttttttttctgagatggagtttcactcttgttgcccaggctggagtgcagtggtgtgaccttggctcaccgcatcctctgcctcccgggttcatgcgattctcctgcctcagcctcccgagtagctgggattacaggcatgtgccaccatgcccagctaactttgtatttttagtagagacagggtttctccatgttgaccaggctggtctcaaactcctggcctcaagtgatccacccacctcggcctcccaaagtgctggggttacaggcgtgagccaccgcactcagcctgggtcgttaaaattcttaagtgacttcatttttaattactatatgggattctatctttccagtgtatcatgatttatttgacctattgctgaatgttggaggtttcagggtaagaggcacagtttgctattatgtacatcactatagtggcatcctgatagctaaatatttgcctacatccctgattatttccttagtctaaattactgggactaggattttggtgtttgatacatgttactaaattgttttttagaaagattaaaccagtttatgctcttccagcccctgtggtatatgatagttcccattttcctgtaccttgccaacactgggtgatatccagttttaaaatctaaatcttgcattgctatgagaactacaattagagaaggcttatcttctactgcccattctctgtacagagcaaatccctctagacctgaagccccttggagttgtcaagaaacctttgagatgactccccactctgtatctgagctgtcaccagtattctccacttcttcaggattgccatggcaactaaattgatgaaaagatttaggaggccttttctctctttgcaattcctatgatcctttttgaatgtgggtttgggactctgtcaatatacccatcatctaattctgtccattgtgttttaaagtttaaggttgcaatttctgattacatctgccttagccatactgtattatatttgacattcaatatacaatgtccttgtttttctgtatttctaatcttattcccagagatgtgtctatttgttcaggattcattttgcaacgtgtttttactaagcatctacccaaaaccgttgaagtcagatttcaggctgtcttacgtctaaagtagcacaggcaggaaaaactattgaagtgggatttttttttccctttttgtactgaaccgagaaaaagtatatagatgatagagaattcctaatttggtatcattgatatctgggtttttgtttgtttttacagaagactgattaactatacttatttattaatttatcttctcattaataaacacttgctgagtgcttactgtctgctaggcattagggagacaaatatgattaagggaagcttcctcctatcaaggtcatgtgttccatttgggtatactaatgcattagcaatgtaaatcaagtagtgagagatcatctgttcccgataggagatggattattggtggggacttctgtgtgtgtgtgtgtgtgtgtgtgtgtgtgtgtgtgtgtatgtatgtgataaaataaatataggaaatgttaattatagattctaagtagtagatatataaacactcattgcaaagttgcttcaagttttctgtatatttgaaaatattcacaacatgtcgacaaaactagcatgataaagccactatttgtgctaagacttcagcttgtatctggattaggcttattatgtagtagtaggaacattagaaatagttttaactcattaaatacacatgttttatgggaaggttttatatatatatttatatgtaatgaatgtgaacaaacaagggtcagatatacactctgcttccctccagaccagttccggctgctctgctgcacatttcaggagtcttattagaattagccacattctgcccacttgcccttacttctcatatttcacaactcctcctggtggggacttaaggagacattcaaactaggccttgaaagatgagaatttttccaagtggaaaaagaggagtggcagcaagtaaggtaaaggtacagagtcatggaattcccaggaaacgtaaagttgtcatgtgttataggaaaacaacttgtgtgaggggtgttgggagaaatgagagataataccagggtataaagggccttttgaatgctatgttgaggaattttatcctaatggcagtaatgactaacaattatatagtgttcaaaaagtataaatcagcagtggtataccactaagggtttttttcttttctttttttttttgagacagagttttgctctgttgcccaggctggagtgccgtggcacgatctcagctcactgcacttccgccacctgggttcaagtgattcttctgcctcagccagtgtttcactgtgatggccaggatggagcactaagggtctttatggaagaaaaagacatgataaacaaggcttttagggaacttctacagtaatgtagctgtattaaaagtagagatcagagcagcatagtagaagtagaaggctagagctaattgaaggagcacttcagaattagaatcaagaagtcttagaaacctattggttttattctccctaatgtatttggccacttacctgctggggaatttgtctaagttataaaaaataattcctttgggaaacccaaaggaaagttatctattaataattaccccactactttttctgatttatgtaatggccacgtagaggttagatgtgatggttgtgacagtagtgactaatacagcctgtgaagcattttggtcagatatctatgtgctttcattccaggttgactgaggcaagactttggctagggtttgatcagtgatgtaactactcacgagtaccacgtggtggcaatggcattgctgcagaccttggcagcaaagcagtgttagagtagcagtagaaacctttgtgaagctaggaatacattttctggtcataaaaacctcctgaaaattgtgaactcagtgtagcaggagaaagaagatggcttgtttttagtaaagggcaaagtcatttttaaggatcagaagaagaaacggagagtgaaacaatgtgttcctgccctactcccccactggactttttggcaaccattgctgttccttctaaaagtgatttttaaacatgtatattttgaagccaggcacagtgactcacgtctgtaatcccagcactttgggaggccgaggcgggcagatcacctgaggtcaggagttcaagaccagcctggccaacatggtgaaaccccgtctctactaaaaatacaaaaattaggccaggtgtggtggctcacgcctgtaatcccagcactttgggaggccgaggcgggaggatcatgtggtcaggagatccagaccatcctggctaacacggtgaaacaccatttctactaaaaatacaaaaaattagctgggcatggtggcgggcgcctgtaatcccagctactcaggaggctgaagcagaagaatggcttgaacctgggaggcggagcttgcagtgaaccaagattgcgccactgcactccagcctgggcaacaaagtgagactccgtctcaaaaaaaaaaaaaaaaattagtcgggcatggtaacaggtgcctgtaatcccagctacttgagaggctgaggcagggagaattgcttgaaccaggtaggcggaggttgcagtgagccaagatcgcaccactgcactccagcctggggcaacagagcaagactgtctcaaaaaaaataaataaataaaataaattcttaagaaggatattttggaaaactccttacatacctaaattctttgtttatcaaatacttggacttagcacactcttctttgaaatggaccaataaacaacaggagcccataagcaaaaagaactcattattttaaaaacagtaactatccttacaggctttctcagggctctttctgttggatccttccctctcacaggtccttgctaatgatctctaggtggacacattctagatgagatgtccctgtctagaatggcagcaccatgagggctatatcctcagtactaggacagcgcctggtgcttaatagatagtaaatagttgtctaattaactgagcaaacagatagattcatgaattagctttttgctttttctgttagaaactaaaggttcaggtcaggcacaatggcgcatgtctctaatcccagcactttgggaggccgaggcgggctgatcacttgaggtcaggagttcaagaccagcctggccaacatagtaaaaccctgtttctacaaaaattaccaaaattagccgggcgtcttggcaagcacctgtaatgccagctacttgagaggctgaggtgggagaatcgcttgaacctgggaggaagaggttgcagtgagccgagatggtgccaacctgggtgacagagggagacttaaaaaaaaaaagaaagaaagaaagaaaagaaactaaaggttcaaagaatcccagaaaaggaagagtcctcacaagccagtaatctaggcaggattactgatagtatttttatatttgttgtatttttataaaatgccatagatagagggcttttttcaacattacatcagtctaaaaatcacacatttttatatgaactaacctaaatgtctgatgaatctcacaacaccaagtctttgaaatgtgcccatataaataaaatgttaacagattcatgctaattttaaatatcgatagtgtttaaatgccttaattattttttcactccctagctttaaaagaaaataaccaacttcaaaaggacatcacaataacatcaagtctatttgggggaatttgaggattttttccctcactaacatcatttggaaataatttcatgggcattaattgcatgaatgtggttagattaaaaggtgttcagctagaacttgtagttccatactaggtgatttcaattcctgtgctaaaattaatttgtatgatatattttcatttaatggaaagcttctcaaagtatttcattttcttggtgccatttatcgtttttgaagcagagggataccatgcaacataacctgataaagctccagcaggaaatggctgaactagaagctgtgttagaacagcatgggagccagccttctaacagctacccttccatcataagtgactcttctgcccttgaggacctgcgaaatccagaacaaagcacatcagaaaaaggtgtgtattgttggccaaacactgatatcttaagcaaaattctttccttcccctttatctccttctgaagagtaaggacctagctccaacattttatgatccttgctcagcacatgggtaattatggagccttggttcttgtccctgctcacaactaatataccagtcagagggacccaaggcagtcattcatgttgtcatctgagtacctacaacaagtagatgctatggggagcccatggaagatacatggtatacaacatagctcttgctctattggaagctaagtggaatgggagaaattggtgacaggcaaccccataatttcagaaagctatgaaaaagtactcagacatattccttataacactggtgtcacatcacaaagacctatttaatgtgcttctgatttatagggagagacatcctatacttcaggaactgcactttgatccacagaaagcctagtgatgtagagctcctgttagttcaaaaggaaaagaaaagaacaacacagaaagcctaattatgcaatagagtcaagtgctttatagcaatgttacagttatcaaaaaaaatccagatggacctctgagaggatgccattggagtaaccaggcagatgcagttgatcagagctgacttcctataagaagtgagcactgagctgaggaataatggcataaatgaaggaaagtgagatggaaatttgagtttttaattggaaagacaatacatcaggcagatttttaaataggggcaaacaaacagacacataggagatgctaggcatggggtccccactaggatgctgcttagaaacatgcaggggtggtgagtactcccaaagtacacttcattcctagctcagtgattcttatctgagtgttaaagttccttcttcagcaccccgttccacagtccaactgggaactttaagacctttcttggagtctttctaggaactcaagtctgctacttatacagaacagtggctttggtccccagttgtgccttgcagtatttttgtgttcaggaagaaacagtagctcttggataaagaagctagctagaaactctgttgctatggcagtgcttcaaaatgtatttccttaaatgctttctttgtaactatcttcatttagttcatctctcagataatgagagatcagagtcccatccccagtataatactcttctttagggtactttcaccatcttcagtctaaacacagactagactttcaattataatgtgtaagatttaaaatgttattattgtgtgactttgaatatctgtgtaaatctactatctcctctttggtatatacgtgtgtttatttttttctggagatctgtaactgaaatgcttaatttctgaattgttttggatatcacaacttaataccaacataagttttgagcctttttctccctaaatctggtgtgagtctaactgaaactcaaatgaactttttaaaaataattttttcttttctttaattttttttttaagtagagacagggacgcactgttaactaggctggtcttgaactcctgatcttgagccatcctccccgacctgagcctcaccttatagagagggtcttgctctgttgcccaagctggagggcagtggcataatcacagctcactgcagcctctcgacctcctcaagcgatcctcctgccttagcctcccaagtagctgggactataggcgtccaccaccatacccagctaatttttttttttattttttgtagagacaaggtctccctatgttgcccaagttggtctcaaactcctggactcaagcagtcctctcacctcagggtcccaaagtgctggggttacaggtgtgagccatggcacctggccagaacttctagtaaaaagaatattgttgccgggtacggtggctcacgcctgtaaccccagcactttgggaggccaaggcaggcgaatcacctgaggtcgggagctcgagaccagcctgaccaacatggagaaaccacatctctactaaaactacaaaaaattagccgggcgtggtggcacatgcctgtaatcccagctacttgggagctacggtgcctggcctagtttattatttcttaatatctgttgtcttccagtgtcttccttaattcttcacaataccctgtacaatgcttagcacacagtgggcagtctgtaagtttattaaatgtttggtgtggcccatacttcctatccacaaagaatgtaacatgttaagacatctagatgagggaatgatttaagaggaactacaataatattctgaaacttggactctggatctctgcatttagactttcctaaaccagccagcaagtagatcatcatgtcacaaggcttaggttgggcttgctgttcagagaatgaattaaggattaaggagaaaaaaaagcagaaaggttttgctctgtttttcaggttctattgagttgttaacttctaacaagttatcttatttgcttcattgcatgaggcccattgtagtaagaagaggaatttatatgctaaatgttctggtgatagaatgacttttctttttttttacagtccaaaggtcttttttttttttttttaacacctattatgccatgaattcatagggaataggttccagctgctcaggctccttcccattggttctcacaaagtgtgcttctctgggtggagcaggctggtgcttcagttgaacccacgtacctttctctttggcttctttctttttctgatcattttccttcacgcgtttcaggaagctgtcttggctcttagagtgtttaatgtgctcaatacgcacattaattctcttggcaagaatcttgcccttaacttgtttacagcgatgccaacagcatgctgggtcacgttgtagacttttccagttttgccatggtaacacttgtggggcattcctttttgaacagtacccgttcccttgatgtctacaatttcacctttcttacagattcgcatatacatggccaaaggaacaactccatgttttctaaaaggcctagagaacatatatcaggtgcctctcctctttccctttgtgttcgtcattttggcaaattactgaaagatggtggttctggccaaaaggaggaatgactttttaatagctgtgtttgtatctgagccttccctctgcctttcattttttttgttttgttttgttttgtttttgtttgagatgaagtttcacttttgttgcccaggctggagtgcaatggtgtgatttcggctcattacaatgtccgcctcagcctcctgggtagctgggattacaggcacccgccaccacgcccagctaatttttgtatttttagtagagacagggtttcaccatgttggccgggctggtctcaaactcctgacctcaggtgatctgtccacctcggcctctcaaagtgctgggattgtaggcgtgagccacatcacctggccacttttttaactctttccaatggttaattccgtttgatatggttccttggaacttgcacattaccctttatcaattatcaccctgtattgggggtggggaggatgatacctctcttcatagttagatcctacttactttcaacagagttcttaacaatcctagaaactcacaggtccagaaaagacaagcataaaggaaactataaataatgcatttgaagactaactcaggaaatcaatgattatttccccccaggctacccagtgtcttaaaaaaacagtttaattaatacaatcttttgtttcaattttctacctatatttatggcttttagcttttctaataaaagctcaaaatgaattacagtcatcagtgactttttaatgaatagaagacttttgcaatttttaactatttgtttttacttattaaatatttccgccttggccaggcatggtggctcacgcctataatcccagcactgtgagatgccaaggcaggaggatcacttgagtttaagagttctagaccaggctgggtatggtggctcatgcctataatcccagcactttgtgaggccaaggttggcggatcacctgaggtcaggagtttaagaccagcctggccaacatggtaaaaccccatctctacaaaaaatacaaaaattagccaaggggtggtggtgggcacctataatcccatcttcttgggaggctaaggcaggagaatcgcttgaacctggaggcagaggttgcagtgagccgagatcatgccactgtattccagcctgggtaacagagcaagactctgtctcaaaaaaaaaaaaaagtttgaaaccagcctggtcaacacagcaagacacccatctcgttgaaaaataacggtcgggcgcagtggctcacgcctgtaatcccatcactttgggaggccgaggcaggcagatcacctgaggtcgggagttcgagaccagcgtgaccaacatggagaaaccccatctctactaaaaatacaaaattagttgggcgaggtggtgcatacctgtaatcccaactacttgggaggctgaggcaggagaacagcttgaacctgggaggcagagaggttgtggtgagccaagatcatgccattgcactgcagcctgggcaacaagagcaaaactccatctcaaaaaaaataaataaataaaaataaataaataagtacttctgcctttaagccacttcctagaaggcagtggcacaaagtgatacatttggaggagtaaatatattacaaaatgaattaggctgggcgcagtggctcatgtctgtaatccccgcactttgggaggccaaggcgggtggatcacttgaggtcaggagttcgagactagcctgatcaacagggtaaaatcccatctctactaaaaataccaaaaaaactagctgggcgtggtggcaggcacctgtaatgtcagctactaggaaggctgaggcaggagaatcgcttgaacccaggaggtggaggttgcagtgagccaagattgcaccattgcacttcagcttgggcaacagagtgagactccgtctcaaaaaaaaaaaaagaactaacatgccagaactttgccttcagtatgttttgtgatttttcccttcttgtgccatttcatcattagttccatgtattatttaagatttcttatcaaccagcaccttgggatttttttgtgtatgtgttggtttagggggtttatttgtttttttcttttttttcggtaattgaaaatgtgaagcaaaatgtcacctgttttttctttcatgtctgacactcatgtcttgtttacccccgacatgcagaagctgaaatccccatttcatacagtcttcaatgtggaggcagtagggatggagaaaataatgtactttgtgctctccggtactctttctttcctattgtctgaggggatttgggcataatttattttgctgcagagataaaaatttgttatatatattttttatcattcagggccaaggaatatagattttttttttcagccttgtctcagctgggtgtctttatttactctgtcttaaagtgttccttttattatcattattattttttaatcattgaattccatttggtgctagcatctgtctgttgcattgcttgtgtttataaaattctgcctgatatacttgtttaaaaaccaatttgtgtatcatagattgatgcttttgaaaaaaatcagtattctaacctgaattatcactatcagaacaaagcagtaaagtagatttgttttctcattccatttaaagcagtattaacttcacagaaaagtagtgaataccctataagccagaatccagaaggcctttctgctgacaagtttgaggtgtctgcagatagttctaccagtaaaaataaagaaccaggagtggaaaggtaagaaacatcaatgtaaagatgctgtggtatctgacatctttatttatattgaactctgattgttaatttttttcaccatactttctccagttttttgcatacaggcatttatacacttttattgctctaggatacttcttttgtttaatcctatataggttttttgaacctataacataagctacaacatgagaaatgtgcggttagatagatatgtcccttctgaaggtcagaaaaaaatataatggaggtaaaacctgaacaagcttggaaactgatggtagacttcttcaaggcagcccttgccctaattaaaattcttgtctttctagaaaaagtctagctgttgatttaccacagaaaataataataataattactattattattattttttgagacagggtcgccctgtgtcacctagattgcagtggtgcagtcatggctcactgcatcctccgtttttcaggctcaagcaatcctcccaccttagcctcctgagtagctgggtccacaagcatgcgccacccacacccactaagtttttgtatttttggtagagatggagttttaccttgttgcccaggctggtctcaaattcctggactcaagtagtccgcccgccttgccctcccaaagccagaaaacatttagaatatctttcagagatgtgtatttacaccactattaacacagggctgtatagcagtccagtactggactatgtagtccagtactattcttttccttactggagggccaggcgtggtggcaggtgcctgtaatcccagctactcaggaggctgaggcaggagaattgcttgaacctgggaggcagaggttgcagtgagctgggaccgtgccattgcactccagcctgggcgacagagcaagactccgtctcaaaacaaaaaaaaaaagagagagagagcagtaattcaggtctcacccatcttcaatccagggggcctagccttagtatttgacccatagtaagcacccaataattgtttaaattaattaacctctgaggccctttaaatctgttgataagtatcttattttgcaaagtcctaagcacttggaagagcagaggaactatttactgggtgtgtatgcttttctaacaatattttatagctggcttttgtttttagaatgaatttgaacattgaaaaggcaggcaatagggatgattctgtgaattctgctaaaactgagtagaaagaatgagtgtagagatgtcgacattgatcaactttctatcttcataagagatctgattctaacatatccatttagactcaagtagaatattgtgtatagagtgagtggcagtgagtaatttggtaaaaatttgctgacctgcttttattctttcctcctttctttcttcctttccttccttccttccttccgtcctttcctttcctttccctcccttccttccttctttccttctttctttcctttctttcctttcttcctttctttccttcctcccttccttttcttttctttctttcctttccttttctttcctttctttcctttcctttctttcttgacagagtcttgctctgtcactcaggctggagtgcagtggcgtgatctcggctcactgcaacctctgtctcccaggttcaagcaattttcctgcctcagcctcccgagtagctgagattacaggcgccagccaccacacccagctactgacctgcttttaaacagctgggagatatggtgcctcagaccaacccaaccccatgttatatgtcaaccctgacatattggcaggcaacatgaatccagacttctaggctgtcttgcgggctcttttttgccagtcatttctgatctctctgacatgagctgtttcatttatgctttggctgcccagcaagtatgatttgtcctttcacaattggtggcgatggttttctccttccatttatctttctaggtcatccccttctaaatgcccatcattagatgataggtggtacatgcacagttgctctgggagtcttcagaatagaaactacccatctcaagaggagctcattaaggttgttgatgtggaggagcaacagctggaagagtctgggccacacgatttgacggaaacatcttacttgccaaggcaagatctaggtaatatttcatctgctgtattggaacaaacactttgattttactctgaatcctacataaagatattctggttaaccaacttttagatgtactagtctatcatggacacttttgttatacttaattaagcccactttagaaaaatagctcaagtgttaatcaaggtttacttgaaaattattgaaactgttaatccatctatattttaattaatggtttaactaatgattttgaggatgagggagtcttggtgtactctaaatgtattatttcaggccaggcatagtggctcacgcctgtaatcccagtactccaggaggccgaggcaggtggatcagctgaggtcaggagttcaagacctgtctggccaacatggtgaaaccctgtctctactaaaaatacaaaaaaattaactgggtgtgctagtgcatgcccgtaatcctagctactctggaggctgaggcagcagaatcacttgaacccgggaggcggaggttgcggtgagccaagatcacaccactgcactccagtctgggtgacagagcaagactccatctcaaaaaatatatatatatatatatacacacatatattttatttcaactgttagacaagagtccaaaggccaaagaataaagttttaggccagtcctttattagaaaatgagtcaaatcccaaagcaagtttttttatgagttaatgaatataaatgactacatattttatgccttaaaaatcacttttaatgaatggtgttttatggcttgtaaatcagagttttaatcagtaaagaaagtttttaatcctcaaaaacacgttatcataaaagacactgtttggcatcaaatgtggtatttggccatgttcattagggtcattttaggaatctcatacattctacttagctatgcttaattcctgataccatggcattttctgaaatgtttcaaggatgacatctctgctgtttttaatttggtaatgatatctgctgatttattaagtgaaaaaagtaatggtgtcattaccttggatgaagaaacaaaaataaagcatttgccacatttttcaactttgttttcctttcttacaaaattgctataagctcattgcccccaaattggacaatatagggaataaaaaagataatttggggtggggttagacacgggtcttgttatgttgccgaggctggtctctaactcctggcctcatgcaatcttcctaccttggcctcccaaagtgctgggattataggtgtgagccacttcaccaagctgagatgccacctcttaaaagagagaataaggacagattacagccactgctcatgcctgtaatgtcagtactttgggaggccaaggtgggagaattgctcgaggccaagagttcaagaccagcctgggcaatgtagcgagacctgatctctatgaaaaggggggtgggggggaaaactagctggggccaggcgtggtgggtggcttacgcctgtaatcccagcactttgggaggccgaggcgggcagatcacctgagggcaggagttcaggaccaacctgaccaatatggagaaaccctgtctctactaaaaatacaaaattagccaggcttggtggcttatgcctgtagtcccagctactcgggaggctgaggcaggagaatcgcttgaacctgggaggcagaggtttcagtgagctgagatcgcgccattgcactctagcctgggcaacaagaatgaaactccatctcaaaaaaaaaaaaaatcagctggaaggtggcaaacacctgtggtcccagctactcaggaggctgagacaggaagatcacttgagtccaggaggtcaaggctgcaggtgagccatgtttgtgccactgcactgcagcctggatgacagaccgagacccttctcaaaaaaaaaatttttcccggtatttttttttgggggggggtttaattcttgttgcccaggctggggtgaattggggaattttgggttaagggaaccttcggcttcctgggttggggggtttttcctgtttaggcttccccagtagctgggattacaggcatgcaccaccacgcccggctaattttttgtatttttagtagagacagggtttctccatgttggtcagactggtctcgacctcttgacctcaggtgatccgcccaccttggcctcccaaagtgttgggattacaggcctgagccaccgcacccggcctgtactcttattctttaataataaaatatttctgtgtttctttagtcattttacataaacttttatttatttatttatttttatttatttatttttttgagacggagtctcgttctgttgcccaggctggaatgcaatggctcaatctcagctcactgcaagctctgcctcccgggtacacgccattcccctgcctcagcctccctagtagccgggactacaggcgcccgccaccacgcccagctaatttttttttttgtattttcagtagagacagggtttcactgtgttagccaggatggtcttgatctcctgacctcgtgatccacccgtctcggcctcccaaagtgctgggattacaggtgtgagccaccgtgctcggcccataaacttttatttttaaaataatgtcatgataaataatattgcttaggtgtctttaatatattagtaacatttctgttttattgtacatcaacatttatattcaaattaatgggtgaagagtactccattggactaggtatatcgtaatttaatctcctattattggacaactacattgtttctaaaattatactattcctatgactaaacctttgcatatatcttttatctccctaggatatatttctaaaactagcattgttgactgaaagtgtaaatacgtgttaaggtgtttgctacataatgccatatttcctttttaggaaactaagctactttggatttccaccaacactgtattcatgtacccatttttctcttaacctaactttattggtctttttaattcttaacagagaccagaactttgtaattcaacattcatcgttgtgtaaattaaacttctcccattcctttcagagggaaccccttacctggaatctggaatcagcctcttctctgatgaccctgaatctgatccttctgaagacagagccccagagtcagctcgtgttggcaacataccatcttcaacctctgcattgaaagttccccaattgaaagttgcagaatctgcccagagtccagctgctgctcatactactgatactgctgggtataatgcaatggaagaaagtgtgagcagggagaagccagaattgacagcttcaacagaaagggtcaacaaaagaatgtccatggtggtgtctggcctgaccccagaagaatttgtgagtgtatccatatgtatctccctaatgactaagacttaacaacattctggaaagagttttatgtaggtattgtcaattaataacctagaggaagaaatctagaaaacaatcacagttctgtgtaatttaatttcgattactaatttctgaaaatttagatctagataaagctatagtgtggattattttatgtatatttacttgagaaaataattattaaatattagtggaaaagctatactttgggtatgatataggactttcgaattggaattttcctttctatctgtaaaagcaagtaggtatagttttattccccagaaggcatctttttctcccccttgtctcacatgggtgaatttaccagcatatttaactaaattcagactggttccaaatgtactgccagatagtagcatttctctagtgtttgttttcatcctggcttgtaagaatgccctgccacttctgccctgcaatatcccttgctattaggattttggcatcaccttgggtccttaatgccagaaatgggaattgcttcatactgtggaaaaatacccattaaaatattaagaccagtaaaacctcgtttctgcttgggctatttgtggatttcagacatcctgagaagtttaccacccctgtaattaattgtcattgtcatcacttcataataaaaataattgcatggccgggcatggtggctcaagcctgtaatcccagcactttgggaggctgaggtggtcagatcacctaaggtcaggagatcaagaccagcctgaccaacatgaagaaaccccatctttactaaaaatacacaattagccgggcgtggtggcgcatgcctataatcccagctactcaggaggctgaggcaggagaattgcttgaacccgggaggcggaggttgcggtgagccgagattgcaccattgcactccagcctgggcaacaagagcgaaactctgtctcaataataagaagaagaattgcgtgaatatttctttaaaactatgatgagataacataccagattatcaaatggattcagtagtgggtgtgccatttattgcacactgagagatgaccaagtcattctgaaatatctttattaatatatccttcctaggatttttcatcctaacttctccataggtagttacttagcataacatctctgtggccagatgtatcccactactaaaagggcaaagtaagctgtggctgccctggtagatacaatgagtaagtgcacagtgatggctataaatgttttcatctcataatcccatgtccagaccagcaatttgctctgaaagctcttacctgtgtctgtttcaatggctcttgatcacttgcctgcacgtccagaattccttatttattcattgaaaattagcgttctttatccctttgttttgcaagttcagctttttagagatggctaaaatggtctaatctttcttggcaaaggcaattctgagctgcagattagactacaagtggcttgggtacatgttgtctttaaacaagcgaagaggaaaactttgagctctattcagacttggtgaagtgtggtaaatttatgatgaaagctactgactgtattacacatgattaattctgaagcccatattaagatgatcttttcagcagttcagcattgctcttctaactgaacagtttcaaggctgggatttcagcaattaatcagttcagaattgctaatgatctggcggagggtggtagcaaaagggggaggatgtcattagcttctctagcctgccttttttcagtgccctgtggcagtatggagtgaggcaacatgaaagaaagatggcctgaccttcatggcagtattgtgcaacacgtaaatactggtgtgagtggctgtggctatggctagtaaatgatggcccttggtaaacaaagttatttatcagacaatacctaccagctaggtcaactgtgcccataattgatctggttaatttcttttgctgcctattgatttttatttggttgatagataatagctagaggactctaaatttctttggggaagaacatgaaccccttctaagccttcttacgagagaattgatcgcttttgcactgacctttagtaacatcctgatttcagtgttttgtaactatcagagggttgagtcttggttttaagccatgtatatctgtagcataactttctgtgtaggctagttacctctcagcttataaagtgtaggctgataaatttatagtacagtagagtgtcactatgcaaagaaacgatcttagggaatcgaatgatatctgctattaaagcaaaattaatatatattttttctttttacttttttttttttttaaagacatgaaatctcactgtattgcccaggctggtcttggtctcagactcttgagctcaagcagtcctcccacctcagcttcccaaagtgctgggattataggcatgagctgccgtgtctggcccagtatatattttttaagttttaagttttgtggtacgtagtaggtttataatattattttgaatccttagttgtaattttatgtctgctgatgtgtacataatttttattaaactatttatttgagacttcaggtatcttttttttttttttgagacggagtctcgcactctcgcccaggctagagtgcagtggcgccatctcggcttactgcaagctctgcttcctgggttcacgccattctcctgcctcagcctcctgagtagctgagactacaggtgcccgccaccacgcctggctaattttttgtatttttagtagagacagggtttcaccgtgttagccaggatggtctcgatctcctgaccttgtgatctgcccgcctcagcctcccaaagtgctgagattacaggcgtgagccaccgcgcccagccgagacttcaggtgtcttagaattttttaaatgtaccctttctgagaaaaacagagacttaaagctaggataactggtattctattttttttttttttttttttttttacctccagcctgggtgacagagcaagactctgtctaaaaaaaaaaaaaaaaaaattcactttaaatagttccaggacacgtgtagaacgtgcaggattgctacataggtaaacatatgccatggtggaataactagtattctgagctgtgtgctagaggtaactcatgataatggaatatttgatttaatttcagatgctcgtgtacaagtttgccagaaaacaccacatcactttaactaatctaattactgaagagactactcatgttgttatgaaaacaggtataccaagaacctttacagaataccttgcatctgctgcataaaaccacatgaggcgaggcacggtggcgcatgcctgtaatcgcagcactttgggaggccgaggcgggcagatcacgagattaggagatcgagaccatcctggccagcatggtgaaaccccgtctctactaaaaaataaaaaaattagctgggtgtggtcgcgtgcgcctgtagtcccagctactcgtgaggctgaggcaggagaatcacttgaaccggggagatggaggttgcagtgagccgagatcatgccactgcattccagcctggcgacagagcaaggctccgtctcaaaaaaaaaaaaaaaaaacgtgaaaaaataagaatatttgttgagcatagcatggatgatagtcttctaatagtcaatcaattactttatgaaagacaaataatagttttgctgcttccttacctccttttgttttgggttaagatttggagtgtgggccaggcacggtggctcacacctgtaatctcagcactttgggaggccgaggcgggtggatcacctgaggtcaggagttcgagaccagcctggccaacgtgttgaaaccccgtctctactaaaaatataaaaattaggtgggcgtggtggcaggcacctgtaatcccagctactcaggaggctgaggcagcagaatcgcttgaacccaggaggtggaggttgcagtgacccaagatcgcaccattgcactccagcctggggacaagagcgagattcttgtctcaaaaaaaaaaaaaaaaaaaaaaggtttggagggtggtgagctgagatagtcaactattaactcctatctacctgctgggactacactggtgaggtggagcctaagtcctaaaacaacaagtgaggcagctggacgcggtggctcgcatcagtaatcccagcactttgggagcctgaggcgggcagatcacaaggtcaggagttcgagaccagcctggccaatatggtaaaacccagtctctactaaaaatacataaattggctgggcgtggtggtgtgcacctgtaatcccagctacttgggaggctgacacagaagaattgcttgaactctggaggctgaggttgcagtcagctgagatcctgccactgcactccagcctggcgacagagtgagactctgtctcaacaacaacaaaagaaagaacaagtgaggcaaaacctggagaccccagcttcatgtaacacctagtttgagtattgttgagagtttttcaggaaaaaagtctgataacagctccgagatagtcttaacatatgaaaaagcaaaaaagggaggagacagatcatttgtcctatacctttctcttttaaggttttaattataacttgtgtaatacaggagacctctgggtgtttttagttgactataaactaaatctgagtacacatttcagggctgctaaaaatgcttatttgaaactgggccgtattaacacaagcagaggctctggagcaagtgaagtacagatccagagccccactgtattctccaatggagtgattgcctgaaagatgatgtcagttttaagcaccgtgcttggtttttaacatggtcactgacaaattggagagtgtttatccagaggtagatggtaaagatacataaaagtaacttgaaatactgtcttttgaagaagaaatgagaagatttaaggaaataagacactgtcttcaagtatctgaagaaccgttacccggaagagaactgttatctggaacaggattaagactcactcatggggctccagaaagcagacgagtgcatggaggacgcagaagatgcagattgtgtggctcaactctaaaatctttctaacaaaattagttctctggatgtgttccagttcacttgatgatgattcttttgtttttgtttttgtttttgaggtgtagtttttcactcttgttgcccaggctgctggagtgcaatggcacgatcttggcttgctgcaacctccccctcccgggttcaagcgattctcctgcctcagcctcccgagtagctgggattacaggaatgcaccaccatacctaattttgtatttttagtagagacagggtttttccatgtcagtcaggctggtcttggactcccgacctcaggtgatccacctacctcggcctcccaaagtgctgggattacaggtgtgagccatcgcgcctagcctatgatgattcttttcacagagatacaggcacttaaggagaggatctaaaccccttggacacattgccgttgaacttctaagatcttaggtttccacttactcatgaaaattataccacagggtcagagggtagtgttcattggagccaggtgccagaacaagttattacaaactactattttagagaaaaatgtcattaaagtttaagataccttaagctataggtttgcatcaaagttaatgaaaggtaaaaagatgccaagcgtggtggctcaggcctgtaatcccagcgctttggggggccaaggcgggcagatcacgaggtcaggagatcgagaccatcctggctaacacggtgaaaccccatctctagtaaaaatacaaaaaattagccgggcatggtggcgggcatctgtagtcccagctactcaggaggctgaggcaggagaatggcatgaacccaggaggcagagcttgccgtgagctgagatccagccactgcactccagcctggctgacagagcaagactgcatctcaaaaaaaaaaaaaaaaaaaaatgcaaatcaaatctaaagtagttcagtctttaaactcaaagccaatacatttgctttgaactacaaatgaactgaagtttttaagtgtaataaatgttactaaatcggcttttgtagcagttaaacaaaaaacttcaaaaattgtaaggattctgtgagggagcatggctgctgctgctgctgctgcttgcagatagcctgctgtgtttaggatttagttaaatacatttctcctgtttaaaactaaatggtctttccttagtttgcttagttcttcagaagggcctttgaaacactgggaaataaacaagtgattctttagctactgctttctgaaatacttatataaaagctctgcactgtattctcccatccctctcaggggaatattagagggttaggactccccaggtagacattctaggggtgaaaatttgtcattacattgacatttcagatttaggttttcaacaatactgttttcttctttcacatattgccatctagtaatatagatgttctccgtccacattaatcaaaactattgacatggataattcctaattccttgaacactataatggagatctatagctagccttggcgtctagaagatgggtgttgagaagagggagtggacagatatttcctctggtcttaacttcatatcagcctcccctagacttccaaatatccatacctgctggttataattagtggtgttttcagcctctgattctgtcaccaggggttttagaatcataaatccagattgatcttgggagtgtaaaaaactgaggctctttagcttcttaggacagcacttcctgattttgttttcaacttctaatcctttgagtgtttttcattctgcagatgctgagtttgtgtgtgaacggacactgaaatattttctaggaattgcgggaggaaaatgggtagttagctatttctgtaagtataatactatttctcccctcctccctttaacacctcagaattgcatttttacacctaacgtttaacacctaaggtttttgctgatgctgagtctgagttaccaaaaggtctttaattgtaatactaaactacttttatctttaatatcactttgttcagataagctggtgatgctgggaaaatgggtctcttttataactaataggacctaatctgctcctagcaatgttagcatatgagctagggatttatttaatagtcggcaggaatccatgtgcagcaggcaaacttataatgtttaaattaaacatcaactctgtctccagaaggaaactgctgctacaagccttattaaagggctgtggctttagagggaaggacctctcctctgtcattcttcctgtgctcttttgtgaatcgctgacctctctatctccgtgaaaagagcacgttcttctgctgtatgtaacctgtcttttctatgatctctttaggggtgacccagtctattaaagaaagaaaaatgctgaatgaggtaagtacttgatgttacaaactaaccagagatattcattcagtcatatagttaaaaatgtatttgcttccttccatcaatgcaccactttccttaacaatgcacaaattttccatgataatgaggatcatcaagaattatgcaggcctgcactgtggctcatacctataatcccagcgctttgggaggctgaggcgcttggatcacctgatgtcgggagttcaagaccagcctgaccaacatggagaaaccccgtttctactaaaaatacaaaattagccgggcttggtggcacttgcctgtaattccagctactcgggaggctgaggcaggagaatcacttgaacctgggaggcgggggttgcagtgagctgagatcgcatcattgcactctaacctgggcaacaagagcaaaactccatcaaaagaaaaaaaaaatcgggtgcagtggctcatgcctgtaatcctaacactgtgggaggccaagacaggcagattgcctgagctcaggagttcgagatcagcctgggcaacatggtgaaaccctgtctctactaaaatacaaaaaattactcagcgtggtggcatgcgcctttagttccagctactcaggaggctgaggcaggagaatctcttgaacccgggaggtggaggttgcaatgagccaagatcgtgccactgcactccaacctggcaacagagcgagactccgtcttaaaaaaaaaaaaaattttgcagcgcaaaccaggatatcctctgttctcatttgttctagatttcaaaagaaacagtcctttctttggggaaaagagaaaggaaaaggagttttataaaaggaaagaaaagattcataagaacaagaagtgggcccacttgcatatacctttgtagaaaactgttcactgttgttgaagaaaagctcttcatattaatatgcagtccagatgcagtggctcacacttataatctcagccctttgggaggctgagacaggaagattacttgaggccaggagtttgaaaccagcctgggcaacatagtgagactctgtctccacaaaatttttttttaattagccgggcatggcagtgtgcttctgtagtcttagctactgaggaagctaagccagaagaatcacttgagcccaggagttcaaggctgcagtgagctatgatcataccattgcactcttgcacttgcacagagcaagaccctgtctcttaaaaaaaaaaaagtgtgtgtgtgcatatgcatatatacatatatatacatgcaaatgtatctgtttataattcagattgcttcaaaaagatgttgcactttatgatactgagaacagtgagaagtaaataagatagagtgtaggaggaggaataatttcagaacagccatctgagaacttctgtgacaacagatcaggcaaaatgaaatgtgaaagtaattttataggccaggcgtggtggctcatgcctataatcccagcactttgagtggccaaggcaggtggatcacttgaggtcaggagttcgagaccagcctggtcaacatggtgaaaccttgtctctactaaaaacacaaaaaaattagtcgagcgtggtggcatgtgcctgtaatcctagctgctggggaggctgaggcaggagaatcacttgaacccgggaggcggaggttgcagtgagcctagattgcaccactgcactccagcctgtgagacagaatgagaccctgtcttaaaaaaaaaaaaaaagtaattttataaactattgtgcacaattcgatgtattcataattaattaaatgattatttttgttggttttaacttttattcagtggctatttattgggagcctactgtgttctgggcactaggaatgcaacagtaaataagactaactaagtccctggtaggattcaggttctgtcgaggggagatacacaataaagatgaatttaagataacaataaatgctatggagaaatatacagaacagtggaatagtattagctgtcaaaggttgttgattactttcgtttaaggaggccagggaaagcctttctgaaaaaattgagctgagacctaaataacaagaaataattgtccttgaaaaatgaagggaatgcatcttataggcagaggaatagcaaacataaaggtcttgaggtaataatgagtgtggttttttgatttctgtattttggtttttttgagatggtgtctccctctatcccccaggctggagtgcagtggcacaatcttggctcactgcaaactctgtctcctgggttcaagcaattctcctgccttggcctcctgagtagctggtattacaggcacgcgtgctaccacacccgactagtttttatttttagtagagatggggttttaccacgttggtcaggctggtctcaaactcctgaactcaagtgatccaaccacctcaacctcccaaagtgctgggatcacaggcgtgagccaccatgcccggccagagcttggtttattttttaaaagataggccaatgttggtcgtgtgtggtggctcgtgcctataatcccagcactttgggaagccaaggcaggcaaatcacttgaggtcaggagttcgagaccagcctggccaacatggtgaaaccccatctctactaaaaatacaaaaaactagcatggtgtggtggtgtgtgcctgtaatcccagtgcctgtaatcccagctactccagaggctgaggcaggagaatcacttgaaccgaaaggtaggagttacagtgagccaagatcgcatcactgcactccagcctgaacgacagagcaagactcctgtctcaagaaataataatgataaaaggttcgggcacagtggctcacacctgtaattccagcactctaggaggccgaggcaggcagatcccctgaggtcaggagtttgagaccagcctggccaacgtggcaaaaccccatctctactaaaaaatgcaaaaattagctgggcacggctgggtgtggtggctcattcctgtaatcccagcactttgggaggtcaaggcggacagatcactgaggtagaaaccctgtctctactaaaaatacaaaaatttgcccagcgtggtggcgcgtgcctctaatcccagctacacgggaggctgagacaagagaatcacttcatcaacccgggaggtggaggttgtggtgagctgagatcgcaccattgcactccagcctgggcaacaagagtgaaactccatctcaaaaacaaaaaaaaattagctgggaatggtggcatgtgcctgtaatcacagctacttgggaggctggggcaggagaatcgcttgaacccaggaggcggagattgcagtgagctgagattgcgccactgcactccaggctgggcgaaagagcaagactccgtctcaaaaataataataataataataataggccagtgtagctggagtaatttgcaaattatgtgtggaggcagagattacacaaggaatgggagaaggtcatagatgagggccagatcacatagtatttggtggtaaggaattcagattttatccttgtggtaattggtggtgtggagatggttaaaaacaaggttggtttgggatgggtttgaagagaggacttgctaatggattaaatttggaggataaggtaaagagaaattgaaggagtgacacttgggttttggcttgaacaatagatcttgttagtaatattaaattagatgaagaaggcatggtagggaatatgggggagtgggaaaggcaggaagcaggaatggaaccaggaactctgttttagatgtgagaatttgttgttgttgttgttgttgttgttgttgttgttgttgttgttgtgacagcatctcgttctgttgcccaggctagagtgcatggagtgcggtagcacgatctcagctcactccaacctccgcctcccggttcaagtgattttcctgcctcagcctcccgagtagctgggattacaggcacctgccacaatgcctggctaatacttgtatttttagtagagatggggttttaccatgttggccaggctggtcttaaactcctgacctcaggtaatccacccacctcggcctcccaaagtgctgggattgcaggtgtgagccactgtgcccggccagatgcatgaattttgagatgtatactagacttctggatagagaagttaagtaggcagttggacacattgtatgaagctcaggggtacaaggaggactatgaacatgggagtcttctgacaaatttatcactagactcctcattcaagtaactaggaaatgtcagatattcttcccctagtaatagccagtggttatactcttgcctttagttttcttcacaatactcttggcaacacataaggccttccctacaatctgagtttcagtcagaattgtttctgagcgttcttcctcaaatttctccccagtctcattattctttattctcatgtccatgaccagtcataatagtaattatgaaaaacctctaactttctttagtgcattgaatgtatattttatcattttggttgtgttaactgtaaatctctcagtggaaatctgaaaagcctttatttccttagatgataatatacaattgatttaggagatagggaatttttcagttacctttataacagcacagtattagcagtctaatctaaatgctaagtgaatgttttgagaggagatagatgttgaaaattaaaatacattaagtcccagtgaggtgaaaagccgattgttaagttctgcacacaaaagatttgcttcagtgaattgatttcaacagctgagatcctagtcatttcacctggtctaccaaaaagaatgattttacttgcttttggtcaaatctctgcccagcaattctttttctttctttcttttttttgttttatgtgtgtgtgtgtgtgtgtttttttttagcagagtctcactttgtcacccaggcgggagtgtggtggtatgatcacagttcactgcagcctccaactcctgggctcaagtgatcctccagcttcagcttttcaagaaattgggactgcaggcacatgcaactatgcctggctgaggttttatgtatcttttttctagagaaggggtctcactgtgttgcccagctgggtctccagctcctggtctcaagctgtcctcctgcctcagcctcccaaagtgccaaagtgctagggttataggtgtgagccattggtgcccagctactgcctgcctggcaattctgaatgccttaaattttttttttttttttttttttttttgagacagagtttcactctgtcacccaggctggagtgcagtggcatgatcgtggctcacagcaacctctgcctcctggattccagcaattctcatgcctcagcttcccgagtagctgggactacaggtgcatgccaccacgcccagctaatttttggtttttttgtttgtttgtttgtttgttttgagacggagtctcgctcagttgcccaggctggagtgcagtggcgtgatctccgctcactgcaagctccgcctcccgggttcacgccattctcctgcctcagcctcccgagtagctgggactacaggcgcctgccactacacccggctaatttttttgtattttaagtagagacggggtttcaccgtgttagccaggatggtctcgatctcctgacctcgtgatccgcctgtctcggcctcccaaagtcctgggattacaggcgtgagccaccacacccggcctaatttttttttttttaattttatttttaattttttgagatgcgagatggagtctcgctctgttacccaggctggagtgcagtggcaccatctcagctcactgcaacctccacctcctgcattcaaaagattctcctgcctcagcctcccaagtagctgggattacaggtgcctgccaccacgcccaactaattttttgtatttttagtagagatgaggtttcaccatgttggtcagactggtgtcgaactcctgacctcaagtgatctgcctgcctcagtctcccaaagtgctaggattacaggggtgagccactgcgcctggcctgaatgccttaaatatgacgtgtctgctccacttccattgaaggaagcttctctttctcttatcctgatgggttgtgtttggtttctttcagcatgattttgaagtcagaggagatgtggtcaatggaagaaaccaccaaggtccaaagcgagcaagagaatcccaggacagaaaggtaaagctccctccctcaagttgacaaaaatctcaccccaccactctgtattccactcccctttgcagagatgggccgcttcattttgtaagacttattacatacatacacagtgctagatactttcacacaggttcttttttcactcttccatcccaaccacataaataagtattgtctctactttatgaatgataaaactaagagatttagagaggctgtgtaatttggattcccgtctcgggttcagatcttagctgataagtggaagagctgggactttaagcagatgagaatctaaagactttgctcttttcacttcactggggtgtctttctctctctctctcttgctctctctctctctttttttttttcccaagacggagtctcactccattgcccaggccagagtgcagtggtgcgatctcagctcactgaaaactcatcttgcccaggctggtcttgaacccctgaccttgtgatcctcccgccttggcctccccaagtgctgggataggcgtgagccaccgtgcccagccaataatagctaaaatttatataatgttcactgggccaggcacagcggctcgttcctgttatcccagcactttgggaagctgaggcaggcagatcgcttgagccaaggagttcgataccagcctgggcaacatggcaaaaccccatctctaccaaaaaaaatatacaaaaattagccaggcgtggtggcatgtacttgtagttccagctactcggaaggctgagttgagagtatctcttgagcccaagaagaggggactacagtgaacggagattgcgccactgcactccagcctagacgacagacagaagatctcaaaagaaaaaaaaaaaaaaaagatcactttatgctgggactgctctaaaggcccaaccatgttttaactaattaacaattttatgacaactctatgagctatgtactgtaattatgcctatattacagatgtgaaaattgaggctcagagaggttgaataagttgctcaaagtcacacaggtaataagtgatggaactagaagttgaactcaggaagtctagctccaagtctaaattctttgttaatttatttttcgggccagagtcttactctgtcacccaggctggagtgcagtgccactatctctgctcactgcaaccttcacctcccaagttcaaaccttgttcaattcttgtgccttggcctcccaagtggctaggattacaggcatgtgccacaacaactagctaattttttgtctgattctgttggccagtctggagtgcagtggcgcaatctcagctcactgcagtctccagctcccaggttcaagtgattctcgtgccttagcctcccaaatagctgggattacaggcacgtgccaccacaccgagatagttttttgtatttttaatagaaacaaggtttcaacatgttggccaggctggtctcaaattccagacctcagatcatctgcccgcctcaggctcccaaagtgctgggattacaggcatgagccactgcacccggccttaatttttatatttttattagagatggggttttgccatgttggccaggctggccttgatctcctggcctccagtgatccacccgccttggcttcccaaagtgctgggattacaagcatgagccactgcacccggcctccaattctaaactcttaacaacaatactatagtttcttgaaaagttgttgaaggcttcacggagggaaaaaaaatggagcattctaacaactttgcagatgagacccaagaagactcaatgactttctcctgatcatattgtagcagatgacttagccagaactctgacttcctcacagggagaaagtctgcaagatttcacacttacctgtcaggcctgagctggctgctttctcagctccctaagtgctatgttcccagtctgcttttcttcctttttcaagtgtgcactaccaggcatttcagaacatcccaggctggtcgcggtggctcacacctgtgatcccagcactttgggagcccaaggcgggtggatcacctgaggtcaggagttcgagaccagcctggccaacatggtgaaaccccatctctactaaaaatacaaaagttaactgggcgtggtggtaggcacctgtaatcctagctcaggattactcgggaggctgaggctagagaatcggttgaacccaggaggcggaggttgcagtgagccaagattgcgccactgcactctagcctggggacaagagggagacttcatctcaaaaaaaaaaaaaaaatcccagctgggcacagcggctcacttctgtaatcccagcactttaggaggccaaggcaggaggatcacttgagcccaggagttcaagactagcctgggcaacatagtaagaccctgtctctacaaaaaaatttaaaaattaattgggtgtcgtagcacactcttgtattcccagctactcaggaggctgaggtgagaagaatgcttgagtctgggaggtcgaggctgcagtgagccatgatggtgctactgcactccagcctggccaacattgtgagaccttgtctcaaaacaaaacaaaacatccttctactgagcactttctgtccctttatagaaacttaagagggaaccagtagaggtaatttcctaaggaaaactgctttgggacatgatcacaaatgaagcctggagttttgaactgctgaggtcagcctgtttttaccttctgagcctatcaagtaattgttccagatgccaagaaaagctgctggccttatttctgcttctgcctttaccacaggggagcgccatgtgagccagtcctctgtttttcctccactgtatgctaggcagtattagcaccagattcttcccctctttaaaaagaaattctagtgctttggattttttcctccatgcagaatagcaatgatggaaagtatgtggtcaaagtaatgacattctgaaaatactaaatgtcaccatagtatttttctctggaagagaaatgtatatgtagaggtgaaacttcaaatttctttttttttttttttaagacgaagctttgctcttcttgcccaggctgaagtacaatggcgtgatcttggctcaccgcaatctctgcctccagggttcaagtgattctcctgcctcagcctcctaagtagctaggattacaggcatgtgccaccacgcccagctgattttgtatttttagtagagatggggtttctccatgttggtcacgctggtcttgaactcccgaccccaagtgatccacccacctcggcctcccaaagtgctaggattacaggccaccgcgcccggcctgaaacttcaaatttctttttttttttgagacagagtctcgctatgtcacccaggctggagtgcagtggcgccgtctcggctcactaccagctccactccacctcctgggttcacaccattctcctgcctcagcctcccaagtagctgggactacaggtgcccgccaccatgcccagctaattttttgtatttttagtagagacgggttttcactgtgttagacgggatggtctccatctcttgacctcgtgatccgcctgcctcagcctcccaaagtgctgggattacaggcgtgagccactacgccaagcccgaaacttcaaatttcttatctcataactaggcatccttatcactgagtgttagcctggatataaacattcctaatcttttgtacttttcatgtcagcatttggctccacttggctgcctggggagaacttctagcattatgagcatgcaggtcctatcaacaggttgggggtgcggtttattcatacaggtagtgagagtggcacagatggatgctgtcccttaaaacaaacagacttgtctttgggagcctgaggcgggtggatcatgaggtcaggagttcaagaccagcctggccaacatagtgaaaccccgtttctactaaaaatacaaaaaattagccgggtgtggtggtgtgcacctgtaatcccagctactagggaggctgaggcaggagaatcacttgaacccaggaggtggaggttgcagtgagccgagatggcaccattgcactccagcccaggcgacagtgcaagactgcgtctcaaaaaaaaaaaaaaaacacacagacttgtcctactgccatttcttttcactctggcggtaaagtaagagtgtgtgtgtgtgtgtgtgtgtgtgtgtgtgtgtgtgtgtgtgtgtgtgtttctgtccgtctgtctgtcaagggggagggtgaccactttctaaaaggccatccgtgtatttttagcttcctgatttttttctctatcgcagtctctttgaagccaggtgaattttaggccttggcaattttctttttattgcaatgggaaggtcaagacactgagagtcacccaaaacatatccatccaaaatgatacaattttagggtttatttttaagtgatacccaagttatttgctaagaacctatgccagtgtgtttatgagaatttgcactgtcccacactgttgccaccagccacatgggactgtttaaatttaaattttacaaattagccagtcatggtggtgtgcacttgtagtcccagctacttaggaggctgaggcaagaggattgcttgagcccagaagttcaatactgcagcaagctatgatcgtgccactgtactccagcctgagtgacagaatgagacctcatctcttcaaaaaaaaagaaaaaaattaaaatatgaagtttagttcttcattcaccctaaccacatctccagtgctcaataactatatgtgactcatggctaccttattagcatagatatagaacattgtgactatcacagaaagttgttttgaacagtgttgccaagccctgtaagtggaagaggcagtgcagtgtgatctgtgtcttcaggaaaccaggtagtcagactagttcaatgaggagaggcagaacctggcttcacttctagattaaaaactgcttaggtggcctaaagatacaatggccattctcagagtagtgagaaggaaggaacagatgtttagggggctagaagaaagtcagagagggccgggcgcagtggcttatgcctgtaatcccagcactttggaaggccaagacaggcagatcacgaggtcaggagttcgagaccagcctgaccaacatggtgaaaccctgtctctactaaaaatacaaaaattagccgggcgtggtggtgcgcgcctgtaatcccagctactcaggaggctaaggcaggagaatcgcttgaaccctggaggcagaggttgcagtgagcccagatcgcaccactacgctccagcctaggtgacagagagagactccgtctcaaaaaaaaaaaaaaaagtcagaggagacaaggagcatgtacacctaaaatcaacatagacccctctgttgatggggtcatagtgagtacttgaggtaccaagtctggataaacatcaaacttcagccaataactttgagtttctagccatccaagcctcttattaaacatacagaaggaccttttttcccttgcatctaacaagttaaagcacctgcagagatcattagggaggagccttggcctgattggtgacaaaagtgagatgctcagtccttgaatgacaaagaatgcctgtagagtgcaggtcaactacatatgcacttcaagaagatcttctgaaatccagtagtgttctggacattggactgcttgtccctgggaagtagcagcagaaatcatcaggtggtgaacagaagaaaaagaaaagctcttcctttttgaaagtctgttttttgaataaaagccaatattcttttataactagattttccttctctccattcccctgtccctctctcttcctctcttcttccagatcttcagggggctagaaatctgttgctatgggcccttcaccaacatgcccacaggtaagagcctgggagaaccccagagttccagcaccagcctttgtcttacatagtggagtattataagcaagatcccacgatgggggttcctcagattgctgaaatgttctagaggctattctatttctctaccactctccaaacaaaacagcacctaaatgttatcctatggcaaaaaaaaactataccttgtcccccttctcaagagcatgaaggtggttaatagttaggattcagtatgttatgtgttcagatggcgttgagctgctgttagtgccaacatgttagtgagaaaatatctttggataggtaaaaatcaaggaggagttctcctcttcctaaaccatcttaatttacttacatagaagaaagcacagcagctggcccaccacggacgggcccagagcaggggaagattctcggtgaacatttctttttttttttctttttttttgaggtcgagtctctgttgcccaggccagagtgcaatggcgcgatctcggctcactgcaacctccacctcccgggttcaagtgattctcctgcctcagcctcccaaatagctgagactacaggcgtgtgccaccacgcccgactaattttttgtattttttttttagtagagacggggtttcaccgtgttagccaatatggtcccgatctcctgacctcgtgatccacccgcctcagcctcccaaagtgctaggattacaggcatgagccactgtgcccagccctctccatgaacattttctaattaaacttgacacttaatacaatgttatgcttaggactgctataaagcttacctctggagttgcgcagcacaaaggccttggtgtgtgtataaatttggtttgttcttttcacagcaaaagctacccacctttgcctcctgtgcctgcttctgcccagggacttaggtcctcttacaccttagagaaaggccttagcatctggtcacaggcagatgagtgacagcaagaaaacctggctgcaatgtaattttgtttccatcctctttattagttatcaattggatttttatgaaatttccaagttccactcaaggatttctcagtgtttttttactttggtatagtggaaaccagggttgccagaaagtattattttgggggtgagttagtcaaccttcgttcagtcagacagacaggagcacctcagcaattcccagaaacgggctgatgggaaagagcaacatacatgaatgtcttgaagaacacagccaacagagcccattgggcagttctgattttccaggtacacagcatctccacagtctcttctgatttttattcccctgagtatatggattccagctcagcatgtagcctttccctgctgagtctctaaccaggataacatgtatttttttgactggatgaattatcttcccatctcttgacatttacagtaattaccaccaagtatggtattttcagtggccgtgattatcagttaccaacacagaattaggatgaagggaggaagggagggaaggaaggtgggtgttttttcacacagtgtcttagccagcaatttagcaaattaatggaaattagatctttgatttttttttctttcaagcattttatttgagagactatcaaaccttataccaagtggccttatggagactgataaccagagtacatggcatatcagtggcaaattgacttaaaatccatacccctactattttaagaccattgtcctttggagcagagagacagactctcccattgagaggtcttgctataagccttcatccggagagtgtagggtagagggcctgggttaagtatgcagattactgcagtgattttacatctaaatgtccattttagatcaactggaatggatggtacagctgtgtggtgcttctgtggtgaaggagctttcatcattcacccttggcacagtaagtattgggtgccctgtcagagagggaggacacaatattctctcctgtgagcaagactggcacctgtcagtccctatggatgcccctactgtagcctcagaagtcttctctgcccacatacctgtgccaaaagactccatctgtaagggatgggtaaggatttgagaactgcacatattaaatatactgagggaagactttttccctctaactctttttcccatatgtccctccccctcctctctgtgactgccccagcatactgtgtttcaacaaatcatcaagaaatgatgggctggaggctgggcatggtggctcatgtctgtaatcccagcactttgggaggccgaggcaggtggatcacttgtcaggagtttgagaccagcctggccaacatggtgaaaccccatctgtactaaaaaaaaaaaaacaaaaagtagccaggcctggtggagcatgcctgtaatgccagctatttgggaagttgaggtgtgagcatcgcttgaacgtgggaggcagaggttgcagtgagccaagattgcaccactgcactccagactgggtgacagagtgagactttgtctaaaaaaaaaaaaaaagagagagagagaaaagctaggtgcggtggctcacgcctgtaatcccagcactttgggaggctgaggtgggcagatcacgaggtcaagagatcgagaccatcctggccaaccaacatggcgaaaccccgtctctactaaaaatacaaaaattagctgggcgtaggggcgcacgcctgtagtcccagctacttgaggggctggggcaggagaatcgcttgaaccccggaggcggaggttgcagttagccaagatcgcgccactgcactccagcccgggcgacagagcgagactccgtctcaaaaaaaaagagagagagagaaatgatgggctgggccagtgccccacccctgtaatcacaacactgggaggccaaggtgggagaatcgcttgagcctgggagctgaagaccagcctgggcaatacagtaggacctcatgtctacaaaaaaattattaaaaattagccaaggctgggtgcggtggctcatgcctataatcccgggggtgaagttgagcccaggagtttgagaccagcctgggcaacatggcaaaaccctgtctctaccaaaaatacaaaaaaattagccaggggtggtggtacgtgtctgtagttccagctacttaggaggctgagatggaaggattgcttgagcccaggaggcagaggtggcagtgagctgagatcacaccactgcactccagcctgggtgacagagcaagaccctgtctcaaaaacaaacaaaaaaaatgatgaagtgacagttccagtagtcctactttgacactttgaatgctctttccttcctggggatccagggtgtccacccaattgtggttgtgcagccagatgcctggacagaggacaatggcttccatggtaaggtgcctgcatgtacctgtgctatatggggtccttttgcatgggtttggtttatcactcattacctggtgcttgagtagcacagttcttggcacattttaaatatttgttgaatgaatggctaaaatgtctttttgatgtttttattgttatttgttttatattgtaaaagtaatacatgaactgtttccatggggtgggagtaagatatgaatgttcatcacaaaaacataaatcaaggccgggcatggtggctcatgcctataattccagcactttgggaggtcaagatggaggtcaaggtgggagcctagaagttcgagaccagcctgggcaacataaggagacttcatctgtacaacaaatttaaaaagtagctgggtgtggtggcagatgcctgtagtcgcagctacttgggaagctgaggtgggaggatcacttgagctcaggaggttgatgcttcagtgagccacgatcacaccactgtactccagcctgggcgacagagcgagaccgtgtctcaaaaagaaaaaagaaagtataaatttacacaaaaacaataaaataatcccagtaattccaccacttggagatgatcaccataaaactccaccaggcatatgtgcgtatatatacacgtgtattttataaaatgtgatcataattacactgttttgcttttttccttaagatattacatacatttttccacatcgttaaattacagtgctgttttcctggtggctttcctttaacagattgaagttcatgttaatacagttgccagaggctgtgggctttcactgtcaccaggagtcactcctagggcctcttcagagcaaggccttatgtcctgaagcattgccttttttttttttttttgaggtggagtctcactctgtcacttagcaggctggagtgcagtggcccagtcttggctcactgcaacctccgcctcctgggtttaaatgattctcctgcctcagcctcagggcggatcacctgacatcaggagtttgagaccagcctggccaatatggcgaaaccccatctctactaaaaatactaaaaaaaattagccaggcatggtggcacgcacttgtagtcccagctacttgggagactgaggcaggagaatcgcttgaacccaggatgttgaggttgcagtgagctgagatcacaccatcacaatccagcctgagtgacagagtgagactccatctgaaaaaaaagaaaaaacaattagcctggcatggtggcaggcacctgtaatccctgctacttgggaggctgaggcaggagaattgcttgaacccgggaggtggaggttgcagtgagctgagatcgtgccattgcattccaggctgagcaacaagagcaagactccgtctcaaaaaaaaaaaaaaaaaaaaaaaaaggccaggtgcagtggctcacgcctgtaatcccagcactttgggaggccaaggtgggtggatcacctgaggtcaggagttccagagcagcctggccaacattgtgaaacccccgtctctactaaaaatacaaaaattagctgggtgtgatggcatgtgcctgtaattccagctactcaggaggcagagacaggagaattgcttgaacccaggaggcggaggttgaatgagccgagattgcgccatcacactctagcctcggcgacagagcaagactccgtctcaaaaaaaaaaaaaaaaaaattagcttctacctcattaatcctaagaactcatacaaccaggaccctggagtcgattgattagagcctagtccaggagaatgaattgacactaatctctgcttgtgttctctgtctccagcaattgggcagatgtgtgaggcacctgtggtgacccgagagtgggtgttggacagtgtagcactctaccagtgccaggagctggacacctacctgataccccagatcccccacagccactactgactgcagccagccacaggtacagagccacaggaccccaagaatgagcttacaaagtggcctttccaggccctgggagctcctctcactcttcagtccttctactgtcctggctactaaatattttatgtacatcagcctgaaaaggacttctggctatgcaagggtcccttaaagattttctgcttgaagtctcccttggaaatctgccatgagcacaaaattatggtaatttttcacctgagaagattttaaaaccatttaaacgccaccaattgagcaagatgctgattcattatttatcagccctattctttctattcaggctgttgttggcttagggctggaagcacagagtggcttggcctcaagagaatagctggtttccctaagtttacttctctaaaaccctgtgttcacaaaggcagagagtcagacccttcaatggaaggagagtgcttgggatcgattatgtgacttaaagtcagaatagtccttgggcagttctcaaatgttggagtggaacattggggaggaaattctgaggcaggtattagaaatgaaaaggaaacttgaaacctgggcatggtggctcacgcctgtaatcccagcactttgggaggccaaggtgggcagatcactggaggtcaggagttcgaaaccagcctggccaacatggtgaaaccccatctctactaaaaatacagaaattagccggtcatggtggtggacacctgtaatcccagctactcaggtggctaaggcaggagaatcacttcagcccgggaggtggaggttgcagtgagccaagatcataccacggcactccagcctgggtgacagtgagactgtggctcaaaaaaaaaaaaaaaaaaggaaaatgaaactaggaaaggtttcttaaagtctgagatatatttgctagatttctaaagaatgtgttctaaaacagcagaagattttcaagaaccggtttccaaagacagtcttctaattcctcattagtaataagtaaaatgtttattgttgtagctctggtatataatccattcctcttaaaatataagacctctggcatgaatatttcatatctataaaatgacagatcccaccaggaaggaagctgttgctttctttgaggtgatttttttcctttgctccctgttgctgaaaccatacagcttcataaataattttgcttgctgaaggaagaaaaagtgtttttcataaacccattatccaggactgtttatagctgttggaaggactaggtcttccctagcccccccagtgtgcaagggcagtgaagacttgattgtacaaaatacgttttgtaaatgttgtgctgttaacactgcaaataaacttggtagcaaacacttccaccatgaatgactgttcttgagacttaggccagccgactttctcagagccttttcactgtgcttcagtctcccactctgtaaaatgggggtaatgatagtatctacctcctaggatttattgaggcagcttaaataccttttgtatttcctgttgctgccaaaacaaattgttgcaaggtcagaagtctgaggtggctcaactgtttctttgtttcaggtttcatgaggccaaaataaaggtgttcgcagggcgtgttcccttctagaggctctgggtccttgcagttctaggactaagatccctgtttcccactggctgttggctgggcatcattctcagcttcttgaggctccccacattcctaggctcctggcctgtctgcctccatcttcaaaaccagcaatgggtggtcaagtttttctcacactgaatcttgctgactactgtatctttctaactcctgccagagacatttctctgtttctaagggctcaagtgattagattgcacccacttggtaatccaaagtgatcttcatatcttaaggcccatagccttaattatagctgcaaagtcccttcgcagcagtacctagattactgttggaatgaataaccagaagacagcaatcaagggaggacatctttagaattctgcctaccacttgtatttaacatgcttaatccacagatgacactctctaccattatttcctggtcctcacactgctcagagattggaatcctttttaagcaaagagaatgaagtcatcacatagttcagtcctgctgtatttgctggaaacagtgaaggaagatagagaaaatggagctaactgccaatattaccattttataatcagtcctcaatcatagccctatgaagtgggtatttgttacctcattggaaaaatgggagttgaatctcaagttccttgtttgtaagattttactcagatttgcacagctaaaaatgactacatggagacccaaagccacctttctgttcccatcatcagctttccatctgcctctgtcactgaccccgggacagaaggttcaagccttaagggaatttggagagagaactagattttgaggggaactcacactcacttcccttttgggccacagtaggagacagtaaaagcagccccatgtcaggcaaagggtcttacaggagtggatcatggctgctgtttccacttctctctggcttcccagcttatgactgtgtatcttagttgtcaaagccttccagttcatcctcacctacagcttgacttcccaagggcccatgccagctccctgtctacctgccagtgagttgatgagtctcggtgttagtagtaaaggcaggcgggaagcaagcagaagtgctactgggccttgagggtaagccaggcctcagccttctgaccccatcactaatgggttaataggaaaagcagtatccatctagtacagcctgccttttcaggaatagtgagtaaaagcaaagatgactaaaatacattaaagttttctgtaattgtctctaaggtctcccaacaaacatataccccatctgtttcaagctctgcataacctttcccagaagtcaagttcaggccctggcctcatggtgcctggcccaggttaagagtgctacctgatgatggagttaatacacgttgctttgacctctgactttaagatgtcctcccacttttccaccccgcaatctctagccctctctgggcacagcagcaattgggaactagttcctgtactgcctttatctcattttacaaaacaaacttctacaaagaagctggaaaggaaggaggagaaaggattatcatgcaggcacagggagggggcctagagaagagctctggcagattatgtccctcttaaaaaatgcaaccagaatcatcaacaaagtatcacctcaaaaatatgcaggagaaaaagaaaggaatcaatgttggggtggttggagcagaaggagccaaactgcccagaaggtgtcctctgaaggctgcgaggagcagactaggtcagccccagaggcagatggcacacacagaatggcaggattaccggtagctgcagatttattgacagaagccctagagactgggcctgctgcccagggaatgtgggggctcacttatcaaagactactggaaaatggctgagccggcaaccccttccactacagtgatgcctggttttcttgcacagcctgtaactctgcctgtaacaaggagaaaattaaagcaacgaatctggccaaatagaaaattaaggaaaactagaaacagctcctatggagagcagggattggggaggtgtagaggggctgatcctgaatgtctggaggatcaggaaaatgtaagcaattgtttaagggactggtaggaatcaagatctggagagagatcctcccgactctggtggctggggaatatgaactgtggagacatggtttcaaggactcaaaatgatatgacagcttaacatttacagttcagtgcagaggctctcaaagcatgatcccctgataggagtgtgagggggcaacaccatcacctaggaatttgttagatatgcaaattcccagacccactgaatcccagacaggtggggccagcaacctgtgaatctacaacaggctcaagtttgagaacaaatgacttagtgtaaggggctgctaattgatataaaatgttacctgtggtctattattttgtctgtagtgaatattgggcttgttaaggataaataaggtttgtgggctggtaagtggttcttctctacaaggttgcaacagctggcttcagttaacttcaaaaaggccctttaagcaaagacagtagtccccccactcatccatggttttgatttcagttacttatggtcaaccatggtccaaaaatattaaaaggaaaattccggaaaccagtcactcgttttaaattgtacaccattctaagtattgtttgacttgttctattttattattagttattgttgttaatctcttactgtgcccaatttataaattaaattttatcataggtatgtatgtatagggaaaaacataatatatatagggtttggtactatccgagggttcaggcatctacttgtggtcttggaacatatgccccgcagataaggggggactgctgtacaatgcaaaggacaaagattaaattatattagcaatctaggagcagaagggcaagactgcttttttaaaaaacagctaaaggtttaggaggttttattaatatttaaattgtattgaaaccacagctgcagcctttgactccagcatagagatatgcaaatatggctttcaaaagaaaggcaatttcagacagccctcaaagtaacaggaacaaataaaacaaatgattttgtaatttatctttattgactgatgttgcacaaggcacaggccataccctgtgagagtcagcaacagccgagctctctgaggagagaagagaaagccaggctggagggagaggcaggccgacccatagacaggtgacaggaaagacacagagcaggcagatgggagaagaagacaactaaattaaaagggaaggaaaataaaaacccagccctgggtcctgtagaccatctgatcttgctggctctcagcagcaacaacaataatcattaatgactatcatttgccacactactactaagtgccatgcactattcctcacatacaaatgaggaaaatgaagctttgagaggtcaagcaacttacccaaggtcacacaacaaaaggaaggggcagagcccagattcaaagatttgtgtgaggctgaagccctgtgctctttccagtgcattatgctgggaaccagtcctgggaggcagtgaataacaataaggttaatgggccgggcgcagtggctcatgcctgtaatcccagcactttgggaggcggaggcgggcaaatcacgaggtcaggagatcgagaccatcctggctaacatggtgaaaccctgtctctactaaaaatacaaaaaattagccgggcgtggtgtcgggcacctgtagtcccagctactcaggaggctgaggcaggagaatggcatgaacctgggaggcagagcttgcggtgagccacgatcgcgccactgcactccaacctgggtgacacagtgagactccgtctcaaaagaaaaaacaaaacaaaacaataaggttaatgattgaggggacactttgtgcccagttctgtggtattctgtatgggcatgcgtgtgtctgtgtgtgtgtatatgtatgtaactgtggaaaagagggtgaaaacctccatttctgaccttcaaattggttactatccaatgagtaaggcaagaaaagaaagccaaagaaaacttgcagaattctggtgtaaaagttcttttggggccgtgtggtggggccagctctgcctgttgtggaagacttctggtggaggcatctcagctggccttggccttgagtaaaatttagccagatgaaaaggaaagctggagattacacaggcccaggtgagagcctccagctgctagaattggaggaaggagcacctgattcagagagatgagaaaaggcaagagaatcctgaaaggatacatatctctgaccctttgtccccatccaatctccccagaccttccatcccaagcccaaacacaaccttacctgctgctccttttcaggcaccctggccaccaaatataggaacccataaattttgctcatactctatgttctactaggcaagtcctgatctgtcatctctacaggccccaatccttcccgctcacccctacagagccttctccaggttttctaggccagaatctctccccacttagaatactccagaagttttgctttatttgtgagactttattcaattgaagttacttgtgtgcatatgttatcctctctatttgactagaaggtccttataatcccttatgaccataattattttatctttgatataacccagctctgtaactagcagatactttgttaggcatccagtgggtttttcctaaatgaatgaagtaaaggatgaatgaatggactcagtgcattgaagggcttatccaactattggttccactctcaagacctttggaaaactagccatgttctggaatgctaattcccttcaatgcctttcgcccatttttctatgaccctgatttactccaaaaacaatataagggatctaagtgtccaagaatgactccttctaaacccacacctaaggattttctctctttttgtgtgtgtgtgtgtgagacagagtttcactcttattgcccaggctggagtgcaatggtgcgatctcagctcactgcaacctccgcctccagggttcaagtgattctccctgtctcaccctcccgagtagctgagattacaggcgcctgccatcacacccagctaatttttgtatttttagtagagacagggttcaccacgttggccaggctggtctcgaactcctgtcctcaggtgatccacccaccttggcctcccaaagtgctgggattacaagcatgagccaccacacccggcctctttgattctcttttgcctatcatgaagtctacccctttgtaattaattagaccaatgtccacccagacagaataacattttcccctatccatcagcgaggtcttctccgtgatggacattcaaggcagacagagagactgctgctgcaataactggggaaataattatggtgttcatgatgatttctttgcaggttcaaagcactagcccagccattatctctcccacttcactaggataaaattgctaaccccactttataggtgctaaaacaggtccagggccttgtcaaaggtcactcagtgagctggtggcagacctggaaataactagcctaggagtctcgatattcattaggccacagatggaaatgccctcattatgctgtctgggctatgtctgagagagagtcaactaactggactccagttaaatggagatatgcactggaagataagtttgtgactacagagtgtttttctctgcaatgctgcagcagttggcactggttaattccagagggtgtgtgtgtgtgtttgtgtgtgtgtgtgtgtgtgtgtgtgtgtgtttaaagcattatcacgcgtcctagatgagggaagagagggtgaatccaaggtaacacagacacacaggtaagcagatgtttgccatcttctcttgaaagtcatataaaaccaaatgacagtgtatattagcaggagaaactcaggaggctcttcccagctgttaggctatacgactctggaataagctagtacaaattaggtagaaagtctaggattgttcctagagcctggtggcgggaggtctttcctggaggcaaaggactgtggggctgtctcagggccttctgcagctgctaaagtgagaagcctgccgacgggatcatccccaagcccacagaagctctgaaagctatggaaaccaagatctgtacaggagccacttctggtttctaatgcctgagagattaaaatggaaaaaaaaattcccatggaaattcaagaatgcaagaatgttctggggccaggcacggtggctcatgcctgtaatcccagcacttttggaaggccgatcacctaagatcagaagttcaagaccagcctggtcaacatggtgaaaccccgtctctattaaaaatagaaaattagctgggcgtggtggtgtgcacctgtaatcccagctactcaggaggctgaggccagagaatcacttgaaccctggagccagaggttgcagcgagctgagatcatgccattgcactccagcccaggcaacaagagcaaaactccatctcaaaaaaaaaaaaaaaagttctacaacgtggccacaggtccgttctggctaaggcagtgatgtccccctcccaccaaagcccaaaccttctaacatcatcctaaagtgtgggaatcacctcttcacctcaggccagctctgggcttttctcagcctattcatcagcctccattagtcctcagctctgctgaggcctcagcagcttcccagtcccactgaaggctgtggggcatagaatgggcagagggcaggccgggcgtggtggctcaagcctgtaatcccagcactttgggaggccgaggcgggcagatcacgaggtcaggagatcgagaccatcctggctaacacggtgaaccccatctctactaaaaatacaaaaaattagccaggcgtggtggcaggtgcctgtagtcccagctacttggtaggctgaggcaggagaatggcatgaacccgggaggcggagcttgcagtgagccaagatcctgccactgcactccagcctgggcgacagagcaaaactccgtctcaaaaaaaaaaaaaaaaagaaagaatgggcagagggcataaaacctgagtccagaggtggtggttgcacaacattgtgaatgcactaaatgcccctgaattgtacattttaaaatggctaattgtatgttatgtgaatttcaatcgatttttaaaaaaaataaaactgagccacctttggggtggggagaggagctgggccaggctctgaggatttgagggttgaaactccttgcagggagtgaaatgaacgacaatggggaggccagtctggccctcccaactcctcctccaggaccagatgggaactggggctagggagaaaggcccaactggggcggcgccgggctctgggcagaagagaagcactcagtgaatgtgaggaggctgcagccgtcggctcatttgcatcataagtgattggttttccctgctcgtccctcatcaggacacaatggacagttgtttgctggcgcagcagatccatttaccaagggagagaggagacagagcacaagtgaccgatgggtaatagtgttgaagggtgggcagccgcctcccctcccctgtgctcccaggccactgggactcttgttctcacacaatgagaagggaccttagagagcaaatcaccgcttcactttatagaagaagagactgaggtgctgagaggaggtgagccttgctgtggtcaaacagcaagaacatagcaaaactaagcattttaaactctaacctctggatcctttttctttgagacaaggtctcgctctgtcacccaggctggagtagtacagtggcacaatctcagctcactgcaacctctacctcccaggctcaagtgatccccccacctcaactttctgtgggccacgacacctggctaattttttgtagagacaaggtctcactgtgttgcccacatttttctcgaactcctgggctcaagtgatcctccagccttggcctcccaaagtgctaggattacaggtgtgagccacagcactgggcctgtttggtttttgttttgttttgtttttttgagatagggttccactctgtcatccaggctagagtgcagtggtatgatcactgctcactacagcctcacactcctggttcaagtgatcctcccacctcagcctcctgagtagctaggactataagtatgtgccaccacgcttagctaatttttatttcttttattttttctagaaacagtgtttccctatgttgcccaggctggtctcacctgggttcaagtgatcctcccacctcagcctcctgaatagctgggattacaagtgtgagccactgcaccaggcctggattctaaactgtcatttgagggttcacttcgtttccccataataccttctctgtgcccttattcccatctctgtggtctcctgttcccggggccttcgtttccatcattctgtctcctgggtctatttctttttctctgtttctgttcctctctgtatcttttcctcttggtttccaggcagctaggataattactagacttttaattaacccctgccctaacaaaggtgggtctggcatgaggcagcaatttagcaagtgtcttggtttgttttggggataggtggggagagaaaaatatgtgttggggcctattataaaccaggcactaagacagacacataatgcactttatctcatttcatcctttcaatcttgcaaggtaggtgttcttagagacaaaaagggtgaggctcagagaggttaagtaacttgtgcaagggcacccagctagcaaattgtagttacctgactccaaaacctctgttcttccatctcacaccctggcacagggtctaactcagggtaaggggctcattgatttcaggcgcaagggaggcacaaagtcactgaaggagaccactgttttgttgctgtcctctaggcagcgactgcgtccccccagagccccctccttctctgagccccttctgcagcgtggcgaaatctcacaaatgcaagcttttgcccccagggaggtggggaggcagtgatcaagaaagaaacctgacaaacccagaccaaccatgggggtctccctcctgttaacacccctccctaacagccctcctggtggttccctgtctgcccctcccctttatgggtcaagcctgctggcgtctgtttcattgtgctgtgggggaaggggagagtcaggggtgagtgggtgtctgtgtgcatgaacataaggcctccgggttcattctgacactgaatgaaaaactcaccaattattcgtccagtctcattaatatgcagacagacatctgttatttaggagtcaacagcagaggcattttcttgtcgggaggggcactagtgtacagggctctcttgtctctccgctgctagcgggtagctactcaggaatcatcccacacctcccgacctggagcctcccctctctctgaccctcactcacagctttgaggacagcaagtaagggattgaccagacagagatggagggagatctgggaacctggctggaaggaaggaagcaggagaggagctgccttgtgtagaacaaactgagaacaaaacgctaaaccctttcctggggaagagaatgtggagttgggggagagagctgtgccaagagtgcctgccccactgggaatctcagggacatgacccctccccccacaccttcctcagcctgcaggacaagtctgagtgcatctgaagcagggagagggtcactatggcaacatgaagtcctcacccagagactgcagaaaacgtaataagaggagttcagaaaaatggagaccaagggacctcaatctttttttttttttttcaatttatttatttttttttattgatcattcttgggtgtttctcgcagagggggatttggcagggagggacctcaatctttggaggagtcactaaagctctcttcaggccccaagataggggtgggaacaagacataaccacctcctgctttctgtcttctgtcttcctccagcctttaagtcccagcacaaaatacccctccaagaagcctttcccaactccctcaggcccagcttagaagcacttaagccttggtgtcttggttgtaaagaataaaagttgacatcagctgagcaacacaatgaggtagatgtggtgatcagcccccttttctaggtgcaaaaactgaggttcagagaggtgctgggcctcaccaaagattccccagggaagaagcagcagagctcaacccaggccctgggacttctgcctctgaacctgaagctcttcccacgactaccccctgggagggccagagtcacaaggggaggacccttgtcagctgaagtgtttcaggagtttgattgagtcctctcttcccatccaccctgtccttccccctcctccctcctaggcaggcggattgcctaggttaagaaacactagtctgggcgaggtggctcacgcctgtaatcccagcactttgggaggccaaggcaggtggatcactaggtcaggaaattgagaccatcctggctaacacggtgaaacctcgtctctactaaaaaatacaaaaaattaggccgggcgcggtggcttatgcctgtaatcccagcactttgggaggccaagacaggcggatcacgaggtcaggagatcaagaccatcctgactaacacggtgaaaccccgtctctactaaaaatacaaaaaatgagccggacgtggtggcaggtgcctgtagtcccagctactcgggaggctgaggcaggagaatggcgtgaacccaggaggcagagcttgcagtgagccgagattgcgccactgcactccagcctgggcgacagagcgagactccgtctcaaaaaaaaaaaaaaaaaaattagccaggcgtggtggcgggtgcctgtggtcccagttactggggcggctgaggcaggagaatggcgtgaacctgtgaggtggagcttgcagtgagccaagattgggccactgcactccagcctgggcaagaaagcgagactctcaaaaaaaaaaccactagtctgggcgcggtggctcctgcctgtaatcccaacactttgggaggccaaggtgggtggatcacctgaggtcaggagttcgagaccagcctggccaacatggtgaaaccccatctctactaaaaatacaaaaattaggtcaggcatggtggctcacgcctgtaatcccagcactttgggagactgaagcaggcggatcatgaggtcaagagatggagaccatcctggccaacatggtgaaaccctgtctctactaaaaatacaaaaatggctgggcacggtggctcatgcctgtaatcccagcactttgggaggccgaggtgggtggatcacgttaggtcgggagttcaagactagcctgaccaacatggagaaaccccatctctactaaaaatacaaaattagctgggcatggtggcacatggctgtaatcccagctacttcaggaagctgaggcaggagaatcacttgaacccaggaggtgaggttgccgtgagccgagatcgcgccagtgcactccagcctgggcaataagagtgaaactccgtctcaaaaaaaaaaaaaacactaaaattagctgtgcatggtggcgcgcgcctgtagtcccagctactcaggagactgaggcaggagaatcgcttgaacccaggaggcagaggttgcagtgagccgagatggtgccactgcactccagcctgaatgacagagtgaaactccgtctcaaaaaaaaaaaaaaaaaaaaaaaaaaaacacagaaactctggcagccatcacagtgtgattatttgtttatttcattaaatgtttaacgaggctacattgtttcccaaaccaatgtctaatttgtgaaggaaacagcgcagagaaggaagctgggtgactcctgcatctggggtggggaagggagtaaggtcccctccctccatcctacagaggcctttgaggatcagcaacagtcccattccctcctcccacccactgagctcctcagcccagagccctcctccccagaaataaaacgtctggcaacccagacctgcagaaagggaccaaaaatccattcctggtggtattgaaaatgtattaaactttggggggtcctccagctgattgatttttctaattatgtttgctttagatggatatttaaatgcatttgcattccctgagctcacatggcaggatatggaggttggaggaaagagggggcacaaacactccacactctgcactttggtggttgcaggcttgaacctgctatacactgagaagtccaaagtggaaaagagaagccactcagctaaaaatcgcaagtcgatttttatggcaggtccttgtggggaaagggtcagtcctcagagacagatggagatccacctagctgggcctggagcccctgccctctcctgtacccttagccgaggactcagggtctttgagtcagtccctaaccaggtctcagtttgagggggtggttatccaagcacacttagataatttcaaatgccattgaagttatcctagaatctttgagactggctgagatgaactagtcccataggagaggttgggatagggatatctgatgatccagggagtggtgggtagggattcctttcctctcaagactggaacctggcataagggaaaggagaagctattttttattttttattttttaattttttttagagacagggtctcactctgacactcaggctggaagacaatggcatgatcatagctcactgcagtctctaactcctggcctcaagcgatcctcccagcttggcctcccaaaggaggaatcttggctgggattataggtgtgagccactgccgagaagctattattttaaatgacacacctcagagccaaatctcccagctccaacaccacatccagataaccatctatccaaaaaacaactctgatcacttcactctctgcctgaaattcctggtggcttcatcctctgaggatgatttcattcatcctcagaatgaaattctgattcctctgtggaccctgcagtagcctcagtgtaccttcctagccttgtcttctattctccctgccatgggagccccaacagtgctatgctcattctcatctccacgtgtttacacatgctgtaccctctgcccagagtgcctttcctaccccttccctgcccggaaaactcctcttcaaccctcaggacctggctcacaggactggcttctcaggctgcaaggagctcccatagcatcccatacatgtacaaatatccctcagccatggcaccctcacacctgaggtacctctcttccacactgggctggcctccaaaagcttagagactggtccttgcaatctcccaagccagtgtatgccacacagttggtgttcagtacatacttgctgaatgaatgaatgagggaggaatgggctataaatttgggtgggatcccagcagatagttgggtaaggtcagtgttctcttccagtgtgtctgggagaactggctagggctgggggagggaagggccagggatggttcctgggggagaatgtcaccgaaaagaggccagtgggaccagagccaggaagggaatacaggacaatctgaaaccagactcccgagaaaacagaccagtactgtctttcctgacaacaggcgctcagccgtcctctccaccgtctttcctttaagggacagggtaggggtgactctaacagctgatgctcccctgaaagccatcatgaaactcagcatgggaggagagaaaggtccctggcctgagcctctaaggagaccccagaatcaaactactgacctcttaggaaacttcacgctgtacaggggtagcttctgtgatgtggaggcttttgatgccttcttttttttttttttttttttttttggagacagagtcttgctctgtcatccaggctagaatgcagtggcgcaatctcggctcactgcaagctccgcctcccaggttcacccgggttcacaccattctcctgcctcagcctcccgagcagctgggactacaggcactgccaccgcgcctggctaattttttgtatttttagtagagatggggtttcaccgtgttagccaggatggtctcgatctcctgaacttgtgatccgcccacctcggcctcccaaagtgctgggattacaggcgtgagccagcgcgcccggcctgatgcctccttatccccacaacccccagggtaccagcaggctccaagccaggggtacagatggtgagcaggacccctcccacactagcagcaggcctggctgggctgagaaatgctgactaattatatgtcggtctgctctaaaaccccctaatggcctgagaattgcccacttcattaactaggatgaacagtcccaggatgtctccttctcccaactctgactcctaaaaggacacttctgatccaacctatggctttgtcctctgctctatctgtggacatggacaggaaagttccccagctgaggtctaactttccctcttactgctaaagattggtagattgatttttttaaaaagcaacaaaactaaagccacagccgttttccatggaggtgggctttattaggtgactgttgaggcaagggaggttctagggctggtggactgatggggggcaagggcttctccttgcttttgaatttagtgcatgttgcctagaggttagatgtgtgagaatagctgcagaagtgagaggagaggaaaagagaaggtcatagaatggacattttccttgggccagaaccaggatatggggactgggggtggagagggagggtactcttcacataggagactccaccaaggtcaccatttgataccagcttccctaacgcccacctgccccatcccagttcatgccccagatgccagccctgttagctccctcaacatccactggagaagaggagggaggaggagatgagaaacgatgatacccttctgccctccagctcccctgcccagaattgctcgctctgcctgccctaacttcccagccaggatcaggaggtcaggaagcctgggcgcaggcaggggaacaattgtgtccctcaccacccctcttcacactctgccctctcctagcccctcacatgaggttgcagcttttggctcgatccttgtgtatctcgccctcattcccccggtctggccgtcctgacagctgagcggatcgctgcattccccggcgtgagtcagttcggcgcagctgcctatggccacggccaagggaggccactgtagccacatggaagacatccctgacgctgcgctcagaggaccgggaggagcactcaacataggacacagcccccacctgcttggccagcacagtgccctggaaaaggaaggagtgcatgggagaaagttataggtcttagcctgcagcttagaaaggggcatggaggctgtgggctggggttgaatgtcaaggctgggggcagtcaagggatcaggtcagaggtcacagaccagaacaaaggatgagccaggtaaggtgttttcaaatcagagactgaaggggcagaggtgacaggtctaggctgggatgaggtcagacgtcaagggtcccacctgctcatgtgtaacagggataagcctctgcttggacagctccctcagtgtggccaggtcagtccgcatgtccagtttacagccaaccagcacaaccttggcattggggcagaactcttgagtctctccttgccactatgtaggagaagaaaagagaattgtggaggggtggagggaggcacagcgtgagcctttgtgccatgccagcagtgtgccctctcttcctcaagcacgcagaaaccatgtatccctcaggactctcccacatgaggaaggaggtgagaatgctaggcttggtttgagagcaggatggggtgagagagaagcagcggggaggagagggctggcgtgggcctgtggactcttctccctcagtggctatgaagggtctgccagcctggaaacttcccattcccactcgcctttcccatactctctcctgggaacaaatttatcccaccctcccctcccccacctgggaactggggctgccctagctgacttctgtccattcacccctggcttttgtcatggaaactggggcctggagaggaggccacagggctttcctgagctccaggatcaggcttcccatcccatcccctccatctgggactcccactgccaaggagttggaagagcagagaaggaatcctgtgagtgcttctcccttcactcccccacctcccctagctgctgtatccagctctgaggactttcaggaaaggggtggctgggagggatgggggctggaggcaggggtggcagggatgagagcttcactcgctaaccagctgatggccataccccagccatcactccctcctcctggcccatgttatgtcaggaccatggtggtctggtccccctcagtctagctgccctatttccccaggctcccaccttcttgagaacactgtccagtgtttctggtcggctaatgtcgaagcagatgagcacagcatcagaatcaggataggccagaggccggacattatcatagtaagaggaacctgaaggaagacagggcatgaggggcctgagtggatgggaggcctggaagggaatgggagaccttacagatcctggtcaagggatgctgggagcagagaatggaaaagagcaaccattaatacccatcattaatacccatcatggagtctgggtttcccaagtgggggagcgggcagaagggaggtcacatggtgggaaacggctctctgcttccctagtggtttaaaaagtaataatttttattcttgactgaggtttggacccctttgagaagctcataaaatctatagacattctcataaaatgttgcatgtgctttctgggctttggcagtctaaagccctgaagggaactcttgtaaaaataaaaaccctccttatgttgggaggaggaaaagagcagtggcagggagagcactctcccattctcctgggacttgacctcagatttatctagttcaatggagagaaacagcctcctgaccacccctcactcaagacattctaaatgtcttttctgcttttttattttttgagatggagtctcgctctatcgctcaggctggagtgcagcggcatgatctcggctcactgcagcctccgcctcccaggttccagcgattctcttgcctcagcctcctggtagctgagattacaggcacgtgccacacgcccgattaatttttgtatttttagtagagacggagtttcaaccatgttggccaggctggtctcaaactcctgacctcaggtgatccccccaccccagcctcccaaagtgctaggattacaggcgtgagccaccgtgcctggcctctaaatgtcttttctaaacccagtcttatctctgaaggaacatgttccaaattaaaagccattccttcccaactttcccaggtaggcaggacccagctgaggggctcagatcctaggctttctccttcaggacatggtttctgtcaggctctgcaagttctacctcagtttccctggattttagcagaatattgatttttcccttcctgttggaattggatggatgggctgggcttacctggaacctaagggtctaaccaagggaggggacagagtgggccgccttggaagtcagggtgacccccagggacttggctacctgaagtgtcccacatgttgagctcaatgcggcgcttgtcgatctcaaagctcgcagtgtagttctcaaacacggtggggacataactctgcagacacggatggatccagatgagatcatctctccaagtcctcaccccagataaatgccctcctcactcccacaccccgtccagcccagcccctggacacaagttggtctgggattgggcaaaggggagatcccgggagctcctgcccccccccccccccccccggagaatctctgctaagctccaagacctcctcctgttcccttctggtcccttcagccccctagttcttcccctctccattgcccaggacctccgacattcccctcgccctccctcccggatgctctggttctcccaaaccccatctatctcaccctgctccctaattcctcccaccccaatcctctgcagtccttcctgagccctcaaggcctccccgcgtcctccgaccccctgtctcttgtccctggttacccgagtacccattcccatccgtcgccagggcccctgtcacccaccccccagcagccttagcgtccccctcccaagacgcaggtccctcaccccgggataggcgtccttggcgaacacctgcagcagcgccgtcttgccgcactctgcgtctcccaccaccacgatcttgcagcggccgctctgcccctccatggtcccggctacgagccggtcccccacgccacccctctcccggtcccctccttcgcctctcccgcccctgcaactgcagccgctcgggccgccaacaccggcatctcccgggcccgcgccgagcccccgccccgggtccgcggccccccctccgccccgcccccagccagcgccgcgccccccggccctcctcccacccccgcagccggggtcggggccagaagatctggcggagccctgggaacagaggcctcagagccggggtccagcccgccggtgtggtctgaggggcccctgccggtttgggacaggccgaactgggcttatttgactttctcggatataagggcaggtcagagttcaagcgaagttcttaggggtagaatatgagcggcacaagcgcgaagctcgggcctgctgtgtacccacgcgtgcacgcaggtgtaccagtgcggacaagagctggggcagccatccacttcctgaacacggcgggagagagatgctaaggggaaggagggagcctctttggttttctctcccgcgtccgcctatgtcctggcagggggtcttggggaaatgggagggtgaaccccagcacacccacccggacggtggtgacatcatagctttccgtccccatggcaacgggcagccgggtctccggttacattgacttaaccgccggcctagactagcagagaagcgtggactgagttcctccagccaagcactgggtggaaagttttgggggagctgcgtcctctggtggatgcttggggacaaggagataaggaagagaaagaaccaaccgccagagttgctctgctggagccagagctaaacccaaaagtcaggcttgattaagagtctgacaataggccgggcgcggtggctcacgcctgtaataccagcactttgggaggccgaggcgggcggatcaagaggtcaggagatcgagactatcatcctggctaacacggtgaaacccgcacggtgggcgcctgtaatcccagctactcaggaggctgaggcaggagaatggcgtgaacccgggaggcggagcttgcagtgagccgagattgcctcactgcactccagcttgtgcaatagagtttcgaaaaaaaaaaagtgcttttttatatcgaggcaattcgagtcaataatatatgctgcaaataattctgtaaagataactagaagctgggcgcggtggctcacgcctgtaaactcagcactttgggaggccaaggcttgcttgcgtgcaggagtttgaggccatcctgggcaacattagcgagaccctctctctagaaaaaaaaatcaaaacttagctaggtttggccactctaggcacgctgcctatggggtagccctgctctgcaaagagcagtaaaacataaagttagccgggcgtggtgacacatgcctgtggtcccagctattcaggaggctgaggtgggaggattgcttgaagccgggagtttgaggctgtagggagctgtgatcgccccacctcgctcagcctgggtgacagagtgagaccctgtatcaaaaaaataaaaatataaatataactagagcacgcagcatcatcactatgttacagaagggaaaatgaggaacagaacgttaacaccaaagtcagaaagttttaaaggcttggtctccatgcttctactttgccactgcaagaccacagtgaattaagtctcatccctgcctgggttagatgtcagagcctgagacacaatgtagttggactccagtccacaggtggctgactccaaatctgatatgagttaactccaaatctgatgtaagttcaagttttgggactgttccttaactttttttttttttttttgagacggagtctcgctctgtagcccaggctggagtgcagtggcgcgatctcgactcactgcaagctctgcctcctgggttcatgccattctcctgcctcagcctcccaggtagctgggactacaggcgcctgccaccacgcctggctaattttttgtattttttagtagagacggggtttcaccgtgttagccaggtgaatctcctgacctcgtaatctgcccgcctcggcctcccaaagtgctgggattacaggcgtgagacaccgcgcccggcctttttttttttcgagatggagtctccctctgtagcccaggctggagtgcagcggcatgatcttggctaactgcaacctccgcctcctgggttcaagcaattctccagcctccgcctccctagtagctgggactataggcacctgccaccatgcctggctaatttttgtagttttagtagagctggggtttcaccatactggtcaggctggtctcgaattcctgacctcaggtgatccacccacccgcctcggcctcccaaagtgttgggattacaggcgtgagcacggcgcccggccctttttttttttttttttaacagggtctcactctgttgcccagactggagtgtagtggcgcgatctcggctcacctccgcctcccaggctcaagcgattcctctgcctcagcctcccaagtagctgagattacaggcgcgcgccactaccgcccggctaacttttttatttttagtaaagacggggtttcaccatgttggccaggctggtcttgaactcctgacctcaaatgatccaccagcctcggcctcccaaagtgctgggattacaggcgtgagccaccgcgccaggcctatcccttaaaatagtttttaatttgaataaggtttactatgaataaataaatcacagtcggcttgatcccaagagcacagacgttcctggtgccccttttcgtgctctcccagcttgcgccactatggccctggccctttaaggctgagcgcgaggccccgcctcgcccggcgccccgcccctcccgctggatcccgcagccgcggctcttcccgacgcgttccgacttccccagctgtgcactctccatccagctgtgcgctctcgtcgggagtcccagccatgtccgacgagagagaggtagccgaggcagcgaccggggaagacgcctcttcgccgcctccgaaaaccgaggcagcgagcgacccccagcatcccgcggcctccgaaggggccgccgccgccgccgcctcgccgccactgctgcgctgcctagtgctcaccggctttggaggctacgacaaggtgaagctgcagagccggccggcagcggccccggcccctgggcccggccagctgacgctgcgtctgcgggcctgcgggctcaacttcgcagacctcatggctaggcaggggctgtacgaccgtctcccgcctctgcctgtcactccgggcatggagggcgcgggtgttgtgatcgcagtgggcgagggagtcagcgaccgcaaggtgagcgggttgcgtagggcagggcagggctgcgcaggccactgggcagtggggcacgagtgggcgagcgccgggggtgtggcagggcgggagaaactggcgcggacctgggtgcacgagcgtggaaagcgtagccaaggaacttgtgtttgggggctcctggagagcggcatttatgtggggaggggagacgaaattatcgccccttccccaaccattttaagttgtggccgccgcccagaagctgtgctggtgggggggaaaacaataaggtgcccatgcgcatgcgcacaaccacactaccgtccccacccaccccccccccccccattaaaaccacacctgtacccctacccaccaaacactctctgggtaattgtggtctgtgactatgagtgacggttagtgccccctttccccgagggagcttgaggggctatgtcgtcggggttgggcgggggcacagcggccgtgccagagtcctggtcacatgcagccccgtggtctgtgggggtgtgaggcggcccctcccaaagcaaggccaaagagacgagacacgcccatcacggaggagagagagcctttgctaccccaccgccaccagccttacaccgccgatctgattttggggtgggggaggcgggattgggtcatccgatctttgtcttgggctctgtgtctcccgtgactgcagtatctcctcctcctgtgactcagccctcagccttcgggccacgacccggggctgcccttgggaatgcctggggcggggagtggaaggggggacccacctctgccttcctcctgcagaggacccccacttcagaaaccccagtgccaggggtttggactggaacggagaggtgcggcgccttgaactggttggccaagtctgcaggcctgtttctccttctcatttatcattaatcttggccacaaccctggacaccagagagctcaaaatgatcagctttttgagagacctgggatgaggcctcagcacgccatttgtttagaggtttcttttttttttctttttctttttttttttttttttttttagacggagtttcgctcttgttgcccaggctggagtgcaatggcgcgatctcggctcaccgcaacctctgcctcccgggttcaagcgattctcctgcctcagcctctcgagtagctgggattacaggcatgcgccaccatgcctggctaattttcgtattttttagtagagacaaggtttcaccattttgggcaggctggtctcgaactcccgacctcaggtgatctgcccacctcggcctccctaagtgctggggttacagacataagccactgcgcttggccaggagtttcctttttaaatcagacccctcaatgagaggccccacagatgcagcctcttgcagacctgccagcccaattctggagccaggtttgttggattcatcctgtatgcaaacagcttctccttaaggctttcctctgaattcagctctggccccaccctcaaactgacttctaaatgatcccactcttgagcaggcgtctaagaggaatattttcgggaggtagttgtagttcatgttactgctgaaggccacccacctcacctcccctccatacactttccgcctggtaaatacaggatatcctgtccagggcaagaatctgatgtaagagcctggattctgcggggagggcccttccctctctctccctcctcctccctcctggtgtctgggttggggaggggtcatggccctgatttggatggcctgagggttagcatgagccagggtaagtgagacttgttctgggtcaaatctgggactggccatgaccctaaatgaccaatgcactcctcgcagctctcctgggttgttctgtatctgctagtcctgagtccctgggtggagggcttccgttcttgttctccagacctcatctcaggccagaacttggaaggaaagaccccagcatgccctcagttctcgtattcagtggagtgtgggggcttgaggacatgaaaaagggcgtaagtggcagtcccatcccccttccccatggaccctaactcttgttaatatacagaattcccatcattcctggcagggatcaagacagacccagattgtcccagaacagcacccacacctccctcttcatgctcttcagagagcgcagagaagtcttttctcctgacgctccctccttttccctgcccttcccttgaccccacttgctaagctggagagaaaggttctgttatctttgtcccctttccctcctgcacagaggctctcgtgggggtgggggggaagccttttactgctgcgtaggcctctgtagcccttcttgtctgttgcccctcctgcaccatctctgagtgaagatgttttctgggctcccagtgctggctcaaacacacttctcccgaggtgaccacaccctgctgtaagcgctcagagaactttgtctgcactttggtatggccctgaccacacagtgccgtcttcttttggttgtgtgacttccttgctgctattatattattattattattattgttagctaacattattaagtgcttattatgtgccagacattgtgctaaaattttttttttccatttggaaaaactgccctaattgacagataagaaaactggagctggaaaagtggagctcaaaaagattaagtaatttttatgcatccgaagtcacacagtcagtaaacagttgagaccgcttttgtaaccacagcagtttgatcttttccacaatacttcatgctgccctaactgtaagcttcttgcattcagggatcttacacaatagtgacatgtaagatctgtaagaagatgataaggatagtatctgcctcaaagaactgatgtaagggttaattaagcattatatataaagcacttgaaatcgggctcggccctcagtcagcactcagtaaaggtgagttgttattgttgttgatgatgatgttattattattattaccatgactattgctgcttctcctgctacttcatttggaagaaggtggccttgtacctagggggaaatcagtaaatagcctgtgggtgaatgaatgagtgactgaatgatactcttctgttcttcaaggcaggagaccgggtgatggtgttgaaccggtcagggatgtggcaggaagaggtgactgtgccctcggtccagaccttcctgattcctgaggccatgacctttgaggaagctgctgccttgctcgtcaattacattacagcctacatggtcctctttgacttcggcaacctacagcctggccacagcgtcttggtacacatggctgcaggtgacaggtcccctcactttatcaccccttaccccacccagatttccttccaggccccttccctgcagcctgtctgggttgttgtcatggcaacaccaggctgccttggcctgtggctcccagaggcctctgctgtgtagttgccgtggtaacattcaggcaccaggtctagtctggtgtgctatccttagcaacgtgccctcaccccacacccccacctctctagctaccttccccaccacttctcagtcatggaaattagacacggccctaaaatgagcgtaggcaaaatgaaggtgacaggctgagtccctgggaggctagaatggagtggttggtggccagggcaactccatatcccctgcttatgggtgtcttgctgcagggggtgtgggtatggctgccgtgcagctgtgccgtacagtggagaatgtgacagtgttcggaacggcctcggccagcaagcacgaggcactgaaggagaatggggtcacacatcccatcgactatcacacgactgactacgtggatgagatcaagaagatttcccctaaaggtggggggcataatatgggagggggtagggaggcacaggacagggaggggagctccagatctgtggatcctaatgttgttcttgggttcccctactctatgacaggagtggacattgtcatggaccctctgggtgggtcagatactgccaagggctacaacctcctgaaacccatgggcaaagtcgtcacctatggtgagttagtgggccagggatggagagagcatgtgagggcaggagggagggtctaaggggtgggatatagaggccagggcttttgaatgaagaaggggtagggactcaggtgctctgtagacgatcagggttaggaatggtcctgtatgctgcattcagattgctgactcttgggtaccagctcttttcattctctgtcacaacttttcatatgagtgatagtaaattctacattcttttttttggttttttttttgagatggagtttcgctcttgtcgcccaggctggagtgcaatggcatgatctcggtcagtgcaacctctgcctcctgggttcaagcgattctcctgcctcaccctcccgagtagctggaattacaggtgtctgccaccacgcccaactaatttttgtatttttagtagaggcggtgtttcaccatgttggccaggctggtcttgaactcctgatctcaggtgatccagccgcctcagcctcccaaagtgctgggattatagccgtgagccaccacgcctggccaaattctacattcttgtttggggattattcttgaacaaccagcctgccttctttctgtcctacctccctgagcatcttaggcagggtgcattttcatttaaaaaagtatttcatacaacaaaataagccaggcatggtggctcatgcctgtaatcccagcactttggaaggccagggcaggcagatggcttgagcctagaaattcgagaccagcctggtcaacatggtgtaccttatctccacaaaaaatacaaaaattagccaggtgtggtggcactgtactccagcctgggcaacagagcgagaccctgactcaaacaaatgaacaaacaagcaaatacataaagattagagcaatttttttttttttgagacagaatatcactctgttacccatcctggagtgcagtggcgcaacctcggctctctgcagcatccacctccctggttcaagcagttctgcctcaggctcctgagtagctggaattacaggtgcccatctccacgcctggcttttttttttttctttttcttgagacagagtctggctgtcacccaggctggagtgcagtgacacgatctcggctcactgcaacctccacctcccggattcaagcaattcttctgcctcagcctcccaagtagctgggactgcgggcgcacgccaccatacctggctaatttttgtattgttgtgggtttttttgtttgttttgttttgttttttttttttgagacggagtttcgctctttttgcccaggctgaagtgcagtggcgcgatctcggctcactgcaacctccgcctcccgggttcaagcgattctcctgcctcagacttcctgagtagctgggattacaggcatgtaccaccatgcccagctaattttgtattttcagtagagacggggtttctccatgttggtcacgctggtctcgaactcctgacgtccagtgatccgcccacctcggcctcccaaagtgctgggattataggcgtgagccaccatacccggccaacacctggctaattttcgtattttttagtagagacaaggtttcaccattttgggcaggctggtctcgaactcctgacctcaagtgatccccccaccttggcttcccagagtgctgggattatggatgtgagccatagcacccagcccctagagcaatttaaagtcagccagggttggtttgggcctggtaaccagcagtttgagaattatccaatcactccctggcactggtgtggagaattgcaaggggatcacagggaacagagagcacagatgcagacacacagggatgtgcctgggggggttcacaggctatgtcaccttgtccttcaggaatggccaacctgctgacgggccccaaacggaacctgatggccctggcccggacatggtggaatcagttcagcgtgacagctctgcagctgctgcaggccaaccgggctgtgtgtggcttccacctgggctacctggatggtgaggtggagctggtcagtggtgtggtggcccgcctcctggctctgtacaaccagggccacatcaagccccacattgactcagtctggcccttcgagaaggtgaatgtgaggactttgcagggagggcttgggtaggactcatgaaggctggggtcccaaggggcagattcctggggaagaggagggctgcctgcatcacactggcccctgttggatgagggttggatagcactgggagccgcatctttccttcctccccaggtggctgatgccatgaaacagatgcaggagaagaagaatgtgggcaaggtcctcctggttccagggccagagaagcagaactagggcaagtggctgtgagaccctagagaccagcgaagggagaagttgggaagctacgttctgttggccaccagacttgcatttcagcctctgtcataatgctctgccctccctcccccgaagttctctgtggtgatgaccgctctcccctgcccctccccgcttcctgacctctgaagaggttgggaagtgaccatttggatgtctgggccctgccaaggcgacagggagggtcagagggaggccggctgcttcctgcccccaccctttccccgggcctgctgtgctgcttttgtgccaaggttagccagtcccccctgttgtgttccatgtgctttcacctctgcctcatctttcctcccgtccctgccccgccacctccccaaagaattgaaacgtcagctcaggatatggggccaatctctgtgagtccagcatgtacctgtctctccctagtgtcccttcagcctgggctgaccagtgcccgcctctgggcttgaccagttcccaatctcgtcctctgtccccaacttcttaagcacaattgggcttcttccatctccaggttttctgccattcttaaccaaggctgcctcttccaacagggcgggaatcagacctactcccctaggtcacaactctgggaaggatacagagcccccacccttcactgagttctctggatttgttctcagtgccttagcaacgaaaacctgtgcttgtgtgtgtgtggcggcggggagggaggatcctgtttcccacctccttctcctcccctgtactccccagtgccttccttgttctggtggagctggggtttctctcctccccagtcccacaacactgccaaaaatctgtgtatgtgccattgggtggggcagccccaagcctcctggggaggcagggcaaaaacaggtgccctcatcgtggtctgtgccatgtcccgtctctatggtggttgaggagaaaggcggggaagcttcctcagccttgcagatatgtgtggcatttactagccagagctctgaaaggcagtgctgtctgtttcttgtactgggaccaaagtaaaaatccaagcacattccccttgcagttaggggaggccctactgccttctcaaagcagagaggcagcttatcaaactcagcccaaaactctgtttacatgggtggggagatggagcagggaagtacagagtgggatggtcaggacctgggccattgcaaccaaaatggggacttcctgggtagggaggtcactccctctactcactgagctaggattagggagggttattgccccaaccattgcaatgggaggtggagggacaggctcagcctcctcattgtctaaatgaggcctaaatgtgtgaagtgcgatttctgcttttgtgtaccccaccaccccattaccacagctgcctttgtgtgtttgtgtcaataaaaagccaaaccctgggtcctgcttgttgcctctgagagtggagggaaggtgagctcctggaaggctagtgctgccagcagaagatctgggctgcttcctgccccctgcctctttccatgcccaaatcacgtttcctttcatgagtgaaatgaggaagaacatcatggcatgcaggctctttttactgttctgggcagtgttttgcaatgtgtgacccctccgcactgttggtgaacatacagacctcctatatgggcacccaagcccaggccagtgtgagaaccttggcgggggggtggggaggatgagaaggggaggcccctagcctgactcagaggtgaagactgctaggccctgctgtccttggggtacgactgtcagggcctctacctccccgcccccgcgggtgggcttctggaagtggatctccaggacgtcatgcagctccgggccatccaagatatcaggaatgttgagcaccagtaccgagcggggaactggctgcgacctgatctggaaaaggagccaggagatggcaaaggctcatgggagaagggctgggggctgggggtagggcaggcagtgccccatgggggtatgaggtcgggaggcctggagaggctgatggtgggtaggtaggtcagtggggtttggggcctctgatccttcattgggcaagttcctggcaggcagacaggttacccagcccagcccctgttcttcacccctcctgcttacctcagccttctggatctccccattcacatacggagagactctcagagggacttgctgcccacccagtggcactgtgaactggccgatttggcacagacgctgagccactgtggggagcaaggaggggtgggcctttagcatcaagccctctcctctccctgcaccataatcttgcacaccctataccctctcccctgcaggaggcctgcatagccctcacctccatccctagcaaaccccagcatgacactccctggcagtagctcccgaacgtccacatcgccacctccgttcctagtcttgccaaagaagatctctagcttgtccagcagctcctcctcactcagcctgaggctggcaggaaatccagtgaccaacaccctccggccactcaactggctggacacctagggggagacagcaaggggtggtcccagacacagctccacttccccatgcccaggtgcatggcatgctttgcatgccccaggattctgtcataccatcacctggatggtggtgaccatgggcagctccaagggctggacctgcacccgcagccggcactcctccatgttgatcgtgtgctccttttgttgcagcacctgctcagccactgggtggtgggaaacagggtcagtactgggaaccctccccacctccctcctgaggctccccatgagcttacctttggggtcatcaaaggtgatcagagcagagcccgcaagcagagggcagtggatccgcaaattggaaactaaagacttaggcacttccgggtcctgctgggtgtgtcctcggaataccagggggatcttgggcactgaaaatgggacctggaagtaggggaggggagtaggagtgttcctcactcccacctaggaggaaggcatctccgattccattccattgatgctgagtgccggagataaatacatttactgaaagaaaagctggataaatgagtggatgaatgcaggtctggtccatacagggcaatttacatacaacatcttaatttgtcctgggaggtgggtagctctactttacagatgttcaagtaacataatggaggtcacacagcaaggaagtagcagagccaggaataaaaccgagaactccccagctcttttttgtgtttctttgttttaaagggagtcttgctctgtcacccagctggagtgtagtggcatgatcttggctcactgcaacctccacttcccaggttcaagcaattcggactcagcctcccaagtagctgggattacaggcatgtgccaccaaacccagctaatttttgtatttttagtagagacggggtttcaccctgttggccaggctggtctcaaactgacctcaggtgatccaccagcctcggcctcccaaagtgctgggattacaggcgtgagccactgcgcccggcctaatttttgtatttttagtagagatgggatttcactgtgttggccaggctggtctcaaactcctgacctgaggtgatcaggcccccttggcctaccaaagtgctgggtttacaggtgtgagccaccgcacccggcctcgccagctcgtttttaccaaacaacaccagatcctttagggggggttattgcgggcggatttttgaaacggagggctggtgataggctttttataggtatgcatgtatatggttctagcgtagtggattttgggaattgcggt

SEQ ID NO: 400 - DNA, 2510 bp, Homo sapiens
ggacacggcgggcgagcgggcggtatggcggcggcggggcccgcggcggggccgacggggcccgagcccatgccgagctacgcgcagctagtgcagcgcggctggggcagcgcgctggcggcggcgcggggctgcacggactgcggctgggggctggcgcgtcgcggcctggctgagcacgcgcacctggcgccgcccgagctgctgctgctggcgctcggcgcgctgggctggaccgcgctgcgctccgcggccactgcgcgcctctttcggcccctggcgaagcggtgctgcctccagcccagagatgccgccaagatgcccgagagcgcttggaagtttctcttctacctgggcagctggagctacagtgcctacctgctgtttggcaccgactaccccttcttccatgacccaccatctgtcttctacgactggacgccgggcatggcagtgccacgggacattgcagccgcctacctgctccagggaagcttctatggccactccatctacgctacgctatacatggacacctggcgcaaggactcggtggtcatgctgctccaccacgtggtcactctcatcctcatcgtctcctcctacgccttccggtaccacaatgtgggcatccttgtgctcttcctgcacgatatcagtgacgtgcagcttgagttcaccaagctcaacatttacttcaagtcccgcggcggctcctaccatcggctgcatgccttggcagcagacttgggctgcctcagcttcggcttcagctggttctggttccgcctctactggttcccgctcaaggtcctgtatgccaccagtcactgcagtctgcgcacggtgcctgacatccccttctacttcttcttcaatgcgctcctgctgctgctcacccttatgaacctctactggttcctgtacatcgtggcgtttgcagccaaggtgttgacaggccaggtgcacgagctgaaggacctgcgggagtatgacacagccgaggcccagagcctgaagcccagcaaagccgagaagccactgaggaacggcctggtgaaggacaagcgcttctgaacccctcggccccgcccccgtggacccggccccaccccgaataccccggccacgctccccgtccttggccgcccctccaccccctccaactctgctcctctagggccgccgccacctcccctgggaccccgccccctcatcctgcctccatttcccggccacgccccccaggacccctgcccctccggggacaccggccccgccctcagcccactggtcccgggccgccgcggaccctgcgcactctctggtcatcgcctgggaggaagatgccaccgccgcagcaaggtccctgcggccaccacctcctcctcctcctggccctgctgctgccctcgctgcccctgacccgcgcccccgtgcccccaggcccagccgccgccctgctccaggctctaggactgcgcgatgagccccagggtgcccccaggctccggccggttcccccggtcatgtggcgcctgtttcgacgccgggacccccaggagaccaggtctggctcgcggcggacgtccccaggggtcaccctgcaaccgtgccacgtggaggagctgggggtcgccggaaacatcgtgcgccacatcccggaccgcggtgcgcccacccgggcctcggagcctgtctcggccgcggggcattgccctgagtggacagtcgtcttcgacctgtcggctgtggaacccgctgagcgcccgagccgggcccgcctggagctgcgtttcgcggcggcggcggcggcagccccggagggcggctgggagctgagcgtggcgcaagcgggccagggcgcgggcgcggaccccgggccggtgctgctccgccagttggtgcccgccctggggccgccagtgcgcgcggagctgctgggcgccgcttgggctcgcaacgcctcatggccgcgcagcctccgcctggcgctggcgctacgcccccgggcccctgccgcctgcgcgcgcctggccgaggcctcgctgctgctggtgaccctcgacccgcgcctgtgccaccccctggcccggccgcggcgcgacgccgaacccgtgttgggcggcggccccgggggcgcttgtcgcgcgcggcggctgtacgtgagcttccgcgaggtgggctggcaccgctgggtcatcgcgccgcgcggcttcctggccaactactgccagggtcagtgcgcgctgcccgtcgcgctgtcggggtccggggggccgccggcgctcaaccacgctgtgctgcgcgcgctcatgcacgcggccgccccgggagccgccgacctgccctgctgcgtgcccgcgcgcctgtcgcccatctccgtgctcttctttgacaacagcgacaacgtggtgctgcggcagtatgaggacatggtggtggacgagtgcggctgccgctaacccggggcgggcagggacgcgggcccaacaataaatgccgcgtgg

SEQ ID NO: 401 - DNA, 1759 bp, Homo sapiens
gacccaatccaggccagagtctttctctcaggggcttcctcgtgctcagctaatcctccgatcaatccttgggaatccctgggacctcttcggtatccctactctcagccagggatcatgtcttgggccgctcgcccgcccttcctccctcagcggcatgccgcagggcagtgtgggccggtgggggtgcgaaaagaaatgcattgtggggtcgcgtcccggtggcggcggcgacggccctggctggatcccgcagcggcggcggcggcggcggtggcaggcggagaacaacaaaccccggagccggagccaggggaggctggacgggacgggatgggcgacagcgggcgggactcccgaagcccagacagctcctccccaaatccccttccccagggagtccctcccccttctcctcctgggccacccctacccccttcaacagctcctacccttggaggctctggggccccacccccacccccgatgccaccacccccactgggctctccctttccagtcatcagttcttccatggggtcccctggtctgccccctccagctcccccaggattctccgggcctgtcagcagcccccagattaactcaacagtgtcactccctgggggtgggtctggcccccctgaagatgtgaagccaccagtcttaggggtccggggcctgcactgtccaccccctccaggtggccctggggctggcaaacggctatgtgcaatctgcggggacagaagctcaggcaaacactacggggtttacagctgtgagggttgcaagggcttcttcaaacgcaccatccgcaaagaccttacatactcttgccgggacaacaaagactgcacagtggacaagcgccagcggaaccgctgtcagtactgccgctatcagaagtgcctggccactggcatgaagagggaggcggtacaggaggagcgtcagcggggaaaggacaaggatggggatggggagggggctgggggagcccccgaggagatgcctgtggacaggatcctggaggcagagcttgctgtggaacagaagagtgaccagggcgttgagggtcctgggggaaccgggggtagcggcagcagcccaaatgaccctgtgactaacatctgtcaggcagctgacaaacagctattcacgcttgttgagtgggcgaagaggatcccacacttttcctccttgcctctggatgatcaggtcatattgctgcgggcaggctggaatgaactcctcattgcctccttttcacaccgatccattgatgttcgagatggcatcctccttgccacaggtcttcacgtgcaccgcaactcagcccattcagcaggagtaggagccatctttgatcgggtgctgacagagctagtgtccaaaatgcgtgacatgaggatggacaagacagagcttggctgcctgagggcaatcattctgtttaatccagatgccaagggcctctccaaccctagtgaggtggaggtcctgcgggagaaagtgtatgcatcactggagacctactgcaaacagaagtaccctgagcagcagggacggtttgccaagctgctgctacgtcttcctgccctccggtccattggccttaagtgtctagagcatctgtttttcttcaagctcattggtgacacccccatcgacaccttcctcatggagatgcttgaggctccccatcaactggcctgagctcagacccagacgtggtgcttctccacactggaggagc

SEQ ID NO: 402 - DNA, 3915 bp, Homo sapiens
gtggggtggggtggggctgggggcttgtcgccctttcaggctccaccctttgcggagattataaatagtcatgatcccagcgagacccagagatgcctgtaatggtgagactttggatccttcctgaggacgtggagaaaactttctgctgagaaggacattttgaaggttttgttggctgaaaaagctgtttctggaatcacccctagatctttcttgaagacttgaattagattacagcgatggggacacagaaggtcaccccagctctgatatttgccatcacagttgctacaatcggctctttccaatttggctacaacactggggtcatcaatgctcctgagaagatcataaaggaatttatcaataaaactttgacggacaagggaaatgccccaccctctgaggtgctgctcacgtctctctggtccttgtctgtggccatattttccgtcgggggtatgatcggctccttttccgtcggactcttcgtcaaccgctttggcaggcgcaattcaatgctgattgtcaacctgttggctgtcactggtggctgctttatgggactgtgtaaagtagctaagtcggttgaaatgctgatcctgggtcgcttggttattggcctcttctgcggactctgcacaggttttgtgcccatgtacattggagagatctcgcctactgccctgcggggtgcctttggcactctcaaccagctgggcatcgttgttggaattctggtggcccagatctttggtctggaattcatccttgggtctgaagagctatggccgctgctactgggttttaccatccttcctgctatcctacaaagtgcagcccttccattttgccctgaaagtcccagatttttgctcattaacagaaaagaagaggagaatgctaagcagatcctccagcggttgtggggcacccaggatgtatcccaagacatccaggagatgaaagatgagagtgcaaggatgtcacaagaaaagcaagtcaccgtgctagagctctttagagtgtccagctaccgacagcccatcatcatttccattgtgctccagctctctcagcagctctctgggatcaatgctgtgttctattactcaacaggaatcttcaaggatgcaggtgttcaagagcccatctatgccaccatcggcgcgggtgtggttaatactatcttcactgtagtttctctatttctggtggaaagggcaggaagaaggactctgcatatgataggccttggagggatggctttttgttccacgctcatgactgtttctttgttattaaaggataactataatgggatgagctttgtctgtattggggctatcttggtctttgtagccttctttgaaattggaccaggccccattccctggtttattgtggccgaactcttcagccagggcccccgcccagctgcgatggcagtggccggctgctccaactggacctccaacttcctagtcggattgctcttcccctccgctgctcactatttaggagcctacgtttttattatcttcaccggcttcctcattaccttcttggcttttaccttcttcaaagtccctgagacccgtggcaggacttttgaggatatcacacgggcctttgaagggcaggcacacggtgcagatagatctggaaaggacggcgtcatggagatgaacagcatcgagcctgctaaggagaccaccaccaatgtctaagtcgtgcctccttccacctccctcccggcatgggaaagccacctctccctcaacaagggagagacctcatcaggatgaacccaggacgcttctgaatgctgctacttaattcctttctcatcccacgcactccatgagcaccccaaggctgcggtttgttggatcttcaatggctttttaaattttatttcctggacatcctcttctgcttaggagagaccgagtgaacctaccttcatttcaggagggattggccgcttggcacatgacaactttgccagcttttcctcccttgggttctgatattgccgcactaggggatataggagaggaaaagtaaggtgcagttcccccaacctcagacttaccaggaagcagatacatatgagtgtggaagccggagggtgtttatgtaagagcaccttcctcacttccatacagctctacgtggcaaattaacttgagttttatttattttatcctctggtttaattacataatttttttttttttactttaagtttcaggatacatgtgccgaatgtgcaggtttgttacataggtatatatatgccatgatggaaatatttatttttttaagcgtaattttgccaaataataaaaacagaaggaaattgagattagagggaggtgtttaaagagaggttatagagtagaagatttgatgctggagaggttaaggtgcaataagaatttagggagaaatgttgttcattattggagggtaaatgatgtggtgcctgaggtctgtacgttacctcttaacaatttctgtccttcagatggaaactctttaacttctcgtaaaagtcatatacctatataataaagctactgatttccttggagcttttttctttaagataatagtttacatgtagtagtacttgaaatctaggattattaactaatatgggcattgtagttaatgatggttgatgggttctaattttggatggagtccagggaagagaaagtgatttctagaaagcctgttcccctcactggatgaaataactccttcttgtagtagtctcattacttttgaagtaatcccgccacctatctcgtgggagagccatccaaataagaaacctaaaataattggttcttggtagagattcattatttttccactttgttctttaggagattttaggtgttgattttctgttgtattttaactcatacctttaaaggaattccccaaagaatgtttatagcaaacttggaatttgtaacctcagctctgggagaggatttttttctgagcgattattatctaaagtgtgttgttgctttaggctcacggcacgcttgcgtatgtctgttaccatgtcactgtggtcctatgccgaatgccctcaggggacttgaatctttccaataaaccaggtttagacagtatgagtcaatgtgcagtgtagcccacacttgagaggatgaatgtatgtgcactgtcactttgctctgggtggaagtacgttattgttgacttattttctctgtgtttgttcctacagcccctttttcatatgttgctcagtctccctttcccttcttggtgcttacacatctcagaccctttagccaaacccttgtcagtgacagtattttggttcttagttctcactgttccctctgctcctggagcctttgaataaaaatgcacgtagctgaggccggatgcggtggctcacgcctgtaatcccagcactttgggaggcctaggcgggcggtcaggggttcgagaccagtctggccaacatcgtgaaaccctgtctctactaaaaatgcaaaaattagccgggcgtggtggcgggcgcctgtaatcccagctacttgggaagctgaggcgggagaatcatgtgaacccgggacgcaggggttgcagtgagcggagatcgcatcattgcactctagcctgggccacagggcgagactccgtctcaaaaaaaaaaaaatgcacatagctatcgagtgtgctttagcttgaaaaggtgaccttgcaacttcatgtcaactttctggctcctcaaacagtaggttggcagtaaggcagggtcccatttctcactgagaagattgtgaatatttccatatggattttctattgttactctggttctttgttttaaaataaaaattctgaatgtacacg

SEQ ID NO: 403 - DNA, 896 bp, Homo sapiens
ggggaaagcagcccattcctgggtcagagactcccaccccagctcagagggagcaggggcccagcagggacggaccctcattcctcccagggaccccagacctctgtctctctcgggccttggctccttgaacttttggccgccatgtgcttcccgaagtcctctctgatgacatgaagaagctgaaggcccgaatgcaccaggccatagaaagattttatgataaaatgcgaaatgcagaatcaggacgtggacaggtgatgtcgagcctggcagagctggaggacgacttcaaagagggctacctggagacagtggcggcttattatgaggagcagcacccagagctcactcctctacttgaaaaagaaagagatggattacggtgccgaggcaacagatcccctgtcccggatgttgaggatcccgcaaccgaggagcctggggagagcttttgtgataaggtcatgaggtggttccaggccatgctgcgacggctgtagacctggtggcacggggtcctggcctgggtgaaggagaaggtggtggccctggtccatgcagtgcaggccctctggaaacagttccagagtttctgctgctctctgtcagagctcttcatgtcctctttccagtctacggagcacggggggacaaggaggagctgacaccccagaagtgttctgaaccccaatcctcaaaatgaagatactgacaccacctttgccctccccgtcaccgcgcacccaccctgacccctccctcagctgtcctgtgccccaccctctcccgcacactcagtccccctgcctgggcgttcctgccgcagctctgacctggcggtcgccctggcatcttaataaaacctgcttatacttcctggcaggggagatacc

SEQ ID NO: 404 - DNA, 1861 bp, Homo sapiens
ggaacgaggaggtggagaattgagagcacgatgcatacacaggtgtttctgagtagtaattagatcgctgtgaaggaaaaagcacacctttgagttttcacctgtgaacactatagcgctgagagagacagtctgaaagcagaggaagacatcgatcagtaacaccaagagacaccaaagttgaaagttttgttttctttccctctgttttatttttcccccgtgtgtccctactatggtcagaaagcctgttgtgtccaccatctccaaaggaggttacctgcagggaaatgttaacgggaggctgccttccctgggcaacaaggagccacctgggcaggagaaagtgcagctgaagaggaaagtcactttactgaggggagtctccattatcattggcaccatcattggagcaggaatcttcatctctcctaagggcgtgctccagaacacgggcagcgtgggcatgtctctgaccatctggacggtgtgtggggtcctgtcactatttggagctttgtcttatgctgaattgggaacaactataaagaaatctggaggtcattacacatatattttggaagtctttggtccattaccagcttttgtacgagtctgggtggaactcctcataatacgccctgcagctactgctgtgatatccctggcatttggacgctacattctggaaccattttttattcaatgtgaaatccctgaacttgcgatcaagctcattacagctgtgggcataactgtagtgatggtcctaaatagcatgagtgtcagctggagcgcccggatccagattttcttaaccttttgcaagctcacagcaattctgataattatagtccctggagttatgcagctaattaaaggtcaaacgcagaactttaaagacgcgttttcaggaagagattcaagtattacgcggttgccactggctttttattatggaatgtatgcatatgctggctggttttacctcaactttgttactgaagaagtagaaaaccctgaaaaaaccattccccttgcaatatgtatatccatggccattgtcaccattggctatgtgctgacaaatgtggcctactttacgaccattaatgctgaggagctgctgctttcaaatgcagtggcagtgaccttttctgagcggctactgggaaatttctcattagcagttccgatctttgttgccctctcctgctttggctccatgaacggtggtgtgtttgctgtctccaggttattctatgttgcgtctcgagagggtcaccttccagaaatcctctccatgattcatgtccgcaagcacactcctctaccagctgttattgttttgcaccctttgacaatgataatgctcttctctggagacctcgacagtcttttgaatttcctcagttttgccaggtggctttttattgggctggcagttgctgggctgatttatcttcgatacaaatgcccagatatgcatcgtcctttcaaggtgccactgttcatcccagctttgttttccttcacatgcctcttcatggttgccctttccctctattcggacccatttagtacagggattggcttcgtcatcactctgactggagtccctgcgtattatctctttattatatgggacaagaaacccaggtggtttagaataatgtcagagaaaataaccagaacattacaaataatactggaagttgtaccagaagaagataagttatgaactaatggacttgagatcttggcaatctgcccaaggggagacacaaaatagggatttttacttcattttctgaaagtctagagaattacaactttggtgataaaaaaaaaaaaaaaaaaa

SEQ ID NO: 405 - DNA, 2619 bp, Homo sapiens
gaagcaaggaggcggcggcggccgagcgagtggcgagtagtggaaacgttgcttctgaggggagcccaagatgaccggttctaacgagttcaagctgaaccagccacccgaggatggcatctcctccgtgaagttcagccccaacacctcccagttcctgcttgtctcctcctgggacacgtccgtgcgtctctacgatgtgccggccaactccatgcggctcaagtaccagcacaccggcgccgtcctggactgcgccttctacgatccaacgcatgcctggagtggaggactagatcatcaattgaaaatgcatgatttgaacactgatcaagaaaatcttgttgggacccatgatgcccctatcagatgtgttgaatactgtccagaagtgaatgtgatggtcactggaagttgggatcagacagttaaactgtgggatcccagaactccttgtaatgctgggaccttctctcagcctgaaaaggtatataccctctcagtgtctggagaccggctgattgtgggaacagcaggccgcagagtgttggtgtgggacttacggaacatgggttacgtgcagcagcgcagggagtccagcctgaaataccagactcgctgcatacgagcgtttccaaacaagcagggttatgtattaagctctattgaaggccgagtggcagttgagtatttggacccaagccctgaggtacagaagaagaagtatgccttcaaatgtcacagactaaaagaaaataatattgagcagatttacccagtcaatgccatttcttttcacaatatccacaatacatttgccacaggtggttctgatggctttgtaaatatttgggatccatttaacaaaaagcgactgtgccaattccatcggtaccccacgagcatcgcatcacttgccttcagtaatgatgggactacgcttgcaatagcgtcatcatatatgtatgaaatggatgacacagaacatcctgaagatggtatcttcattcgccaagtgacagatgcagaaacaaaacccaagtcaccatgtacttgacaagatttcatttacttaagtgccatgttgatgataataaaacaattcgtactccccaatggtggatttattactattaaagaaaccagggaaaatattaattttaatattataacaacctgaaaataatggaaaagaggtttttgaatttttttttttaaataaacaccttcttaagtgcatgagatggtttgatggtttgctgcattaaaggtatttgggcaaacaaaattggagggcaagtgactgcagttttgagaatcagttttgaccttgatgattttttgtttccactgtggaaataaatgtttgtaaataagtgtaataaaaatccctttgcattctttctggaccttaaatggtagaggaaaaggctcgtgagccatttgtttcttttgctggttatagttgctaattctaaagctgcttcagactgcttcatgaggaggttaatctacaattaaacaatatttcctcttggccgtccattattttctgaagcagatggttcatcatttcctgggctgttaaacaaagcgaggttaaggttagactcttgggaatcagctagttttcaatcttattagggtgcagaaggaaaactaataagaaaacctcctaatatcattttgtgactgtaaacaattatttattagcaaacaattgatcccagaagggcaaattgtttgagtcagtaatgagctgagaaaagacagagcatatctgtgtatttggaaaaataattgtaacgtaattgcagtgcatttagacaggcatctatttggacctgtttctatctctaaatgaatttttggaaacattaatgaggtttacatatttctctgacatttatatagttcttatgtccatttcagttgaccagccgctggtgattaaagttaaaaagaaaaaaattatagtgagaatgagattcatttcaatgtaatgcactaaagcagaacacgaacttagcttggcctattctaggtagttccaaatagtatttttgttgtcaaactttaaaatttatattaatttgcaaatgtatgtctctgagtaggacttggacctttcctgagatttattttatccgtgatgtattttttttaattcttttgatacagagaagggtctttttttttttaagtatttcagtgaaaacttggtgtaagtctgaacccatcttttgaaatgtattttcttcattgcaggtccacctaatcatcctgtgaaagtggtttctctatggaaagctttgtttgcttcctacaaatacatgcttattccttaagggatgtgttagagttactgtggatttctctgttttctgtcttacaagaaacttgtctatgtaccttaatactttgtttaggatgaggagtctttgtgtccctgtacagtagtctgacgtatttccccttctgtcccctagtaagcccagttgctgtatctgaacagtttgagctctttttgtaatatactctaaacctgttatttctgtgctaataaacgagatgcagaacccttgaaaaaaaaaaaaaaaaaaaaaaaaaaaaaaaaaa

SEQ ID NO: 406 - DNA, 2075 bp, Homo sapiens
gagaggggcgggcgctctattccagagaccgagtggcagggcggccactgtggcggggctctttccccgtttcgcctcagctacccctcagctccggtagtcgccagtccggggtcgtcgccgtttggggcgggagctgctcggccccgccgccgtccccgtcgccgcttccgggtccaggcccctcgggccgcctgccgccgtcatgaggctgcgggtgcggcttctgaagcggacctggccgctggaggtgcccgagacggagccgacgctggggcatttgcgctcgcacctgaggcagtccctgctgtgcacctgggggtacagttctaatacccgatttacaattacattgaactacaaggatcccctcactggagatgaagagaccttggcttcatatgggattgtttctggggacttgatatgtttgattcttcaagatgacattccagcgcctaatataccttcatccacagattcagagcattcttcactccagaataatgagcaaccctctttggccaccagctccaatcagactagcatgcaggatgaacaaccaagtgattcattccaaggacaggcagcccagtctggtgtttggaatgacgacagtatgttagggcctagtcaaaattttgaagctgagtcaattcaagataatgcgcatatggcagagggcacaggtttctatccctcagaacccatgctctgtagtgaatcggtggaagggcaagtgccacattcattagagaccttgtatcaatcagctgactgttctgatgccaatgatgccttgatagtgttgatacatcttctcatgttggagtcaggttacatacctcagggcaccgaagccaaagcactgtccatgccggagaagtggaagttgagcggggtgtataagctgcagtacatgcatcctctctgcgagggcagctccgctactctcacctgtgtgcctttgggaaacctgattgttgtaaatgctacactaaaaatcaacaatgagattagaagtgtgaaaagattgcagctgctaccagaatcttttatttgcaaagagaaactaggggaaaatgtagccaacatatacaaagatcttcagaaactctctcgcctctttaaagaccagctggtgtatcctcttctggcttttacccgacaagcactgaacctaccagatgtatttgggttggtcgtcctcccattggaactgaaactacggatcttccgacttctggatgttcgttccgtcttgtctttgtctgcggtttgtcgtgacctctttactgcttcaaatgacccactcctgtggaggtttttatatctgcgtgattttcgagacaatactgtcagagttcaagacacagattggaaagaactgtacaggaagaggcacatacaaagaaaagaatccccgaaagggcggtttgtgatgctcctgccatcgtcaactcacaccattccattctatcccaaccccttgcaccctaggccatttcctagctcccgccttcctccaggaattatcgggggtgaatatgaccaaagaccaacacttccctatgttggagacccaatcagttcactcattcctggtcctggggagacgcccagccagtttcctccactgagaccacgctttgatccagttggcccacttccaggacctaaccccatcttgccagggcgaggcggccccaatgacagatttccctttagacccagcaggggtcggccaactgatggccggctgtcattcatgtgattgatttgtaatttcatttctggagctccatttgtttttgtttctaaactacagatgtcaactccttggggtgctgatctcgagtgttattttctgattgtggtgttgagagttgcactcccagaaaccttttaagagatacatttatagccctaggggtggtatgacccaaaggttcctctgtgacaaggttggccttgggaatagttggctgccaatctccctgctcttggttctcctctagattgaagtttgttttctgatgctgttcttaccagattaaaaaaaagtgtaaattaca

SEQ ID NO: 407 - DNA, 3176 bp, Homo sapiens
tgaactgagcggcccctgagctgacagatacactgcgcagtggaacggcgagcgagccgacgggcgagtgaggggcgcacatgatcacctcggccgctggaattatttctcttctggatgaagatgaaccacagcttaaggaatttgcactacacaaattgaatgcagttgttaatgacttctgggcagaaatttccgagtccgtagacaaaatagaggttttatacgaagatgaaggtttccggagtcggcagtttgcagccttagtggcatctaaagtattttatcacctgggggcttttgaggagtctctgaattatgctcttggagcaagggacctcttcaatgtcaatgataactctgaatatgtggaaactattatagcaaaatgcattgatcactacaccaaacaatgtgtggaaaatgcagatttgcctgaaggagaaaaaaaaccaattgaccagagattggaaggcatcgtaaataaaatgttccagcgatgtctagatgatcacaagtataaacaggctattggcattgctctggagacacgaagactggacgtctttgaaaagaccatactggagtcgaatgatgtcccaggaatgttagcttatagccttaagctctgcatgtctttaatgcagaataaacagtttcggaataaagtactaagagttctagttaaaatctacatgaacttggagaaacctgatttcatcaatgtttgtcagtgcttaattttcttagatgatcctcaggctgtgagtgatatcttagagaaactggtaaaggaagacaacctcctgatggcatatcagatttgttttgatttgtatgaaagtgctagccagcagtttttgtcatctgtaatccagaatcttcgaactgttggcacccctattgcttctgtgcctggatccactaatacgggtactgttccgggatcagagaaagacagtgactcgatggaaacagaagaaaagacaagcagtgcatttgtaggaaagacaccagaagccagtccagagcctaaggaccagactttgaaaatgattaaaattttaagtggtgaaatggctattgagttacatctgcagttcttaatacgaaacaataatacagacctcatgattctaaaaaacacaaaggatgcagtacggaattctgtatgtcatactgcaaccgttatagcaaactcttttatgcactgtgggacaaccagtgaccagtttcttagagataatttggaatggttagccagagccactaactgggcaaaatttactgctacagccagtttgggtgtaattcataagggtcatgaaaaagaagcattacagttaatggcaacataccttcccaaggatacttctccaggatcagcctatcaggaaggtggaggtctctatgcactaggtcttattcatgccaatcatggtggtgatataattgactatctgcttaatcagcttaagaacgccagcaatgatatcgttagacacggtggcagtctgggccttggtttggcagccatgggaactgcacgtcaagatgtttatgatttgctaaaaacaaacctttatcaggatgatgcagtaacaggggaagcagctggcctggccctaggtttggttatgttgggctctaaaaatgctcaggctattgaggacatggttggttatgcacaagaaactcaacatgagaagattctgcgtggtcttgcagttggcatagctttagtaatgtatgggaggatggaagaggctgatgctctcattgaatctctctgtcgtgacaaggacccaattcttcgaaggtctggaatgtatactgtagccatggcttattgtggctctggtaacaacaaagcaattcgacgcctgctacatgtggctgtaagtgatgtgaatgatgatgtcaggagtgcagcagtagaatcacttgggttcattctattcagaacccctgaacagtgcccaagtgttgtctctttgttgtcagagagttacaaccctcatgtgcgctacggagctgcaatggccttggggatatgctgtgctggtacaggaaacaaggaagccattaatttgctagaaccaatgacaaacgaccccgtgaactacgtgaggcaaggggcactcatagcttcagctctcatcatgatccagcagactgaaatcacttgtccaaaggtgaatcagttcagacagctgtattccaaagtcatcaatgataagcatgatgatgtcatggccaagtttggcgctattctggcccagggcatactggatgcaggtggtcataatgtcacaatctccttgcagtccaggactgggcatactcatatgccttctgtggttggcgtccttgtatttacccagttttggttctggtttcctctttcacacttcctgtcattggcttatacccctacctgtgtcattggccttaacaaggacttaaagatgccgaaagttcagtataaatcgaactgtaaaccatccacatttgcatatcctgcccctctggaagtaccaaaagaaaaagaaaaggaaaaggtttctactgctgtattatctataactgccaaggctaaaaagaaggaaaaagaaaaggaaaaaaaggaggaggagaaaatggaagtggatgaggcagagaaaaaggaggaaaaagagaagaaaaaagaacctgagccaaacttccagttattggataacccagcccgagttatgcctgcccagcttaaggtcctaaccatgccggagacctgtagataccagcctttcaaaccactctctattggaggcatcatcattctgaaggataccagtgaagacattgaggagctggtggaacctgtggcagcacatggcccaaaaatcgaggaggaggaacaagagccagaacccccagaaccatttgagtatattgatgattaaggaccagaggatctcacttgcttatctgaagaagattgtccaggctcatattgggaatgcttatgaggaaattcatgccgagacctgctattcaatgcatgtatcgttgcctctgcactgacctgaagaaccctgtctccaagtctttggttgaagagaagatatatgactgttgagtgtgctctttcacagaacttggttttcaaataaatataagatctccagatggacaag

SEQ ID NO: 408 - DNA, 7635 bp, Homo sapiens
gggcgagcgcctccgtccccggatgtgagctccggctgcccgcggtcccgagccagcggcgcgcgggcggcggcggcgggcaccgggcaccgcggcgggcgggcagacgggcgggcatggggggagcgccgagcggccccggcggccgggccggcatcaccgcggcgtctctccgctagaggaggggacaagccagttctcctttgcagcaaaaaattacatgtatatattattaagataatatatacattggattttatttttttaaaaagtttattttgctccatttttgaaaaagagagagcttgggtggcgagcggtttttttttaaaatcaattatccttattttctgttatttgtccccgtccctccccacccccctgctgaagcgagaataagggcagggaccgcggctcctacctcttggtgatccccttccccattccgcccccgccccaacgcccagcacagtgccctgcacacagtagtcgctcaataaatgttcgtggatgatgatgatgatgatgatgaaaaaaatgcagcatcaacggcagcagcaagcggaccacgcgaacgaggcaaactatgcaagaggcaccagacttcctctttctggtgaaggaccaacttctcagccgaatagctccaagcaaactgtcctgtcttggcaagctgcaatcgatgctgctagacaggccaaggctgcccaaactatgagcacctctgcacccccacctgtaggatctctctcccaaagaaaacgtcagcaatacgccaagagcaaaaaacagggtaactcgtccaacagccgacctgcccgcgcccttttctgtttatcactcaataaccccatccgaagagcctgcattagtatagtggaatggaaaccatttgacatatttatattattggctatttttgccaattgtgtggccttagctatttacatcccattccctgaagatgattctaattcaacaaatcataacttggaaaaagtagaatatgccttcctgattatttttacagtcgagacatttttgaagattatagcgtatggattattgctacatcctaatgcttatgttaggaatggatggaatttactggattttgttatagtaatagtaggattgtttagtgtaattttggaacaattaaccaaagaaacagaaggcgggaaccactcaagcggcaaatctggaggctttgatgtcaaagccctccgtgcctttcgagtgttgcgaccacttcgactagtgtcaggagtgcccagtttacaagttgtcctgaactccattataaaagccatggttcccctccttcacatagcccttttggtattatttgtaatcataatctatgctattataggattggaactttttattggaaaaatgcacaaaacatgtttttttgctgactcagatatcgtagctgaagaggacccagctccatgtgcgttctcagggaatggacgccagtgtactgccaatggcacggaatgtaggagtggctgggttggcccgaacggaggcatcaccaactttgataactttgcctttgccatgcttactgtgtttcagtgcatcaccatggagggctggacagacgtgctctactggatgaatgatgctatgggatttgaattgccctgggtgtattttgtcagtctcgtcatctttgggtcatttttcgtactaaatcttgtacttggtgtattgagcggagaattctcaaaggaaagagagaaggcaaaagcacggggagatttccagaagctccgggagaagcagcagctggaggaggatctaaagggctacttggattggatcacccaagctgaggacatcgatccggagaatgaggaagaaggaggagaggaaggcaaacgaaatactagcatgcccaccagcgagactgagtctgtgaacacagagaacgtcagcggtgaaggcgagaaccgaggctgctgtggaagtctctgtcaagccatctcaaaatccaaactcagccgacgctggcgtcgctggaaccgattcaatcgcagaagatgtagggccgccgtgaagtctgtcacgttttactggctggttatcgtcctggtgtttctgaacaccttaaccatttcctctgagcactacaatcagccagattggttgacacagattcaagatattgccaacaaagtcctcttggctctgttcacctgcgagatgctggtaaaaatgtacagcttgggcctccaagcatatttcgtctctcttttcaaccggtttgattgcttcgtggtgtgtggtggaatcactgagacgatcttggtggaactggaaatcatgtctcccctggggatctctgtgtttcggtgtgtgcgcctcttaagaatcttcaaagtgaccaggcactggacttccctgtgcaacttagtggcatccttattaaactccatgaagtccagtgcttcgctgttgcttctgctttttctcttcattatcatcttttccttgcttgggatgcagctgtttggcggcaagtttaattttgatgaaacgcaaaccaagcggagcacctttgacaatttccctcaagcacttctcacagtgttccagatcctgacaggcgaagactggaatgctgtgatgtacgatggcatcatggcttacgggggcccatcctcttcaggaatgatcgtctgcatctacttcatcatcctcttcatttgtggtaactatattctactgaatgtcttcttggccatcgctgtagacaatttggctgatgctgaaagtctgaacactgctcagaaagaagaagcggaagaaaaggagaggaaaaagattgccagaaaagagagcctagaaaataaaaagaacaacaaaccagaagtcaaccagatagccaacagtgacaacaaggttacaattgatgactatagagaagaggatgaagacaaggacccctatccgccttgcgatgtgccagtaggggaagaggaagaggaagaggaggaggatgaacctgaggttcctgccggaccccgtcctcgaaggatctcggagttgaacatgaaggaaaaaattgcccccatccctgaagggagcgctttcttcattcttagcaagaccaacccgatccgcgtaggctgccacaagctcatcaaccaccacatcttcaccaacctcatccttgtcttcatcatgctgagcagtgctgccctggccgcagaggaccccatccgcagccactccttccggaacacgatactgggttactttgactatgccttcacagccatctttactgttgagatcctgttgaagatgacaacttttggagctttcctccacaaaggggccttctgcaggaactacttcaatttgctggatatgctggtggttggggtgtctctggtgtcatttgggattcaatccagtgccatctccgttgtgaagattctgagggtcttaagggtcctgcgtcccctcagggccatcaacagagcaaaaggacttaagcacgtggtccagtgcgtcttcgtggccatccggaccatcggcaacatcatgatcgtcaccaccctcctgcagttcatgtttgcctgtatcggggtccagttgttcaaggggaagttctatcgctgtacggatgaagccaaaagtaaccctgaagaatgcaggggacttttcatcctctacaaggatggggatgttgacagtcctgtggtccgtgaacggatctggcaaaacagtgatttcaacttcgacaacgtcctctctgctatgatggcgctcttcacagtctccacgtttgagggctggcctgcgttgctgtataaagccatcgactcgaatggagagaacatcggcccaatctacaaccaccgcgtggagatctccatcttcttcatcatctacatcatcattgtagctttcttcatgatgaacatctttgtgggctttgtcatcgttacatttcaggaacaaggagaaaaagagtataagaactgtgagctggacaaaaatcagcgtcagtgtgttgaatacgccttgaaagcacgtcccttgcggagatacatccccaaaaacccctaccagtacaagttctggtacgtggtgaactcttcgcctttcgaatacatgatgtttgtcctcatcatgctcaacacactctgcttggccatgcagcactacgagcagtccaagatgttcaatgatgccatggacattctgaacatggtcttcaccggggtgttcaccgtcgagatggttttgaaagtcatcgcatttaagcctaaggggtattttagtgacgcctggaacacgtttgactccctcatcgtaatcggcagcattatagacgtggccctcagcgaagcagacccaactgaaagtgaaaatgtccctgtcccaactgctacacctgggaactctgaagagagcaatagaatctccatcacctttttccgtcttttccgagtgatgcgattggtgaagcttctcagcaggggggaaggcatccggacattgctgtggacttttattaagttctttcaggcgctcccgtatgtggccctcctcatagccatgctgttcttcatctatgcggtcattggcatgcagatgtttgggaaagttgccatgagagataacaaccagatcaataggaacaataacttccagacgtttccccaggcggtgctgctgctcttcaggtgtgcaacaggtgaggcctggcaggagatcatgctggcctgtctcccagggaagctctgtgaccctgagtcagattacaaccccggggaggagcatacatgtgggagcaactttgccattgtctatttcatcagtttttacatgctctgtgcatttctgatcatcaatctgtttgtggctgtcatcatggataatttcgactatctgacccgggactggtctattttggggcctcaccatttagatgaattcaaaagaatatggtcagaatatgaccctgaggcaaagggaaggataaaacaccttgatgtggtcactctgcttcgacgcatccagcctcccctggggtttgggaagttatgtccacacagggtagcgtgcaagagattagttgccatgaacatgcctctcaacagtgacgggacagtcatgtttaatgcaaccctgtttgctttggttcgaacggctcttaagatcaagaccgaagggaacctggagcaagctaatgaagaacttcgggctgtgataaagaaaatttggaagaaaaccagcatgaaattacttgaccaagttgtccctccagctggtgatgatgaggtaaccgtggggaagttctatgccactttcctgatacaggactactttaggaaattcaagaaacggaaagaacaaggactggtgggaaagtaccctgcgaagaacaccacaattgccctacaggcgggattaaggacactgcatgacattgggccagaaatccggcgtgctatatcgtgtgatttgcaagatgacgagcctgaggaaacaaaacgagaagaagaagatgatgtgttcaaaagaaatggtgccctgcttggaaaccatgtcaatcatgttaatagtgataggagagattcccttcagcagaccaataccacccaccgtcccctgcatgtccaaaggccttcaattccacctgcaagtgatactgagaaaccgctgtttcctccagcaggaaattcggtgtgtcataaccatcataaccataattccataggaaagcaagttcccacctcaacaaatgccaatctcaataatgccaatatgtccaaagctgcccatggaaagcggcccagcattgggaaccttgagcatgtgtctgaaaatgggcatcattcttcccacaagcatgaccgggagcctcagagaaggtccagtgtgaaaagaacccgctattatgaaacttacattaggtccgactcaggagatgaacagctcccaactatttgccgggaagacccagagatacatggctatttcagggacccccactgcttgggggagcaggagtatttcagtagtgaggaatgctacgaggatgacagctcgcccacctggagcaggcaaaactatggctactacagcagatacccaggcagaaacatcgactctgagaggccccgaggctaccatcatccccaaggattcttggaggacgatgactcgcccgtttgctatgattcacggagatctccaaggagacgcctactacctcccaccccagcatcccaccggagatcctccttcaactttgagtgcctgcgccggcagagcagccaggaagaggtcccgtcgtctcccatcttcccccatcgcacggccctgcctctgcatctaatgcagcaacagatcatggcagttgccggcctagattcaagtaaagcccagaagtactcaccgagtcactcgacccggtcgtgggccacccctccagcaacccctccctaccgggactggacaccgtgctacacccccctgatccaagtggagcagtcagaggccctggaccaggtgaacggcagcctgccgtccctgcaccgcagctcctggtacacagacgagcccgacatctcctaccggactttcacaccagccagcctgactgtccccagcagcttccggaacaaaaacagcgacaagcagaggagtgcggacagcttggtggaggcagtcctgatatccgaaggcttgggacgctatgcaagggacccaaaatttgtgtcagcaacaaaacacgaaatcgctgatgcctgtgacctcaccatcgacgagatggagagtgcagccagcaccctgcttaatgggaacgtgcgtccccgagccaacggggatgtgggccccctctcacaccggcaggactatgagctacaggactttggtcctggctacagcgacgaagagccagaccctgggagggatgaggaggacctggcggatgaaatgatatgcatcaccaccttgtagcccccagcgaggggcagactggctctggcctcaggtggggcgcaggagagccaggggaaaagtgcctcatagttaggaaagtttaggcactagttgggagtaatattcaattaattagacttttgtataagagatgtcatgcctcaagaaagccataaacctggtaggaacaggtcccaagcggttgagcctggcagagtaccatgcgctcggccccagctgcaggaaacagcaggccccgccctctcacagaggatgggtgaggaggccagacctgccctgccccattgtccagatgggcactgctgtggagtctgcttctcccatgtaccagggcaccaggcccacccaactgaaggcatggcggcggggtgcaggggaaagttaaaggtgatgacgatcatcacacctgtgtcgttacctcagccatcggtctagcatatcagtcactgggcccaacatatccatttttaaaccctttcccccaaatacactgcgtcctggttcctgtttagctgttctgaaatacggtgtgtaagtaagtcagaacccagctaccagtgattattgcgagggcaatgggacctcataaataaggttttctgtgatgtgacgccagtttacataagagaatatcac

SEQ ID NO: 409 - DNA, 1501 bp, Homo sapiens
agcgagtccttcttttcctgactgcagctcttttcattttgccatccttctccagctccatgatggttctgcaggtttctgcggccccccggacagtggctctgacggcgttactgatggtgctgctcacatctgtggtccagggcagggccactccagagaattacgtgtaccagggacggcaggaatgctacgcgtttaatgggacacagcgcttcctggagagatacatctacaaccgggaggagtacgcgcgcttcgacagcgacgtgggggagttccgggcggtgacggagctggggcggcctgctgcggagtactggaacagccagaaggacatcctggaggagaagcgggcagtgccggacagggtatgcagacacaactacgagctggacgaggccgtgaccctgcagcgccgagtccagcctaaggtgaacgtttccccctccaagaaggggcccctgcagcaccacaacctgcttgtctgccacgtgacagatttctacccaggcagcattcaagtccgatggttcctgaatggacaggaggaaacagctggggtcgtgtccaccaacctgatccgtaatggagactggaccttccagatcctggtgatgctggaaatgaccccccagcagggagacgtctacatctgccaagtggagcacaccagcctggacagtcctgtcaccgtggagtggaaggcacagtctgattctgcccagagtaagacattgacgggagctgggggcttcgtgctggggctcatcatctgtggagtgggcatcttcatgcacaggaggagcaagaaagttcaacgaggatctgcataaacagggttcctgacctcaccgaaaagactaatgtgccttagaacaagcatttgctgtgttttgttaacacctggttccaggacagaccctcagcttcccaagaggatactgctgccaagaagttgctctgaagtcagtttctatcgttctgctctttgattcaaagcactgtttctctcactgggcctccaaccatgttcccttcttcttagcaccacaaataatcaaaacccaacataagtgtttgctttcctttaaaaatatgcatcaaatcgtctctcattacttttctctgagggttttagtaaacagtaggagttaataaagaagttcattttggtttacacgtaggaaagaagagaagcatcaaagtggagatatgttaactattgtataatgtggcctgttatacatgacactcttctgaattgactgtatttcagtgagctgcccccaaatcaagtttagtgccctcatccatttatgtctcagaccgctattcttaactattcaatggtgagcagactgcaaatctgcctgataggacccatattcccacagcactaattcaacatatatcttactgagagcatgttttatcattaccattaagaagttaaatgaacatcagaatttaaaatcataaatataatctaatacacttt

SEQ ID NO: 410 - DNA, 3081 bp, Homo sapiens
cccgccagcccagcccagcccaaccctactccctccccacgccagggcagcagccgttgctcagagagaaggtggaggaagaaatccagaccctagcacgcgcgcaccatcatggaccattatgattctcagcaaaccaacgattacatgcagccagaagaggactgggaccgggacctgctcctggacccggcctgggagaagcagcagagaaagacattcacggcatggtgtaactcccacctccggaaggcggggacacagatcgagaacatcgaagaggacttccgggatggcctgaagctcatgctgctgctggaggtcatctcaggtgaacgcttggccaagccagagcgaggcaagatgagagtgcacaagatctccaacgtcaacaaggccctggatttcatagccagcaaaggcgtcaaactggtgtccatcggagccgaagaaatcgtggatgggaatgtgaagatgaccctgggcatgatctggaccatcatcctgcgctttgccatccaggacatctccgtggaagagacttcagccaaggaagggctgctcctgtggtgtcagagaaagacagccccttacaaaaatgtcaacatccagaacttccacataagctggaaggatggcctcggcttctgtgctttgatccaccgacaccggcccgagctgattgactacgggaagctgcggaaggatgatccactcacaaatctgaatacggcttttgacgtggcagagaagtacctggacatccccaagatgctggatgccgaagacatcgttggaactgcccgaccggatgagaaagccatcatgacttacgtgtctagcttctaccacgccttctctggagcccagaaggcggagacagcagccaatcgcatctgcaaggtgttggccgtcaaccaggagaacgagcagcttatggaagactacgagaagctggccagtgatctgttggagtggatccgccgcacaatcccgtggctggagaaccgggtgcccgagaacaccatgcatgccatgcaacagaagctggaggacttccgggactaccggcgcctgcacaagccgcccaaggtgcaggagaagtgccagctggagatcaacttcaacacgctgcagaccaagctgcggctcagcaaccggcctgccttcatgccctctgagggcaggatggtctcggacatcaacaatgcctggggctgcctggagcaggtggagaagggctatgaggagtggttgctgaatgagatccggaggctggagcgactggaccacctggcagagaagttccggcagaaggcctccatccacgaggcctggactgacggcaaagaggccatgctgcgacagaaggactatgagaccgccaccctctcggagatcaaggccttgctcaagaagcatgaggccttcgagagtgacctggctgcccaccaggaccgtgtggagcagattgccgccatcgcacaggagctcaatgagctggactattatgactcacccagtgtcaacgcccgttgccaaaagatctgtgaccagtgggacaatctgggggccctaactcagaagcgaagggaagctctggagcggaccgagaaactgctggagaccattgaccagctgtacttggagtatgccaagcgggctgcacccttcaacaactggatggagggggccatggaggacctgcaggacaccttcattgtgcacaccattgaggagatccagggactgaccacagcccatgagcagttcaaggccaccctccctgatgccgacaaggagcgcctggccatcctgggcatccacaatgaggtgtccaagattgtccagacctaccacgtcaatatggcgggcaccaacccctacacaaccatcacgcctcaggagatcaatggcaaatgggaccacgtgcggcagctggtgcctcggagggaccaagctctgacggaggagcatgcccgacagcagcacaatgagaggctacgcaagcagtttggagcccaggccaatgtcatcgggccctggatccagaccaagatggaggagatcgggaggatctccattgagatgcatgggaccctggaggaccagctcagccacctgcggcagtatgagaagagcatcgtcaactacaagccaaagattgatcagctggagggcgaccaccagctcatccaggaggcgctcatcttcgacaacaagcacaccaactacaccatggagcacatccgtgtgggctgggagcagctgctcaccaccatcgccaggaccatcaatgaggtagagaaccagatcctgacccgggatgccaagggcatcagccaggagcagatgaatgagttccgggcctccttcaaccactttgaccgggatcactccggcacactgggtcccgaggagttcaaagcctgcctcatcagcttgggttatgatattggcaacgacccccagggagaagcagaatttgcccgcatcatgagcattgtggaccccaaccgcctgggggtagtgacattccaggccttcattgacttcatgtcccgcgagacagccgacacagatacagcagaccaagtcatggcttccttcaagatcctggctggggacaagaactacattaccatggacgagctgcgccgcgagctgccacccgaccaggctgagtactgcatcgcgcggatggccccctacaccggccccgactccgtgccaggtgctctggactacatgtccttctccacggcgctgtacggcgagagtgacctctaatccaccccgcccggccgccctcgtcttgtgcgccgtgcccacagatgtgaaatgaatgtaatctaatagaagcctaatcagcccaccatgttctccactgaaaaatcctctttctttggggtttttctttctttcttttttgattttgcactggacggtgacgtcagcctgtacaggctcccaggggtggcgtcaaatgctattgaaattgcgctgaatcgtatgctttttccttttgataaataaacaatgtaaaaatgtttcaaaaacctaataaaataaataaatacg

SEQ ID NO: 411 - DNA, 2686 bp, Homo sapiens
atcgagccatttaacatggcggaggatgtttcctcagcggccccgagcccgcggcggtgtgcggatggtagggatgccgaccctactgaggagcagatggcagaaacagagagaaacgacgaggagcagttcgaatgccaggaactgctcgagtgccaggtgcaggtgggggcccccgaggaggaggaggaggaggaggaggacgcgggcctggtggccgaggccgaggccgtggctgccggctggatgctcgatttcctctgcctctctctttgccgagctttccgcgacggccgctccgaggacttccgcaggacccgcaacagcgcagaggctattattcatggactatccagtctaacagcttgccagttgagaacgatatacatatgtcagtttttgacaagaattgcagcaggaaaaacccttgatgcacagtttgaaaatgatgaacgaattacacccttggaatcagccctgatgatttggggttcaattgaaaaggaacatgacaaacttcatgaagaaatacagaatttaattaaaattcaggctatagctgtttgtatggaaaatggcaactttaaagaagcagaagaagtctttgaaagaatatttggtgatccaaattctcatatgcctttcaaaagcaaattgcttatgataatctctcagaaagatacatttcattccttttttcaacacttcagctacaaccacatgatggagaaaattaagagttatgtgaattatgtgctaagtgaaaaatcatcaacctttctaatgaaggcagcggcaaaagtagtagaaagcaaaaggacaagaacaataacttctcaagataaacctagtggtaatgatgttgaaatggaaactgaagctaatttggatacaagaaaaagtgttagtgacaaacagtctgcggtaactgaatcctcagagggtacagtatccttattgaggtctcacaagaatcttttcttatctaagttgcaacatggaacccagcaacaagaccttaataagaaagaaagaagagtaggaactcctcaaagtacaaaaaagaaaaaagaaagcagaagagccactgaaagcagaatacctgtttcaaagagtcagccggtaactcctgaaaaacatcgagctagaaaaagacaggcatggctttgggaagaagacaagaatttgagatctggcgtgaggaaatatggagagggaaactggtctaaaatactgttgcattataaattcaacaaccggacaagtgtcatgttaaaagacagatggaggaccatgaagaaactaaaactgatttcctcagacagcgaagactgattgtgtttgtaaaagcttgatgaaaggacagttaagtattttgatcactgcattttgtttgaaacttgtgtcattgatgtaatttaaaacttttgtttaaagcattacagtatttttctgtgaccatcaattaatgagggtttgtgctaccagagttaaagcatatgctatcattgtattctttaagaaccttattttgataaaatgtaaatttgttgaaccctgccacatttagtatccccacccccaaatcctgttccaatgaaaaaattaaaacctgatacgaaaaaaaaaaaattccagttaacctattttgtgtctgtaggctgacctcaaccctgtaacgtaacccattaaaatgaatttctttttttttaagacagagtttctctctgttgcccaggctggagtgcagtggcgcaatttcagctcactgaacctctgcctcccaggtcaagtgattctcctgcctcagcctctgagtagctgggattacaggcacacaccaccagccagctaatttttgtatttttagtagaggcggggtttcaccatgctggtcaggatgttctccaactcctgacttcatgatccacccacctcggcctcccaaagtgctgagattacagacgtgagccactgcgtcctgcctaaaatgaattttctagatgattgaataacagtagtagtcctttgatagaagataatgacttggtttatggccttaatatactacttaattacttaagatgtttattaatagaatgataaatgtacagagtaacctataagcatgacatacttttgctttcagtagtttcatgtaaagaaaaaaacttgaaaatagtaatacctgagtacccatgggaataatagacactggggaggtagggtggggagcgggacgaagagctgaaaaacttacctactggggactgtgctcactacctgggtgacaggatcatacgtaccccaaacctcaacatcacacagtatactcagctaacaaacctgcccatgtgtttcctgaatctaaaataaaaatcgaaataatttttttaaaaaagaaaaagacaatagtattacccatgggacaaaatttgtactattagcaagaatcattttgtgtctcatttagaaacaatttgacttttgttccagtgtttaaactttgacaaaaatggttttgaatagatctttataacctgatgcctaaatacaagattctctgataccttcatttaatatatcaatattggcctaaaacgtattctgtaaagcttaaattggtattaactatgatcatcttgatgtctatgatagataataaacaaggtcatacataccttaa

SEQ ID NO: 412 - DNA, 3003 bp, Homo sapiens
ctcgccagcccagactcggccctggcagtggcggctggcgattcggaccgatccgacctgggcggaggtggcccgcgccccgcggcatgagccggtgaccaagctcggggccgagcgggaggcagccgtggccgaggagtgtgaggaagaggctgtctgtgtcattatgtgtgcgtcggtcaagtataatatccggggtcctgccctcatcccaagaatgaagaccaagcaccgaatctactatatcaccctcttctccattgtcctcctgggcctcattgccactggcatgtttcagttttggccccattctatcgagtcctcaaatgactggaatgtagagaagcgcagcatccgtgatgtgccggttgttaggctgccagccgacagtcccatcccagagcggggggatctcagttgcagaatgcacacgtgttttgatgtctatcgctgtggcttcaacccaaagaacaaaatcaaggtgtatatctatgctctgaaaaagtacgtggatgactttggcgtctctgtcagcaacaccatctcccgggagtataatgaactgctcatggccatctcagacagtgactactacactgatgacatcaaccgggcctgtctgtttgttccctccatcgatgtgcttaaccagaacacactgcgcatcaaggagacagcacaagcgatggcccagctctctaggtgggatcgaggtacgaatcacctgttgttcaacatgttgcctggaggtcccccagattataacacagccctggatgtccccagagacagggccctgttggctggtggcggcttttctacgtggacttaccggcaaggctacgatgtcagcattcctgtctatagtccactgtcagctgaggtggatcttccagagaaaggaccaggtccacggcaatacttcctcctgtcatctcaggtgggtctccatcctgagtacagagaggacctagaagccctccaggtcaaacatggagagtcagtgttagtactcgataaatgcaccaacctctcagagggtgtcctttctgtccgtaagcgctgccacaagcaccaggtcttcgattacccacaggtgctacaggaggctactttctgtgtggttcttcgtggagctcggctgggccaggcagtattgagcgatgtgttacaagctggctgtgtcccggttgtcattgcagactcctatattttgcctttctctgaagttcttgactggaagagagcatctgtggttgtaccagaagaaaagatgtcagatgtgtacagtattttgcagagcatcccccaaagacagattgaagaaatgcagagacagctcttcatggaaccagtcaggagagagaactggtcagctgctaatcaccaaatgaactccctgatctggcctagggaacagtgggattcacagattatcaatgaccggatctatccatatgctgccatctcctatgaagaatggaatgaccctcctgctgtgaagtggggcagcgtgagcaatccactcttcctcccgctgatcccaccacagtctcaagggttcaccgccatagtcctcacctacgaccgagtagagagcctcttccgggtcatcactgaagtgtccaaggtgcccagtctatccaaactacttgtcgtctggaataatcagaataaaaaccctccagaagattctctctggcccaaaatccgggttccattaaaagttgtgaggactgctgaaaacaagttaagtaaccgtttcttcccttatgatgaaatcgagacagaagctgttctggccattgatgatgatatcattatgctgacctctgacgagctgcaatttggttatgaggtctggcgggaatttcctgaccggttggtgggttacccggatcgtctgcatctctgggaccatgagatgaataagtggaagtatgagtctgagtggacgaatgaagtgtccatggtgctcactggggcagctttttatcacaagtattttaattacctgtatacctacaaaatgcctggggatatcaagaactgggtagatgctcatatgaactgtgaagatattgccatgaacttcctggtggccaacgtcacgggaaaagcagttatcaaggtaaccccacgaaagaaattcaagtgtcctgagtgcacagccatagatgggctttcactagaccaaacacacatggtggagaggtcagagtgcatcaacaagtttgcttcagtcttcgggaccatgcctctcaaggtggtggaacaccgagctgaccctgtcctgtacaaagatgactttcctgagaagctgaagagcttccccaacattggcagcttatgaaacgtgtcattggtggaggtctgaatgtgaggctgggacagagggagagaacaaggcctcccagcactctgatgtcagagtagtaggttaagggtggaaggttgacctacttggatcttggcatgcacccacctaacccactttctcaagaacaagaacctagaatgaatatccaagcacctcgagctatgcaacctctgttcttgtatttcttatgatctctgatgggttcttctcgaaaatgccaagtggaagactttgtgggcatgctcccagatttaaatccagctgaggctccctttgttttcagttccatgtaacaatctggaaggaaacttcacggacaggaagactgctggagaagagaagcgtgttagcccatttgaggtctggggaatcatgtaaagggtacccagacctcacttttagttatttacatcaatgagttctttcagggaaccaaacccagaattcggtgcaaaagccaaacatcttggtgggatttgataaatgccttgggacctggagtgctgggcttgtgcacaggaagagcaccagccgctgagtcaggatcctgtcagttccatgagctattcctctttggtttggctttttgatatgattaaaattattttttattccttttaaaa

SEQ ID NO: 413 - DNA, 4087 bp, Homo sapiens
gaattcatgccgttgggtggagtcagcgcccccaggctctacttggaaaacctttaagctcttttctttcgtaagctctctgggcgagggtggtggtatgttttgtgaggtttagcttagccccaaatcctcaagccccgccgccgccgctagtgcggtgcaggaaccgggccagtactgcgcccagggacagagcgctggggaggaacaaaggcggcgctaggctgtgttatccgagagatctttcgggggccgcgggcagcccgtcctgccgcgaccgagggtctgggcgtcccggctgggccccgtgtctgtgcgcacggtttcgctgatgctgaggggccactttctgtctcgcgttgttctctggggaccgggagaggaggaggcacccaaaaagagcgggggcgttgggcgagctcgggggacgtgggagggggaacgggaacaaagcgcagcctagggttagcgtgggaagaccctccgcggtctttggcgttttggaaagatacccacacattcccgggaaaacatggtgagtttctgcccggagcccccggagcgggtgtcagggcggcgaggggcggggttgtttgtttctggcttctatggcgttggagccactgggcgcggttcgcctcactgaacctcttctgtcaggagctgactgaaaaaaaaacaaaaaaacctttcatcattgcggaactgtaggctccaaaagggttttcttcactattataagttagatgacttttttttttcttgagcaaaatcataattcacttcacaagctctttaatgtctggtctggggacgccctgccctgaccgactgaagtgtgtgtgtgtgtgtgtgtgtgtgtgtgtgtgtgtctgtgggacgcctgccctgaccgactgaagtgtgtgtgtgtgtgtgtgtgtgtctgtctgtctcgtctggactgcacagttcagcgagggagaaaggcccactttgtgagggtaccgatggtcaggacccagggaaacgcccttccccgccgcccccccgccccgcccccaccacattcagcgaatagacaattgaaagtggtagccctaaagaccacagagaagaaaacctctattggatgcaaagaatatgaatattatgtgatgggtagagaatctcaggatgaaaatactattttgttgttttaaataaatatttcattatccttccactgggcttttattctttggtaccttttcatgtgatgcttgtttctaacttaggaacttttgtgtgtgtgtgtgtaagatacggataatttttcagcttttacagtggagaagatctggaaaaaggtttttttttaaaaaaaaaagtaatgaaattgctacagacaaagaagaattatactccgcttcccgttgtcccccgttccagtgcatcttaattaattcatttcaattcaggcacatggtcccgggcggtcagaggaggaaaactggcaaaacagcacaatgagatcatgtaggcagctgctggaaatagagcttgctctgttaaataatgtagcagacagtacaggctagcaccaggcacacagcaaatacagcaatgcagcaatgcagaaggcagaccttgtctaaactcctagtattgatggattctgcagtacagatgtccggattataatatcaagtcctattcagaggaaactttcatctttatttaaaagggaagaaagcagtaaaattaatcccaattaagtcataattggatttacttcattttacaaatttgtgctttgaatactgaatagcttttaaatatgaaaatcttctattcaagactggtagtaggccaatggctggatacccgtgctgacagggccaaggcgacaatcattattcagaccacacccatatgcagcatttgtagcaggtgattttccttaaatctttgtatcgtgctggggatatgacctcaaataatttagaaaaatatctgtatattattagaaatattttgaaatttcctataatttaaatgctaatacaccttaattttacatttttcacttttcctccccacagcgtgagtgcatctccatccacgttggccaggctggtgtccagattggcaatgcctgctgggagctctactgcctggaacacggcatccagcccgatggccagatgccaagtgacaagaccattgggggaggagatgattccttcaacaccttcttcagtgagacgggggctggcaagcatgtgccccgggcagtgtttgtagacttggaacccacagtcattggtgagttgacctcagtaacccaagtgagatcccagggtgctggacaggaggtctgtcctggggggctccgctggtcactcacccactctcctcccgctcctcgtcccctcctcctcctccccctgctcctcccccatcatgtctccagatgaagttcgcactggcacctaccgccagctcttccaccctgagcaactcatcacaggcaaagaagatgctgccaataactatgcccgagggcactacaccattggcaaggagatcattgacctcgtgttggaccgaattcgcaagctggtatgtttcttttcaagaataaagtaaattaatgagcctaaagaacacttttgaaataatgctttttttttcaaacacagaattgaactgttattttaataaagagtggaatgagtcattctttggggtttttaaaattcagttaaaatgaactatttgatgtcattttgtaaatgttaatgagaattttttaaaagcatttgtcaaataagatctaagtcctggagatgtatgaaagtgaaatatattactatgatgtactacaagataaactaacctttcctctgtcctctcttttgtataggccgaccagtgcacgcgtctccagggcttcttggttttccacagctttggtgggggaactggttctgggttcacctcgctgctcatggaacgtctctcagttgattatggcaagaagtccaagctggagttctctatttacccggcgccccaggtttccacagctgtagttgagccctacaactccatcctcaccacccacaccaccctggagcactctgattgtgccttcatggtagacaatgaggccatctatgacatctgtcgtagaaacctcgatattgagcgtccaacctatactaacctgaataggttaataggtcaaattgtgtcctccatcactgcttccctgagatttgatggagccctgaatgttgacctgacagaattccagaccaacctggtgccctatccccgcatccacttccctctggccacatatgcccctgtcatctctgctgagaaagcctaccatgaacagctttctgtagcagagatcaccaatgcttgctttgagccagccaaccagatggtgaaatgtgaccctggccatggtaaatacatggcttgctgcctgttgtaccgtggtgacgtggttcccaaagatgtcaatgctgccattgccaccatcaagaccaagcgtaccatccagtttgtggattggtgccccactggcttcaaggttggcatcaactaccagcctcccactgtggtgcctggtggagacctggccaaggtacagagagctgtgtgcatgctgagcaacaccacagccattgctgaggcctgggctcgcctggaccacaagtttgacctgatgtatgccaaacgtgcctttgttcactggtacgttggggaggggatggaggaaggtgagttttcagaggcccgtgaggacatggctgcccttgagaaggattatgaggaggttggtgtgcattctgttgaaggagagggtgaggaagaaggagaggaatactaaagttaaaacgtcacaaaggtgctgcttttacagggaagcttattctgttttaaacattgaaaatgttgtggtctgatcagttaatttgtatgtagcagtgtatgctctcatatcaattactgacctatgctctaaaacatgaatgcctttgttacagacccaagctgtccatttctgtgatgggttttgaataaagtattccctgtcttaaatgaattc

SEQ ID NO: 414 - DNA, 6483 bp, Homo sapiens
aagcttctaattgcagttcaaccacctgttacatatcttcaggaaaaaatcacaacctctcaacttcaacttcctcttctataaattagaaataacaataaccacacctgtaaccccagcactttgggaggccaaggcaggcagatcaagaggtgaggagattgagaccatcctggctaacatgatgaaaccctgtctctaccaaaaagacaaaaaattagccaggtatggtggcacacacctgtagtcccagctactcgggaggctgaggcaggagaatggcgtgaacccgggaggtggagcttgcagtgagccgagatggcgccactgcactccagcctgggcgacagagcaagcctccgtctaaaaaaaaaaaaagaaagaaagaaagaaagaaagaaaagaaataataataaccaccattcctatctcaacagcttgttctagaaatttttaaagcacagtatcacaaacagcactacataattgtaaaacatgtatgaatatatacatccaaacaacagcaatgtcatagcctatgggtagatataatcttatacaatgtaccaaaatcccaatttacttcactagacaaactgttataccaaattctgtacacagtatatccaagaaaatgtgttgtttttattgagaaactgaacctagcttgggaacacatgtgcacagtctagttcataatatttggtgcaagtatcattctctaatatagatttacatttttgcaagcaaatttttacttgcaatcgtaacatatccaaattttccctttttactcaatcagaacttagtgtaaagtactacaagttagttcttcggatttcatgctaagaaaataatgcagattttctgcattattatggtcttcacagaaaccttaactatgatgaatttaaaagtgcaaaataatccaggataactttatgatttcacattttttaatgttaaaaataatgccatcattaattagaaaattctaaaatcattacttccactttcttaggcaaaatatcaatatactctcatttgccaaataaattaaaagatctcctacaaacacaatctcctaaattgtggttttatggctttaatgttttatgtgtggcaactattgatgctagttaaaattttagaaactctttctttttgattccctacagttgtctacaagaaccttattgtagcatgatcctgccagactttatactatttgttgctccaattaaaactgtttaaaacatgaatttgaaaaatcttattttaactataattttgtagctgaaacttttttttctaaactttgcaaacattctatgcaacctgaattagtgctgagaaaattggatcttaatggttgctcaatgttcttcaacaggtgaaaagcataataaaacatgctcatctgaactccacccattttcaatttcaacatagcatacctcgtgtttattcttagggcaaattcaaaattgtacatattaggattggttattactgaagataatttatgcaatcataagccaaagatgctaagttggcaaaaagaaaacaatgtaagtaagcaaactctaacacatgtggacacaccctctcagtatataaaggcttgtcactgtccttggtagcaggcactccctgggctaaacagcatcaccatgtctgttcgatacagctcaagcaagcactactcttcctcccgcagtggaggaggaggaggaggaggaggatgtggaggaggaggaggagtgtcatccctaagaatttctagcagcaaaggctcccttggtggaggatttagctcaggggggttcagtggtggctcttttagccgtgggagctctggtgggggatgctttgggggctcatcaggtggctatggaggattaggaggttttggtggaggtagctttcatggaagctatggaagtagcagctttggtgggagttatggaggcagctttggagggggcaatttcggaggtggcagctttggtgggggcagctttggtggaggcggctttggtggaggcggctttggaggaggctttggtggtggatttggaggagatggtggccttctctctggaaatgaaaaagtaaccatgcagaatctgaatgaccgcctggcttcctacttggacaaagttcgggctctggaagaatcaaactatgagctggaaggcaaaatcaaggagtggtatgaaaagcatggcaactcacatcagggggagcctcgtgactacagcaaatactacaaaaccatcgatgaccttaaaaatcaggtaagaggtatttttaaatccagctttaagtatcttgtccatgtaatccagacagatgaatcttaaattaagcacaatgtggctgttcactatgcttacccatgttactttcttccttcaaaaataacccagtctcatcaaagataaacatctgtgaaactatggtcatggcaatcttcatccagcaagtgtgctacttgtcttaagaggatgggagatttactaagcacttttgaggttttaatgagcatacaatgagtccacagttaaaatatgctaggctatttacaaatgtagaaactgaaaaaaaaaatcatgatatgaatcagaacaaaatgttattcagactgataacaagccatattcagtaccaacatggcaagaaaaataaattttccagtatgaaaatgggacactgcttgcttctaaggaatttctgaattgtacctattgtgtaccagttcagagtgtatttatttattagtatttatcatgagttaaacaaatgcaggtgtgagtcagccaaagcatggctgaaatacatggaaatcacatagtctaaaagaggagggcacacttacaggaatacatctatataattccagttagttttcagaaaggaataattcgtgtacagaaatacaagactggagaaattccaagagaacaaataattcaaagttaagtatatgggtaagcctgcaatatttcatatttaaaataaaaaattttcccaagattttgtaagagaacaacataaaagtgcagagtgcatctatgtcactacaaaagccatatctgcatctgacctcttctcaaataactgtgcctctccctccagattctcaacctaacaactgataatgccaacatcctgcttcagatcgacaatgccaggctggcagctgatgacttcaggctgaagtaagttaagtgatcgttgtataatactatcacaacgaatacatcagtggtttttaacaatgacttgggatgccctcaataacatttacatttttctgaattcacccaaagttaaatagtattggagttatctgagaaattttccatgtcagtgttacctttttggcaatattaaaggaagaaaatgcatattaaagtaactgctaaggttttttccattaaaccactattacttctaagagaactgtacatgacaaatattgccattacatgagatcaactatgtagttgctttttaaatagtctctgcccagatacatctcccctatataagttataaccagtattgatatcatgcttgtttcaggtatgagaatgaggtagctctgcgccagagcgtggaggctgacatcaacggcctgcgtagggtgctggatgagctgaccctgaccaaggctgacctggagatgcaaattgagagcctgactgaagagctggcctatctgaagaagaaccacgaggaggtgacacaaaagttatacttttcccagccaaaagagagttcattatggtcctcgtgtagccaataaatctttctgttcctcaaacaggaaatgaaagaccttcgaaatgtgtccactggtgatgtgaatgtggaaatgaatgctgccccgggtgttgatctgactcaacttctgaataacatgagaagccaatatgaacaacttgctgaacaaaaccgcaaagatgctgaagcctggttcaatgaaaaggtaaagtaatcttccttatagtgaaactcatggaggttttatcatttcagaatttcctcacccttttccttgtttttaatactctagagcaaggaactgactacagaaattgataataacattgaacagatatccagctataaatctgagattactgaattgagacgtaatgtacaagctctggagatagaactacagtcccaactggccttggtatgttaactctcatgaaatgacttcaactttatcatacaaagtttcatgctcacctaagaatatgcaatgcaacaaaaaaatgcagagttggaggtaagaaagagaaaacaaagtgaagctcatgttaatggaggaaaagtactactagtgttgatctaaaagtgctgaaactgaaatggtgccattaaacatacaacaaattctgttcattttcttattcttctatataatgccttactaaataatcaaataagcgtcaccatactcaactgaacaaggaagtcactaagccacaaaaaaatccgtttcagaaacaatccctggaagcctccttggcagaaacagaaggtcgctactgtgtgcagctctcacagattcacgcccagatatccgctctggaagaacagttgcaacagattcgagctgaaaccgagtgccagaatactgaataccaacaactcctggatattaagatccgactggagaatgaaattcaaacctaccgcagcctgctagaaggagagggaaggtaaattataacatgaaaagttatcccagtttcttttattcaatattccagatagcaaggcttatctaaaccccaagaagatgccagagaatgagaggaagggaggagagagggtagagtacagaaaaaggagtacgcaaccgcaatctcactttctcatgaatttggcccaaaatgattcttaagagttctgtgaacttaacattgttttcaaaggatgggttttaaaatatatacctggcagggttttattttttcaacacgttttgcttattttctaaattaacggcaactggaaagctacccaccgttttccaacgttagagataaccgaatgtgacctcaccccgtttagttccggaggcggcggacgcggcggcggaagtttcggcggcggctacggcggcggaagctccggcggcggaagctccggcggcggctacggcggcggccacggcggcagttccggcggcggctacggaggcggaagctccggcggcggaagctccggcggcggctacgggggcggaagctccagcggcggccacggcggcggaagctccagcggcggccacggcggcagttccagcggcggctacggtggtggcagttccggcggcggcggcggcggctacgggggcggcagctccggcggcggcagcagctccggcggcggatacggcggcggcagctccagcggaggccacaagtcctcctcttccgggtccgtgggcgagtcttcatctaagggaccaaggtcagcagaaactagctggggtaatctagaattagttttaacttcctgtgatggtttttttgcgctttaagctctagagttgttttaaaaaattaaaaatcttagagacggttccgtttgcatttgttcacaaactactcttaacaccagccgtgaaaaatggcatgatcaaaatgtcataccttaagcatttttttgggcttaacaatgtaaagttgaaatttccttctttttacaatatttgcttgttaattactaaggatccctacagactgtttaaaattttttttccatcattcacacagatactaacaaaaccagagtaatcaagacaattattgaagaggtggcgcccgacggtagagttctttcatctatggttgaatcagaaaccaagaaacactactattaaactgcatcaagaggaaagagtctcccttcacacagaccattatttacagatgcatggaaaacaaagtctccaagaaaacacttctgtcttgatggtctatggaaatagaccttgaaaataaggtgtctacaaggtgttttgtggtttctgtatttcttcttttcactttaccacaaagtgttctttaatggaaagaaaaacaactttgtgttctcatttactaatgaatttcaataaactttcttactgatgcaaactatcccaatttgtcagaatttatctttacttaagtacataatactctttaaaattaaagattagtaacccatagcagttgaaggttgatgtatccagaaattcggaagacagaactattgtcatgccttttctaagttttttaatcatgtatgttcagaccaccgtcagtaaattcactgagtaaagtctgtaaatccccaatattactctttaagatacacaatatgtggaaggctcccagctctctggctttaaattatttcaatcctggaaattctggaatatctcaaatataacccccaaaataataataa

SEQ ID NO: 415 - DNA, 7680 bp, Homo sapiens
gcggacactcctctcggctcctccccggcagcggcggcggctcggagcgggctccggggctcgggtgcagcggccagcgggcctggcggcgaggattacccggggaagtggttgtctcctggctggagccgcgagacgggcgctcagggcgcggggccggcggcggcgaacgagaggacggactctggcggccgggtcgttggccgggggagcgcgggcaccgggcgagcaggccgcgtcgcgctcaccatggtcagctactgggacaccggggtcctgctgtgcgcgctgctcagctgtctgcttctcacaggatctagttcaggttcaaaattaaaagatcctgaactgagtttaaaaggcacccagcacatcatgcaagcaggccagacactgcatctccaatgcaggggggaagcagcccataaatggtctttgcctgaaatggtgagtaaggaaagcgaaaggctgagcataactaaatctgcctgtggaagaaatggcaaacaattctgcagtactttaaccttgaacacagctcaagcaaaccacactggcttctacagctgcaaatatctagctgtacctacttcaaagaagaaggaaacagaatctgcaatctatatatttattagtgatacaggtagacctttcgtagagatgtacagtgaaatccccgaaattatacacatgactgaaggaagggagctcgtcattccctgccgggttacgtcacctaacatcactgttactttaaaaaagtttccacttgacactttgatccctgatggaaaacgcataatctgggacagtagaaagggcttcatcatatcaaatgcaacgtacaaagaaatagggcttctgacctgtgaagcaacagtcaatgggcatttgtataagacaaactatctcacacatcgacaaaccaatacaatcatagatgtccaaataagcacaccacgcccagtcaaattacttagaggccatactcttgtcctcaattgtactgctaccactcccttgaacacgagagttcaaatgacctggagttaccctgatgaaaaaaataagagagcttccgtaaggcgacgaattgaccaaagcaattcccatgccaacatattctacagtgttcttactattgacaaaatgcagaacaaagacaaaggactttatacttgtcgtgtaaggagtggaccatcattcaaatctgttaacacctcagtgcatatatatgataaagcattcatcactgtgaaacatcgaaaacagcaggtgcttgaaaccgtagctggcaagcggtcttaccggctctctatgaaagtgaaggcatttccctcgccggaagttgtatggttaaaagatgggttacctgcgactgagaaatctgctcgctatttgactcgtggctactcgttaattatcaaggacgtaactgaagaggatgcagggaattatacaatcttgctgagcataaaacagtcaaatgtgtttaaaaacctcactgccactctaattgtcaatgtgaaaccccagatttacgaaaaggccgtgtcatcgtttccagacccggctctctacccactgggcagcagacaaatcctgacttgtaccgcatatggtatccctcaacctacaatcaagtggttctggcacccctgtaaccataatcattccgaagcaaggtgtgacttttgttccaataatgaagagtcctttatcctggatgctgacagcaacatgggaaacagaattgagagcatcactcagcgcatggcaataatagaaggaaagaataagatggctagcaccttggttgtggctgactctagaatttctggaatctacatttgcatagcttccaataaagttgggactgtgggaagaaacataagcttttatatcacagatgtgccaaatgggtttcatgttaacttggaaaaaatgccgacggaaggagaggacctgaaactgtcttgcacagttaacaagttcttatacagagacgttacttggattttactgcggacagttaataacagaacaatgcactacagtattagcaagcaaaaaatggccatcactaaggagcactccatcactcttaatcttaccatcatgaatgtttccctgcaagattcaggcacctatgcctgcagagccaggaatgtatacacaggggaagaaatcctccagaagaaagaaattacaatcagagatcaggaagcaccatacctcctgcgaaacctcagtgatcacacagtggccatcagcagttccaccactttagactgtcatgctaatggtgtccccgagcctcagatcacttggtttaaaaacaaccacaaaatacaacaagagcctggaattattttaggaccaggaagcagcacgctgtttattgaaagagtcacagaagaggatgaaggtgtctatcactgcaaagccaccaaccagaagggctctgtggaaagttcagcatacctcactgttcaaggaacctcggacaagtctaatctggagctgatcactctaacatgcacctgtgtggctgcgactctcttctggctcctattaaccctccttatccgaaaaatgaaaaggtcttcttctgaaataaagactgactacctatcaattataatggacccagatgaagttcctttggatgagcagtgtgagcggctcccttatgatgccagcaagtgggagtttgcccgggagagacttaaactgggcaaatcacttggaagaggggcttttggaaaagtggttcaagcatcagcatttggcattaagaaatcacctacgtgccggactgtggctgtgaaaatgctgaaagagggggccacggccagcgagtacaaagctctgatgactgagctaaaaatcttgacccacattggccaccatctgaacgtggttaacctgctgggagcctgcaccaagcaaggagggcctctgatggtgattgttgaatactgcaaatatggaaatctctccaactacctcaagagcaaacgtgacttattttttctcaacaaggatgcagcactacacatggagcctaagaaagaaaaaatggagccaggcctggaacaaggcaagaaaccaagactagatagcgtcaccagcagcgaaagctttgcgagctccggctttcaggaagataaaagtctgagtgatgttgaggaagaggaggattctgacggtttctacaaggagcccatcactatggaagatctgatttcttacagttttcaagtggccagaggcatggagttcctgtcttccagaaagtgcattcatcgggacctggcagcgagaaacattcttttatctgagaacaacgtggtgaagatttgtgattttggccttgcccgggatatttataagaaccccgattatgtgagaaaaggagatactcgacttcctctgaaatggatggctcccgaatctatctttgacaaaatctacagcaccaagagcgacgtgtggtcttacggagtattgctgtgggaaatcttctccttaggtgggtctccatacccaggagtacaaatggatgaggacttttgcagtcgcctgagggaaggcatgaggatgagagctcctgagtactctactcctgaaatctatcagatcatgctggactgctggcacagagacccaaaagaaaggccaagatttgcagaacttgtggaaaaactaggtgatttgcttcaagcaaatgtacaacaggatggtaaagactacatcccaatcaatgccatactgacaggaaatagtgggtttacatactcaactcctgccttctctgaggacttcttcaaggaaagtatttcagctccgaagtttaattcaggaagctctgatgatgtcagatatgtaaatgctttcaagttcatgagcctggaaagaatcaaaacctttgaagaacttttaccgaatgccacctccatgtttgatgactaccagggcgacagcagcactctgttggcctctcccatgctgaagcgcttcacctggactgacagcaaacccaaggcctcgctcaagattgacttgagagtaaccagtaaaagtaaggagtcggggctgtctgatgtcagcaggcccagtttctgccattccagctgtgggcacgtcagcgaaggcaagcgcaggttcacctacgaccacgctgagctggaaaggaaaatcgcgtgctgctccccgcccccagactacaactcggtggtcctgtactccaccccacccatctagagtttgacacgaagccttatttctagaagcacatgtgtatttatacccccaggaaactagcttttgccagtattatgcatatataagtttacacctttatctttccatgggagccagctgctttttgtgatttttttaatagtgctttttttttttgactaacaagaatgtaactccagatagagaaatagtgacaagtgaagaacactactgctaaatcctcatgttactcagtgttagagaaatccttcctaaacccaatgacttccctgctccaacccccgccacctcagggcacgcaggaccagtttgattgaggagctgcactgatcacccaatgcatcacgtaccccactgggccagccctgcagcccaaaacccagggcaacaagcccgttagccccaggggatcactggctggcctgagcaacatctcgggagtcctctagcaggcctaagacatgtgaggaggaaaaggaaaaaaagcaaaaagcaagggagaaaagagaaaccgggagaaggcatgagaaagaatttgagacgcaccatgtgggcacggagggggacggggctcagcaatgccatttcagtggcttcccagctctgacccttctacatttgagggcccagccaggagcagatggacagcgatgaggggacattttctggattctgggaggcaagaaaaggacaaatatcttttttggaactaaagcaaattttagacctttacctatggaagtggttctatgtccattctcattcgtggcatgttttgatttgtagcactgagggtggcactcaactctgagcccatacttttggctcctctagtaagatgcactgaaaacttagccagagttaggttgtctccaggccatgatggccttacactgaaaatgtcacattctattttgggtattaatatatagtccagacacttaactcaatttcttggtattattctgttttgcacagttagttgtgaaagaaagctgagaagaatgaaaatgcagtcctgaggagagttttctccatatcaaaacgagggctgatggaggaaaaaggtcaataaggtcaagggaagaccccgtctctataccaaccaaaccaattcaccaacacagttgggacccaaaacacaggaagtcagtcacgtttccttttcatttaatggggattccactatctcacactaatctgaaaggatgtggaagagcattagctggcgcatattaagcactttaagctccttgagtaaaaaggtggtatgtaatttatgcaaggtatttctccagttgggactcaggatattagttaatgagccatcactagaagaaaagcccattttcaactgctttgaaacttgcctggggtctgagcatgatgggaatagggagacagggtaggaaagggcgcctactcttcagggtctaaagatcaagtgggccttggatcgctaagctggctctgtttgatgctatttatgcaagttagggtctatgtatttaggatgcgcctactcttcagggtctaaagatcaagtgggccttggatcgctaagctggctctgtttgatgctatttatgcaagttagggtctatgtatttaggatgtctgcaccttctgcagccagtcagaagctggagaggcaacagtggattgctgcttcttggggagaagagtatgcttccttttatccatgtaatttaactgtagaacctgagctctaagtaaccgaagaatgtatgcctctgttcttatgtgccacatccttgtttaaaggctctctgtatgaagagatgggaccgtcatcagcacattccctagtgagcctactggctcctggcagcggcttttgtggaagactcactagccagaagagaggagtgggacagtcctctccaccaagatctaaatccaaacaaaagcaggctagagccagaagagaggacaaatctttgttgttcctcttctttacacatacgcaaaccacctgtgacagctggcaattttataaatcaggtaactggaaggaggttaaactcagaaaaaagaagacctcagtcaattctctacttttttttttttttttccaaatcagataatagcccagcaaatagtgataacaaataaaaccttagctgttcatgtcttgatttcaataattaattcttaatcattaagagaccataataaatactccttttcaagagaaaagcaaaaccattagaattgttactcagctccttcaaactcaggtttgtagcatacatgagtccatccatcagtcaaagaatggttccatctggagtcttaatgtagaaagaaaaatggagacttgtaataatgagctagttacaaagtgcttgttcattaaaatagcactgaaaattgaaacatgaattaactgataatattccaatcatttgccatttatgacaaaaatggttggcactaacaaagaacgagcacttcctttcagagtttctgagataatgtacgtggaacagtctgggtggaatggggctgaaaccatgtgcaagtctgtgtcttgtcagtccaagaagtgacaccgagatgttaattttagggacccgtgccttgtttcctagcccacaagaatgcaaacatcaaacagatactcgctagcctcatttaaattgattaaaggaggagtgcatctttggccgacagtggtgtaactgtgtgtgtgtgtgtgtgtgtgtgtgtgtgtgtgtgtgtgtgggtgtgggtgtatgtgtgttttgtgcataactatttaaggaaactggaattttaaagttacttttatacaaaccaagaatatatgctacagatataagacagacatggtttggtcctatatttctagtcatgatgaatgtattttgtataccatcttcatataatatacttaaaaatatttcttaattgggatttgtaatcgtaccaacttaattgataaacttggcaactgcttttatgttctgtctccttccataaatttttcaaaatactaattcaacaaagaaaaagctcttttttttcctaaaataaactcaaatttatccttgtttagagcagagaaaaattaagaaaaactttgaaatggtctcaaaaaattgctaaatattttcaatggaaaactaaatgttagtttagctgattgtatggggttttcgaacctttcactttttgtttgttttacctatttcacaactgtgtaaattgccaataattcctgtccatgaaaatgcaaattatccagtgtagatatatttgaccatcaccctatggatattggctagttttgcctttattaagcaaattcatttcagcctgaatgtctgcctatatattctctgctctttgtattctcctttgaacccgttaaaacatcctgtggcactc

(The sequence listing continues in the following parts.)
